United States Patent Application Publication US 2004/0259086 A1 - sequence listing, part 7

SEQ ID NO: 32964 - DNA, 366 bp, Homo sapiens
gcgcgctatacgactcactatagggcgaattggagctccacccgcgggggcggccgcccggccaggtactatatgccatggatgtgaatttcccatagaagctggtgacatgttcctggaagctctgggctacacctggcatgacacttgctttgtatgctcagtgtgttgtgaaagtttggaaggtcagacctttttctccaagaaggacaagccccctgtgtaagaaacatgctcattctgtgaatttttgaaagtcaacagtttcaggaagaagagaaggatatttgaagagaaaaaggaaaattaaaattactaattaatttttaggattcaatattttatattggagttttgaaaaataat

SEQ ID NO: 32965 - DNA, 411 bp, Homo sapiens
cgactactatagggcgaattggagctccaccgcggtggcggccgcccgggcaggtaccacccccttgccgaaagcactggttcccctgttgaagcttgctagggattacagtgggtttgactcaattcaagtaagtaagcaaacatttaaatatttttcaggcataaatgttagcgttcttatcctgtaatatgcgaagtaaataaatttatatacttactgcctttgttacaatgcatgcaaacacgtggtaaggtgttcataccttaggaagagatctgattctcaagaacagcagaaaataggaagcagagaatgagttaggatgaaattcaaatgggagaaagaaatgaagaagccagatacttccagtagttaatttcttaacatggctacttataataatagaga

SEQ ID NO: 32966 - DNA, 445 bp, Homo sapiens
cactactatagggcaattgagctccccgcggtggcggccgaggtacaaagtccctgaggcaaaagcatgcttgctgtgttctaggaaaagcaaggaagacagcatgtctatagcagtgggaggtggaaggataataaacagtaggtgaggttagaggggaccaaatcatgtattttccatccagaggttcccaaccttggctgcacattagatttattctaaggagcttttaaaaaaataccaatgactgggtcccagcctagagtgattaaatcagaatctctggaggtagacttgagaatctgatgtttgcaagtttcctaggcaagtcaaggctgaggaagactgctgcaggccattgtaagagccaggcgttgatctcattcaacctttccctcagctcttctagagacagccagcattctcttatggcacaaatacagcc

SEQ ID NO: 32967 - DNA, 421 bp, Homo sapiens
tacgactactatagggcgaattggagctccaccgcggtggcggccgcccgggcaggtacgcgggctttcttgaaggaatcccttaagtgcacgtctcccgttttcttttcacatcaatgcagagtccctctgtgaatttacaacacccaacacccatgagttcagtccttaagaaggaaaattgagcaagtatttaattggttggacattgcataaaagaggtccatatccaggctaactctagaaattttattctcaaacttagttggcctctttttcttctgtcagaggaccattcttagtggcactggggaaatcttggcacccagaagaattcaactgcgctcactgcaaaaatacaatggcctacattggattttgtagaggagaaaggagccctgtattgtgagctgtgctatga

SEQ ID NO: 32968 - DNA, 445 bp, Homo sapiens
cgactactatagggcgaattggagctccaccgcggtggcggccgcccgggcaggtacagtattgagaagtagggaaagaatagaaggaggagttgaatctgtaattgactgagcaatcagttgagataactcactgcctccacataaccttgggctgtcctatgagtcagtggagagcaacccctctcatgtaggttcagtctgaggtagctcactggcactgggaaagttgatcagggtagtcccatctcatgcacagccccatttccccatgagccgctagagtggctcgtatcagaaagatgccataccaaatgctggcaaggacctggagcaactagaatgcatgtgcatttaccttgtcctgacagccactttggagaactctttggctgtttcttataaagctaaacataatcttcccaaataacatggcaatcccact

SEQ ID NO: 32969 - DNA, 451 bp, Homo sapiens
tacgactcactatagggcgaattggagctccaccgcggtggcggccgaggtacttttttttttttttttttttttttttttattgacaacaaaattttttagaggggcttcaacttaactgaataggattaaaggtggattctttggtcagtgttcaagaagagaccctatagctacttacaaaggagtccacacctcaaagtaagccactcagtaaagcttatctattttcactggaacgaaaaggagctaaacaaatgacaaattctactaaactacaaggaaggcaatcagcatcagttgtgcaactttggttaaaatgtcccagccaaaaaacattctctatcatttcatcattttaatcaggtagcttctcattcctatttgctctggggtttctctgctaaaatgtccacatgttgattaaatagcaaactgagacaagccctac

SEQ ID NO: 32970 - DNA, 444 bp, Homo sapiens
cgactactatagggcgaattggagctccaccgcggtggcggccgaggtacttccaccttctaaggacatccataagtcaggtttgatttcttcactgtcaaagcgttccttcaggaaagtctggaaataaaataagccagatgtggttaaaaaaacaatttcagataactatggaatatttaagaaaatacagagtgatgtcttggactttaaaaaaatagagctgatttcaaatgcttttcaaagatgtttaaaaaaggctatttccacaatcttttttcctgtcgtatattgaaaatcatttaaactgctcaaataatgtttaataattgaaatttaaaataattgtaaagttgactatatcaatttttttttttgagacgaagtcttgctctgtcacttgggctggagtgcagtggcgcaatctcaactaactgcagcctc

SEQ ID NO: 32971 - DNA, 445 bp, Homo sapiens
ctactatagggcgaattggagctccaccgcggtggcggccgaggtactttttttttttttttttttttctagtttctacatttcttttaatgttgttataccactgttacctaactaggaaaaaataaatttttttaaatgaccaagctcattttgaagctgctcggtgtcccataaacactgaggcctgcctgcctcaactaaagcagccacttgaaatgcagctccagctgctcattcttctgtttatcaaaacagggcaaagccgcccaggaaactcgcctcagcaaggtgacctgacctcaggcccatcacagtcacaaatctgcattcccaataaaaaataatcacaacgaagaaagcacccaggtaaccagttatggaaaagcaaaggattgatgagttgggggtgacaggacagtggattactggttttgtttttttg

SEQ ID NO: 32972 - DNA, 449 bp, Homo sapiens
ctactatagggcgaattggagctccaccgcggtggcggccgaggtacgcgggagaagaaatagcaagtgccgagaagctggcatcagaaaaacagaggggagatttgtgtggctgcagccgagggagaccaggaagatctgcatggtgggaaggacctgatgatacagaggtctgtaggccatgggaatgggtttggaattttattcaaagagctatgggaagtgactagaaggtttaaagttggggaagaggttttgtgtttctgttatatttgtgttttatacaaattactctggttgctgtgttgataggacagcagaagggtaggagcagggacaccagttaagttattgcaatggttaaggtgagaggtggtggctgggcctaggcctttttggagtgaacaagctatttgcttggcttccatgatccttctccctccactgga

SEQ ID NO: 32973 - DNA, 429 bp, Homo sapiens
cgaattggttctccaccgaggtggcgggcgcccgggcaggtactaaaaaatcaggctactaagcccactgtttttatagacgcagaccaattgttaggaacaggggcaaattggagcaccattaaccaacaatcagtgatgcagaatgaggctattgaacaagtaagggctatttgcctcagggcctggggaaaaattcaggacccaggaacagctttccctattaattcaattagacaaggctctaaagagccatatcctgactttgtggcaagattacaagatgctgctcaaaagtctattacagatgacaatgcccgaaaagttattgtagaattaatggcctatgaaaatgcaaatccagaatgtcagtcggccataaagccattaaaaggaaaagttccagcaagagttgatgtaattacagaa

SEQ ID NO: 32974 - DNA, 424 bp, Homo sapiens
ggagctccttcgcggtggcggccgaggtacatatatatgtatgcttgtaaatgagcttttattagctgtgtatattaaaggttttctccatcctgtgatctgcttttagattttggaacacatttcattgtgcacattccatttgtattattaatatgacaacatttattactattattattatcatcattaattcaatcacatctactatatccctgataatgaccatgatccttttaataatcacaaaactctcttcccttcatcacggggtaaataacctaccacaatgctgtaagtctccatcagcaccccaggctgcccctgctcacttaccagatctgctactttagccagatcaatcatcatgttaatgtcacacccacattcaataatggtgagtctgcgctttttacctgacacg

SEQ ID NO: 32975 - DNA, 437 bp, Homo sapiens
ctatacggcgaattggatctccaccgcggtggcggccgcccgggcaggtaccagttgtaaaattaccaggaaccgccatgcttcaagatcgccctgttttctggcttcatcaatgactgcatgcagtgcaccaccctgtccactacgtgatgctgtaggattaagtctcacagtgggcggctgaggatacagcgccgcgtcctgtgttgctggtgaattagacgccatcgctgtgggttgctggtatggtgccgtgctatttggcacaggacacaccgcttgaggtctgtattgaacctctgaaggaggccgatactgaagctcggttggcagccggtattgataaactaccagcggttgggtcttattttctaccggctgatattgtggatactgtatctgagttggcattgccgggatagagactctgtcccttt

SEQ ID NO: 32976 - DNA, 231 bp, Homo sapiens
attggagctccaccgcggtggcggccgaggtacgatatatgaaggagcttccaacatccagttgaacaccattgcaaagcatatcgatgcagaatactgacgtctataggagtgggacccctccctggtgtcactgctgtaaaattttaaacggttgtgtcttgttgggagtaagtgcccttgcgtggggaataaaccttccacagccattccgaatatttttaaatgaag

SEQ ID NO: 32977 - DNA, 431 bp, Homo sapiens
cgaattggatctccaccgcggtggcgggcgaggtactttttttttttttttttttctttttttctatgaaagtttttgcgtgacctatttttcctctctccatgcaaaggtaagcctggaaataatacattttattttttagttaaaaaacaagaatagaaaagagcctcatttagtaatgaagggaacgtaacctttattcaatgcaaagggcaatggattctatattcatctatgtgccaagcagccctctgagctttaaaaactaattatagggggagattgtgacttttcagtctttttggctcatgccatattctatggtactggtctcctgagttcacttgtttaaataatttcccctcaccttcccatgcaaggcattaaagagcacaacaggcagctgccactttggggacctttttagtatt

SEQ ID NO: 32978 - DNA, 445 bp, Homo sapiens
cgactactatagggcgaattggagctccaccgcggtggcggccgcccgggcaggtaccacccccttgctgaaagcactggttcccctgttgaagcttgctagggattacagtgggtttgactcaattcaagtaagtaagcaaacatttaaatatttttcaggcataaatgttagcgttcttatcctgtaatatgcgaagtaaataaatttatatacttactgcctttgttacaatgcatgcaaacacgtggtaaggtgttcataccttaggaagagatctgattctcaagaacagcagaaaataggaagcagagaatgagttaggatgaaattcaaatgggagaaagaaatgaagaagccagatacttccagtagttaatttcttaacatggctacttataataatagagaaatggtaagaaaagaaggaaaagcaagaaaaatg

SEQ ID NO: 32979 - DNA, 449 bp, Homo sapiens
atacactactatagggcgaattggagctccaccgcggtggcggccgcccgggcaggtacggtgaatagaaaattccccatatgatgtcaactaccaggtgcttgtaagtttgagggctctgaaggccatcctagggatacccacatgatttcagcggtgtctgttgggcagtgccagtcttggaaggtgggccaagcataaattccacaaccttataactaatattagatgaagtttctcaaacattcctttgagacatggcaggacagcgccagggatcctccttcaggaagaaactagattttacattggtacgcgggggttccgggcgtcaccatcgtccgtgcgcaccgcccggcgtccagatttggcaattcttcgctgaagtcatcatgagctttttccaactcctgatgaaaaggaaggaactcattcccttggtggtgttc

SEQ ID NO: 32980 - DNA, 446 bp, Homo sapiens
acgactcactatagggcgaattggagctccaccgcggtggcggccgaggtacgtaacaggacatcaataaatattagttgaatggaagattaaatcaacaaaatgggtgatggatctctgcagtaagtggaagagttcttcatggcccccaaggttatatccatctagaacttcagcacgtaatttcatctggaaatagtgcctttgcggatataagttaggtaaaactgaagatgagatcatactggattaggatgggatctaaatccaatgaaaatgtcttcataaaaaacaggaaagaacccatagaaacacaaggaagaaggtcatgtgaagatggaggcagagattggagggatgcagccaccggcccaggaatgccagcagccacccagaagctggaaggaaatgagggattctctcctagaacctttagagagaacatg

SEQ ID NO: 32981 - DNA, 440 bp, Homo sapiens
ctatacggcgaattggttctccaccgcggtggcggccgaggtacctaatataaagttaagtggttttatttaatacttttttcctgaccatgattatgttataaataagaggatttatagtttgcatgcctgatataatctatttaatttcctttacaaaatttttgcacatgaaagataaatgtcttcattttaccagctacctccttccagattgaatgcttcagtgcactttgattttcaaattggctattattttttaatgtaattaaccttcacaatttaaattgaaggatattctgatccttaggttataaatatgtgacttgatggtttatgtaacattcaagtagcatgttttctataacaatatgataaaagttttgatacataccttgtatgttgcttgacagatctgttttagaaaacattcctctgcc

SEQ ID NO: 32982 - DNA, 440 bp, Homo sapiens
atagggcgaattggagctccaccgcggtggcggccgcccgggcaggtacattatttctccatatgtctgtcccctctgctccaaaactgcaggggagagtcttgcacatgatctttgtaaaaacagtctttgttttactcagaaaatttgtattgagtcctgctacatacatgctaggcattagggtctaaaaagaatgaaaataaagcatctcagggatggcttttctagaacacatgcccaagcagagacttaaatattgaggctggccagattaaaaggggtagagggcaggaaagggtgacagcatgcccggcagcagcaagagcgggagcgaggcctgaaagaatgaaagtatttgcctacaacagaaggatgagtgagtagggcactaccagcagctcaataatgccagagaaagggcacacagggaaaagggc

SEQ ID NO: 32983 - DNA, 174 bp, Homo sapiens
tggagctccaccgcgggggcggccgggcatttctcccagggatctctgtgcttccttttgtgcttcctgtgtgtgtggatatttaaaggggctggaaatgtgcaaaaacatgtcactacttagacattatattgtcatcttgctgtttctagtgatgttaattatctccatttc

SEQ ID NO: 32984 - DNA, 434 bp, Homo sapiens
  misc_feature 210, 211, 214, 243, 244, 245, 248, 249: n = A,T,C or G
ctatagggcgaattggagctccaccgcggtggcggccgaggtacgcgggggggagtgccctttcttgaaggaatcccttaagtgcacgtctcccgttttcttttcacatcaatgcagagtccctctgtgaatttacaacacccaacacccatgagttcagtccttaagaaggaaaattgagcaagtatttaattggttgggccttgcttnnaanagggccatatccaggctaactcttgaaannnaannctcaaacttaattggccactttttcttctgtcagaggaccattcttagtggcactggggaaatcttggcacccagaagaattcaactgcgctcactgcaaaaatacaatggcctacattggatttgtagaggagaaaggagccctgtattgtgagctgtgctatgagaaattctttgcccctgaa

SEQ ID NO: 32985 - DNA, 240 bp, Homo sapiens
tatagggcgaattggagctccaccgcggtggcggccgaggtactccagggaaactgacagtgatcgtaaacttgttgataaagaagatatcgacactagcagcaaaggaggctgtgtccaacaggctactggctggaggaaagggacaggcctgggatatggccatcctggattggcttcatcagaggaggctgaaggccggatgaggggccccagtgttggagcctcaggaaagaacca

SEQ ID NO: 32986 - DNA, 451 bp, Homo sapiens
cactactatagggcgaattggagctccaccgcggtggcggccgaggtacatctctagatgatcacgaatgtcaaatatcacactacactgtgatatggggattccccttgggggttttcatgtgtatagggtgcctgcagctacactaaacatcttaaagctaccacaatgttcacttcatatttttgctttttataggctttcctggtctcctcctatgttcccatcattttcttgctttgaatctgtaagaatcgagttgaatcttctccattttaaattttccataggctgagaaactgtttagccaagtttggataaaattgtatccaaagtaagagtatacaagctatgggcaagtccaaaatcaagctgttcacaggaccatgttctctctaaaggttctaggagagaatccctcatttccttccagcttctgggtggctgctgg

SEQ ID NO: 32987 - DNA, 454 bp, Homo sapiens
ctaatacactactatagggcgaattggagctccaccgcggtggcggccgaggtacagcagtcgaagtgagctgccatctctgattctgtatccctgatggctctgcacagcctagtcttccctggtgggaagagtgtcccttgtccacagaggtggtggggacccacattgcttgtagctcccgtgagcatgcaaagaaggccattaccaggaggaaccgcctctcaggatctgatcttttcttccctctttcttgacttccttctatttctaatggcagtgcttatcttcttctctttgcaggttgtaacctccatttctgacatccccactggtattccagttcacctagagctggccagtatgactaacagggagctcatgagcagcattgtccatcagcaggtctttcccgcggtgacttcccttgggctgaatgaacaggagctgttat

SEQ ID NO: 32988 - DNA, 447 bp, Homo sapiens
actactatagggcgaattggagctccaccgcggtggcggccgaggtacgcggggaaaaaagggtggggagtgccctttcttgaaggaatcccttaagtgcacgtctcccgttttcttttcacatcaatgcagagtccctctgtgaatttacaacacccaacacccatgagttcagtccttaagaaggaaaattgagcaagtatttaattggttggacattgcataaaagaggtccatatccaggctaactctagaaattttattctcaaacttagttggcctctttttcttctgtcagaggaccattcttagtggcactggggaaatcttggcacccagaagaattcaactgcgctcactgcaaaaatacaatggcctacattggatttgtagaggagaaaggagccctgtattgtgagctgtgctatgagaaattctttgcccctg

SEQ ID NO: 32989 - DNA, 447 bp, Homo sapiens
cactactatagggcgaattggagctccaccgcggtggcggccgaggtacctgtctcatatgtggcaactacgtggggcagcacactcaaggaatgaaggaagtttcagtgaatgacaactttataaagacagtgttgaggcagcccagtgcagcggtttgggagccaggaacagcgtgtgggccggagtgtggctgcaggacaggaggtcaaaaataagggttgagggtggaataggaagaccccggaacgtcatcctgggagcttgagattttattctacatttctcttgttcttaactatttagggtgatggatctctgcagtaagtggaagagttcttcatggcccccaaggttatatccatctagaacttcagcacgtaatttcatctggaaatagtgcctttgcggatataagttaggtaaaactgaagatgagatcatact

SEQ ID NO: 32990 - DNA, 439 bp, Homo sapiens
acgactactatagggcgaattggagctccaccgcggtggcggccgaggtacttttttttttttttttttttttttttccttagagcctttcattacaattcagccattctgcaattaattgtcacaaatttctggccaatacattcatttcctatcatattcaaagaaaattatttgaatttaaaattcttactctaaatgaggtatattgaacatttcgaatcttgacagtttaattctatatttgtgtcatgaaatcagttcttttctttttacctgtcttatttctttaagttagttataggtaaaattgtaaccctgactgttatctcatgttaacgcaagacaagaaaatatgtatgaatgtcgggaagagatttgacctggaaacttttcatttattgaaaaggctgcttttgaattttgccacatgaattat

SEQ ID NO: 32991 - DNA, 480 bp, Homo sapiens
ctcactatagggcgaattggagctccaccgcggtggcggccgaggtactgaggctgtatacagccacagcctctccccatccctccagccttatctgtcatcaccatcaacccctcccatgcacctaaacaaaatctaacttgtaattccttgaacatgtcaggcatacattattccatctgcctgagaagctcttccttggttcttaaatctagaatgatgtaaagttttgaattaagttgactatcttacttcatgcaaagaagggacacatatgagtattcatcatcacatgaagacagctaaatactaaaagttgtaatttgattataagaagtttagatataatatatgaaatgcaaagagccacaaagggaatgtttatggggcacgttttgtaagccctgggatgtgaagcaaaggcagggaaacctcatagtatcttatataatatacttcatttctttatctctatcacaa

SEQ ID NO: 32992 - DNA, 447 bp, Homo sapiens
tactatagggcgaattggagctccaccgcggtggcggccgaggtaccagttgtaaaattaccaggaaccgccatgcctcaagatcgccctgttttctggcttcatcaatgactgcatgcagtgcaccaccctgtccactacgtgatgctgtaggattaagtctcacagtgggcggctgaggatacagcgccgcgtcctgtgttgctggtgaattagacgccatcgctgtgggttgctggtatggtgccgtgctatttggcacaggacacaccgcttgaggtctgtattgaacctctgaaggaggccgatactgaagctcggttggcagccggtattgataaactaccagcggttgggtcttattttctaccggctgatattgtggatactgtatctgagttggcattgccgggatagagactctgtccctttctacttgattttctc

SEQ ID NO: 32993 - DNA, 453 bp, Homo sapiens
ggcgaattggagctccaccgcggtggcggccgaggtacctaataaatatttttggcatatgtgaatgaatgaatgagtgaataaataatcagattagttgatgaaagattctaagggaagattaggtaatgtgattataagagaaagatcctgaagaatgcttggaaatggatcctttacccatacatgattttgttcatcagcttatatgtaggatcacagtcatttggaaaatattggtccattgaaatttatacattttccaaatggtgacacacttcattatacagtgtcaaaagttagccttcatgactatcaccactgatctcatcaggaagttttaagtattggatagctataagctcacaatggcagtcctagatagtgcagccgtggattgaaaaagtgttctagtttcctctttttaagccaagaatccatccttaaatataa

SEQ ID NO: 32994 - DNA, 439 bp, Homo sapiens
  misc_feature 434: n = A,T,C or G
tacgactactatagggcgaattggagctccaccgcggtggcggccgcccgggcaggtacgcggggggcatcgtaaatctcaacatccacatgaacttcacccatatctgcagaagccacaattctatcaaccagtccttggatgagtctgtgatttatggaccaggaaacctgtcaaccaacaacaatactctcagagaccacttcaaagggatttcttcccatagcagaagctcactcatgcccctgagaaatgatgtggataagagaggggagacgacctcagcatccttgctaaatgctggattaagccacactgaataccagatagtcacagaccctggggacgtcccagcttttttgaaatggctgtccttagccagcttgcttgtttatgttgctgctttttcaattggtctaggaccaatgccctgnctggt

SEQ ID NO: 32995 - DNA, 468 bp, Homo sapiens
  misc_feature 200: n = A,T,C or G
actatagggcgaattggagctccaccgcggtggcggccgaggtaccaatccttatcatttttattaccaagagttactgaaggaaaacaccaacctttgtgttggctgcaatccaattggaggtttcactgtcatcatcacactttttaatccatttctttaaccactgtttgaaaataacaacggttaggatacaacanaagacttttaaaaatagcaaattactttagcacttaactatggtcaagcttaaatgtaaaagccaatgaataagattatcactaggctcacatcctcttaagccagggaagtcccatagctacaatgtccagtatatataaaatcaaccaaagcaggattttctttggcagaagctgagtggggaacctagagcttgaagagaagcccaactgcaaggtgtgtattcccctaattacaaagcctgacaaagaggtgccttagccatgg

SEQ ID NO: 32996 - DNA, 444 bp, Homo sapiens
gactactatagggcgaattggagctccaccgcggtggcggccgcccgggcaggtacaaagtccctgaggcaaaggcatgcttgctgtgttctaggaaaagcaaggaagacagcatgtctatagcagtgggaggtggaaggataataaacagtaggtgaggttagaggggaccaaatcatgtattttccatccagaggttcccaaccttggctgcacattagatttattctaaggagcttttaaaaaataccaatgactgggtcccagcctagagtgattaaatcagaatctctggaggtagacttgagaatctgatgtttgcaagtttcctaggcaagtcaaggctgaggaagactgctgcaggccattgtaagagccaggcgttgatctcattcaacctttccctcagctcttctagagacagccagcattctcttatggcac

SEQ ID NO: 32997 - DNA, 439 bp, Homo sapiens
tacgactactatagggcgaattggagctccaccgcggtggcggccgaggtacaacaccatctggcttctctattttgaaactccacaccaggttaatcttgtccatggctgtggcttaaatctaaagtcaggttctggtgttttctggaatccatgcctagctctttgattctgaaaccaaatctggattctggactcttctgtattgattgctaaagcaagtttttgtttggtagcataacctgggtaaggtttttgagtgaaggtattggtgaggattttcaattgatcttctgtgaatttggtgcaattgcacctatgatttgttgctaccatcttgtgtgaagaggggtcttcaactatgcagaaagagagttctggaggctgagctactgtctgggagactgcttacagctcattttttaaaaagaaaggtcac

SEQ ID NO: 32998 - DNA, 446 bp, Homo sapiens
tacgactcactatagggcgaattggagctccaccgcggtggcggccgcccgggcaggtacgcggggacatcaatgcagagtccctctgtgaatttacaacacccaacacccatgagttcagtccttaagaaggaaaattgagcaagtatttaattggttggacattgcataaaagaggtccatatccaggctaactctagaaattttattctcaaacttagttggcctctttttcttctgtcagaggaccattcttagtggcactggggaaatcttggcacccagaagaattcaactgcgctcactgcaaaaatacaatggcctacattggatttgtagaggagaaaggagccctgtattgtgagctgtgctatgagaaattctttgcccctgaatgtggtcgatgccaaaggaagatctttggagaagtcatcaatgcgttgaaa

SEQ ID NO: 32999 - DNA, 465 bp, Homo sapiens
cgactcactatagggcgaattggagctccaccgcggtggcggccgcccgggcaggtacctcaaggtgtgttgtcgtagtcatataattcctttgcttgtaactgcccaataaatggatgaggactcacttcacccataaataagaaaggtgaacagcacatggggcctgtagatgccttttgcagggccctctttttctcttcctaaagttgcaatttgagtatttctctagatgggcacatcatagaaactgtcgtcctagatcagagcctggggagagagatacaggtgtcatgcttacatctgcagagtgggaacaagcccagaaaaatcaagatgattaagcagagagcttccatactggagataaaccagctgtgtaaaaaatcattgcaccaaaaaagcattgcaccatcgacataactgctttaactaagaagtaaaggaactgatgccccagcagag

SEQ ID NO: 33000 - DNA, 448 bp, Homo sapiens
actactatagggcgaattggagctccaccgcggtggcggccgcccgggcaggtacaaatattactataccaaggtgtagaggagtatgtctaagcctgtaatgatagcaggtggcaaggtggaggtagatggccttctgtggtagttcacggggaggaagacagtggatccaagcaaataagaaaggccacattttttttttttaattttgcatctcaaggtattttagtcaaaattttttttttagttttccacagcaaacgattacgtaaaatataaacctaatgtattctttaggactaagtgtgccttttctctatatgctaagaggtgtaagtagagaatagacgttatagtatcctagcaaatgaatattcacaagaaaggctacaaaacttcattatcttggcttattctaaatctacctaaagtcatcttgctctcctaa

SEQ ID NO: 33001 - DNA, 447 bp, Homo sapiens
cactactatagggcgaattggagctccaccgcggtggcggccgcccgggcaggtacttccaaaccctcctgttctttcctttttgttttccccaattttaacataaggcaaaagcagtaattgagcaattctatcacctggattggcactccggggaacagtggagctgatcactaactgaattccccctttataatctgaataaattaccccagtatgaatttggactcccttcaaatttagacttgatctccctcaaaggcctaccctcccttctggcagcgggccatatacccctctaggaatcttttgtgggggctttccagggagtaaaaagaccatttgggtggaacataaatctactgcggtgctgcctgctgtggcgcgggacagctgttggattgttgtaattggctgactccctgaagtggtggtattttctgtagg

SEQ ID NO: 33002 - DNA, 431 bp, Homo sapiens
tggagctccaccgcggtggcggccgcccgggcaggtacaggttgctgtaggagcccttaatctatgagatcttgacagattgcttgctttcttctttccaccatgggagaatgcaacaaggtcttcaccagatggccgaacagatccaagtgtcatgaccttggactgtccatcctccagaaccataagccaaataaatttcttttcttcataaatttcccagtctgtggtatcttgaaatcaactgaaatcagtcactaaggaacaaaattctccagagaaactgtttcttccttgaatctgaatgcctgactgtcaatcatttagcactgaaacaaggagagcctctctgaatgttgagcagccaagagagctgcccacactggacatcaatcagcagcagggcctgtcctcagggtgactccgtttac

SEQ ID NO: 33003 - DNA, 422 bp, Homo sapiens
actactatagggcgaattggagctccaccgcggtggcggccgcccgggcaggtacattggatgtgaactcttttaaactataacatggacactttattggaaccaaactttagttttctacattaatgagaaacactggtaactttgcttcattgaaaaaataattgcttgttctctgtcagatgcacttcgtcttagtaacatggccatggggaagacaaccacaggccagatagtcaatctgctgtccaatgatgtgaacaagtttgatcaggtgacagtgttcttacacttcctgtgggcaggaccactgcagacgatcgcagtgactgccctactctggatggagataggaatatcttgccttgctgggatggcagattttatcatttcttctgcccttgcaaagctgttttgggaag

SEQ ID NO: 33004 - DNA, 436 bp, Homo sapiens
actactatagggcgaattggagctccaccgcggtggcggccgcccgggcaggtgcatggcgaagctagagactgtaacctgaagattgggacaaattaaagaaaaaaatgtgatttaacacaattacaaaaactgttacgttagggtcaaacaagaaccattttatgaaactgaattacaacaaatgacattatatctaactcttccgggtctccacagcacttatacttacttaagcagcttaaacacttccgagtctccacagcactctgatacttacttaaacagctcttttaacctgccctagtattcttaagtgcagcatatctaatttttttttttcctcagtagtttgaacacttgctggctattttttctgtccaagttctcagtaacttcggcctgtgtagtcagtggttctacacagccgacacta

SEQ ID NO: 33005 - DNA, 449 bp, Homo sapiens
gcgaattggagctccaccgcggtggcggccgaggtactttgggaggctgaggcaggtgaatcatctgagggcaggacttcgagaccagcctgcctaacacggtgaaacctcatctccactaaaaatacaaaaaaattagccaggcgtgctggcaagcacctataatcccagctaatttcttctagttttaatagtccaagcttcgggagaaaagatagttttagcataggtagatgaaaggaaaaattattttcttaaagatgttgacactcactgggaagctgattttcctttagacaaattcaactgaagagatgttgaagagtacgcgggggtcagaagctggaggagttgaaggcagaggagccagataacttcagcagcaaagtagtgcagaggggccgagagttctttgacagcaacgggaacttcctgtacctgcccgggcg

SEQ ID NO: 33006 - DNA, 444 bp, Homo sapiens
actactatagggcgaattggagctccaccgcggtggcggccgaggtacgaaaaaatcaggctactaagcccactgttaatatagacgcagaccaattgttaggaacaggtccaaattggagcaccattaaccaacaatcagtgatgcagaatgaggctattgaacaagtaagggctatttgcctcagggcctggggaaaaattcaggacccaggaacagctttccctattaattcaattagacaaggctctaaagagccatatcctgactttgtggcaagattacaagatgctgctcaaaagtctattacagatgacaatgcccgaaaagttattgtagaattaatggcctatgaaaatgcaaatccagaatgtcagtcggccataaagccattaaaaggaaaagttccagcaggagttgatgtaattacagaatatgtgaagg

SEQ ID NO: 33007 - DNA, 443 bp, Homo sapiens
actactatagggcgaattggagctccaccgcggtggcggccgcccgggcaggtacaaagtccctgaggcaaaagcatgcttgctgtgttctaggaaaagcaaggaagacagcatgtctatagcagtgggaggtggaaggataataaacagtaggtgaggttagaggggaccaaatcatgtattttccatccagaggttcccaaccttggctgcacattagatttattctaaggagcttttaaaaaataccaatgactgggtcccagcctagagtgattaaatcagaatctctggaggtagacttgagaatctgatgtttgcaagtttcctaggcaagtcaaggctgaggaagactgctgcaggccattgtaagagccaggcgttgatctcattcaacctttccctcagctcttctagagacagccagcattctcttatggcac

SEQ ID NO: 33008 - DNA, 274 bp, Homo sapiens
acgactcactatagggcgaattggagctccaccgcggtggcggccgaggtacttttttttttttttttttttttgtatttttagtagagacagggtttcaccatgttggccaggatgatcttgatctcttgacctcatgatccgcccgtcttggcctcccaaagtgctgggatcacaggcgtgagccaccatacctggccctttatttattctctttaaagagaagagaaaacttatgagagggccaaaatttatttaatttaaatctttttac

SEQ ID NO: 33009 - DNA, 421 bp, Homo sapiens
ctataggtcgaattggagctccaccgcggtggcggccgcccgggcaggtacgcgggggcttccttccagtaaggagtcggggtcttcctcagttttctcagccaggcggcggcggcgactggcaatgtttggcctcaaaagaaacccgccaagggtgggttggaaaccgaaacgagtcagtgttgaaacgtgtctcatcctattcctgaagccagaatattctggccatgagtcattgtttccgcccatcttgattcttttggaaatggcagctcttgttcaaagaccggaaagggtgggatgtcaatttcaagtggggtcaacctgagttctgtaaatcccagtagcgattttcccgccgcgggtgggtaggcgaatcttgcgccggtttatacaaaggaggccgtgaggacctgcatgc

SEQ ID NO: 33010 - DNA, 467 bp, Homo sapiens
cgactcactatagggcgaattggagctccaccgcggtggcggccgcccgggcaggtactccaagccaaagatgatggagagtgaattaagttagtgcaatgggaccaagtctagagctatttagaagtgagaagtgacacggaaaaaaaaaaagattgattggatgtagaacaagttggataagaatccaggacaaccccaggtgtcaggctggggcagctaggtaggtgctattgccatataaagtgttaaaaaagaatagagaaggggctagttgtcgggggaaggagttcagttttagacatgttgaactgcaaggagatttgatactataattaaggaatgtgttttaataaatttaataaacaatgaacacacattattcgcatttcccaaacaatttggatggtagatcaaaaagaatgagagtgaaaataaggggtctgtgaccactcaattaagattga

SEQ ID NO: 33011 - DNA, 413 bp, Homo sapiens
cactactatagggcgaattggagctccaccgcggtggcggccgaggtacagatgtccagtagacctactggatatgcaggcctgcagctcaggggagagctgggttaagaaccgccaaggcagtaatcatctgcatttagatggcgagtgaagccatgacaggggctgaaatggcccagcaagaataaatcaaaccatgagaaacacatacatttaagaataaggagatgtggtcaggcgcggtggctcacacctgtaatcccagcactttgggaggccgaggcgggtggatcacttgaggtcagtagtttgagaccagcctggacaacctagtgaaatcccgtctctgctaaaaatacagaacttagctgggtgtggtggtgcgtgcctatagtcccagctgcttgggaggc

SEQ ID NO: 33012 - DNA, 416 bp, Homo sapiens
gcgaattggagctccacctcggtggcggccgaggtactttcccgtgtggaggcgcgcccagtcaccttgttgcggtagcctcaaggtgaggaatcgagacccaccaagtatgatgaataaacccagactctcagcaatgcaggaaaggaacaaacgggcagcttgggaaaagggggctcacataccacagcgactaggtaaactctacacagaccaagattttgatagtttacctgtgcaaattacagttccggagaaaatacggtcaataataaaggaaggaattgaatcgcaggcatcctacaaaattgtaattgaagggaaaccatatactgtgaatttaatgcaaaagtaggtaatcatcattattttatcaattctctttgttctacttataatttttgcttgaaattgtc

SEQ ID NO: 33013 - DNA, 450 bp, Homo sapiens
actactactatagggcgaattggagctccaccgcggtggcggccgcccgggcaggtaccaccctcttgctgaaagcactggttcccctgttgaagcttgctagggattacagtgggtttgactcaattcaagtaagtaagcaaacatttaaatatttttcaggcataaatgttagcgttcttatcctgtaatatgcgaagtaaataaatttatatacttactgcctttgttacaatgcatgcaaacacgtggtaaggtgttcataccttaggaagagatctgattctcaagaacagcagaaaataggaagcagagaatgagttaggatgaaattcaaatgggagaaagaaatgaagaagccagatacttccagtagttaatttcttaacatggctacttataataatagagaaatggttagaaaagaaggaaaagcaagaaaaatgtcgt

SEQ ID NO: 33014 - DNA, 456 bp, Homo sapiens
gactcactatagggcgaattggagctccaccgcggtggcggccgcccgggcaggtacgcggggacatcaatgcagagtccctctgtgaatttacaacacccaacacccatgagttcagtccttaagaaggaaaattgagcaagtatttaattggttggacattgcataaaagaggtccatatccaggcttactctagaaaattttattctcaaacttagttggcctctttttcttctgtcagaggaccattcttagtggcactggggaaatcttggcacccagaagaattcaactgcgctcactgcaaaaatacaatggcctacattggatttgtagaggagaaaggagccctgtattgtgagctgtgctatgagaaattctttgcccctgaatgtggtcgatgccaaaggaagatccttggagaagtcatcaatgcgttgaaacaaacttggcat

SEQ ID NO: 33015 - DNA, 456 bp, Homo sapiens
tacgactactatagggcgaattggagctccaccgcggtggcggccgcccgggcaggtactttttttttttttttttttttgcaataattacttttattgtatactgcacaatataaacagcatgttgcaaagaaatatatatatttgtgtgctttgtgtatgatataaatccatttctgcaaaataaaatacaaacccgatttatctaacaaatatgaaactcaatgaaaaaacaaatcccaaaataatactatttatgtaaaatatagaagctaaacaataaattaataatacatacataaatagcaaaagagtaaagcatagtaaaaaataataagcacccaagtaaagaaaagaaataacgtaaaatttgggatggagtgatttctatgacggggaatagaaaagagatgtggccacgcatgagaatattcaggctcattggtaatgttctgg

SEQ ID NO: 33016 - DNA, 173 bp, Homo sapiens
gcgaattggagctccaccgcggtggcggccgaggtacgagttgaatcattgttcaaataaggtgtaattgaaaagtgatcctctcttcagagatgtcaaaaacaaacaaatccaagtctggatctcgctcttctcgctcaagatctgcatcaagatctcgttctcgttcattt

SEQ ID NO: 33017 - DNA, 447 bp, Homo sapiens
actactatagggcgaattggagctccaccgcggtggcggccgcccgggcaggtacaaagtccctgaggcaaaagcatgcttgctgtgttctaggaaaagcaaggaagacagcatgtctatagcagtgggaggtggaaggataataaacagtaggtgaggttagaggggaccaaatcatgtattttccatccagaggttcccaaccttggctgcacattagatttattctaaggagcttttaaaaaataccaatgactgggtcccagcctagagtgattaaatcagaatctctggaggtagacttgagaatctgatgtttgcaagtttcctaggcaagtcaaggctgaggaagactgctgcaggccattgtaagagccaggcgttgatctcattcaacctttccctcagctcttctagagacagccagcattctcttatggcacaaat

SEQ ID NO: 33018 - DNA, 421 bp, Homo sapiens
ctatacggcgaattggtgctccaccgcggtggcggccgcccgggcaggtacagtagtatttaacctggatgtgaggactaaggaggaaattttctggtgaataccgaagagcaaagagcagcaggtcagcaggaatgactaatgtttttctatgcacgtttaatggaaaattcatgtaggatattttgagtaggtaattggataaccagcatttataactcgcatcctactagtttgactctcactaataagacttgtcaaagatccaagaatctgaaagttgatgataaatgtccatgtgtatcaccatcaatgatcaaaagttagcatccacaacatagaatgggacagatgaacttaatggataaagatgaatatcggagttgttccttttagggaatgatactctccatgacctgtg

SEQ ID NO: 33019 - DNA, 432 bp, Homo sapiens
gactcactatagggcgaattggagctccaccgcggtggcggccgaggtacttttttttttttttttttttttttttttttttactttttaagcacatgacctttccccaaatatggcccaagcttctactttggggagattaagatttatctagaagaaatgcatatgcaaagaccaagaaagatgaaatattcaactttttgactttcggaaaataagatactgcatcaaaacaagagctctgcaaatcaaattatgttgagaacagattgcataaaacttttacccctttatcctctctttcccatctctgccgagctaaattttattagttatacataaagacgacctaggagaaagaagaagagcattctgcccatttttgatattagaatagttgtgcggaaaattaaagagaagaaaagaaagaaa

SEQ ID NO: 33020 - DNA, 440 bp, Homo sapiens
  misc_feature 88: n = A,T,C or G
actactatagggcgaattggagctccaccgcggtggcggccgaggtacttttttttttcaaattttcttttttctcaagccctttgantctctttgtctcatacttcattcagaatgatttacagagaaaatagaggatatcagatggaactttactcaaactcctcctgccacatttgcacaccttcccttcttttagttccttcccttctgcagatgtctcacctctgcccaaggctcttccccttcctatgtcctggatcccacctgcttccagttcctctttaactttctactatatcctctctttcttctccaacactaccaccctccttgccacaaggtttcttcccaccagcatttataatacatgctcatcctctactgttttattaacaaccagccaacctttctccccatctgtctttccccaactacca

SEQ ID NO: 33021 - DNA, 440 bp, Homo sapiens
atacgactactatagggcgaattggagctccaccgcggtggcggccgaggtaccaggcactggaaacgccagacaaacaaggtctctaaccttgccatctttcaacaggaaacactcccctcgccccaccccaggggaatgtagtagtgtaatggtaaaaacataaagagaactatacggacttcaccgaactgacatgaggtttaaatgcgatatggcagacaaagcatataacggtagaaaaagtgaacacttaagaaatgtttaattcccatcgcctttcccagtgtgatcgctcagcagctaaattactgttaaacactggctatctcatgctatataaatctaagacacgataataagcaaaaaaacaaaataataacaacaaacatttttactacttatcctctctagactcttattagaatatccctgggcag

SEQ ID NO: 33022 - DNA, 439 bp, Homo sapiens
tacgactactatagggcgaattggagctccaccgcggtggcggccgcccgggcaggtacgaaaaaatcaggctactaagcccactgttaatatagacgcagaccaattgttaggaacaggtccaaattggagcaccattaaccaacaatcagtgatgcagaatgaggctattgaacaagtaagggctatttgccttagggcctggggaaaaattcaggacccaggaacagctttccctattaattcaattagacaaggctctaaagagccatatcctgactttgtggcaagattacaagatgctgctcaaaagtctattacagatgacaatgcccgaaaagttattgtagaattaatggcctatgaaaatgcaaatccagaatgtaagtcggccataaagccattaaaaggaaaagttccggcaggagttgatgtaatt

SEQ ID NO: 33023 - DNA, 446 bp, Homo sapiens
actatacggcgaattggtgctccaccgcggtggcggccgaggtactaaaaataataatctgttgtgagatacaggataattattatttccattttatagatgagaactgaagcttaaattttaagtaacttgtccgaattattaagtggtgaggtaagggcttatatccaggttttccgtctttaaatacaagattttaacattattccacattgcttcacatgcctcagattgtgaccagctgagggaaattgtaatttttctttctaataggtaatcaggtgctccctttcaatattaattttacataggtaaaacttgtaaaagtaagccaaatagtatatatagatattccaaatgactgttctcacatagaggtcttctgacacactgacaacacaccaagtcattcagaaccagtgggactcattaataaagttagtgct

SEQ ID NO: 33024 - DNA, 439 bp, Homo sapiens
actactatagggcgaattggagctccaccgcggtggcggccgcccgggcaggacgcggggacatcaatgcagagtccctctgtgaatttacaacacccaacacccatgagttcagtccttaagaaggaaaattgagcaagtatttaattggttggacattgcataaaagaggtccatatccaggctaactctagaaattttattctcaaacttagttggcctccttttcttctgtcagaggaccattcttagtggcactggggaaatcttggcacccagaagaattcaactgcgctcactgcaaaaatacaatggcctacattggatttgtagaggagaaaggagccctgtattgtgagctgtgctatgagaaattctttgcccctgaatgtggtcgatgccaaaggaagatccttggagaagtcatcaatgcgttgaa

SEQ ID NO: 33025 - DNA, 443 bp, Homo sapiens
cgactactatagggcgaattggagctccaccgcggtggcggccgaggtacctgtctcatatgtggcaactacgtggggcagcacactcaaggaatgaaggaagtttcagtgaatgacaactttataaagacagtgttgaggcagcccagtgcagcggtttgggagccaggaacagcgtgtgggccggagtgtggctgcaggacaggaggtcaaaaataagggttgagggtggaataggaagaccccggaacgtcatcctgggagcttgagattttattctacatttctcttgttcttaactatttagggtgatggatctctgcagtaagtggaagagttcttcatggcccccaaggttatatccatctagaacttcagcacgtaatttcatctggaaatagtgcctttgcggatataagttaggtaaaactgaagatgagatc

SEQ ID NO: 33026 - DNA, 445 bp, Homo sapiens
ctatagggcgaattggagctccaccgcggtggcggccgaggtaccttttttcatagcatagagctctgctatgaagaatacataacacatacacagtatttaagattacatgtgcacacatgaacacacacacacacacacaccaccccttctttaaagaaaaaagaacccatccccttgatataaactgttagactcgttttcagaatgtctcttgccattatgtcaattcagcctgcaaacaaaatttaacatttttgtttttttaaaaaaatcaacttttaaccaaaacttcttagaattatttttcaatattagcataaaatatttgttggtgttttgctattattttaactgcagtggtcaggtatctccttcacaaaaagaaactcaaactgaagctgatgtagatgaaaatgaaaaccaatcacctttatccaattac

SEQ ID NO: 33027 - DNA, 446 bp, Homo sapiens
tacgactactatagggcgaattggagctccaccgcggtggcggccgaggtacttccaaaccctcctgttctttcctttttgttttccccaattttaacataaggcaaaagcagtaattgagcaattctatcacctggattggcactccggggaacagtggagctgatcactaactgaattccccctttataatctgaataaattaccccagtatgaatttggactcccttcaaatttagacttgatctccctcaaaggcctacccccccttctggcagcgggccatatacccctctaggaatcttttgtgggggctttccagggagtaaaaagaccatttgggtggaacataaatctactgcggtgctgcctgctgtggcgcgggacagctgttggattgttgtaattggctgactccctgaagtggtggtattttctgtaggggt

SEQ ID NO: 33028 - DNA, 445 bp, Homo sapiens
ctactatagggcgaattggagctccaccgcggtggcggccgaggtacttaatcctggttggtttacccattctaaattatttatgtgagatagctatctatttggaaaaaagtaaagtgaaagtcttacctcaatccacactcaaaaatagtttactatatgacagatctatggcaggcagatttgatggctcaatgaactccaccctcccagtgttcacacctttatgtagttcccacttacagggagccaaaggtccgtgggacgtgaccaactcagcattccactggaggctatatgatcaaacagcaaactgtttatcatgaatgcaggatgtgagcaaactcaccattgctcctgccgacagaaggttttctggaggcaatcactccctggtgctgaggttatctactgcaacatttagagaatgtggtcttgcaagcct

SEQ ID NO: 33029 - DNA, 442 bp, Homo sapiens
tacgactcactatagggcgaattggagctccaccgcggtggcggccgcccgggcaggtacttttttttttttttttttaaagaatcagaacaggcttaataggaactttgaattttaatccttctattcatctgttatagattattttccctagtgatttctgtattaataaaacttaaacatggcaagttttttctaataagcaaaataaccaacagcttaatatatttgtattaaactctaacagtgcactaactttaaatgttgaaatagattacacattttagggcataatggcagaatatttggctacaatagaccataggattttgttgaagcaaataacaaaatgatgatttatcattttaatgcaaactcaattttattgtttaatgggaatttaatttttgtctttgggaaatctttttgagtagctgatttt

SEQ ID NO: 33030 - DNA, 451 bp, Homo sapiens
ctactatagggcgaattggagctccaccgcggtggcggccgaggtacgcggggaggaaagaagggcacatgagcaaacatgatggcccctttatgagaggtaatttactgaaatgcacagcgattacctgctcacccagccctgatgtaattaaaaatggcaggctaggggctctgtttcccccggctctggcagagaaacctgggtttcgacttgtgaagcttgaggttggatgtgggaattggcttggagtcataggcgatgagaggggcattaggatattatgaagcccgtgaactcaactcctgagaaggacacagcagagcgagagaaaagatggaataaaaaggcctacctcattaggctcgtgtgggtgaggagaactgaagagtctgagagcgcggcacgagccagaggctacggaaaacactgccctcctacactccacctt

SEQ ID NO: 33031 - DNA, 447 bp, Homo sapiens
tacgactcactatagggcgaattggagctccaccgcggtggcggccgaggtacaaaaggatccgctactgtgtgcctttctctagctagctcattttattcttgttatgcatttcccagacaatgcatgctgagggcctactatgcatgagacactgtcctaggaacagaggtggttccctggtggccctactacgtcattatcattgtggattttggattgcagaatattgaactgacacattttttgatggcacatgtcttgagggagagactgcagtagggcaggtgaatctttgccacctgtgcagaccctaatgtttgccacaatgtttgtatctggttgacagctgagcgtgagattgtccgggacatcaaggagaaactgtgttatgtagctctggactttgaaaatgagatggccactgccgcatcctcatcctccctt

SEQ ID NO: 33032 - DNA, 438 bp, Homo sapiens
tacgactactatagggcgaattggagctccaccgcggtggcggccgaggtaccagttgtaaaattaccaggaaccgccatgcctcaagatcgccctgttttctggcttcatcaatgactgcatgcagtgcaccaccctgtccactacgtgatgctgtaggattaagtctcacagtgggcggctgaggatacagcgccgggtcctgtgttgctggtgaattagacgccatcgctgtgggttgctggtatggtgccgtgctatttggcacaggacacaccgcttgaggtctgtattgaacctctgaaggaggccgatactgaagctcggttggcagccggtattgataaactaccagcggttgggtcttattttctaccggctgatattgtggatactgtatctgagttggcattgccgggatagagactctgtcccttt

SEQ ID NO: 33033 - DNA, 448 bp, Homo sapiens
actactatagggcgaattggagctccaccgcggtggcggccgcccgggcaggtacaagggaggccctcaagaaggtctgtcatctccttacactgaatcaggactggcgtagtgtgacctgtggaatacagtagaagtaaagatgtgtgactcccaaagcttggtcatataaggcattgcagcttcagccttgctctcttggatcacttaccctggagaaagtcatctcccatgctctgaggatactcaagcaactctgtggagtgttccacatggagaggaagtgccgaagacccgcaccaactggccaaaaaagtttgtcaaaattgacaaatgggatctaattaaactcaagagcttctgcacagcaaaagaaactaccatcagagtgaacaggcaacctacaaaatgggagaaaattttcgcaacctactcatctgacaaaggg

SEQ ID NO: 33034 - DNA, 368 bp, Homo sapiens
  misc_feature 313: n = A,T,C or G
agctccaccgcggtggcggccgaggtacgcggagacatcaatgcagagtccctctgtgaatttacaacacccaacacccatgagttcagtccttaagaaggaaaattgagcatgtatttaattggttggacattgcataaaagaggtccatatccaggctaactctagacaattttatatctcaatacttagttcggccctctttattcattctgtcaagaggacgcattctgtagtggcatctggggaagatctctggcactccagatagaattcacactgcgctcatctgcacaaatacaagtggcctacnattggatttgtagaaggagaaaaggagccctgtatatgtgagcatgtgctatgag

SEQ ID NO: 33035 - DNA, 611 bp, Homo sapiens
  misc_feature 188, 218, 219, 576: n = A,T,C or G
atacgactcactatagggcgaattggagctccaccgcggtggcggccgcccgggcaggtaccttgaattgattttctgactttcttttattggttttcagatttcttctgcatctcactaagcttctttaaaattaatgttttgtattttttaggggatgatgaatatgtttattatcatgatagtgngtgttggttttaatgggtataccatatgtnncaaatcttaaccaaattttatactataaacatgtgcagtttattgtatggcaattatacatcaagatgttaaaatagggccacaaactcttttctgtttctctcagtaagagatgcattataattctcttcccactgagtctggggtggccttggtgtatcgtttgaccattaggatatagcacatactgggacttctgaacataagtcttaggcattgcatctggccagacgaggtggcttatgcctgtaatcccagcactttgggaggctgaggcgggcggatcatgaggtcaggagatggagaccatcctggttaacatggtgaaaccccgtctctactaaaaatacaaaacanaaaaaaattaactaggcgtggtggtgggtgcctgt

SEQ ID NO: 33036 - DNA, 577 bp, Homo sapiens
  misc_feature 558: n = A,T,C or G
tacgactcactatagggcgaattggagctccaccgcggtggcggccgaggtacgttcatctacctactttgcacttggatggaagtcctagattgggtcttaaaaggagggaacattctagaacccaccaacccttcctgatactgtcacaagatttttttcccttaattcttttaaaatagggcacatttcaactccctgcccgctgccatttgatgatatttttgtttctctttaggtatcgtcctattttctttttctttaccactgacagcggcttatttcatatgaataatatattaaatacatatgcatttaaaatattgttttgatttgtttgcgaattgtttctcttaaagggtctatctggggaaatgagtaatttttcatatcctgttcttgcaggaagaattttaaatcgttgctccaaagacattggacacttggatgatttgctgccgctgacgtttttagatttcatccaggtaacgttgagagtaatgtcaggatctcaaatggaaaacggaagttcctattttttcaagcccttttcatggngtctgggggtgggactctc

SEQ ID NO: 33037 - DNA, 537 bp, Homo sapiens
acgactcactatagggcgaattggagctccaccgcggtggcggccgaggtaccagttgtaaaattaccaggaaccgccatgcctcaagatcgccctgttttctggcttcatcaatgactgcatgcagtgcaccaccctgtccactacgtgatgctgtaggattaagtctcacagtgggcggctgagatacagcgccgcgtcctgtgttgctggtgaattagacgccatcgctgtgggttgctggtatggtgccgtgctatttggcacaggacacaccgcttgaggtctgtattgaacctctgaaggaggccgatactgaagctcggttggcagccggtattgataaactaccagcggttgggtcttattttctaccggctgatattgtggatactgtatctgagttggcattgccgggatagagactctgtccctttctacttgattttctcttggggtttgtgcttgtctaacctgcgtttgaggttgtaatgttacaggcatctgaaccgcgggaggaggagttgatggcgatcg

SEQ ID NO: 33038 - DNA, 617 bp, Homo sapiens
atacgactcactatagggcgaattggagctccaccgcggtggcggccgcccgggcaggtacgcggggaaattcccttaggcagaaaaagggtggggagtgccctttcttgaaggaatcccttaagtgcacgtctcccgttttcttttcacatcaatgcagagtccctctgtgaatttacaacacccacacccatgagttcagtccttaagaaggaaaattgagcaagtatttaattggttggacattgcataaaagaggtccatatccaggctaactctagaaattttattctcaaacttagttggcctctttttttctgtcagaggaccattcttagtggcactggggaaatcttggcacccagaagaattcaactgcgctcactgcaaaaatacaatggcctacattggatttgtagaggagaaaggagccctgtattgtgagctgtgctatgggaaattctttgcccctgaatgtggtcgatgccaaaggaagatccttggagaagtcatcaatgcgttgaaacaaacttggcatgtttcctgttttgtgtgtgtagcctgtggaaagcccattcggaacaatgtttttcacttggaggatggggaaccctact

SEQ ID NO: 33039 - DNA, 571 bp, Homo sapiens
gcgaattggagctccaccgcggtggcggccgcccgccaggtaccactgcactaccaggttctagcaagaggagaagaaaggaggaaaccacagggaaaaatgttaagaagacacagcatgaattagatcacaatggtctcgttcccttacccgtcaaagtctgcttcacgtgtaacaggagttgccgtgtggctcctctcatccagtgtgactattgccctctcctgttccacatggattgcctcgagccgccgctcactgccatgcccctgggcagatggatgtgtccgaatcacatcgaacatgtggtgctgaaccagaagaatatgacactgagcaatcggtgccaggtgtttgatcgtttccaggacaccgtttcgcagcatgtcgtcaaagtggacttcctgaaccgaatccacaagaagcacccccctaaccggcgtgtgctccagtcggtcaaaagaagaagcttgaaggttcctgatgctataaaatctcagtacctcggccgctctagaactagtggatcccccgggctgcaggaattcgatatcaagcttatcgataccgt

SEQ ID NO: 33040 - DNA, 480 bp, Homo sapiens
ctatagggcgaattggagctccaccgcggtggcggccgcccgggcaggtacttattttatgtgtttttttttgtttggcgacctcaataaccatttatttctggcacagctttccctctctctctccaggtgaagtttgtgcaagcgtgagttaagagattggatgaaatattcacccaaatgtaagtgtcggtatgttattaatactttctccaagaacatgcacatcttcacctgggcttgctgctgccccatgtagtaaggatgcaacagtttgtggttctctagagagctttgccaccatttttgcagggagagggcttttagtgtcttaaccatagtgacatgtgaacaatcgatatgagagtttttcttgagaatgaatttttatccaacgaaaagggagaggaacagaacattgctggccttggaaatctcaaataaaaggctacgcatgggctcaatatatcatctcaatga

SEQ ID NO: 33041 - DNA, 545 bp, Homo sapiens
gagctccaccgcggtggcggccgcccggcaggtacgcggggactcgcgtcggttggcgactcccggacgtaggtagtttgttgggccgggttctgaggccttgcttctctttacttttccactctaggccacgatgccgcagtaccccaacatgagcattttctattaaaatttctcatcttctgtgccatcttccatgttgctttgaacatgtggaaattcatttcccatgcactcatatacagaccaaaaatttgggagaaacaatattggcgatggaacagcaacactgttgcatgtcttcttattcttctgtgcatataattatgattgaaccagtctgtaacttcattaggcttcttcaggcagatatggctttaactcataaaagctcaaggaatttcgtcagctggaaggaataccaatgcagacacatgatgcatgtttaaactgaagttgtcatctttgccgtatcacatggccaattcactcatttgaattgtctgtcaaatgcattgggctgaatggaaaaaaacaattattat

SEQ ID NO: 33042 - DNA, 562 bp, Homo sapiens
ctcactatagggcgaattggagctccaccgcggtggcggccgcccgggcaggtactatagattatttgtcttgaagaagagctttgatatgtttcaaaattcgacgttggctttggaaggaaactgtaaatttacagatctttgtccttccccacaaagagccttaatctcacaggttggattatgtggaactcactgctatttttcagttctcctttaagtgactaaggaacatccagatacttccaaaaaaaaaaaaaagtctaagtttttcactttgtccattgccatttaattatcttctgcatattttaaagcatttcctgtgaacataagtattgcccatccagaaaatttgcgtctacattgattttatgtttaatgaaacctgttcttctcaagttctttatttaatcacataacatagtatcttcaaaggtgagataaaaaaatcactggagaaatgttaaaacttcatttatttaagatgactagtgatgcagctagcaaacccaagaagccaactggaatggaaatgctcagtggtgctcagccattaccc

SEQ ID NO: 33043 - DNA, 459 bp, Homo sapiens
agctccaccgcggtggcggccgggtacttttttttttttttgtgacagggtcttgctctgtcacaaaaaaaaaaaaaaaaaaaggaaaggaaaaagaagaagaaaatatgtatattggatatactatgtgccaggcacgattccaagcccctgatacatcttacattttacagatgggggaaggaggtccagagatgttaaatacttgcccaaggtcacacagaaagtggaacactgggatttgaacaaggttttggttgggcatcttctcctatgggagctcagaaatatctgttgtctagccctttctcagcctcccaaccttgtcggttccttacctatgtcacagctgactttgagctaaagtcatctcggggcaactaggtgcctatgtgagctggcgttcatttctcactgattctccttccaaatacctccaggaagaaaagcaagtccttt

SEQ ID NO: 33044 - DNA, 559 bp, Homo sapiens
ctcactatagggcgaatgggagctccaccgcggtggcggccgcccggcaggtacgaaaaaatcaggctactaagcccactgttaatatagacgcagaccaattgttaggaacaggtccaaattggagcaccattaaccaacaatcagtgatgcagaatgaggctattgaacaagtaagggctatttgcctcagggcctggggaaaaattcaggacccaggaacagctttccctattaattcaattagacaaggctctaaagagccatatcctgactttgtggcaagattacaagatgctgctcaaaagtctattacagatgacaatgcccgaaaagttattgtagaattaatggcctatgaaaatgcaaatccagaatgtcagtcggccataaagccattaaaaggaaaagttccagcaggagttgatgtaattacagaatatgtgaaggcttgtgatgggattggaggagctatgcataaggcaatgctaatggctcaagcaatgagggggctcactctaggaagacaagttagaacatttgggaaaaaatgttataa

SEQ ID NO: 33045 - DNA, 586 bp, Homo sapiens
  misc_feature 200: n = A,T,C or G
ctcactatagggcgaattggagctccaccgcggtggcggccgcccgggcaggtacgaaaaaatcaggctactaagcccactgttaatatagacgcagaccaattgttaggaacaggtccaaattggagcaccattaaccaacaatcagtgatgcagaatgaggctattgaacaagtaaggctatttgcctcagggcctgnggaaaaaattcaggacccaggaacagctttccctattaattcaattagacaaggctctaaagagccatatcctgactttgtggcaagattacaagatgctgctcaaaagtctattacagatgacaatgcccgaaaagttattgtagaattaatggcctatgaaaatgcaaatccagaatgtcagtcggccataaagccattaaaaggaaaagttccagcaggagttgatgtaattacagaatatgtgaaggcttgtgatgggattggaagagctatgcataaggcaatgctaatggctcaagcaatgagggggctcactctaggaggacaagttagaacatttgggaaaaaatgttataattgtggtcaaatcggtcatctgaaaa

SEQ ID NO: 33046 - DNA, 464 bp, Homo sapiens
gcgaattggatctccaccgcggtggcggccgcccgggcaggtacttttttttttttttttttttttggaaactgtaaaaatgtgaagatactagaatgttaatttgactgctctaagaagtaatttttttaactttgcacaaaacatagtatgaatgtcatatattcaattaaaaatgtgcttatgcatctagtaagcaaagctgaactacccttgcggaaatgtgttacctgttcaatggcctaagggataataggtaattttaaagagggtgatacgagcatttgtagagctctatataactgtataacatcatgtaaatttgtatgattttgttttgtgaatatagtttcaacttgctaagtaaagcagtaaggggcaaacactaaacttaccagttaaaaagcattaaacagttagactttgtaatgatagtctttcaaggtttacccttgctgccatta

SEQ ID NO: 33047 - DNA, 473 bp, Homo sapiens
  misc_feature 427: n = A,T,C or G
tactatagggcgaattggagctccaccgcggtggcggccgaggtaccgactcctcagaaactggcatgccaaatcaaaatgggtctggttcaatcctccctaatggcaatgtaaacccctctaactaatcccacttctcctaattatctttttctccttacgaacctaaaaatctcaccatttctattagcctgaaaataacatccctctgttcttctcttcctccttcagcactggatctcacttacaataggttttatttaataattatcttccttacactttctgtctcaccagtttccccttaaactgatttacctgctacacaaaattattcttattgggcttatgtgccttttcctccacttattcgacctctcacctggatggatgctcctgcagaaatctatactaacgatagtgtgtnggatgcctggaactacagatgaccgttgccccgctcagccaggaga

SEQ ID NO: 33048 - DNA, 413 bp, Homo sapiens
cgcggtggcggccgaggtaccgcacacaattgtatgcgctgcactttcatctgactggaagcacagtgggcttacaccagcatcaacacaaacacgtgagcagtgccttgcactacaacagacgcgatatccctaggggacagcactgttttcagccccattataatctcatgggactactgttacagatgaggtccaccattgaccaaaacatgtggagcacggcaattaattctggatttggatggggacacaaaataagcacagctctggcaggtctaatcaagattaagagagaaaagcaactaaaacatctgagaaaacagatacagagggcataacaccacacagaaaatacttcatacaactgagctattatttttaattgacttgctgggaattactaaattact

SEQ ID NO: 33049 - DNA, 460 bp, Homo sapiens
tatagggctaattggagctccaccgcggtggcggccgcccgggcaggtacgcggggacatcaatgcagattccctctgtgaatttacaacacccaacacccatgagttcagtccttaagaaggaaaattgagcaagtatttaattggttggacattgcataaaagaggtccatatccaggctaactctagaaattttattctcaaacttagttggcctctttttcttctgtcagaggaccattcttagtggcactggggaaatcttggcacccagaagaattcaactgcgctcactgcaaaaatacaatggcctacattggatttgtagaggagaaaggagccctgtattgtgggctgtgctatgagaaattctttgcccctgaatgtggtcgatgccaaaggaagatccttggaaaagtcatcaatgcgttgaaacaaacttggcatgtttcctgtttt

SEQ ID NO: 33050 - DNA, 455 bp, Homo sapiens
actactatagggcgaattggagctccaccgcggtggcggccgcccgggcagttactaagggaggcagttaaagaagttttaaactgagttatttctcagaaccccaaataagagctcagcctatctatggctctgctaatattgattttaaaactataacgttcatctttttcttgctttaaattcaagctgtttttaaaatcaaatctttatccccaaccaaaatgtagattttttagttcaccagagaacttcaactgacctaattaaaactaaaagttcctagctgcttaaatgtttatgtaaaacaaaaagaaaaagttgaagttccggaaaaaatacttagacatttccataatgtagtcactgcctcatttgcttcatcaatactaacagtcgttttttttaagtcaagatatttcaagtagaataaaaacacttcatatatgtatatt

SEQ ID NO: 33051 - DNA, 443 bp, Homo sapiens
agggcgaattggagctccaccgcggtggcggccgcccgggcaggtacgcgggacatcaatgcagagtccctctgtgaatttacaacacccaacacccatgagttcagtccttaagaaggaaaattgagcaagtatttaattggttggacattgcataaaagaggtccatatccaggctaactctagaaattttattctcaaacttagttggcctctttttcttctgtcagaggaccattcttagtggcactggggaaatcttggcacccagaagaattcaactgcgctcactgcaaaaatacaatggcctacattggatttgtagaggagaaaggagccctgaattgtgagctgtgctatgagaaattctttgcccctgaatgtggtcgatgccaaaggaagatccttggagaagtcatcaatgcgttgaaacaaacttggca

SEQ ID NO: 33052 - DNA, 443 bp, Homo sapiens
ctactatagggcgaattggagctccaccgcggtggcggccgaggtacttaatcctggttggtttacccattctaaattatttatgtgagatagctatctatttggaaaaaagtaaagtgaaagtcttacctcaatccacactcaaaaatagtttactatatgacagatctatggcaggcagatttgatggctcaatgaactccaccctcccagtgttcacacctttatgtagttcccacttacagggagccaaaggtccgtgggacgtgaccaactcagcattccactggaggctatatgatcaaacagcaaactgtttatcatgaatgcaggatgtgagcaaactcaccattgctcctgccgacagaaggttttctggaggcaatcactccctggtgctgaggttatctactgcaacatttagagaatgtggtcttgcaagc

SEQ ID NO: 33053 - DNA, 454 bp, Homo sapiens
acgactactatagggcgaattggagctccaccgcggtggcggccgaggtacactgtttccatgttatgtttctacacattgctacctcagtgctcctggaaacttagcttttgatgtctccaagtagtccaccttcatttaactctttgaaactgtatcatctttgccaagtaagagtggtggcctatttcagctgctttgacaaaatgactggctcctgacttaacgttctataaatgaatgtgctgaagcaaagtgcccatggtggcggcgaagaagagaaagatgtgttttgttttggactctctgtggtcccttccaatgctgtgggtttccaaccaggggaagggtcccttttgcattgccaagtgccataaccatgagcactactctgccatggttctgcctcctggccaagcaggctggtttgcaagaatgaaatgaatgattctac

SEQ ID NO: 33054 - DNA, 430 bp, Homo sapiens
atacgactactatagggcgaattggagctccaccgcggtggcggccgcccgggcaggtacttccaaaccctcctgttctttcctttttgttttccccaattttaacataaggcaaaagcagtaattgagcaattctatcacctggattggcactccggggaacagtggagctgatcactaactgaattccccctttataatctgaataaattaccccagtatgaatttggactcccttcaaatttagacttgatctccctcaaaggcctaccctcccttctggcagcgggccatatacccctctaggaatcttttgtgggggctttccagggagtaaaaagaccatttgggtggaacataaatctactgcggtgctgcctgctgtggcgcgggacagctgttggattgttgtaattggctgactccctga

SEQ ID NO: 33055 - DNA, 372 bp, Homo sapiens
gggcgaattggagctccaccgcggtggcggccgcccgggcaggtacaataaatcttcctgtcccttccaccagaatacacatgtgtgaaggcatcattgacttgcagcgcccaaacaccttcatcatggactcggtatgttgctatacatctctgctggccaagggaccaaaggcgaattgtcccatcagaactgcctgacaggcattgcgtgccatctctgtttaatagcaatgcctccacattatccgtgtgccctttaagcttcattagttttgcacatgttcttggatcccatacccttaacaccttttcagtggaccctgatacaatgattgttcccagttgattcatggccaggttataaatggaa

SEQ ID NO: 33056 - DNA, 429 bp, Homo sapiens
acgactactatagggcgaattggagctccaccgcggtggcggccgcccgggcaggtacttcaaatcattttgaggatgtatatgtaggttctgaaactgaattcatagtattgcacatagaccccaacgttgattaccagttcagagtctgcgcccgaggagatggccgacaggagtggagtccttggagtgtcccccagctaggtcattccacattggtgcctcatggtatgctgctaaccttttctctcctgaagcctaactatatattagaatacctgtattctgtgctaagggcagcacactgacaaccagctattctaagcatagatcctgaattgataagaacaacatgcaccatgtcttttactcagattacctcatgtgatttttgttttcttcaggtcttcacagtccaaaaaaaaatgc

SEQ ID NO: 33057 - DNA, 451 bp, Homo sapiens
tatagggcgaattggagctccaccgcggtggcggccgaggtactaagaaaaattgttttgccttgagatgctgttaatctgtaactttagccccaaccctgtgctcacggaaacatgtgctgtaaggtttaagggatctacggctgtgcaggatgtacagcaaaaaagaaactgagaagcccaaactgctttcttgttaacatccacttatccaaccaatgtggaaacttcttatacttggttccattatgaagttggacaattgctgctatcacacctggcaggtaaaccaatgccaagagagtgatggaaaccattggcaagactttgttgatgaccaggattggaattttataaaaatattgttgatgggaagttgctaaagggtgaattacttccctcaaaagagtgttaagaaaagtcatagatgctataatagcagctattttaa

SEQ ID NO: 33058 - DNA, 449 bp, Homo sapiens
actactatagggcgaattgaagctcacaccgcggtggcggccgcccgggcaggtacgcggggacatcaatgcagagtccctctgtgaatttacaacacccaacacccatgagttcagtccttaagaaggaaaattgagcaagtatttaattggttggacattgcataaaagaggtccatatccaggctaactctagaaattttattctcaaacttagttggcctcttttttttctgtcagaggaccattcttagtggcactggggaaatcttggcacccagaaaaattcaactgcgctcactgcagaaatacaatggcctacattggatttgtagaggagaaaggagccctgtatttgtgagctgtgctatgaaaaattctttgcccctgaatgtggtctatgccaaaggaagatccttggagaagtcatcaatgcgttgaaacaaact

SEQ ID NO: 33059 - DNA, 426 bp, Homo sapiens
ggcgaattgagctccaccgccgtggcggccgaggtacctgtcagtgttcaatatttaacaaactccagtcataacaggtaagaggtcagcagtagcttataggccttggttctattatccatgtgcccaactgcagccatcgtgggctggtgttaaaattttcctttcaattgtcatttttctaataattgcaatcagtgagaggagaagaaaaagttcaagggaatgacctggcctttcaccatcctacacaggagatgactgatgacatggattcatacactaatgtatatcgtatattctccaaagaccctcaaaaatcacaagaagttttgaaaaattctgagatcataaactggaaacagaaactccaaatccaaggtaacaagtctgaagaaatgggcaagcagctgtgcttctcaaatt

SEQ ID NO: 33060 - DNA, 429 bp, Homo sapiens
ctactatagggcgaattggagctccaccgcggtggcggccgcccgggcaggtaccagttgtaaaattaccaggaaccgccatgcctcaagatcgccctgttttctggcttcatcaatgactgcatgcagtgcaccaccctgtccactacgtgatgctgtaggattaagtctcacagtgggcggctgaggatacagcgccgcgtcctgtgttgctggtgaattagacgccatcgctgtgggttgctggtatggtgccgtgctatttggcacaggacacaccgcttgaggtctgtattgaacctctgaaggaggccgatactgaagctcggttggcagccggtattgataaactaccagcggttgggtcttattttctaccggctgatattgtggatactgtatctgagttggcattgccgggatagagac

SEQ ID NO: 33061 - DNA, 443 bp, Homo sapiens
actactatagggcgaattggagctccaccgcggtggcggccgaggtaccagttgtaaaattaccaggaaccgccatgcctcaagatcgccctgttttctggcttcatcaatgactgcatgcagtgcaccaccctgtccactacgtgatgctgtaggattaagtctcacagtgggcggctgaggatacagcgccgcgtcctgtgttgctggtgaattagacgccatcgctgtgggttgctggtatggtgccgtgctatttggcacaggacacaccgcttgaggtctgtattgaacctctgaaggaggccgatactgaagctcggttggcagccggtattgataaactaccagcggttgggtcttattttctaccggctgatattgtggatactgtatctgagttggcattgccgggatagagactctgtccctttctacttgaa

SEQ ID NO: 33062 - DNA, 428 bp, Homo sapiens
actactatagggcgaattggagctccaccgcggtggcggccgcccgggcaggtacgcggggaaaaaagggtggggagtgccctttcttgaaggaatcccttaagtgcacgtctcccgttttcttttcacatcaatgcagagtccctctgtgaatttacaacacccaacacccatgagttcagtccttaagaaggaaaattgagcaagtatttaattggttggacattgcataaaagaggtccatatccaggctaactctagaaattttattctcaaacttagttggcctcttttccttctgtcagaggaccattcttagtggcactggggaaatcttggcacccagaagaattcaactgcgctcactgcaaaaatacaatggcctacattggatttgtagaggagaaaggagccctgtattgtgagct

SEQ ID NO: 33063 - DNA, 436 bp, Homo sapiens
atacgactactatagggcgaattggagctccaccgcggtggcggccgcccgggcaggtaccagttgtaaaattaccaggaaccgccatgcctcaagatcgccctgttttctggcttcatcaatgactgcatgcagtgcaccaccctgtccactacgtgatgctgtaggattaagtctcacagtgggcggctgaggatacagcgccgcgtcctgtgttgctggtgaattagacgccatcgctgtgggttgctggtatggtgccgtgctatttggcacaggacacaccgcttgaggtctgtattgaacctctgaaggaggccgatactgaagctcggttggcagccggtattgataaactaccagcggttgggtcttattttctaccggctgatattgtggatactgtatctgaattggcattgccgggatagagact

SEQ ID NO: 33064 - DNA, 602 bp, Homo sapiens
gtatacgactcactatagggcgaattgggccctctagatgcatgctcgagcggccgccagtgtgatggatatctgcagaattcgccctttcgagcggccgcccgggcaggtacgcggggagaaaaaaagggtggggagtgccctttcttgaaggaatcccttaagtgcacgtctcccgttttcttttcacatcaatgcagagtccctctgtgaatttacaacacccaacacccatgagttcagtccttaagaaggaaaattgagcaagtatttaattggttggacattgcataaaagaggtccatatccaggctaactctagaaattttattctcaaacttagttggcctctttttcttctgtcagaggaccattcttagtggcactggggaaatcttggcacccagaagaattcaactgcgctcactgcaaaaatacaatggcctacattggatttgtagaggagaaaggagccctgtattgtgagctgtgctatgagaaattctttgcccctgaatgtggtcgatgccaaaggaagatccttggagaagtcatcaatgcgttgaaacaaacttggcatgtttcctgttttgtgtgtgtag

SEQ ID NO: 33065 - DNA, 320 bp, Homo sapiens
tatagggcgaattggagctccaccgcggtggcggccgaggtaccatgctgacttcttggtatcttttaaggcctaattttcccttccttgagattactgtagtgtgttccagctaatttctatttggaaacgagttggaacagctgaaaactaggtattattgaaggcaaagcagcctcacgtcatttttttatcagctcatttgggaagtttttttttttttttttttggttaattagaaagtaggctgggcacggtggctcatgcctataatcccagcacttggggaggccgaggatctcctctctggtggatcactt

SEQ ID NO: 33066 - DNA, 432 bp, Homo sapiens
tacactcacttagggcgaattggagctccaccgcggtggcggccgcccgggcaggtacgcggggagaaaaagggtggggagtgccctttcttgaaggaatcccttaagtgcacgtctcccgttttcttttcacatcaatgcagagtccctctgtgaatttacaacacccaacacccatgagttcagtccttaagaaggaaaattgagcaagtatttaattggttggacattgcataaaagaggtccatatccaggctaactctagaaattttattctcaaacttagttggcctctttttcttctgtcagaggaccattcttagtggcactggggaaatcttggcacccagaagaattcaactgcgctcactgcaaaaatacaatggcctacattggattggcagaggagaaaggagccctttattgtgagct

SEQ ID NO: 33067 - DNA, 435 bp, Homo sapiens
ctactatagggcgaattggagctccaccgcggtggcggccgcccgggcaggtacgcggggacatcaatgcagagtccctctgtgaatttacaacacccaacacccatgagctcagtccttaagaaggaaaattgagcaagtatttaattggttggacattgcataaaagaggtccatatccaggctaactctagaaattttattctcaaacttagttggcctctttttcttctgtcagaggaccattcttagtggcactggggaaatcttggcacccagaagaattcaactgcgctcactgcaaaaatacaatggcctacattggatttgtagaggagaaagggagccctgtattgggagctgtgctatgagaaattctttgcccctgaatgtggtcgatgccaaaggaagatccttggaaaagtcatcaatgcg

SEQ ID NO: 33068 - DNA, 426 bp, Homo sapiens
cgtaatacgactactatagggcgaattggagctccaccgcggtggcggccgcccgggcaggtacgcggggacatcaatgcagagtccctctgtgaatttacaacacccaacacccatgagttcagtccttaagaaggaaaattgaacaagtatttaattggttggacattgcataaaagaggtccatatccaggctaactctagaaattttattctcaaacttagttggcctctttttcttctgtcagaggaccattcttagtggcactggggaaatcttggcacccagaagaattcaactgcgctcactgcaaaaatacaatggcctacattggatttgtagaggagaaaggagccctgtattgtgagctgtgctatgagaaattctttgcccctgaatgtggtcgatgccaaaggaagacccct

SEQ ID NO: 33069 - DNA, 403 bp, Homo sapiens
tacgactactatagggcgaattggagctccaccgcggtggcggccgaggtactttttttttttttttttttttttcctgagccacccatttcctatttgtttattttgaaagttttcataataaaggttaatttttaaaaatttaaaactaccaagatcactaatcctatactaacaaagcatgagatttctcacatcaaaaaaaaaagtccttctgtgagagcccattttttgaatagtttaaaacacaaaacatctgtatttcattatgtgaatgcgcttgagattttaagaatatatcttagcaaggaatagacaatactgaattccctttcccagtgatatcctaatttaaaaatagcaccaaaattggcagggggtggtggctcatgcctgtaatccc

SEQ ID NO: 33070 - DNA, 413 bp, Homo sapiens
acgactcacttagggcgaattggagctccaccgcggtggcggccgaggtacgcggggacatcaatgcagagtccctctgtgaatttacaacacccaacacccatgagttcagtccttaagaaagaaaattgagcaagtatttaattggttggacattgcataaaagaggtccatatccaggctaactctagaaattttattctcaaacttagttggcctctttttcttctgtcagaggaccattcttagtggcactggggaaatcttggcacccagaagaattcaactgcgctcactgcaaaaatacaatggcctacattggatttgtagaggagaaaggagccctgtattgtgagctgtgctatgagaaattctttgcccctgaatgtggtcgatgccaaaggaagatcctt

SEQ ID NO: 33071 - DNA, 425 bp, Homo sapiens
gtatacgactactatagggcgaattggagctccaccgcggtggcggccgaggtacggggaggaacagagtccctcctttacttctccattagaaagaatgagatggcaagacaatgaaacaggcaaagtggacagagatgcaagacaaaattcaggtgagagagccagagcatcactcagccattcctgacatgtaaaacaggcaactagaaatttgcagaaaggaagcgaggtctccataaagatgtttttaaagtgagcttgaagtatttggagacaattcagtgttacataaaatctgcaaatctctggataaagaagcagagatcccagcatgggacaaatggagccttaaaagtgggaagaagacagagaagaccagggcagaatgcatctcttcctttctcttggctttcctggataag

SEQ ID NO: 33072 - DNA, 326 bp, Homo sapiens
tacgactcactatagggcgaattggagctccaccgcggtggcggccgaggtacgcgggctcctgatctccttaaaaatgaatctagagttggtggctttttccccctcctctttggccagttccacagttcagttcttcctgaaaacagggatgatgaacttgtaggatcaggacaaatgtgtgtttttcaaaaacttaaggctgggtgtgaaacaccttctgtggacaaggatttgtaaacttctctcctccctccagctgcggccccagcctaactgatagttacttgattcagtgtgctagacacttaaatagcatctatgtc

SEQ ID NO: 33073 - DNA, 425 bp, Homo sapiens
actactatagggcgaattggagctccaccgcggtggcggccgcccgggcaggtacagtagtatttaacctagacgtgaggaaggagtaggaaattttctggtgaatacagaagagcaaagaacagcaggtcagcaggaatgactaatgtttttctatgcgtgtttaatggaatattcgtgtaggatattttgagtaggtaattggataatcagcatttgtaacttgcatcctagtagtctgactctcactaataagacttgtcaaagttccaagaatctgaaagtggatgataaatgtccatgtgtatcaccatccatggccgaaagtcagcatccacagaacacagaattgggacagatgaacttaatagataaagatgaatatcggagttgttcctcttagggaatgatactctccatgagca

SEQ ID NO: 33074 - DNA, 430 bp, Homo sapiens
atacgactactatagggcgaattggagctccaccgcggtggcggccgcccgggcaggtaccaggagggtattgatgtttgaggtccaaactgaaaacccatcacctccttcccactgctatagcagcgttagccctggggttcattatctagccagttcacaccttctaaagtggggctctgaaaatgtcttacttccctcacagacaaagcaattctcaagcctcctgagatcacccaccaaccagagcaactgctgtcacttggaggtgcagctgaattcttctaattgtgacacaaactcttgaaactgtaaatgctgaaagattaaatgaggttataacactcagaaggttttacaagtaaaagtaagtcaaatcaataggtctttatttcatatctgtaatggtttagctctgcgggaagtgtta

SEQ ID NO: 33075 - DNA, 425 bp, Homo sapiens
tacgactcactatagggcgaattggagctccaccgcggtggcggccgcccgggcaggtacgaaaaaatcaggctactaagcccactgttaatatagacgcagaccaattgttaggaacaggtccaaattggagcaccattaaccaacaatcagtgatgcagaatgaggctattgaacaagtaaaggctatttgcctcagggcctggggaaaaattcaggacccaggaacagctttccctattaattcaattagacaaggctctaaagagccatatcctgactttgtggcaagattacaagatgctgctcaaaagtctattacagatgacaatgcccgaaaagttattgtagaattaatggcctatgaaaatgcaaatccagaatgttcagtcggccataaagccattaaaaggaaaagttccagc

SEQ ID NO: 33076 - DNA, 412 bp, Homo sapiens
ttggagctccaccgcggtggcggccgaggtactcggggagtcacagaggaagccatttccagagaggaacaaccgtgtagactgctttcctgggagtcaagttaaaacttctctcctgtgaccttgtcacccggcagaggaaagttacccttggctgcagccacgacttccgcatactcttcagaacttgctctgcccttgagttttccagctttcctttaatgcactaaacctttaatattgtattctcctaaatgagacgtctcgcatttgagcaagtaacactcggatcttccccatgtcacggagagacatggatgagaatgaaggctgctgagtgggaggggcttatggggccagttttgaagaggcctcataccttttggccacattccattggccagaactttgt

SEQ ID NO: 33077 - DNA, 428 bp, Homo sapiens
tacgactcactatagggcgaattggagctccaccgcggtggcggccgcccgggcaggtactttttttttttttttttttttaagcaagcccccaacaccatagaaaattcttgatttgctcggaggataattggatgaaggattattttcttctttgtttatgtgcaagaaatgaagataaggaattgctttgatcagacaacttcttatctttgtggtagaaacagaactgcccttcttggagtggctctgcctctgagatcactacaggggagacagcatgccctgttcagctggctgaatatttggcaacaatctcctgaagcagctggaattgacaagaagtacctcggccgctctagaactagtggatcccccgggctgcaggaattcgatatcaagcttatcgataccgtcgacctcgaggg

SEQ ID NO: 33078 - DNA, 346 bp, Homo sapiens
tacgactcactatagggcgaattggagctccaccgcggtggcggccgaggtacatcatatttgcttgttggctttatgataacctagaaataatattctggattaactgtgtgactcatgagaagatttgtgcaactatgtttccaaatttacttgattttcaagacttacactagaactgtgagaacagggtaataaataagcatatgtattaatatcacctttggtcaactcttgggtagccccaacggtagtgtaggaattaacgtaatttttcctactaaaagtattggatttggtttgagagaccacagttgaaaatcattgacatacaaaggttaaaaat

SEQ ID NO: 33079 - DNA, 430 bp, Homo sapiens
tacgactactatagggcgaattggagctccaccgcggtggcggccgcccgggcaggtacagagacaactagtgacttatcccaagtcacacaggagttagaggcagggccaggacccaaacccaagtttcccttttatgagtcagctcatttcctgtgactccatattaaagataccactctgaatttgccttggaagctggcgcttcagtttataacacaaattgacactttaggaagacaagagagctttgtattctccctgcaatcatttactcagtcaggaaaatactaaacactgtctttgcgtagaatataatgctactgatgtgaggaaaagaaatccagtgcctggcacatagaaaaggatagatacacttttgtgggaggaaaaatagtggtaaaaacatggactggagtctcagctctac

SEQ ID NO: 33080 - DNA, 442 bp, Homo sapiens
tacgactcactatagggcgaattggagctccaccgcggtggcggccgaggtacactgtttccatgttatgtttctacacattgctacctcagtgctcctggaaacttagcttttgatgtctccaagtagtccaccttcatttaactctttgaaactgtatcatctttgccaagtaagagtggtggcctatttcagctgctttgacaaaatgactggctcctgacttaacgttctataaatgaatgtgctgaagcaaagtgcccatggtggcggcgaagaagagaaagatgtgttttgttttggactctctgtggtcccttccaatgctgtgggtttccaaccaggggaagggtcccttttgcattgccaagtgccataaccatgagcactactctgccatggttctgcctcctggccaagcaagctggtttgcaagaatgaa

SEQ ID NO: 33081 - DNA, 186 bp, Homo sapiens
acgactcactatagggcgaattggagctccaccgcggtggcggccgcccgggcaggtacttctgtcttccagttttccacttcaaacttctatcttctccaaattgtttcatcctaccactcccaattaatctttccattttcgtctgcgtttagtaaatgcgttaacctaggcttttaaatgacg

SEQ ID NO: 33082 - DNA, 512 bp, Homo sapiens
tactatagggcgaattggagctccaccgcggtggcggccgcccgggcaggtacatctacctaaaggactattatgtggaataatacatactaatgaagtattacatgatttaaagactacaataaaaccaaacatgcttataacattaagaaaaacaataaagatacatgattgaaaccaagttgaaaaatagcatatgccttggaggaaatgtgctcaaattactaatgatttagtgttgtccctactttctctctcttttttctttctttttttttattatggttagctgtcacatacaactttttttttttttgagatggggtctcgctctgtcaccaggctggagtgcagtggcgcgatctcggctcactgcaacctccacatcccatgttgaagtaattcttctgcctcagcctcccgagtagctgggactagaggaacgtgccaccatggctggctaattttctgtatcttttagtagagacagagtttcaccatgttggccagga

SEQ ID NO: 33083 - DNA, 444 bp, Homo sapiens
agggcgaattggagctccaccgcggtggcggccgcccgggcaggtactatagattatttgtcttgaagaagagctttgatatgtttcaaaattcgacgttggctttggaaggaaactgtaaatttacagatctttgtccttccccacaaagagccttaatctcacaggttggattatgtggaactcactgctatttttcagttctcctttaagtgactaaggaacatccagatacttccaaaaaaaaaaaaagtctaagtttttcactttgtccattgccatttaattatcttctgcatattttaaagcatttcctgtgaacataagtattgcccatccagaaaatttgcgtctacattgactttatgtttaatgaaacctgttcttctcaagttctttatttaatcacataacatagtatcttcaaaggtgagataaaaaaat

SEQ ID NO: 33084 - DNA, 715 bp, Homo sapiens
ctactatagggcgaattggagctccaccgcggtggcggccgctgagtgaggcgtcggctgtgtttctcaccgcggtcttttcctcccactcttggctggttggaccccgctatggaaaagttggcccctgagccagagctccagcagccttgttagggcgtggcctgaggcttggataagtgggatgtaaaacgaagatcaggagcagatttgaagaattacaaagtgaattggtgccagtcagcatgtcagagacagaccacatagcctctacttcctctgataaaaatgttgggaaaacacctgaattaaaggaagactcatgcaacttgttttctggcaatgaaagcagcaaattagaaaatgagtccaaactattgtcattaaacactgataaaactttatgtcaacctaatgagcataataatcgaattgaagcccaggaaaattatattccagatcatggtggaggtgaggattcttgtgccaaaacagacacaggctcagaaaattctgaacaaatagctaattttcctagtggaaattttgctaaacatatttcaaaaacaaatgaaacaaaacagaaagtaacacaaatattggtggaattaaggtcatctacatttccagaatcagctaatgaaaagacttattcagaaagcccctatgatacagactgcaccaagaaatttatttcaaaaataaagagcgtttc

SEQ ID NO: 33085 - DNA, 407 bp, Homo sapiens
gcgaattggagctccaccgcggtggcggccgaggtacaactctggctccatggctcctcacaaatgttccatgtgagatgtaaacatctttatcctcgacaagtcatgttcattccaagaaaccagtctttgttcttaattggacatttgtttctgcaaacagcttaccatacattcaattccaaagttatcagaaacctacactcttatctcacaaatttagaggtgtggtagatcatctccaaagatggccaccaacagttgctctcatcctctgtgcacgtgctatttccaataaggtctatttttttctacagtgagggctgaacttgtgacttgttttgactaataggatatggaagtgatattttggcagctttccacttttgctcttgaaaataagctga

SEQ ID NO: 33086 - DNA, 433 bp, Homo sapiens
tagggcgaattggagctccaccgcggtggcggccgcccgggcaggtaccctccaacacctcttccataaaatcagcaaacaactgacagagatcatgcagcgggagcccacgatcggtttaatcatcactcacttccattggatcaactacaaatcaactcagatgagagtgctgagtctcagaggatggacatctcaccccttgccatacagataagtagaaaggatggtattcaaaattaatggccagactctaagtcccagatactatacttcatggtcttccaactctcaaaaagttgtgggagttttttttgtttttgtttttgtttttttgagacggagtctcattctgttgcccaggctggaagtgcagtggagtgatctcagctcattgcaacctccgcatcccaggttcaagctattctcctgc

SEQ ID NO: 33087 - DNA, 449 bp, Homo sapiens
tacgactcactatagggcgaattggagctccaccgcggtggcggccgcccgggcaggtactcactctcaagtttacgttaaatactatcccatacaaaaaccactctttctcttgttttcattatttatatgttgccttgtttaaaggaagaacacaaaaatgccctgctaaagggattctgtttggctgcaggcagcaagagggaaaaacacagagcatattttgcagaaaatgatttattagaagtcagaactatgacacgaagccaagcagggcactctaggactgaatttgctgtgctgccttcatacgctccttgctctttcttttctggcagctgtgactcacacagctcatggagagtatcattccctaagaggaacaactccgatattcatctttatctattaagttcatctgtcccaattctgtgttctgtggatgctga

SEQ ID NO: 33088 - DNA, 442 bp, Homo sapiens
gcgtatacgactcactatagggcgaattggagctccaccgcggtggcggccgaggtacagtagtatttaacctagacgtgaggaaggagtaggaaattttctggtgaatacagaagagcaaagaacagcaggtcagcaggaatgactaatgtttttctatgcatgtttaatggaatattcgtgtaggatattttgagtaggtaattggataatcagcatttgtaacttgcatcctagtagtctgactctcactaataagacttgtcaaagttccaagaatctgaaagtggatgataaatgtccatgtgtatcaccatccatgaccgaaagttagcatccacagaacacagaattgggacagatgaactttatagataaagatgaatatcggggttgttcctcttagggaatgatactctccaagaactgtgtgagtcacagc

SEQ ID NO: 33089 - DNA, 257 bp, Homo sapiens
cactcactatagggcgaattggagctccaccgcggtggcggccgaggtacttaactagatgagaataacaggtcgccattatttgaattgactcctattcgtttttcatttgttgtgttactcatgttttacttatgggggatatatataacttccgctgttttcagaattattgtatgcagtcagtatgagaaatgcaatttaagttttccttgatgcctttttcacactttctattacttagaaataagtaatac

SEQ ID NO: 33090 - DNA, 441 bp, Homo sapiens
actactatagggcgaattggagctccaccgcggtggcggccgggggccattgagactgccatggaagacttgaaaggtcacgtagctgagacttctggagagaccattcaaggcttctggctcttgacaaagatagaccactggaacaatgagaaggagagaattctactggtcacagacaagactctcttgatctgcaaatacgacttcatcatgctgagttgtgtgcagctgcagcggattcctctgagcgctgtctatcgcatctgcctaggcaagttcaccttccctgggatgtccctggacaagagacaaggagaaggccttaggatctactgggggagtccggaggagcagtctcttctgtcccgctggaacccatggtccactgaagttccttatgctactttcactgagcatcctatgaaatacaccagtgag

SEQ ID NO: 33091 - DNA, 168 bp, Homo sapiens
tacgactcactatagggcgaattggagctccaccgcggtggcggccgaggtactggctggccaccaaagcacacggagattctgtcaggcgctgagacaccacagccttttcaatcttgtccttaagggctttatctttcatccaattcagcagaggctcaaattctt

SEQ ID NO: 33092 - DNA, 439 bp, Homo sapiens
actactatagggcgaattggagctccaccgcggtggcggccgaggtacttccaaaccctcctgttctttcctttttgttttccccaattttaacataaggcaaaagcagtaattgagcaattctatcacctggattggcactccggggaacagtggagctgatcactaactgaattccccctttataatctgaataaattaccccagtatgaatttggactcccttcaaatttagacttgatctccctcaaaggcctaccctcccttctggcagcgggccatatacccctctaggaatcttttgtgggggctttccagggagtaaaaagaccatttgggtggaacataaatctactgcggtgctgcctgctgtggcgcgggacagctgttggattgttgtaattggctgactccctgaagtggtggtattttctgtagg

SEQ ID NO: 33093 - DNA, 419 bp, Homo sapiens
tagggcgaattggagctccaccgcggtggcggccgaggtacctcaaggtgcgttgtcgtagtcatataattcctttgcttgtaactgcccaataaatggatgaggactcacttcacccataaataagaaaggtgaacagcacatggggcctgtagatgccttttgcagggccctctttttctcttcctaaagttgcaatttgagtatttctctagatgggcacatcatagaaactgtcgtcctagatcagagcctggggagagagatacaggtgtcatgcttacatctgcagagtgggaacaagcccagaaaaatcaagatgattaagcagagagcttccatactggagataaaccagctgtgtaaaaaatcgttgcaccaaaaaagcattgcaccatcgacataactgctttaactaa

SEQ ID NO: 33094 - DNA, 341 bp, Homo sapiens
attggagctccaccgcggtggcggccgcccgggcaggtacaagttcagagacattcagttgcaaagacatttaagcatattccctctgcttatgggaacttttctaaaaggtttgtaagaggaaacggcaccgcggagggacaggagtggaaatgtatctgtctggttccctcctgactcttgcttcccattggtcaaattttattccacagagatctaatgcttctatacatttggcaacttggtagctactcaagaagccatttcccaagccctgttttgtggcatttcatctaagaccagaagtggaggggagattcagcaggtcagactaccaacca

SEQ ID NO: 33095 - DNA, 429 bp, Homo sapiens
acgactactatagggcgaattggagctccaccgcggtggcggccgaggtacatctctagatgatcacgaatgtcaaatatcacactacactgtgatatggggattccccttgggggttttcatgtgtatagggtgcctgcagctacactaaacatcttaaagctaccacaatgttcacttcatatttttgctttttataggctttcttggtctcctcctatgttcccatcattttcttgctttgaatctgtaagaatcgagttgaatcttctccattttaaattttccataggctgagaaactgtttagccaagtttggataaaattgtatccaaagtaagagtatacaagctatgggcaagtccaaaatcaagctgttcacaggaccatgttctctctaaaggttctaggagagaatccctcatttcc

SEQ ID NO: 33096 - DNA, 250 bp, Homo sapiens
actcactatagggcgaattggagctccactcgcggtggcggccgaggtacagcatctggtgcaaaatcaatgtggactgaacataaatcacctgatggaaggacttactactacaacactgaaaccaaacagtctacctgggagaaaccagatgaacttaaaacacctgctgggcaacttcttaattttaaatgctccctggaaggaaatacaaagtcagatttcttggaaagcccttacttattattaa

SEQ ID NO: 33097 - DNA, 437 bp, Homo sapiens
cgactactatagggcgaattggagctccaccgcggtggcggccgaggtacctgtggatgggaagaatagaaatcaggagtgggcagagggaaaagttaagctgtgatgtaggcccagtgacaagccactgacacttctatggggagctgtaaatagacctttggcattgtcccaagttgggccaatatggccaggcctttacaggctcacacatcatttattgcttgtgggccactccaggaaggtgcatgactttgggtaaggaggctctctggagctgaggtaatccctgaaaggactaacagctgaagattgtctgctgagaatactgccgaagactaaggcaacaaattcttccacatacaggatctggatggcacatcacagtgcccaaaataaaggctgaacttatttagttataatctgatcagttagga

SEQ ID NO: 33098 - DNA, 447 bp, Homo sapiens
gcgtaatacgactcactatagggcgaattggagctccaccgcggtggcggccgccgggcaggtaccagttgtaaaattaccaggaaccgccatgcctcaagatcgccctgttttctggcttcatcaatgactgcatgcagtgcaccaccctgtccactacgtgatgctgtaggattaagtctcacagtgggcggctgaggatacagcgccgcgtcctgtgttgctggtgaattagacgccatcgctgtgggttgctggtatggtgccgtgctatttggcacaggacgcaccgcttgaggtctgtattgaacctctgaaggaggccgatactgaagctcggttggcagccggtattgataaactaccagcggttgggtcttattttctaccggctgatattgtggatactgtatctgagttggcattgccgggatagagactctgtcc

SEQ ID NO: 33099 - DNA, 343 bp, Homo sapiens
attggagctccaccgcggtggcggccgcccgggcaggtacttttattagttctgttttatagatgatgaacccaaggctcagagaggttaagtaacttgtctaagatcacacagtaagtggcaaagctgggatttaaacccacaaagtctggctcctgaaagtatgtttactccagctactccacactcatgtatggtgggcatttgagtttttactggagtgaacaaccaatcaaagtctagtttgattccttgcaaacaagcagcctctcattcatttattcagttttcctctttttttttttttttctgagacggagtctttcttttgtgaattaagact

SEQ ID NO: 33100 - DNA, 448 bp, Homo sapiens
cgactactatagggcgaattggagctccaccgcggtggcggccgcccgggcaggtacaggcggtaatatgagccataaggagtggctgtaaatacagatgaagcttccctggcttgcctgctgctcacctcctcctgtgtggtgtggttcataatagtccatggactggtatgagtgtgtggcctgggagttgaggacccctgctctgcgtggtcctaccatagataaaaaagtaaaagtaaggaatttttgatcacaaaagaacactgaagcacaagtcatgttacatatgcttgtcccaataaggtctcactattattgacttcattcctcctcatttgaagttggaaagagatatatttactttgttggaacaagatgtgttcttctacctgctggttaattgtcatcataacagtaattttgttagaacaagatgctctgctac

SEQ ID NO: 33101 - DNA, 450 bp, Homo sapiens
ctactatagggcgaattggagctccaccgcggtggcggccgaggtacttcccattgtaaatcacatttttagatagtccagtggccaaagcccccagacgaacaaaaacactcgtatcagccaagacatgccagaggcctagtgattgtttcccagtagctgagggcagaagccagacctctttcaataaggttgatctttcactgtattaacactgtatataaaggacttttataaaagcttgtagttatggtgttattgtcatcatccagtttaatgccctcttttttccagtaagaaaagaaaggtctgggataatcatgttaattgatttgtttacatttttattttaattagtagcacaactgagagtgaaaatggaacccaaatagtccatctttagcataatacttttttttctcctctagtggagcttataccttgccaatt

SEQ ID NO: 33102 - DNA, 427 bp, Homo sapiens
atacgactcactatagggcgaattggagctccaccgcggtggcggccgaggtactttttaaatgacaaagagtaatttcaacaaaaccaaatgctgcagtgtggcactcagctataacagtgtattttctttatccaaataaacacaataaaagctttgctttgcattgttcattataaaaaactgaatttttcttttgcaactatttatttttaaatgaggaagtaaaattctcaaaatgatacagttgctgctgcaaagtatgaataataagactgagggaggtaagagagaaaggactagtgcaagccctaacaaaagccctgtaccagatggaaaatgtttttggtgatctggctgctgcttaaagccagttttccctaagaactccaaaggctaaagtctactaggggcagagtgtgaggat

SEQ ID NO: 33103 - DNA, 424 bp, Homo sapiens
tacgactcactatagggcgaattggagctccaccgcggtggcggccgcccgggcaggtactctgcattggtgttaatgcccttctggatgtgctgggactcctcaataagtctgtcctccagactgttacattatgctcatacttccacatatccccagaacctaacattttgccatatattttagtagatactaaattatgtttgttaattaggatgctgatggaacccattatttagcagtttttcccttacatttttaggaggtggttttgccagataaatataatgtttaattttttttctaatttagcttattgacatgtgtgtgcagaactgtggtccaagtttccagtctctgattgtgaagaaggaatttgttaaagagaatttagttaagctactgaatcccagatacaacttgc

SEQ ID NO: 33104 - DNA, 420 bp, Homo sapiens
gcgaattggagctccaccgcggtggcggccgcccgggcaggttcgcggggctgaccacagcagaaaggacggggatgagcactgactggagcaatctgttgactgtcccctgttgtaaaccacagctgcctaattttgagaaacaggggccgagccatcagatgtaggggaatggaagctgatgccaacggaagcccggaggtaaactagggccccggaaaaacgaagaggaaacagaaattatgagtaagcagcggaagttgatactactcccaagatggaggctaatcactctgaacagctctcagcggaacgacagtcaacacctccaggtgacagttcatcattacccagtcacaatggcctggagaaggaagatggccaggattttccaaccccagttcaaccaccagagaaaga

SEQ ID NO: 33105 - DNA, 447 bp, Homo sapiens
gcgaattggagctccaccgcggtggcggccgcccgggcaggtacaaaaattagctgggcatagtggcacatgcctgtagtcccagctactcgggaggctgatgaacaagaatcacttgaacctgggaggaggaggttgcagtgagctgagatcgtgccactgcactccagcctgagcgacagagcaagactgtctcaaaaaaataaaaaagaaaaaaataataaaaaggaaaacaaagcctttagaaaaacaaagcctttgaaaaaggatgtaaaattgaatatatagatacaattatttttaaaaagttttatagaaaaatatcctggattgttgatgttgttttaatatattttaatcatttttgtataatgtcatgtataatatgttataatgaaagtaaaaaaaaaaaggtcttagcagagcaggcagaaaaatgccaaactc

SEQ ID NO: 33106 - DNA, 235 bp, Homo sapiens
acgactcactatagggcgaattggagctccaccgcggtggcggccgcccgggcaggtacgaagaattgcttcattccagtaatgaaataaatctcatttttttctctggttgagtctttcttgggccccttcaaagttgcatacattaacctgacccatccaacccagggctgtagagccaaagtaaactcctaggaaaccatcagtgctgaaaaaaagggtcttgggaattcct

SEQ ID NO: 33107 - DNA, 451 bp, Homo sapiens
tatacgactcactatagggcgaattggagctccaccgcggtggcggccgcccgggtaggtacttgcccaatgtttacccttacgacaacgcaggcaaacagtagcaggagcatttggccgtgtttgttgagccggcttggccgcttttaagtttttaacagtgtagtttttttgggtatgaccaagttggccacaattatagcaggctccaagaaaagaatcagtcgagccagtttggttgccgtgcttcatggccggtgcccacagaatagctctgtgggtctccgatccaacgccttcacaagctttaatatatgcaggcaacacctcatgatcaggtaaattttgacgtaggatggaatgcacggccattttacactcatggttcgcattttgaaaagctaacatatgaagaagaataccttgagtgtgctcatcaaagacagatttt

SEQ ID NO: 33108 - DNA, 448 bp, Homo sapiens; identical to SEQ ID NO: 32492

SEQ ID NO: 33109 - DNA, 413 bp, Homo sapiens
tatagggcgaattggagctccaccgcggtggcggccgaggtacaccgccagccatttaagccacaagcttataatgaggagaatctcacactttctcgaaagggtggcactttgctcctggcctgaagctgattctatgtcccggacacgtattgaccttcaggccagcactgtccagtggaaatggaatgtggactatgaatgcaagctacctatgccattttaaatttcctagtagccacagtcaaagaggaaaaagaaacagactacattaatcttaataatactttttggttttttgtttttttcaatttgagagcaggtaccttcggccgctctagaactagtggatcccccgggctgcaggaattcgatatcaagcttatcgataccgtcgacctcgagggggggcc

SEQ ID NO: 33110 - DNA, 440 bp, Homo sapiens
cgactcactatagggcgaattggagctccaccgcggtggcggccgcccgggctggtacgcgggggcctcatttcagctcaataaaacatcaccaaattcccttaggcagaaaaagggtggggagtgccctttcttgaaggaatcccttaagtgcacgtctcccgttttcttttcacatcaatgcagagtccctctgtgaatttacaacacccaacacccatgagttcagtccttaagaaggaaaattgagcaagtatttaattggttggacattgcataaaagaggtccatatccaggctaactctagaaattttattctcaaacttagttggcctcttttttttctgtcagaggaccattcttagtggcactggggaaatcttggcacccagaagaattcaactgcgctcactgcaaaaatacaatggcctacattgga

SEQ ID NO: 33111 - DNA, 442 bp, Homo sapiens
ctactatagggcgaattggagctccaccgcggtggcggccgcccgggcaggtacttccaaaccctcctgttctttcctttttgttttccccaattttaacataaggcaaaagcagtaattgagcaattctatcacctggattggcactccggggaacagtggagctgatcactaactgaattccccctttataatctgaataaattaccccagtatgaatttggactcccttcaaatttagacttgatctccctcaaaggcctaccctcccttctggcagcgggccatatacccctctaggaatcttttgtgggggctttccagggagtaaaaagaccatttgggtggaacataaatctactgcggtgctgcctgctgtggcgcgggacagctgttggattgttgtaattggctgactccctgaagtggtggtattttctgt

SEQ ID NO: 33112 - DNA, 409 bp, Homo sapiens
gcgaattggagctccaccgcggtggcggccgcccgggcaggtacttgtatgtgaggaaaaggaggtaaacaaggagttagaaagatgtgatgagaccaggtggtgatggactgaatataaagcaaagacatctggatttttaattctgtagggaatagctgaccaaggtatatgattacatgtctgctttttaaacagctttgtgatttgaaatgctgggttgttattgtttttttttgtttttgtctttttttttaaaaaaaaaaaagatggctaactctgccaaccatagacaaaatatgcatactggcatgtggagaaagaagacaggaattgttagaaagatttcattatttttccagcctccaaaataatgaggtaattttaggcatagtaataagaatgagga

SEQ ID NO: 33113 - DNA, 313 bp, Homo sapiens
cactcactatagggcgaattggagctccaccgcggtggcggccgcccgggcaggtacgcgggacagaaaatgagagtttcagatactgagaatagaaccactaagaagcagaaaagagaagatattctcgtgggggagaacaacggctgggaggggaggaagcatggccaaggcaaagaggaatacaacatgtttaagaccacagaacatctgcataggctgtaaatttcgtttgaatgatggatgcaaagatggaagacagatggatagaaggaaaagacagaatcaggatactggatgagtttagtacgcg

SEQ ID NO: 33114 - DNA, 420 bp, Homo sapiens
ctactatagggcgaattggagctccaccgcggtggcggccgcccgggcaggtacttccaaaccctcctgttctttcctttttgttttccccaattttaacataaggcaaaagcagtaattgagcaattctatcacctggattggcactccggggaacagtggagctgatcactaactgaattccccctttataatctgaataaattaccccagtatgaatttggactcccttcaaatttagacttgatctccctcaaaggcctaccctcccttctggcagcgggccatatacccctctaggaatcttttgtgggggctttccagggagtaaaaagaccatttgggtggaacataaatctactgcggtgctgcctgctgtggcgcgggacagctgttggattgttgtaattggctgactcc

SEQ ID NO: 33115 - DNA, 270 bp, Homo sapiens
ggagctccaccgcggtggcggccgaggtactttttttttttttttttttttggctgttttggggaaaaaaaatcacattccatttttttttccccatgatatggataataaaggctggatgtctctgacctagggtgactgcagtctcaatttacatcttatgtccggacgtcccattcaatgtcgcattcattccaaacaaaagcgtcccagtttagatgacagattatatgactgcccttttttgtcctcaaggtatgatccaaaggg

SEQ ID NO: 33116 - DNA, 444 bp, Homo sapiens
cactactatagggcgaattggagctccaccgcggtggcggccgaggtacaagcttcatttgccacaaaactcacaaaaaagtaattgattaaagaatatctcttttatgcaaaatatacattttaggatataatttaattgatattctactatatactgacattgctccttgatcattgaataaaaaaatactctcattgccagaattatgtttttgtaatatttataattgaggtaataatgataaaagacttaaactatgaataatgttggtgagttccatttaagctataacaatttcccagaactaaacaaatatgtgactaaacataggtcatttttgataaatgaatactaacaatttcacaacataattgacaagctgattacatcagtaatttataagaaaattatacaatcaagttcatagattcaaccaaagaa

SEQ ID NO: 33117 - DNA, 454 bp, Homo sapiens
tacgactcactatagggcgaattggagctccaccgcggtggcggccgaggtacagccatccttgtcttcaagcactttgagaacattttagccattgatgtttacatgtggcacccacccatgcaagataggtttctgtatttatacattaaaataccaaaaaaaaagtatgaaatgccttcaaaaatgttcaaagcttgagagaaaagcttttttcattagtcaaggtgttttgatatggtattaaaataatatctaacaaaatgaaaaaaaaattctcttttctccatgaatgctgacactggggagaatggcaattttaggctgtcaagagcatactaaataagtaaaatatctagaaatgcaatcgacttgcacgggatatgaaaattactggctttcagtcacttttggctatttcatactggcagaaagtaaaaattatggaacacac

SEQ ID NO: 33118 - DNA, 453 bp, Homo sapiens
acactactatagggcgaattggagctccaccgcggtggcggccgaggtacactagtatttaacctagacgtgaggaaggagtaggaaattttctggtgaatacagaagagcaaagaacagcaggtcagcaggaatgactaatgtttttctatgcatgtttaatggaatattcgtgtaggatattttgagtaggtaattggataatcagcatttgtaacttgcatcctagtagtccgactctcactaataagacttgtcaaagttccaagaatctgaaagtggatgataaatgtccatgtgtatcaccatccatgaccgaaagtcagcatccacagaacacagaattgggacagatgaacttaatagataaagatgaatatcggagttgttcctcttaaggaatgatactctccatgagctgtgtgagtcacagctgcccagaaaagaaagagc

SEQ ID NO: 33119 - DNA, 190 bp, Homo sapiens
tcactatagggcgaattggagctccaccgcggtggcggccgaggtacagatctgggaactaaatattaaaaatgagtgtggctggatatatggagaatgttgggcccagaaggaaccgtagagatcagatattacaacagctttgttttgagggttagaaatatgaaaatgaatttggttaatgaaacgc

SEQ ID NO: 33120 - DNA, 409 bp, Homo sapiens
gcgaattggagctccaccgcggtggcggccgaggtaccccagccaggcgcacgatgtcgtgtaagcagggtatccttgtgccagcatttgcttctctgtgaaaacacagcgccgtcaacattttgcactttccagggcccttcggaattggaagtgcctgtagctaatctgtttcccctggagagtccagctgttctcctgatccggccctgcacacacacacccagccacagattactaggatgtcaaacccaggtgatcaggatactctcacggactgccctgctcccccagggctctccctacagtgtaatcctaaagccaaacttcctttcagcagtggctgaagcaaactctgcagtcagaggtcatacccagcaggcttcaccatgcagacttgaatgttgat

SEQ ID NO: 33121 - DNA, 424 bp, Homo sapiens
actcacttagggcgaattggagctccaccgcggtggcggccgcccgggcaggtactttttttttttttttttttttttttttggtcttaaataccactccattgtatatttatcaactatactctttgcttattagtggcatgatctttggtttgtttcttaacctctctgaacctctgtctcttcatctgtaaaatggaaaaaataatgcaccttccttgcaggatgacagtaaggataagaagtaaaatgagtaagccatggtgcctggcacagagtagaactcaataaatggcatctagcattatttcccttcacacatacagacagattgtaagcttctagaaggcagaaaccagtatgcattttgccctaagcttccacatcaccacagtgcctaatacccagtttaaatcaacccata

SEQ ID NO: 33122 - DNA, 505 bp, Homo sapiens
  misc_feature 474: n = A,T,C or G
ctatagggcgaattggagctccaccgcggtggccggccgcccgggcaggtacttccaaaccctcctgttctttcctttttgttttccccaattttaacataaggcaaaagcagtaattgagcaattctatcacctggattggcactccggggaacagtggagctgatcactaactgaattccccctttataatctgaataaattaccccagtatgaatttggactcccttcaaatttagacttgatctccctcaaaggcctaccctcccttctggcagcgggccatatacccctctaggaatcttttgtgggggctttccagggagtaaaaagaccatttgggtggaacataaatctactgcggtgctgcctgctgtggcgcgggacagctgttggattgttgtaattggctgactccctgaagtggtggtattttctgtaggggttgttgtccttgaaaaccctgaagaacanacagtttaactgggaatgccccagtttgttg

SEQ ID NO: 33123 - DNA, 419 bp, Homo sapiens
tatagggcgaattggagctccaccgcggtggcggccgaggtactttatagtttaggctggacattggaaaaaaaaaaaagccagaacaacatgtaatagataatatggttggctgcacacttccagactgatgaatgatgaatgcgatggactattgtatggagcacatcttcagcaagagggggaaatactcatcatttttggccagcagttgtttgatcaccaaacatcatgccagaatactcagcaaaccttcttagctcttgagaagtcaaagtccgggggaatttattcctggcaattttaattggaccccttatgtgagagcagcggctacccagctggggtggtggagcgaacccgtcactagtggacatgcagtggcagagctcctggtaaccacctagaggaatacacag

SEQ ID NO: 33124 - DNA, 402 bp, Homo sapiens
gcgaattggagctccaccgcggtggcggccgaggtacaatgcttcatttgccacaaaactcacaaaaaagtaattgattaaagaatatctcttttatgcaaaatatacattttaggatataatttaattgatattctactatatactgacattgctccttgatcattgaataaaaaaatactctcattgccagaattatgtttttgtaatatttataattgaggtaataatgataaaagacttaaactatgaataatgttggtgagttccatttaagctataacaatttcccagaactaaacaaatatgtgactaaacataggtcatttttgataaatgaatactaacaatttcacaacataattgacaagctgattacatcagtaaattataagaaaatta

SEQ ID NO: 33125 - DNA, 408 bp, Homo sapiens
tacgactactatagggcgaattggagctccaccgcggtggcggccgcccgggcaggtacccatactgagaggaaacctataatgtcagtgatataattcatatatggttttcagaaaagactcctgaatgttagtaaacttttgttctttttgttcttccccgcgtactcaccacaggggagtaagttggtgggggggatgctgaagatgggacatggtttgagagcatcccataggagtgctgggctgtggcctataatacaccatgggccctgttcacactgcactgctcagcttatcacactagggtggcccatacaggggtccccaatgaggaagcatgacaagatggaccacaaaggcctgcagctgggatagtggctcccggctgtcaacttgtttgggaca

SEQ ID NO: 33126 - DNA, 408 bp, Homo sapiens
cgactcactatagggcgaattggagctccaccgcggtggcggccgcccgggcaggtacttccaaaccctcccgttctttcctttttgttttccccaattttaacataaggcaaaagcagtaattgagcaattctatcacctggattggcactccggggaacagtggagctgatcactaactgaattccccctttataatctgaataaattaccccagtatgaatttggactcccttcaaatttggacttgatctccctcaaaggcctaccctcccttctggcagcgggccatatacccctctaggaatcttttgtgggggctttccagggagtaaaaagaccatttgggtggaacataaatctactgcggtgctgcctgctgtggcgcgggacagctgttggattgtt

SEQ ID NO: 33127 - DNA, 220 bp, Homo sapiens
acgcgcgtaaacgactcactatagggcgaattggagctccaccgcggtggcggccgcccgggcaggtacttgtgcatgaataaatttattcttcttttctgttgcagatataaatatttctgattgtgccattttgattacccaactaggaaaagagacagtagagacagaagaattaacataggccttttgaaatggaacaccctgaaaatatcaaaaa

SEQ ID NO: 33128 - DNA, 509 bp, Homo sapiens
  misc_feature 218, 219, 248, 263: n = A,T,C or G
ctatagggcgaatcggagctccaccgcggtggcggccgaggtaccaaagagggcataataatcagtctcacagtagggttcaccatcctccaagtgaaaaacattgttccgaatgggctttccacaggctacacacacaaaacaggaaacatgccaagtttgtttcaacgcattgatgaacttctccaaggggatcttcctttggcattcgaccacannttcaggggcaaagaatttctcatagcacnagctcacaatacagnggctcctttctcctctacaaatccaatgtaggccattgtatttttgcagtgagcgcagttgaattcttctgggtgccaagatttccccagtgccactaagaatggtcctctgacagaagaaaaagaggccaactaagtttgagaataaaatttctagagttagcctggatatggacctcttttatgcaatgtccaaccaaataaatacttgctcaatttccttcttaaggactgaactcatgggtg

SEQ ID NO: 33129 - DNA, 590 bp, Homo sapiens
actatagggcgaattggagctccaccgcggtggcggccgaggtacagagaacagaaaacaaaacaaaaggatgatcaagcagaactttggtaaggaagggtgaagcagagatacttaactcagggtggggacaacagcaatgaccttgtttgaaatgcagctcctgtctctgggctcttgtctctgctggggcatcagttcctttacttcttagttaaagcagttatgtcgatggtgcaatgcttttttggtgcagtgatttttacacagctggtttatctccagtatggaagctctctgcttaatcatcttgatttttctgggcttgttcccactctgcagatgtaagcatgacacctgtatctctctccccaggctctgatctaggacgacagtttctatgatgtgcccatctagagaaatactcaaattgcaactttaggaagagaaaaagagggccctgcaaaaggcatctacaggccccatgtgctgatcacctttcttatttatgggtgaagtgagtcctcatccatttattgggcagttacaagcaaaggaattatatgactacgacaacacaccttgaggta

SEQ ID NO: 33130 - DNA, 526 bp, Homo sapiens
  misc_feature 184: n = A,T,C or G
ctcactatagggcgaattggagctccaccgcggtggcggccgcccgccaggtacttccaaaccctcctgttctttcctttttgttttccccaattttaacataaggcaaaagcagtaattgagcaattctatcacctggattggcactccggggaacagtggagctgatcactaactgaatccnctttataatctgaataaattaccccagtatgaatttggactcccttcaaatttagacttgatctccctcaaaggcccaccctcccttctggcagcgggccatatacccctctaggaatcttttgtgggggctttccagggagtaaaaagaccatttgggtggaacataaatctactgcggtgctgcctgctgtggcgcgggacagctgttggattgttgtaattggctgactccctgaagtggtggtattttctgtaggggttgttgtccttgaaaaccctgaggaacaaacagtttaactgggaatgccccagtttgttgggggggcctgaggctggcccc

SEQ ID NO: 33131 - DNA, 546 bp, Homo sapiens
ctcactatagggcgaattggagctccaccgcggtggcggccgaggtacatttggtggaactgagaaatggcataacaccaaatttaatatatgtcagatgttactatgattatcattcaatctcatagttttgtcatggcccaatttatcctcacttgtgcctcaacaaattgaactgtaacaaaggaatctctggtcctgggtaatggctgagcaccactgagcatttccattccagttggcttcttgggtttgctagctgcatcactagtcatcttaaataaatgaagttttaacatttccccagtgatttttttatctcacctttgaagatactatgttatgtgattaaataaagaacttgagaagaacaggtttcattaaacataaagtcaatgtagacgcaaattctctggatgggcaatacttatgttcacaggaaatgctttaaaatatgcagaagataattaaatggcaatggacaaagtgaaaaacttaaactttttttttttttggaagtatctggatgttccttagtcacttaaa

SEQ ID NO: 33132 - DNA, 545 bp, Homo sapiens
atacgactcactatagggcgaattggagctccaccgcggtggcggccgaggtactggactgagtagaaatcaattactttaatattggatgagagagtgattgattgaagatcaggtttttaacctctttttttgttctccttctcacagggagagtcccgtattctcagagtaaaagttgttctggaattgatctcgccaaaaaggacatctttggagccaggtatgctggctttgtttttatttctgtggacttctgaaaaattgacaagcagttttcaaattcaggcacgcatcagaatcacctggaggacttcttaagacaaagctggctgggccccacctgcagggattctgatttaggaagtgatgctggcccagctggttccaggagcacattttgcacagggcttctggacttaccatcacaacagtagttaacagcctgttcttcacatgggctaatttcatgagattagcttctggtgttgtattctcagtagaaaaatacagtgtgggactatggctctgcttattttaatact

SEQ ID NO: 33133 - DNA, 521 bp, Homo sapiens
gcgaattggagctccaccgcggtggcggccgaggtactcaaatttactacaaaattaataatagtaaatgtaaaatatgtatttatacagccttttgcagacttatgaactatctcaaattcacgaatcctattttttaaatacagttttaagtttcaaccacttgtatcaccaaattttgagacttaactcccatggttaagagatttccaagctgtgttcacacctgtagtcccagctacactgaaagctaaggcgggaggaccacatgagcccaggagttccagactagccttgctctatttaaagagcaagactccactgccaaaaaaaaggaaaaacaaagaagagaattccataaattacttggcttcttatattccatctcttcagtgaaacagtacctgcccgggcggccgctctagaactagtggatcccccgggctgcaggaattcgatatcaagcttatcgataccgtcgacctcgagggggggcccggtacccagcttttgttcccttt

SEQ ID NO: 33134 - DNA, 474 bp, Homo sapiens
  misc_feature 295, 464: n = A,T,C or G
ctcactatagggcgaattggagctccaccgcggtggcggccgaggtacctagccacattccctctagttctccacctattcagtgcatctcattaagccaccctcacaaatttccttttatgcttctcttttataatactatctctgcactgcctttttttttaaggcccagaaaacaggttctttgtgggtagacagttcctggtgcacacctttcattcagcactgtaaagatgcaaagtggcaactgagatattaggattcaaaacctcagcactctggatttttaccctgngcttggggaatcaaattttctttttatgaatttgctagctctgattcttctgtgacaccacagtagaaaatcctatcctaattcttaatggtattgttcagaatcctataacttccccttacccatctagtagtttagaataccataacattaaaattagtatgaattntgagtggaac

SEQ ID NO: 33135 - DNA, 531 bp, Homo sapiens
  misc_feature 465, 519: n = A,T,C or G
cactactatgggcgaattggagctccaccgcggtggcggccgaggtacgtccatcttccagctgcttgccagcaaagatcagtctctgctgatcaggaggaattccttccttatcctggatcttggcctttacattttctatcgtatccgagggttcaacctcgagggtgatggtcttcccgtaagttttcacgaaaatctgcattttggtggcggctccaccgcagatggcggatcgaaaagccccgcgtacattgctttagtgccctgtggttggtttacagtagttcccagaattacctaggccctagacaatccaaagacactgccctagagaaatgaaggcagtgcagggcccatcaccacacattggcatttagagaatatgtgtttcaattactgaggaaaaatcacttcggttacctctatgagctgccataggagcaaataaagtatcactggttntggcactacaggggatacaggaagtacctgcccgggcggccgaggtactttttntttttttttttt

SEQ ID NO: 33136 - DNA, 251 bp, Homo sapiens
gagctccaccgcggtggcggccgaggtacagatctcatcaggtatgagggcagtctctgacgcgaacgtctcttcctcgtggtttttattgtcagtattcacacgaagtttaagtctcctagtgggcacccagacgggattgacgatctcctggtaaaacacaagcataccctcttccccacgttataattgttccaggttcccaggtattggtttgggagtttttccatgacactggcttgccttcgttt

SEQ ID NO: 33137 - DNA, 427 bp, Homo sapiens
accgcggtggcggccgaggtacctgtcagtgttcaatatttaacaaactccagttaaacaggtaagaggtcagcagtagcttataggccttggttctattatccatgtgcccaactgcagccatcgtgggctggtgttaaaattttcctttcaattgtcatttttctaataattgcaatcagtgagaggagaagaaaaagttcaagggaatgacctgacctttcaccatcctacacaggagatgactgatgacatggattcatacactaatgtatatcggatattctccaaagaccctcaaaaatcacaagaagttttgaaaaattctgagatcataaactggaaacagaaactccaaatccaatgtaacaggtctgaagaaatgggcaagcagctgtgcttcttaaattgtgtcttcaactaacaa

SEQ ID NO: 33138 - DNA, 280 bp, Homo sapiens
attggagctccaccgcggtggcggccgcccgggcaggtactttttttttttttttttttttagcagtcaactcttgtttatcctgtcattttaattgtaatgatggccctgtgtgtttcggctaaaaatttgtggtatcagcatattaggatttgattatatatagttaaacttcaagtaaatactaaatttttatttaatagcatgaatcaaacttggatatcgcccaagccttatggtccagttggggccagctggtatggaaaatgcacaaacaaat

SEQ ID NO: 33139 - DNA, 379 bp, Homo sapiens
agggcgaattggagctccaccgcggtggcggccgaggacgcggggggcttggggaggagctaggtttgggcttggagttgggccctgaatggcgctttgctgtgaatctccgcggggaggctcttccaaccaggggctgagcttctgcgctgtggagaagccaggctcctgatgtcttattgggggccatatctagagtgatgccctagttcgcgtggctgaagatggcttgccaccctacctgctgattgcattctgactggatgggtcatcagttaaggaagttgaaacctaccaccggacacgtgctttaagatctttgagaaaagatgcacagaattcttcagattctagttttgagaagaatgtggaaaaaaaa

SEQ ID NO: 33140 - DNA, 394 bp, Homo sapiens
agggcgaattggagctccaccgcggtggcggccgccatcttgggtcatcgatgagcctcgccctgtgcctggtcccgcttgtgagggaaggacattagaaaatgaattgatgtgttccttaaaggatgggcaggaaaacagatcctgttgtggatatttatttgaacgggattacagatttgaaatgaagtcacaaagtgcactgtagcacagtggtcccaggcatgcatttggggccagagttcctggattgaaaggcgtctctattcaccagccatgtgcccttggggaaaagctcaatcctgctcatctgtaaaatgggggttgttgacaacaatgacagtgtgtggcaagtattgaataaatgcacaaagagcacttaaagcagtgcttg

SEQ ID NO: 33141 - DNA, 399 bp, Homo sapiens
ctactatagggcgaattggagctccaccgcggtggcggccgcccgggcaggtactctttctctatcacaattcccctgtctcgatgaattgactctgtctaggcaggggcaaggtgaaccccttaggcggtaacagaacactgcagaagagtgcagtggggcgcctcagcaagaggactaagtgtgctgccatggatttttctttagaggtatttatggaccttaaggcaggagcttaggatagtaaaaagagtttcggcatggcatttcagagatgtatataaattttagttacttgtaaaagttgaaagaggcctggaaccagactttagatactaggaaagtttaattacttctgaattcccagaaaaggagtttcgcctccgtctggcccgtttg

SEQ ID NO: 33142 - DNA, 397 bp, Homo sapiens
gactactatagggcgaattggagctccaccgcggtggcggccgaggtacgcggggacatcaatgcagagtccctctgtgaatttacaacacccaacacccatgagttcagtccttaagaaggaaaattgagcaagtatttaattggttggacattgcataaaagaggtccatatccaggctaactctagaaattttattctcaaacttagttggcctctttttcttctgtcagaggaccattcttagtggcactggggaaatcttggcacccagaagaattcaactgcgctcactgcaaaaatacaatggcctacattggatttgtagaggcgaaaggagccctgtattgtgagctgtgctatgagaaattctttgcccctgaatgtggtcgatgcc

SEQ ID NO: 33143 - DNA, 366 bp, Homo sapiens
tacactactatagggcgaattggagctccaccgcggtggcggccgaggtactttttttttttttttttttttttttggtggggggcaatatcaaatgaaagatgaggcaaataaaaatttcctcacttgtgatttcatgtcctgcaaaatgtcactgtttactttaacctaaagcccaaattactcatttcatatagtcatttttacttctatacattgcgtgttgactgacgtgcaatattagcttgctgaaaaagcctgcagaaaaagtattggcatgtgtgcgataactcctgtaatcattaaatactctgctcaagtcaaactcttaatttaacgcgtgtcggcctgatgagccatgctcac

SEQ ID NO: 33144 - DNA, 420 bp, Homo sapiens
agctccaccgcggtggcggccgcccgggcaggtacagagtgatgccaggcgttcatctcctcactgagctcctgctgagtgtttgcctggggccaggtcctccttccgggaagtcattttaactggaaagaacagggtgggggcggttggcaagggatcatagcatgagcgtttgagggctttattaggggcattgaggagcctctaaaggactctacatttaggaatgacagatttaaacaatttaacaaagccctaaaggtccctgccaggaaagaatgagccccatgtatcaccataagcaacttcttataaacataacccacccctgtcattccagcactttgggaggccaaggagggaggattgcttgaggccattagctcgggatcaacctggtcaacatggtgagaccccatt

SEQ ID NO: 33145 - DNA, 401 bp, Homo sapiens
ctactatagggcgaattggagctccaccgcggtggcggccgaggtacgcggggacatcaatgcagagtccctctgtgaatttacaacacccaacacccatgagttcagtccttaagaaggaagattgagcaagtatttaattggttggacattgcataaaagaggtccatatccaggctaactctagaaattttattctcaaacttagttggcccctttttcttctgtcagaggaccattcttagtggcactggggaaatcttggcacccagaagaattcaactgcgctcactgcaaaaatacaatggcctacattggatttgtagaggagaaaggagccctgtattgtgagctgtgctatgagaaattctttgcccctgaatgtggtcgatgccaaagga

SEQ ID NO: 33146 - DNA, 435 bp, Homo sapiens
actactatagggcgaattggagctccaccgcggtggcggccgaggtacgcgggggagtgccctttcttgaaggaatcccttaagtgcacgtctcccgttttcttttcacatcaatgcagagtccctctgtgaatttacaacacccaacacccatgagttcagtccttaagaaggaaaattgagcaagtatttaattggttggacattgcataaaagaggtccatatccaggctaactctagaaattttattctcaaacttagttggcctcttttttttctgtcagaggaccattcttagtggcactggggaaatcttggcacccagaagaattcaactgcgctcactgcaaaaatacaatggcctacattggatttgtagaggagaaaggagccctgtattgtgagccgtgctatgagaaattctttgcccctga

SEQ ID NO: 33147 - DNA, 443 bp, Homo sapiens
tacgactcactatagggcgaattggagctccaccgcggtggcggccgaggtaccgcacacaattgtatgcgctgcactttcatctgactggaagcgcagtgggcttacaccagcatcaacacaaacacgtgagcagtgccttgcactacaacagacacgatatccctaggggacagcactgttttcagccccattataatctcatgggactactgttacagatgaggtccaccattgaccaaaacatgtggagcacggcaattaattctggatttggatggggacacaaaataagcacagctctggcaggtctaatcaagattaagagagaaaagcaactaaaacatctgagaaaacagatacagagggcataacaccacacagaaaatactacatacagctgagctataatttttaattgacttgctggaaattactaaatt

SEQ ID NO: 33148 - DNA, 444 bp, Homo sapiens
tacgactactatagggcgaattggagctccaccgcggtggcggccgaggtaccagttgtaaaattaccaggaaccgccatgcctcaagatcgccctgttttctggcttcatcaatgactgcatgcagtgcaccaccctgtccactacgtgatgctgtaggattaagtctcacagtgggcggctgaggatacagcgccgcgtcctgtgttgctggtgaattagacgccatcgctgtgggttgctggtatggtgccgtgctatttggcacaggacacaccgcttgaggtctgtattgaacctctgaaggaggccgatactgaagctcggttggcagccggtattgataaactaccagcggttgggtcttattttctaccggctgatattgtggatactgtatctgagttggcattgccgggatagagactctgtccctttctactt

SEQ ID NO: 33149 - DNA, 448 bp, Homo sapiens
tacgactactatagggcgaattggagctccaccgcggtggcggccgaggtaccaaggcccaatcaccccaaacagtgacaggaacataatttcctgttgggaccagttctcggaattttgcaccaacatgatcccatagttccacatctaacgttcccttttcaggaaaccaaggacagtgttcttccactgccctgaatagggtgaccatattttccatgggaacccgaactcccccattttaacaggaatttaatatagcagagataagcataatgtttagactctgcgtgacccatagttaccccggagaatacacagacaactcaccaatcgttggggagccaaacaagcatttctgtggactggaccgatgaacatttctccgcacctaccaaagggaatcgggttcccacatgcacttaggaaaaagaaaaccacgttgggt

SEQ ID NO: 33150 - DNA, 522 bp, Homo sapiens
  misc_feature 182: n = A,T,C or G
tatagggcgaattggagctccaccgcggtggcggccgaggtacttttttttttttttttttttgtaaatctggaaccaaggattttaataccaatgataatataatgtttgcccaacattaagagtcaaatcaaatcatagtttatctattacggctctaaaccaattacaaaatattacanaaaaataataaccgcttttctgtaaaatatctgtattggctgggcatggtggttcacgcctataatcctggcactttcagaggccaaggtgagtgaatcgcttgagtccaggagttcaagacaagcctacgcaacgtagcaaaactccacctctacaaaaaataccaaaattagccaggcatggtgatgtgcacctgtagtcccagctacttaagaggctgaggcgggaggatcgtttgagccctggaggcagaggctgcagtgagccaagatcataccagcctggcctcaaaaaaaaaaaaaatctttattagacactgggcatcacagggtagcagca

SEQ ID NO: 33151 - DNA, 449 bp, Homo sapiens
gcgtaatacgactactatagggcgaattggagctccaccgcggtggcggccgaggtacttccaaaccctcctgttctttcctttttgttttccccaattttaacataaggcaaaagcagtaattgagcaattctatcacctggattggcactccggggaacagtggagctgatcactaactgaatccccctttataatctgaataaattaccccagtatgaatttggactcccttcaaatttagacttgatctccctcaaaggcctaccctcccttctggcagcgggccatatacccctctaggaatcttttgtgggggctttccagggagtaaaaagaccatttgggtggaacataaatctactgcggtgctgcctgctgtggcgcgagacagctgttggattgttgtaattggctgactccctgaagtggtggtattttctgtaggg

SEQ ID NO: 33152 - DNA, 499 bp, Homo sapiens
  misc_feature 408: n = A,T,C or G
gcgaattggagctccaccgcggtggcggccgcccgggcaggtaccctggtcattgactggcttgttcattctccccatggactctgacttcttgagggcagcgtgtttctgctacaatagggacaatgtaagggaccagagcacacagtaactaatgtcttacaggatctcccccaagctcatggctttgagcatcatccctattctgacaactttcaagtctgtcatttcagttcaggctctgccctgagctgtggcggtcgtaacacaaacatccacctttctcacccagcatctccacttggatgtttgacaggtcaaacttaatgtgcttctgaaccaaactcctggcttcctctccaccctccacccccacccaaatctgcttctcctatatctttcccattntggttagcagtaactccatccttcctgttgcttggaccaagccttgagtcatccttgactcctctctctttcacacttgacatgaaatcct

SEQ ID NO: 33153 - DNA, 548 bp, Homo sapiens
  misc_feature 191, 268, 296, 513: n = A,T,C or G
ctactatagggcgaattggagctccaccgcggtggcggccgaggtacgaaaaaatcaggctactaagcccactgttaatatagacgcagaccaattgttaggaacaggtccaaattggagcaccattaaccaacaatcagtgatgcagaatgaggctattgaacaagtaagggctatttgcctaggcctgnggaaaaattcaggacccaggaacagctttccctattaattcaattagacaaggctctaaagagccatatcctgactntgtggcaagattacaagatgctgctcanaagtctattacagatgacaatgcccgaaaagttattgtagaattaatggcctatgaaaatgcaaatccagaatgtcagtcggccataaagccattaaaaggaaaagttccagcaggagttgatgtaattacagaatatgtgaaggcttgtgatgggattggaggagctatgcataaggcaatgctaatggctcaagcaatgagggggctcactctangaggacaagttagaacatttgggaaaaaatgttat

SEQ ID NO: 33154 - DNA, 556 bp, Homo sapiens
  misc_feature 52, 243, 253, 386: n = A,T,C or G
ctactatagggcgaattggagctccaccgcggtggcggccgaggtacgcggngagaaatagcaagtgccgagaagctggcatcagaaaaacagaggggagatttgtgtggctgcagccgagggagaccaggaagatctgcatggtgggaaggacctgatgatacagaggtctgtaggccatggaatgggtttggaattttattcaaagagctatgggaagtgactagaaggtttaaagttggngaagaggttntgtgtttctgttatatttgtgttttatacaaattactctggttgctgtgttgataggacagcagaagggtaggagcagggacaccagttaagttattgcaatggttaaggtgagaggtggtggctgggcctangcctttttggagtgaacaagctatttgcttggcttccatgatccttctccctccactggaatggaaggtacctgcccgggcggccgaggtacttacaaagttacaaccatttgcttccttaacattttccatgttaagttcatacatgtagatatgatcaagattatcat

SEQ ID NO: 33155 - DNA, 424 bp, Homo sapiens
  misc_feature 411: n = A,T,C or G
tatacgactcactatagggcgaattggagctccaccgcggtggcggccgaggtacttcgaagtttatccagaagcaaatttaactatgtcttaaacttgtttcccacgctgatgaagctaagttttcctgctttttgtttagtatctttgttgttatttgtggatgattcaaataattcccgttaaacttatctctggattcacatattaaggattcaagagacatatgtaaagcatcattatttttctccacaaactgggtctgaaaaataaatcaaacaggaatgtttctgtccatcttgtgataacatcacttaacatggctctgtccaaaggaactttctgtgatgacagaaatgttctgtatctgcactgtccaacgccgtcaccactagtcagtgtggacactgngcacctgaagtgt

SEQ ID NO: 33156 - DNA, 612 bp, Homo sapiens
ctactatagggcgaattggagctccaccgcggtggcggccgcccggcaggtacaggttgctgtaggagcccttaatctatgagatcttgacagattgcttgctttcttctttccaccatgggagaatgcaacaaggtcttcaccagatggccgaacagatccaagtgtcatgaccttggactgtcatcctccagaaccataagccaaataaatttcttttcttcataaatttcccagtctgtggtatcttgaaatcaactgaaatcagtcactaaggaacaaaattctccagagaaactgtttcttccttgaatctgaatgcctgactgtcaatcatttagcactgaaacaaggagagcctctctgaatgttgagcagccaagagagctgcccacactggacatcaatcagcagcagggcctgtcctcagggtgactccgtttaccagttctggaatgactgaagggccttgcatcagcagacaaatctgattagtggtggtagccatccaggctgacttttatgtctgctcagtcattggtacctcggccgctctagaactagtggatcccccgggctgcaggaattcgatatcaagcttatcgataccgt

SEQ ID NO: 33157 - DNA, 484 bp, Homo sapiens
  misc_feature 416: n = A,T,C or G
gctccaccgcggtggcggccgaggtacaaagtccctgaggcaaaagcatgcttgctgtgttctaggaaaagcaaggaagacagcatgtctatagcagtgggaggtggaaggataataaacagtaggtgaggttagaggggaccaaatcatgtattttcatccagaggttcccaaccttggctgcacattagatttattctaaggagcttttaaaaaataccaatgactgggtcccagcctagagtgattaaatcagaatctctggaggtagacttgagaatctgatgtttgcaagtttcctaggcaagtcaaggctgaggaagactgctgcaggccattgtaagagccaggcgttgatctcattcaacctttccctcagctcttctagagacagccagcattctcttatggcacanatacagcctttcaccctcacagaaagacacaggacaacaaattcaataaattaattcactggcatgga

SEQ ID NO: 33158 - DNA, 484 bp, Homo sapiens
actcactatagggcgaattggagctccaccgcggtggcggccgcccgggcaggtactctttctcttcatttctcagccggctgacacttacagaaaatagaaagaacgtgcgttgaaatattaggggcaggttcccccaatatctggcgcccaacgtggttttctttttcctaagtgcatgtgggaacccgattccctttggtaggtgcggagaaatgttcatcggtccagtccacagaaatgcttgtttggctccccaacgattggtgagttgtctgtgtattctccggggtaactatgggtcacgcagagtctaaacattatgcttatctctgctatattaaattcctgttaaaatgggggagttcgggttcccatggaaaatatggtcaccctattcagggcagtggaagaacactgtccttggtttcctgaaaagggaacgttagatgtggaactatgggatcatgttggtgcaaaattc

SEQ ID NO: 33159 - DNA, 446 bp, Homo sapiens
ttggagctccaccgcggtggcggccgaggtactttttttttttttttttttttttgcaatggtcatgtttcatgttcttaatcaagaagatcaaaataaagcgattctttcagaatgacagataaaatgatagaggtttgaaggtaaatgtaacacagtaactttggaacccagagcccctaggaactcataggatatttggccactgttacacatgacaaacagaaacatgacccccttttaaatcacatgactgaaatttgaatttcagtcttggttttcattacagtttttaaaaagttgtcaaatactttaaatgttggttttgcagaaatatagggctaaacaaccagcatattttttgtgtgcttttgcaataatcagaaataaaattggttttcttaaggtaagtaacaggtcgtttttttggcttagccaaagttccc

SEQ ID NO: 33160 - DNA, 482 bp, Homo sapiens
actactatagggcgaattggagctccaccgcggtggcggccgaggtactattattcccatttacagataagaaaactaaaacacagcaattctcaaatgtttgtttccttactctctggtttcctttgcttgaacaaaaaagaaaaaagaaaaaggaaaaaaatccacttcatttaggaagtctttcccacgtaatacagacccaaattatttctttgagcttccctccaacattcctccactacaatgtatgattcagaaggggaaaagggctgtgatactacaaataaatttaaaaaagcatcaccaaagaaaactagacaaagaacacaaaaaggctccaacatttgaacgtgctcaaacaaataactggaaaagatttttctgaatggtgaatattgtgccaggtattgtcaagaggtcaggaaatggccactcccattcactattggaggaagtgaaaaattaacaccaactttcta

SEQ ID NO: 33161 - DNA, 449 bp, Homo sapiens
tactatagggcgaattggagctccaccgcggtggcggccgaggtaccgactcctcagaaactggcatgccaaatcaaaatgggtctggttcaatcctccctaatggcaatgtaaacccctctaactaatcccacttctcctaattatctttttctccttacgaacctaaaaatctcaccatttctattagcctgaaaataacatccctctgttcttctcttcctccttcagcactggatctcacttacaataggttttatttaataattatcttccttacactttctgtctcaccagtttccccttaaactgatttacctgctacacaaaattattcttattgggcttatgtgccttttcctccacttattcgacctctcacctggatggatgctcctgcagaaatctatactaacgatagtgtgtggatgcctggaactacagatgac

SEQ ID NO: 33162 - DNA, 444 bp, Homo sapiens; identical to SEQ ID NO: 33083

SEQ ID NO: 33163 - DNA, 448 bp, Homo sapiens
ctactatagggcgaattggagctccaccgcggtggcggccgaggtacatggtttgccaaccctgtattatgtttatagcatttgttttacaaaatatacctgattctgaaaaaatgaaaaatggttactataggctagatagtaggtagttaagtcctataactactagtaggtagttataggacttaattaacagatagatatgatgtgacaattcagtttaagtgcaactttcagtttctatcttaactataacttgagagattaatttagaattacaaatgtgtgtatatatatatatgagcatatgtatacataacatatttacacacaaggcacacatactatgagcaccctgcagtttgtaggcatttttacatgcgaatgttattggaacagataggcatcacgggaagaaattttgcctctacctgctctcaccatgtca

SEQ ID NO: 33164 - DNA, 444 bp, Homo sapiens
tatagggcgaattggagctccaccgcggtggcggccgaggtacttaatcctggttggtttacccattctaaattatttatgtgagatagctatctatttggaaaaaagtaaagtgaaagtcttacctcaatccacactcaaaaatagtttactatatgacagatctatggcaggcagatttgatggctcaatgaactccaccctcccagtgttcacacctttatgtagttcccacttacagggagccaaaggtccgtgggacgtgaccaactcagcattccactggaggctatatgatcaaacagtaaactgtttatcatgaatgcaggatgtgagcaaactcaccattgctcctgccgacagaaggttttctggaggcaatcactccctggtgctgaggttatctactgcaacatttagagaatgtagtcttgcaagcctcct

SEQ ID NO: 33165 - DNA, 439 bp, Homo sapiens
tatagggcgaattggagctccaccgcggtggcggccgaggtacgcggggagtcacagaggaagccatttccagagaggaacaaccgtgtagactgctttcctgggagtcaagttaaaacttctctcctgtgaccttgtcacccggcagtggaaagttacccttggctgcagccacgacttccgcatactcttcagaacttgctctgcccttgagttttccagctttcctttaatgcactaaacctttaatattgtattctcctaaatgagacgtctcgcatttgagcaggtaacactcgggagagtcccgtattctcagagtaaaggttgtttctggaattgatctcgccaaaaaggacatctttggagccagattggataaccgagccgcgactccacttgaacatctgagcagttggcccgcgtgggaaacagcaat

SEQ ID NO: 33166 - DNA, 482 bp, Homo sapiens
gactcactatagggcgaattggagctccaccgcggtggcggccgcccgggcaggtaccagttgtaaaattaccaggaaccgccatgcctcaagatcgccctgttttctggcttcatcaatgactgcatgcagtgcaccaccctgtccactacgtgatgctgtaggattaagtctcacagtgggcggctgaggatacagcgccgcgtcctgtgttgctggtgaattagacgccatcgctgtgggttgctggtatggtgccgtgctatttggcacaggacacaccgcttgaggtctgtattgaacctctgaaggaggccgatactgaagctcggttggcagccggtattgataaactaccagcggttgggtcttattttctaccggctgatattgtggatactgtatctgagttggcattgccgggatagagactctgtccctttctacttgattttctcttggggtttgtgcttgtctaacct

SEQ ID NO: 33167 - DNA, 444 bp, Homo sapiens
actcacttagggcgaattggagctccaccgcggtggcggccgcccgggcaggtacctctccaattcgtcatctgggtggcctgtctcagcccagcttccaagcttgcttttattggtggcatagagcttcaggatatcttccgtaacaaagaggagtgctcccgaatgctctaccttcactgaatttgaaaatgcagctgctcttatcccctcacctaaactttcttgaaaacctgagagaaagccaagaaagcaatattgtcagacatgcagttctctacttacactgctcacacctgattaatgcctcagtgcctagtagttctcaaagttgagtttacaccacaatcagctatagtccttggcacaccacagattgctccacctctcccagctctgagaatttcaaggaatttacatttctaatgagctctcaagtgatgc

SEQ ID NO: 33168 - DNA, 467 bp, Homo sapiens
ggagctccaccgcggtggcggccgcccgggcaggtactatagattatttgtcttgaagaagagctttgatatgtttcaaaattcgacgttggctttggaaggaaactgtaaatttacagatctttgtccttccccacaaagagccttaatctcacaggttggattatgtggaactcactgctatttttcagttctcctttaagtgactaaggaacatccagatacttccaaaaaaaaaaaaaaaaagtctaagtttttcactttgtccattgccatttaattatcttctgcatattttaaagcatttcctgtgaacataagtattgcccatccagaaaatttgcgtctacattgattttatgtttaatgaaacctgttcttctcaagttctttatttaatcacataacatagtattctttaaaggtgagataaaaaaatcactggagaaatgttaaaacttcattta

SEQ ID NO: 33169 - DNA, 448 bp, Homo sapiens
atacgactactatagggcgaattggagctccaccgcggtggcggccgaggtacttttttttttttttttcgagtgtgtgtgagagacagacagggtcttatgttgtccaggctggctcagactcctaggattaaggatcttcccatctcagcttccctagtagctgtgattctttatctattctttaaacgcaacaaacgttggctgaacatctacaatgtggcaggagacatgggaaaaaacaaagatgagtaagataaggttccacacccaaggagcttacaatgcagaggaagaaacagacatgttatgtgatggtgctatttgttagagagcccctaatccagctccctcagtctgacttaggtgtccacttggaagctgaacatacgaatggataacagccagacactatataacagaaccatggcttaaacaaccgctgctg

SEQ ID NO: 33170 - DNA, 467 bp, Homo sapiens
tggagctccaccgcggtggcggccgcccgggaggtacttccaaccctcctgttctttcctttttgttttccccaattttaacataaggcaaaagcggtaattgagcaattctatcacctggattggcactccggggaacagtggagctgatcactaactgaattccccctttataatctgaataaattaccccagtatgaatttggactcccttcaaatttagacttgatctccctcaaaggcctaccctcccttctggcagcgggccatatacccctctaggaatcttttgtgggggctttccagggagtaaaaagaccatttgggtggaacataaatctactgcggtgctgcctgctgtggcgcgggacagctgttggattgttgtaattggctgactccctgaagtggtggtattttctgtaggggttgttgtccttgaaaaccctgaggaacaaacagtttaa

SEQ ID NO: 33171 - DNA, 451 bp, Homo sapiens
tacgactactatagggcgaattggagctccaccgcggtggcggccgaggtaccttccattccagtggagggagaaggatcatggaagccaagcaaatagcttgttcactccaaaaaggcctaggcccagccaccacctctcaccttaaccattgcaataacttaactggtgtccctgctcctacccttctgctgtcctatcaacacagcaaccagagtaatttgtataaaacacaaatataacagaaacacaaaacctcttccccaactttaaaccttctagtcacttcccatagctctttgaataaaattccaaacccattcccatggcctacagacctctgtatcatcaggtccttcccaccatgcagatcttcctggtctccctcggctgcagccacacaaatctcccctctgtttttctgatgccagcttctcggcacttgctattt

SEQ ID NO: 33172 - DNA, 451 bp, Homo sapiens
  misc_feature 201: n = A,T,C or G
actactatagggcgaattggagctccaccgcggtggcggccgaggtacatctctagatgatcacgaatgtcaaatatcacactacactgtgatatggggattccccttgggggttttcatgtgtatagggtgcctgcggctacactaaacatcttaaagctaccacaatgttcacttcatatttttgctttttataggctntcttggtctcctcctatgttcccatcattttcttgctttgaatctgtaagaatcgagttgaatcttctccattttaaattttccataggctgagaaactgtttagccaagtttggataaaattgtatccaaagtaagagtatacaagctatgggcaagtccaaaatcaagctgttcacaggaccatgttctctctaaaggttctaggagagaatccctcatttccttccagcttctgggtggctgctggc

SEQ ID NO: 33173 - DNA, 492 bp, Homo sapiens
actactatagggcgaattggagctccaccgcggtggcggccgaggtacgcggggggtgacacacacacacacacacagcacctgcacgcagatgcacacatctctagtcaaatgaggctctcagctttttgataggggctttttgatacgtgtataaccaatactttattctcactgtagtcaaggactcattgcaattcagaaatgagaagctgatccggaactccactacagctcaaagaaattctcgaatgttctcacctattaacagttattaaaatggaagaagctggggatgaaattgtgagcaatgccatctcctacgctctatacaaagccttcagcaccagtgagcaagacaaggataactggaatgggcagctgaagcttctgctggagtggaaccagctggacttagccaatgatgagattttcaccaatgaccgccgatgggaggtaagcacgaagctctcctgggttattccagtgttg

SEQ ID NO: 33174 - DNA, 434 bp, Homo sapiens
tggagctccaccgcggtggcggccgaggtacatttaatctatagccccacacagataaatagttagaaatggagattactcatcttgtcagataattatggatattattctttgatactaaatttgacaagggaatgcacaatatgggtttgaaatcaagtcaaagaacactttgtacgcggggattccaggctcttctgtgcctgtgggactacattctctgtgccgggcttagagaacacgaagagggagccatctgccacactctggaggctgaagcctgcaccagtgctgctcgcctcactgtggtaggtggtggtgatgggaactgcagatcggccagagtggtagaaaagttgctgcagggtttttctggctttgcctgcccagctgctccatgcctggctagaggagaaggaggagccacatgtgga

SEQ ID NO: 33175 - DNA, 428 bp, Homo sapiens
gagctccaccgcggtggcggccgaggtactatagattatttgtcttgaagaagagctttgatatgtttcaaaattcgacgttggctttggaaggaaactgtaaatttacagatctttgtccttccccacaaagagccttaatctcacaggttggattatgtggaactcactgctatttttcagttctcctttaagtgactaaggaacatccagatacttccaaaaaaaaaaaagtctaagtttttcactttgtccattgccatttaattatcttctgcatattttaaagcatttcctgtgaacataagtattgcccatccagaaaatttgcgtctacattgattttatgtttaatgaaacctgttcttctcaagttctttatttaatcacataacatagtatcttcaaaggtgagataaaaaaatcac

SEQ ID NO: 33176 - DNA, 409 bp, Homo sapiens
cgactactatagggcgaattggagctccaccgcggtggcggccgcccgggcaggtacttcatcgcgtttggagcgatgtgtccattgataggcggttagtaaatgtttgaaaaattggtttatgttatttactcttctttcccttttttcattcttttcaatttctttgcaccctttccccttctttcctttttaatgaaagttttagtaagcaaaattattagcatacccaacaatggtttgctttccctccaacctgttggtagtgagtgagtagttaattcacattttattccataaaacgttttactttttctccagagtaattaagtagaaaatatggctcttggccaggcacggtggctcttgcctgtaatctctgcacgttgggaggctgaggtgggtggat

SEQ ID NO: 33177 - DNA, 441 bp, Homo sapiens
tacgactactatagggcgaattggagctccaccgcggtggcggccgcccgggcaggtacgcggggacacatcaatgcagagtccctctgtgaatttacaacacccaacacccatgagttcagtccttaagaaggaaaattgagcaagtatttaattggttggacattgcataaaagaggtccatatccaggctaactctagaaattttattctcaaacttagttggcctctttttcttctgtcagaggaccattcttagtggcactggggaaatcttggcacccagaagaattcaactgcgctcactgcaaaaatacaatggcctacattggatttgtagaggagaaaggagccctgtattgtgagctgtgctatgagaaattctttgcccctgaatgtggtcgatgccaaaggaagatccttggagaagtcatcaatgcg

SEQ ID NO: 33178 - DNA, 460 bp, Homo sapiens
ggcggccgaggtacgtttgaaggtgtctacaaggcaccaccttagacctttctgaattcttaaaaggttgtgcagtttcaccctgggtttgatttttgctctgaaaccatttcttggctcaagaattgtttgatgtgtggagagattgggaatgagaaacaggtttatatttaacagtttattctttagctcatctctctctgctcacatcttataggcagtgagcagaacccaggtgtcactttaagtggctgcctggaaatctctttagatagatcattgagttcattaggtgcatttccgcttcccactttactgtagatgtcagtgttgctaaactctctgtcactgcacaacagggtcctcctttcctctagcttccaggaacatttccctcacttttctttaagccctcactgacaaccttcttaaaacaacagtcatttcattatctcgcact

SEQ ID NO: 33179 - DNA, 441 bp, Homo sapiens
tatagggcgaattgttagctccaccgcggtggcggccgcccgggcaggcaccatatcagtggagagctgcagcaaggtggcccctacggccacgcaccagcctgcacattacctctccatactgcagccctttatatggaaaattcctacatcactttgctgtgtgtgtttacacaggtggattttgctttacttgcactgacagcacacaggagggcagcacacaccccaacccacatcaactgccattaaagaaaagaaatttcagcccataatttcatgtccagcaaaattaggcatcataagtgaaggagaaataagatccttttcagacaagcaaatgctgagggaattcaatatcaccagatctaccttacaagagctcctgaaggaagcactaaatatggaaagaaaaaaccatcaccagccactacaaaaatg

SEQ ID NO: 33180 - DNA, 455 bp, Homo sapiens
tatacactactatagggcgaattggagctccaccgcggtggcggccgcccgggcaggtacgaaaaaatcaggctactaagcccactgttaatatagacgcagaccaattgttaggaacaggtccaaattggagcaccattaaccaacaatcagtgatgcagaatgaggctattgaacaagtaagggctatttgcctcagggcctggggaaaaattcaggatccaggaacagctttccctattaattcaattagacaaggctctaaagagccatatcctgactttgtggcaagattacaagatgctgctcaaaagtctattacagatgacaatgcccgaaaagttattgtagaattaatggcctatgaaaatgcaaatccagaatgtcagtcggccataaagccattaaaaggaaaagttccagcaggagttgatgtaattacagaatatgtgaag

SEQ ID NO: 33181 - DNA, 479 bp, Homo sapiens
gcgaattggagctccaccgcggtggcggccgcccgggcaggtacaagttcagagacattcagttgcaaagacatttaagcatattccctctgcttatgggaacttttctaaaaggtttgtaagaggaaacggcaccgcggagggacaggagtggaaatgtatctgtctggttccctcctgactcttgcttcccattggtcaaattttattccacagagatctaatgcttctatacatttggcaacttggtagctactcaagaagccatttcccaagccctgttttgtggcatttcatctaagaccagaagtggaggggagattcagcaggtcagactaccaaccaagagagaaggaggcagctgagggaatgtagaaagcatacaaaaaaaaaaaaaaaaaaaaccttacattccataccacacagaaaaagcgttgcgtgcaacttaacacttttttgggggaaaaaattaattaaaa

SEQ ID NO: 33182 - DNA, 526 bp, Homo sapiens
  misc_feature 498: n = A,T,C or G
gctccaccgcggtggcggccgaggtactgggctctttctttattgctttctctagcattctgcattctggaactttccctacctagctttggcgaacatttgagttttcatgcccaactatgtcccccaggcaactgatatgcagtttagctcttcactgcctttcagcattcaggagggtaggctgaagctgtaggtaggttcagtctttctgccccggagctcagaggaatggggcgagtaaggccaccagcattccctggctccctggctcctttggcctggtcctcatggggctgcagtggcagcaggccagacactgatttgtgtccccactgttgaaaacagaatgtgtgacattcttctgaatgctcacaatagtggtaaatcttgatctttcaagatgtttaaaaaaaaaacaccggaaaccaccttgatccaaatgtgaatacatatcaacaagctggataataccacttgaggattaagaatgaagtnttttttgcaccaagttttatatatcatc

SEQ ID NO: 33183 - DNA, 490 bp, Homo sapiens
ggcgaattggagctccaccgcggtggcggccgaggtacgaaaaaatcaggctactaagcccactgttaatatagacgcagaccaattgttaggaacaggtccaaattggagcaccattaaccaacaatcagtgatgcagaatgaggctattgaacaagtaagggctatttgcctcagggcctggggaaaaattcaggacccaggaacagctttccctattaattcaattagacaaggctctaaagagccatatcctgactttgtggcaagattacaagatgctgctcaaaagtctattacagatgacaatgcccgaaaagttattgtagaattaatggcctatgaaaatgcaaatccagaatgtcagtcggccataaagccattaaaaggaaaagttccagcaggagttgatgtaattacagaatatgtgaaggcttgtgatgggattggaggagctatgcataaggcaatgctaatggctcaagcaatg

SEQ ID NO: 33184 - DNA, 570 bp, Homo sapiens
gagctccaccgcggtggcggccgaggtacaggtgacccaagaagagtgattccctgttgcttaaagtgtgccacttttgctgaaatacttaccttactaacaagaatatctgtagcttcaaaatgtcttccaaacattttgggtgactcaccagggataggttctatttttacacaaacttcttgtccttttttgcaacatccacttgtttatggtttatttcaatacttgttactattccgatgtcaacaaactataaaataagaacaaattaaaatgcatgcagaagaattcatgccaatcacaggcgccatggctggatagctgaagtaagaactagagcaaaagcctgttttaaaagtcatggcagtgcgatcctttcatcactcacggtgtaacattttggtaaactaggctggcaccaccaacaccctattcccttcatgatggttgtaagaatgacaggagataatgtgctttgcaaaacattccaagtgccctgttgacccaatgtcatttcctatttttgctctaccatttcacgtgacaggtgccgtaataggagggatc

SEQ ID NO: 33185 - DNA, 513 bp, Homo sapiens
tggcggccgcccgggcaggtatcattagtctgctcaggctcggcagcagagaggtttatgagtgtcccaggaggcaagtcaccatgccagaaaccccccagcatccctcacagacaaagatctgaaactgctctcaagtcagattctagtcttgcctaccccttggtagaagcagagaacagacctgggcagtcacaggcaggcttgtgaaggaagaattaaagtgggctgggagtgagggtcctggttttgcctctagcttgctgtgtgacctagggaaaatcacagaacctctctggacctccacttactcctcccaaatgagcatgctgcaataaatgattccaagggcccttcagctctgactgtgattcttggacacattgagagcccacgcctgcaaagcaggtggagagtgccttcctcaacaggtggcaagaggaggaatggagacagggacacttagacaacctctctgtgctattcctcaactttccggaaataaacaaacct

SEQ ID NO: 33186 - DNA, 520 bp, Homo sapiens
  misc_feature 383: n = A,T,C or G
atacgactcactatagggcgaattggagctccaccgcggtggcggccgaggtacaaagtccctgaggcaaaagcatgcttgctgtgttctaggaaaagcaaggaagacagcatgtctatagcagtgggaggtggaaggataataaacagtaggtgaggttagaggggaccaaatcatgtattttccatccagaggttcccaaccttggctgcacattagatttattctaaggagcttttaaaaaataccaatgactgggtcccagcctagagtgattaaatcagaatctctggaggtagacttgagaatctgatgtttgcaagtttcctaggcaagtcaaggctgaggaagactgctgcaggccattgtaagagccaggcgtngatctcattcaacctttccctcagctcttctagagacagccagcattctcttatggcacaaatacagcctttcaccctcacagaaagacacaggacaacaaattcaataaattaattcactggcatggatgattttc

SEQ ID NO: 33187 - DNA, 360 bp, Homo sapiens
tggagctccttcgcggtggcggccgaggtacaaggttgcatggaaaagacacactagcgtaagacatggactgtggccctgagtgacgtgcagccggtttaggcgaattaagatttacatacttgaaaagggacaaacaagtctggacgtggtgacttatacctgtaattccaacactgtgggaggtggaggcaggaggatcccttgaggccaggagtttgcaaccagcctgggcaacatgggaaaacccctgtctttacaaaaattaaaaaaaaattagccatgtgtggctgaatgcccattgtcccagctactcacaagggctgaggtgggagaattgcttgagcccaggagatccag

SEQ ID NO: 33188 - DNA, 415 bp, Homo sapiens
actactactatagggcgaattggagctccaccgcggtggcggccgcccgggcaggtaccatccacgtcactgggcacctggccgaacatggccaggtagggctcgtagatgaccgaacggaatatccacctccagcgctgctcattctgcctaaggatcccttgcctggccacgccaaaggccaccatccacaccgcaaagaggaacaggaagaagaacacatcgatcagcatcctctgcagcattataatcttgggtcctaagtttctgcttacagaaaaaatgtggatcaatcttagagtgaaaataatgtagtccagacagaaaatgactcgtccagaatacaaagagcttttattagaagagtggagccgaaatacaattcctgctatgaagtaaaaaagccccaacgtgt

SEQ ID NO: 33189 - DNA, 446 bp, Homo sapiens
tacgactactatagggcgaattggagctccaccgcggtggcggccgcccgggcaggacgcggggctttcttgaaggaatcccttaagtgcacgtctcccgttttcttttcacatcaatgcagagtccctctgtgaatttacaacacccaacacccatgagttcagtccttaagaaggaaaattgagcaagtatttaattggttggacattgcataaaagaggtccatatccaggctaactctagaaattttattctcaaacttagttggcctctttttcttctgtcagaagaccattcttagtggcactggggaaatcttggcacccagaagaattcaactgcgctcactgcaaaaatacaatggcctacattggatttgtagaggagaaaggagccctgtattgtgagctgtgctatgagaaattctttgcccctgaatgtggtc

SEQ ID NO: 33190 - DNA, 441 bp, Homo sapiens
tatagggcgaattgttagctccaccgcggtggcggccgaggtactccctaatgaatggttatgcaggcaggagaacttctcaggaagagaaaaggagaagactaactctacagagatttttgaaagactccgtgggatctcagcaatttgttaacactgctagggcccttcactgcatagggaggcatatggactgccatgggtctccaggctcatgttccaagcaagaatagggtaagtaactgtgaattaccctacaagcagtaataagtttattataataatatttttatacatttttggatgcacccaacccactctaaagaatgtcagtgactttatacaaaagaggaagcatctagattggcattgtgaacataatgcataggggcgcggcgggagctctagagcctagtggttaaaaccgtggcctctggaata

SEQ ID NO: 33191 - DNA, 438 bp, Homo sapiens
tactatcgggcgatttgtagctccaccgcggtggcggccgaggtacaatcacagcagagttaatggtaggttggttccacttcatcagaggttctggaggaggaaactaagatcttccctgaaaggcaagacctggcatcaggggctactgtgggcactttcctttgaattgcatttatctgccaggaagatgatatcctttattgttttacatgaaagcatttgaaaattctaaaaactgaccatgcctgccttggtcagttcaggttgtaataacaaagtgccatagactggatggctgacacatttatttttcacagttctggaggggagaagtctgagatcatggtgccagcatgggcaggttttggtgaggaacctcctccaactgtctactgctggctctcctatcctcacaaggtaggaagaaaagccagc

SEQ ID NO: 33192 - DNA, 436 bp, Homo sapiens
tatagggcgatttggagctacaccgcggtggcggccgcccgggttggtaccagttgtattattaccaggatttgccatgcctcaagatcgccctgttttctggcttcatcaatgactgcatgcagtgcaccaccctgtccactacgtgatgctgtaggattaagtctcacagtgggcggctgaggatacagcgccgcgtcctgtgttgctggtgaattagacgccatcgctgtgggttgctggtatggtgccgtgctatttggcacaggacacaccgcttgaggtctgtattgaacctctgaaggaggccgatactgaagctcggttggcagccggtattgataaactaccagcggttgggtcttattttctaccggctgatattgtggatactgtatctgagttggcattgccgggatagagactctgtcccttt

SEQ ID NO: 33193 - DNA, 411 bp, Homo sapiens
ggtggcggccgcccgggctggtacactagtatttaacctagacgtgtggtaggagtaggaaattttctggtgaatacagaagagcaaagaacagcaggtcagcaggaatgactaatgtttttctatgcatgtttaatggaatattcgtgtaggatattttgagtaggtaattggataatcagcatttgtaacttgcatcctagtagtctgactctcactaataagactcgtcaaagttccaagaatctgaaagtggatgataaatgtccatgtgtatcaccatccatgaccgaaagtcagcatccacagaacacagaattgggacagatgaacttaatagataaagatgaatatcggagttgttcctcttagggaatgatactctccatgacctgtgtgagtcacagctgc

SEQ ID NO: 33194 - DNA, 461 bp, Homo sapiens
acactactatagggcgaattggagcttcccccgcgggggcggccgcccgggcaggtacaagtatactccgactctataaacttactcttctttaaagcagatcatcctatttatcataagattattaaaaatgtatacctttgcttttatttgccataaaaaaagctttctttggaataaaatagatttttatccaaagatgcagaactgttttcaagataaatccaatctgatcaatttgacagattaagactctcttcaatagtaattcctcaaattatttaaataatttatgaaacagtaaaggcttaaaatatgaattacatagccttaaaagttctagatccttcatggattttatttttggtttattattgcaggaaaatacatacaaatcttttgagaaaaataacaaaaccaagactttttttcccagtttgctataagcgagctcaataaat

SEQ ID NO: 33195 - DNA, 444 bp, Homo sapiens
atagggcgaattggagctccaccgcggtggcggccgcccgggcaggtactgaggctgtatacagccacagcctctccccatccctccagccttatctgtcatcaccatcaacccctcccatgcacctaaacaaaatctaacttgtaattccttgaacatgtcaggcatacattattccttctgcctgagaagctcttccttgtctcttaaatctagaatgatgtaaagttttgaataagttgactatcttacttcatgcaaagaagggacacatatgagattcatcatcacatgagacagcaaatactaaaagtgtaatttgattataagagtttagataaatatatgaaatgcaagagccacagagggaatgtttatggggcacgtttgtaagcctgggatgtgaagcaaaggcagggaacctcatagtatcttatataatat

SEQ ID NO: 33196 - DNA, 437 bp, Homo sapiens
acgactactatagggcgaattggagctccaccgcggtggcggccgcccgggcaggtactccaagccaaagatgatggagagtgaattaagttagtgcaatgggaccaagtctagagctatttagaagtgagaagtgacacggaaaaaaaaaagattgattggatgtagaacaagttggataagaatccaggacaaccccaggtgtcaggctggggcagctaggtaggtgctattgccatataaagtgttaaaaaagaatagagaaggggctagttgtcgggggaaggagttcagttttagacatgttgaactgcaaggagatttgatactataattaaggaatgtgttttaataaatttaataaacaatgaacacacattattcgcatttcccaaacaatttggatggtggatcaaaaagaatgagagtgaaaataa

SEQ ID NO: 33197 - DNA, 459 bp, Homo sapiens
cactactatagggcgaattggagctccaccgcggtggcggccgaggtacgcggggacatcaatgcagagtccctctgtgaatttacaacacccaacacccatgagttcagtccttaagaaggaaaattgagcaagtatttaattggttggacattgcataaaagaggtccatatccaggctaactctagaaattttattctcaaacttagttggcctctttttcttctgtcagaggaccattcttagtggcactggggaaatcttggcacccagaagaattcaactgcgctcactgcaaaaatacaatggcctacattggatttgtagaggagaaaggagccctgtattgtgagctgtgctatgagaaattctttgcccctgaatgtggtcgatgccaaaggaagatccttggagaagtcatcaatgcgttgaaacaaacttggcatgtttcctgtttt

SEQ ID NO: 33198 - DNA, 416 bp, Homo sapiens
atagggcgaattggagctccaccgcggtggcggccgcccgggcaggtacgcggggggttttccggaagccgccagttcttttagaactcatcaaattgaagctgttccaaccagctctgcaagtgatggatttaaggtaaatcttgtttttaaggagattgagaagaaacttgaagaggaaggggaaacaattttgtgaaagaaaatcgggtggtatttttgcctttaaggttgaaagatggcccctgggggtaaagaggccacctgggtggtggatgtgaagaatgacaaaggatcagtgcttcctaactcagattagaaggctgactgcacaatcacaatggctgactcagacttcctggctttaatgactggtaaaaagaatcctcaatcggccttctttcaaggcaaattga

SEQ ID NO: 33199 - DNA, 145 bp, Homo sapiens
cgactcactataggcgaattggagctccaccgcggtggcggccgcccgggcaggtactttttttttttttttttttttttttttcacaaaaaagtgttaagttgcacgcaatgctttttctggggtattgtatgtaaggtttttt

SEQ ID NO: 33200 - DNA, 186 bp, Homo sapiens
cgactcactatagggcgaattggagctccaccgcggtggcggccgaggtacatggggaaaaaatcagtttcaatagtcaagttagctttgggaatagaactgggttaaactgtgtttaaaaggtctctttaatgcagtaatcctaagtctttaacatgctaatacgcactgtggctttcaaggaaa

SEQ ID NO: 33201 - DNA, 386 bp, Homo sapiens
tatagggcgaattggagctccaccgcggtggcggccgaggtacttcagttgaaaagttgaccaaagccaaaaaatgtctatctggtggtcagtagtttgataggttcaaggagttgaaagaagcctaggatggctgggacatgtagatcatagtgctaagagatggaaagcacccttggctattttggccgttttaattgggaaggttttttaagtagagtgttgtgatcagaagggccctttagaaagattgtggctagaatatggagaacaaagaggagaccaccagagtggatgtgggaggccaatatgtaggttattctagtagctttgcagtgacttacacaaaggcagttttagcggacttgttcatgagtttacctaag

SEQ ID NO: 33202 - DNA, 147 bp, Homo sapiens
tatagggcgaattggagctccaccgcggtggcggccgtgcagggtgaactccccttcctcctcaatcagccacttgttttgaacaaacttctgcagcacctgctccgcttccttcttcctcatcttcttgcctttaagttgatcaac

SEQ ID NO: 33203 - DNA, 301 bp, Homo sapiens
gcgcgtaatacgactcactatagggcgaattggagctccaccgcggtggcggccgcccgggcaggtacatctgggaatagcgaatgcatatcaaaaggcttcatttcttttgttctttcatgaggcttgtagcacatcaaattttgaatgtcttcttttaaagctatgtgcgcacacacgcacgcacacacatatgcgggcacacacacacatcctccctctgaactgatggtgtttagtatcgataacattttctttcttggtaatacgaggtaaatgaggggggcaaaaacttatgact

SEQ ID NO: 33204 - DNA, 163 bp, Homo sapiens
acgactcactatagggcgaattggagctccaccgcggtggcggccgaggtacaattgaagtatgtgcagtttattgcatgtaaataaaccttttaaaaattaaccgatacaagttgacttacatgaccagaaagctcttgaaaaactttcctgttttctcccc

SEQ ID NO: 33205 - DNA, 417 bp, Homo sapiens
cgactcactatagggcgaattggagctccaccgcggtggcggccgaggtacatggaaggcactcaatacatgtctattaagtgtgaaagtaatgtcatcttcctctgtatttctaggatgctaagattatatatgtcacaaatgctttcacattttttaatactgtaaatattagagtaaatgtgtctttaacccccaggtgaaaagaatgccttgaaaaagaaaatcaaaatttacacaacttgaaatgctaagcacacaaaggagaaactcaagtttcatttcctctaagcacagcttttgtgctctgattcccgtgtgctacaaaacccacccaaggaaaaacagcccactaaaaggagcttctctctccaactatacgaaaagtgcaggtggctgacaaaggtaattcaaaac

SEQ ID NO: 33206 - DNA, 202 bp, Homo sapiens
agggcgaattggagctccaccgcggtggcggccgcccgggcaggtacgcggggaggctcctggggtggagtccaaatcactcattgtttgtgaaagctgagctcacagcaaaacaagccaccatgaagctgtcggtgtgtctcctgctggtcacgctggccctctgctgcctaccaggccaattgccggagttctggcccag

SEQ ID NO: 33207 - DNA, 177 bp, Homo sapiens
ctcactatagggcgaattggagctccaccgcggtggcggccgcccgggcaggtacatgggactacaggcacgccccaccatgcccagctcatttttgtatttttagtagagacagggtttcaccatgttggccaggatgatcttgatctcttgacctcatgatccgcccgtcttggc

SEQ ID NO: 33208 - DNA, 179 bp, Homo sapiens
cgactcactatagggcgaattggagctccaccgcggtggcggccgaggtactatatggacaccaacatggagcagaaaatgagggcagcagtgtccaatctcattccaggtgagaagttgcacagtgtccaataggtgcatacatctccttagtaagtagttgtgattaacaatgaaat

SEQ ID NO: 33209 - DNA, 451 bp, Homo sapiens
tacactactatagggcgaattggagctccaccgcggtggcggccgaggtacgcgggatggatcctatgaataattactgaataattattgtaattgcttttattggcagtgctgaaaactcatccctttgtgacctcaagtaacccatgacactttgtgaacctgcagttttttcatttagaaacttgacagattttcattctgacacagaatgtcaggtctcccagaccctagaaaatacattgacttaaagcctttgatacatctcaaagcagtatccttacagtgtcactggaagatggtgcgggctgcagagagggatgctttcaaatgggattaaccagtcctccttccttcacttccacatgaatgctgggcagcccagggtcaacccactgcaccctcaactcaggcaagtccagcagccaatcttaggagacctgggctacag

SEQ ID NO: 33210 - DNA, 423 bp, Homo sapiens
gcgcgtatacgactcactatagggcgaattggagctccaccgcggtggcggccgcccgggcaggtacaaaaatttgaaagtgtgacaatgacaattatgaaatcctgtgactgaaagtcccctcgagtgcactctgtggtgcacatgcgcccgcccacacaaactctggcatggaaacataaactaatgcaaaccaatggcttaccaaaaaccaccaacacgtgtgttctccattccaccaatcacagaccagtattctactccaaacattccagtaacgaaaactatggccatcttcccaggaacagcaaggcaggcttcttactcacgatgaaccagcacgaataaacccagcaaaaagagaactgcatacttaaatttaggatagtcattcatgaggaatcgtcacaatttccaatataa

SEQ ID NO: 33211 - DNA, 417 bp, Homo sapiens
cgactcactatagggcgaattggagctccaccgcggtggcggccgaggtaccgaggtcattttgcttcctatagactgccaccttttggcaaaagctgttctaactccatctcagcatttacaattccatacctggtggtcagaggaggcccgcctgcaggctcagctaaatcgggctggatgggcatttccatttccttagggctcacctcacaggctccataattactctgatactactgctcatttaagctttgatgctctcaccacggaacaagtaacaaaggtgtgtatgagagcttgggataaattacgcaccccaggccaagcttctgtttcttttactattgttaaacagggtcacaatgaattatatcttgattttttagctaaattacaagatgctgttgaaaaatc

SEQ ID NO: 33212 - DNA, 216 bp, Homo sapiens
cactactatagggcgaattggagctccaccgcggtggcggccgaggtacgggacttgtctccaggagacatgtctgggaagaagagctagactggagaatcatgagcatgttcaggtgaaaacatgtgagtggataagagcaagagggtgagaacacagaccaaggggctaaggacagactggtcagatttgggtatggactgtttgctcttgcta

SEQ ID NO: 33213 - DNA, 330 bp, Homo sapiens
  misc_feature 303: n = A,T,C or G
tatagggcgaattggagctccaccgcggtggcggccgcccgggcaggtacaagatgctgctggacatcaagacacgtctggagcaggagatcgccacctaccgcagcctgctcgagggccaggacgccaagatgattggtttcccttcctcagcaggaagcgtcagcccccgtagcacctttggtacccacgactttttgtgcctttgttaccaccacctctaatgcctctggtcgccgcacttctgatgtccgtaggccttaaatctgcctggcgtcccctccctctgtcttcagcacccanaggagggagagagccgggcagtttccc

SEQ ID NO: 33214 - DNA, 450 bp, Homo sapiens
cactcactatagggcgaattggagctccaccgcggtggcggccgaggtacttttttttttttttttttttttttttttgaaaattctttattgccaggagtgaaccctaaagtggctcacaagagtgccctatttctttcaattaactacaaggacaaacacatctcaaagttgagataagtgaccagtatgatttgccaaaattctaaagcgcactcaccatgaaatggataaaggttacctttggggatttgcactgcatgaattctgtgaaaagcttgttggatattgtgatagagatagagaaatgaagtatattatataagatactatgaggttccctgcctttgcttcacatcccaggcttacaaacgtgccccataaacattccctctgtggctcttgcatttcatatatttatctaaactcttataatcaaattacactttt

SEQ ID NO: 33215 - DNA, 428 bp, Homo sapiens
tatagggcgaattggagctccaccgcggtggcggccgcccgggcaggtacagcaaatgtgccacttgaatatctagtatgaagctggtaatgaagaaattgccatttctgaagcagatatgaaatatgatctgcttaattgttaaggcaactgacctttcaaaagtgcagagtcttattaaaagaaggggaagggggtgaaagccagaaataattagccattatgtctaaaacctgcccccaagttaaacttccttcttgtttaaatttataaaagcccagttatttttttttttagatagtatttttttgtcaacttggataatcacaggaaatatataagaaaagagcttggacttacttgagaagttggacatggaaagcaagaccaagttccagtgggtttaattttccctttggttattttcg

SEQ ID NO: 33216 - DNA, 453 bp, Homo sapiens
gtaatacactactatagggcgaattggagctccaccgcggtggcggccgcccgggcaggtacatccgctgaggcagagctttggagtagggagcagggcgcggcacagtggtgcgcaaaatgaattcccggccagcagggggtgggaagtctgacacggagttctgccttctttcctctggggagcccattctcttcaattcctcctctggtggagtcatagctgcagcctggaaaagaatcaaatgctaaagtcaaaagcaggtcaaatgctaaactcagatgcttttgaaggacagatgaattaacataataaagatatgaaaatgtcccacgttactcagtaatgcagtcagctatatgttaagattactcaaaaaccacataacacagcaaatgcaagaagcttgagacactgcatgagcagccgggctggagacagacaggagggatg

SEQ ID NO: 33217 - DNA, 176 bp, Homo sapiens
gcgtatacgactcactatagggcgaattggagctccaccgcggtggcggccgcccgggcaggtacattatatgacaatgcacattagccagcaagtcttttataggtggtttcagcagcaacgataaataatgcagaattcagctccagcactttatttcaaaagaaatttcctgc

SEQ ID NO: 33218 - DNA, 382 bp, Homo sapiens
gcgaattggagctccaccgcggtggcggccgaggtaccagttgtaaaattaccaggaaccgccatgcctcaagatcgccctgttttctggcttcatcaatgactgcatgcagtgcaccaccctgtccactacgtgatgctgtaggattaagtctcacagtgggcggctgaggattccacggcctcgtcctgtgttgctggtgaattagacgccatcgctgtgggttgctggtatggtgccccgctatttggcacaggacacaccgcttgaggtctgtattgaacctctgaaggaggccgatactgaagctcggttggcagccggtattgataaactaccagcggttgggtcttattttctaccggctgatattgcggatact

SEQ ID NO: 33219 - DNA, 180 bp, Homo sapiens
cgactcactatagggcgaattggagctccaccgcggtggcggccgcgtggctggaagacatggccactccagtcggtgttgagcacggcgagcagtctcaggcctttagtgatgatgattaaaggtggtggctgtggccttgaaaacagtcatgtgaaaactcatcaccttaaggtgtta

SEQ ID NO: 33220 - DNA, 392 bp, Homo sapiens
tatagggcgaattggagctccaccgcggtggcggccgaggtacagactccctggttgctgaacatcctgtatcttggatcatccacaatagcaactttgtttttcatccaggttattttaggcttaggatttcctctcacactgcagtttagggtggcattgtaaccagctatggcataggtgttaaccaaaaggctgaattaaacatgggtgccttctgagaaaatcaaagttcttcatacacctggaatttttgtagaatttttaccattccctggccgatcactgccactctctttagtcatggtggcaatcctcactgaggccacacatgttttcagaaaagacccggaagtaatattcattccctatgaccaattcagtaatggtgg

SEQ ID NO: 33221 - DNA, 153 bp, Homo sapiens
cactactataggcgaattggagctccaccgcggtggcggccgaggtacttttttttttttttttttttttttttttacactttgatatttattaacaaaaatggtccaaaaaaggattgagtcaaaattacaaatgattaaataaaacaaaat

SEQ ID NO: 33222 - DNA, 185 bp, Homo sapiens
atacgactcactatagggcgaattggagctccaccgcggtggcggccgaggtacagatctgggaactaaatattaaaaatgagtgtggctggatatatggagaatgttgggcccagaaggaaccgtagagatcagatattacaacagctttgttttgagggttagaaatatgaaatgaatttggt

SEQ ID NO: 33223 - DNA, 446 bp, Homo sapiens
actactatagggcgaattggagctccaccgcggtggcggccgcccgggcaggtacgcgggggcatctgccatgtgccaggctttgtgacacacacacacacacacagcacctgcacgcagatgcacacatttctagtcaaatgaggctctcagctttttgataggggctttttgatacgtgtataaccaatactttattctcactgtagtcaaggactcattgcaattcagaaatgagaagctgatccggaactccactacagctcaaagaaattctcgaatgttctcacctattaacagttattaaaatggaagaagctggggatgaaattgtgagcaatgccatctcctacgctctatacaaagccttcagcaccagtgagcaagacaaggataactggaatgggcagctgaagcttctgctggagtggaaccagctggactta

SEQ ID NO: 33224 - DNA, 417 bp, Homo sapiens
actcactatagggcgaattggagctccaccgcggtggcggccgcccgggcaggtactcttggcttgtccatattgtcggatgatctccagtggtggaggatgagtgtgctgattggattaattccgagttggaatataatgaatggttagtgtccttttactccgatgtgttttgagggtgttggccctgacagccattttggcaaataatctggttatccaaaaagatttttggttttttgatttaatgctttaaacttttcttatttttttttttacttataatattaaacatgtaaaagcgattttaatgacttttcattgaagatatacccttctgcctccatctccccaaatgggcatgcgagaaacattactactgaacagtctggaagtaagtttgcaccaccaaaggtc

SEQ ID NO: 33225 - DNA, 455 bp, Homo sapiens
cgactcactatagggcgaattggagctccaccgcggtggcggccgaggtacgaaaaaatcaggctactaagcccactgttaatatagacgcagaccaattgttaggaacaggtccaaattggagcaccattaaccaacaatcagtgatgcagaatgaggctattgaacaagtaagggctatttgcctcagggcctggggaaaaattcaggacccaggaacagctttccctattaattcaattagacaaggctctaaagagccatatcctgactttgtggcaagattacaagatgctgctcaaaagtctattacagatgacaatgcccgaaaagttattgtagaattaatggcctatgaaaatgcaaatccagaatgtcagtcggccataaagccattaaaaggaagagttccagcaggagttgatgtaattacagaatatgtgaaggcttgtgat

SEQ ID NO: 33226 - DNA, 411 bp, Homo sapiens
gaattggagctccaccgcggtggcggccgaggtaccactatgcctggctaatatttttatttttttatttttgtagagacagggtcttgttatgttgcccaggctgttctcaaactcctatcctcaagccatcctcccatctcagccactcaacttgctggaattaccagcggaagccactgtgcccagcccagactcccttttacctatatatcatgtctaatttctaacaaaaataaaaaaacattgtagagaaaaaaaaaccctaaaacaaacaacaacaaaaacccaaacacaaaagtttaagaacagagctagctgacagactatattagatatgaggtatatagaatatcaattggtaattttaaacaactatgactatatggtagagtgatatggaaaaaatag

SEQ ID NO: 33227 - DNA, 215 bp, Homo sapiens
ctcactatagggcgaattggagctccaccgcggtggcggccgcccgggcaggtacctgcaggatccaattgtgtccattgatctctcagagtggctgaggataatagagtttcttcttcaaggtctcaaggtgtatggctctgtgtatcacatcaatcacgggaaccccttcaacatggaagtgctggtggaatcctggcctgaatattcagatg

SEQ ID NO: 33228 - DNA, 362 bp, Homo sapiens
actatagggcgaattggagctccaccgcggtggcggccgaggtacatgggactacaggcacgccccaccatgcccagctcatttttgtatttttagtagagacagggtttcaccatgttggccaggatgatcttgatctcttgacctcatgatccgcccgtcttggcctcccaaagtgctgggatcacaggcgtgagccaccacacctggccctctatttattctctttaaagagagagaaaactatgagaggccaaaattatttaattaaatctttaccttagcacaagggaaaaaaatggaatttgcctaatataggtgatgaagcatacacaatgaatagaaacaatcacattttagta

SEQ ID NO: 33229 - DNA, 423 bp, Homo sapiens
acgactcactatagggcgaattggagctccaccgcggtggcggccgaggtacgtccacggtcagccttgcggtaagcttgtgtgcttagaggaacccagggtaacgatggggcaaactgaaagtaaatatgcctcttatctcagctttattaaaattcttttaagaagagggggaggttgagccttttacagaaaaatctaattacgctatttcaaacaatagaacaattctgcccatggtttccagaacagggaactttagatctaaaagattgggaaaaaattggcaaagaattaaaacaagcaaatagggaaggtaaaatcatcccacttacagtatgaaatgattgggccattattaaagcaactttagaaccatttcaaacaggagaagatattgtttcagtttctgatgcccctaaa

SEQ ID NO: 33230 - DNA, 423 bp, Homo sapiens
tacgactcactatagggcgaattggagctccaccgcggtggcggccgcccgggcaggtacttttttttttttttttttttttttttttcttttttaaaaaaaagacatttattcagcgtcacgatcaaactgttacatttagcaatcaacagcatggggtgcaaaaaaaaaaatctacattaaaaccctttttttgaaaagcttttacactttccacagaacagaaactaaaataacctgttatacaattagtcacaaatacagtcctcgagttttttgcccatacacatgagtatttgtctaaaacatgtcttctttgtagcagctaggccctgccaccactgtgcttggctgagttcacaaatctgttgtaacctgtagcttccctgtcacttttttggctttcctctcctgctaagcttt

SEQ ID NO: 33231 - DNA, 107 bp, Homo sapiens
tagggcgaattggagctccaccgcggtggcggccgcccgggcaggtaccaggaacagctggtccaggagcaggagctagcaaaacatgcagatgtggctccgggacg

SEQ ID NO: 33232 - DNA, 416 bp, Homo sapiens
tatagggcgaattggagctccaccgcggtggcggccgcccgggcaggtactctggcttcttctgaaatcagattccagctcctagtcaccataaagtatgcctgacccttactttatcattggaaactaggtattccagagcaagaaattcatgtattcattatttattatgcactgtatctgattcctaaattactccttttttgcaaaaaaaggaaaaaaaattatttttccatcacatgtgcactctcataaaactgaggttatatttttaaacactgtatgtattcaagaaaaatatatcatttataaacctcatgttttatatatttcatgaaatcagtgtcctgtgcttgaactctgacaagtagggaaatactgctcgtataaaagctatggaatttaatttaaaacag

SEQ ID NO: 33233 - DNA, 163 bp, Homo sapiens
  misc_feature 138, 152, 153, 154: n = A,T,C or G
actactatagggcgaattggagctccaccgcggtggcggccgaggtacaacattatgcttactgcatcccatggaaacttaattccctcctagcacatatttgcatactgaaaggtccgaaaagggcatccacggcangcttgagccccctnnntagcaccat

SEQ ID NO: 33234 - DNA, 442 bp, Homo sapiens
actatagggcgaattggaggctccaccgcggtggcggccgcccgggcaggtaccttatggatgacttcacaagagatccactgtatatcctggacaacaaccacacacatttgctgctcgtggacaatggctgtcatggacatcccactgtcgaagcaaagctccggaatcagctagaaaaagattatctctgagcgcccctattcaagatttccaactatggtggccaaggatccccattggtgtgtttttggcccacgggagggtggaaaaagcagaacttttgaaaaagccattcaaataaccttccattcaaaaaataaaacattccttgtggtggtgggtggaagggctcgggcccagatcgctgatgtgatcgctagcctggtggaggtggaggatgccctgacatcttctgccgccaggagaagctggtgcgctt

SEQ ID NO: 33235 - DNA, 120 bp, Homo sapiens
ctatagggcgaattggagctccaccgcggtggcggccgcccgggcaggtactttttttttttttttttttttttttttttatagttagaaacattttatttaaatgtggccaaaataaaa

SEQ ID NO: 33236 - DNA, 426 bp, Homo sapiens
  misc_feature 54: n = A,T,C or G
ctcactataggcgaattggagctccaccgcggtggcggccgaggtacgcggggngcgtgcgtgtgttgatgcgcgccgcttagtgttggtggacaaggcagagtgggaggcagctgagttagagtcccaactcttggactccatttgctattctcttctttctcccccacacctatctggtggtggtagtgggcgtttatatttgcgttccttttcattcatttctaaatctcttaaaaattttgggttgggggtattggggaaggcaggaaagggaaaaggagagtagtagctgaagagcaagaggaggacatggagatgaagaagaagattaacctggagttaaggaacagatccccggaggaggtgacagagttagtccttgataattgcctgtgtggtaatggggaaattgaaggcctgaat

SEQ ID NO: 33237 - DNA, 417 bp, Homo sapiens
tacgactcactatagggcgaattggagctccaccgcggtggcggccgaggtacagacgggatttcactatgttggccaggctgttctcaaactcctggccttgtgatctaccctcctcaatctcccaaagtgctgagattacaagcgtgatccactgcacccggccagttgttttttttggtttttttgtttttttaggttttttttacgaaaatgtttgggaacagaaatgttgtggatttgagattttgttggattttggaatatttgtattatacctactgtttgaacatcccaagtttgaaaatctgaaaccttaagtgttaacatgagcaccttaataaagtttggacagtatttcttttataaacaatattattgatattgctaactattaacattagaaatgaaagtcgc

SEQ ID NO: 33238 - DNA, 414 bp, Homo sapiens
ctactatagggcgaattggagctccaccgcggtggcggccgaggtactttttttttttttttttttttttttgtttaagatgacaatatccataatgctaaaagtttactatatccatcactattcaccctcagaatgccaatattctagaattcctttgctctggctcaaggaaatattaatgcacgcagggatttgtataggattgacagagccaactcagcatgacaaatgggggaaattccatgcgcaacgtttatgggaaacatcaggttagtatgctgctaagaccagctgctccgtgtgctgcggctcccccgtgcagtcccccatgaatcatgcagacacacagttgccctaagcctgtggcatctactgtgtgacttgcttaagcaaagacaagacttttctttt

SEQ ID NO: 33239 - DNA, 401 bp, Homo sapiens
actactatagggcgaattggagctccaccgcggtggcggccgaggtacgcgggggtgacacacacacacacacacagcacctgcacgcagatgcacacatctctagtcaaatgaggctctcagctttttgataggggctttttgatacgtgtataaccaatactttattctcactgtagtcaaggactcattgcaattcagaaatgagaagctgatccggaactccactacagctcaaagaaattctcgaatgttctcacctattaacagttattaaaatggaagaagctggggatgaaattgtgagcaatgccatctcctacgctctatacaaagccttcagcaccagtgagcaagacaaggataactggaatgggcagctgaagcttctgctggagtgg

SEQ ID NO: 33240 - DNA, 407 bp, Homo sapiens
cgactactatagggcgaattggagctccaccgcggtggcggccgaggtacctatggaactatataatggaattactcctgtgccacttagtgggttgatacatattattggccatccatatggagaaaaaaagcagattgatgcttgtgctgtgatccctcagggtcagcgagcaaagaaatgtcaggaacgtgttcagtctaaaaaagcagaaagtccagagtatgtccatatgtatactcaaagaagtttccagaaaatagttcacaaccctgatgtgattacctatgacactgaatttttctttggggcttccggctcccctgtgtttgattcaaaaggttcattggtggccatgcatgctgctggctttgcttatacttaccaaaatgagactcgtagtatca

SEQ ID NO: 33241 - DNA, 414 bp, Homo sapiens
atacgactcactatagggcgaattggagctccaccgcggtggcggccgcccgggcaggtacgcggggagaaaaagggtggggagtgccctttcttgaaggaatccctgaagtgcacgtctcccgttttcttttcacatcaatgcagagtccctctgtgaatttacaacacccaacacccatgagttcagtccttaagaaggaaaattgagcaagtatttaattggttggacattgcataaaagaggtccatatccaggctaactctagaaattttattctcaaacttagttggcctctttttcttctgtcagaggaccattcttagtggcactggggaaatcttggcacccagaagaattcaactgcgctcactgcaaaaatacaatggcctacattggatttgtagaggagaa

SEQ ID NO: 33242 - DNA, 409 bp, Homo sapiens
actcacttagggcgaattggagctccaccgcggtggcggccgaggtacacgactggtccaggttcctggaggtcacactctggggctgccagccaaagggtgcccttaagttggagtgtgggtgacttcctgaacagagctggcactggggagggggtgctcggggtcctttctcttctaacaggccccagttttgtctcaatgacagtgtttctacacctgtgggttatgacaaagacaactgccaaagaatcttcaagaaggaggactgcaagtatatcgtggtggagaagaaggacccaaaaaaagacctgttctgtcagtgaatggataatctaatgtgcttctagtaggcacagggctcccaggccaggcctgattctcctctggcctctaatagtcaatgatt

SEQ ID NO: 33243 - DNA, 400 bp, Homo sapiens
gtatacgactcactatagggcgaattggagctccaccgcggtggcggccgcccgggcaggtacatggggaaaaaatcagtttcaatagtcaagttagctttgggaatagaactgggttaaactgtgtttaaaaggtctctttaatgcagtaatcctaagtctttaacatgctaatacgcactgtggctttcaaggaaaggatctagtgttttccaaactctgttttcaaaattttgattacagcattcacctccctctttttttccccaatgtcctgtagaaaacactgagagaactgacatttttaactttatatggaaagaatcgtaaatatggtgaatctggatgtcctcatcaaccaacttcaaagactatcacccatgcaatcttgtttcatctg

SEQ ID NO: 33244 - DNA, 406 bp, Homo sapiens
gtatacgactcactatagggcgaattggagctccaccgcggtggcggccgaggtacagatcaaaatggagtttcttatgtcttccttttctacatagacacagtgaaagtctgatctctcttttccttacatatcccccccttttctttttgacaaaaccaccatcgtcactatggcccattcttgctggttgctgtctctttggagctgctggatacacctgtagactggcgagtcgattggggtgtctccatctccacacttttctttgcatctccagtgagttcattgtagaactttaaatgtctagtgggtatccaaacaggaagctgattttctcctggtgaaacacaagcaaaacctctcccccacgttatcaccttccccatttcccatgttttatttt

SEQ ID NO: 33245 - DNA, 407 bp, Homo sapiens
cgtaatacgactactataggtcgaattggagctccaccgcggtggcggccgaggtacgcggggcttttcttgaaggaatcccttaagtgcacgtctcccgttttcttttcacatcaatgcagagtccctctgtgaatttacaacacccaacacccatgagttcagtccttaagaaggaaaattgagcaagtatttaattggttggacattgcataaaagaggtccatatccaggctaactctagaaattttattctcaaacttagttggcctcttttttttctgtcagaggaccattcttagtggcactggggaaatcttggcacccagaagaattcaactgcgctcactgcaaaaatacaatggcctacattggatttgtagaggagaaaggagccctgtattgtg

SEQ ID NO: 33246 - DNA, 398 bp, Homo sapiens
gactcactatagggcgaattggagctccaccgcggtggcggccgcccgggcaggtacgcggggacatcaatgcagagtccctctgtgaatttacaacacccaacacccatgagttcagtccttaagaaggaaaattgagcaagtatttaattggttggacattgcataaaagaggtccatatccaggctaactctagaaattttattctcaaacttagttggcctcttttttttctgtcagaggaccattcttagtggcactggggaaatcttggcacccagaagaattcaactgcgctcactgcaaaaatacaatggcctacattggatttgtagaggagaaaggagccctgtattgtgagctgtgctatgagaaattctttgcccctgaatgtggt

SEQ ID NO: 33247 - DNA, 527 bp, Homo sapiens
atacgactcactatagggcgaattggagctccaccgcggtggcggccgcccgggcaggtaccagttgtaaaattaccaggaaccgccatgcctcaagatcgccctgttttctggcttcatcaatgactgcatgcagtgcaccaccctgtccactacgtgatgctgtaggattaagtctcacagtgggcggctgaggatacagcgccgcgtcctgtgttgctggtgaattagacgccatcgctgtgggttgctggtatggtgccgtgctatttggcacaggacacaccgcttgaggtctgtattgaacctctgaaggaggccgatactgaagctcggttggcagccggtattgataaactaccagcggttgggtcttattttctaccggctgatattgtggatactgtatctgagttggcattgccgggatagagactctgtccctttctacttgattctctcttggggtttgtgcttgtctaacctgcgtttgaggttgtaatgttacaggcatcttaaccacggga

SEQ ID NO: 33248 - DNA, 391 bp, Homo sapiens
atacgactcactatagggcgaattggagctccaccgcggtggcggccgctgagtgaggcgtcggctgtgtttctcaccgcggtcttttcctcccactcttggctggttggaccctgctatggaaaagttggcccctgagccagagctccagcagccttgttagggcgtggcctgaggcttggataagtgggatgtaaaacgaagatcaggagcagatttgaagaattacaaagtgaattggtgccagtcagcatgtcagagacagaccacatagcctctacttcctctgataaaaatgttgggaaaacacctgaattaaaggaagactcatgcaacttgttttctggcaatgaaagcagcaaattagaaaatgagtccaaactattgtcat

SEQ ID NO: 33249 - DNA, 436 bp, Homo sapiens; identical to SEQ ID NO: 32434

SEQ ID NO: 33250 - DNA, 361 bp, Homo sapiens
cggccgcccgggcaggtactttttttttttgtttttttccccctctatgtcttttgctgtcacccctgtttgtttcgggtttttattaaaatacttcagctgggcccagagattctgcagcgggaaaatccaaggcttataatgccaggctgagtggattaggccaggcaggaagcttctgccggttagctggccacgatatccactatttggctttgacaggtgttctctcaaaaattggcagaagtggtgagaatccgaatgccccgctgaatctcctggctgactttgctggtggaggccttatgtgtgcactgggcattataatgggctatttttgaccgcacacgcactgacaagg

SEQ ID NO: 33251 - DNA, 441 bp, Homo sapiens
  misc_feature 199, 200: n = A,T,C or G
tggagctccaccgcggtggcggccgaggtaccatgctgacttcttggtatcttttaaggcctaattttcccctccttgagattactgtagtgtgttccagctaatttctatttggaaacgagttggaacagctgaaaactaggtattattgaaggcaaagcagcctcacgtcatttttttatcagctcatttgggaagnnttttttttttttttttttttttttaattaattagaaagtaggctgggcacggtggctcatgcctataatcccagcacttggggaggccgaggatctcctctctggtggatcacttgagggcaggagttaagagaccatcctggccaacatgatgaaaccctgtctctactaaaaatacaaaaagtagctgggcgtggtggcatactcttacaatcccagctacttgggaggctgaggcagg

SEQ ID NO: 33252 - DNA, 183 bp, Homo sapiens
cactatagggcgagttggagctgcaccgcggtggcggccgaggtacgcgggggggcaaaaaatcaaggtatttggtcccggaacaaagcttatcattacaggtaagttttctttaaattttgcaatgtaaagaagggatgggaggctggcaggcaggagctggctcagaattctaggaattcc

SEQ ID NO: 33253 - DNA, 416 bp, Homo sapiens
ggtggcggccgaggtacccttccactcctactccactttgagatatcccacctttttaggttaaaccaatatgtagcctcatgtattgatttatgactttgcctgtaacctctgccacgctgcctttaaaaacccttacctgtgtaagccatctgggagtttaaggtttaaccatgacctccctgatcctccttgcttggtgccctgcaacaaatgccccactttctctccctgcaatcccgatgtcagtgtgtggctttgctgctctgggtgggcagacccaagttcagcaagtaaccattctaaggagggtgtttacaccttcttcatgatcccttgtcactgtttcatcctaaatcctgattccaacccaattatctgttccttctcatcatctcccctctctttatttcact

SEQ ID NO: 33254 - DNA, 255 bp, Homo sapiens
cactcactatagggcgaattggagctccaccgcggtggcggccgcccgggcaggtacgttcacggtcagccttgcggtaagcttgtgtgcttagaggaacccagggtaacgatggggcaaactgaaagtaaatatgcctcttatctcagctttattaaaattcctttaagaagagggggagttagagcttttacagaaaaattttaattatcgctattttcaaaacaattgaaacaatttctgccccatggtttt

SEQ ID NO: 33255 - DNA, 439 bp, Homo sapiens
gcgaattggagctccaccgcggtggcggccgcccgggcaggtacttgatggactcatcattacagaatactcctcgttggaagggggtatgccttgaagtaagaattgcaaaaggcaatccagctagcaaaagggaataaatgaaaatatcattaaaaaagaaatatcaaaactaattaatggccaataattatcccacagactctgtctaaaaatgcatttgccgtgaaaataaatgagagcacatgtaaaaaaggaaatgcagcaatgcatgcaacagaagttagaaagattacagttttaagataaagatgttttgtctacagcaaacaaagtgttcaaatcctctattaaccaatttaacaaagagttatctttcctttgtttctgtcccaacacactaaatggattttggaaaaatctcttctcacgttcttgt

SEQ ID NO: 33256 - DNA, 180 bp, Homo sapiens
atagggcgaattggagctccaccgcggtggcggccgcccgggcaggtacgtgacaggagtgactatttctttctaactggagtcagccctccatatccttgggatccacatccaaggattcaaccaacctcagatgggaaatattcaaaagaacaaacaaacaatttaaaaaaaagaaaa

SEQ ID NO: 33257 - DNA, 445 bp, Homo sapiens
ggagctcaccgcggtggcggccgaggtaccttccattccagtggagggagaaggatcatggaagccaagcaaatagcttgttcactccaaaaaggcctaggcccagccaccacctctcaccttaaccattgcaataacttaactggtgtccctgctcctacccttctgctgtcctattaaaaaacagggaaaccagaggtaatttgtataaaacacaaatataacagaaacacaaaacctcttccccaactttaaaccttctagtcacttcccatagctctttgaataaaattccaaacccattcccatggcctacagacctctgtatcatcaggtccttcccaccatgcagatcttcctggtctccctcggctgcagccacacaaatctcccctctgtttttctgatgccagcttttcggcacttgctatttcttctccccgcg

SEQ ID NO: 33258 - DNA, 433 bp, Homo sapiens
gactcactatagggcgaattggagctccaccgcggtggcggccgcccgggcaggtacttgtgcatgaataaatttattcttcttttctgttgcagatataaatatttctgattgtgccattttgattacccaactaggaaaagagagagagagacagagaataacataggcttttgaatgaacgcctgaaatatttaaagaatccattaaattctttttaaaagtttctcacataattttgaacaaagagaaaagcaatctcaatagctcagaggaaattgcagaagattgctggtaaccaggcatcttgtctacccagtctttgcctccgaggacaggccagaggcttcaggtcagtgtcaggtgtgtgtgattgttggtgttaggaaaggaggtaaatggttcaagcagggactgccattccatgccactc

SEQ ID NO: 33259 - DNA, 186 bp, Homo sapiens
ctcactatagggcgaattggagctccaccgcggtggcggccgaggtacattagtaattataacaatgcattaaaattttcatttcatgtcatagagaatcagttttcttcatgatgatacattatgttttactgagtgagtttgtccctccagagacctttctgggaacatgccttctccagggac

SEQ ID NO: 33260 - DNA, 426 bp, Homo sapiens
ctccaccgggtggcggccgcccgggcaggtacaaagtccctgaggcaaaagcatgcttgctgtgttctaggaaaagcaaggaagacagcatgtctatagcagtgggaggtggaaggataataaacagtaggtgaggttagaggggaccaaatcatgtattttccatccagaggttcccaaccttggctgcacattagatttattctaaggagcttttaaaaaataccaatgactgggtcccagcctagagtgattaaatcagaatctctggaggtagacttgagaatctgatgtttgcaagtttcctaggcaagtcaaggctgaggaagactgctgcaggccattgtaagagccaggcgtttgaatctcattcaaccttttccctcagctcttctagagacagccagcattctcttatggcgcaaa

SEQ ID NO: 33261 - DNA, 450 bp, Homo sapiens
tcactactacgagtcactataggggcgaattggagctccaccgcggtggcggccgcccgggcaggcaccagttgtaaaattaccaggaaccgccatgcctcaagatcgccctgttttctggcttcatcaatgactgcatgcagtgcaccaccctgtccactacgtgatgctgtaggattaagtctcacagtgggcggctgaggatacagcgccgcgtcctggggtggttggtgaaattagacgccctcgctgcgggttgctggtatggtgccgggctatttggcacaggacacaccgcttgaggtctgtattgaacctctgaaggaggccgatactgaagctcggttggcagccggtattgataaactaccagcggttgggtcttattttctaccggctgatattgtggatactgtatctgagatggcattgctgggatagagacttctg

SEQ ID NO: 33262 - DNA, 599 bp, Homo sapiens
  misc_feature 295: n = A,T,C or G
gcgaatgggagctccaccgcggtggcggccgaggtaccatgttcaggaaaccaaggacaatattgctctactgttggaaacagagtaatcaaattttctgtgctagccttaattcctgccctctttaagaggagcttaataaaatgtaaatatgcagaatgtttactttggattgctcatggtgtctggaatgctccgagtgcacaagcttaccgcaaggccgaccacacgttctcgggagttcctggacagaccgttcttcacaacgaccacgctcaggtgtaacttcacctgngttcgaggagaccgtgttgggtgccaaagatgtaggggaacctgcctgatacaccacccgcaggctctccccttcccggtggagacgagggaatgagaaaagaaataaagacaaagacacaaagtttaagagttaacaaaagtgggttcaaggatccatcgcaacgttggagattgcaaaggcccccgcgtacctgcccgggcggccgctctagaactagtggatcccccgggctgcaggaattcgatatcaagcttatcgataccgtcgacctcgagggggggcccggtacccagcttttgtt

SEQ ID NO: 33263 - DNA, 606 bp, Homo sapiens
  misc_feature 495: n = A,T,C or G
tacgactcactatagggcgaatgggagctccaccgcggtggcggccgaggtaccgaggtcattttgcttcctatagactgcgaccttttggcaaaagctgttctaactccatctcagcatttacaattccatacctggtggtcagaggaggcccgcctgcaggctcagctaaatcgggctgatggcattccaattactcaggctcagcccacaggctccgataattactctgatactactgctcatttaggctttgatgctctcaccacggaacaagtaacaaaggtgtgtatgagagcttgggataaattacgcaccccaggccaagcttctgtttcttttactattgttaaacagggtcacaatgaattatatcttgattttttagctaaattacaagatgctgttgaaaaatctgtctctgatgagcacactcaaggtattcttcttcatatgttagcttttcaaaatgcgaacccatgagtgtaaaatggnccgtgcattccatcctacgtcaaaatttacctgatcatgaggtgttgcctgcatatattaaagcttgtgaaggcgttggatcggagacccacagagctattctgtgggcac

SEQ ID NO: 33264 - DNA, 344 bp, Homo sapiens
  misc_feature 193: n = A,T,C or G
atataattcctttgcttgtaactgcccaataaatggatgaggactcacttcacccataaataagaaaggtgaacagcacatggggcctgtagatgccttttgcagggccgtctattctcttcctaaagttgcaatttgagtatttctctagatgggcacatcatagaaactgtcgtcctagatcagagcctgnggagagagatacaggtgtcatgcttacatctgcagagtgagaacaagcccagaaaaatcaagatgattaagcagagagcttccatactggagataaaccagctgtgtaaaaaatcattgcaccaaaaaagcattgtaccatcgacataact

SEQ ID NO: 33265 - DNA, 359 bp, Homo sapiens
atagggcgaattggagctccaccgcggtggcggccgaggtacttgagtcaaagacgacatttagattcttcagctttgaagcatttagtaacatcattgtctagtcaggcagaggaaagaaattcaaaagcactttctttttcttctgtcagttcctttgcagtaagatccatcttctcacgtgagaaatcattaatagggaggaccttcaacaaacctttccaggttcttatttctttgattacaaccagggaatgagtaagagcaagatcaatcagggaacactcataggaagtttgcccatcagaagattaacaactccatgggaccacaaaactcctccccttctggggtttcca

SEQ ID NO: 33266 - DNA, 195 bp, Homo sapiens
actactatagggcgaattggagctccaccgcggtggcggccgcccgggcaggtactttgaacctgttgttcctttacctgatctagttgaagtatccagtggtgaggaaaatgaacaagttgtttttagtcacagggcaaaactctacagatacgataaagatgttggtcaatggaaagaaaggggcattggtga

SEQ ID NO: 33267 - DNA, 464 bp, Homo sapiens
attggagctccaccgcggtggcggccgcccgggcaggtaccggggtcattttgcttcctatagactgccaccttttggcaaaagctgttctaactccatctcagcatttacaattccatacctggtggtcagaggaggcccgcctgcaggctcagctaaatcgggctgatggcattccaattactcaggctcagctcacaggcctccgatattactctgatactactgctcattaaggctttgatgctctcaccacggaacaagtaacaaaggtgtgtatgagagcttgggataaattacgcaccccaggccaagcttctgtttcttttactattgttaaacagggtcacaatgaattatatcttgattttttagctaaattacaagatgctgttgaaaaatctgtctctgatgagcacactcaaggtattcttcttcatatgttagcttttcaaaatgcgaac

SEQ ID NO: 33268 - DNA, 192 bp, Homo sapiens
gcgaattggagctccaccgcggtggcggccgcccgggcaggtacgcggggaggcattgaggcagccagcgcaggggcttctgctgagggggcaggcggagcttgaggaaaccgcagataagtttttttctctttgaaagatagagattaatacaactacttaaaaaatatagtcaataggttactaagatat

SEQ ID NO: 33269 - DNA, 461 bp, Homo sapiens
gcgaattggagctccaccgcggtggcggccgaggtacgcgggggacatcaatgcagagtccctctgtgaatttacaacacccaacacccatgagttcagtccttaagaaggaaaattgagcaagtatttaattggttggacattgcataaaagaggtccatatccaggctaactctagaaattttattctcaaacttagttggcctcttttcttctgtcagaggaccattcttagtggcactggggaaatcttggcacccagaagaattcaactgcgctcactgcaaaaatacaatggcctacattggatttgtagaggagaaaggagccctgtattgtgagctgtgctatgagaaattctttgcccctgaatgtggtcgatgccaaaggaagatccttggagaagtcatcaatgcgttgaaacaaacttggcatgtttcctgttttgggtgtgtagcctg

SEQ ID NO: 33270 - DNA, 205 bp, Homo sapiens
tcactatagggcgaattggagctccaccgcggtggcggccgaggtactattctatcattattgtataacggttttcaaaccagtgggcacacagagaacctcactctgtaataacaatgaggaatagccacggcgatctccagcaccaatctctccatgttttccgcagctcctccagccaacccaaatagcgcctgctatagtg

SEQ ID NO: 33271 - DNA, 462 bp, Homo sapiens
gcgaattggagctccaccgcggtggcggccgcccgggcaggtacagagaagcaggttgagtggatggcaaagtgaccggttgagggaccaaaatgataggagggtgaggggctgtggtggatgggggagggcctgcagaattacaggtaaattgtagtttggatggctccggaggcaaagactgtaaaggtttggagagggaagaattagcatagatatggtcctgggctgtctgagttggggccgcaggagctacaagtgtcggctcttcgtgaaaagaaataagatcatcagggggtgatgttaagccaaagtcactggagttagatattgaatcctcagtatcgtcaggtgggggaggagtaggcaaagggaggggctgagcatataatgaaggccgagtgggagaggaaagctgaggaagaggtagagggtggccagattcagaaaactgtggtaact

SEQ ID NO: 33272 - DNA, 452 bp, Homo sapiens
cgactcactatagggcgaattggagctccaccgcggtggcggccgccatcttgggtcatcgatgagcctcgccctgtgcctggtcccgcttgtgagggaaggacattagaaaatgaattgatgtgttccttaaaggatgggcaggaaaacagatcctgttgtggatatttatttgaacgggattacagatttgaaatgaagtcacaaagtgaggcatttcccatgagaaggaaaacagaacgagaaaatctttggatggctttcaacaagacattgcagccaaacaaaaatggaaatacctgtgaatgacattgagtgcaggccaatgctggtggagggagattaaccaacggtggcaggagggttcagggatttctggccccttgctgcctaaaactggtgccgttcattaaccaaattcattttcatattttcttaaccctcaaaaacaa

SEQ ID NO: 33273 - DNA, 209 bp, Homo sapiens
tatagggcgaattggagctccaccgcggtggcggccgcccgggcaggtacttactttttaagaattagagacagtaactccaaaaataattgtccttttttctttctttttttttttacaataaggctcttgaaaattgtcattacttgtgttttcctatacattcatctgtgtgaaagccttatttcttttttgatttaaaaaaattt

SEQ ID NO: 33274 - DNA, 206 bp, Homo sapiens
tcactatagggcgaattggagctccaccgcggtggcggccgaggtacccctccaagccggacaacccgggcgaggacgcaccagcggaggacatggccagatactactcggcgctgcgacactacatcaacctcatcaccaggcagagatatggaaaacgatccagcccagagacactgatttcagacctcttgatgagagaaagc

SEQ ID NO: 33275 - DNA, 458 bp, Homo sapiens
gcgaattggagctccaccgcggtggcggccgcccgggcaggtacgaaaaaatcaggctactaagcccactgttaatatagacgcagaccaattgttaggaacaggtccaaattggagcaccattaaccaacaatcagtgatgcagaatgaggctattgaacaagtaagggctatttgcctcagggcctggggaaaaattcaggacccaggaacagcttttccctattaattcaattagacaaggctctaaagagccatatcctgactttgtggcaagattacaagatgctgctcaaaagtctattacagatgacaatgcccgaaaagttattgtagaattaatggcctatgaaaatgcaaatccagaatgtcagtcggccataaagccattaaaaggaaaagttccagcaggagttgatgtaattacagaatatgtgaaggcttgtgatgggattgga

SEQ ID NO: 33276 - DNA, 606 bp, Homo sapiens
  misc_feature 597: n = A,T,C or G
tatagggcgaattggagctccaccgcggtggcggccgaggtacaaagtccctgaggcaaaagcatgcttgctgtgttctaggaaaagcaaggaagacagcatgtctatagcagtgggaggtggaaggataataaacagtaggtgaggttagaggggaccaaatcatgtattttccatccagaggttcccaaccttggctgcacattagatttattctaaggagcttttaaaaaataccaatgactgggtcccagcctagagtgattaaatcagaatctctggaggtagacttgagaatctgatgtttgcaagtttcctaggcaagtcaaggctgaggaagactgctgcaggccattgtaagagccaggcgttgatctcattcaacctttccctcagctcttctagagacagccagcattctcttatggcacaaatacagcctttcaccctcacagaaagacacaggacaacaaattcaataaattaattcactggcatggatgattttctcagactaattgtttccagtttgataggagacaattaaaggctggaaggcactggatgcctgatgatgaagtggactttcaaactggngcactactg

SEQ ID NO: 33277 - DNA, 593 bp, Homo sapiens
tacgactcactatagggcgaattggagctccaccgcggtggcggccgaggtacattaacatagggacccctcccctggagcatagcagccgatgttttgtccaggcaattgattctggttagcctgttgttcacacaattcatcatattctgccctccagagggggtattgactcgcctcctaaagttgttttagctagcactgaccagtcccatggagtcatatggtagttatctgctattgcctcaattaatcctcttgtgaatgggctagtggccccattttctctaatgctttttcttatttccttagaagtgttcaatgtaatgggctcatgcacccaattgccttgttgatcttgcatcactgggcaggccaagagttccccttccaatgctgcttgcctaaggcagggtcccataactgtagtatatcgcttgtcttcttcccagttcattggggggagggggaggaaaacctccgtctcctctttggtatctttagccagtgacggcaaggctgagggaggctgaagcattaaagtgggtagtggttccccttcccttatctttttgggctcttctatgaagagc

SEQ ID NO: 33278 - DNA, 565 bp, Homo sapiens
tacgactcactatagggcgaattggagctccaccgcggtggcggccgaggtaccagttgtaaaattaccaggaaccgccatgcctcaagatcgccctgttttctggcttcatcaatgactgcatgcagtgcaccaccctgtccactacgtgatgctgtaggattaagtctcacagtgggcggctgaggatacagcgccgcgtcctgtgttgctggtgaattagacgccatcgctgtgggttgctggtatggtgccgtgctatttggcacaggacacaccgcttgaggtctgtattgaacctctgaaggaggccgatactgaagctcggttggcagccggtattgataaactaccagcggttgggtcttattttctaccggctgatattgtggatactgtatctgagttggcattgccgggatagagactctgtccctttctacttgattttctcttggggtttgtgcttgtctaacctgcgtttgaggttgtaatgttacaggcatctgaaccacgggaggaggagttgatggcgatcgtggttaggctctgatggccccaatga

SEQ ID NO: 33279 - DNA, 574 bp, Homo sapiens
cgactcactatagggcgaattggagctccaccgcggtggcggccgcccgggcaggtacgaaaaaatcaggctactaagcccactgttaatatagacgcagaccaattgttaggaacaggtccaaattggagcaccattaaccaacaatcagtgatgcagaatgaggctattgaacaagtaagggctatttgcctcagggcctggggaaaaattcaggacccaggaacagctttccctattaattcaattagacaaggctctaaagagccatatcctgactttgtggcaagattacaagatgctgctcaaaagtctattacagatgacaatgcccgaaaagttattgtagaattaatggcctatgaaaatgcaaatccagaatgtcagtcggccataaagccattaaaaggaaaagttccagcaggagttgatgtaattacagaatatgtgaaggcttgtgatgggattggaggagctatgcataaggcaatgctaatggctcaagcaatgagggggctcactctaggaggacaagttagaacatttgggaaaaaatgttataattgtggtcaaa

SEQ ID NO: 33280 - DNA, 670 bp, Homo sapiens; identical to SEQ ID NO: 30471

SEQ ID NO: 33281 - DNA, 594 bp, Homo sapiens
ctatagggcgaattggagctccaccgcggtggcggccgaggtacgactgtaacaaggaccattctctgcttcccagatggacctctgtgtcctcccatcgtggaggaaacagaaggacaaaatgggcctggttagttccctccagccttctgtaaggacactaatccccttcaggagggctctgccgtagcgacctgatcacctcttagaggccccacctcttaacactgatgctggggtgaacttccaacctgtgaatttagaacaggcatgcccattcaaaccatagcatccactttacacaccatcaccttttcctaagtcgctgtcactcaattgccaggggcaaataatttatatcaccaaggtaaggtcctggcacataatgtatgctcaagtatttgtgtgtttatgaataagttgaaaattaaaataaattggctttgtgagagggcttggcaagaacttgactgtctaagcttttcaaaaatctgctttgttttattcctggttcttaatagagatggatgcccaaagacagactcgagtgaacttagctgacactggctgtgattatttttttatttttatttt

SEQ ID NO: 33282 - DNA, 509 bp, Homo sapiens
gcgtatacgactcactatagggcgaattggagctccaccgcggtggcggccgcccgggcaggtaccttctgctgttccctgggtcttcaatgactcaatttcccaccagcagtatcctttaaagccatcctgcatcctgagacaagagattgacaattcattgataagtagtcttaattgtcactattacagggctgtaggtcctttgccagccatgcctttcagtcctaaatggtcttcaaggttgggctgtgttgtccaagagctgaggaccttacatttattgttccaatatttattggctataatgatttctgtggagcagtcagctgtcagaaaattttgtctcctttgtaggtaacctgtcattggtctctggatttttttatagactccctatgtatctggtgtaaattagtttcaatctgttgtgcctacgtgtagacttcttgcttgaaaaggtgttggatttcttgagtttgaattttggagtgtttaatcagttctga

SEQ ID NO: 33283 - DNA, 524 bp, Homo sapiens
cgcgtaatacgactcactatagggcgaattggagctccaccgcggtggcggccgcccgggcaggtacttccaaaccctcctgttctttcctttttgttttccccaattttaacataaggcaaaagcagtaattgagcaattctatcacctggattggcactccggggaacagtggagctgatcactaactgaattccccctttataatctgaataaattaccccagtatgaatttggactcccttcaaatttagacttgatctccctcaaaggcctaccctcccttctggcagcgggccatatacccctctaggaatcttttgtgggggctttccagggagtaaaaagaccatttgggtggaacataaatctactgcggtgctgcctgctgtggcgcgggacagctgttggattgttgtaattggctgactccctgaagtggtggtattttctgtaggggttgttgtccttgaaaaccctgaggaacaaacagtttaactgggaatgccccaatttgttggggg

SEQ ID NO: 33284 - DNA, 691 bp, Homo sapiens
  misc_feature 612, 644: n = A,T,C or G
aatacgactcactatagggcgaattggagctccaccgcggtggcggccgcccgggcaggtactatcaggacactttgagtttccctgcagaggggaaggtgattgagtagataggaaagatgacaaagctattctcttcaaccatggacacatctgcacatgtaatcccagggccaaggccacacttggcttgcttcgctgatctctcttttacataaattccatttagcattttggctaccagataaatttctttccatttaaatataaaaagtcctatcagaggaatgaaggattgcaattttataaaaggtcataaggagaggttataacaatctttaacaggaatatgaaaaagcctgagtttgggggaaattttctgaacctgaaaaaggaagaaacagtagccataaggggaaatggcttttgaattttaacaaaatgaacttcgtatgttgctaaaaaatatgagctgaaaatatactgctttttttccctgagttatacctatctcctgaaggaccaagagtggcccgtgtgatgtcacttggcaacactaatcgatgagatgtctcgatctaaagcatcttagcaccaataacaaaaacattntaaaatcaatgattatataacctattcctatnttctttgagagaagagctcttcctaaaataccaccaaccatattctc

SEQ ID NO: 33285 - DNA, 506 bp, Homo sapiens
  misc_feature 414: n = A,T,C or G
gcgtatacgactcactatagggcgaattggagctccaccgcggtggcggccgcccgggcaggtacgcggggaagaaatagcaagtgccgagaagctggcatcagaaaaacagaggggagatttgtgtggctgcagccgagggagaccaggaagatctgcatggtgggaaggacctgatgatacagaggtctgtaggccatgggaatgggtttggaattttattcaaagagctatgggaagtgactagaaggtttaaagttggggaagaggttttgtgtttctgttatatttgtgttttatacaaattactctggttgctgtgttgataggacagcagatgggtaggagcagggacaccagttaagttattgcaatggttaaagtgagaggtggtggctgggcctaagccttttnggagggaaacagctatttgcttggcttccatgatccttctccctccactggaatgggaagtacctcggccgaggtacctttatttctatcat

SEQ ID NO: 33286 - DNA, 554 bp, Homo sapiens
aatacgactcactatagggcgaattggagctccaccgcggtggcggccgaggtacttgtagtcttttaataaccatagaaagcactaaaagtaattttaaaagcctggaaagttaaatgaaaactgatattatatacaattaatttaaaattatagttttactctgtttatttacaaatttgctagataaaacataatctcagaaaaaaagtgtttctttttgttgcttctgcactatagtaaatatctagatatctataacaggcatataatatagtatatatatagggaatcctagtgaagagtatagcagttatagaaatatatatggagagaaatcttataaaatggttatgttctaagtatccataatgaaatcctataaattttattgcaggagagaacaatgaaaagtgtcagtgtgtgatgatactaaacttttatttccattttgtcacttctaaaacacatttttgaagcattttaaagacctctgaaatgacaatgcatcttataatcaatggtgtgtcaaaccatttggaacaattttttca

SEQ ID NO: 33287 - DNA, 652 bp, Homo sapiens
tacgactcactatagggcgaattggagctccaccgcggtggcggccgccgggcaggtacatttttaccttaggggatatagcccagctgtgtccagccagggtggagaagcgcatcttccttctgattcagtccgtcctggcttcgtctgctgatgcttaccactcaccatcatctcaaggcagcagtgaggccccagcgtctcagccacccccccaggtcagaggttctgtcatgccctctgtgattagagcacatgccatcattaccttaggtaagaaaaacatgggagaatggggcttgacatcgttctgtgtgtagctgttgtcttaagtaagtccagccatgggactgtgtcaggggctgcggagcctgtctgtgtctgctctcagccatgtggttcctagaggtggctctgatctgagtgctgagctctgcataactgcgtgctggtcatgagagccctcaggctgataagtcctcaagactaaggtacctcggccgctctagaactagtggatcccccgggctgcaggaattcgatatcaagcttatcgataccgtcgacctcgagggggggcccggtacccagcttttgttccctttagtgagggttaattgcgcgcttggcgtaatcatggtcatagctgttt

SEQ ID NO: 33288 - DNA, 475 bp, Homo sapiens
  misc_feature 62: n = A,T,C or G
cgtaatacgactcactatagggcgaattggagctccaccgcggtggcggccgaggtactttntttttttttttttttttttttttttttggtttcaagaattcaggaatttcaaataacaaaaacaaagcatattataagtagatgtggggaggaatggctaaagaataggaatacctacccaaagggtagatgaggttgtcctgctggaggatgatcacattggagaaagaagctcagaggatcccaggagaagactaagtgcctttctagggagccctgttcatcaggatgtatggtgactgctttctttgggcggttgtctcatcaatagcagccatagagactcaatatatatcccaagacttttataatcccattggtattacactttattggcactacactttgaatatttcaaaagaatcttaagctccccatgaccaagagtggaccttatgaatgtaggagtggta

SEQ ID NO: 33289 - DNA, 676 bp, Homo sapiens
  misc_feature 595, 638: n = A,T,C or G
ctatagggcgaattggagctccaccgcggtggcggccgaggtactatgaataaggtattgaaatccttttatattttagagcatgacagtgataattttctgaggtaatattttctactttaaaatagtctctgttaaccattataaactatgtagtttaaaaatattctatgcttgttattgagttaaatccaaacaataactgataaacaaggtaagacagatattatcatcaccattggatataggaggatttctcatcctcagcagactcttgagactttgggccagataaatgtctgtcgtaagggctgtcctgcacatggtagggtattttgcagcatcactggcttctacttactgcatgcagtggcatccccattcctcagttgtgataacccaaaatgtttccagacactgccacatgttccctgagtgacaaaatcaccctctgttacctacttaatgtaatgtcagtaaatctacagtgattaatgttttataccttcaatcaatgaatgttaattgagcacatactatgtgtcatgtgttgttctaggcttttgccatataatactgtcttactatatggaanttacattcaagttggggagcggaaagcaatataggtatagatnttaggaaaggcctctctgaggagatgacatttaatcag

SEQ ID NO: 33290 - DNA, 681 bp, Homo sapiens
tacgactcactatagggcgaattggagctccaccgcggtggcggccgcccgggcaggtaccttttctagaatgtggtcaaagagctgcctgcatccatcacattggggcttgttaccatagaagtgccctggactcccctccagaacctgcaacttgaatctctataacgtgaagtatggggatcttcatttgtagcagccttgtccaaaaattaatcttcacactaacgcataagaaccactgcatactctctgcagggactgccttaaatattaggttaaaatcctagtgttaaagttgtttgattaacaacattggcaatatcacacaatttgtttataaaatcctaatgaataggtctgtgttcaagttattatgatcgtatggaatattgccctttgcatgtttccatcccctacagaaactacagaaatggatctgctcgtgactcggcctttaaaataaattactatattgtttttaaacgtctccctcctgtcagctattaacgtatgttatgacctgaagaaaatatgtaaaacatcaaaagaaaagtcagcattgaaattggaatttcgtaattaaatgatatgtaaaatttgaatattatttgttcagtcttattcttccagaacctcagttactttcttttattaattcagacagttaccacaatacct

SEQ ID NO: 33291 - DNA, 515 bp, Homo sapiens
  misc_feature 363: n = A,T,C or G
tacgactcactatagggcgaattggagctccaccgcggtggcggccgcccgggcaggtacagtggtgcgatctcagctcactgcaagctccgcctcctgggttcacgccattctcctgcctcagcctcccgagtagctgggactacaggcatctgccaccacgcctggctaattttttttgtatttttagtagagacgggatttcactgtattagccaggatggtctcaatctcctgacctcatgatccacctgccttggcctcccaaagtgctgggattacaggcatgagccactgcgcccagccgagtcattttttaatactactgcatgtgagttaacacaatcattcccaaattgaagntttagatgggccctcaaaatttttaggatatggttttcctacaggtttatattgaaagtatggggtatctcctattactcctctttttatttgtcttaaaggaaaaagggagaggccagagaccaaatgtccccatttccctatagctaatc

SEQ ID NO: 33292 - DNA, 493 bp, Homo sapiens
gagcgcgcgtaatacgactcactatagggcgaattggagctccaccgcggtggcggccgaggtacatctctagatgatcacgaatgtcaaatatcacactacactgtgatatggggattccccttgggggttttcatgtgtatagggtgcctgcagctacactaaacatcttaaagctaccacaatgttcacttcatatttttgctttttataggctttcttggtctcctcctatgttcccatcattttcttgctttgaatctgtaagaatcgagttgaatcttctccattttaaattttccataggctgagaaactgtttagccaagtttggataaaattgtatccaaagtaagagtatacaagctatgggcaagtccaaaatcaagctgttcacaggaccatgttctctctaaaagttctaggaaagaatccctcatttccttccagcttctgggtggctgctggcattcctgggccggtggctgcatccc

SEQ ID NO: 33293 - DNA, 463 bp, Homo sapiens
actactatagggcgaattggagctccaccgcggtggcggccgcccgggcaggtacagcaatatcatgaggaccagaatctatctaaccatctcatcctttccatgtcaaatacatggcctttgccatgtattttcatcagtatcttcagggcagtgaccttggtaagtcattaaggtggtaagtggagcagcaaagccgatatgtcactaggtagtcagcagacccagactgaagcctgaagagtgaaacaactttcctgctgggtggccctctgttcgttctattcctattttatcctgatggggagaagtgctttttaaaaatgatctttaatatttccagagtggctaacttccaaaaaacataacctaaagagtaaaaacattcttttctaaagaatgagaatcatgatatgctcttgacaagtatattagccatcaactacagaagacttaaacaggt

SEQ ID NO: 33294 - DNA, 441 bp, Homo sapiens
tatagggcgaattggagctccaccgcggtggcggccgcccgggcaggtacagaaacggtttcactatgttggccaggctggtctcgaactcctggccttcctcaagtgatccacatgtcttggcctcccaaggtgctgggattttcttttaacttttaataaatgtagcaggaacatctctcctcaattcaacatcaccataaaaagaaaataataataaaatggaagaaatcacctatcagagagagaaattatttttgtggtgggggctccccccaaatatcacaagtcacttcacttgtctccaaagacaacattgaatagtgctttgaaggtggtttcaatcatgagactaaagaggtggcatttacccctaccagatacctgttgctttcactccaaggccttctgaagctaaggggaaagcttatcccatggcca

SEQ ID NO: 33295 - DNA, 445 bp, Homo sapiens; identical to SEQ ID NO: 32594

SEQ ID NO: 33296 - DNA, 460 bp, Homo sapiens
ctactatagggcgaattggagctccaccgcggtggcggccgcccgggcaggtacctcagccagcagaacatcgctgggacgtgcctggcctaaggcatcctaccaacagcaccatcaaggcacgttggagctttcttgccagaactgatctcttttggtgtgggaggacatggggtacgcggggattccaggctcttctgtgcctgtgggactacattctctgtgccgggcttagagaacacgaagagggagccatctgccacactctggaggctgaagcctgcaccagtgctgctcgcctcactgtggtaggtggtggtgatggaaactgcagatcggccagagtggtagaaaagttgctgcagggtttttctggctttgcctgcccagccgctccatgcctggctagaggagaaggaggagccacatgcggtacctcggccgctctagaactagtgga

SEQ ID NO: 33297 - DNA, 577 bp, Homo sapiens
tactactcactatagggcgaattggagctccaccgcggtggcggccgcccgggcaggtactactggcttcccagtggttgggttgagtataagcccccaaatatgagtaaaagaagaaaaagttaattcaatcaccaagtcttgctcgcatattaaaaattggatagatgaatgttcaatcatatgttttggctttggccagccagacgaggtcaatttttagatttgaactgcttagaattcttcaggcaagtcttgatggagcacttcttggacagttagaactttaccaggttcacaggagagctcagatgaagcgaacacctcatccacactggtttcctttggagacctttactgttgagaggtggttttcatagccgcaaaatgacaagtgcaagttgagtagatcagtgtttatcaaccaggtgccacattgtgccccaggagacatttgacaatgatggggtgttactggcatctagtagacagaggtcaaggatgctgcttaacatcttacaatgcacaggacagttgccacagcaaagcattacccagactcaaatgccaatagtgc

SEQ ID NO: 33298 - DNA, 439 bp, Homo sapiens
cgactcactatcgggcgaattggggctaattggagctccaccgcggtggcggccgcccgggcaggtactgccaccatctccgtttccaggagtcttctgcttgctctttctggtcttcctcacggatcctgaaggggggttctctgcagagcgaccaccccatcttcctgggagagctggttcaagatttttctgctgtggaccagctgtcttgtttcctgaggaggcccctctcattttacttctctgcatgttgcttctagttggttttttgaagttctcttattctgcagattgctgtccacgaggttgagtaaccctgctttctggaactcattcaaccctgtttttatttccaaccaacaattcttccttctttccctttcaagaactcctaatgattttcccagatgaaatcttatagatcttctgggatggt

SEQ ID NO: 33299 - DNA, 463 bp, Homo sapiens
tacgactcactatagggcgaattggagctccaccgcggtggcggccgaggtacgcggggagagtccctctgtgaatttacaacacccaacacccatgagttcagtccttaagaaggaaaattgagcaagtatttaattggttggacattgcataaaagaggtgcatatccaggctaactctagaaattttattctcaaacttagttggcctctttttcttctgtcagaggaccattcttagtggcactggggaaatcttggcacccagaagaattcaactgcgctcactgcaaaaatacaatggcctacattggatttgtagaggagaaaggagccctgtattgtgagctgtgctatgagaaattctttgcccctgaatgtggtcgatgccaaaggaagatccttggagaagtcatcaatgcgttgaaacaaacttggcatgtttcctgttttgtgtgtgtag

SEQ ID NO: 33300 - DNA, 469 bp, Homo sapiens; identical to SEQ ID NO: 31275

SEQ ID NO: 33301 - DNA, 655 bp, Homo sapiens
gtatacgactcactatagggcgaattggagctccaccgcggtggcggccgcccgggcaggtaccctggcaaggtttgtcctgtcttggtagcagaaagaacttctcaaagtaagggcttcacactaggggagagttcaatggcccaacccagccatggccaccctgacaccatgccctgatgctagtccctgtggcctggcccacactgaaaatactgtggggacaacagaatggatttgcaagttaccactatctctcaccagctgtaagaccctgggcacattgttgatcctaagcctcagtttcctaatctgtaaaagggtgatattaattgttcgtgctcacagaactgttatgagaattaacagaaatagcatattcagactatagcagagtgtctggcatgaaacagagactcaataaatacaggaacaatttggttattagaaacagtgaggcttggcatggtggctcacacctgtaatcccactatagcgcttctcatgtgaatgtttcattctcatagtgcccaactttagtttttaattttggaaacttcttatctatagaaaatttgaaagaataatgtaatgaatctcaatatatccttcttttagagccatgaattttaatatttttccatgcttcttcttg

SEQ ID NO: 33302 - DNA, 475 bp, Homo sapiens
  misc_feature 360: n = A,T,C or G
atacgactcactatagggcgaattggagctccaccgcggtggcggccgaggtacaagaccccaaatgtgagagggtgtttgtttcagtgttttatagagttcctaatatgccatcatatatacattcagttgttttcaaaatacagtttagtatttggctactcacaaagtaataaaacatttaaatcacttaaccatacaattcttggtaaccaaaaggcttttctttctattcagtagtttaacatccagctttcttttttagggcaaaggagatagaagtggatgaaatgagagagtatttttttaattgaactctgattaatgccaaaagtgttcaatcactatgtgtggcgaagnatcctggtacctgcccgggcggccgctctagaactagtggatcccgcgggctgcaggaattcgaaatcaagcttatcgataccgacgaccttgagggggggccctgtacccagct

SEQ ID NO: 33303 - DNA, 445 bp, Homo sapiens
cgactactatagggcgaattggagctccaccgcggtggcggccgaggtacctatgctttcagagtaagagcttacaagggttcaatctgtagttcttgcagcagagaattgattcttcatactcctccagctccagttttcagcttcctctttgatgaaaaatgtggctataataatgaacacctcctgctgaacttgaagagagaccgtgtagagagtagagctggatttaatcttctgcttgctgcagaacgcatccaagtgggttattacacaagcttagactacatcattggagatactggcattacaaaaggaaaacacttctgggccttccgtgtggaaccatattcatacctggtaaaagtgggagttgcttctagcgataaactacaagaatggctccgttctccccgggatgcagttagtccaagatttgagcaag

SEQ ID NO: 33304 - DNA, 542 bp, Homo sapiens
  misc_feature 298, 301, 303, 305, 307, 309, 312, 313, 320, 321: n = A,T,C or G
gctgcaccgcggtggcggccgcccgggcaggtacaacgatttcccaaatgttttcagggcaactaggctatttggatttccttggctgtcactactacctgccaccgatctttattctagggacaaagattagataagtgattccaaagtctcaagattctcccttttcaatcatctccactttttagagcaagcctcctctatttgtatatgctaatttattttctcagattaccctcaagcctctgtcctgggaaatcttcaccttattttgggctctggcccccgcgtactttanatnantncngngcnnatggttnngactccatgaagaagcttcatctcaacctccgtcatgttttagaaaccttttatcttttccttcctcatgctactcttctaagtcttcatattttctcttaaaatcttaagctattaaaattacgttaaaaacttaacgctaagcaatatcttagtaacctattgactatattttttaagtaggtgaattaatctctatctttcaaagagaaaaaaactta

SEQ ID NO: 33305 - DNA, 453 bp, Homo sapiens
atacgactactatagggcgaattggagctccaccgcggtggcggccgcccgggcaggtacggatcctccgcatattatctcaacagaggacagtagctcaggaggcagcttcaaacggtgacctgtggcctgggccatctcttcgtcatgtgcttcacttttccctgtttccctgtgaactggcttccatggttctgtagggtagtgagtcggggttgtggctgcagcagagcaggagatgcttgcccgagtgggagcaacccacccccgtgtccccaatgcctcactcctggcttctagtgcagccctttgtagactcacctcgcaagaaggaagatctgcctggagacctgatcccagtccagctttttgaccataggtcatctttgtccccttgctcctttgcatcatgtcataaaatttgaggatatcagctgattatttttttcttcc

SEQ ID NO: 33306 - DNA, 464 bp, Homo sapiens
tatagggcgaattggagctccaccgcggtggcggccgaggtacgcggggattctcaatcctacccatgatgcagacagattacctcatttcagctcaataaaacatcaccaaattcccttaggcagaaaaagggtggggagtgccctttcttgaaggaatcccttaagtgcacgtctcccgttttcttttcacatcaatgcagagtccctctgtgaatttacaacacccaacacccatgagttcagtccttaagaaggaaaattgagcaagtatttaattggttggacattgcataaaagaggtccatatccaggctaactctagaaattttattctcaaacttagttggcctcttttttttctgtcagaggaccattcttagtggcactggggaaatcttggcacccaaaagaattcaactgcgctcactgcaaaaatacaatggcctacattggatttgtag

SEQ ID NO: 33307 - DNA, 463 bp, Homo sapiens
tacgactcactatagggcgaattggagctccaccgcggtggcggccgaggtacgcggggacatcaatgcagagtccctctgtgaatttacaacacccaacacccatgagctcagtccttaagaaggaaaattgagcaagtatttaattggttggacattgcataaaagaggtccatatccaggctaactctagaaattttattctcaaacttagttggcctcttttttttctgtcagaggaccattcttagtggcactggggaaatcttggcacccagaagaattcaactgcgctcactgcaaaaatacaatggcctacattggatttgtagaggagaaaggagccctgtattgtgagctgtgctatgagaaattctttgcccctgaatgtggtcgatgccaaaggaagatccttggagaagtcatcaatgcgttgaaacaaacttggcatgtttcctgtttt

SEQ ID NO: 33308 - DNA, 519 bp, Homo sapiens; identical to SEQ ID NO: 32483

SEQ ID NO: 33309 - DNA, 385 bp, Homo sapiens
actactatagggcgaattggagctccaccgcggtggcggccgaggtacttttttttttttttttttttttttttttagaggactctgtaactctgagtttattcgttttcattttgttattgtatcagcattaaagaaatgcctaagttgatgaccattgggggatatagtttggccattttcttataaatatttttaagaaggcaaaaaaccttgtttttgatcaccagttatcaaaattgcaacctttcacatgggaatataatttatatgatatttaaatcatgtctagtttctatgatcataatttatataatatttctttagaatcatttttgtggcggtttttttgttttgctaatctttttagatatctttagataat

SEQ ID NO: 33310 - DNA, 414 bp, Homo sapiens
cgactactatagggcgaattggagctccaccgcggtggcggccgaggtactcccatcatagctgatttcaagctatcaaagtggtggaactccagaaaatggaacaactaggtcttatgagccagttccagcacactaagagactaaagccagcataacttataaggtgctatacaacgctggcatcccgtaggagatcttccatcattacatcacagtattttagaatctgcagttaaccaactactgtttccaaactgactcaccttgtaggggactgctgctctgtgtctgagctctgagatcgagcaggagggttagaacttcgcttcacccaagcattctcctttggtggaggggctggcattacctttaggggctgatcaggtttgggaggtttagaagttggagagt

SEQ ID NO: 33311 - DNA, 416 bp, Homo sapiens
ctactatagggcgaattggagctccaccgcggtggcggccgaggtaccgactcctcagaaactggcatgccaaatcaaaatgggtctggttcaatcctccctaatggcaatgtaaacccctctaactaatcccacttctcctaattatctttttctccttacgaacctaaaaatctcaccatttctattagcctgaaaataacatccctctgttcttctcttcctccttcagcactggatctcacttacaataggttttatttaataattatcttccttacactttctgtctcaccagtttcccctgaaactgatttacctgctacacaaaattgttcttattgggcttatgtgccttttcctccacttattcgacctctcacctggatggatgctcctgcagaaatctatactaa

SEQ ID NO: 33312 - DNA, 413 bp, Homo sapiens
acgactactatagggcgaattggagctccaccgcggtggcggccgcccgggcaggtaccctccaacacctcttccataaaatcagcaaacaactgacagagatcatgcagcgggagcccacgatcggtttaatcatcactcacttccattggatcaactacaaatcaactcagatgagagtgctgagtctcagaggatggacatctcaccccttgccatacagataagtagaaaggatggtattcaaaattaatggccagactctaagtcccagatactatacttcatggtcttccaactctcaaaaagttgtgggagttttttttgtttttgtttttgtttttttgagacggagtctcattctgttgcccaggctggaagtgcggtggagtgatctcagctcattgcaacct

SEQ ID NO: 33313 - DNA, 428 bp, Homo sapiens
tacgactcactatagggcgaattggagctccaccgcggtggcggccgaggtaccttcttgttgtgttttcacatggctcagttgttccaaccacattaaaaaaactttccaatagctgaatcgagtgtcagtttttgagtttatttggcaaaaatgcattaaagcttgctgcatttaagagatgtcccattatgcaaaccgggttgaaagaatattacaaatacgttttggaaaaatacggagtgtcgcgcagctcagcaatccgcagtcttaatgcgcgcctctttccaggaatttgatccagcatcaaaacccacaggtgcactcaccacacgggagtaacaagtaaatgatgtgccagtattcaacctgcaagtgcgtcgtcagagcctacctcaccctcagcataactttcaccggtattcacc

SEQ ID NO: 33314 - DNA, 437 bp, Homo sapiens
  misc_feature 287: n = A,T,C or G
ggcgaattggagctccaccgcggtggcggccgaggtacatctctagatgatcacgaatgtcaaatatcacactacactgtgatatggggattccccttgggggttttcatgtgtatagggtgcctgcagctacactaaacatcttaaagctaccacaatgttcacttcatatttttgctttttattaggcttttttggtctccttcctatgttcccatcattttcttgctttgaatctgtaagaatcgagttgaatcttctccattttaaattttccataggctgtnaaactgtttagccaagtttggataaaattgtatccaaagtaagagtatacaagctatgggcaagtccaaaatcaagctgttcacaggaccatgttctctctaaaggttctaggagagaatccctcatttccttccagcttctgggtggct

SEQ ID NO: 33315 - DNA, 444 bp, Homo sapiens
ctactatagggcgaattggagctccaccgcggtggcggccgcccgggcaggtaccccctgaccccttcctccgaatatacttttgtctcttgtcttttattcctgtgttcaccccactgtgttcagtccccctaggtctgtgcgggttacaagtggcgcccaaacagggacagaattgggtgctttacacccttttctttagcagggactggcctagtgacttacctctattcagaatatggcaaaggcgttggaatctcacctccttaattaagctatacatgtttaaaaaaattattcaatgagaattgttaaagcacagtaaggaagactttattcagggccattatgacaggtatatagacaaatgtaatgggattttgcagtggtagagggtgaatggacttaactccaaatatcagcataagtaagtgggaatttata

SEQ ID NO: 33316 - DNA, 288 bp, Homo sapiens
actactatagggcgaattggagctccaccgcggtggcggccgaggtacagacaggaggctcagcacttgtgccaggttagctctgcatggtggtcccactaaggcagtgggaagccaggatccagggaaccctatagcagggggatggcagagcaaaattcatggcctacagctgcctcttgccaaactgcactggattttgtgtctcccattccccagagctgtctgaggtgctttggaccatggtgatccacatcggcctgattcgtgaagagacttggcgggagg

SEQ ID NO: 33317 - DNA, 414 bp, Homo sapiens
ctactatagggcgaattggagctccaccgcggtggcggccgcccgggcaggtacccaacagccatggctcttgcgactcacctgggcagctgtgtggctgcgcacctgactcactctttctagagggtgccttgaacagcatcagcgtggcccggcgttccctacaaatagcccttgcaattgctgaccccaaacaatgttgggaataacagaagggacaagggaacaaagaaaaggccaggaaggtaataattaaccacttactgagttcaaagccatcttgctgttatcaacagcatcgagtaatgataggtatctggaatgttcaatatgacctagaagaaagaattacaggactgtaatatttccataccagttagtttttagaagataaatctggaaagaactagaaga

SEQ ID NO: 33318 - DNA, 432 bp, Homo sapiens
gtatacgactcactatagggcgaattggagctccaccgcggtggcggccgcccgggcaggtacagcccacagaactgtgagccaattcaatcctttttctttttcaattacccacactcatgtatatctttatagcagtgtgagaacagattaatacactcctcctcagaaagcattcaatttagctgtgtctaaagtatgcccgggtgttcttagggtgttatcttagccaataattcttcctcttcagcaagatctatttgcctatgacagcttgacctacatttcctaccatacttgtcagtaacaagtagcccataacatctgaatggacttcattgaaatcacagaggttctttagttctctactttattagcaggcattagggaaacacatcaactttctaatttaataaggtgcctgttgctttg

SEQ ID NO: 33319 - DNA, 410 bp, Homo sapiens; identical to SEQ ID NO: 31685
  misc_feature 212: n = A,T,C or G

SEQ ID NO: 33320 - DNA, 442 bp, Homo sapiens
atacgactcactatagggcgaattggagctccaccgcggtggcggccgaggacttccaaaccctcctgttctttcctttttgttttccccaattttaacataaggcaaaagcagtaattgagcaattctatcacctggattggcactccggggaacagtggagctgatcactaactgaattccccctttataatctgaataaaataaccccagtatgaatttggactcccttcaaatttagacttgatctccctcaaaggcctaccctcccttctggcagcgggccatatacccctctaggaatcttttgtgggggctttccagggagtaaaaagaccatttgggtggaacataaatctactgcggtgctgcctgcagtggcgcgggacagctgttggattgttgtaattggctgactccctgaagtggtggtattttctga

SEQ ID NO: 33321 - DNA, 375 bp, Homo sapiens
acgactcactatagggcgaattggagctccaccgcggtggcggccgcccgggcaggtacctaaaaaagaggaaggttagggaaggctgttgtcctttgcttactccttcctttcccagactttgtgtaaaatacctcttacttcccaggctctttactctcccttccaacccagatcctgacgtgtgcatctctttcgtgcaagacaatgtgatccgagaatataacttgaatgagctataccagcgggccaagaaactatcaaaggctggagacaatatctcctgaggagcagacctgtggcttcagacccccaccacagtgttcagatgggggaaaacacagaaggatataataaggatcctcaactttggca

SEQ ID NO: 33322 - DNA, 457 bp, Homo sapiens
tacactactatagggcgaattggagctccaccgcggtggcggccgaggtacaaggtaatataaatgagttttatcaatattttgatcaataactatatcaatttattttttaattaagatggggctgaaaattttatcaactactagaaaaagaaaatgttgcttccaatataggagacaaaagcagaagaaggtatatctaactgagatagccttccttctgagaggggaaatgaaatattaatctgatcttggaactcgcttccaattaattatgcatgccccgagtcagcatacagtgttgccatcatcataatcaaatgcacattagcagctttttctacttggaataggctgccttgcagggtggcgtttccttgacattgcagtcattcagaaagaggctgatgagggcatcctggaggaggacatgtgggttattgggggggtcagcctt

SEQ ID NO: 33323 - DNA, 416 bp, Homo sapiens
actactatagggcgaattggagctccaccgcggtggcggccgcccgggcaggtacgcggggatcaatgcagagtccctctgtgaatttacaacacccaacacccatgagttcagtccttaagaaggaaaattgagcaagtatttaattggttggacattgcataaaagaggtccatatccaggctaactctaaaaaattttaattctcaaacttagttggcctcttttcttctgtcagaggaccattcttagtggcactggggaaatcttggcacccagaagaattcaactgcgctcactgcaaaaatacaatggcctacattggatttgtagaggagaaaggagccctgtattgtgagctgtgctatgagaaattctttgcccctgaatgtggttcgatgccaaaggaagatcct

SEQ ID NO: 33324 - DNA, 412 bp, Homo sapiens
ctactatagggcgaattggagctccaccgcggtggcggccgcccgggcaggtaccaacacttccagtgcttgatggtgaccatgataggcctagaaataaataaaaatgtaaatttaaaacatacatatttagactgacttcctaaatacttgaataaatgtaaataagcaaacttgacttcatattattatcctacttgagataatccaaacttctacatcgagaattcaggaagttaactacagatctttctaataatcaacatactacgctactgagttagggaacaggcattctaaaaataatacaagttcaaatgacaggtcatcttttcatgagtatacaatgcttggctcacggcagacattcaatggatgtgtgacacggattcatttaaagtcttgatttcaa

SEQ ID NO: 33325 - DNA, 429 bp, Homo sapiens
tatacgactcactatagggcgaattggagctccaccgcggtggcggccgcccgggcaggtaccctgcacacactaggttctcaagaaatattcatgtaataagtgaataattgaatgaatgaatgactaagtgaaacttctctttacaacaagcaaatgtaatagccctttctaagctctcatcatcctcattgtccttggggggattcccaccacactcagaattccttttcacctttccatgcatatgaggccccacctaatcaggtgctggtcttcttagctttctgtctcctaccactttttgtcttgcttcgggaactccactgtcttttctgttataggaacatgctaaggttattcttcatagtcaagagcacaagctttgaacccagccaaatctgttcttgaactcaagttccacttatt

SEQ ID NO: 33326 - DNA, 463 bp, Homo sapiens
cgtaatacgactcactatagggcgaattggagctccaccgcggtggcggccgcccgggcaggtacgcggggcttgaaggaatcccttaagtgcacgtctcccgttttcttttcacatcaatgcagagtccctctgtgaatttacaacacccaacacccatgagttcagtccttaagaaggaaaattgagcaagtatttaattgggtgggacattgcataaaagaggtccatatccaggctaactctagaaattttattctcaaacttagttggcctctttttcttctgtcagaggaccattcttagtggcactggggaaatcttggcacccagaagaattcaactgcgctcactgcaaaaatacaatggcctacattggatttgtagaggagaaaggagccctgtattgtgagctgtgctatgagaaattctttgcccctgaatgtggtcgatgccaaaggga

SEQ ID NO: 33327 - DNA, 419 bp, Homo sapiens
ctactatagggcgaattggagctccaccgcggtggcggccgaggtacttcactgatttttctactgcatctttaccacctgaactctacattattcctccacatgtctgtcccgtctgctccaagactgcagaggacagtcttgagcatcatcttactcacattttactcagaaatttcttattgagtcctgctaaatacatgctaggcattagggtttaaaaacaattaaaataaagcatgtcagggatggcttttctagaaaacatgcccaagcagagacttaaatattgagactagccagattaaaaggggtagagggcaggaaagggtgacggcatgccacgcagcagcaagagcgggagcgaggcctgaaagagtgaaagtatttgcctacaataggaggatgagtgagtaggg

SEQ ID NO: 33328 - DNA, 418 bp, Homo sapiens
cgactactatagggcgaattggagctccaccgcggtggcggccgaggtacgcggggagctcaataaaacatcaccaaattcccttaggcagaaaaagggtggggagtgtcctttcttgaaggaatcccttaagtgcacgtctcccgttttcttttcacatcaatgcagagtccctctgtgaatttacaacacccaacacccatgagttcagtccttaagaaggaaaattgagcaagtatttaattggttggacattgcataaaagaggtccatatccaggctaactctagaaattttattctcaaacttagttggcctctttttcttctgtcagaggaccattcttagtggcactggggaaatcttggcacccagaagaattcaactgcgctcactgcaaaaatacaatggcctacat

SEQ ID NO: 33329 - DNA, 418 bp, Homo sapiens
tacgactcactatagggcgaattggagctccaccgcggtggcggccgaggtaccaggagggtattgatgtttgaggtccaaactgaaaacccatcacctccttcccactgctatagcagcgttagccctggggttcattatctagccagttcacaccttctaaagtggggctctgaaaatgtcttacttccctcacagacaaagcaattctcaagcctcctgagatcacccaccaaccagagcaactgctgtcacttggaggtgcagctgaattcttctaattgtgacacaaactcttgaaactgtaaatgctgaaagattaaatgaggttataacactcagaaggttttacaagtaaaagtaagtcaaatcaataggtctttatttcatatctgtaatggtttagctctgcgggaag

SEQ ID NO: 33330 - DNA, 462 bp, Homo sapiens
gtaatacgactactatagggcgaattggagctccaccgcggtggcggccgaggtacaagttcagagacattcagttgcaaagacatttaagcatattccctctgcttatgggaacttttctaaaaggtttgtaagaggaaacggcactgcggagggacaggagtggaaatgtatctgtctggttccctcctgactcttgcttcccattgggtcaaattttattccacagagatctaatgcttctatacatttggcaacttggtagctactcaagaagccatttcccaagccctgttttgtggcatttcatctaagaccagaagtggaggggagattcagcaggtcagactaccaaccaagagagaaggaggcagctgagggaatgtagaaagcatacaaaaaaaaaaaacaaaaaaaacaaaaaaaagacaaaaaaaaaaccttacatacaataccacacag

SEQ ID NO: 33331 - DNA, 420 bp, Homo sapiens
ctactatagggcgaattggagctccaccgcggtggcggccgcccgggcaggtacttccaaaccctcctgttctttcctttttgttttccccaattttaacataaggcaaaagcagtaattgagcaattctatcacctggattggcactccggggaacagtggagctgatcactaactgaattccccctttataatctgaataaattaccccagtatgaatttggactcccttcaaatttagacttgatctccctcaaaggcctaccctcccttctggcagcgggccatatacccctctaggaatcttttgtgggggctttccagggagtaaaaagaccatttgggtggaacataaatctactgcggtgctgcctgctgtggcgcgagacagctgttggattgttgtaattggctgactcc

SEQ ID NO: 33332 - DNA, 196 bp, Homo sapiens
actactatagggcgaattggagctccaccgcggtggcggccgaggtacttttttttttttttttttttttgcagatcctttcctttttgtatttctagtctccctatcaaatttcagcctgccttaagtaaatggaagtttccttcagttgtgaactatctccaaagtttgtttgcctgggattcttctttaaaaa

SEQ ID NO: 33333 - DNA, 439 bp, Homo sapiens
gactcactatagggcgaattggagctccaccgcggtggcggccgaggtacgcggggagggtggaagaaagtcagagctcagcccaggctgccttttccctgcagcgagcctcagccctctccccagcacgcccagctctctcatcatggattattcttcagctcattgcttaagtcgtcctgtgacacctccgggaacggacgctgttcttccttttcagtggtcagcaagtccatctgggcagcgcagagggaccaaaggtgtccatcgttggcctggacgattctggcttcctccaggttcaccaggagggcggcgagggttgtgaactgtgcacccggacggcaactccttcgacatgctgagaaacctcatcctccccaaacggcggtaatgcggggcgtccccgagacgcggctgcctggtccgtgcccatgca

SEQ ID NO: 33334 - DNA, 175 bp, Homo sapiens
gcgaattggagctccaccgcggtggcggccgaggtactggagggtagactgctataacaacttttggttttggatgggaataaacagaaaaagtctcatctccagttcatttctggggagggtcaggaggtggggggtgcttggctctactcccttcgtatgattttcccttctt

SEQ ID NO: 33335 - DNA, 400 bp, Homo sapiens
tatagggcgaattggagctccaccgcggtggcggccgcccgggcaggtacagctctctttgaactttactgcccaggtgaacgttctctgcatttagatcttcaggagttttacagactagtgtggagtggacatgtaaggacaagaggaagaggcaggtttcagctgagctcttctcctccttagagcaggacagtgttgggatgggctgattgtgagtatggagttctttctggaggagctccagcaggagctgggcaaatactgggagctttgactaaggggcatgcattgcagatgaggtttgaccagaggttttccaggatccctgaagaactctgcacttctaagcctgtaaggccacaacaggtgagatgaagggggagttgaacttccagct

SEQ ID NO: 33336 - DNA, 444 bp, Homo sapiens
tacactactatagggcgaattggagctccaccgcggtggcggccgaggtacgccaggcactgttcccacactgaacaatggatgaactcattgaattctcatagcaactaacaatgctatgaggtggatgtcattattatctccatttacaaaggaaactacagcacagagaggttaagtaacttgcccaagatcacagagctagtaaatggcagagctgggacggaggtagtcagctgccactctatgctctgaccactgtgttcagcagtcttccctcaagacactagcaggtcatctaagccagaaacctgggagccagcctcaacttctccctcttcgctccctgtcagtccattatcaattcccagcaattttattacctcaaatgtcccttcaatgcaaaccaactctaccactaactgctttagtacctgcccgggc

SEQ ID NO: 33337 - DNA, 354 bp, Homo sapiens
tacactactatagggcgaattggagctccaccgcggtggcggccgaggtacttttttttttttttttttttttttcctatgggtttaatgcttagctatctcaaattccgtatgggccaggagtccctgaaacatatacaaattaggtcccctttgtgaccaacgtgctgttaggcagctaatctatttatcatctatttaatgttcatctagatcaatcagtcttctcaatcttgacatgcattttgggctgcataattctttgttggtggggactgtcctattccctatagaattaacccctggattctacttatgtcagcagcactccctccaattgtgacaactacaatg

SEQ ID NO: 33338 - DNA, 311 bp, Homo sapiens
actactatagggcgaattggagctccaccgcggtggcggccgaggtaccatgttcaggaaaccaaggacaatattgctctactgttggaaacagagtaatcaaattttctgtgctagccttaattcctgccctctttaagaggagcttaataaaatgtaaatatgcagaatgtttacttttggattgtctcatggtgtccctggaatgctccgagtgcacaagcttaccgcaaggccgaccacacgttctcgggagttcctggacagaccgttcttcacaacgaccacgctcaggtgtaacttcacctggg

SEQ ID NO: 33339 - DNA, 451 bp, Homo sapiens
tacactactatagggcgaattggagctccaccgcggtggcggccgcccgggcaggtactacaataatcctcaagatactgaaagtaatgccaagtgaaagaccaagggggtgggtggagggctaatgggctggacgaaatagccacttgattgctagttcatacaagatgtggcagcaactccttttctggctggagatcttggatgtcacatcttagaatcaggtggcaaagcatctgtgaagggcaatgtggcatcccagacagtgggtggtgagatcaggaagaaaaaatggaaatcaacagatggtggatcctacagctgagaactgattcttcaatttgacatggttggcataaacattttaaatggagcttggtaaagatcaggttattttaccattgaccaagctcttggcttctaaaaggtcctaaatttttgtttcctttgc

SEQ ID NO: 33340 - DNA, 352 bp, Homo sapiens
cgactcactatagggcgaattggagctccaccgcggtggcggccgaggtactgaggctgtatacagccacagcctctccccatccctccagccttatctgtcatcaccatcaacccctcccatgcacctaaacaaaatctaacttgtaattccttgaacatgtcaggcatacattattccttctgcctgagaagctcttccttgtctcttaaatctagaatgatgtaaagttttgaataagttgactaccttacttcattgcaaagaagggacacatttgagattcatcatcacatgagacagcaaaaatgctaaaagtgtaatttgattataagaagtttagataaatata

SEQ ID NO: 33341 - DNA, 460 bp, Homo sapiens
tatacgactactatagggcgaattggagctccaccgcggtggcggccgcccgggcaggtactccagcctggcaaacagaataagattctatcgccaaaaaaataaataagtaaaataatgttccaactaagtaaataccaatagttttaagttatcccctttcttgtgctttgatcactctccaggttaatgtcagcaaaaagggtggccgctctggtttcagaatccagaggatcagtcacaggcctaagcgcctgtccctggtccctccacggtctctcctgctggggacacgacgggctgtgaagagggtaaaaataatacacgcactgtacctcggccgctctagaactagtggatcccccgggctgcaggaattcgatatcaagcttatcgataccgtcgacctcgagggggggccccggtacccagctttggttccctttagtgagggttaatt

SEQ ID NO: 33342 - DNA, 424 bp, Homo sapiens
acactactatagggcgaattggagctccaccgcggtggcggccgaggtaccaaatacattgacagtggatgctttcacggctcagccaacacagttcagaggaatcttttcggcttccagggcattgcttgttaccttttgtcaggatcaacccaaatcctcagggatgctgtttttccacactgtaagtcctaactcattagtgggtcatgaaatcaacttaacagctcaagaccagtatattttaaacgtgaaatacattaaaaaatagaggaacaatagagcatataaaatggttaagtattggttcctgaaatactgtttcagctaaatattctatttactgtgtatactgggtcacaatataaagtgtttcctgttatgaaatgcaatttaaaaaaagaaagcttgaaagactgctgca

SEQ ID NO: 33343 - DNA, 296 bp, Homo sapiens
tacgactactatagggcgaattggagctccaccgcggtggcggccgcccgggcaggtactgtttactaaattatagcactgcaataagacatttcaccaatatgatattgaagcataacaagttatttcataaggaatggtaattatctaacattctaagcaaatttggcagtgtgacttggtggggcgcagtgctgtccctgacacaatgacagccttactctctaaattagtaacttccgtaggagaccccagaagcacacctccctcccagcagtgaaagccgaggattcccg

SEQ ID NO: 33344 - DNA, 472 bp, Homo sapiens
ctcactatagggcgaattggagctccaccgcggtggcggccgaggtactgggagaaattacatcctgggaagaagccacacattccagaaatggtggcttcactctttgagtccttaactgctgtaaacatgccattagcctacagcaaatgttattaatattacttgcaatggtgctattttatgtttgtctcaaagaagggattatctccatcctcaattcatactctcttaagaagatcgttacttttctcttaaggtgtcatggagaaactccagctgggcccagagattctgcagcgggaaaatccaaggcttatttatgccaggctgagtggatttggccagtcaggaagcttctgccggttagctggccacgatatcaactatttggctttgtcaggtgttctctcaaaaattggcagaagtggtgagaatccgtatgccccgctgaatctcctggctgactttg

SEQ ID NO: 33345 - DNA, 473 bp, Homo sapiens
actactatagggcgaattggagctccaccgcggtggcggccgaggtacgaaaaaatcaggctactaagcccactgttaatatagacgcagaccaattgttaggaacaggtccaaattggagcaccattaaccaacaatcagtgatgcagaatgaggctattgaacaagtaagggctatttgcctcagggcctggggaaaaattcaggacccaggaacagctttccctattaattcaattagacaaggctctaaagagccatatcctgactttgtggcaagattacaagatgctgctcaaaagtctattacagatgacaatgcccgaaaagttattgtagaattaatggcctatgaaaatgcaaatccagaatgtcagtcggccataaagccattaaaaggaaaagttccagcaggagttgatgtaattacagaatatgtgaaggcttgtgatgggattggaggaactatgcat

SEQ ID NO: 33346 - DNA, 480 bp, Homo sapiens
actactatagggcgaattggagctccaccgcggtggcggccgcccgggcaggtacagaagatgaaatagagtcttacagagcttaggtgagctccccagggtcatatagctagtaataataattgcccacattgattgagtgtttagaatatctgcgactctgttctaaaccatcttaagacatttaatcttctaaggtagttattgacatcatcaccattttacaaataagaaaaccaagtcacaagatttaagagacttgcctacagtcacatagctagaaagtggaaaaccaggatttccacccacacagtctgactttagcaggcagacactgatccactgcactaaattgccttgtctggttccccaaagagctggaactgacacacttggactctgattccaagttcagttctctttcaagtgaccctgctcattagcagatactgcatccaaatgagaagaaatggtcatgtg

SEQ ID NO: 33347 - DNA, 428 bp, Homo sapiens
ctactatagggcgaattggagctccaccgcggtggcggccgcccgggcaggtaccccagtgaatgttcacacgtccagagctagcacaccatctgcagggttgagcagcgagcgctgggacccccaaggattcagaatggacacagaatgcaggtgcaggaggaagcccagcacccaaggcagagcctcagtgaacagcaaagaccctaaaactgacttgcatcccccaatagataactctggaccgatgacaaagtttattcagagtgctgctccaaaatccctgctcttcatggtgacctatgacgacggaagcacaagactgaataacgatgccaagaatgccatagaagcacttggaagtaaagaaatcaggaacatgaaattcaggtctagctgggtatttattgcagcaaaaggctcggaac

SEQ ID NO: 33348 - DNA, 477 bp, Homo sapiens
ctactatagggcgaattggagctccaccgcggtggcggccgaggtactaacacaagccaaacaaaaatttctgctcctgttgcctggtttggaaactgttgaaatgatggaggaatccagtggaccatattctgatggaacagaaaattcacaactaaatgtgaagataagtggcatggagagaaaatcaaatggaaaaagagattcatttttggcacaaacaaagaataaaaaagaaaatatgaaaccagcagccaaactgaaacttgaatcttcgtctttaaaagtaaagggtgaaattcttttggaagaggaaaagtctactgactttgtgtttatacctccagaaggaaaagatgcaaaggaaagaatattaactgatcatcaaaaagaagttctcaaaacaaagcggtgtgatattcctgccatgtataataatctggatgtttcccaagataccttatttactcagtatag

SEQ ID NO: 33349 - DNA, 467 bp, Homo sapiens
gtaatacgactcactatagggcgaattggagctccaccgcggtggcggccgcccgggcaggtacgcggggtccgcttccttccagtaaggagtcggggtcttccccagttttctcagccaggcggcggcggcgactggcaatgtttggcctcaaaagaaacgcggtaatcggactcaaccccgccaagggtgggttggaaaccgaaacgagtcagtgttgaaacgtgtctcatcctattcctgaagccagaatattctggccatgagtcattgtttccgcccatcttgattcttttggaaatggcagctcttgttcaaagaccggaaagggtgggatgtcaatttcaagtggggtcaacctgagttctgtaaatcccagtagcgattttcccgccgcgggtgggcaggcgaatcttgcgctggtttagacaaaggaagccgagaggacctgcctgcttttctttttt

SEQ ID NO: 33350 - DNA, 445 bp, Homo sapiens
ctactatagggcgaattggagctccaccgcggtggcggccgaggtacgcgggggaaataaggaatgaacgttatgtaaagaccataatgctagtcagagaatgttccaatggaaaactgatgtttccttctgccaccaggacaaaacttttgtgatctaaaggcaaaacaataacaaaaacagcaacagcaacaaaaaccagcctaacagtcccaagtggtcttcactgtcatgattattaagcattttctccaaagtctgaactacagtttgttgaggtttcattgaaaatgatactaaaacaaatttgcttaaaagtaaaatggagttattggcatcacaaagatcatagtcaccttcttaagaattgcataacctttaatgactgtaaaggatttttaaagacgatccttgcgactagttattaatacatttttttgaggct

SEQ ID NO: 33351 - DNA, 459 bp, Homo sapiens
tatagggcgaattggagctccaccgcggtggcggccgaggtacatggcagacatttaagtttccggccccagcatctttcttatatcagacctggaattgaatgatggtgcccagcagctggggaactagggtgcccagaccctcattttctccaaccccacttcttcctggatcaccaaaatgcttggtttggattgttaaagtttaggagaggccattgtttttgactcctgcactaggccccagcagaccagaccgaaccaaaatgaagccacttgtacctgcccgggcggccgctctagaactagtggatcccccgggctgcaggaattcgatatcaagcttatcgataccgtcgacctcgagggggggcccggtacccagcttttgttccctttagtgagggttaattgcgcgcttggcgtaatcatggtcatagctgtttcctgtgtgaaatt

SEQ ID NO: 33352 - DNA, 472 bp, Homo sapiens
ctcactatagggcgaattggagctccaccgcggtggcggccgaggtacagagcaagcagttcagtccttcactccgatatgaaaggggtgatgtcaacctatccaggaaatattgaattgattttaaaactgctgtaagggtgaataaatcggtggtgctgtgcattagcatgagactgcctgcacccacccatgtctccccgtttatttgtcttaatgctaggattattagaaaccagctgaataggtgcccttcaaaatacagatcgagggatcagagaatgttgattttttttaagcctaaattttgtaacttggcattatcctagacatatttagctccctatttgcgtattttctttccaattctagtattcggttcatttatgaaaactggggaccgtgcttttccatcatctcttttgctcctctctcttcccatctccctctgacaagttttctgaagcatgtt

SEQ ID NO: 33353 - DNA, 481 bp, Homo sapiens
cactactatagggcgaattggagctccaccgcggtggcggccgaggtacctcctgctctagttttttggacttggcagtgctccactctactgctaggtcaaaagaacagccagagaaaccccacattcaggctaagttgcaaatggaaaggagctccctgctttcatcattaaaaagcactctgttcatcttaatgcagcccaatggagttgctttagtagcagtggctctccgggcctgtgtgttctcatagttaaaaaaataaaataaaaagcagatgggccggccagccagcctgcagactgtcagcgatgcagctttctgagaagtcagggtggggcaggggagaagggaagaacacaggcacacacacagagacagagaaggatgcacgcgaatgcacatgaacacacgtgcacacacacaccataacgagcatgcctgggcagttacatgtgccagaacacactggtatttatc

SEQ ID NO: 33354 - DNA, 474 bp, Homo sapiens
actactatagggcgaattggagctccaccgcggtggcggccgcccgggcaggtaccgagttgtagaggtagaagggattcagagatcctgttttccgtcagggtggttgggtgaggctcccagacacagggctgaagtctgaaccttcatcctttcactcccagcccaatgatgtgccactgtgtcatagccacatggtggttatgaatgcatctggaactctacattttaatctgccaggcatccacccattcgttcacataattcacgtgtgtgtaatagtaaccttcagaaaggaatgtcacaatatttttctcattacaacatctttaggctttaagatgaaaagggtgaagaaagaaatcttctctaaatcttgtattcccgctattcatttttttattcaaggaaaaacaaagcctctgttaaagctctgcttacaatgaaatgtaactgaagttctatccaattctt

SEQ ID NO: 33355 - DNA, 473 bp, Homo sapiens
actactatagggcgaattggagctccaccgcggtggcggccgaggtacgaaaaaatcaggctactaagcccactgttaatatagacgcagaccaattgttaggaacaggtccaaattggagcaccattaaccaacaatcagtgatgcagaatgaggctattgaacaagtaagggctatttgcctcagggcctggggaaaaattcgggacccaggaacagctttccctattaattcaattagacaaggctctaaagagccatatcctgactttgtggcaagattacaggatgctgctcaaaagtctattacagatgacaatgcccgaaaagttattgtagaattaatggcctatgaaaatgcaaatccagaatgtcagtcggccataaagccattaaaaggaaaagttccagcaggagttgatgtaattgcagaatatgtgaaggcttgtgatgggattggaggagctatgcat

SEQ ID NO: 33356 - DNA, 468 bp, Homo sapiens
actactatagggcgaattggagctccaccgcggtggcggccgcccgggcaggtacgcggggaaaaaagggtggggagtgccctttcttgaaggaatcccttaagtgcacgtctcccgttttcttttcacatcaatgcagagtccctctgtgaatttacaacacccaacacccatgagttcagtccttaagaaggaaaattgagcaagtatttaattggttggacattgcataaaagaggtccatatccaggctaactctagaaattttattctcaaacttagttggcctctttttcttctgtcagaggaccattcttagtggcactggggaaatcttggcacccagaagaattcaactgcgctcactgcaaaaatacaatggcctacattggatttgtagaggagaaaggagccctgtattgtgagctgtgctatgagaaattctttgcccctgaatgtggtcgatgc

SEQ ID NO: 33357 - DNA, 473 bp, Homo sapiens
ctactatagggcgaattggagctccaccgcggtggcggccgaggtactacaataatcctcaagatactgaaagtaatgccaagtgaaagaccaagggggtgggtggagggctaatgggctggacgaaatagccacttgattgctagttcatacaagatgtggcagcaactccttttctggctggagatcttggatgtcacatcttagaatcaggtggcaaagcatctgtgaagggcaatgtggcatcccagacagtgggtggtgagatcaggaagaaaaaatggaaatcaacagatggtggatcctacagctgagaactgattcttcaatttgacatggttggcataaacattttaaatggagcttggtaaagatcaggttattttaccattgaccaagctcttggcttctaaaaggtcctaaatttttgtttcctttgctttcacgagtgtttatttgctttccaggaactt

SEQ ID NO: 33358 - DNA, 476 bp, Homo sapiens
actactatagggcgaattggagctccaccgcggtggcggccgaggtactatagattatttgtcttgaagaagagctttgatatgtttcaaaattcgacgttggctttggaaggaaactgtaaatttacagatctttgtccttccccacaaagagccttaatctcacaggttggattatgtggaactcactgctatttttcagttctcctttaagtgactaaggaacatccagatacttccaaaaaaaaaaaaaagtctaagtttttcactttgtccattgccatttaattatcttctgcatattttaaagcatttcctgtgaacataagtattgcccatccagaaaatttgcgtctacattgattttatgtttaatgaaacctgttcttctcaagttctttatttaatcacataacatagtatcttcaaaggtgagataaaaaaatcactggagaaatgttaaaacttcatttatt

SEQ ID NO: 33359 - DNA, 448 bp, Homo sapiens
atacgactactatagggcgaattggagctccaccgcggtggcggccgaggtaccttctgctgttccctgggtcttcaatgactcaatttcccaccagcagtatcctttaaagccatcctgcatcctgagacaagagattgacaattcattgataagtagtcttaattgtcactattacagggctgtaggtcctttgccagccatgcctttcagtcctaaatggtcttcaaggttgggctgtgttgtccaagagctgaggaccttacatttattgttccaatatttattggctataatgatttctgtggagcagtcagctgtcagaaaattttgtctcctttgtaggtaacctgtcattggtctttggatttttttatagtctccctttgtatctggtgtaatttagtttcaatctgttgtgcctacgtgtagacttcttgcttgaaaa

SEQ ID NO: 33360 - DNA, 469 bp, Homo sapiens
actactatagggcgaattggagctccaccgcggtggcggccgaggtacgcggtacacacacacacagcacctgcacgcagatgcacacatctctagtcaaatgaggctctcagctttttgataggggctttttgatacgtgtataaccaatactttattctcactgtagtcaaggactcattgcaattcagaaatgagaagctgatccggaactccactacagctcaaagaaattctcgaatgttctcacctattaacagttattaaaatggaagaagctggggatgaaattgtgagcaatgccatctcctacgctctatacaaagccttcagcaccagtgagcaagacaaggataactggaatgggcagctgaagcttctgctggagtggaaccagctggacttagccaatgatgagattttcaccaatgaccgccgatgggagtctgctgaccttcaagaagtcatg

SEQ ID NO: 33361 - DNA, 433 bp, Homo sapiens
gcggccgaggacctggcatatactcaacatgtattttttcccctttctttacaatgttccttgccccgaacacttgaatagtggagagaggaatgtttgcttttcctctccattgaaccaacactcgcccatccactgagcccaagattcaccttaggattgtctgatggactcggctcttttgtgacctaacagtgcaggggccttgtgctgagctgcacatgctcgctctcgctggtgctccctctctctctctctctctgtctgcattatttatagtaaaccatattagaacagagtgttaaagaggaaggatgagtcattcccattgaaaccattgctgacataaataaaagcaaaatgcttactatgtgttgtgtgcagtatttaaagccaggttgtgctaaattctaatgctcccaaactggatctg

SEQ ID NO: 33362 - DNA, 462 bp, Homo sapiens
ctatagggcgaattggagctccaccgcggtggcggccgaggtacacaattaccttaacttcaaataaagtgttcttttctccatactcttctattcccttaacaatccctgttctcaaaggcctttgtgttttattttctgctttataacaaaacaaaaaaacaaacacccaccgtcctatgacacaggtgttttgaatccatgtcaatttttgtagttagtatatgctggttaaaccacatagcatatcccccaaaaagccagaggcaagcaaaaacttaatttgatgcccttcaagtttcggaaggtcccatttctttttattaaccaaaagataagatgaagctcagcatggctatggctgtgattagataacttttgatattttcatttcccttaccgagctgctgcttctaggctgaactcattttattcacctgcccatttttaaagagagactga

SEQ ID NO: 33363 - DNA, 472 bp, Homo sapiens
cactactatagggcgaattggagctccaccgcggtggcggccgcccgggcaggtacgaaaaaatcaggctactaagcccactgctaatatagacgcagaccaattgttaggaacaggtccaaattggagcaccattaaccaacaatcagtgatgcagaatgaggctattgaacaagtaagggctatttgcctcagggcctgtggaaaaattcaggacccaggaacagctttccctattaattcaattagacaaggctctaaagagccatatcctgactttgtggcaagattacaagatgctgctcaaaagtctattacagatgacaatgcccgaaaagttattgtagaattaatggcctatgaaaatgcaaatccagaatgtcagtcggccataaagccattaaaagaaaaagttccagcaggagttgatgtaattacagaatatgtgaaggcttgtgatgggattggagga

SEQ ID NO: 33364 - DNA, 476 bp, Homo sapiens
acgactactatagggcgaatttggagctccaccgcggtggcggccgcccgggcaggtacgcgggagaaaaacaaaggggagattggggtggctgcagccgagggaaaccagaaagatctgcatggtgggaaggacctgatgaatacagaggtgaaaaataagaaaggctgctgactttaccatctgaggccacacatctgctgaaatggagataattaacatcactaggaaacaggcagatgacaatataatgtctaagtagtgacatgtttttgcacatttccagcccctttaaatatccacacacacaggaagcacaaaaggaagcacagagatccctgggagaaatgcccggccgctctagaactagtgggatcccccgggctgcaggaattcgatatcaagcttatcgataccctcgacctcgagggggggcccggtacccagcttttgttccctttagtgagggttaattg

SEQ ID NO: 33365 - DNA, 471 bp, Homo sapiens
actactatagggcgaattggagctccaccgcggtggcggccgaggtactatatgctagaaacttggctgaatgatttgacattatcctatttaatgttcatgacaatccaataacgtaaccactcatatctcccttttgtgcagataacaaactgaggcccagagaaatcaaatatgttgtcaaaatctacatcgttgaagagatgggtttcaaatccaggtcggcttggcccttgccacgacttcataatgaaattccatgggtgagtgttaccagtttctggtccatccttgcttatttcaagggtctcatcatcccatccactgtatcactttttttgttacaggctttactcttttctaccatggaaaagactaatgatatttttttctccataagcttggaaatattatcaatcaccataaaattcagccttcctctggtaactttggagacccttagagcttttc

SEQ ID NO: 33366 - DNA, 457 bp, Homo sapiens
ataaggcgaatcggagctccaccgggggggcggccgaggtacgcggggacatcaatgcagagtccctctgtgaatttacaacacccaacacccatgagttcagtccttaagaaggaaaattgagcaagtatttaattggttggacattgcataaaagaggcccatatccaggctaactctagaaattttattctcaaacttatgtggcctctttttcttctgtcagaggaccattcttagtggcactggggaaatcttggcacccagaagaattcaactgcgctcactgcagaaatacagtggcctacattggatttgtagaggagaaaggagccctgtgtcgtgagctgtgctatgagaaattcttggcccctgaatgtggtcgatgccaaaggaagatgcttggacaagtcatcaatgcgtcgaaacaaacttggcatgtctcctgctttgagtg

SEQ ID NO: 33367 - DNA, 447 bp, Homo sapiens
gactactatagggcgaattggagctccaccgcggtggcggccgaggtacgcgggacatcaatgcagagtccctctgtgaatttacaacacccaacacccatgagttcagtccttaagaaggaaaattgagcaagtatttaattggttggacattgcataaaagaggtccatatccaggctaactctagaaattttattctcaaacttagttggcctctttttttttctgtcagaggaccattcttagtggcactggggaaatcttggcacccagaagaattcaactgcgctcactgcagaaatacaatggcctacattggatttgtagaggagaaaggagccctgtattgtgagctgtgctatgagaaattctgtgcccctgaatgtggtcgatgccaaaggaagatccttggagaagtcatcaatgcgttgaaacaaacttggcat

SEQ ID NO: 33368 - DNA, 658 bp, Homo sapiens; identical to SEQ ID NO: 32642

SEQ ID NO: 33369 - DNA, 466 bp, Homo sapiens
atagggcgaattggagctccaccgcggtggcggccgaggtaccttgctctaaaggaactaatgatatatgctactattattaaccaagataagattttcccattccagttggccaatattccattttaagtgatcagtccagattctagattatgacctttcctgtctctcaatcgtatgctcttttcaacatactacttgacttcctcttccgaaaaagagaacagatgtaaaatgctaaaataagaacaataaatgtattgaaacatattactctatcccatccattactgtgatgaaaaattacaaacgaaaaattatttgacctgagaaatgagaacacaaagaagatttgaattatatgagattaagaaagttaaagtaaaaaataatcaactagtccttccttattatatggtttcataatacaattatgaagggtcattcaatgatttaaatggcaggt

SEQ ID NO: 33370 - DNA, 341 bp, Homo sapiens
cgcgcgtatacgactcactatagggcgaattggagctccaccgcggtggcggccgaggtacgcggggacatcaatgcagagtccctctgtgaatttacaacacccaacacccatgagttcagtccttaagaaggaaaattgagcaagtatttaattggttggacattgcataaaagaggtccatatccaggctaactctagaaattttattctcaaacttagttggcctctttttcttctgtcagaggaccattcttagtggcactggggaaatcttggcacccagaagaattcaactgcgctcactgcaaaaatacaatggcctacattggatttgtaga

SEQ ID NO: 33371 - DNA, 477 bp, Homo sapiens
actactatagggcgaattggagctccaccgcggtggcggccgcccgggcaggtactatactgaggtgacgtttccaccaccaaccatctgcttgggcccctcttaattctccaccggagactggggctgccttcctcagggatcccagctatctctcaacacctcgtcttcctccaagactggagtcttcgtggagttctgaggaattcactttccaagcaagaaggttttgggtcctcatgtcatcttcctccaagactggagtctttgtggagttctgaggaattcactttccaagcaagaaggttttgggtcctcatgtcatctttctccaagactggcatcatctcggaattctcaggaattcactttccaagcaagaaggttttgggtcctcatgtcatcttcctccaagactggcatcatctcggaattctgaggaattcactttccaagcaagaaggtcttgggtccttg

SEQ ID NO: 33372 - DNA, 587 bp, Homo sapiens; identical to SEQ ID NO: 32514
  misc_feature 209, 313: n = A,T,C or G

SEQ ID NO: 33373 - DNA, 407 bp, Homo sapiens
gtatacgactactatagggcgaattggagctccacgcggtggcggccgcccgggcaggtacgcgggcattttctaaatcaattatgacagtgttaacaatcaaccttttatttttctctactgaataacggcgtattaaatggtttgaagactttttcttcctctacctctctcctaaattcctcatttacaaaagaaaacccaaaacaaaacaaacaaccccaacaataccaattgtaactccccagaccagttagatcatagatccagatctcattgaaaattatccttttggctaggcatggtggctcatgcccgtaatcccagcactttgggagaccaaggtgggcagatggcttgagcccaagagtttgagactagcctgggctacctggtgacaccccgtg

SEQ ID NO: 33374 - DNA, 406 bp, Homo sapiens
tacgactcactatagggcgaattggagctccaccgcggtggcggccgcccgggcaggtacgcggggactcaagctcgggttcttctcctaggcggaagccagaccagagagcgtgcgtgtttttcccagggtgccccgcgctgctgttatggccgcctccttgaggtagtatccgcacatggaattctagggccgcaggtgtatttacggtaactgtcgccactagatttcagcgcctttggactctcctgttttcactttcttttgttgactcccgtgtggccctcgtgggagcctgttttggctgcagcggtgtctggggtgatgtggaccccggagctggcaattctgaggggattccccactgaggctgagcggcagcaatggaaacaggagggggtcgtcg

SEQ ID NO: 33375 - DNA, 397 bp, Homo sapiens
ctatagggcgaattggagctccaccgcggtggcggccgcccgggcaggtacaagaaaggcgagaacccagtatcttatgctggaatgttaggaaccgaagatctcctaaaatttatccagctcaacaggatttcatatccagtgaatataacatcgatccaagaagcagaagaatatttaagtggggaattatataaagacctcatcttgtattctagtgtgtcagtattgggactatttagtccaaccatgaaaacagcaaaagaagattttagtgaagcaggaaactacctaaaaggatatgttatcactggaatttattctgaagaagatgttttgctactgtcaaccaaatatgctgcaagtcttccagccctgctgcttgccagacacacag

SEQ ID NO: 33376 - DNA, 404 bp, Homo sapiens
tacgactcactatagggcgaattggagctccaccgcggtggcggccgcccgggcaggtactcgggaaactgaggtgggcaaatctgttgagtccaggagttcgagacaagcctgggcaacatagcaagaccatatcaaaaatataaataaataaataaaaaataaaagataaaagttgggtccacaaaaaattgctaaaacaaaaaataaaaggactggtccttaagtaagaaaagagattttcattgctacctatacaaattataagatataaggaaggaagtcaatatagttacatgtagatatagctctggagggactgagaagtttagggagatgcagcctgatgaatctttcatgtggttttagcaactttatctaaagaaggaaagataagtccaagt

SEQ ID NO: 33377 - DNA, 396 bp, Homo sapiens
  misc_feature 128: n = A,T,C or G
gtatacgactcactatagggcgaattggagctccaccgcggtggcggccgaggtacgcggggactgtagtcaaggactcattgcaattcagaaatgagaagctgatccgggactccactacggctcanagaaattctcgaatgttctcacctattaacagttattaaattggaagaaagctggggatgaattgggagcatgccatctcctacgctctatacaaagccttcagcaccagtgagcaagacagggataactggattgggcagctgaagcttctgctggagtggaaccagctggacttagccaatgatgagattttcaccaatgaccgccgatgggagtctgctgaccttcaagaagtcatgtttacggctctcataaaggacagaccca

SEQ ID NO: 33378 - DNA, 406 bp, Homo sapiens; identical to SEQ ID NO: 31339

SEQ ID NO: 33379 - DNA, 292 bp, Homo sapiens
cactcactatagggcgaattggagctccaccgcggtggcggccgcccgggcaggtacagatctgggaactaaatattaaaaatgagtgtggctggatatatggagaatgttgggcccagaaggaaccgtacagatcagatattacaacagctttgttttgagggttagaaatatgaaatgatttggttatgaaaccgcacaagtttagggcagcagggccccagaaatccctgacccttctgcccccgtggtttatgctccttccccaggcttggcttgccctcatgtcatc

SEQ ID NO: 33380 - DNA, 461 bp, Homo sapiens
atacgactactatagggcgaattggagctccaccgcggtggcggccgcccgggcaggtaccagttgtaaaattaccaggaaccgccatgcctcaagatcgccctgttttctggcttcatcaatgactgcatgcagtgcaccaccctgtccactacgtgatgctgtaggattaagtctcacagtgggcggctgaggatacagcgccgcgtcctgtgttgctggtgaattagacgccatcgctgtgggttgctggtatggtgccgtgctatttggcacaggacacaccgcttgaggtctgtattgaacctctgaaggaggccgatactgaagctcggttggcagccggtattgataaactaccagcggttgggtcttattttctaccggctgatattgtggatactgtatctgagttggcattgccgggatagagactctgtccctttctacttgattttctc

SEQ ID NO: 33381 - DNA, 363 bp, Homo sapiens
cgcgcgtatacactcactatagggcgaattggagctccaccgcgggggcggccgcccgggcaggtactgaggctgtatacagccacagcctctccccatccctccagccttatctgtcatcaccatcaacccctcccatgcacctaaacaaaatctaacttgtaattccttgaacatgtcaggcatacattattccttttgcctgagaagctctttcctttgtcttctttaaattctagaatgatgtaaaagctttgaataaagttgacttatcttactttcatgcaaaggaaggggacacataatgacgattcatcaatcacaatgtagacagccaaattaactaaaagttgtaattttgat

SEQ ID NO: 33382 - DNA, 445 bp, Homo sapiens
ggcgaattggagctccaccgcggtggcggccgaggtacgcggggagtcacagaggaagccatttccagagaggaacaaccgtgtagactgctttcctgggagtcaagttaaaacttctctcctgtgaccttgtcacccggcagtggaaagttacccttggctgcagccacgacttccgcatactcttcagaacttgctctgcccttgagttttccagctttcctttaatgcactaaacctttaatattgtattctcctaaatgagacgtctcgcatttgagcaagtaacactcggatcttccccatttcacggagagacatggatgagaatgaaggctgctgagtgggaggggcttatggggccagttttgaagaggcctcataccttttggccacattccattggccagaactttgtcatatgactgcacctaactacaaggaa

SEQ ID NO: 33383 - DNA, 469 bp, Homo sapiens
atacgactactatagggcgaattggagctccaccgcggtggcggccgcccgggcaggtaccatgatcataatattgctcattccttaacaagtattatgattctgatgttagcacaatgtctgtaatatttcactgtgggtgtcctttcctttctctaataccttggcagctctgtagaaaaaaacctcatgctccctttacgttcgcttctgctttgattttcctactctaggtttatattcgaagcacagacgttgaccggactttgatgagtgctatgacaaacctggcagccctgtttcccccagaaggtgtcagcatctggaatcctatcctactctggcagcccatcccggtgcacacagttcctctttctgaagatcaggtcagtatactgggaaaacccacagatttcagatggacctagaatgaggaaggcaggctactcaacagttgtggatttgggag

SEQ ID NO: 33384 - DNA, 135 bp, Homo sapiens
cccgggcaggtacaattttagaagaaaatctgaagatcgaaacattatagaaactgaaaatattgtcaagagtttcagatagaatatgaaaaacaagctaagacaagtattggagaagtatagaagaatgaaaaa

SEQ ID NO: 33385 - DNA, 435 bp, Homo sapiens
tatagggcgtattggagctccaccgcggtggcggccgcccgggcagttacaaccaatctttagcttacttaggtttttctagtgcagtagttctaaaatatggtccctggatcattagtgttagcatcccctgggattttgtgttttaacaagttctctatatgattctgatgcacactaaagcttcagaaatactgctgtagttataaacctgggatgggttctcaggccttccccgcttgctggcttaagtgtttgcatttcttgggtctactaaagtcagtttagttcttttatcctgttgtccttttccaggttttccaaaaattttttggttgcatatctctattccttcttccagttttttccttcattatgtggtggaattttataatctttttttttaaaaaaaaatctctttttatttgttataaa

SEQ ID NO: 33386 - DNA, 215 bp, Homo sapiens
ccgcccgggcaggtaccgttcctgagaccttcgtcaggcaatctcgtttgcccgctgtgtttttgacatgggggtgagtatacgtgaccctgttagggaagggcgggacacaactgacaataactagtcttaattctagagttaactttttatggcagttggttctgtaattaacatgggttttaagcctatctgcttgcatacattatttgtta

SEQ ID NO: 33387 - DNA, 437 bp, Homo sapiens
gcgaattggagctccaccgcggtggcggccgaggtacatctctagatgatcacgaatgtcaaatatcacactacactgtgatatggggattccccttgggggttttcatgtgtatagggtgcctgcagctacactaaacatcttaaagctaccacaatgttcacttcatatttttgctttttataggctttcttggtcctcttctattgttcccatcattttcttgctttgaatctgtaagaatcgagttgaatcttctccattttaaattttccataggctgagaaactgtttagccaagtttggataaaattgtatccaaagtaagagtatacaagctatgggcaagtccaaaatcaagctgttcacaggaccatgttctctctaaaggttctaggagagaatccctcattttcttccagcttctgggtggctgc

SEQ ID NO: 33388 - DNA, 441 bp, Homo sapiens
ctactatagggcgaattggagctccaccgcggtggcggccgcccgggcaggtacttccaaaccctcctgttctttcctttttgttttccccaattttaacataaggcaaaagcagtaattgagcaattctatcacctggattggcactccggggaacagtggagctgatcactaactgaattccccctttataatcttaataaattacccccagtttgaatttggactcccttcaaatttagacttgatctccctcaaaggcctaccctcccttctggcagcgggccatatacccctctaggaatcttttgtgggggctttccagggagtaaaaagaccatttgggtggaacataaatctactgcggtgctgcctgctgtggcgcgggacaactgttggattggtgtaattggctgactccctgaagtggtggtattttct

SEQ ID NO: 33389 - DNA, 200 bp, Homo sapiens
tactcactatagggcgaattggagctccaccgcggtggcggccgaggtacacactgccatttttgtattttaaaggaaaaatgactttcattcccaactgattatgacctttcaggatgtcgtcaagtgatgctttcagttgtaacacgtgacttggtgctgtccctgctggtctaagtagaactgtatgattcatatgg

SEQ ID NO: 33390 - DNA, 453 bp, Homo sapiens
ggagctccaccgcggtggcggccgaggtactcctactcatatgcttcagttaattatatatgttgaacaggtaggaagcagtgctgtttttatttattttaatatgttattcatacatttgaagaattatgttctttctgtaggcagctgaattttttttttttgagacgaagtcttggtattgtcccccttgcttggatggcaatggcaatgacctcggctcactgcaacctttgcctcctgggttcaggcaattctcctgcctcagactcctgagtagctgggattacaggcgcctgccaccacgcccggataatttttgtatttttagtagagacagtgtttcacctatgttggctgggctggtctcgaactcctgccctcaggtgaaccgcctgccttagccttccaaagtgctgggattactggcgtgagccactgctgccagccggc

SEQ ID NO: 33391 - DNA, 472 bp, Homo sapiens
tactatagggcgaattggagctccatcgcggtggcgggccgaggtacctcagttggaaatgcagaaatcacctgcctactgcattgatctcgctgggagctgcagaccggagctgttcctattcagccatcttgccagcaggtatttctttatagcaacacaagaacagcctaatacaatttccagtatcaacgggctggtacaaagtccccctaccccttcccagtgggatggagacagtggagtgtctaaactttcaacatcgtccagaagtaaagaggccactcgctccctcttccctccggtgtcaatggaggccatgtggagaacagtaatgagacactcctattctttccaactaggatgggatcagcagaggcctagtggggagccaaaactcctagtcccaccatgcagtaacaaggaggcccccatccctggtgccagtaaaggctgagtgggaacctagact

SEQ ID NO: 33392 - DNA, 177 bp, Homo sapiens
ctatagggcgaattggagctccaccgcgggggccggccgcccggccgggtccccgggaggctttgaggcagccagcccaggggcttctgctgagggggcaggcggagcttgaggaaaccgcagataagtttttttctctttgaaagatagagattaatacaactacttaaaaaatat

SEQ ID NO: 33393 - DNA, 469 bp, Homo sapiens
cactactatagggcgaattggagctccaccgcggtggcggccgcccgggcaggtaccagttgtaaaattaccaggaaccgccatgcctcaagatcgccctgttttctggcttcatcaatgactgcatgcagtgcaccaccctgtccactacgtgatgctgtaggattaagtctcacagtgggcggctgaagatacaacgcccgcgtcctgtgttgctggtgaattagacgccatcgctgtgggttgctggtatggtgccgtgctatttggcacaggacacaccgcttgaggtctgtattgaacctctgaaggaggccgatactgaagctcggttggcagccggtattgataaactaccagcggttgggtcttattttctaccggctgatattgtggatactgtatctgagttggcattgccgggatagagactctgtccctttctacttgattttctcttggggtttgt

SEQ ID NO: 33394 - DNA, 462 bp, Homo sapiens
ctatagggcgaattggagctccaccgcggtggcggccgcccgggcaggtaccaggagggtattgatgtttgaggtccaaactgaaaacccatcacctccttcccactgctatagcagcgttagccctggggttcattatctagccagttcacaccttctaaagtggggctctgaaaatgtcttacttccctcacagacaaagcaattctcgagcctcctgagatcacccaccaaccagagcaactgctgtcacttggaggtgcagctgaattcttctaattgtgacacaaactcttgaaactgtaaatgctgaaagattaaatgaggttataacactcagaaggttttacaagtaaaagtaagtcaaatcaataggtctttatttcatatctgtaatggtttagctctgcgggaagtgttagcagctatatgaattaggaagaatttagaagacaatcccta

SEQ ID NO: 33395 - DNA, 472 bp, Homo sapiens
actactatagggcgaattggagctccaccgcggtggcggcccggcccggccgggtccccggggccagaaaatgaaagtttcagatactgagaatagaaccactaagaagcagaaaagagaagatattctcgcgggggagaacaacggctgggaggggaggaagcatggccaaggcaaagaggtgggcattaataagaactgcttcttgctgccgccatatgaagaaggacgtgttcgcttccccttcctccatgattgtaagtttcctgagacctcgccagccatgctgaactagtgaacaggaaacctacagaataggagaaaatttttgcaatctactcatctgacaaaaggctaatatccagaatctacaaagaactcaaacaaatttacaagcacaaaacgaacaaccccatcaacaagtgggcgaaggacatgaacagacacttctcaaaagaagacatttatgcag

SEQ ID NO: 33396 - DNA, 467 bp, Homo sapiens
actactatagggcgaattggagctccaccgcggtggcggccgagggaccccgggacataaatgcaaagtccttctgggaatttacaacccccaacacccatgagttcagtccttaagaaggaaaattgagtaagtatttaattggttggacattgcataaaagaggtccatatccaggctaactctagaaattttattctcaaacttagttggcctcttttttttctgtcagaggaccattcttagtggcactggggaaatcttggcacccagaagaattcaactgcgctcactgcaaaaatacaatggcctacattggatttgtagaggagaaaggagccctgtattgtgagctgtgctatgagaaattctttgcccctgaatgtggtcgatgccaaaggaagatccttggagaagtcatcaatgcgttgaaacaaacttggcatgtttcctgttttgtgtgtgta

SEQ ID NO: 33397 - DNA, 468 bp, Homo sapiens
ctactatagggcgaattggagctccaccgcggtggcggccggcccggccgggtccttcttggttatgaggactgaagttggattaaaatccttttcaatgaagatcagatgtcctgagtagaattcttactattgggtcctgaatcttacattaaatattctctcaaattccttgaggcatagcaacgtgagccaccgtgcccggcctgtcctctgtggttttctgggcttatgttaaaattataactcaatcaccagtctttataaatttgcttttttatatttaaaccaaacctaatgctaattgtgatatgttatttattctcacctgatttgaatcattggattcaattaaatgagtttaattatcattaaataattctaagagaaataatgtctattcggatggtgggaattttctttctacatgcagccccattctgaatgaaatcaaatcacgtgaagatc

SEQ ID NO: 33398 - DNA, 465 bp, Homo sapiens
ctactatagggcgaattggagctccaccgcggtggcggccgaggtacgcgggtagtggaaacaaataactgtttcactcttgagtgttagcatggaagagattctggttgaaatcctagtcctgccactttctggttacagaaacttacattacttttcttttgatgtttcaaggaggtaggagttaaagaaaaatgaacaccagattactagaacattcttatagagttgcccaaagatggaatggacaccttccagagtggaggggagggagtaggattggacagtagtcctcaactgggagcacttcttccccctgaccccacacctgcctcccagggacgtttgacagttttggattgcacaaaactgaggggtgagagttgctgctatatctagtgagcagaagccagagatgcttccaaataccttacgaagcataggacagccctcacggaaagaatt

SEQ ID NO: 33399 - DNA, 474 bp, Homo sapiens
atacactactatagggcaattgagctccccgcggggccggccgaggtccttggttttttcttgactgaaatttcttactgaattctctggctgatatttttcattgtgagttgcttatctcgatgtcctgctttgaaaagtatgtgtttagggaatgtttttatttgcatacttactatgtttgctatggaaaatttagaaagttatgttaagtaaaatgaagaaaataaaaaccatctgtactcatttgtattcactgtcactttttctcatgttctaattataaatgaccaaaatcaagattgctcaaaagggtaaatgatagccacagtattgctccctaaaatatgcataaagtagaaattcactgccttcccctcctgtccatgaccttgggcacagggaagttctggtgtcatagacatcccgttttgtgaggtagagctgtgcattaaacttgcacatgactggaac

SEQ ID NO: 33400 - DNA, 475 bp, Homo sapiens
atacactactatagggcgaattggagctcaccgcggtggcggccgaggtacaaaaaaatcaggctactaagcccactgttaatatagacgcagaccaattgttaggaacaggtccaaattggagcaccattaaccaacaatcagtgatgcagaatgaggctattgaacaagtaagggctatttgcctcagggcctggggaaaaaaattaaggacccaggaacagctttccctattaattcaattagacaaggctctaaagagccatatcctgactttgtggcaagattacaagatactgctcaaaagtctattacagatgacaatgcccgaaaagttattgtagaattaatggcctatgaaaatgcaaatccagaatgtcagtcggccataaagccattaaaaggaaaagttccagcaggagttgatgtaattacagaatatgtgaaggcttgtgatgggattggaggagctatg

SEQ ID NO: 33401 - DNA, 491 bp, Homo sapiens
tatagggcgaattggagctccaccgcggtggcggccgaggtacttcccattgtaaatcacatttttagatagtccagtggccaaagcccccagacgaacaaaaacactcgtatcagccaagacatgccagaggcctagtgattgtttcccagtagctgagggcagaagccagacctctttcaataaggttgatctttcactgtattaacactgtatataaaggacttttataaaagcttgtagttatggtgtcattgtcatcatccagtttaatgccctcttttttccagtaagaaaagaaaggtctgggataatcatgttaattgatttgtttacatttttattttaattagtagcacaactgagagtgaaaatggaacccaaatagtccatctttagcataatacttttttttctcctctagtggagcttataccttgccaattattgaatcttgaactcctgacctcgtgatccacctgcctcagcct

SEQ ID NO: 33402 - DNA, 487 bp, Homo sapiens
cactactatagggcgaattggagctccaccgcggtggcggccgaggtaccaggagggtattgatgtttgaggtccaaactgaaaacccatcacctccttcccactgctatagcagcgttagccctggggttcattatctagccagttcacaccttctaaagtggggctctgaaaatgtcttacttccctcacagaccaaagcaattctcaagcctcctgagatcacccaccaaccagagcaactgctgtcacttggaggtgcggctgaattcttctaattgtgacacaaactcttgaaactgtaaatgctgaaagattaaatgaggttataacactcagaaggttttacaagtaaaagtaagtcaaatcaataggtctttatttcatatctgtaatggtttagctctgcgggaagtgttagcagctatatgaatcaggaagaatttataagacaatccctaaacacatgaaatgtccaagtaagaag

SEQ ID NO: 33403 - DNA, 493 bp, Homo sapiens
actactatagggcgaattggagctccaccgcggtggcggccgcccgggcaggtaccaaggcccaatcaccccaaacagtgacaggaacataatttcctgttgggaccagttctcggaattttgcaccaacatgatcccatagttccacatctaacgttcccttttcaggaaaccaaggacagtgttcttccactgccctgaatagggtgaccatattttccatgggaacccgaactcccccattttaacaggaatttaatatagcagagataagcataatgtttagactctgcgtgacccatagttaccccggacaatacacagacaactcaccaatcgtcggggagccgaacaagcattttctgtggactggaccgatgaacatttctccgcacccaccaaagggaatcgggttcccacatgcacttaggaaaaagaaaaccacgttgggcgccagatattgggggaacctgcccctaatatttcaacgtac

SEQ ID NO: 33404 - DNA, 439 bp, Homo sapiens
actactatagggcgaattggagctccaccgcggtggcggccgaggtacttgcccaatgtttacccttacgacaacgcaggcaaacagtagcaggagcatttggcagtgtttgttgagccggcttggccgcttttaagtttttaacagtgtagtttttttgggtatgaccaagttggccacaattatagcgggctccaagaaaagaatcagtcgagccagtttggttgccgtgcttcatggccggtgcccacagaatagctctgtgggtctccgatccaacgccttcacaagctttaatatatgcaggcaacacctcatgatcaggtaaattttgacgtaggatggaatgcacggccattttacactcatggttcgcattttgaaaagctaacatatgaagaagaataccttgagtgtgctcatcagagacagatttttc

SEQ ID NO: 33405 - DNA, 479 bp, Homo sapiens
ctactatagggcgaattggagctccaccgcggtggcggccgaggtacgcggggacacttcaggtgcccagtgtccacactgactagtggtgacggcgttggacagtgcagatacagaacatttctgtcatcacagaaagttcctttggacagagccatgttaagtgatgttatcacaagatggacagaaacattcctgtttgatttatttttcagacccagtttgtggagaaaaataatgatgctttacatatgtctcttgaatccttaatatgtgaatccagagataagtttatacgggaattatttgaatcatccacaaataacaacaaagatactaaacaaaaagcaggaaaacttagcttcatcagcgtgggaaacaagtttaagacacagttaaatttgcttctggataaacttcgaagtacctgcccgggcggccgctctagaactagtggatcccccgggctgcaggaattc

SEQ ID NO: 33406 - DNA, 436 bp, Homo sapiens
tatagggcgaattggagctccaccgcggtggcggccgcccgggcaggtacttgcccaatgtttacccttacgacaacgcaggcaaacagtagcaggagcatttggcagtgtttgttgagccggcttggccgcttttaagtttttaacagtgtagtttttttgggtatgaccaagttggccacaattatagcaggctccaagaaaagaatcagtcgagccagtttggttgccgtgcttcatggccggtgcccacagaatagctctgtgggtctccgatccaacgccttcacaagctttaatatatgcaggcaacacctcatgatcaggtaaattttgacgtaggatggaatgcacggccattttacactcatggttcgcattttgaaaagctaacatatgaagaagaataccttgagtgtgctcattagagacagat

SEQ ID NO: 33407 - DNA, 482 bp, Homo sapiens
acactactataaggcgaattggagctccaccgcggtggcggccgcccgggcaggtaccgcctgcagagccataatccaaatatatcttttttctttgtaaattactgtctcaggtattcctttatataatgcaaaaatagcctaacataacacgcatctcaataattgccccattgtcacattgcaaaaatacctgtgaggttgttatagagatattggctttctgggttgttttgttttgagaggacaataacatttgattattaaaaaaaaatcctagcacaatgtggcttgtcattgtttattgttttctatacaagtcataaaccattattatatgtgctcatgttcctttatatagaaatcatataaaaaaaggattttgttttactctttaaaaagttttcatggctgggcgtgattggctcacttttgtaattccagcacattgggaggccgaggtgggcagaacatctgaggtc

SEQ ID NO: 33408 - DNA, 493 bp, Homo sapiens
actcctatagggcatatggagctccaccgcggtggcggccgcccgggcaggtacacagttaatagtagtattgtataagtctcatgacagtgtagctccctttcattgttttaaacatgtctgtcttacttgagatcttcctatttaaagtgaaaaaagaaatttttttaatttccaaggataaaagctggggtgataatttttaaaaaactgaccattatttttgcgtattattttcaggaaacgaaagccagcattgtaataaattccgttcatgaagataatttaggctttcaaatatggaagcaaagttctaactaataacctttaataaaaaatattcatggtagcacattaaaacatttgttttaggatatattattgaaaatggcttttaacttttcttgcctcactgggggaagaggaaaatggaagttgaaagcacattatcctgtaaaaacagctaagcattcaattgtttgtctgttttcca

SEQ ID NO: 33409 - DNA, 488 bp, Homo sapiens
tacgactactatagggcgaattggagctccaccgcggtggcggccgcccgggcaggtaccagttgtaaaattaccaggaaccgccatgcctcaagatcgccctgttttctggcttcatcaatgactgcatgcagtgcaccaccctgtccactacgtgatgctgtaggattaagtctcacagtgggcggctgaggatacagcgccgcgtcctgtgttgctggtgaatagacgccatcgctgtgggttgctggtatggtgccgtgctatttggcacaggacacaccgcttgaggtctgtattgaacctctgaaggaggccgatactgaagctcggttggcagccggtattgataaactaccagcggttgggtcttattttctaccggctgatattgtggatactgtatctgagttggcattgccgggatagagactctgtccctttctacttgattttctcttggggtttgtgcttgtctaacctgcgtt

SEQ ID NO: 33410 - DNA, 461 bp, Homo sapiens
ggagctccaccgcggtggcggccgaggtacagaaagcccaaacattaacctagtgaaaataaccctcattttatttaaaagaaatagtcagaaaataaatcaaaaggaccagaaaataagggagaaaatggttaaagaagtaaacatttcatttgggaaagatttcaactgctataggatatcttaatgactttaaaagatttattcagaaatgaccatatgcttatgcacataattgcaatatttatcttcacagtcaacttacctataaaaggatacaaaaactgaagaacagagaggagcagataccctggaaagccgaaagttttattgaccaaagactggtaggtatctgttccagagagggcccctccttttatcaataaaacaagggaaaagtctgtggcaagaacatcaattaaatgtcagattacatgtaatacaaatatttttcatgtttt

SEQ ID NO: 33411 - DNA, 471 bp, Homo sapiens
actactatagggcgaattggagctccaccgcggtggcggccgaggtacatctacctaaaggactattatgtggaataatacatactaatgaagtattacatgatttaaagactacaataaaaccaaacatgcttataacattaagaaaaacaataaagatacatgattgaaaccaagttgaaaaatagcatatgccttggaggaaatgggcttcaaattactaatgatttagggttggccctaacttctctctctttttttctttcttttttttattatggttagctgtctaaaagcataaaaatggaataacatatcaaatgaaacaggggaaaatgaaagctgacaatttatggaagccagggcttgtcacagtctctactgttattatgcattacctgggaatttatataagcccttaataataatgccaatgaacatctcatgtgtgctcacaatgttctggcacta

SEQ ID NO: 33412 - DNA, 445 bp, Homo sapiens
tatagggcgaattggagctccaccgcggtggcggccgaggtaccagttgtaaaattaccaggaaccgccatgcctcaagatcgccctgttttctggcttcatcaatgactgcatgcagtgcaccaccctgtccactacgtgatgctgtaggattaagtctcacagtgggcggctgaggatacagcgccgcgtcctgtgttgctggggaattagacgcccatcgctgtgggttgctggtatggtgccgtgctatttggcacaggacacaccgcttgaggactgtattgaacctctgaaggaggccgatactgaagctcggttggcagccggtattgataaactaccagcggttgggtcttattttctaccggctgatattgcggatactgtatctgagttggcattgccgggatagagactctgaccctttgtacttgattttctc

SEQ ID NO: 33413 - DNA, 337 bp, Homo sapiens
acgactcactatagggcgaattggagctccaccgcggtggcggccgaggtacgcgggataccaaaacacaaagaaacaacaggaagtaagaacaaaactcaagaggtctgagtgacatcttgccttgcttcacaacttcagagtttgcattgctttaaaaacattggttataagtgagtgtggaaacagtgtgttcactatttttatgctgtggctgtgctgtgcaggagctgggcttttcgtgcattttagacagaattgaccttggttaatgcttgacttgggaactatgcagaaacatccaggaagtggtggtggctgatcctgaccgtcctca

SEQ ID NO: 33414 - DNA, 472 bp, Homo sapiens
tatagggcgtttggatctccaccccggtggcggccgcccgggcaggtacagcccacagaactgtgagccaattctttcccttttctttttcaattacccactctcatgtatatctttatagcagcgtgagaacagattaatacactcctcctcacaaagcattcaatttagctgtgtctaaagtatgccaggtgttctagggttgtattctacccaataattctacctcttcagcaagatctatatgcctatgacagcttgacctacatttcctaccatacttgtcagtaacaagtagcccataacatctgaatggactccattgaaatcacagaggccctttagttctctactttattagcacgcattcgggaaacacatcaactttctaatttaataaggtgcctgttgctctgaaaaactgctcaaaagaagataggagaggcttacttaaagatatcactataggcat

SEQ ID NO: 33415 - DNA, 488 bp, Homo sapiens
ctatagggcgaattggagtaccaccgcggtggcggccgcccgggcaggtacttccaaaccctcctgttctttcctttttgttttccccaattttaacataaggcaaaagcagtaattgagcaattctatcacctggattggcactccggggaacagtggagctgatcactaactgaattccccctttataatctgaataaattaccccaatattgaattgggactcccttcaaatttagacttgatctccctcaaaggcctaccctcccttctggcagcgggccatatacccctctaggaatcttttgtgggggctttccagggagtaaaaagaccatttgggtggaacataaatctactgcggtgctgcctgctgtggcgcgggacagctgttggattgttgtaattggctgactccctgaagtggtggtattttctgtagggttgttgtccttgaaaaccctgaggaacaaacagtttaactgggg

SEQ ID NO: 33416 - DNA, 493 bp, Homo sapiens
tactatagggcgaattggagctccaccgcggtggcggccgaggtacttgcccaatgtttacccttacgacaacgcaggcaaacagtagcaggagcatttggccgtgtttgttgagccggcttggccgcttttaagtttttaacagtgtagtttttttgggtatgaccaagttggccacaattatagcaggctccaagaaaagaatcagtcgagcccagtttggttgccgtgcttcatggccggtgcccacagaatagctctgtgggtctccgatccaacgccttcacaagctttaatatatgcaggcaacacctcatgatcaggtaaattttgacgtaggatggaatgcacggccattttacactcatggttcgcattttgaaaagctaacatatgaagaagaataccttgagtgtgctcatcagagacagatttttcaacagcatcttgtaatttagctaaaaaatcaagatataattcattgtgaccctgg

SEQ ID NO: 33417 - DNA, 484 bp, Homo sapiens
tatagggcgaattggagctccaccgcggtggcggccgcccgggcaggtacgaaaaaatcaggctactaagcccactgttaatatagacgcagaccaattgttaggaacaggtccaaattggagcaccattaaccaacaatcagtgatgcagaatgaggctattgaacaagtaagggctatttgcctcagggcctggggaaaaatttaagacccaggaacagctttccctattaattcaattagacagggctctaaagagccatatcctgactttgtggcaagattacaagatgctgctcaaaagtctattacagatgacaatgcccgaaaagttattgtagaattaatggcctatgaaaatgcaaatccagaatgtcagtcggccataaagccattaaaaggaaaagttccagcaggagttgatgtaattacagaatatgtgaaggcttgtgatgggattggaggagctatgcataaggcaatg

SEQ ID NO: 33418 - DNA, 438 bp, Homo sapiens
ctactatagggcgaattggagctccaccgcggtggcggccgcccgggcaggtacttccaaaccctcctgttctttcctttttgttttccccaattttaacataaggcaaaagcagtaattgagcaattctatcacctggattggcactccggggaacagtggagctgatcactaactgaattccccctttataatctgaataaattaccccaagatgaatttggactcccttcaaatttagacttgatctccctcaaaggcctaccctcccttctggcagcgggccatatacccctctaggaatcttttgtgggggctttccagggagtaaaaagaccatttgggtggaacataaatctactgcggtgctgcctgctgtggcgcgggacagctgttggattgttgtaattggctgactccctgaagtggtggtatttt

SEQ ID NO: 33419 - DNA, 462 bp, Homo sapiens
atacgactcactatagggcgaattggagctccaccgcggtggcggccgcccgggcaggtacatctctagatgatcacgaatgtcaaatatcacactacactgtgatatggggattccccttgggggttttcatgtgtatagggtgcctgcagctacactaaacatcttaaagctaccacaatgttcacttcatatttttgctttttataggctttcttggtctcctcctatgttcccatcattttcttgctttgaatctgtaagaatcgagttgaatcttctccattttaaattttccataggctgagaaactgtttagccaagtttggataaaattgtatccaaagtaagagtatacaagctatgggcaagtccaaaatcaagctgttcacaggaccatgttctctctaaaggttctaggagagaatccctcatttccttccagcttctgggtggctgctg

SEQ ID NO: 33420 - DNA, 465 bp, Homo sapiens
tacgactactatagggcgaattggagctccaccgcggtggcggccgcccgggcaggtacatggggaaaaaatcagtttcaatagtcaagttagctttgggaatagaactgggttaaactgtgtttaaaaggtctctttaatgcagtaatcctaagtctttaacatgctaatacgcactgtggctttcaaggaaaggatctagtgttttccaaactctgttttcaaaattttgattacagcattcacctccctctttttttccccaatgtcctgtagaaaacactgagagaactgacatttttaactttatatggaaagaatcgtaaatatggtgaatctggatgtcctcatcaaccagcttcaaagactatcacccatgcaatcttgtttcatctgcatagccactcatttcccacacacacccacttgagttttttaagttatttcatgcaccatatcatccag

SEQ ID NO: 33421 - DNA, 481 bp, Homo sapiens
tactactactatagggcgaattggagctccaccgcggtggcggccgaggtacacacttgcatgagggatggggctggtttacaggaatggaaccagcttggaaagaagacagaaggtgagaagtgaatacttgttggtatcatgtaagaacagagtgaagaaaaaggacaggccggcccttggtttatttttaaatttcaggaaaatggattggccaaataatggggatcaaaaataaagggtgtttttattatgagccaagtgaaaattaaatttaagatatgtatgttgttatggtttgattgtgtcctccaaagttcatgtgttggaaactgaagcgccagtgcaacagtattgagaggtagaaactttaagaggtgatcagtgctgggtgcagtggctcacgcctgtaatcccagcactttgggaggccaaggcgggcagatcacctgaggtcgggagtttgagatcagcctgatca

SEQ ID NO: 33422 - DNA, 485 bp, Homo sapiens
ctactatagggcgaattggagctccaccgcggtggcggccgaggtaccatgttcaggaaaccaaggacaatattgctctactgttggaaacagagtaatcaaattttctgtgctagccttaattcctgccctctttaagaggagcttaataaaatgtaaatatgcagaatgtttacttttggattgtctcatggtgtccctggaatgctccgagtgcacaagcttaccgcaaggccgaccacacgttctcgggagttcctggacagaccgttcttcacaacgaccacgctcaggtgtaacttcacctgggttcgaggagaccgtgttgggtgccaaagatgtaggggaacctgcctgatacaccacccgcaggctctccccttcccggtggagacgagggaatgagaaaagaaataaagacaaagacacaaagtttaagagttaacaaaagtgggttcaaggatccatcgcaacgtggagattgc

SEQ ID NO: 33423 - DNA, 476 bp, Homo sapiens
actactatagggcgaattggagctccaccgcggtggcggccgcccgggcaggtaccagttgtaaaattaccaggaaccgccatgcctcaagatcgccctgttttctggcttcatcaatgactgcatgcagtgcgccaccctgtccactacgtgatgctgtaggattaagtctcacagtgggcggctgaggatacagcgccgcgtcctgtgttgctggtgaattagacgccatcgctgtgggttgctggtatggtgccgtgctatttggcacaggacacaccgcttgaggtctgtattgaacctctgaaggaggccgatactgaagctcggttggcagccggtattgataaactaccagcggttgggtcttattttctaccggctgatattgtggatactgtatctgagttggcattgccgggatagagactctgtccctttctacttgattttctcttggggtttgtgcttgtcta

SEQ ID NO: 33424 - DNA, 392 bp, Homo sapiens
cgactactatagggcgaattggagctccaccgcggtggcggccgcccgggcaggtaccagttgtaaaattaccaggaaccgccatgcctcaagatcgccctgttttctggcttcatcaatgactgcatgcagtgcaccaccctgtccactacgtgatgctgtaggattaagtctcacagtgggcggctgaggatacagcgccgcgtcctgtgttgctagtgaattagacgccatcgctgtgggttgctggtatggtgccgtgctatttggcacaggacacaccgcttgaggtctgtattgaacctctgaaggaggccgatactgaagctcggttggcagccggtattgataaactaccagcggttgggtcttattttctaccggctgatatt

SEQ ID NO: 33425 - DNA, 446 bp, Homo sapiens
tactatagggcgaattggagctccaccgcggtggcggccgcccgggcaggtacgcgggtccttccaccatgggaggacacagcgtttgtctcttctgccatgtgaaggctgagcaacaaggtgctatcttgaaagcacaaactgggtcctcaggatatagtaaatcttttgaggtcttccagcccctaaaactggcaatgagggcttccattctggctcttcaccatgataaccttgggggcttcctggatttaaaacccaggaaagcaggggttgagaagggagagcctttgaccatggtctctagcagtttttcactctcctaaatgtccacgttcagcctccagcaagttgtcgaagtcaccagacaaggttttgctgtattgcctactacactggagtgcagtagtgccatcatagcttactgcaacctcgagcttccgggc

SEQ ID NO: 33426 - DNA, 449 bp, Homo sapiens
tatagggcgaattggagctccaccgcggtggcggccgaggtacaccaccacaccccactaattttgatttttagtaaagacggggtttctccgtgttggtcaggctgtctccaacaccctaactcaggtgatctacctgcctcggcctcccaaagtgctgggattgcgagcgtgagccactgcacctgcccttgtttttaactcctcttactataattcccagtcacgcagtttgtttttgactgtgatttagcctccataggttggggtgaaacacggcactctgtctgcaaactggcagcagagttttttttgtttttgtttttgtttttttttttattcaggaaaatcccttagttgctgctgggattgaagacctgtatcttacttattaggacctattttgatttttagagaagtaggcacaatatattgcaaatgactagggg

SEQ ID NO: 33427 - DNA, 375 bp, Homo sapiens
  misc_feature 202, 203: n = A,T,C or G
tacgactactatagggcgaattggagctccaccgcggtggcggccgaggtacatctctagatgatcacgaatgtcaaatatcacactacactgtgatatggggattccccttgggggttttcatgtgtatagggtgcctgcagctacactaaacatcttaaagctaccacaatgttcacttcatatttttgcttttttatannggctttcttggtctcctcctatgttcccatcaattttcttgcttttgaatctgtaagaatcgagttgaatcttctccattttaaattttccataggctgagaaactgtttagccaagtttggataaaattgtatccaaagtaagagtatacaagctatgggcaagtccaaaa

SEQ ID NO: 33428 - DNA, 466 bp, Homo sapiens
cgactcactatagggcgaattggagctccaccgcggtggcggccgaggtacctttcattggattgtccatggtgcatcgctttagcaagcggcgtgactctccactgcccgtcatcttggccaatatctatctgctggttcctcctgtgctcaacccaattgtctaaggagtgaagacaaaggagattcgacagcgcatccttcgacttttccatgtggccacacacgcttcagagccctaggtgtcagtgatcaaacttcttttccattcagagtcctctgattcagattttaatgttaacattttggaagacagtattcagaaaaaaaatttccttaataaaaatacaactcagatccttcaaatatgaaactggttggggaatctccattttttcaatattattttcttctttggtttcttgctacatataattattaataccctgactaggttgtggttgga

SEQ ID NO: 33429 - DNA, 470 bp, Homo sapiens
ctactatagggcgaattggagctccaccgcggtggcggccgcccgggcaggtaccgactcctcagaaactggcatgccaaatcaaaatgggtctggttcaatcctccttaatggcaatgtaaacccctctaactaatcccacttctcctaattatctttttctccttacgaacctaaaaatctcaccatttctattagcctgaaaataacatccctctgttcttctcttcctccttcagcactggatctcacttacaataggttttatttaataattatcttccttacactttctgtctcaccagtttccccttaaactgatttacctgctacacaaaattattcttattgggcttatgtgccttttcctccacttattcgacctctcacctggatggatgctcctgcagaaatctatactaacgatagtgtgtggatgcctggaactacagatgaccgttgccccgctc

SEQ ID NO: 33430 - DNA, 462 bp, Homo sapiens
  misc_feature 309, 437: n = A,T,C or G
cgtaatacgactactatagggcgaattggagctccaccgcggtggcggccgaggtacttgatctatatttagacttcgtaaaatttataggtgaaaaagtagattcataccctaactgttccaaacatacttgaaagttttcaaaaaactaaattatcagcttttaagtttaactggattaaacttaataaatggattaaatagtaaaatgaaaaatgcagtttctcgatgatactagtcacatttcaagtgttcatgtgcacagtgtgcctggtggctacctcagtggacagttttagcaatgggggngagggtctctccaatagctccttgccttttgtgacacctgcagaaagcagggccaaaggaatttggctttgctagttaaaccagcctcacttttttgtgctagaagtttgtggggaaagagagtgacnaggtgattcagcacagtctccccat

SEQ ID NO: 33431 - DNA, 463 bp, Homo sapiens
cgtaatacgactactatagggcgaattggagctccaccgcggtggcggccgaggtacgcggggattctcaatcctacccatgatgcagacagattacctcatttcagctcaataaaacatcaccaaattcccttaggcagaaaaagggtggggagcgccctttcttgaaggaatcccttaagtgcacgtcttcccgttttcttttcacatcaatgcagagtccctctgtgaatttacaacacccaacacccatgagttcagtccttaagaaggaaaattgagcaagtatttaattggttggacattgcataaaagaggtccatatccagactaactctagaaattttattctcaaacttagttggcctctttttcttctgtcagaggaccattcttagtggcactggggaaatcttggcgcccagaaaaattcaactgcgctcactgcaaaaatgcaatggcc

SEQ ID NO: 33432 - DNA, 435 bp, Homo sapiens
tacactactatagggcgaattggagctccaccgcggtggcggccgaggtacttccaaaccctcctgttctttcctttttgttttccccaattttaacataaggcaaaagcagtaattgagcaattctatcacctggattggcactccggggaacagtggagctgatcactaactgaattccccctttataatctgaataaattaccccagtatgaatttggactcccttcaaatttagacttgatctccctcaaaggcctaccctcccttctggcagcgggccatatacccctctaggaatcttttgtgggggctttccagggagtaaaaagaccatttgggtggaacataaatctactgcggtgctgcctgctgtggcgcgggacagctgttggattgttgtaattggctgactccctgaagtggtggtatttt

SEQ ID NO: 33433 - DNA, 458 bp, Homo sapiens
ctactatagggcgaattggagctccaccgcggtggcggccgcccgggcaggtaccagttgtaaaattaccaggaaccgccatgcctcaagatcgccctgttttctggcttcatcaatgactgcatgcagtgcaccaccctgtccactacgtgatgctgtaggattaagtctcacagtgggcgggtgaagatacagcgccgcgtcctgtgttgctggtgaattagacgccatcgctgtgggttgctggtatggtgccgtgctatttggcacaggacacaccgcttgaggtctgtattgaacctctgaaggaggccgatactgaagctcggttggcagccggtattgataaactaccagcggttgggtcttattttctaccggctgatattgtggatactgtatctgagttggcattgccgggatagagactctggccctttctacttgattttctcttg

SEQ ID NO: 33434 - DNA, 467 bp, Homo sapiens
cgtaatacgactactatagggcgaattggagctccaccgcggtggcggccgcccgggcaggtactctaggggaattgagaaaaacgaaggcattatctttgtaagaagaaaaaatcaagatgatctggcacacctggaggggtagtggaatgggagttgatcactgaacatgtatgcaatgtgcataggcacagggggattgggaaagacatcccaggcgagaagtaagagtaatcacaaaggtgggaataaatatggcatgctacagtgtggcatgggctttgtgttcctattatttgcagaatgttcgcatagctgggtgtcttagtctgggatgctataccaaaataccatagattggtttataagcagttctagaagctgggaagtccaagatcaaggcaccagcagattccatgtctggtgattctgtttcctggttcatagacagtgcctttttgctgtgt

SEQ ID NO: 33435 - DNA, 459 bp, Homo sapiens
gactactatagggcgaattggagctccaccgcggtggcggccgcccgggcaggacgcgggggagtgccctttcttgaaggaatcccttaagtgcacgtctcccgttttcttttcacatcaatgcagagtccctctgtgaatttacaacacccaacacccatgagttcagtccttaagaaggaaaattgagcaggtatttaattggttggacattgcataaaagaggtccatatccaggctaactctagaaattttattctcaaacttagttggcctctttttcttctgtcagaggaccattcttagtggcactggggaaatcttggcacccagaagaattcaactgcgctcactgcaaaaatacaatggcctacattggatttgtagaggagaaaggagccctgtattgtgagctgtgctatgagaaattctttgccctgaatgtggtcgatgccaaag

SEQ ID NO: 33436 - DNA, 445 bp, Homo sapiens
gcgaattggagctccaccgcggtggcggccgcccgggcaggtactctccttcattttgccttttgtttcctgattttccaactcttgaatatttcccattctgttttgcatgtatttatttcttcttgcatatttattgttttttcctcttctagttttccttactaatacctactctagtaaacctggcctccaataattcctgccgtcgtgggtccaggctatgcaattcttccatcatttctggctggcagagcgtctcccgagactaaaggtgctctgggatcccaaagacctacataattttaatcagttatgctcacttcactgagaagtaggtctacagaggtcctcatgctgccattgtggaagtcatggtaactttttatatttattgccccactagaaaataagttctataaaagcacagagttttgtctgtttc

SEQ ID NO: 33437 - DNA, 465 bp, Homo sapiens
cactatagggcgaattggatctccaccgcggtggcggccgaggtacgcggggacatcaatgcagagtccctctgtgaatttacaacacccaacacccatgagttcagtccttaagaaggaaaattgagcaagtatttaattggttggacattgcataaaagaggtccatatccaggctaactctagaaattttattctcaaacttagttggccttctttttcttctgtcataggaccattcttagtggcactggggaaatcttggcacccagaagaattcaactgcgctcactgcaaaaatacaatggcctacattggatttgtagaggagaaaggagccctgtattgtgagctgtgctatgagaaattctttgcccctgaatgtggtcgatgccaaaggaagatccttggagaagtcatcaatgcgttgaaacaaacttggcatgtttcctgttttgtgtgtgt

SEQ ID NO: 33438 - DNA, 475 bp, Homo sapiens
actactatgtggcgaattggagctccaccgcggtggcggccgaggtacggggaggaacagagtccctcctttacttctccattagaaagaatgagatggcaagacaatgaaacaggcaaagtgaacagagatgcaagacaaaattcaggtgagagagccggagcatcactcagccattcctgacatgtaaaacaggcaactagaaatttgcagaaagggaagcgaagtctccttaaagatgtttttaaagtgagcttgaagtatttggagacaattcagtgttacataaaatctgcaaatctctggataaagaagcagagatcccagcatgggacaaatggagcctcaaaagtgggaagaagacagagaagaccagggcagaatgcatctcttcctttctcttggctttcctggataaggactgcatcattcctgtggaaggacaggccatcagctccgaaacactgtatgtatt

SEQ ID NO: 33439 - DNA, 464 bp, Homo sapiens
tcactatagggcgaattggatctccaccgcggtggcggccgcccgggcaggtacgcggggacatcaatgcagagtccctctgtgaatttacaacacccaacacccatgagttcagtccttaagaaggaaaattgagcaagtatttaattggttggacattgcataaaagaggtccatatccaggctaactctagaaattttattctcaaacttagttggcctctttttcttctgtcagaggaccattcttagtggcactggggaaatcttggcacccagaagaattcaactgcgctcactgcaaaaatacaatggcctacattggatttgtagaggagaaaggagccctgtattgtgagctgtgctatgagaaattctttgcccctgaatgtggtcgatgccaaaggaagatccttggagaagtcatcaatgcgttgaaacaaacttggcatgtttcctgtttt

SEQ ID NO: 33440 - DNA, 455 bp, Homo sapiens
ttggagctccaccgcggtggcggccgaggtaccatgttcaggaaaccaaggacaatattgctttactgttggaaacagagtaatcaaattttctgtgctagccttaattcctgccctctttaagaggagcttaataaaatgtaaatatgcagaatgtttacttttggattgtctcatggtgtccctggaatgctccgagtgcacaagcttaccgcaaggccgaccacacgttctcgggagttcctggacagaccgttcttcacaacgaccacgctcaggtgtaacttcacctgggttcgaggagaccgtgttgggtgccaaagatgtaggggaacctgcctgatacaccacccgcaggctctccccttcccggtggagacgagggaatgagaaaagaaataaagacaaagacacaaagtttaagagttaacaaaagtgggtccaaggatccatcg

SEQ ID NO: 33441 - DNA, 467 bp, Homo sapiens
  misc_feature 179: n = A,T,C or G
tatagggcgaattggagctccaccgcggtggcggccgaggtacgcggggtagccacacttcaggtgcccagtgtccacactgactagtggtgactgcgttggacagtgcagatacagaacatttctgtcatcacagaaagttcctttggacagagccatgttaagtgatgttatcacanagaatggacccagaaaccattccttgttttgatttattttttcagacccagtttgtggagaaaaataatgatgctttacatatgtctcttgaatccttaatatgtgaatccagagataagtttatacgggaattatttgaatcatccacaaataacaacaaagatactaaacaaaaagcaggaaaacttagcttcatcagcgtgggaaacaagtttaagacacagttaaatttgcttctggataaacttcgaagtcctgcccgggcggccgctctagaactagtggat

SEQ ID NO: 33442 - DNA, 466 bp, Homo sapiens
atacgactcactatagggcgaattggagctccaccgcggtggcggccgaggtacgcggggacatcaatgcagagtccctctgtgaatttacaacacccaacacccatgagttcagtccttaagaaggaaaattgagcaagtatttaattggttggacattgcataaaagaggtccatatccaggctaactctagaaattttattctcaaacttaggtgggcctcctttttcttctgtcagaggaccattcttagtggcactggggaaatcttggcacccagaagaattcaactgcgctcactgcaaaaatacaatggcctacattggatttgtagaggagaaaggagccctgtattgtgagctgtgctatgagaaattctttgcccctgaatgtggtcgatgccaaaggaagatccttggagaagtcatcaatgcgttgaaacaaacttggcatgtttcctgtttt

SEQ ID NO: 33443 - DNA, 435 bp, Homo sapiens
tagggcgaattggagctccaccgcggtggcggccgaggtacttccaaaccctcctgttctttcctttttgttttccccaattttaacataaggcaaaagcagtaattgagcaattctatcacctggattggcactccggggaacagtggagctgatcactaactgaattccccctttataatctgaataaattaccccagtatgaatttggactcccttcaaatttagacttgatctccctcaaaggcctaccctcccttctggcagcgggccatatacccctctaggaatcttttgtgggggctttccagggagtaaaaagaccatttgggtggaacataaatctactgcggtgctgcctgctgtggcgcgggacagctgttggattgttgtaattggctgactccctgaagtgggggtattttctgaagggtt

SEQ ID NO: 33444 - DNA, 471 bp, Homo sapiens
ctactatagggcgaattggagctccaccgcggtggcggccgcccgggcaggtactaacaaatgcagtagccaacaagattaccatgcaatcattaaggagaaccaaagtaagagagccactcaaaccagattttgaacgctactaaaattaaagtagttctttgatgaatatgaatgagtagggaaaggattctttgtaatagtgatacctctgtggtaagagaagggtggtatgtgagttttagtctacagattatggcaaattcagtgacaacaatcaaatggtctaagattgacagtagcacagttttactctgtgaaggtaatgttcaggacaaatttcaagaaaactagaaaaccattctttacagctgaaatctttccctaaccattgttatttccacttttaagtcctcaagagatgagaaaagggaggtaaggcttccttatacatttcctgcacaatgaaac

SEQ ID NO: 33445 - DNA, 462 bp, Homo sapiens
gactactatagggcgaattggagctccaccgcggtggcggccgcccgggcaggtacgcgggctttcttgaaggaatcccttaagtgcacgtctcccgttttcttttcacatcaatgcagagtccctctgtgaatttacaacacccaacacccatgagttcagtccttaagaaggaaaattgagcaagtatttaattggttggacattgcataaaagaggtccatatccaggctaactctagaaattttattctcaaacttagttggcctctttttttctgtcagaggaccattcttagtggcactggggaaatcttggcacccagaagaattcaactgcgcttcactgcaaaaatacaatggcctacattggatttgtagaggagaaaggagccctgtattgtgagctgtgctatgagaaattctttgcccctgaatgtggtcgatgccaaaggaagatcct

SEQ ID NO: 33446 - DNA, 183 bp, Homo sapiens
tggagctccaccgcggtggcggccgaggtacggttcagcctgtgatcacttcattccaatcaatttatggggccgagacttgttacaacaatggcatgcagagattactatcccagcctccctatacagccccaggaataaaaaaatcatgactaaaatgggatagctccctaaaaagggact

SEQ ID NO: 33447 - DNA, 201 bp, Homo sapiens
acactcactatagggtaattggagctccaccgcggtggcggccgaggtacgctgggacatcaatgcttagtccctctgtgaatttacaacacccaacacccatgagttcagtccttaagaaggaaaattgagcaagtatttaattggttggacattgcataaaagaggtccatatccaggctaactctagaaattttattc

SEQ ID NO: 33448 - DNA, 310 bp, Homo sapiens
acactactatagggtaattggagctccaccgcggtggcggccgcccgggctggtacagagacagttgaaggggggctcctttgccaagagagggaaccccacctgccacagataccagctaggtatatatacagaggctggaggaggcagtgtctgatttgcacaggcccaggggattggtttgactaggcatgtcattcacgtagcccggaaggaaaagcttgcttctccaaccctagccctttaaatatgcaaaatgcaggggcaaccattgatctttctacacagggtgggggaatacttcgggggt

SEQ ID NO: 33449 - DNA, 443 bp, Homo sapiens
tatagggcaattggagctttccgcggtggcggccgaggtacgcgggggacatcaatgcagagtccctctgtgaatttacaatacccaacacccatgagttcagtccttaagaaggaaaattgagcaagtatttaattggttggacattgcataaaagaggtccatatccaggctaactctagaaattttattctcaaacttagttggcctctttttcttctgtcagaggaccattcttagtggcactggggaaatcttggcacccagaagaattcaactgcgctcactgcaaaaatacaatggcctacattggatttgtagaggagaaaggagccctgtattgtgagctgtgctatgagaaattctttgcccctgaatgtggtcgatgccaaaggaagatccttggagaagtcatcaatgcgttgaaacaaacttggcatgtt

SEQ ID NO: 33450 - DNA, 452 bp, Homo sapiens
actactatagggcgaattggagctccaccgcggtggcggccgcccgggcaaattcccatgatgtcagaccactggagtttccaggggcaacaccccataaccgtcccgctgcagaagagcatcagaagttcagaagaatgcaaaggatctcagtgggaacgcggacaggagagccccaaaccaacacatgctagggctctctaggccctttcaggctagatcttgacgagagaagagtaaagatctttctgaggttggtgcaactgaggaaacgaaagtttcggcctctgctgtcagatctatgaaaggaaagaactgtgaacttgtccccttttgttttctttgacttaaaacaaaagaaaatcactggaacaaagtcttaaagtaataacagaaatgtcagaaaagttgaacatcttatgggcacatgcggtgagttacgctaacttata

SEQ ID NO: 33451 - DNA, 417 bp, Homo sapiens
atacgactactatagggcgaattggagctccaccgcggtggcggccgcccgggcaggtactaatttcctgaaaagtatgttccgatagatgaacagatcattaatgcagaatgagaatcactcctaaaataggtaatggtaaaaattaaattgacaattacctctctctatgcagaaggaaatatcacctatatgacatcatcatcatctattgatacctggctggcagtgctaatattgtttttaatgccaatttgtaagaagttttatctctctgtcactgacatcctacagagtcacttccccaggcctcccatagaagttgggtgccatcaacatagggaaataagaaaagcttaaatgtaaggaagggttcttgtcttttttctgtgccagaaaaaacaagaatggccaaca

SEQ ID NO: 33452 - DNA, 464 bp, Homo sapiens
acgactcactatagggcgaattggagctccaccgcggtggcggccgaggtacagatgtccagtagacctactggatatgcaggcctgcagctcaggggagagctgggttaagaaccgtcaaggcagtaatcatctgcatttagatggcgagtgaagccatgacaggggctgaaatggcccagcaagaataaatcaaaccatgagaaacacataccattaaaaaataaggagatgtggtcaggcgcggtggctcacacctgtaatcccagcactttgggaggccgaggcgggtggatcacttgaggtcagtagtttgagaccagcctgggcaacctagtgaaatcccgtctctgctaaaaatacagaacttacctgggtgtggtggttgcgtgcctatagtcccagctgcttgggaggctgaggcacaagaatcgcttgaacccgggaggtggaagctgcagtga

SEQ ID NO: 33453 - DNA, 297 bp, Homo sapiens
  misc_feature 260: n = A,T,C or G
accgcggtggcggccgcccgggcaggtacgcggggtctctcttcctcggcgctgcctacggaggtggcagccatctccttctcggcatcatggccgccctcagaccccttgtgaagcccaagatcgtcaaaaagagaaccaagaagttcatccggcaccagtcagaccgatatgtcaaaattaaaccctaacctgggggaaacccaaaggcaattgacaacagggtttcgtagaaaattcaagggcccagatcttgatgncccaacattgtgttatgggaagccaacaaaaaaacaa

SEQ ID NO: 33454 - DNA, 401 bp, Homo sapiens
tccaccgcggtggcggccgaggtactggtttcaacaagataaggtttctatggagctgccataatttttctataacgctgcccctaggccagaattggttggtctacaggtagatacctgatccaaactatgacaaccacaatattccagcccttgacaatgattgactcttccaggacgggcacttaactcaagctaggccaatcatagtcatttctcaactagatcctgccccactggtcatagctaattggtgcaggactggaactggatgcaagctgactctctggattgagaactagaggtcagaccattccctgtcccatgtctgaaactgaaatatgcagcactggaaaactgctcatgctcatggccatgggatcagccttccccttagcctc

SEQ ID NO: 33455 - DNA, 538 bp, Homo sapiens
ccgggcaggtacatttttagatgatcacgaatgtcttatatcacacttttctgtgatatggggattccccttgggggttttcatgtgtatagggtgcctgcagctacactaaacatcttaaagctacacaatgttcacttcatatttttgctttttataggctttcttggtctcctcctatgttcccatcattttcttgctttgaatctgtaagaatcgagttgaatcttctccattttaaattttccatacgctgagaaactgtttagccaagtttggataaaattgtatccaaagtaagagtatacaagctatgggcaagtccaaaatcaagctgttcacaggaccatgttctctctaaaggttctaggagagaatccctcatttacttccagcttctgggtggctgctggcattcctgggccggtggctgcatccctccaatctctgcctccatcttcacatgaccttcttccttgtgtttctatgggtactttcctgttttttatgaagacattttcattggatttagatccca

SEQ ID NO: 33456 - DNA, 425 bp, Homo sapiens
ctatagggcgaagtggatttggagctccaccgcggtggcggccgccgggcaggtaccctggaatatgacggtgatcacaagcctgcaacaggaactctgccccagtttcctcctcccctctgctccagctctgggacgctgctttccgtggaccaacattactccaccggcgctcccagggatcaccaatgacaccaccatacagcaggggatcagcggtcttattgacagcctcaatgcccgagacatcagtgttaagatctttgaagattttgcccagtcctggtattggattcttgttgccctgggggtggctctggtcttgagcctactgtttatcttgcttctgcgcctggtggctgggcccctggtgctggtgctgatcctgggagtgctgggcgtgctggcatatggcatctactact

SEQ ID NO: 33457 - DNA, 594 bp, Homo sapiens
  misc_feature 530: n = A,T,C or G
gcggccgaggtactgggagagaccacatttggggtcataaaacaagaagcaacatatatgaaaggaatgaaataatacagagtatgttctctgaccacagtggaattaaatgacaataacaataagataactaggaaacaccaactatctggaaattaatgcatgtccaaataatcattgggtcaaagaagaagtcacaagaaaaactagataacattttgaactaaatgttaatgaaaatacaacatatcaaaattttgtgagatgcaacttaagctgcactttgagaaaacgatataattttacaatcttagctcttacatgtagaaaccaaatgctttattcaaccaattttgaatgtgcacaaatatggggtatatttttcacgagcctttctgaataaactagaagacaagctccagccaaccaagagatggggaaatttttggtaaaaggaccagagataaacaattattaataacatacttaactggagatataagccagtaacaaagctgcggatatgagtngtaaagtgttatatgttctgacagtgtagaaacaatataaccaacaaaaactgggaaaggaatg

SEQ ID NO: 33458 - DNA, 471 bp, Homo sapiens
ggtggcggccgaggtacctgattcatatcccatcaaggactgtttctcagtctttataggcagcacagtaaaggggaaagatcatgatttttggggccaggttcccttgaatattgtggggtccccacacttctggatgatgttggataactctttgagacttaagcttcacatctgtaaaatggaaatacttatttttcagagttgtcataaacactaaatgatttgacttatatcaacctaattcctactggctcattgaactcagctcagctgtcccctctgttcggatgccttccccagtggggcttagttaggtatccctgctggataccctgccaagctcttacacattccctctgccataacactcattctttgttactgaattataatttcatgttcatttgtttatctctcatactaggctgtgagttccctgatgacagagaatgtcttgttggttttgga

SEQ ID NO: 33459 - DNA, 520 bp, Homo sapiens
  misc_feature 473, 504: n = A,T,C or G
gactcactatagggcgaataggagctccaccgcggtggcggccgcccgggcaggtacttgcccaatgtttacccttacgacaacgcatgcaaacagtagcaggagcatttggccgtgtttgttgagccggcttggccgcttttaagtttttaacagtgtagtttttttgggtatgaccaagttggccacaattatagcaggctccaagaaaagaatcagtcgagccagtttggttgccgtgcttcatggccggtgcccacagaatagctctgtgggtctccgatccaacgccttcacaagctttaatatatacaggcaacacctcatgatcaggtaaattttgacgtaggatggaatgcacggccattttacactcatggttcgcattttgaaaagctaacatatgaagaagaataccttgagtgtgctcatcagagacagatttttcaacagcatcttgtaatttagctaanaaatcaagatataattcattgtgaccctgtntaacaatagtaaaaga

SEQ ID NO: 33460 - DNA, 360 bp, Homo sapiens
tcactatagggcgaattggagctccaccgcggtggcggccgaggtacatatatatgtctgtgtgtgtgtgtgtgtgtatatatatggccatataaagtgtgaaaaagcatgtttgagagagaataccaagggtgtggtcaagtgaccatttgctaaagagattaccctggatagaagggaaccagatgctattcaagataatgggagaaagatcctgaatacattccagagatctttgagtcttccccacccatcacagccccagagatctaggagggcagaatgatttcagaggatgggcctggggtgccctccagaggcttgctgcctagagctgccttggtccctgtttcccacatt

SEQ ID NO: 33461 - DNA, 469 bp, Homo sapiens
ccgcccgggcaggtacgcgtgagattacctcatttcagctcaataaaacatttctcaaattcccttaggcagaaaaagggtggggagtgccctttcttgaaggaatcccttaagtgcacgtctcccgttttcttttcacatcaatgcagagtccctctgtgaatttacaacacccaacacccatgagttcagtccttaagaaggaaaattgagcaagtatttaattggttggacattgcataaaagaggtccatatccaggctaactctagaaattttattctcaaacttagttggcctctttttcttctgtcagaggaccattcttagtggcactggggaaatcttggcacccagaagaattcaactgcgctcactgcaaaaatacaatggcctacattggatttgtagaggagaaaggagccctgtattgtgagctgtgctatgaaaaattctttgcccctgaatgt

SEQ ID NO: 33462 - DNA, 539 bp, Homo sapiens
ctactatagggcgaattggagctccaccgcggtggcggccgaggtactagagtaggtgagtgttaatgaccagaaaaaaatagtaattatccatgacactgtatacaatgttacagtgtaaaaatcacacccagaaccactgccctctgaagcaactgtattatacccatggtcagaaaagttaatcaagtcactcttcacaaatgccccattgctggagcatagaggctgttcaaagtggagcatggaggctcctgctgattgggagcctgataagtgttgcctggcagaggcagatacaaggaaagccagcacttggggctgggaagcactgggcattttctacccaggcccatgggatctgttgcctcagagactgactcgcctttcctgagcattagacatccatcacctgggattagtctgagtagttgagcaatttgttaacagattagagatatacatcttttctccagtggacttggaatctgatggccctggaattgaatcctaatgtggctttaacactctcttggtat

SEQ ID NO: 33463 - DNA, 476 bp, Homo sapiens
  misc_feature 66: n = A,T,C or G
gctatacactactatagggcgaattggagctccaccgcggtggcggccgcccgggcaggtactgtnttattttttttattgtttgttggctacaagtgtttgtgctgttcagaaggggttctgttgctcaaatgctgtcaaagtaatcccccttcatttattttctgcccttgaagttcatccccaagaatataggaacactcaaaaattcattttttgaggaaaggattctgtctttggaatggctatgagcctaaagagaaaaaacaataatttgacctagtttcacaataacccatctccccaagaggcaaaatgcatagctatcctgtgaagtcaggggagcagaggaaagctgaccccacttccttaaaatactttctcttggtattaaaaaataggttgcaatggctcacagatgagaatcatgccaaatgtgcatttgatccatgcttacggataaatttaggcaagat

SEQ ID NO: 33464 - DNA, 462 bp, Homo sapiens
tacactactatagggcgaattggagctccaccgcggtggcggccgcccgggcaggtacaatcctctttagcttttttgttttatagacagtgtggacgtgcatatattgcaagcatcactttgttaaactatgcttaaccctgcaaatgattttaagagctctgtgtgggtggctttcttgggtttactattaaatatctgtgtttatcatagttctataacatttcaactttgtaaatatgtagtttgttgataaagaggatagagacatttttcttttgttgatagattgttctttcccctttgcttagtcttcattgtgttgctgggattgtaaaagacaaattacttgcacatatttaagcttatatattaaatgtatatatgctgtcatgttagagagggagagtggttccctcccccacattttgatttaaaagtaaaaattaatttttattaaat

SEQ ID NO: 33465 - DNA, 456 bp, Homo sapiens
gactactatagggcgaattggagctccaccgcggtggcggccgaggtacttctgctccacgaggaaggggatcgccaggcactaccgcatcaagcacaataatgtccgagcccagccagaaggcaagaacaacctcttcaagtgtgccctgtgtgcctacaccaaccccatccgcaaaggtctggcagcccactaccagaagcgccacgacattgatgcgtattacactcactgcttggcagcctccaggaccatcagcgacaagcccaacaaagtgatcatcccatccccgcccaaggacgactcccctcagctgagcgaggaactccggcgggcagtggagaagaaaaagtgctccttgtgctctttccagtcgttcagcaagaagggcatcgtgtcccattacatgaaacgccacccagggggtgttcccaaagaagcagcacgccagcaagt

SEQ ID NO: 33466 - DNA, 443 bp, Homo sapiens
actactatagggcgaattggagctccaccgcggtggcggccgcccgggcaggtacaggcccacgccagacacgacgtctggcaggaacctcggcctcagaggtgggtcacttatatctctcacgcagatttactatcatgggtcacttaacccgtggatcacacgggttcctcattcttgagttttgggctagtgaggtgccgacttcggggtctaggaggggagacctgatgtggctgtgtgtgcgcacgcgggggtgttgagagtggatgagtgggaggagttggcgaatagaatagagactaggactgaagtaggaaagactccccggtgtttaggaggtttagagagatccaaaactgaggcgggaagacaaactgagctgataaaatgagggcatggaaagaacggcagtggcaggactagtgggaaacgtcggattt

SEQ ID NO: 33467 - DNA, 464 bp, Homo sapiens
ctactatagggcgaattggagctccaccgcggtggcggccgcccgggcaggtacaaaaattagctgggcatagtggcacatgcctgtagtcccagctactcgggaggctgatgaacaagaatcacttgaacctgggaggaggaggttgcagtgagctgagatcgtgccactgcactccagcctgagcgacagagcaagactgtctcaaaaaaataaaaaagaaaaaaataataaaaaggaaaacaaagcctttagaaaaacaaagcctttgaaaaaggatgtaaaattgaatatatagatacaattatttttaaaaagttttatagaaaaatatcctggattgttgatgttgttttaatatattttaatcatttttgtataatgtcatgtataatatgttataatgaaagtaaaaaaaaaaaaagtacctcggccgctctagaactagtggatcccccgggctg

SEQ ID NO: 33468 - DNA, 440 bp, Homo sapiens
agggcgattgagctcaccgcggtgggcggccgcccgggcaggtacagcatggctcaaggcctcaggcaaacaaaagcactcttaccagatagaacattatgagagctcagttcccagagctgcccaaaggctagtcaggaaaacaggaccttctggggaacttacagagtttgagcaataggcctgttatgtcaaccccaagcagagtggatgaagacaaggcaagggacaggctgacagctgattcctgggttcctctgatgtttacaggagagatcaagcaaaggagacaaaaaaaggactgttaacacagggggaaaccaacactgaaaactcctggaaatgaagagttttcagaatgggttgttgctatccttggagctgaatggctatcataatgatgataacattaattcagattttaaaaattaatcattaga

SEQ ID NO: 33469 - DNA, 349 bp, Homo sapiens
cactactatagggcgaattggagctccaccgcggtggcggccgaggtactctgcgtggggctccacctcacacccacccctgggcatcttaggactggaggggctccttggaaaactggaagaagtctcaacactgtttctttttcagaagttttgtttttgatatttatattacttggtatggatttccttaggtcagaggagagcatcgcatctcacgtttttaggtttatcactgccatcccacttctgggatgggaggtagcaagggcttctgtattttcttgtgttcattctagcaacccagacatttccggatcagatcctgctggtctccactcactggaaa

SEQ ID NO: 33470 - DNA, 449 bp, Homo sapiens
tacactactatagggcgaattggagctccaccgcggtggcggccgcccgggcaggtacttttttttttttttttttttttttgcaaataagaaagttgaagagcaaaacgacgtgtctaacgtcacacattgagctttaaagacagatgggatctggcatgcgtttgtcagttaacagtgctagcacaaatacaacttttgttaaaatcgtaaggattttatgtcgtgagacactcaggactcacctgatctcggtgttcagttgtgcgtagtttttgatttgcgcctcgcccttgggcaagtgcagaatcctggggttatacaaagctcatcacagttaacccctttgtcccagtccgcaaaatgagagctcatagcccggccatgggaggctcggttatataggcaggaaaatcaaggaacccaggtatgagcaggggcctttgtgg

SEQ ID NO: 33471 - DNA, 410 bp, Homo sapiens
tacgactactatagggcgaattggagctccaccgcggtggcggccgcccgggcaggtaccgggaaccaaactctcattccccaggggcctaagccccccgtggccaggcccttctcaagtcagggttcctgcacattcacagttacgggtggccctgggagtaacacctggcacccaaacaggtcaccagagtccacacatagtccacctgccctccctgcgtaagatcagctcttcctcctcccgacgaatagatcagggtcaatgatccctgccaagatggcgactgctccagcctgctggtccaacctgtccagccaccagctgttgctcgaaggcttgaagttcaatgggaccctctcccgctttctacaaactagttcctttatttttatgtttatttatttggg

SEQ ID NO: 33472 - DNA, 338 bp, Homo sapiens
ctcactatagggcgactcggagctccaccgcggcgcccgggcaggtacacccttctcaacaacttccttcacatctgcaggctgcacaccaggagaatgctcagttcctgtttctctccaatcccaagtccgactaccccctggccatactttgcagtccttataggttgtattagagcccttttactttcatttgcccccatgataaggaagcaatttcagggggaaagtcataaggaacttcactggaagtcagatgcggagccaacctggtcttggaacttcccaagccttccaagaacccaaccgcactgtcctccctcaaaagttggcgttcc

SEQ ID NO: 33473 - DNA, 459 bp, Homo sapiens
tatacactcactatagggcgaattggagctccaccgcggtggcggccgcccgggcaggtacgcggggaagcttccaagatgccgcccaaaggaaaaagtggttctggaaaagcggggaaagggggagcagcctctgggagtgacagtgctgacaagaaggctcaaggtcccaaaggtggtggcaatgcagtaaaggtcagacacattctatgtgaaaaacatggcaaaatcatggaagccatggaaaagttaaagtctgggatgagattcaatgaagtggccgcacagtatagtgaagataaagccaggcaagggggtgacttgggttggatgaccagagggtccatggtgggaccatttcaagaagcagcatttgccttgcctgtaagtgggatggataagcctgtgtttacagacccaccggttaagaaaaaatttggatatcatattattatggtc

SEQ ID NO: 33474 - DNA, 459 bp, Homo sapiens
actatagggcgaattggagctccaccgcggtggcggccgaggtacttctcatctttcaggaagacgacagtgatcttagttctgtggttctctgcattcagtccctcatatagagatttgttgaaagatatttcaccaaggatctgcagttcagttacatcttttagtaactgaaccgaactgtacgcgggtattgtttacatataatgccgtcttgccaagaggggtgttctcatggaagtgaggcacagaaagtcaaaatgacttgcttaaagttcagagtctcacaaatcctgatcagttgtaggcttttcttggaagggagtgagggggactcagccgaggcacacttgacccaggtctcctggatgtagaggcatcagggaactccaagggtccctccggggaccttctggagcccagcttcatggtggaatagcagtgtctgccgaaagctgg

SEQ ID NO: 33475 - DNA, 460 bp, Homo sapiens
ctactatagggcgaattggagctccaccgcggtggcggccgcccgggcaggtacgcggggaggtaagaaatgaattttgttgttttggtttcaaattgtggaaaaataccaagagattgatgtattgtctggatatgtgtgcagcagaggagacaacatttgcttctttacagctttgcaagtgcattaaacaaaaattgtagaagagggtgtccttgtcctctcctagtcaccacttgtgcaaacagcgaaagtttagaaaggaaaatcagcaagtcttgcatagagtgtaaggacattcagattgagaatgaagaacttgtcctttcagtctcttcttccctattaatatgagataaaaacataataaaatcacttgtaaatctagagaaatagaaagtgatttttttttccacataccaattttgacagtgctgggcctaaaggagataacatttat

SEQ ID NO: 33476 - DNA, 453 bp, Homo sapiens
actactatagggcgaattggagctccaccgcggtggcggccgcccgggcaggtacgcgggggctgatgccattttcagcctcagcacgcctgcacccaggcgctcattaaaacagcatgttgctccccactgcctcgtgttgtctgttggcgcgctgtcggggttcgaaccgatacaagaaccttccacctacctggtgctttggcctcatctataagcagcttttccactgtcctgaaacaagatagagaatctgagcggccagtcatctgccctaagtgctgccgccgaagactgaatgtcctggaaagtttgctgtcacatctccattatgacaaaagcattgtgccgaacagatgaaaaaatgcattgtcaacggaatcttttatgtttgtttgtcttcctttaagcaacattgccttacttgttattaaagataaataaatatttgtt

SEQ ID NO: 33477 - DNA, 455 bp, Homo sapiens
cactactatagggcgaattggagctccaccgcggtggcggccgcccgggcaggtacagcagacatcttgtgaccatgaggtgacaaaccagcatgctgtagaggacagagtggaaagagaaaaagtctacgtccttgatagcaccaatgagccactgtcccaaccctatactgcctaattctaggctataaataggataggccttttttttttttgcttaagctaatattaaatatttgtttaactagtttactgtcacctgcaagcagaacatattctgaaatgagagacagcaagattgacagtgagcaaattagcctgaaggctattacagtaacccagaaaagtgatgatgatgacttgagggagagtaattataggattagagaagacagaatagatttgaaggagcgggaggtagagacaattttgttttaggcacattgacattggca

SEQ ID NO: 33478 - DNA, 424 bp, Homo sapiens
tacgactcactatagggcgaattggagctccaccgcggtggcggccgaggtactttttttttttttttttttttttttttgcttttttattttcttccatcagtgggacaaagttgacatcattgcctaaaagtaatttctgtgattatctgtgtatttcagttaaccatgttctttggactcactgtggtcttcagcagggatggtggccaaactatgtttagaaagataaaaattaaaatgacatctgcatccttcatgtaaacccataaaaaatagcacgtgaccctgaagatcctctgcctctcattccaggcattacaattgaaaatgctatctgggatgttaaaaactaaaactattctaggacttagtggaattttgatagttagggaaagctgtttgctttcttgaattttgaacc

SEQ ID NO: 33479 - DNA, 452 bp, Homo sapiens
tatacactactatagggcgaattggagctccaccgcggtggcggccgcccgggcaggtacgggggagatgaagttggagcccttgtttttgacattggatcctatgctgtgagagctggttatgctggtgaggactgccccaaggtggattttcctacagctgttggtatggtggtagaaagagatgacggaagcacatttatggaaatagatggcgataaaggcaaacaaggcggtcccacctactacatatgatactaatgctctgcgtgttccgagggagaatatggaggccattttacctctaaaaaatgggaatggttgaagactgggatagtttccaagctattttggatcatacctacaaaatgcatgtcaaatcagaagccagtctccatcctggtctcatgtcaaaggcaccgtggaatactagagcaaagagagagaaactg

SEQ ID NO: 33480 - DNA, 450 bp, Homo sapiens
tatagggcgaattggagctccaccgcggtggcggccgaggtactgatcgtcttgttatcactccattaacagatagatgctatatcacgttagctcaggccttgggcatgaacatgggaggtgctcccgcaggacctgctggcactggcaaaacagaaaccacaaaagacatgggaaggtgtttgggaaaatatgtggtcgtgttcaattgctcagatcaaatggatttcagaggcctaggaaggattttcaaagcaagaaaagaaagaaagaaacagttcattttttctgatggtgattgtgttgatttaaatccagaatttggaatcttcttaacgatgaaccctggatatgctgggcgccaggaactaccagaaaacctaaaaatccagtttagaactgttgctatgatggttcctgatagacagatcattatgagagttaaacttg

SEQ ID NO: 33481 - DNA, 442 bp, Homo sapiens
ctcactatagggcgaattggagctccaccgcggtggcggccgcccgggcaggacgcgggggcgcagctcttagtcgcgggctgactggtgtttatccgtcactcgccgaggttccttgggtcatggtgccagcctgactgagaagaggacgctcccgggagacgaatgaggaaccacctcctcctattgttcaagtacctaaatctttgtctgagattctatttcctctagacagatgcctagaagtaaaattaatgggtcagaggacatatttttaaagcaaggttctggataacataatgctacattactttgcagaattttgtgtcaatatatagatatccactatcactatgagtgtctatttcactgtacctcggccgctctagaactagtggatcccccgggctgcaggaattcgatatcaagcttatcgataccg

SEQ ID NO: 33482 - DNA, 398 bp, Homo sapiens
actgactcactatagggcgaattggagctccaccgcggtggcggccgtcgctcccctgctcctccttggtggctctctcaaggactccagagttgtatccccaggccgtcttccccgcgtacctcggccgaggtacgcgggggagaacaaagaggaagcagccatgttagcattactgaaggcagagccagccttgcatttaactgcatggtggtagagggcagtgtaattccctggttattctgtaaactatatcaaatcctttttgtctcttctcatttcactaacagaattcacaaggagctagctgaaataacccttgatcctcctcctaattgcagtgctgggccttaaggagataacatttatgaatggagatcaactatactttggtccac

SEQ ID NO: 33483 - DNA, 446 bp, Homo sapiens
attggagctccaccgcggtggcggccgcccgggcaggtacatttttgttgtagattattttaaacataatgctatagtaatattttgaagatttgagctgttatttccatttgtttttacactgtgactaaatgattaggttttagttttagactctaaacggaacctgaattaataggaaataaacacggtacgggggattattatctgcttccatggataaaaccatgattctctgggctccagatgaagagtcaggagtttggctagaacaggttcgagtaggtgaagtaggtgggaatactttgggattttatgattgccagttcaatgaagatggctccatgatcattgctcatgctttccacggagcgttgcacctttggaaacagaattcagtttacccaagagagtggactccagagattgtcatttcaggacacttt

SEQ ID NO: 33484 - DNA, 446 bp, Homo sapiens
gggcgaattggagctccaccgcggtggcggccgaggtacttagtctctcaaggacgattccccttggtgaacctgaccgatatgctgagcgttgctgtgcagcaccgtgagaaagaggtgttggcctggatgattctgcacagcttataccaggcacggattgtgagccatgccaatacgggtgaggacaccctggggtgaacatcagaaacaggaatagatctgcctgctgttgcttttaagttgcacttgagttctcaacttaaaaattagtttagtgcttattgacacaggttaggccttctggtgccaaatgaggagtaacttggatagaaattaacagttatagctcacaacatccactttttggaaatgaggatggattctttcgaggggtttttgttttctatttggctctgtagaccctcacagttacaaacaagtta

SEQ ID NO: 33485 - DNA, 464 bp, Homo sapiens
ctactatagggcgaattggagctccaccgcggtggcggccgcccgggcaggtacgcgggagaggagggggaggaagccggcggccagaaacggcagtggcagcagcgtccggagcagccgcagccttctggaagctccaggcggtctttctgccgagcctcggtcccggcccccatcctccccgccccatcggttgttgtctgggcggatttaaacagtcaagttaaatcaagctgggtaatcatggcagaaggtggatttgatccctgtgaatgtgtttgctctcatgaacatgcaatgagaagactgatcaatctgttacggcagtcccagtcctactgcacagacacagagtggtttcaggaattaccgggaccctctggtgataatggcattagtgttacaatgatcttggtagcctggatgggtattgcattgatcttgttcttactgagaccttctaa

SEQ ID NO: 33486 - DNA, 432 bp, Homo sapiens
ctactatggctatagggcgaattggagctccaccgcggtggcggccgaggtacaaagctgaaacgcagagattttcatattatttgggagactcagaaatgagcttttaaggttgttccttgacttgcgggtcaataagcgcacaatggtgaagaaaaggctgccttctagtgacacggtgttccggtttgagactccgggcagcccaaggaaggccaacgtggaggcctcacgcagctccacagacagccccagaccagaagaaaatcattagcctatggtcaaaatccagttttgatggtgcctctttagcaagtgataagaacgactgtaaaacagaaagcaaaaatgaccctaagactgaaagaaaaaagtcttcatcttccagccagtacctgcccgggcgggcgctctagaactagtggatccccc

SEQ ID NO: 33487 - DNA, 443 bp, Homo sapiens
ctatagggcgaattggagctccaccgcggtggcggccgaggtacgcgggggctgatgccattttcagcctcagcacgcctgcacccaggcgctcattaaaacagcatgttgctccccactgcctcgtgttgtctgttggcgcgctgtcggggttcgaaccgatacaagaaccttccacctacctggtgctttggcctcatctataagcttttccactgtcccgaaacaagatagagaatctgagcggccagtcatctgccctaagtgctgccgccgaagactgaatgtcctggaaagtttgctgtcacatctccattatgacaaaagcattgtgccgaacagatgaaaaaatgcattgtcaacggaatcttttatgtttgtttgtcttcctttaagcaacattgccttacttgttataaaagataaataaatatttgttcatt

SEQ ID NO: 33488 - DNA, 342 bp, Homo sapiens
gcggccgaggtacgcggggattcattcgttgcgcacctactcttgcacaaagccctgcttttccctctggaatgtgctgaccctggccccgagatggttccactgtttcttctgtgggcttgtctcactcgtgaaagagtgtcccaaatagtgactactgaagctgcaccaagtaataggaacaaatctcgttctgtctcctaatctttcttcctctctccctccttttgttttttacaactccacctcccaggccatgtggaagcctgcgtatgacttcttactcacctggagccatcagatcggggacagctaccgggatgtcatccaggagctgcacct

SEQ ID NO: 33489 - DNA, 437 bp, Homo sapiens
actatagggcgaattggagctccaccgcggtggcggccgcccgggcaggtacgcgggggctgatgccattttcagcctcagcacgcctgcacccaggcgctcattaaaacagcatgttgctccccactgcctcgtgttgtctgttggcgcgctgtcggggttcgaaccgatacaagaaccttccacctacctggtgctttggcctcatctataagcttttccactgtcctgaaacaagatagagaatctgagcggccagtcatctgccctaagtgctgccgccgaagactgaatgtcctggaaagtttgctgtcacatctccattatgacaaaagcattgtgccgaacagatgaaaaaatgcattgtcaacggaatcttttatgtttgtttgtcttcctttaagcaacattgccttacttgttataaaagataaata

SEQ ID NO: 33490 - DNA, 441 bp, Homo sapiens
acgactcactatagggcgaattggagctccaccgcggtggcggccgaggtactttttttttttttttttttttgcgttgggggcttcactatgttgcctaggctggtcttgaactcctaggctcaagtgaccctcccaccttggcctcctagtagctggcactacaggtatgcgccagcacacctagctgtatcttattatctattcctatcttctttagagttctacttcttactagccaatccttcattactccaattccactatggttaataatttcttatattgaactttagttattcaaattactacgtgatttctgtctcctggttacagatacagattgatagagcaagtgtgagatccaacagcacagctatcacaaaaagcagaaactgcccgaaaccttgtatcgatacaatataaggaagaagtgtcaga

SEQ ID NO: 33491 - DNA, 404 bp, Homo sapiens
  misc_feature 32: n = A,T,C or G
agctccaccgcggtggcggccgaggtacttgnctcactatgtttctattctattatttaaaggatatgtttttagatcaatgccttttgttggggagggttatggagtgagaggttcaatgtggaaacttccagcctggctgattgtatgggctgtctatgaccgtggctttctgtggccagcacagtggtgccacctgtgagctggaagtcatcacctgttccactgtggcagttggcctggtcgtcatcacattcatccaccaagttcccgttgggagtggtcggtccagctgtaggggcttccacttcacagcccagcagctccattctgagccccagtccgccatgagtggctctctcggggtagatcctgatgaatcgcgtggagagagctggaaaagt

SEQ ID NO: 33492 - DNA, 396 bp, Homo sapiens
acgactcacatagggcgaattggagctccaccgcggtggcggccgcccgggcaggtacgcggggagagaagtttccgggactggtgagtagtgggcgatttaaaaacccgcgagtgtagttgtgaccttcgcggtatgtgccggttggggccggctgtgattgttatcttggtgctgcacaggacagcagaagaggtagattgggtcagaaaaactgcctctgccgcagccatagcacgagcgcactagttgggacacggggtcctagactcattacttaacgtggctgtgtcatcgtggctatttcacctgtccgtggaaaaagcgctgaatgtggcatctgataatgaggcattatatgaggtaaccgtctagggagcggtttgcaggttgcaa

SEQ ID NO: 33493 - DNA, 700 bp, Homo sapiens
  misc_feature 436: n = A,T,C or G
actactatagggcgaattggagctccaccgcggtggcggccgcccgggcaggtacccagggacacaaacactctgcctaggaaaaccagagacctttgttcacttgtttgtctgctgaccttccctccactagtgtcctatgaccctgccaaatccccctctgtgagaaacacccaagaatgatcaataaaaaaaaataaaattaaaaagaaaacaacaacaacaacaaaaaaaagtcctcccataaggaaagatgatcaattcttatgtatcgttctagggatataaatattcaggaggcttttcagaataaaagttaaatcatttatgtcgcacaaacaaatttactattcggacaaatacgatgacaaggagtttgagtatcgacatgtcatgctgcccaaggacatagccaagctggtccctaaaacccatntggtgtctgaatctgaatggaggaatcttggcattcagcagagtcagggatgggtccattatatgatccatgaaccagaacctcacatcttgctgttccggcacccactacccgagaaaacaaagaaatgaagctggcaagctgcttttcagcctcaagctttacacagctgtccttacttcctaacatctttcagataacattattatggtgccttcttgcttctcactttgatatttaaaagatgttcaatacactgtttga

SEQ ID NO: 33494 - DNA, 610 bp, Homo sapiens
tatacgactcactatagggcgaattggagctccaccgcggtggcggccgaggtacaaccacttgacttgctctttaacatagtcctgtgagatgccagctgccatgaccaagcagtattcccactcctcctctacactctggcaaggctttcctggaacatccccatgcccacatctttacccagtaactcactaaagccactcttgactcaagcaggtgccgttccttgatcacggaatctacctttgatttcatcacgccagattcacaaacagaatgggagtgctttatctatacctttgagaggatggagagtgaaataactggaaacactgggttatcacagcttaatttcatccaggcttggtgtctataccaaagatggctggggaaaggaagggagattcatcttgttcaggcagtgatttgctcagaattttacaagacgtaccctatacagacctatttgaattctactgtgggtttattgaaccagtgttggaacaacttcgcaaaacaaaccaggccagttaggtacctgcccgggcggccgctctagaactagtggatcccccgggctgcaggaattcgatatcaagcttatcgata

SEQ ID NO: 33495 - DNA, 685 bp, Homo sapiens
  misc_feature 142, 412: n = A,T,C or G
agctccaccgcggtggcggccgaggtacctgcctagacaatcacagtgctgggacccctgcctggcaccctctggctctgagcctcgcactcctgaccgcagctcagtcccacccacctgctcagcaagggcgtccccagcnaagggcacccagaacccgcatgtgtagagagactctggcagggctgatggagcgacaggtcggggtttctctaacaagcactttcctggaaacttcattttaacatgttcccatctccctcagaaaaagggcatcgagaagaacctgggcatcggcaaagtctcctcttttgaggagaagatgatctcggatgccatccccgagctgaaggcctccatcaagaagggggaagatttcgtgaagacccctgaagtgagccggtgtgacggntggccagtttccttaatttatgaaggcatcatgtcactgcaaaagccgtacagataaactttgtattttaatttgctttggtgatgattactgtattgacatcatcatgccttccaaattgtgggtggctctgtgggcgcatcaataaaagccgtccttgattttatttttcaaggtcccttctgtaaatgctgtgctttctttcctgtgagagccaactttaaagtgtctgctacctcttcattaccaatcagaattagatgatgtttaact

SEQ ID NO: 33496 - DNA, 504 bp, Homo sapiens
ctatagggcgaattggagctccaccgcggtggcggccgcccgggcaggtacgcggggggggctgggcttcgtgtcctgcgttccgggagcgccaacccctccagcagaggggacgtggctggtggctggagaagctggatttgccctttgatggtggccctcttgatccccggcttgctgaagtcaaaggagaggctgtcgatgctgaggcacgagagaatttgctcctgctcctccagagaaaatggctgggacaggctgttgaggaataattctgcagggaaaagtggaagatggctgtgaaagactgggaggaggctggctgtgttttcaggggttcttcctgcacagtcggtagaagctgagctgctggggaaggggctggaagaaagcccacaccgcaggtatcagtagcaaattcaaaaactacagaatcagctccagaggactttgttaacaagaaagagaagattgaaaacagccctggggctacaccaactcaag

SEQ ID NO: 33497 - DNA, 186 bp, Homo sapiens
ggcgaattggagctccaccgcggtggcggccgaagtaccattgatggaagtccagtagtcttgccacattggtttatgagggcttcttggagtggaaaagaccgattatcgggggctttgaaaacagctgcaaaccagggaggaaaatcatctggcccctgctctgaggacagacatgtgctacca

SEQ ID NO: 33498 - DNA, 436 bp, Homo sapiens
gcgaattggagctccaccgcggtggcggccgaggtacgcggggagacgccgcgccgcgctgcgacgctgtagtggcttcgtcttcggtttttctcttccttcgctaacgcctcccggctctcgtcagcctcccgccggccgctctagaactagtggatcccccgggctgcaggaattctatatcaagcttatcgataccgtcgacctcgagggggggcccggtacccagcttttgttccctttagtgagggttaattgcgcgcttggcgtaatcatggtcatagctgtttcctgtgtgaaattgttatccgctcacaatttcacacaacatacgagccgggagcataaagtgtaaagcctggggtgcctaatgagtgagcttacctacattaattgcgttgcgctcactgcccgctttccagtcgggaaacctgtc

SEQ ID NO: 33499 - DNA, 511 bp, Homo sapiens
gactcactatagggcgaattggagctccaccgcggtggcggccgaggtactctcttaatggcatttttatggtaagttgagttacctcagaacctgccgtgcccctcctggatgcaccaggaaagtcacagatgggaaaggacactctctcacagcagctttgctccagtcaccaagcccaacactgcgaaccataaagcagcacacagggacttctttacaccaaaggggcccgatccagcccttccttctgtgcctgccacttccgggttggtgctttacagcgcttgaagggagaacaatgttctgtagtctgcaacacactccagaccatgttgacgctatgatcactatgtttgcatgattgcatagagcttaaaagaagaaacagaacaccaagtttcttgcactgaattcacatatgaaaactggaagagcacaactgttagttttcaaggtctttggctaaagcttcacgaatgaattgtaaagtacctgcccgggcggccgc

SEQ ID NO: 33500 - DNA, 227 bp, Homo sapiens
tatagggcgaattggatctccaccgcggtggcggccgcccgggcaggtacccccagcatctagcagtgttggcatgtagtaggcactcaagaaatgtgtgttgaatgaacgatgcctgtgacaagcaagcggactttattctttcctgacccttgctcctatgacacacctcctcctgactaccactgtcactccttcagagcagaactcctctagggaacctggat

SEQ ID NO: 33501 - DNA, 474 bp, Homo sapiens
gactactatagggcgaattggagctccaccgcggtggcggccgaggtactttttgtggtgcatcatcataaccaagccgtcccttaccagcatgagccctggggcacccagcgcctctggcatgattcgcatgactagtggggacatgccgctcactgtagggaatcccacactgattagcattgaccagctgaggcaatgttggtcccaatagccaccgcctgtggaagccccgaacgtcatattgatggcacagaagtctattctgggacccaaagaaggctcggacaatgggtgactggaagacggccgctctagaactagtggatcccccgggctgcaggaattcgatatcaagcttatcgataccgtcgacctcgagggggggcccggtacccagcttttgttccctttagtgagggttaattgcgcgcttggcgtaatcatggtcatagctgtttcctgtgtgaaatt

SEQ ID NO: 33502 - DNA, 238 bp, Homo sapiens
actactatagggcgaattggagctccaccgcggtggcggccgaggtacgcgggggagcgcagagcggtttggtcgttcgttgggcggtgttggtttttcgctcgtcgactgcggctcttcctcgggcagcggaagcggcgcggcggtcggagaagtggcctaaaacttcggcgttgggtgaaagaaaatggccagaaccaagcagactgctcgtaagtccaccggggggaaaaccccc

SEQ ID NO: 33503 - DNA, 455 bp, Homo sapiens
  misc_feature 305: n = A,T,C or G
tacactactatagggcgaattggagctccaccgcggtggcggccgaggtacctgaaggttttgtctcttaattttctttgaaccacacctcttctccttattataagaaaaaccctcttagggtaagggaagcccaaattaactgtcctgaaattttgcattatatttaaaccataatatttgatttacttctgtcaaacaaaacactaccatttgggttctcatttgtagattatttaaaaacatgtttttcctgttaattatcaatgcatttactatcacaaggattaaaaagatcacttcangtggtggggatgtttcatgaaacaccatggtggggagtaggtagtgggcaggcagagtgacaatcagcttaacctcctttcacctagctgttctttagaaaaacaaaaataaaagtcaaattgctttcagttttcaagagtgaaaatgga

SEQ ID NO: 33504 - DNA, 212 bp, Homo sapiens
gtaatacactactatagggcgaattggagctccaccgcggtggcggccgcccgggcaggtacgcgggaaaactgaaccaacccacccgggaccgaaatgaagatgccggtggccgtgggtccctacggacagtcccagccaagctgcttcgaccgtgtcaaaatgggcttcgtgatgggttgcgccgtgggcatggcggccgctctagaact

SEQ ID NO: 33505 - DNA, 460 bp, Homo sapiens
tacgactactatagggcgaattggagctccaccgcggtggcggccgcccgggcaggtacagatatttttgacctataggtgcctttatgagaattgagggtctgacatcctgccccaaggagtagctaaagtaattgctagtgttttcagggattttaacatcagactggaatgaatgaatgaaactttttgtcctttttttttctgttttttttttctaatgtagtaaggactaaggaaaacctttggtgaagacaatcatttctctctgttgatgtggatacttttcacaccgtttatttaaatgctttctcaataggtccagagccagtgttcttgttcaacctgaaagtaatggctctgggttgggccagacagttgcactctctagtttgccctctgccacaaatttgatgtgtgacctttgggcaagtcatttatcttctctgggccttagttg

SEQ ID NO: 33506 - DNA, 443 bp, Homo sapiens
cgactactatagggcgaattggagctccaccgcggtggcggccgcccgggcaggtactgtgtttagaagggattaccaaaggctggagcgatttaagctatgcactagccttgccctcttaggttgcattctctttaggccactggttctcaaacattagggtgcactgtaaccattacagagcttgtgaaaagtgcagaaacctgagcctcaccttatgagattcagccagggggaggacaggaatctgtatttttcatagcaacctcaagtaatctttattctgagggtctcgggattgcaggttgaaaaacacaaccttaatcagcagtaaattcttctctactcggccaggcgcagtggctcatgcctgtaatcccagcactttgggaggccgaggtgggtggatcacaaggtcaggagttcgagaccagcctgaccaa

SEQ ID NO: 33507 - DNA, 447 bp, Homo sapiens; identical to SEQ ID NO: 32509

SEQ ID NO: 33508 - DNA, 547 bp, Homo sapiens
cgcgtaatacgactcactatagggcgaattggagctccaccgcggtggcggccgaggtacggatacaattccgctgagttagattccaaattctaacctctccatcacacgccccagaaaggacagtagccagcttctctggatgctttgccaagcaattgactccatcacggtgaccatccagcgaagcaaggaatggttttgcaaatactcgttccagtttggtagcatttaaagctcttatatattctcgtgggacctcaaaaggatgtaaagcaggatcatagtttcttggaactctctgtaagtccaacttggtttcgcggacataattgtccggattccggctcagcatcttcaccttcatctcggttgctcttccggccgctctagaactagtggatcccccgggctgcaggaattcgatatcaagcttatcgataccgtcgacctcgagggggggcccggtacccagcttttgttccctttagtgagggttaattgcgcgcttggcgtaatcatggtcatagctgtttcctgtgtgaaa

SEQ ID NO: 33509 - DNA, 366 bp, Homo sapiens
gtggcggccgaggtacgcgggggcttgaaacggcagtagcgcagcgagaaggatcgccatcacacggcgcactggtgcggcttctcccccgagtggatgaacatgtgcttggtgtcgtttttccttgagctgaacgtcttgcaacagtggccgcacgcataggtcatcactgatcagaggcctaacccaaggagggggtcatgtgcagacccagctgtggggaggaaagatgctgcagaggagacggatgcccacagaggcccctgagtggatacaatgctcactaagtgggctgaccccacattggacaccgctgcatccatgtccatcacacaacacagctgccgtttcttctgcctgcttatg

SEQ ID NO: 33510 - DNA, 369 bp, Homo sapiens
ttggagctccaccgcggtggcggccgaggtacagatctcgcccacccagagaagacctggagtcgtaagactcataaggtccaaacctgctacccccaccaccaccactgtgattgtccatgccatatgactggtttaggtaggaatccatggatctctgacccccataggatccatggccatagtcacgatccatccctccataagatccagggccataatcacgatccattccattaaagccctgataagtattcctgcaggcggagtgtgtgtaatcgtcctcgaagtccatggcagaggctgagggccgtcggccttggcggcgctaggctgagctatggccggcggcgagcgtccgcgacccgc

SEQ ID NO: 33511 - DNA, 393 bp, Homo sapiens
gtatacgactcactatagggcgaattggagctccaccgcggtggcggccgcccgggcaggtacgcggggctaaacctagccccaaacccactccaccttactaccagacgaccttagccaaaccatttacccaaataaagtataggcgatagaaattgaaacctggcgcaatagatatagtactgatcatggaataaacacatctctctttttttaatgctggcgtctccctgacatttctttgtgaaccaactgttgcctaggctaggcccaggggacccctggaccccagaccacctctgtacctcggccgctctagaactagtggatcccccgggctgcaggaattcgatatcaagcttatcgataccgtcgacctcgagggggggcccg

SEQ ID NO: 33512 - DNA, 397 bp, Homo sapiens
atacgactcactatagggtcgattggagctccaccgcggtggcggccgaggtacaatccatcctgaggcaaaattcctctccagctgtgaatctgtgaaaccagatgagttacgtgcttccaaaatctaagggtagggcaggtatagaagagacatccccactccaataggagaaacaggaaaaaaagggtgatgatcccaaggaagtcaaaacctagcaaggtcgagcggccgcccgggcaggtaccagggaaacaaacatgaataaaatactggctctttgctgagcaagcttggagatcagtttcagggaaagccaaaatggtcttaataacaacagagaataatagtgctgcaataaagtaagtgaggggagacaaataattgtcctccagtg

SEQ ID NO: 33513 - DNA, 236 bp, Homo sapiens
ttggacctccaccgcggtggcggccgaggtacgcgggggtcggcgccattttgtctcggcagcggtggccgtagctccatcgcattttatgtttctggcgagaagggaacggagttttcatcagggtagattggttttggtgcggccgctctagaactagtgggatcccccggggctgcaggaattccgatatcaagcttattgatacccgtcgaccttaaagggggggcccggga

SEQ ID NO: 33514 - DNA, 481 bp, Homo sapiens
gggcgaatttgagctccaccgcggtggcggccgaggtactttttttttttttttttttttggtattaagcctttagttttgacttaaactcgaaggatgctcttagattggtaactactctgagatactaagagtgtttccactctcctcccagttagagtggggggtttcctcctcagtgctgcccctgcatggctggttcatttctctgtgccttctctgacccctcgttaggacctgtcttccagaccttcttaccagggtggaaagaatagggttcatgtagagaatggatctgaaggttaaacacatggagttctagtctcaaagagacacaacagacagtgtcctccttgttgaggtcagagaataggaacatcaagaaatgagagatatcagagagccagaggggtttggacaaatgcattgcctggaacaatgaataaatggcaatgtggtccctgcttcacagcaggacatc

SEQ ID NO: 33515 - DNA, 478 bp, Homo sapiens
ctatagggcgaattggagctccaccgcggtggcggccgcccgggcaggtacttttttttttttttttttttttttttttattaacaacaaaattttttagaggggcttcaacttaactgaataggattaaaggtggattctttggtcagtgttcaagaagagaccctatagctacttacaaaggagtccacacctcaaagtaagccactcagtaaagcttatctattttcactggaacgaaaaggagctaaacaaatgacaaattccactaaactacaaggaagacaatcagcatcagttgtgcaactttggttaaaatgtcccagccaaaaaacattctctatcatttcatcattttaatcagggagcttctcattcctatttgctctggggtttctctgctaaaatgtccacatgttgattaaatagcaaactgagacaagccctacattttacagcctggccgccaaaaccaacg

SEQ ID NO: 33516 - DNA, 479 bp, Homo sapiens
tactattgggcgaataggagctccaccgcggtggcggccgacgtacaggctcatggttgggagctgagggaaggctgagaatcctcccggaacctctggattctgacgccccaggggttcttcacacaggctggccggtctcgggattgaagccggagacgtcagacgctaaggttgcttaaactgcggcccacgtggaaggctcttagccaccctgcctggcccgaggtaatcgcgctagggacgctttttctgcagcaatgatataccccgccgaactgtcccacgtcctggttgggacctcttggtttcgcttggctgggctcaatccatccgtacctgcccgggcggccgctctagaactagtggatcccccgggctgcaggaattcgatatcaagcttatcgataccgtcgacctcgagggggggcccggtacccagcttttgttccctttagtgagggttaattgcgcgcttg

SEQ ID NO: 33517 - DNA, 457 bp, Homo sapiens
ctcactatagggcgaattggagctccaccgcggtggcggccgaggtactttttttttttttttttttttggtattaagcctatagttttgacttaaactcgaaggatgctcttagattggtaactactctgagatactaagagtgtttccactctcctcccagttagagtggggggtttcctcctcagtgctgcccctgcatggctggttcatttctctgtgccttctctgacccctcgttaggacctgtcttccagaccttcttaccagggtggaaagaatagggttcatgtagagaatggatctgaaggttaaacacatggagttctagtctcaaagagacacaacagacagtgtcctccttgttgaggtcagagaataggaacatcaagaaatgagagatatcagagagcccgaggggtttggacaaatgcattgcctggaacaatgaataaat

SEQ ID NO: 33518 - DNA, 426 bp, Homo sapiens
ggggtggcggccgaggtacagctgccagtattgctcgtttggttctgctttcaggcacaatttggatcgccatatgcaaacccaccacggacaccataaaccattccgatgcaaactctgctccttcaagtcctcctataacagccggctgaaaacacatatactcaaagctcatgctggtgagcatgcctacaagtgtgcttggtgctcattctccaccatgacaatcagccagctgaaggaacactccctcaaggtccacggaaaagccctgaccctccccaggccacggatcgtcagtctcctcttctaacactcccaccactccttccaaaaagctaccccggctgaagaagtggaagactccaatgactcatcatattcagagcccccagatgttcagcaacagttgaaccactatcagtc

SEQ ID NO: 33519 - DNA, 454 bp, Homo sapiens
tacgggcgaattggtgctccaccgcggtggcggccgaggtaccagtggccagaggacctgctcaaacctgaccttattctgctgctcactgtgagtcctgaggagaggttgcagaggctgcagggccggggcatggagaagaccaggaaagaagcagaacttgaggccaacagtgtgtttcgtcaaaaggtagaaatgtcctaccagcggatggagaatcctggctgccatgtggttgatgccagcccctccagagaaaaggtcctgcagacggtattaagcctaatccagaatagttttagtgaaccgtagttactctggccaggtgccacgtctaactagattagatgttgtttgaaacatctacatccaccatttgttatgcagtgttcccaaatttctgttctacaagcatgttgtgtggcagaaaactggagaccaggcatcttaattt

SEQ ID NO: 33520 - DNA, 267 bp, Homo sapiens
  misc_feature 34, 53: n = A,T,C or G
ggggcagaaagaagggcagaggcccggaacaganacagcaggaggcagagagngaggaggaaaaacccgacaggacggacagtgacagtgaagacacagatgcaaacacaactgtgcaaacaagggcgagagaaaagaggaagccccagctggagaaggacacaaagccgaaagagcccagggagacgcccgggagcaaccacgaggaaaagcagccgcccaagaggctggaagcacgtcccggagccgcagccaagacgccggaag

SEQ ID NO: 33521 - DNA, 317 bp, Homo sapiens
gcgaatggagctccccgcggtggcggccgcccgggcaggtacaatgaaaggtaaaagtaatgctctcagaggaaatgtttccattctagttctatttggaagtccttgggacaatttgtgttttgattatatttagaaatcttcagtattttgtcttggccaggtgtagttgctcaagcttgtaatcgcaacactttgggaggctaaggcgggtggattacctgaggtcaggagtttgaatcaccctggccaaaatggtgaaaccctgtctctactaaaaatacaggaaatttagctggaatgttggtgggtggggt

SEQ ID NO: 33522 - DNA, 234 bp, Homo sapiens
gcggccgcccgggcaggtacactcacacacacacacacacacagagctcttagcaactggtcctgagtagctctttgtaaattctttattgccaggagtgaaccctaaagtggctcacaagagtgccctatttctttcaattaactacaaggacaaacacaatctaaaaggttgaagataaagggacccagtatgattttgccaaaaaattctaaaagcgccactctaccatga

SEQ ID NO: 33523 - DNA, 203 bp, Homo sapiens
cctatacgactcactatagggcgaattggagctccaccgcggtggcggccgaggtacgcgggggattttttgatttttcaatttccacaatgtgacggtgttttcgacagagttcctcattggtccctggataagaatgttaaggaaattggtgtatgaactttggtgctatctgtagcattctgtacaactcaggcattgaa

SEQ ID NO: 33524 - DNA, 401 bp, Homo sapiens
cgtatacgactcactatagggcgaattggagctccaccgcggtggcggccgcccgggcaggtacgcggggctttttcgtctgggctgccaacatgccatccagactgaggaagacccggaaacttaggggccacgtgagccacggccacggccgctctagaactagtggatcccccgggctgcaggaattcgatatcaagcttatcgataccgtcgacctcgagggggggcccggtacccagcttttgttccctttagtgagggttaattgcgcgcttggcgtaatcatggtcatagctgtttcctgtgtgaaattgttatccgctcacaattccacacaacatacgagccgggagcataaagtgtaaagcctggggtgcctaatgagtgagctaactcac

SEQ ID NO: 33525 - DNA, 197 bp, Homo sapiens
tacgactactatagggcgaattggagctccaccgcggtggcggccgaggtacacgactcccatctaggctgaaaacctagaagtggaccttgtgtgtgtgcatggtgtcagcccaaagccaggctgagacagttctcatatactgttgagccaaactgtttgggtctcgttgctttatggtatggtctggatttgtg

SEQ ID NO: 33526 - DNA, 450 bp, Homo sapiens
ctactatagggcgaattggagctccccgcggtggcggccgcccgggcaggtacagggcacaatgtgctgggctcgggctcttgatttcttttcggcttgagaaggtgcgggcgatccaaagccccccggggactgcgtgtagccgccggctcccccgtatgaggagctgccatagctttcgaatccactgttccacatcttggtcacgattctccgcaaagaggccgagaaggtgcgggtctgggggaaatagcggaaaaccacagaacgcggccgaggtacgcggggggggtttctgggaaaaggcttgtgaacggcgtttatgcgtctgccgtggacagcgaagctgctgcggttcctgagccggaagagtgcctgtgaagaaaacgggggattgccctgaggcttatattctgcctcagttgtcttttcttgaaatatttataaatc

SEQ ID NO: 33527 - DNA, 464 bp, Homo sapiens
ctactatagggcgaattggagctcaccgcggtggcggccgaggtacgcgggggtggcgcattctcagtgaggagggccgccctgcatccgtcgccggccccggtctccaggggcctcacccgagtcatgccccgctattgcgcagcgatttgttgtaagaaccgccggggacgaaacaataaagaccggaagctgagtttttattccggaaaggacccttctaaaaaaaaaatcccagaagaaaaacttggaagatgagaaagaagtatgcccaaaagccaagtcagaagaatcatttgtattaaatgagacaaagaaaaatatagttaacacagatgtgccccatcaacatccagaattacttcattcatcttccttggtaaagccaccagctcccaaaacaggaagtatacaaaataacatgttaacttttaatctagttaaacaacatactgggaaaccag

SEQ ID NO: 33528 - DNA, 229 bp, Homo sapiens
  misc_feature 181: n = A,T,C or G
tgctcgaagatgctgttggtctgagagtcgaatcggaccatagtcaatggctggacagcaatcccggcaagccagaagatgaagttaaatccgaacagcaggtatttgatgcacttggtgcctcctttgaccggcatggtgagggctaacttagcctgggccgaacgggtgcgggactggngggcgcgcgcagctgggactggcgggacctggcgctggatacagatgc

SEQ ID NO: 33529 - DNA, 501 bp, Homo sapiens
gcgaattggagctccaccgcggtggcggccgcccggcaggtactaaaatcacgagaacacctaaacaacaaccaaaaatctattgtggtatgcacttgattaacttataaaatgttagaggaaactttcacatgaataatttttgtcaaattttatcatggtataatttgtaaaaaaaaaaaaaaaaaaagtacgcgggggcaggcgccgtgtggcactcggcggtcgaaaggggagttcaaggagacgggggcgacgcggctgagggcttctcgtcggggtcggggctgcagccgtcatgccggggatagtggagctgcccactctagaggagctgaaagtagatgaggtgaaaattagttctgctgtgcttaaagctgcggcccatcactatggagctcaatgcgataagcccaacaaggaatttatgctctgccgctgggaagagaaagatccgaggcggtgtttagaggaaggcaaactgatcaacaagtgtgcttt

SEQ ID NO: 33530 - DNA, 480 bp, Homo sapiens
  misc_feature 56, 57, 80: n = A,T,C or G
tcactatatggcgaattggagctccaccgcggtggcggccgcccggcaggtacttnnttttttttttttttttttttttnaatgtagtccacccatttaattgttttggagttataggccaatggaaaaaaaaaacaattctccatcttattaaaattaagaactctttgggcagtaagtaaaaacagtaacaaaaacccttcgaacttggcaggtggctaggactcctgaggaatcatgtcacagctatgtctccaaaaaatatttgaaattaaggtttagagatttcaaaggtctcttctgagtccaaacttttggcagatgtcaaaattttaggaaatcattttggaagagaggaaactagcccaaactttttttttgtccccccttccacagacagattgaagcaaggactaaatcatcaatggagtttgaaagagaggaatcctaccataataacatagaaagatcttcatttct

SEQ ID NO: 33531 - DNA, 465 bp, Homo sapiens
actactatagggcgaattggagctccaccgcggtggcggccgcccgggcaggtaccctgcacacactaggttctcaagaaatattcatgtaataagtgaataattgaatgaatgaatgactaagtgaaacttctctttacaacaagcaaatgtaatagccctttctaagctctcatcatcctcattgtccttggtggattcccaccacactcagaattccttttcacctttccatgcatatgaggccccacctaatcaggtgctggtcttcttagctttctgtctcctaccactttttgtcttgcttcgggaactccactgtcttttctgttataggaacatgctaaggttattcttcatagtcaagagcacaagctctgaacccagccaaatctgtttttgaactcaagttccacttattgctagctgtgtgatattgggaaattctttatgttctgtaaccct

SEQ ID NO: 33532 - DNA, 131 bp, Homo sapiens
tttgtctttccgtggagctgtcgccatgaaggtcgagctgtgcagttttagcgggtacgcgggtgaagatcctcaccgagcgcggctacagcttcaccaccacggccgctctagaactagtggattccccc

SEQ ID NO: 33533 - DNA, 451 bp, Homo sapiens
cactactatagggcgaattggagctccaccgcggtggcggccggcccggccggtaccttttcagggcctgccttttctaaagttaaatgttcagggtgaaaggtccttccttttcaagccctacatttgcatctttcaagcttctaagaaaactccctcaataagaattggaatgtaaatatgcctacgttcctcttatccacatcctttaaactaattatagaacctatgacaataagatgggctccttagttaactaatgtttccaggtatagtccatggtttaactatgtggcaaaaagttgacactcttcttattaagaaggagggtctatgtccttaccctgagattgccatgtaggtaagttcacttgtaggtgctccaactggaagtcctagcctaacacttgggtgaagatgccttcacacgatctgaaactctggccaataa

SEQ ID NO: 33534 - DNA, 198 bp, Homo sapiens
acgactcactatagggcgaattggagctccaccgcggtggcggccgaggtacaatttctgccactggtctaggtgtctgaggagcatcttcctggctcagagaccttttgctccaggtgctcatgccgcagatggcaatctgcgcgcgaactaattcgcggccgctctagaactagtggatcccccgggctgcaggaa

SEQ ID NO: 33535 - DNA, 453 bp, Homo sapiens
actactatagggcgaattggagctccaccgcggtggcggccgcccgggcaggacaaggctcagaagattgaagtatcaaagtcacgtcctctgtttctaacactgtttgatagacagctttctggaaatctgtcaaagaacaatacaccatccggtcttccttcttaggcaactgatccttgataagagtcttggtgcgcctgagaaaccagccagacatctttttggcaagtctttgcatggcctttcggccagtggctagttctctctttgttgccgtgtgtctctgaccatgttctactgggtcagaaaactgcttcttgaagtaggtcccactccctaaaaggcctggcacagcccagtccataacacaccacagttccttcatgttgttctgaaggatggttccagtgaggccaatgcggacattacatttcaaagctttcataactt

SEQ ID NO: 33536 - DNA, 266 bp, Homo sapiens
cgactcactatagggcgaattggagctccaccgcggtggcggccgcccggccgggtacgcgggggtggaagcccggccctgcaggctggagaggatttgattagactacgcgtttcgacttgcagggtgtttaatcgtcgccaagcgggacttactgcaagctatcaaatctgaggtcttattttgttgagtcgaaaagtgaaattttcctttggccaacgtgacagcattttgacatttgtgccagcaaagaaaatggttaatgg

SEQ ID NO: 33537 - DNA, 450 bp, Homo sapiens
actatagggcgaattggagctccaccgcggtggcggccgaggtactttttttttttttttttttttttttgcaattgcttttggcatcttcctcatgaaatctttgccttacactttttgatagtgtctccctctttggaatttcttttgctgtctctcctttgggtgacttcagaaaaaaataaaaataaaaaataagcctttccagctctctgttctcagcatgtttaaaaactgggaatagcttttgagcactcaggtgcctaggagtgaatttaggaactgaggtgttgtcttagtccatttgttctgcaaagacaaaatacctgagactgggtcatttataaagaacagaaatttatttctcacagttttggaaatccaagatcaaggaactggcaggttcaatgtcttgtgagggtctagtctctgcttccaaggtgacacctt

SEQ ID NO: 33538 - DNA, 457 bp, Homo sapiens
actactatagggcgaattggagctccaccgcggtggcggccgcccgggcaggtactttttttttttttttttttttttttgtaattttgattaaattctttatatcattcttgcaacttttccatgcttttgaaattatttaagaaagttaacaaataagcaaacaaactacaaatcaggaatggaaagtgaattttacaaaatgccattttcagattcacaagacgcttgcattcaccttccttcgacgattactacttcttacacgctatgatttctctcctttttccaccacaccggctccaggtctacttgtctttactctccccgcttcatcgctgtctgcccccttccaaaacctgttctttggtttcattctctctttttcttagttgattcatttctgcttttgtctttaaagaacacagtaattcttcaacttactttggttctttgc

SEQ ID NO: 33539 - DNA, 461 bp, Homo sapiens
cactactatagggcgaattggagctccaccgcggtggcggccgaggtacaaaagccttcatgtgcttgtattgaacggatacaattccgctgagttagattccaaattctaacctctccatcacacgccccagaaaggacagtagccagcttctctggatgctttgccaagcaattgactccatcacggtgaccatccagcgaagcaaggaatggttttgcaaatactcgttccagtttggtagcatttaaagctcttatatattctcgtgggacctcaaaaggatgtaaagcaggatcatagtttcttggaactctctgtaagtccaacttggtttcgcggacataattgtccggattccggctcagcatcttcaccttcatctcggttgctcttccggccgctctagaactagtggatcccccgggctgcaggaattcgatatcaagcttatcgatacc

SEQ ID NO: 33540 - DNA, 448 bp, Homo sapiens
acactactatagggcgaattggagctccaccgcggtggcggccgaggtacatctggcgcagaccagcagtggcacgattccaaacaaatgtcagacgagagcgcttcatggggagaaactgaaaattatcccgcgtacctgcaggcctcctacacctacctctctctgggcttctatttcgaccgcgatgatgtggctctggaaggcgtgagccacttcttccgcgaactggccgaggagaagcgcgagggctacgagcgtctcctgaagatgcaaaaccagcgtggcggccgggggcagctggaggtgcctcagaaggtgcattctgcttcctgcaggggcttgaaacaccaaggcactccagggatcctggagtcaaagcagcagccccggttgttgcactccttgggggtgacatgggggtagccgcagtccaccctgtccttgg

SEQ ID NO: 33541 - DNA, 456 bp, Homo sapiens
actactatagggcgaattggagctccaccgcggtggcggccgaggtacgcgggatcctcattactattctgcctagcaaactcaaactacgaacgcactcacagtcgcatcataatcctctctcaagcaattctcctgtctcagcctcctgagtagctgggattataggcatgtcccactattcctggccaatttttgtagttttagtagggacggggtttcgccatgttggccaggctggtctcgaactcctgacctcaggtaatccgtccgcctcagcctcccaaagtgctgtgattacaggcatgagccaccgcgccaggcctcaataaaatattttataaatacctttaaggaataatacaaacacaaccagagcttaaataaataaatgtaaatcagtctgcttgctggttaagtaatgagttcagtgtttctctccgcacagaaagtggg

SEQ ID NO: 33542 - DNA, 451 bp, Homo sapiens
tacgactactatagggcgaattggagctccaccgcggtggcggccgccacgctggttttgcatcttcaggagacgctcgtagccctcgcgcttctcctcggccagtccgcgatgatgtggctctggaaggcgtgagccacttcatcgcggtcgaaatagaagcccagagagaggtaggtgtaggaggcctgcaggtacgcgggtatattcaggtgaatgagccctggaagcggattaaaggcagtgagactgacaggcaacgggcaggaacagtgactggcttggcagtgaatatagctgccttgctctctgtcatgcttcagccttacatgcccacggttagtgccacaatccaggcccagctgcagctcccacctccagcctgcagtatcctgctgacaaacttcctgtgtacctcggccgctctagaactagtggatcccccgggctg

SEQ ID NO: 33543 - DNA, 465 bp, Homo sapiens
  misc_feature 219, 220, 221: n = A,T,C or G
ctactatagggcgaattggagctccaccgcggtggcggccgtggctgcccagacgtatttggcgtcgcagtagccgacaatggcggcctcctggcagcagccatcgcacatcaggttatccacgtagctctgccaaccggccatcttcgagcccttcgcactgcagcgcggacggcgaggagcccccgcgtaccttcggccgcccgggcaggtaccctnnntttttttttttttttgtgtgatttttttttttttgccttaagaaataaaagaatctttattgttttagaagcaattttgagcaaacagacaggcaaatatctaaagataccatacatcaactagggggttaaacatttgaagaaaaaacatggaaagtattttacatgggccagtttatatactgctatttacactattatttcctatagctacatgttctttgtacaataggcactttattag

SEQ ID NO: 33544 - DNA, 475 bp, Homo sapiens
gactcactatagggcgaattggagctccaccgcggtggcggccgaggtacgcagggagccacacttcaggtgcccagtgtccacactgactagtggtgactgcgttggacagtgcacatacagaacatttctgtcatcacagaaagttcctttggacagagccatgttaagtgatgttatcacaagatggacagaaacattcctgtttgatttatttttcagacccagtttgtggagaaaaataatgatgctttacatatgtctcttgaatccttaatatgtgaatccagagataagtttatacgggaattatttgaatcatccacaaataacaactaagatactaaacaaaaagcaggaaaacttagcttcatcagcgtgggaaacaagtttaagacacagttaaatttgcttctggataaacttcgaagtacctgcccgggcggccgttctagaactagtggatcccccgggc

SEQ ID NO: 33545 - DNA, 126 bp, Homo sapiens
tatagggcgaattggagctccaccgcggtggcggccgaggtacagactacaatgccagtgtttcagtcccagacagcagtggccccgagcgcatattgagtatcagtgctgatatttgaaacaata

SEQ ID NO: 33546 - DNA, 187 bp, Homo sapiens
atacgacacactatagggcgaattggagctccaccgtggtggcggccgaggtacaaacattttacaaaaaagaacattaccaatatcagtggcagtaagggcaagctgaagaataaatagactgagtttccgggcaatgtctgacctcaaagacatccaaactgcgttcaggcagctgaaacaggct

SEQ ID NO: 33547 - DNA, 447 bp, Homo sapiens
atacgactactatagggcgaattggagctccaccgcggtggcggccgccatcttgggtcatcgatgagcctcgccctgtgcctggtcccgcttgtgagggaaggacattagaaaatgaattgatgtgttccttaaaggatgggcaggaaaacagatcctgttgtggatatttatttgaacgggattacagatttgaaatgaagtcacaaagtgagcattaccaatgagaggaaaacagacgagaaaatcttgatggcttcacaagacatgcaacaaacaaaatggaatactgtgatgacatgaggcagccaagctggggaggagataaccacggggcagagggtcaggattctggccctgcttgcctaaactgtgcgttcataaccaaatcatttcatatttctaacccttaaaacaaagctggtggaatatctgatctctacggtt

SEQ ID NO: 33548 - DNA, 210 bp, Homo sapiens
acgactactatagggcgaattggagctccaccgcggtggcggccgctctagaactagtggatcccccgggctgcaggaattcgatatcaagcttatcgataccgtcgacctcgagggggggcccggtacccagcttttgttccctttagtgagggttaattgcgcgcttggcgtaatcaatggtcatagctgtttacctgtgtgaaaatt

SEQ ID NO: 33549 - DNA, 440 bp, Homo sapiens
ctactatagggcgaattggagctccaccgcggtggcggccgcccgggcaggtactctcaagacttagaagccatatggatagaatgaaataggaattggtggtgtcttggaatatctgcttcaggacgataatgaaactaatgatttagggcagtagaagaagccgtgggaggaactttcacatttggcgagcatggaatcccctttgcagttatgtttgcctgtgcatctccggcagctggaggacgaatcacatcaggctgatgagtgtgtcacgctctttatcccccaagagctgtgatgaagaccaagactaacagttgattaacagtgctaccttttataaggctgatttagttcctaaaatatgctgaaaggaaacaaaaccaaaaagaaaaaagagtggaaaggggggtgagacagaaacctttgtcgagttc

SEQ ID NO: 33550 - DNA, 187 bp, Homo sapiens
acgactcatatagggcgaattggagctccaccgcggtggcggccgaggtaccttctggacaatttccagaacattgaattttcctatcactaagatgtcaaataccgcatttaaacccagcacagtgatcccttgctctttgcacagcatggccactgctcccagaaagatactcagcagcacccag

SEQ ID NO: 33551 - DNA, 680 bp, Homo sapiens
  misc_feature 495: n = A,T,C or G
ctcactatagggcgaattggagctccaccgcggtggcggccgaggtacttctgctccacgaggaaggggatcgccaggcactaccgcatcaagcacaataatgtccgagcccagccagaaggcaagaacaacctcttcaagtgtgccctgtgtgcctacaccaaccccatccgcaaaggtctggcagcccactaccagaagcgccacgacattgatgcgtattacactcactgcttggcagcctccaggaccatcagcgacaagcccagcatagtgatcatcccatccccgcccaaggacgactcccctcagctgagcgaggaactccggtgggcagtggagaagaaaaagtgctccttgtgctctttccagtcgttcagcaagaagggcatcgtgtcccattacatgaaacgccacccaggggtgttcccaaagaagcagcacgccagcaagttggggggctacttcacggccgctctagaactagtggatccnccgggctgcaggaattcgatatcaagcttatcgataccgtcgacctggagggggggcccggtacccagctgttgttccctttagtgagggttaattgcgcgctaggcgtaatcatggtcatagctggttcctgtgtgaaattgttatccgctcacaattgcacacaacatacaagccgggagcat

SEQ ID NO: 33552 - DNA, 564 bp, Homo sapiens
tacgactcactatagggcgaattggagctccaccgcggtggcggccgcccgggcaggtaccccagctgttccggaggctgaggccaggaggatgggtggacgctgggaggtggatgctgcagtgagcagtgattgcaccactgcactccagcctgggtgacagagccagaccccgtcccaaataaataaacataaaaataaaggaaccagtttgtagaaagcgggagagggtcccattgaacttcaagccttcgagcagcagctgtggctggacaggttggaccagcaggctggagcagtcgccatcttggcagggatcattgaccctgatctatcgtcgggaggaggaagagcttatcttacgcagggagggcaggtggactatgtgtggactctggtgacctgtttgggtgccaggtgttactcccagggccacccgtaactgtgaatgtgcaggaaccctgacttgagaagggcctggccacggggggcttaggcccctggggaatgagagtttggttcccggtacctcggccgctctagaactagtggatcccccgggct

SEQ ID NO: 33553 - DNA, 523 bp, Homo sapiens
atacgactcactatagggcgaattggagctccaccgcggtggcggccgaggtactttgttctttttcttcttgttctttgttttgaaatgaacaaatatttatttatcttttataacaagtaaggcaatgttgcttaaaggaagacaaacaaacataaaagattccgttgacaatgcattttttcatctgttcggcacaatgcttttgtcataatggagatgtgacagcaaactttccaggacattcagtcttcggcggcagcacttagggcagatgactggccgcttatagatgaggccaaagcaccaggtaggtggaaggttcttgtatcggttcgaaccccgacagcgcgccaacagacaacacgaggcagtggggagcaacatgctgttttaatgagcgcctgggtgcaggcgtgctgaggctgaaaatggcatcagcccccgcgtacctgcccgggcggccgctctagaactagtggatcccccgggctgcaggaattcgatatcaagcttatcgata

SEQ ID NO: 33554 - DNA, 552 bp, Homo sapiens
cgtatacgactcactatagggcgaattggagctccaccgcggtggcggccgcccgggcaggtactttttttttttttttttttgtaatgaacaaatatttatttatcttttataacaagtaaggcaatgttgcttaaaggaagacaaacaaacataaaagattccgttgacaatgcattttttcatctgttcggcacaatgcttttgtcataatggagatgtgacagcaaactttccaggacattcagtcttcggcggcagcacttagggcagatgactggccgctcagattctctatcttgtttcaggacagtggaaaagcttatagatgaggccaaagcaccaggtaggtggaaggttcttgtatcggttcgaaccccgacagcgcgccaacagacaacacgaggcagtggggagcaacatgctgttttaatgagcgcctgggtgcaggcgtgctgaggctgaaaatggcatcagcccccgcgtacctcggccgctctagaactagtggatcccccgggctgcaggaattcgatatcaagcttatcgata

SEQ ID NO: 33555 - DNA, 398 bp, Homo sapiens
gtatacgactcactatagggcgaattggagctccaccgcggtggcggccgcccgggcaggtacaatgaaagtttcacatacggatcactggctccaaagatgtcctttttggcgagatcaattccagaaacaacttttactctgagaatacgggactctcccgagtgttacttgctcaaatgcgagacgtctcatttaggagaatacaatattaaaggtttagtgcattaaaggaaagctggaaaactcaagggcagagcaagttctgaagagtatgcggaagtcgtggctgcagccaagggtaactttccactgccgggtgacaaggtcacaggagagaagttttaacttgactcccaggaaagcagtctacacggttgttcctctctggaaatggc

SEQ ID NO: 33556 - DNA, 405 bp, Homo sapiens
cgcgcgtatacgactcactatagggcgaattggagctccaccgcggtggcggccgaggtactccattctccagcattttctacatctggcaagctcgaaagtgaaaccctagtgggccatcatgcaggttttgagttatttactgttacagatgaggaaactgcgaagctacatggccacagtcaacaacgacaacagaaggcaacatagtatggtggttaagagcaccgactctgaagccagcctgaatcctagagccagagctgtgcaacagcaggtaaatgacttatcctgtgcagtttcctccttaatggaaatagtgcccaggccacaatatcgcgagatttacacgtaaagctggaaacaactcccgtcctagagtaagcactgtttactattaagcag

SEQ ID NO: 33557 - DNA, 389 bp, Homo sapiens
gactcactatagggcgaattggagctccaccgcggtggcggccgaggtacgcggggatcttattctggccttggcggagttggggatggtgtcgcctagcagccgctgccgctttggcttgctcgggaccatttggctggacccagagtccgcgtggaaccgcgatagggatctgtcagggcccgcggccgctctagaactagtggatcccccgggctgcaggaattcgatatcaagcttatcgataccgtcgacctcgagggggggcccggtacccagcttttgttccctttagtgagggttaattgcgcgcttggcgtaatcatggtcatagctgtttcctgtgtgaaattgttatccgctcacaattccacacaacatacgagccg

SEQ ID NO: 33558 - DNA, 179 bp, Homo sapiens
gcgaattggagctccaccgcggtggcggccgcccgggctggtacaatcggtgccatcagtcatctccaggtctccatttatcttcctgctgatctgccgtttctgaatgagtctcatcctgcacttgcagaatggtgcagacttgggcagatatagtacttccccattcctttccaaaa

SEQ ID NO: 33559 - DNA, 389 bp, Homo sapiens
ctactatagggtatatgggagctcaccgcggtggcggccgtgcagacctcctgtgtgccctgttcttcttgttatctttccttggctactgtaaagcatttagagaaagtaacaaggagggagcgcattcttccaccttctgggtgctgctgagtatctttctgggagcagtggccatgctgtgcaaagagcaagggatcactgtgctgggtttaaatgcggtatttgacatcttggcgataggcaaattcaatgttctggaaattgtccagaaggtacctcggccgctctagaactagtggatcccccgggctgcaggaattcgatatcaagcttatcgataccgtcgacctccagggggggcccggtacccaacttttggtcccttt

SEQ ID NO: 33560 - DNA, 475 bp, Homo sapiens
tacgactcactatagggcgaattggagctccaccgcggtggcggccgcccgggcaggtacatgcccatttatgggtctggttggtctctacaggggcagcaaagggaaaggaggaagactttttcccagatctctctaccttaaagcatggagccaagtagcttgtattagtcctaggattccttttctcctgcaaaactggtggtagaaacagtggcatgcgggggatggtacatcacaaaatacattttgatatcccaaagaagcaagacttgcaagtaggcgttttaaacataactaatctacagctacaaagttctactcttgatagcatttacctttttggggagtctcccaggctccaaaggataaaagcagagtagaatcagtataacatatacacagaagtccgtattgtaaaggctataaagatttgcagcacagtgagaagatgccttctgctccttcacactgc

SEQ ID NO: 33561 - DNA, 476 bp, Homo sapiens
atacgactactatagggcgaattggagctccaccgcggtggcggccgaggtacgcggggagtgataacattagaaactcattggagcacgaaccctgttgtgaactgcctatccgaaggatctaggttgtgtgcttcgtatgagaatctaatgccagatgatctatcattgtctcactttgcccccagataagaccatctagttgcagaaaaataagctcagagcttccactgattctacattatggatatgtgccgccgaagcaagcacatagccctacttttacacatgcctagtgatgcttcatggacaaggcttggctctgttgagtccaactaacctacctgagattctgagatttctcttcaatggcttcctgtgagctagagtttgaaaatatcttaaaatcttgagctagagatggaagtagcttggacgattttcattatcatgtaaatcgggtcactcaaggggcc

SEQ ID NO: 33562 - DNA, 206 bp, Homo sapiens
tatagggcgaattggagctccaccgcggtggcggccgaggtactttttttttttttttttttttttttttgctgtcttcaggtttccctaagggactcctaaacaatctgagccttacagttattttagttgtgattccctgttattatttatgagccatgttgatgtggcagtaaggtgtgggacagggaggaatcattctttca

SEQ ID NO: 33563 - DNA, 482 bp, Homo sapiens
ctactatagggcgaatgagctccccgcggtggcggccgagccctgcaggcctctgccctgaaggcctggggcgggaagaaggagaacctgaaggctgcgcaggaggagtatgtcaagcgagccctggccaacagccttgcctgtcaaggaaagtacctcggccgctctagaactagtggatcccccgggctgcaggaattcgatatcaagcttatcgataccgtcgacctcgagggggggcccggtacccagcttttgttccctttagtgagggttaattgcgcgcttggcgtaatcatggtcatagctgtttcctgtgtgaaattgttatccgctcacaattccacacaacatacgagccgggagcataaagtgtaaagcctggggtgcctaatgagtgagctaactcacattaattgcgttgcgctcactgcccgctttccagtcgggaaacctgtcgtgccagctgcattaatgaatcg

SEQ ID NO: 33564 - DNA, 481 bp, Homo sapiens
ctactatagggcgaattggagctccaccgcggtggcggccgaggtacgcgggagaagagtcaggccggagagccagccggtaggtgaggttggcggcgaaccgagccggcagcgaactgctctgcggccgctctagaactagtggatcccccgggctgcaggaattcgatatcaagcttatcgataccgtcgacctcgagggggggcccggtacccaacttttggtccctttagtgaggggtaaattgcgcgcttggcgtaatcatggtcatagctgtttcctgtgtgaaattgttatccgctcacaattccacacaacatacgagccgggagcataaagtgtaaagcctggggtgcctaatgagtgagctaactcacattaattgcgttgcgctcactgcccgctttccagtcgggaaacctgtcgtgccagctgcattaatgaattggccaacgcgcggggagaggccggttgcgtatt

SEQ ID NO: 33565 - DNA, 221 bp, Homo sapiens
acgactcactatagggcgaattggagctccaccgcggtggcggccgaggtacctattctttgcagtctcaggaattgttgacatgctcacctatctggtcagccacgttcccttgggggtggacagactggttatggctgtggcagtattcatggaaggtttcctcttctactaccacgtccacaaccggcctccgctggaccagcacatccactcactcc

SEQ ID NO: 33566 - DNA, 223 bp, Homo sapiens
actactatagggcgaattggagctccaccgcggtggcggccgaggtacatggctgtatttatagctctttgcaggtaaagcattatatctcttgcctctattttatttacaaaggctattttcttgcccattttaagtgcccctagtctgtggttctataccatcctatgtatagctttatcatagcactttctatacctgcttcctttactgaactctaagt

SEQ ID NO: 33567 - DNA, 397 bp, Homo sapiens
gactcactatagggcgaattggagctccaccgcggtggcggccgcccgggcaggtactctctggggcaagcaataagtaggaccttgtgtgcagtttcattgtagagacatgtatatctgaggaataaaacagcttgttctgtgtcagtctgagatatgtggagattttgttcctatcctatagctcttttgtattctttggcatattttatatcctggtagaagaaaacaagtgcttgtttccaattttcttttttcttatttgctctcaggtagttcttactccatacaacaaagactttttgtttgttgggctttttttttttttttgctctgtttcattttgttttagagacggggtttcaccatgttgtccaggctggtctcaaactcctga

SEQ ID NO: 33568 - DNA, 359 bp, Homo sapiens
agggcgaattggagctccccgcggtggcggccgcccgggcaggtactatatctattgcgccaggtttcaatttctatcgcctatactttatttgggtaaatggtttggctaaggttgcccgcgtacgcggggtgagctccgagtcctctgctgctttgccttcagcctctcccaggactgggagctccctgcgaagagagagctggggctgcagagctgtattcaggtccaaggttctgcccttccttgagtggtctagaaggcactgcgtggcccctcagatgctgggacacaacagacccgggacccagctgagctacccaccccttccatggactgaataagatggactaacaggc

SEQ ID NO: 33569 - DNA, 399 bp, Homo sapiens
  misc_feature 260: n = A,T,C or G
gcgtaatacgactcactatagggcgaattggagctccaccgcggtggcggccgaggtacaggtggtagatgaagaaggggaccaacaacatcaagaaggaaaaagacttcggagggtagcttgcacctgtcccaactgtaaagaaggtggtggaagaggtactgccttctgtgactgggtggcacctccagggcacatttacacaaggccctgaatctgcagaggctgtttctcaagatgcccgtcatggtgtggcctgngccagctctggcttccacaggtccctgactgtcctcagagtggaacatgctcaacctcccgcccactgctctctctctgcccagatttcaggggtgccggtccccaaggcctgcccccttctttaagactgaactcaag

SEQ ID NO: 33570 - DNA, 504 bp, Homo sapiens
gcgaattggagctccaccgcggtggcggccgcccgggcaggtaccccagctgttccggaggctgaggccaggaggatgggtggacgctgggaggtggatgctgcagtgagcagtgattgcaccactgcactccagcctgggtgacagagccagaccccgtcccaaataaataaacataaaaataaaggaaccagtttgtagaaagcgggagaagggtcccattgaacttcaagccttctagcaacagctgtggctggacaggttggaccagcaggctggagcagtcgccatcttggcagggatcattgatcctgatctattcgtcgggaggaggaagagctgatcttacgcagggagggcaggtggactatgtgtggactctggtgacctgtttgggtgccaggtgttactcccagggccacccgtaactgtgaatgtgcaggaaccctgacttgagaagggcctggccacggggggcttaggcccctggggaatgagagtttg

SEQ ID NO: 33571 - DNA, 209 bp, Homo sapiens
actactcactatagggcgaattggagctccaccgcggtggcggccgaggtacgcggggccctttcatcagtcttcccgcgtccgccgattcctacttcttggtcgccgcgtccttggctggcgtcaagccttgggatgatgagacggacatggctcagctggaggcctgtgtgcgctctatccagctggacgggctggtctggggggct

SEQ ID NO: 33572 - DNA, 511 bp, Homo sapiens
tacactactatagggcgaattggagctccaccgcggtggcggccgaggtacgtcatgtcttggtttagactacactttagaggggatatgacggtaggaaaacctggttggatgtattacagagacataaacatataaatgagtaagacccgagaccagaatgagggtaatggagatggaaacaaaaatcaaacagaaagagcttttaagtgaaaaattagatcttttaaaaggaccatgtaattttaaatgactctaaagaattgtattccagacacctgaatgattgatgggattaatacacgagatgggtattgggatatggcttatgacagaagatgatgcatttaattttagaaccatagagacaaggtaacaagatttaaatcaggaagaatttaattgtaaaatcttatagaaaaatatggaagaagtcagctacacagagacagcagttgaaaatgaatcattcggctgggcatggtggctcacgcctgtaatcccagcactt

SEQ ID NO: 33573 - DNA, 469 bp, Homo sapiens
actactatagggcgaatgagctcaccgcggtggcggccgaaaccagcttttaagtgagctcagcatattataaaggaatgaaagcaattagagcgtggactctaaaggtaggtgagacttgctgttccacttagaaacatagaaacataggaaactaaggactcgatggggacatcaatagtaggatggcttttaagagggctgaagtgtgtaaatttcccataaggtttgcagcaactctgtgccaaatcgaagttgttgcagacctggaattttagtttggtaaaggataactgtagttattttttaaataaaatgattcattagaattctttggttctctcatgataatttagcaagtttgtctctttcagaaagaaaagtttaagtggggttaatgggtactactcgattgtcaacgtcaaggagtcgcaggtcgcctggttctaggaataatgggggaagtatg

SEQ ID NO: 33574 - DNA, 486 bp, Homo sapiens
atacgactactatagggcgaattggagctccaccgcggtggcggccgaggtacttctgctccacgaggaaggggatcgccaggcactaccgcatcaagcacaataatgtccgagcccagccagaaggcaagaacaacctcttcaagtgtgccctgtgtgcctacaccaaccccatccgcaaaggcctggcagcccactaccagaagcgccacgacattgatgcgtattacactcactgcttggcagcctccaggaccatcagcgacaagcccaacaaagtgatcatcccatccccgcccaaggacgactcccctcagctgagcgaggaactccggcgggcagtggagaagaaaaagtgctccttgtgctctttccagtcgttcagcaagaagggcatcgtgtcccattacatgaaacgccacccaggggtgttcccaaagaagcagcacgccagcaagttggggggctacttcacggccgctctag

SEQ ID NO: 33575 - DNA, 469 bp, Homo sapiens
tcactatagggcgaattggagctccaccgcggtggcggccgcccgggcaggtacaatatttttttggcaacatgctcgcattacaatgaaaacttctccacacagccacttcccaaatgccccttggtagcataaatttcttttgaaaagtaattcactgtaagaacctcacatttaccttggatttttcccttctccccaaaatatcctgactactgataggcattgcaaaattggaaagaggcatcacattttgaaaccccatctttctgctaaagagagatgcagtacacctgtaaactcaaccactcttacgtattctggcaacaaaaagaacttaggaatgcttctgatgggtgcaaaggatggtcctgctccctccccaaggcatggctaaggacgacaaagcttctacagactaaagcagtgattctttctcatgccatgacatatttaccaaaaagtaacc

SEQ ID NO: 33576 - DNA, 428 bp, Homo sapiens
cgactcactatagggcgaattggagctccaccgcggtggcggccgcccgggcaggtacttttttttttttttttttttttttttttggaatgaacaaatatttatttatcttttataacaagtaaggcaatgttgcttaaaggaagacaaacaaacataaaagattccgtcgacaatgcattttttcatctgttcggcacaatgctttttgtcataatggagatgtgacagcaaactttccaggacattcagtcttcggcggcagcacttagggcagatgactggccgctcaaattctctatcttgtttcaggacagtggaaaagcttatagatgaggccaaagcaccaggtaggtggaaggttcttgtatcggttcaaaccccgacagcgcgccaacagacaacacgaggcagtggggagcaacatg

SEQ ID NO: 33577 - DNA, 388 bp, Homo sapiens
  misc_feature 137: n = A,T,C or G
attggagctccaccgcggtggcggccgaggtacgcgggggctgatgccattttcagcctcagcacgcctgcacccaggcgctcattaaaacagcatgttgctccccactgcctcgtgttgtctgttggcgcgctgtngggttcgaaccgatcaagaaccttcacctacctggtgcttggcctattatagcggccagtcatctgccctaagtgctgccgccgaaggctgaatgtcctggaaagtttgctgtcacatctccattatgacaaaagcattgtgccgaacagatgaaaaaatgcattgtcaacggaatcttttatgtttgtttgtcttcctttaagcaacattgccttacttgttataaaagataaataaatttttgttcatt

SEQ ID NO: 33578 - DNA, 463 bp, Homo sapiens
atacgactactatagggcgaattggagctccaccgcggtggcggccgcccgggcaggtacttttttttttttttttttttttgcttatcttttctcatgtaatgtaaaaagtagcctcctcttctcagagggtaaatacaagggtcaatccctgatttactctaggttcttggtggagaacatacatactggatagagaagaaaccccttctcaccttcttgccctcaataaccatgaagatgcatcctaccaccgtcagggcaatcattagatagctgatcttcactcgcatcttgttctttgcagcatcaagcatctccaacgagacagtctctgggatttcatcttcctttttgaagcgacctgaccatatgaggatctttttctgccaatccgtaggtttgtgtaaaggcactctgttgtaagtgcgggatggagctccgggactttcctgtggttttg

SEQ ID NO: 33579 - DNA, 462 bp, Homo sapiens
tatagggcgaattggagctccaccgcggtggcggccgaggtacgcgggagtgacgtctgccaggagccagaagacagaacctctaagtggctctggggaccagccactcttccgtggagctgatcgatatgactttgccatcatgatacctccaggaggcacggaatgcttttggcaatttgcccaccagactggatacttctatttcagttacgaggacggcacacaaaaggtgcagaacaatatctttcacatgtggcgatactacaactttgcccggatgaggaaaatggctgactttttccttatccaatcaaactataactacgtgaactggtggtcgacagcccagagccttgttattattctttctgggatcctgcaactgtatttcttgaagcgtctcttcaatgttccaacaactacagatacaaagaagccaagatgctaagctaaggtgac

SEQ ID NO: 33580 - DNA, 472 bp, Homo sapiens
actactatagggcgaattggagctccaccgcggtggcggccgcccgggcaggtactccaaagattcaggtttactcacgtcatccagcagagaatggaaagtcaaatttcctgaattgctatgtgtctgggtttcatccatccgacattgaagttgacttactgaagaatggagagagaattgaaaaagtggagcattcagacttggtctttcagcaaggactggtctttctatctcttgtacgcgggatatcataaatctcaagaggacctgggagaagcttctgctggcagctcgtgcaattgttgccattgaaaaccctgctgatgtcagtgttatatcctccaggaatactggccagagggctgtgctgaagtttgctgctgccactggagccactccaattgctggccgcttcactcctggaaccttcactaaccagatccaggcagccttccgggagccacggctt

SEQ ID NO: 33581 - DNA, 502 bp, Homo sapiens
tacactactatagggcgaattggagctccaccgcggtggcggccgaggtacgcgggtggaatgaatgaacgaaagggagagttggagttaataacaccttgcatagaataaaccccgtcggttcttaacccgaagagagtcgagacccagagcccttttccttccctgccacctatcacaccccatcctaaagtaaggtcagctaaataagctatcgagcccattcccccgaaaatgttggttatccccttcccgtacctgcccgggcggccgctctagaactagtggatcccccgggctgcaggaattcgatatcaagcttatcgataccgtcgacctcgagggggggcccggtacccagcttttgttccctttagtgagggttaattgcgcgcttggcgtaatcatggtcatagctgtttcctgtgtgaaattgttatccgctcacaattccacacaacatacgagccgggagcataaagtgtaaagcctggggtgccta

SEQ ID NO: 33582 - DNA, 383 bp, Homo sapiens
ggcgaattggagctccacgcggtggcggccgaggtacaaagagaagcagcaaaatatgaaaaaaggccagagctgtattctccccagtggctagcctaaccaaccccggagtgtccagacctagaaaagaaaaggctaacggtcctgggctcacccagcacaagtgcgagcctcaagggcacgaaacagcttacaaaaggccatttggtactatgtctggtgctggtattcttgtagactcattcttgatcatataattgaaaaaagacctctgcaagtgatgggggagaaaaaacaaacccacattctagggaaaggtgagttggtgactcagcagctcccgtctagtgtgacacttctggagaagagtagggggccatggt

SEQ ID NO: 33583 - DNA, 400 bp, Homo sapiens
atacgactcactatagggcgaattggagctccaccgcggtggcggccgcccgggcaggtacgcgggggagtcaggactgagcagagaatcctccaccacacacagcaggcactatctgccacagttcctttccccgatagcttcaaattctctgccttttgaaataagtctacttttaactggaataaataattggtcaatctctacctcaggtgaagaggaaccaagcctctggaaacacttaggaacaaactgtaaaaaccaaaggcaattgtgtaaccggttaaataagcttgctggactttgtccctgtgtatgagttagacaattctttcagctagtttgagtgacgcactgaccagtgaagcgcagtgaagcagtgggaaccggaatatccaaa

SEQ ID NO: 33584 - DNA, 390 bp, Homo sapiens
gactcactatagggcgaattggagctccacgcggtggcggccgcccgggcaggtacagctaaggaagaaaataaactggaaggacccagagaaaaacactgaataacaatggatatgtgcaaagcactaaaatgggattaataagtatacaacactagggctgagttccacccaactagaaactaaaaacaatgaggctgcctctcactgttagctactaacctcttaaaaaaaaaaaaatcataaattctaggacctgggaaattgaaatacagattagcaaaaatccctcaaggaaacagatcatagattcaaatagttaatataatcaagtcttttttttttttgagaaacgtaacatctgatggctctcaaaatgtcacacgatta

SEQ ID NO: 33585 - DNA, 555 bp, Homo sapiens
  misc_feature 533: n = A,T,C or G
atagggcgaattggagctccaccgcggtggcggccgcccgggcaggtactttgttcttgctaggtatttcaaaactcattctaagaggaagactaagaggacaatgacacactgtagtgctgtcccaaataagcagagagagagtagaaaagcaagcagtgttgggaagggacagcagggagcagtggccaagtggagaaactgccaggatagaggaaaggagaattacctggaatggggaggagatggggaagacttccagaagagcagaagctaggaagcccctggggtggtgcaggcccacagtgggaaatggttcacggtgtgtctacatagcgatcttgtctctagacttcaaagagatgctgtagaggattggactgcagtttttcctcatagccaaacagctggaagccagttcccagaagaccaaactgcatgccccaatcgccaaggtaatttattcttattacttgatgtcctaaagcttctttgagatttgctataaaatttcctatgatggtagaacgcanatgtccaacatgaaattttttg

SEQ ID NO: 33586 - DNA, 563 bp, Homo sapiens
atagggcgaattggagctccaccgcggtggcggccgcccgggcaggtacatctctagatgatcacgaatgtcaaatatcacactacactgtgatatggggattccccttgggggttttcatgtgtatagggtgcctgcagctacactaaacatcttaaagctaccacaatgttcacttcatatttttgctttttataggctttcttggtctcctcctatgttcccatcattttcttgctttgaatctgtaagaatcgagttgaatcttctccattttaaattttccataggctgagaaactgtttagccaagtttggataaaattgtatccaaagtaagagtatacaagctatgggcaagtccaaaatcaagctgttcacaggaccatgttctctctaaaggttctaggagagaatccctcatttccttccagcttctgggtggctgctggcattcctgggccggtggctgcatccctccaatctctgcctccatcttcacatgaccttcttccttgggtttctatgggttctttcctgttttttatgaaaacattttcattg

SEQ ID NO: 33587 - DNA, 604 bp, Homo sapiens
gactcactatatggcgaattggagctccaccgcggtggcggccgaggtaccttgcttggtcactcagtgctcatggggattgttagaagctttactttagatcccacttctgatgccatctttcagtccagaggaaataagcatccttccatgcaaggggttcttaaattttgtgttacttttatttgtttgctttcttgcttgtttttatcttttggccttttggtgacttggtgctccttggagtcactggagttctactttgaatcccactctgacatcaatcgactgccttaattcctggtccagctgcccgaccctgactctctcccgctcttttcctcaggtcgaaggtttcctttaagatcacgctgacgtcggacccacggctgccgtacctgcccgggcggccgctctagaactagtggatcccccgggctgcaggaattcgatatcaagcttatcgataccgtcgacctcgagggggggcccggtacccagcttttgttccctatagtgagggttaattgcgcgcttggcgtaatcatggtcatagctgattcctgtgtgaaattgttatccgctcacaatttcacacaacata

SEQ ID NO: 33588 - DNA, 592 bp, Homo sapiens
ctcactatatggcgaattggagctccaccgcggtggcggccgcccgggcaggtacggtccactagcacagaaactatggtatgggcatctgagagtgccctgtaagcaggtgtggccaggctggggccctgggagaggcaagcagactaaggagtgctgagacaaagtgtctacaagggcaagtggagcctagagagatagctgtccctgccctctgggctccacatcacctgacttgctgctccaccactttgcttgtctcctgggtgctccatcccagagacatgtgagttagcaatcacttagtgtaatcagcccaggatggagggtctgtgctgtgggcccaagccagggttccctgtctggtgatgagtagtggagggtgtgtggtacctcggccgctctagaactagtggatcccccgggctgcaggaattcgatatcaagcttatcgataccgtcgacctcgagggggggcccggtacccagcttttgttccctttagtgagggttaattgcgcgcttggcgtaatcatggtcatagctgtttcctgtgtgaaattgttatccgctcacaattccacacaacata

SEQ ID NO: 33589 - DNA, 685 bp, Homo sapiens
gcgtaatacgactcactatagggcgaattggagctccaccgcggtggcggccgcccgggcaggtactttttttttttttttttttgagaccaggtctcactatgttgcccaggatggtctcaaactcctgagctcaagtgatcctcccgccttggcctcccaaagtgctaggattacaggcgtgagccaccacacccagccaagttccatccacttttgaaaacaagacatttatgtataggaagagaattatggaaacactttgtaaaacatccatttattatatccaatgctaaacactaccacttggactctaagatatgtttatgcctctctgtttattctagttttttaaaaatcaaatatatatacctacgggcataaaacctctatcgttattacttttatgtgtttaaacaaacccctacactttgagtctaactttctactcatctgagctgttttctactttatgaaaaagtggcagactgggattaaaatttggtctaatacaaaacctcatcccgcgtacctcggccgctctagaactagtggatcccccgggctgcaggaattcgatatcaagcttatcgataccgtcgacctcgagggggggcccggtacccagcttttgttccctttagtgagggttaattgcgcgcttggcgtaatcatggtcatagct

SEQ ID NO: 33590 - DNA, 529 bp, Homo sapiens
tcactatagggcgaattggagctccaccgcggtggcggccgaggtacagcatggctcaaggcctcaggcaaacaaaagcactcttaccagatagaacattatgagagctcagttcccagagctgcccaaaggctagtcaggaaaacaggaccttctggggaacttacagagtttgagcaataggcctgttatgtcaaccccaagcagagtggatgaagacaaggcaagggacaggctgacagctgattcctgggttcctctgatgtttacaggagagatcaagcaaaggagacaaaaaaggactgtttacacagggggaaaccaacactgaaaactcctggaaatgaagagttttcagaatgcgttgttgctatccttggagctgaatggctatcataatgatgaatacattaattcagattttaaaaattaatcattagatgtgatacaagagaccggaattaggatcttaagggttgcactcagtattacctgcccgggcggccgctctagaactagtggatccccc

SEQ ID NO: 33591 - DNA, 614 bp, Homo sapiens
atacgactcactatagggcgaattggagctccaccgcggtggcggccgcccgggcaggtactttttttttttttatcttagagcactataactgaatgtctttgttgtatcattgtaaacacagcaataaatatgcagttcttccctccctttttctccaccagatgttaacagggaacgacatgaagacttttacgcagagcttaaaacagtcaaccctctctgttcttacaagtttttgccccatcaatggctaaataaaagatgttgaaaactgtggaaaaaagtagaatgtatttaattagcaaacatttgatgagtggtatcatgctatcgagttggaatttaaggaagggaaattgaagatgtgttagatgtggtggtttcttcctcaagaagctcatggtctaatggtcatgctaaaaatgtgtatcactgagtaatgtggtagctatcagacttaaagcactgtaggcttggcatggcggctcatgcctataatctcagcacttcgagaggctgaggtgggagaaaagctttaggccaggagtttgagatcagcttgggcaacacagtgagatctcatctctacaaaaaataagcaaaaatagtta

SEQ ID NO: 33592 - DNA, 715 bp, Homo sapiens; identical to SEQ ID NO: 33084

SEQ ID NO: 33593 - DNA, 677 bp, Homo sapiens
gcgtatacgactcactatagggcgaattggagctccaccgcggtggcggccgtggtggtgaagctgtagccgcgctcggtgaggatcttcacccgcgtacccgctaaaactgcacagctcgaccttcatggtgacagctccacggaaagacaaaagatggcgaaaaaaaaaagccccgcgtacctcggccgctctagaactagtggatcccccgggctgcaggaattcgatatcaagcttatcgataccgtcgacctcgagggggggcccggtacccagcttttgttccctttagtgagggttaattgcgcgcttggcgtaatcatggtcatagctgtttcctgtgtgaaattgttatccgctcacaattccacacaacatacgagccgggagcataaagtgtaaagcctggggtgcctaatgagtgagctaactcacattaattgcgttgcgctcactgcccgctttccagtcgggaaacctgtcgtgccagctgcattaatgaatcggccaacgcgcggggagaggcggtttgcgtattgggcgctcttccgcttcctcgctcactgactcgctgcgctcggtcgttcggctgcggcgagcggtatcagctcactcaaaggcggtaatacggttatccacagaatcaggggataacgcaggaaagaacatgtgag

SEQ ID NO: 33594 - DNA, 662 bp, Homo sapiens
gactactatatggcgaattggagctccaccgcggtggcggccgcccgggcaggtacccctctccccttaacgcatacacacactctccctcacacacacacacaccccacatggaaaggtgctgtgctacaggcgggccatggccaccttgaagcataaccacacatttgcactgcatatcactttgggatggggtccccccccagaaggagaagtgggcatctccccttgcccagcctgcacactgggctggcagcaggggatgagaagcccaggtcagctcccagggtgcccacggtcaactgcttctgggtcctgggtaaatccagcccggcccgggttccctgtggggatgtgaggcggccacggctctctcggcccaaatgtggatccgtggtggatgaagtccgttcttcttcaagtgctatcttgatttcttcccaggccgggttccctccaggagtggtgaacattgtgccaggattcgggcccacagtgggagcagcaatttcttctcaccctcagatcaacaagatcgccttcaccggctccacagaagtaaccctccccacagggtgctggggaaagtgaaaggggcgtgttatttgacacccgtgagcttttcctttgacaggctttaatatgatttgtttttcttctaa

SEQ ID NO: 33595 - DNA, 628 bp, Homo sapiens
cgtatacgactcactatagggcgaattggagctccaccgcggtggcggccgaggtactttaaagtttttggttagcaactgtttttgtctgttgtgggtagatccattctaccttcagccttcgggtcctacagttaggctctacttccctgtcagctcgcctcaggtggggatagtcagtgggacagcaggtgcacatcctggccaggcctcctgcactgccctgaagggccaccctggtggcactgaccgtggatggcctgtggtcgtggccctttctcctttctctgtctcatgtcttgtctgtatgctgcatgttccttgaagattgcctctttttaataaacttatttttttaatgataaacacttatttaacagtttaatgtttatgtttcctttttactcattagggtgaaaatgggatggaggattgtgtcatggccctagaaaccttgtttagtgttctgctttctctttgcagacttatggtaagatgattggcttctttctagtacctgcccgggcggccgctctagaactagtggatcccccgggctgcaggaattcgatatcaagcttatcgataccgtcgaccctcgaggggggcccggtacccaacttttgtt

SEQ ID NO: 33596 - DNA, 531 bp, Homo sapiens
actatagggcgaattggagctccaccgcggtggcggccgcccgggcaggtacctgcacgatactattcatttcagtttcacacaaaccaacggataggtttgaacactatttttatccgcatttcattcacccggaaacttgcttcatgaatttaagaaatttggcaaagtcatgcactactgagtggcaaagtagggaacagaaaccaagtttttgggctcaaagccacactcatgaccactgaccccgactatgtctctgcctcccctgctatcctacccaaaacctgcctgatgatgcccttaagtccaagcagaagaagttctaattcattccttttcttcttggttttttttttttttttttgagacggaatcttgctctgtcacccaggctggagtgcaatggtgcggtctcagctgactgtaacctacgcctcctgggttcgagattctcctgcctcagccttccaagtagctgggactacaggcacccaccaccacacctggctaattttttttgtattttta

SEQ ID NO: 33597 - DNA, 541 bp, Homo sapiens
acgactcactatagggcgaattggagctccaccgcggtggcggccgaggtacttccagggagacaccgattataagaagagaaactcagcgctggggaagaagacaaataaaaagaagtgttaagaattgcctttgggactctgaaggctgaagaattgatgaattgcaagtttgtgccccatagctgcacagaatgtttcatcattactaacaggatattcctcatgacattgctgtctgatctttgaccatcagtctgtgacctgccccttctctttacgtaagtaaaagtgatttctttacctttaaaaaaaaaaagtaccaacgcagggctgagccccagctgtccttgacagggtgtctctgccagcctctgcagggaagcaggactgaccaaaatcagccccggggcccccctctggctgccctgcagtcctggtgtcactgccgagtgctccggggaaaggactgtcaggcacaatgtcactgacagagtctgtggagttctgggggctgttacaagtcctgggcgtaagtggc

SEQ ID NO: 33598 - DNA, 616 bp, Homo sapiens
cgcgcgtaatacgactcactatagggcgaattggagctccaccgcggtggcggccgcccgggcaggtacgcgggggaagtggttggtgccttagcaactaaagctggcaactgggacatcgtccggtgctgcaggtctcagccgaagggcgtcggaaactgcgctcgcatcgagcagtttccagcctcctgggtaaaggagcagtctcctcccttgcttgggactctggacgcatctcattccggtgaaagtaagggacagcttaggaccagaagcctttcgcggagaaaaggctgacatgcccgtcctatatgacaggttactgaagctaaaggagatgtttaactccaagtttggatctattcccaagttttatgttcgagcaccaggaagagtcaacataataggagagcatatagattattgtggatattctgttcttcctatggctgtagaacaagatgtgctaatagctgtagaacctgtgaaaacgtacctcggccgctctagaactagtggatcccccgggctgcaggaattcgatatcaagcttatcgataccgtcgacctcgagggggggcccggtacccagcttttgttccctttagtgagggtt

SEQ ID NO: 33599 - DNA, 553 bp, Homo sapiens
tacgactcactatagggcgaattggagctccaccgcggtggcggccgaggtactgctgattggttggggatgcaaccatcggggtgtggaagctggtcctggtgcactcagttggcttctgggtgggagccacggaagagttgctggtcccggtgggtccatctgactttgaagcatcttttgcagtttgaatgtttccagtgatgtctgagcagctcacagcaacaggcacaaaagttgtccatacgtaagctgtggtggtgagttctctttaagtctagattaagttgtccagcttcagcttgcagggcttccggaaaagggcagtttttgttctgtaatgccaataggtttggatgaattcttctcttcttcagatctttaaaatatatctaaagtttctgggcctttttttcataaggctaaaaaacccagtagtctatgcacatttttaaatatgatgctccagccaaagccttggtaaaataaccaatgtttccaattgtattcaatgacaccctccaaatgtgcaaagagaagcagtgagcacaag

SEQ ID NO: 33600 - DNA, 605 bp, Homo sapiens
  misc_feature 303, 384: n = A,T,C or G
gactcactatagggcgaattggagctccaccgcggtggcggccgaggtacagggctgggtcctggggacaaagcagtgggcaaggcagagtgccatgttatagctggcgcaacagccaagggcagcagatgactgggagaacaaggtgatttcagagagtggtctatgctaggaagaaaaaacaggtttgtccttaggagtgagggttactttagatagggtgaccagtgagggcttcttggagacggtggcgtttgaactgagaccttaatgccaagaaacaacccccatagcaagacctgngcacagaggggcctacaaaggcaacggcccagtgccagggactgagcttgggagctgaggaaataaaagccagcccttccncagctgtccattgcttgatctcatgcttttttctctccacttgagccagcctgagatagctttcgccactagccctggagaaggcaaggttttctgtccacaccctctctctgcttgcacactctgggccttcttagcttgatcctctttcctgtccagcaactgagggtccatcgtagctgcagacatttgtggacggccgctctagaactagtggatcc

SEQ ID NO: 33601 - DNA, 534 bp, Homo sapiens
  misc_feature 310: n = A,T,C or G
gtaatacgactcactatagggcgaattggagctccaccgcggtggcggccgaggtacagggctgggtcctggggacaaagcagtgggcaaggcagagtgccatgttatagctggcgcaacagccaagggcagcagatgactgggagaacaaggtgatttcagagagtggtctatgctaggaagaaaaaacaggtttgtccttaggagtgagggttactttagatagggtgaccagtgagggcttcttggagacggtggcgtttgaactgagaccttaatgccaagaaacaacccccatagcaagacctgngcacagagggacctacaaaggcaacggcccagtgccagggactgagcttgggagctgaggaaataaaagccagcccttccccagctgtccattgcttgatctcatgcttttttctctccacttgagccagcctgagatagctttcgccactagccctggagaaggcaaggttttctgtccacaccctctctctgcttgcacactctgggccttcttagcttgat

SEQ ID NO: 33602 - DNA, 602 bp, Homo sapiens
gactcactatagggcgaattggagctccaccgcggtggcggccgcccgggcaggtacaccgactacggcggactaatcttcaactcctacatacttcccccattattcctagaaccaggcgacctgcgactccttgacgttgacaatcgagtagtacccattaaccccacttaaacttttctttctgaaagagacaaacttgctaaattatcatgagagaaccaaagaattctaatgaatcattttatttaaaaaataactacagttatcctttaccaaactaaaattccaggtctgcaacaacttcgatttggcacagagttgctgcaaagcttaatgtgtatatttacacacttcagccctcttaaaagccatcctactattgatgtccccatcgagtccttagtttcctatgtttctatgtttctaagtggaacagcaagtctcacctacctttagagtccacgctctaattgctttcattcctttataatatgctgagctcacttaaaagctggtttcggccgctctagaactagtggatcccccgggctgcaggaattcgatatcaagcttatcgataccgtcgacctcgagggggg

SEQ ID NO: 33603 - DNA, 606 bp, Homo sapiens
actatagggcgaattggagctccaccgcggtggcggccgcccgggccaaacccacagcgcagggccagggacacagggagtcagccgggcaggagctcgtcctcaccctgtccgggcggctgtgagacagcatgtcaggggatgaggagtaaccaggcctagtgtcaaggcaaactgtgtcccccaaaatgcataaagtcctaacccccaggacctcgggatgtgactaattgaaaacagggtctttacagaggcaattaagttaaaatgaggccatcggggtgggcactaatccaatctgcctggtgtccttataagaagggagatgaggacacagacacagtcagcgggaagactctgtgagggcacagggggaaggcggctgtctgtagcccaggaacgaggtctcaagagagcccagccctgcccacagcttgatattggacttctggcctccagactgtgagattctccatttctgttgattaaggtgcccagtctgtggtgctttgttatagcagcttcagaaaaccaagacccctggagaatacatatgtgtagagtggctgttcccacaaagcctgcacaaactcttctggaaagatt

SEQ ID NO: 33604 - DNA, 689 bp, Homo sapiens
actatatggcagctccaccgcggtggcggccgcccgggcaggtacgcggggaggtcccggaagagccgcttggagcgcggcacgttcagccctgagagcgcagcggggacggaggaagtgctgtggaacatcagatagaatggatagcacagcccaaattttacaaaaaggattttaaaggaagatctcaatggtggaacactagaggctttcctgctaaagttaagaacaagcaaaggctgacgcagttttggcatacaggaagtgttggagctgagactcgaaactgtcccccaggccttggccatgctgataaatatctaggccctacaggagttcgtgtccatgaacccagtaaacgcaattcctcagccaaaaaaaaaaaacaaaaaaaaaaaggtccctcggccgctctagaactagtggatcccccgggctgcaggaattcgatatcaagcttatcgataccgtcgacctcgagggggggcccggtacccagcttttgttccctttagtgagggttaattgcgcgcttggcgtaatcatggtcatagctgtttcctgtgtgaaattgttatccgctcacaattccacacaacatacgagccgggagcataaagtgtaaagcctggggtgcctaatgagtgagctaactcacattaattgcgttgcgctcactgcccgctttc

SEQ ID NO: 33605 - DNA, 666 bp, Homo sapiens
gactactatagggcgaattggagctccaccgcggtggcggccgaggtacccccattctctgattataaacagataaacccaaatgtggatcatccttggaatacccccattctccttgcctcttagcatgtttgatttaagaaaagcctccaggaaatcttgagagcctgtcttggcataatgcagtgtcacctgtgccaaccatggggtgtcccgtgagtgtgagtgtggcagtgagaagaagcatcgagggcgaggggaatatgaaagttggtcttcacctaattacctgtttggtttggattttcaagagatgattgggcttcttagcttttctgaattctgcagtattttctaaacaggatagattatgatctcggtccccatccatcctaacttctgagttcatctctgtctctgctttacagtctttaattttttgttgttccttcatttttttctttttaataagacatagcagaattccttaggtatgggatttatgagaccagtacctgcccgggcggccgctctagaactagtggatcccccgggctgcaggaattccatatcaagcttatcgataccgtcgacctcgagggggggcccggtacccagcttttgttccctttagtgagggttaattgcgcgcttggcgtaatcatg

SEQ ID NO: 33606 - DNA, 582 bp, Homo sapiens
cgcgcgtatacgactcactatagggcgaattggagctccaccgcggtggcggccgaggtacacagcagtgctgtatcaaagaaaaaccaacacacacaccagcattctcaaatccagttcagaaaaataaggaagagtgacggtaaaatgaggcctatgattaacggtaagtttgtgagtaaataatctcaaggaggcaagtctttgcaaatgaagaacaggggaaaaaaaactgtgaaccaatcaagcctcttttcttaaaaattacccagtctcaggtatttctttatagcaatgcaagaatggcctaataccactgtcctatggggaactccagcgggaggcctgggacacagagctgccaatcagagtcccagggatttgactggttcaggaatgggcaggtgacccaacttgggaatggtgaaactctggaagaggctcggctgtaaggcagctcagctaatggcaatggctgaaagtgctgaagccactccaaggatggattcttcctgaggactgcaacccagaggaaggtacctgcccgggcggccgctctagaactagtggatcccccgggct

SEQ ID NO: 33607 - DNA, 628 bp, Homo sapiens
actatagggcgaattggagctccaccgcggtggcggccgaggtacagatggctggttaggattctcggcaccattttccgtttctgcgaccggtcggtgccccctgcccgggccctcctgaagaggcggcgctcagacagcactctgttttctacagtggacactgatgaaataccagccaaaagaccaagattagattgctttattcaccaagtgaaaaacagtctctacaatgctgccagcttatttggattcccattccagctgaccacaaagcccatggtaacttctgcttgtaatggaacacggaatgtggccccttcaggagaggtattttcgaactcttcatcttgtgaactgacaggttctggatcctggaacaacatgctgaaactgggtaataaatctcctaatggaataagtgactatccaaagatcagagtgacagttacccgagatcagccacgcagagtcctgccttcctttggttttactttgaactcagaaggctgtaatagaagaccaggtggccgccgccatagcaaaggtaatccagagagttctttaatgtggaaacctcaggaacaggctgtaacagagatgatttctgaagagagtggcaagggtc

SEQ ID NO: 33608 - DNA, 581 bp, Homo sapiens
acgactcactatatggcgaattggagctccaccgcggtggcggccgaggtactgtaggggatcgcacaccttggggtggaaacagcagctctccggagttgcatgggagccatgggcagtggtcctggctggtgaaatgattctagccacgtggcccacccagggggcaaaacaatagaaaccttcagaaatgaaacgtcacctggctgcaagaagatagtcccacaggcgccctaaagatggggatgccaagtggcttctcgggaagctgtaagaatccacagggcattgtaagatggagggaaatattaagttttcttcgtaaagaggtgaggggggcgagagcagcaaaggacactggaaaatgagaagcatggatgggaagtgtcgcattgagtataatttggaggtaaaatctccaacaccgtaactgagtggcctggggacctgatagaaagccttgctcaggactaaagcagaattcccagttatatcgcagatacaaagagaccaagaacacgcttgtaatcacaacacttaaggaagcttacgcgggtggatgacctgaggtcaggagttca

SEQ ID NO: 33609 - DNA, 633 bp, Homo sapiens
ctactatagggcgaattggagctccaccgcggtggcggccgaggtacagaggccggtgggctccctgacatcccttccaggcaacctgaaagcactgaaatagcttatggccctgtgccagggaccttggcccaagctgctgacctccagggtggggagggagctacccccaggagaagagtcactcagacagcagtatgagcaagccagccagcagctccgtgcctgcacccagctcaggggaatcccagggggttcagatgcccaggaaggaaaaggggacagcgctactgctatggaatgagaccaccacttctcctgttgtccttcccagcttctccccaacctccccttttccctagtttataagacaggagaaaagggagaaagcaaaaagctggaaagaaacagaagtaagataaatagctagacgaccttggcgccaccacctggccctggtggttaaaatgataataatattaacccctgaccaaaacgactggtgttatctgtaaatcccagacattgtgtgagaaagcaccgtaaaactttttgtcctattagctgatgtgtgtagcccccagtcacgttcctcacgcttacttgatctattatgaccctttcacgtggacc

SEQ ID NO: 33610 - DNA, 505 bp, Homo sapiens
ctactatagggcgaattggagctccaccgcggtggcggccgaggtacgtcatgtcttggtttagactacactttagaggggatatgacggtaggaaaacctggttggatgtattacagagacataaacatataaatgagtaagacccgagaccagaatgagggtaatggagatggaaacaaaaatcaaacagaaagagcttttaagtgaaaaattagatcttataaaaggaccatgtaattttaaatgactctaaagaattgtattccagacacctgaatgattgatgggattaatacacgagatgggtattgggatatggcttatgacagaagatgatgcatttaattttagaaccatagagacaaggtaacaagatttaaatcaggaagaatttaattgtaaaatcttatagaaaaatatggaagaagtcagctacacagagacagcagttgaaaatgaatcattcggctgggcatggtggctcacgcctgtaatcccagcac

SEQ ID NO: 33611 - DNA, 650 bp, Homo sapiens; identical to SEQ ID NO: 31835

SEQ ID NO: 33612 - DNA, 533 bp, Homo sapiens
tcactatagggcgaattggagctccaccgcggtggcggccgcccgggcaggtacctaagtagacactttttgtctatcttttcgtctgctaaagagagagcattgtgtaggagctctttagagttgctcttagaagcatacttttgtggaagagtgggaagaaataatcataaatttatttcacagttgatgtgtgactactttttcaagtgtatgacttgtaaaagtgggattggtgtatttgagttagtggatgaccattttgtagagttgaatgttggtgtcactggccttcctgtttcagattccaggatcatagctggtcttgtgcttcagaaagatttttctgtgtacgcggggagccaaggagggagggtcttcctttggcatgggatggggatgaagtaaggagagggactggaccccctggaagctgattcactatggggggaggtgtattgaagtcctccagacaaccctcagatttggtgatttcctagtagaactcacagaaataaagagctgttatactg

SEQ ID NO: 33613 - DNA, 194 bp, Homo sapiens
atagggcgaattggagctccaccgcggtggcggccgcccgggcaggtacctggccgtggtggcctcctcccacaagggcaagaaagacacaagtatcacgggagagctggaaaagcagcttctacaagcaaacccgattctggaggctttcggcaacgccaaaacagtgaagaacgacaacttcctcacgattc

SEQ ID NO: 33614 - DNA, 312 bp, Homo sapiens
tatagggcgaattggagctccaccgcggtggcggccgaggtactgtgggtgatatttgcctttagtgcactcttctccttcagagtaaagtggttggcggtggttatcatgggtgtggtgctacaaggtgccaacctgtatggttacatcaggtgtaaggtgcgcagcagaaagcatttaaccagcatggctacttcatattttgggaagccagtttttaagaacaaaaacactgggaaatgatcaatactttcctggaatagaagaaagctttattgtgcttttggttacattgggtggaacaaaactgaa

SEQ ID NO: 33615 - DNA, 203 bp, Homo sapiens
actactatagggcgaattggagctccaccgcggtggcggccgcccgggcaggtacttataccagctaagcagcagtaaactgaaagtaaaaagcatagctagctagagagatgaatagacagcaatgtttatgtcctgcagccagatgacaatgcactgttgcagaagaatgagtttcagacctttgcagctttggtcttctc

SEQ ID NO: 33616 - DNA, 475 bp, Homo sapiens
ctactatagggcgaattggagctccaccgcggtggcggccgcccgggcaggtactttttttttttttttttttttttttttttggaatgaacaaatatttatttatcttttataacaagtaaggcaatgttgcttaaaggaagacaaacaaacataaaagattccgttgacaatgcattttttcatctgttcggcacaatgcttttggcataattggaaatgtgacaggcaaactttccaggacattcattcttcggcggcagcacttagggcagatgactggccgctcagattctctatcttgtttcaggacagtggaaaagctgcttatagatgaggccaaagcaccaggtaggtggaaggttcttgtatcggttcgaaccccgacagcgcgccaacagacaacacgaggcagtggggagcaacatgctgttttaatgagcgcctgggtgcaggcgtgctgaggctgaaaatg

SEQ ID NO: 33617 - DNA, 506 bp, Homo sapiens
acgactcactatagggcgaattggagctccaccgcggtggcggccgaggtacgtttgggagcctgagctggaactgaagctggggctgcagcctgggccttggtttgatccttggccttggccttggccttggcctttggccggcacagcctgagccccttggcaatacgggcacgagcacgcttcccaagcttggggtgggcaatgtagggcaattcgattcgaaccttgcggctgacaccctttgggatctttgggccttaaccctccttgggcctttacgaggtgccttgataagcctcggcaacgttgcacttcatgtgcctttggcattgtttgagacctgcatctttctttaggggccctttttgttgtgctttctttggcaaaagcgcatgtttcctcaggaaacttttggggtccactcccctttaagtagaattcgtatcttttgtgaatcgggtgtttcttggataccattttctgtgcccatttttcggggactg

SEQ ID NO: 33618 - DNA, 196 bp, Homo sapiens
tatagggcgaattggagctccaccgcggtggcggccgcccgggcaggtactgaaattagtagaagctaggccaatgatccatgaattgttaactgaagggcggagatcgaagactaacaaagcaaaaacccttgctacatgggcaacaaaagaactgaggaaactgaagaaccaagcttgatctgttaccattggg

SEQ ID NO: 33619 - DNA, 493 bp, Homo sapiens
  misc_feature 328: n = A,T,C or G
ctatagggcgaattggagctccaccgcggtggcggccgcccgggcaggtacgcgggggaggaagagtgggggttccaacttttctgcttatctgggaggtgttgggcgcggacagtcgagatgtcagagaaaaagcagccggtagacttaggtctgttagaggaagacgacgagtttgaagagttccctgccgaaaactgggcttgctttaaatgaagatgaaagatgcccatgtctgggaggataattgggaagatgacaatgtaagaggatgacttttctaatcagttacgagctgaactagagaaacatggttataaggatggangacttcattagcattccagaagaaagtgttgaagtaaacctaaactttgacctgcttaaatacatttctagggcaggagaaccccaggtatggtgacacttaaaaaatgtgttttatttcattaatctgcttggatttatttgtgttttttgtaacacaaaaaat

SEQ ID NO: 33620 - DNA, 215 bp, Homo sapiens
cgactcactatagggcgaattggagctccaccgcggtggcggccgaggtacttattacatataggaaaagattttccatgacatagtggtaatccgcccgactgctgtctggcagaaaacaggcggcaaacacaatgatggcatttagaccgtccccatagtatcctgaatctcctccgtgagaaatgactctcctgtagggctcgatgaccttt

SEQ ID NO: 33621 - DNA, 488 bp, Homo sapiens
ctcactatagggcgaattggagctccaccgcggtggcggccgaggtactcttctatttcttcagaagccttcctcctaaacttcgaagccttcacggaatcacctgcccagcctccctgtcggcagcgaggtaatttagcagaggaagtctctccagtcagagtcaaagaggaattcttgccattgaggtgattctcggcctgcgcctgccttctggttggagctcgggcgaccccatctgggccctggaggtagccaagcttgagcgaagctcctcgtccaagtcgagcaaatcctccatctccgcggccgctctagaactagtggatcccccgggctgcaggaattcgatatcaagcttatcgataccgtcgacctcgagggggggcccggtacccagcttttgttccctttagtgagggttaattgcgcgcttggcgtaatcatggtcatagctgtttcctgtgtgaaattgttatccgctcaca

SEQ ID NO: 33622 - DNA, 197 bp, Homo sapiens
tatagggcgaattggagctccaccgcggtggcggccgcccgggcaggtacttttttaataaaaccagcaagctcagtgctgttgtaacatgggaataccactgacaggtgctcaataatactattgaacggcttttttggagactggcttgaacgcgcagcacgtcctggaggaacaggctgcttccgatcagccac

SEQ ID NO: 33623 - DNA, 200 bp, Homo sapiens
tatagggcgaattggagctccaccgcggtggcggccgcccgggcaggtacgcgggggcttctttcccgagcttggaacttcgttatccgcgatgcgtttcctggcagctacattcctgctcctggcgctcagcaccgctgcccaggccgaaccggtgcagttcaaggactgcggttctgtggatggagttataaagggaa

SEQ ID NO: 33624 - DNA, 345 bp, Homo sapiens
tatagggcgaattggagctccaccgcggtggcggccgaggtacctggatcctgctcctctgggttgaaacccgggcgccgccaagatgccggcttaccactcttctctcatggatcctgataccaaactcatcggaaacatggcactgttgcctatcagaagtcaattcaaaggacctgcccccagagagacaaaagataccaattttggtggattgaagccatctaattactttcaagggccaatgtctttcttttaaaaaactatgaaaattaatgaattgaaggctgataggtacccttgatattatattaactctcttacatttccttgaatggttctgaa

SEQ ID NO: 33625 - DNA, 387 bp, Homo sapiens
ctcactatagggcgaattggagctccccgcggtggcggccgaggtacctggattggagttctcactctgttcatgtagcagatgaaaaaaatcaaagcacagagaggctaagtgacttgcccaaggccacacagccaggaagcaatcagctgggatttgaacccacacaacccgactcccgagcccacgatgatcacccgtgtgttccactgcctcacccctgagtgaacctcactgaccatgaaagatggggtaggaagagggctcacacctgctggatatcctcacccacctgggcaggtaactcgccgagcctctctctcctgcctcagctcttccccccgatccacacggtagatcacgtcggatttggacccaggcagccct

SEQ ID NO: 33626 - DNA, 386 bp, Homo sapiens
ctcactatagggcgaattggagctccaccgcggtggcggccgcccgggcaggtacgcgggggatgccattttcagcctcagcacgcctgcacccaggcgctcattaaaacagcatgttgctccccactgcctcgtgttgtctgttggcgcgctgtcggggttcgaaccgatacaagaaccttccacctacctggtgctttggcctcatctataagcagcttttccactgtcctgaaacaagatagagaatctgagcggccagtcatctgccctaagtgctgccgccgaagactgaatgtcctggaaagtttgctgtcacatctccattatgacaaaagcattgtgccgaacagatgaaaaaatgcattgtcaacggaatcttttat

SEQ ID NO: 33627 - DNA, 380 bp, Homo sapiens
actatagggcgaattggagctccaccgcggtggcggccgcccgggcaggtactttttagcagagacatggtttcaccactgattcacttcttgccttagtctcagagatctcagacagaagctgtgaccttcttggctaaccatgatgacagtcgggccctctatgccatcccaggtgagtagttagcatttgaatggtgcccgtcaagaaggagtctggtgtgtctcagggagaggattctgatgtcctgtcatccactgggagggattatgatgctgagaggtatgatatcagggttatcccatactggaacaaggccagttaatgtttcttctcaaccccatctctctcctctcctgtgagtttcaccactgtcttt

SEQ ID NO: 33628 - DNA, 395 bp, Homo sapiens
cgtatacgactcactatagggcgaattggagctccaccgcggtggcggccgcccgggcaggtaccattatgtgcccgaattccgaaaagtgtccatagcagctaccatcatctatgcctatgcctggctggttcctcttgcactctggggtttcctcatgtggagaaacagcaaagttatgaacatcgtctcctattcatttctggagattgtgtgtgtctatggatattccctcttcatttatatccccaccgcaatactgtggattatcccccagaaagctgttcgttggattctagtcatgattgccctgggcatctcaggatctctcttggcaatgacattttggccagctgttcgtgaggataaccgacgcgttgcattggccacaattg

SEQ ID NO: 33629 - DNA, 402 bp, Homo sapiens
atacgactcactatagggcgaattggagctccaccgcggtggcggccgaggtacgcgggtggttggatctcagctggaagttctgtttggagcccatttctgtgagaccctgtatttcaaatttgcagctgaaaggtgcttgtacgcggggaggcgattactgggcaggctcagtctttcgcctcagtctcgagctctcgctggccttcgggtgtacgtgctccgggatcttcagcacccgcggccgctctagaactagtggatcccccgggctgcaggaattcgatatcaagcttatcgataccgtcgacctcgagggggggcccggtacccagcttttgttccctttagtgagggttaattgcgcgcttggcgtaatcatggtcatagctgtttcctgtg

SEQ ID NO: 33630 - DNA, 369 bp, Homo sapiens
  misc_feature 187: n = A,T,C or G
cgcggtggcggccgaggtacttttttttttttttttttttttttttttgggagtagtcctttgaaacgacagtcatattgaaacaggaagtcagtaagctgttgcaacatccttagggcaaatgctgtgaattcacctgctggtaactttgattaaggactgagaatggtgtgggtatcgctgtctnctcataagtaattatttaaaaggactaattgctcctttggcttcagaggtaaaaatgcccacatggcagccagttctgtggcagtttggggataatgtggttggatgaataagggagctaggaagaaggctgatggcggccttgactctcaatcccctggggctggggacagggaatgcagg

SEQ ID NO: 33631 - DNA, 396 bp, Homo sapiens
gactcactatagggcgaattggagctccccgcggtggcggccgaggtactttttttttttttttttttttttcccccgccccctatctgtcttcctctccctctttctcgctggtggcgtctgcagctgtgctagacccggctttaacagggagcgagagagcggaaaaagtctctctcctttaaaaaaaaaaaatctgatttaaacccccttctaccagcgctatcaaaacttgaattgcaaactggcttccgttcgccgccctcctcctccttcctctgctccgagcctccggagggtgtctcggtttcaatccaaatcttgctgggctcttctcccgtgcctctctctcttccttgtcctaaaacgtgagcgaattcgcttcctaaatctgtg

SEQ ID NO: 33632 - DNA, 383 bp, Homo sapiens
gcgtatacgactcactatagggcgaattggagctccaccgcggtggcggccgaggtacttctgtggttaatgtatatttttattatggtttttaaaatgggaatcatttttatgtatctgtgcaaataataaatgcccatttggaaaaagagtaagctcttacataaaatggaccaaaaaatcccccttaattgaaaccaaaattttttctttctagttaggtttttttcccaactccttttaacttttggaatttattaataatttttttcttttttaatgatatgcccataggttcataaattgcttttgttcttttaaaattcatccatttggtttaacttaaaggaaccttttaaatgcctcacccttgaccctcagag

SEQ ID NO: 33633 - DNA, 472 bp, Homo sapiens
tatagggcgaattggagctccaccgcggtggcggccgcccgggcaggtacgcggggagtgggaggtggttgaatcatgggggcagtttcccccatgctattctcatgagagtgagtgagttctcatgagatctgatggttttataagcatctggcatttcccctgctcactctcactccatcctgctgccctgtgaagaaggtgcctgcactcccgcctgggtgacagagcaagactctgtctcaaaaaaaaaaagggacctggaatgcttcgtgggggtgtcgcaaggtctcggagcctatggaatctggttctggagctgggcagggcttccactgggctctgcaggcctgggccgggagctggctcatttgtttatgggacatttgcttcctgggagtctacagtgtggtggtccctgccctgggtgctggacacagcatcaaacaaggcagacacagcccgcccttgt

SEQ ID NO: 33634 - DNA, 473 bp, Homo sapiens
ctactatagggcgaattggagctccaccgcggtggcggccgaggtactcggaggatttctgtcaacctccggactttccctgcctcaagcagctggtggcctacgtgcagctcaacatgccaggctcagacctggagtgccgtgcccaccttctcctggcccagctggagcactcggaacccattgaggcagagcctgaggctctgtcaccagtgccagctctaaaaccaactccagagctcgagctagctctaacaccagctcgagcacccagcccagtgccggctccagccccggagccagagccagctccaacaccagctccaggttcagagctagaagtagctccagcaccagctccggagctccagcaggctccagaaccagctgtgggactagaatcggctccagcgccagctctggaactagagccagctccagaacaggatccagctccctcacaaactctagag

SEQ ID NO: 33635 - DNA, 446 bp, Homo sapiens
actactatagggcgaattggagctccaccgcggtggcggccgaggtacctgggtgacgtttacgttctgggatttcgggagatgcggttttctgcacgccaggggccaagcctgagacgtagatggacggcagggataggagctctctccgcgccacaaacgcccctgctcatacctgggttccttgattttcctgcctatataaccgaacccttccatgcccgggctctgagctctcattctgcggactgggacaaaggggttaactgtgatgagctttgtataaccccaggattctgcacttgcccaagggcgaggcgcaaatcaaaaactacgcacaactgaacaccgagatcaggtgagtcctgagtgtctcacgacataaaatccttacgattttaacaagagttgtatttgtgctagcactgttaactgacaaacgcatg

SEQ ID NO: 33636 - DNA, 489 bp, Homo sapiens
tacactactatagggcgaattggagctccaccgcggtggcggccgcccgggcaggtacaaaaagtctaagccaaaggttctcaggggagaaagcacatgtgcagttttaaaacaaagcagtgctttgtcccattgctgtgatttttagtcagactttactcagtctgaaatgcaattaacattaaaggattaagtgtgagatttcgatttatgctaattggtgtatcccatactcctcccttttaataatcagtttccactgatgatatgaagggccggtataaagaagtctttaaatgagtaagctttcttggtaagattaaatcttacaaattatttttaaaaccttgtgatatatacaatgtttagctgagttttctaattttctggatgtaaaacaaaaggtttaacctatacattccttgagctgttagtgctatttaaatcttttgccctgtttaggtcctaaacacttttagttgagtagga

SEQ ID NO: 33637 - DNA, 449 bp, Homo sapiens
tacgactcactatagggcgaattggagctccaccgcggtggcggccgctgagtgaggcgtcggctgtgtttctcaccgcggtcttttcctcccactcttggctggttggaccccgctatggaaaagttggcccctgagccagagctccagcagccttgttagggcgtggcctgaggcttggataagtgggatgtaaaacgaagatcaggagcagatttgaagaattacaaagtgcattggtaccagtcagcatgtcagagacagaccacatagcctctacttcctctgataaaaatgttgggaaaacacctgaattaaaggaagactcatgcaacttgttttctggcaatgaaagcagcaaattagaaaatgagtccaaactattgtcattaaacactgataaaactttatgtcaacctaatgagcataataatcgaattgaagcccag

SEQ ID NO: 33638 - DNA, 373 bp, Homo sapiens
tcgggagatgcggttttctgcacgccaggggccaagcctgagacgtagatggacggcagggataggagctctctccgcgccacaaacgcccctgctcatacctgggttccttgattttcctgcctatataaccgaaccctcccatggccgggctctgagctctcattctgcggactgggacaaaggggttaactgtgatgagctttgtataaccccaggattctgcacttgcccaagggcgaggcgcaaatcaaaaactacgcacaactgaacaccgagatcaggtgagtcctgagtgtctcacgacataaaatccttacgattttaacaagagttgtatttgtgctagcactgttaactgacaaacgcatgc

SEQ ID NO: 33639 - DNA, 442 bp, Homo sapiens
agggcgaattggagctccaccgcggtggcggccgcccgggcaggtacaaagaagagattctacagcacttagaggctgtatagcttccagaaaaagtagctataatgcattgcagaggccaccaaaaggcaaggatgccacaagccaaaggaaacagaaaagcagacagggaggcaaagcaggcagcaatgatcagcccgattttaagaggaagcttagctatgcctctcctcccagaacctcctctccaagacgacccaagttatactccaaatcaaagatcctggtgtgccaagaagatataaaatgtatgaaaagaaagtaaaagaagttcttctataggagactagccattccaaagatgttagctcctaagtttgtgaagcaaatccatcaagaaaatcatataagaaaaacagcattagaaacattatgtagtgcc

SEQ ID NO: 33640 - DNA, 339 bp, Homo sapiens
  misc_feature 226, 283, 284: n = A,T,C or G
actactatagggcgaattggagctccaccgcggtggcggccgaggtacgcgggtgaggagtgccagcagtgtgataatttaaacatatttaaacaaaaacaaaaaaaatgaatgcacaaacttgctgctgcttagatcactgcagcttctaggacccggtttcttttactgatttaaaaacaaaacaaaaaaaataaaaaagttgtgcctggtaaaaaataaaatnaataaaaaaatttggttccgcggggagcccgccctggatacccgcaagcttaggaanntaatggaataggaaaccgcggtctctaatttgtgttggggttttcggaaaactga

SEQ ID NO: 33641 - DNA, 188 bp, Homo sapiens
tggcaacttgaacctccagcccgccgacgtacaaagagcggattctccaggacaaacctgagttcatggaggagccagatagaaaagatgttgcccaataagatgctgaaaaattaggattttccgagactgatagcaaggaggcctcatctgaaagttctggtcataaacgaatcttccagttgggg

SEQ ID NO: 33642 - DNA, 424 bp, Homo sapiens
gagctccccgcggtggcggccgaggtacctgcaggcctcctacacctacctctctctgggcttctatttcgaccgcgatgatgtggctctggaaggcgtgagccacttcttccgcgaactggccgaggagaagcgcgagggctacgagcgtctcctgaagatgcaaaaccagcgtggcggccgctctagaactagtggatcccccggcctgcaggaattcgatatcaagcttatcgataccgtcgacctcgagggggggcccggtacccagcttttgttccctttagtgagggttaattgcgcgcttggcgtaatcatggtcatagctgtttcctgtgtgaaattgttatccgctcacaattccacacaacatacgagccgggagcataaagtgtaaagcctggggtgcctaatgagtgagcta

SEQ ID NO: 33643 - DNA, 427 bp, Homo sapiens
tggagctccaccgcggtggcggccgaggtacatcttgacccgtggtcttgagcatatggaagaacatcttacccagcacctgtgtaaacatcccaggagtttagttcccagagactggccaagggtcattgccatatgggctccggtaatgggcagctccagcctgcggcgtagacagttgccatggagaaagacaggcgtatccagagttgacggttgccgtggagacaaaagccgtccgcacgcagtgggggcggggcttacagaacgtattttgcgattgatccacaggaaatagacgcagctgcgtggatcgccttctccaccccacatactgaagccagaataagccacgactttcgtgtgctccacgcgagggctcgcctgacgccagaggtttctcccgcatctgccatcacaggaccgt

SEQ ID NO: 33644 - DNA, 444 bp, Homo sapiens
gactactatagggcgaattggagctccaccgcggtggcggccgcccgggcaggtacccagggacacaaacactctgcctaggaaaaccagagacctttgttcacttgtttgtctgctgaccttccctccactagtgtcctatgaccctgccaaatccccctctgtgagaaacacccaagaatgatcaattaaaaaaaaaattaaatttaaaaggaaaacaccaacaacaacagaaaaaagtcctcccataaggaaagatgatcaattcttatgtatcgttctagggatataaatattcaggaggcttttcagaataaaagttaaatcatttatgtcgcacaaacaaatttactattcggacaaatacgatgacaaggagtttgagtatcgacatgtcatgctgcccaaggacatagccaagctggtccctaaaacccatttgat

SEQ ID NO: 33645 - DNA, 442 bp, Homo sapiens
ctactatagggcgaattggagctccaccgcggtggcggccgaggtacgcggggggcagtgagcatgcgctccggctccaccacgaacatgtagtagaggttccacatcagcatcgacagcagtggcagaaacgtcaggccgtagccgaagcctcggaaggagcggcccacggcaaagagacatggtcttgctatgttgccagtctgggcctcaaacttctggccttgagtgattctctcacctcagactcctgagtagctgggattacagatgcgggccaccacacctggctgtacttcataaaatcctcttatagagttactcttgccctagattgtaaattaagtttggcattattgtcagactggatggagggtgaagtaaaatagtatgaacaattaagaggctctccccctcttgtctttaagccatattctcctac

SEQ ID NO: 33646 - DNA, 449 bp, Homo sapiens
cactacttagggcgaattggagctccaccgcggtggcggccgcccgggcaggtactccctaatgaatggttatgcaggcaggagaacttctcaggaagagaaaaggagaagactaactctacagagatttttgaaagactccgtgggatctcagcaatttgttaacactgctagggcccttcactgcatagggaggcatatggactggcctggggtctcccggctcatgttccaagcaagaatagggtaagtaactgtgaattaccctacaagcagtaataagtttattataataatatttttatacatttttggatgcacccaacccactctaaagaatgtcagtgactttatacaaaagaggaagcatctagattggcattgtgaacataatgcatacgggcgcggcgggagctctagagcctagtggttaaaaccgtggcctctgg

SEQ ID NO: 33647 - DNA, 423 bp, Homo sapiens
ccgtggtggcggccgaggtactgcgcagcaaaacaattctatcttcttaatagttcttctatgtctttcccagcgtaaagcacagctcatggaacagacggcagtgacaggcgggcagtgggaggcgggagaacggcttgagcccaggagttcgagaccagcctggggcaatatagcaagaaccgcctctcgcgccggtcctggccgaggctccagctcgagttgtttgcaggccctcagacccccgcccgcagtaaacgtgttttcttcatccccgtggcaggccgtctactttttaaaaatcccgcgtacctgcccgggcggccgctctagaactagtggatcccccgggctgcaggaattcgatatcaagcttatcgataccgtcgacctcgagggggggcccggtacccagcttttgtt

SEQ ID NO: 33648 - DNA, 447 bp, Homo sapiens
cactactatagggcgaattggagctccaccgcggtggcggccgaggtactctgtgatttcacctagatttggagaaggtgagggaggaaaggctgtcctctttgatcccataccatgcaggggcaaatggctgccagcataacaaaataagaaggaaagaaagaaaagtgggccaggcgcagtggctcactcctgtaatccccctgattaatctgcgcgaacagtgctgagcgggaagcagactcatctgagcctgaactggtagagactgggggaggaggggggcctggtggagggggaggaggacctgatccggcagagggtccagatggcagtccgctccccgcgtacctgcccgggcggccgctctagaactagtggatcccccgggctgcaggaattcgatatcaagcttatcgataccgtcgacctcgagggggggcccgg

SEQ ID NO: 33649 - DNA, 189 bp, Homo sapiens
gactcactatagggcgaattggagctccaccgcggtggcggccgcccgggcaggtactattttacctatgacccgtggattggcaagttattgtatcttgaggacttcttcgtgatgagtgattatagaggctttggcataggatcagaaattctgaagaatctaagccaggttgcaatgaggtgtcgc

SEQ ID NO: 33650 - DNA, 190 bp, Homo sapiens
acgactcatatagggcgaattggagctccaccgcggtggcggccgtccgggcaggtacgcggggcgtcgggaccctacctgacccatcagcaaaaggtgttgcggctttataagcgggcgctacgccacctcgagtcgtggtgcgtccagagagacaaataccgatactttgcttgtttgatgagagccc

SEQ ID NO: 33651 - DNA, 403 bp, Homo sapiens
cgactcactatagggcgaattggagctccaccgcggtggcggccgaggtaccactggcatcgtgatggactccggtgacggggtcacccacactgtgcccatctacgaggggtatgccctcccccatgccatcctgcgtctggacctggctggccgggacctgaccgactacctcatgaagatcctcactgagcgagggctccagcttttaccaccacggtccgctttagaactagtgagatcccccggtgctgcagggaatttcgatattcaagcttattcgatacccgtcgaacctcgaggggggggtcccggtaacctcagactttttggttcccttttagtgaaggggtttaattgcgtcgcttgtgcgtatatcattggtcataagcttgttttcctg

SEQ ID NO: 33652 - DNA, 236 bp, Homo sapiens
cgactactatagggcgaattggagctccaccgcggtggcggccgaggtactgtgctgagaaatgggccccttgccagatgctcccctctccttcctctctgcgaggcagaagtcagaaggtagagattgctggcaaaactgtgaagtcccaccctggggtctcaaccccaactccactgagggcagtctccctgacctggtgtgacctaggcagttaaagggtgtgcggttgatgg

SEQ ID NO: 33653 - DNA, 319 bp, Homo sapiens
acgactactatagggcgaattggagctccaccgcggtggcggccgcccgggcaggtactcttgtgagagaagttacatgttcattgttaaggaaattatatgtaaatcacaaagatcatggtctgtgaataatgtgccatatctcacaaaatatggtcattggaatcttattaaaattatctacaggtgacttcagttttcaatttcttcacccctttgccttaagataccaaagccttggacatgaccacaatcccaagtcagtcatagggctccttctatgatgggcggagatatcttcaagttcctggcttcatag

SEQ ID NO: 33654 - DNA, 315 bp, Homo sapiens
acgactcactatagggcgaattggagctccaccgcggtggcggccgaggtactgactttaacttgctctgactgaatgctttctggatggaaccctgtataccacttttatctgatttggagatgagacactatgaaatgtgactccacaagctttctgctgcttgctgtgtcttgataacattaatgctatgtttaaaaaaaacaattgcttaaaatgaacctaaagggcccttggcaagaaggaatgccattcctcccagaccctgtgtcgcattgcgaagctttaagtgtaaagggcttattcttggtgcta

SEQ ID NO: 33655 - DNA, 442 bp, Homo sapiens
attggagctccaccgcggtggcggccgcccgggcaggtactccctaatgaatggttatgcaggcaggagaacttctcaggaagagaaaaggagaagactaactctacagagatttttgaaagactccgtgggatctcagcaatttgttaacactgctagggcccttcactgcatagggagggcattggactgccatgggtctccaggctcatgttccaagcaagaatagggtaagtaactgcgaattaccctacaagcagtaataagtttattataataatatttttatacatttttggatgcacccaacccactctaaagaatgtcagtgactttatacaaaagaggaagcatctagattggcattgtgaacataatgcataggggcgcggcgggagctctagagcctagtggttaaaaccgtggcctctggaatatgact

SEQ ID NO: 33656 - DNA, 185 bp, Homo sapiens
ctatagggcgaattggagctccaccgcggtggcggccgcccgggcaggtactcttgtgagagaagttacatgttcattgttaaggaaattatatgtaaatcacaaagatcatggtctgtgaataatgtgccatatctcacaaaatatggtcattggaatcttattaaaattatctacaggtgact

SEQ ID NO: 33657 - DNA, 186 bp, Homo sapiens
acgactcactatatggcgaattggagctccaccgcggtggcggccgctgagtgaggcgtcggctgtgtttctcaccgcggtcttttcctcccactcttggctggttggaccccgctatggaaaagttggcccctgagccagagctccagcagccttgttagggacgtggcctgaggtcttggataa

SEQ ID NO: 33658 - DNA, 336 bp, Homo sapiens
cactatagggcgaattggagctccaccgcggtggcggccgaggtacgcgggtattaaggcctatcattctggtgaaggacatatgccctttagaactggaactggtggcattgcaacttgttacagtccacggacttcaactgaatcttttgctccacgggattcagtgggactggcaccccaggatagccaggccaggtaccattttaagtaatgggaccaacatgattatgagccccagagatgcctaccatggagccagaagggggttcttgatgacagtgtgagagtcacttttttgattgcccgtgaagcacatagttgatgaagaatcca

SEQ ID NO: 33659 - DNA, 491 bp, Homo sapiens
actactatagggcgaattggagctccaccgcggtggcggccgaggtacgcgggttttcttttcgccatcttttgtctttccgtggagctgtcgccatgaaggtcgagctgtgcagttttagcgggtacgcgggtgaagatcctcaccgagcgcggctacagcttcaccaccacggccgctctagaactagtggatcccccgggctgcaggaattcgatataaagcttatcgataccgtcgacctcgagggggggcccggtacccagcttttgttccctttagtgagggttaattgcgcgcttggcgtaatcatggtcatagctgtttcctgtgtgaaattgttatccgctcacaattccacacaacatacgagccgggagcataaagtgtaaagcctggggtgcctaatgagtgagctaactcacattaattgcgttgcgctcactgcccgctttccagtcgggaaacctgtcgtgccagctgcattaatg

SEQ ID NO: 33660 - DNA, 483 bp, Homo sapiens
ctactatagggcgaattggagctccaccgcggtggcggccgaggtacgcagggagccacacttcaggtgcccagtgtccacactgactagtggtgactgcgttggacagtgcagatacagaacatttctgtcatcacagaaagttcctttggacagagccatgttaagtgatgttatcacaagatggacagaaacattcctgtttgatttatttttcagaccccagtttgtggagaaaaataatgatgctttacatatgtctcttgaatccttaatatgtgaatccagagataagtttatacgggaattatttgaatcatccacaaataacaacaaagatactaaacaaaaagcaggaaaacttagcttcatcagcgtgggaaacaagtttaagacacagttaaatttgcttctggataaacttcgaagtacctgcccgggcggccgctctagaactagtggatcccccgggctgcaggaatt

SEQ ID NO: 33661 - DNA, 488 bp, Homo sapiens
ctactatagggcgaattggagctccaccgcggtggcggccgtggccgtggctcacgtggcccctaagtttccgggtcttcctcagtctggatggcatgttggcagcccagacgaaaaagccccgcgtacctgcccgggcggccgctctagaactagtggatcccccgggctgcaggaattcgatatcaagcttatcgataccgtcgacctcgagggggggcccggaacccagcttttgttccctttagtgagggttaattgcgcgcttggcgtaatcatggtcatagctgtttcctgtgtgaaattgttatccgctcacaattccacacaacatacgagccgggagcataaagtgtaaagcctggggtgcctaatgagtgagctaactcacattaattgcgttgcgctcactgcccgctttccagtcgggaaacctgtcgtgccagctgcattaatgaatcggccaacgcgcggggagaggcggtttg

SEQ ID NO: 33662 - DNA, 427 bp, Homo sapiens
ggagctccccgcggtggcggccgaggtacagggttggcgctctgttacccgattgctttccagctgtgtctggttcccattcatgctgcctccagcaacggataagtatacggcagcacctccttatttgagtgcaaatgtctggttgtaatagaggtagatgattcttggtgtggtgccgtggtcattgtccgtttgtgtcatggtaacatgttatccgacgtacggccgaggtactccttcagccgctgcacgttggcctgcagggactccgtggacttgttccgcctcctcggatccacagaaatgccgatggtccgggccaccttcttgtgaatgccggccaccctgagctcctccaggctgaagccgcggccgctctagaactagtggatcccccgggctgcaggaattcgatatcaagctt

SEQ ID NO: 33663 - DNA, 505 bp, Homo sapiens
tacgactcactatagggcgaattggagctccaccgcggtggcggccgaggtacttttttttttttttttttttgggtttgaactgagaccttaatgccaagaaacaacccccatagcaagacctgggcacagagggacctacaaaggcaacggcccagtgccagggactgagcttgggagctgaggaaataaaaagccagcccttccccagctgtccattgcttgatctcatgcttttttctctccacttgagccagcctgagatagctttcgccactagccctggagaaagcaaggttttctgtccacaccctctctctgcttgcacactctgggccttcttagcttgatcctctttcctgtccagcagctgagggtccatcgtagctgcaaacatttgtggacggccgctctagaactagtggatcccccgggctgcaggaattcgatatcaagcttatcgataccgtcaacctcgagggggggcccggttcccaacttttgt

SEQ ID NO: 33664 - DNA, 503 bp, Homo sapiens
tcactatagggcgaattggagctccaccgcggtggcggccgaggtactttttttttttttttttttttttcgttctttggtttttctctcctgtgttttttgtttggttggcagctcatggatgtccacacctcttccctgtaagtttgaaacgatataatgcccttctcatatcctgctcgtccatttcgatctttttgggataatgattctgtcttcccagcatccccaaatgagatcagcacactctcaaagatctcggccaagtcattaataaaaagccctgaacagaacaggccaaaggaggtcatcacaaagttgcagggagattcataccacagcagagcagcctgagccagccggagtccaggagagccagttggggtgacctgggagccagaaccaaggtcaggcatcagaggggctgggcacatggggaagatacaggctgcatccctggggactggggacaccaagttggagagacgtgattcagggtgcag

SEQ ID NO: 33665 - DNA, 210 bp, Homo sapiens
tccaccgcggtggcggccgcccgggcaggtactgggccaccacctctctcgcctgctgagtgccttgctttccatgacatttccccttcaagcaccaacacatttttctggtgatacccaaaaaacatattatcccagatttctggggcagaagatgatgatgaaagtcttctttgggacactttaatgaattggttggcaagaaaatgt

SEQ ID NO: 33666 - DNA, 174 bp, Homo sapiens
actcactatagggcgaattggagctccatcgcggtggcggccgaggtactgacagaagtctacataagggacagcaggggaacaaaaaaaggcacagtcaaaacatctttgactgcaatttggagaactttaaacaaggattatcctttctacaggcatactgaaattttcttt

SEQ ID NO: 33667 - DNA, 484 bp, Homo sapiens
actactatagggcgaattggagctccaccgcggtggcggccgcccgggcaggtactttttgtttatttttcttttttttatttccacattttgaatagcatcccacttttccctggtctgtagggatttgcctgagaaatctgttgatattcttatggaagttccattgtatgtgatgaattacttttttcttgttgttttcaaattctctccgtatttgacttctgaaagtttgataataatgtggcttggtgaagacttttttgtgtttggcgttctttgggctttattaatctgattgttcatttctctcccagatttgggaagttttctgtcattatttctttaatctttctgaccatctctttttctctgagaatactataatgtgcatacttatacacttgataccccgcgtacttttttttttttttttttatttttaggtcttcaactaaaacagcggaagaggtgatttattata

SEQ ID NO: 33668 - DNA, 498 bp, Homo sapiens
ctactatagggcgaattggagctccaccgcggtggcggccgaggtactgacatgcactgacatcagtccagaaccatgctctggttgtgcatggcattgcattccgtggtgctggatcatgctgtgattcctcacacgggctgtagggacagggactgtgattcttagctcatggtctccgaagaggaagggcaatccaagggtggtgcttcttgcctttcttctatcatccattagcagtgtgtgatgataacagaggctaacgattcataactttatagcccttatgccaaatttttacatctagcagagataaatattaagccactttaccaatgaatctaaacaataatgtatgttgacaattctgaagccatttctaattacatttcacgaatacttttaaaactagcttatttattaaaaatttacttaagtcacataaacttgaaaaagcatttggctcaaagtctgttttttttctgataaagtgtttga

SEQ ID NO: 33669 - DNA, 460 bp, Homo sapiens
cgtaatacactactataggccaaatggaacctccaccgcggtggcggccgaggtactaaatggtggtctaggaccacctggccggatagcaccggccatattttggaatggatgaggtctggcaccctgagcagtccaccgaggaactgggtcttatttgaagcaatttggctaggaggaatagtatgcagcacggttctgagtctgtgggatagctgccatgaagtaacctgaaggaggtgctggctggtaggggttgattacagggttgggaacagctcgtaccgcggccgctctagaactagtggatcccccgggctgcaggaattcgatatcaagcttatcgataccgtcgacctcgagggggggcccggtacccagcttttgttccctttagtgagggttaattgcgcgcttggcgtaatcatggtcatagctgtttcctgtgttgaaattgtta

SEQ ID NO: 33670 - DNA, 146 bp, Homo sapiens
ccaccgcggtggcggccgcccgggcaggtacgcgggatagtcagtttgttttgaggctagtaaaaagatatttttctaaatagatgggagttggcatataaacaaaatacgttttttaactaatgacagtccattgaattcggaaa

SEQ ID NO: 33671 - DNA, 484 bp, Homo sapiens
actactatagggcgaattggagctccaccgcggtggcggccgaggtactcattttccttgaagtgccaacatgatttatccaaatctgaggaagagaagaaactaaaaaaaggattattcaaattttagatttgtagggaaataatgttttcacttatctcatttggattcccaaaatgctagcttaaaccaagccaagcagtggcataagataatagacccaaaatcagtttatattccagcaggataatagatgagccacagctggatgttctccatttactcatccatgaacaaacatgcactgagtacagtgtggccgtggtgcccacgggcagcttctgcagaacatcctcatccttcagggacttgcccttggggtccaggcggagggactggcgggcggggtacctgcccgggcggccgctctagaactagtggatcccccgggctgcaggaattcgatatcaagcttatcgatacc

SEQ ID NO: 33672 - DNA, 237 bp, Homo sapiens
tatttataagttgagggcgcctatacgactcatatagggcgaattggagctccaccgcggtggcggccgcccgggcaggtaccagacccgacaggaccagtgcatctataacaccacctacctgaatgtccagcgggaaaatgggaccatctccagatacgtgggaggccaagagcatttcgctcacttgctgatcctcagggacaccaagacctacatgcttgcttttgacgtgaa

SEQ ID NO: 33673 - DNA, 465 bp, Homo sapiens
atacgactactatagggcgaattggagctccaccgcggtggcggccgcccgggcaggtactttttagcagagacatggtttcaccactgattcacttcttgccttagtctcagagatctcagacagaagctgtgaccttcttggctaaccatgatgacagtcgggccctctatgccatcccaggtgagtagttagcatttgaatggtgcccgtcaagaaggagtctggtgtgtctcagggagaggattctgatgtcctgtcatccactgggagggattatgatgctgagaggtatgatatcagggttatcccatactggaacaaggccagttaatgtttcttctcaaccccatctctctcctctcctgtgagtttcaccactgtcttttgcatctctgtgccaggcttggactatgttagccatgaagacatcctcccctacaccttcactgatcaggttcccat

SEQ ID NO: 33674 - DNA, 464 bp, Homo sapiens
gactactatagggcgaattggagctccaccgcggtggcggccgcccgggcaggacttgggacagttacaggcatgctgctattgccatgatcttcgggaagctgaagtgatgagcagcagtgtgtgattctgaggacacagagggctggggtctaggagctatctcaggtgggctcagtcagtgccatcctcccgtttggtgcctccctagaagtgctgagaagatgcaaaaccaaaagcttttactccaacattgcttagccaagctaagcacatgcattccctatgattcagcaattctgctcctagcatgtatcccagagaattgtcccatgggtccataggggcatataagaatggccattgcagcaaagttctggttggggtagggggagctgaaagtcatctggtgtccacaactggaggaatggatggataaaatgggatggatgcacaagtgggca

SEQ ID NO: 33675 - DNA, 409 bp, Homo sapiens
gggcgaattggagctccaccgcggtggcggccgaggtacgcgggtgggagatacctccccagtgtccccaggcagtctaatgatagagacaccttgacgaccacaggcattattatgagagacacactttgccaaacccaggcagtctaatgctagagacaattgggcgacaagcattctagcgggaaaaattcccggctgaccccaagcattgtaataaaagaaaagcctgagtgatcccagccattttcatgggagagacttttgttcgaccccaggcatttcttatgggagggactactggccaacaccagacagtctaataaaaaagacatgtagatgaccccatgcattcttttttttttcacactttaaatactttatttatataaaaactaatttgtttttt

SEQ ID NO: 33676 - DNA, 606 bp, Homo sapiens
  misc_feature 60: n = A,T,C or G
gtatacgactcactatagggcgaattggagctccaccgcggtggcggccgaggtactttntttttttttttttttttttttaacttgtttcactttgacccagactatttttcagaacataaagtcatcaacattcatattacagcaatgctttttcttttctgcccaattagcaccaatataaatcgtttattccatctaaggccctgtattacttcagggaatataaatctaagtcccggccaggtgcagtggcttacgcctgtaatcccagcaccgtgggaggctgaggctgaaggatcacaaggtcaggcgtttgagaccatcctgaccaacgtggtgaaaccccatctctactgggaatacaaaaattagtcgggtgtggtgtcacacgcctgtagtcacagctgctcgggaggctgaggcaggagaatcacttgaatccgggaggcggaggttgcagggatccgagatcgcctcactgcactccagcctgggcaagagaccgagactccctcaactcaaaattaaaatgtaaccgtcttaaaacacgaacattgctcctgaatgccacatgcatgaaaaaccgggtatgcactggattgg

SEQ ID NO: 33677 - DNA, 554 bp, Homo sapiens
ctactatagggcgaattggagctccaccgcggtggcggccgcccgggcaggtacaatttgtagttgtttccaggtttggctaataatcattccttaacctagaattcagatgatcctggaattaaggcaggtcagaggactgtaatgatagaattaaattagtgtcactaaaaactgtcccaaagtgctgcttcctaataggaattcattaacctaaaacaagatgttactattatatcgatagactatgaatgctatttctagaaaaagtctagtgccaaatttgtcttattaaataaaaacaatgtaggagcagcttttcttctagtttgatgtcatttaagaattactaacacagtggcagtgttagatgaagatgctgtctacaaggtagataatatactgtttgatactcaaaacatttttcattttgtttaaagtagaagttacataattctatattttaagtcttgggtaaaaaagtagttttacattttataaagtaaagatgtaaatgattcatgtttaaagctctaattgacttcctttttttg

SEQ ID NO: 33678 - DNA, 699 bp, Homo sapiens
acgactcactatagggcgaattggagctccaccgcggtggcggccgaggtacttcgaagtttatccagaagcaaatttaactgtgtcttaaacttgtttcccacgctgatgaagctaagttttcctgctttttgtttagtatctttgttgttatttgtggatgattcaaataattcccgtataaacttatctctggattcacatattaaggattcaagagacatatgtaaagcatcattatttttctccacaaactgggtctgaaaaataaatcaaacaggaatgtttctgtccatcttgtgataacatcacttaacatggctctgtccaaaggaactttctgtgatgacagaaatgttctgtatctgcactgtccaacgcagtcaccactagtcagtgtccccgcgtacctgcccgggcggccgctctagaactagtggatcccccgggctgcaggaattcgatatcaagcttatcgataccgtcgacctcgagggggggcccggtacccagcttttgttccctttagtgagggttaattgcgcgcttggcgtaatcatggtcatagctgtttcctgtgtgaaattgttatccgctcacaattccacacaacatacgagccgggagcataaagtgtaaagcctggggtgccctaatgagtgagctaactcacattaattgcgttgcgctcactgcccg

SEQ ID NO: 33679 - DNA, 359 bp, Homo sapiens
acgactactatagggcgaattggagctccaccgcggtggcggccgccgggcaggtactgcaaaaatcacccttggcaaaaacaatgttttgacctgcccgaagggattaatacggttcactgctcaatttttttccaaggggtccatggccattcaactcaacaatcaaaccaaagccaaagacatattggcaaaatttcaatatgaaaacagaatactgcactggcagcgagctgcactttccttcctaaatggaaaatgggttaaaaaagaaagagaagagtcgacagaaaccaacaggagccccaaacatgtattcctcttcactattggcctggacatctccacataggcagtca

SEQ ID NO: 33680 - DNA, 377 bp, Homo sapiens
ttggagctcaccgcggtggcggccgtgcagacctcctgtgtgccctgttcttcttgttatctttccttggctactgtaaagcatttagagaaagtaacaaggagggagcgcattcttccaccttctgggtgctgctgagtatctttctgggagcagtggccatgctgtgcaaagagcaagggatcactgtgctgggtttaaatgcggtatttgacatcttagtgataggcaaattcaatgttctggaaattgtccagaaggtacctcggccgctctagaactagtggatcccccgggctgcaggaattcgatatcaagcttatcgataccgtcgacctcgagggggggcccggtacccagcttttgttccctttagt

SEQ ID NO: 33681 - DNA, 397 bp, Homo sapiens
gactcactatagggcgaattggagctccaccgcggtggcggccgaggtactaggttggcacacaatgggatctgggcttccagcagaggtaggaggctcaggactgtaagaacccaggacagcgccatactgagaccaggaggcacgtggagccaggcagtgctccccgcgtactactcgattgtcaacgtcaaggagtcgcaggtcgcctggttctaggaataatgggggaagtatgtaggagttgaagattagtccgccgtagtcggtgtacctgcccgggcggccgctctagaactagtggatcccccgggctgcaggaattcgatatcaagcttatcgataccgtcgacctcgagggggggcccggtacccagcttttgttccctttagtgag

SEQ ID NO: 33682 - DNA, 365 bp, Homo sapiens
gcgcgttatacgactcacttagggcgaattggagctccaccgcggtggcggccgaggtacgcgggaacaggagcccactgagaggcccctgaaagggatccagagtcgcctgcggaagaagcgccgggaggagggtcccgccgagactgtgggctccgaggccagtgacactgtggagggcgtcctgcccagtaagcaggagcccgagaacgatcagggggttgtgtcccaggctgggaaagatgacagagagagtaagttggagggaaaggcggctcaggacatcaaagatgaggagcctggagacttgggccgaccgaagcctgaatgtgagggttacgaccccaacgccctgttttgcattt

SEQ ID NO: 33683 - DNA, 392 bp, Homo sapiens
ctactatagggcgaattggagctccacgcggtggcggccgtgcagacctcctgtgtgccctgttcttcttgttatctttccttggctactgtaaagcatttagagaaagtaacaaggagggagcgcattcttccaccttctgggtgctgctgagtatctttctgggagcagtggccatgctgtgcaaagagcaagggatcactgtgctgggtttaaatgcggtatttgacatcttagtgataggcaaattcaatgttctggaaattgtccagaaggtacctcggccgctctagaactagtggatcccccgggctgcaggaattcgatatcaagcttatcgataccgtcgacctcgagggggggcccggtacccagcttttgttccctttagt

SEQ ID NO: 33684 - DNA, 378 bp, Homo sapiens
ttggagctccaccgcggtggcggccgcccgggcaggtaccgccacgttcacgcggtccgcaggtttgcccaggatggaggcagcggcggcgcagagtcgtttctccagccccgcggggactcggttggcgggcaaattcgtgtccagctccaggaacggcatggcgggcagaggaacggaaacagctctccccgcgtacagctgatttgccatttcagagtgaaaaggctgcactgtctcaccctgcccccaaagtctaacctatcctattttaactggtattggtaaaaactatttttgcaattccttgccgaaaggaatcaaacggatccctttaacatgtacctcggccgctctagaactagtggatcccccggg

SEQ ID NO: 33685 - DNA, 386 bp, Homo sapiens
gactcactatagggcgaattggagctccaccgcggtggcggccgaggtacaggtggtagatgaagaaggggaccaacaacatcaagaaggaaaaagacttcggagggtagcttgcacctgtcccaactgtaaagaaggtggtggaagaggtactgccttctgtgactgggtggcacctccagggcacatttacacaaggccctgaatctgcagaggctgtttctcaagatgcccgtcatggtgtggcctgggccagctctggcttccacaggtccctgactgtcctcagagtggaacatgctcaacctcccgcccactgctctctctctgcccagatttcaggggtgccgttccccaaggcctgcccccttctttaagactgaact

SEQ ID NO: 33686 - DNA, 394 bp, Homo sapiens
gactcactatagggcgaattggagctccaccgcggtggcggccgaggtacgcggggggcgccattttgtagagaaacaagcggagttaaccgaagagggggtcgaggagagccggagtcggggacccaggagtttcctgtgtccagcgctgctggagccgcctgaggtgccatgtttcagaacagagtaagacccctggtaaagaagaactgaagatattatacagataccagatatagcctaattacaaagaaagcattaacctgcctctgaggtgactaaaggggaataatggtgattttgcgccgggctcggccgctctagaactagtggatcccccgggctgcaggaattcgatatcaagcttatcgataccgtcgacctcgaggggggg

SEQ ID NO: 33687 - DNA, 388 bp, Homo sapiens
agggcgaattggagctccacgcggtggcggccgcccgggcaggtacgcgggcaccggtgaaggcaggtgcggtaactgccgcactggaccctaggaagccccaggtattcgcaatctgacctcctcctgtctgtttcccttcacggatcaattctcacttaagaggccaataaacaacccaacatgaaaaggtgacaagcctgggtttctcccaggataggtgaaagggttaaaatgagtaaagcagttgagcaaacaccaacccgagcttcgggcgcagaattcttcaccttctcttcccctttccatctcctttccccgcggaaacaacgcttcccttctggtgtgtctgttgatctgtgttttcatttacatctctcttagactc

SEQ ID NO: 33688 - DNA, 615 bp, Homo sapiens
  misc_feature 171, 468: n = A,T,C or G
tacgactcactatagggcgaattggagctccaccgcggtggcggccgcccgggcaggtacgcgggggctgatgccattttcagcctcagcacgcctgcacccaggcgctcattaaaacagcatgttgctccccactgcctcgtgttgtctgttggcgcgctgtcggggttnaaccgatacaagaaccttccacctacctggtgctttggcctcatctataagcagcttttccactgtcctgaaacaagatagagaatctgagcggccagtcatctgccctaagtgctgccgccgaagactgaatgtcctggaaagtttgctgtcacatctccattatgacaaaagcattgtgccgaacagatgaaaaaatgcattgtcaacggaatcttttatgtttgtttgtcttcctttaagcaacattgccttacttgttataaaagataaataaatatttgttcatttcaaaanaaacaaacgcacaaagaggtacctcggccgctctagaactagtggatcccccgggctgcaggaattcgatatcaagcttatcgataccgtcgacctcgagggggggcccggtacccagcttttgttccctttagtgagggttaattg

SEQ ID NO: 33689 - DNA, 394 bp, Homo sapiens
gactcactatagggcgaattggagctccaccgcggtggcggccgcccgggcaggtacttggacggataaataaaagcctgagtaatattttctaaattcttaaaagtaagaaagagggtctaagaaagtaaactcagagccagggacttggcccatgttaaaccccaagcactacagctggcttttactcaacccgtggaaactgaccagggtatagagcctgatatatcttcttaggtgaaggtgagacaccagacctaaatctgtcatctcaagagtagaaggatgaaccacacatacaaacccatcacagatgaatgcaaataaaaaagtcagctccgaagttgggttctgagcagtgtagattctactgctaaggcttggactacaagcc

SEQ ID NO: 33690 - DNA, 394 bp, Homo sapiens; identical to SEQ ID NO: 33686

SEQ ID NO: 33691 - DNA, 369 bp, Homo sapiens
ttggagctccaccgcggtggcggccgcccgggcaggtactttttttttttttttttttttttttttggagtagaatattgattgtcctatatcccattttcttgaagagattctggcttctaatatatgttcctaaaaaaaaatttatcgtctagtagtgatgtcttcatgtttcacccagctgtctcataggcatgactaagcatctatttcatcacctggctctggatgcctcctctctttaccattggtgaaaggcatttgctgattccttttgatatacctgaagtattgatgctagagaaatcacttccaatataacagcatcgtttgcagattttcacttctgtgctgcctcaagattatggt

SEQ ID NO: 33692 - DNA, 406 bp, Homo sapiens
cgcgtatacgactcactatagggcgaattggagctccaccgcggtggcggccgaggtacaagccgtccactgcaggaatgacgtgctgtaaaagggatgcagtgtcaagtgtagtcatggatgggtgggaagaccagacaaaggcatccaatgggactgacttacctaaacaaaccagaaggaagtcagaacagtgggaagatctgatagataagcagtattctgcaggcagatgaaggagcaagctttgggcccccaaatcttcaccagtgcatccacattacagaggataatgcctgagggaggggaagatcatctcaggattctggaacactgggccctccctttcttattccaaaaggctggagcagttctgcatgtaggcttctctggaaatggtctagga

SEQ ID NO: 33693 - DNA, 413 bp, Homo sapiens
  misc_feature 374: n = A,T,C or G
cgcgtatacgactcactatagggcgaattggagctccaccgcggtggcggccgaggtaccgggaaccaaactctcattccccaggggcctaagccccccgtggccaggcccttctcaagtcagggttcctgcacattcacagttacgggtggccctgggagtaacacctggcacccaaacaggtcaccagagtccacacatagtccacctgccctccctgcgtaagatcagctcttcctcctcccgacgaatagatcagggtcaatgatccctgccaagatggcgactgctccagcctgctggtccaacctgtccagccacagctgttgctcgaaggcttgaagttcaatgggaccctctcccgctttctacanactggttcctttatttttatgtttatttatttgggacgg

SEQ ID NO: 33694 - DNA, 390 bp, Homo sapiens
agggcgaattggagctccacgcggtggcggccgcccgggcaggtaccctttatagaagaagaacagagaaacttttccatgtctgtaaatagcgctgctgtcctgcgattgacaggacgaggaggaggaggaacagtggtgggggctcctagaggtcgaagttcttcaagagggcgaggcagaggcagaggtgaatgtggtttctaccaaagaagttttgatgaagtagagggtgtttttggtcgaggaggtggcagagaaatgcatagatcgcagagcaagagagaagagaggcagaaatgagggcaaaacgggaagaggaagagcgaaagaggcaggaagaactccgaagacaacaggaggaaattcttcggcgacagcaggaagaag

SEQ ID NO: 33695 - DNA, 357 bp, Homo sapiens
ggcgaattggagctccaccgcggtggcggccgaggtacctgaaggttttgtctcttaattttctttgaaccacacctcttctccttattataagaaaaaccctcttagggtaagggaagcccaaattaactgtcctgaaattttgcattatatttaaaccataatatttgatttacttctgtcaaacaaaacactaccatttgggttctcatttgtagattatttaaaaacatgtttttcctgttaattatcaatgcatttactatcacaaggataaaaaagatcacttcaggtggtggggatgtttcatgaaacaccatggtggggagtaggtagtgggcaggcagagtgacaatc

SEQ ID NO: 33696 - DNA, 401 bp, Homo sapiens
gactcactatagggcgaattggagctccaccgcggtggcggccgaggtactccattctccagcattttctacatctggcaagctcgaaagtgaaaccctagtgggccatcatgcaggttttgagttatttactgttacagatgaggaaactgcgaagctacatggccacagtcaacaacgacaacagaaggcaacatagtatggcggttaagagcaccgactctgaagccagcctgaatcctagagccagagctgtgcaacagcaggtaaatgacttatcctgtgcagtttcctccttaatggaaatagtgcccaggccacaatatcgcgagatttacacgtaaagctggaaacaactcccgtcctagagtaagcactgtttactattaagcagcatcaga

SEQ ID NO: 33697 - DNA, 384 bp, Homo sapiens
ttggagctccccgcggtggcggccgtggtggtgaagctgtagccgcgctcggtaaggatcttcacccgcgtacccgctaaaactgcacagctcgaccttcatggcgacagctccacggaaagacaaaagatggcgaaaagaaaacccgcgtacctcggccgctctagaactagtggatcccccgggctgcaggaattcgatatcaagcttatcgataccgtcgacctcgagggggggcccggtacccagcttttgttccctttagtgagggttaatggcgcgcttggcgtaatcatggtcatagctgtttcctgtgtgaaattgttatccgctcacaattccacacaacatacgagcccgggagcataaagtgtaaagcctggg

SEQ ID NO: 33698 - DNA, 394 bp, Homo sapiens
actatagggcgaattggagctccacgcggtggcggccgaggtactccctagttgtgtctgaattggacgcaccagcacttgagcacacacaaatgcacgtgaacagacggaacatgttatgggcctgttagccaaggaatgacagaattaatccatgggcatttgcggccagtgttgtgttaaactaaagggaaaaagtgaactggaaaaagcaatgtttgttttatgaaaatctcagacccaatccttaggtgacagttctggaaatgaggggtgtctaaaacaaagggcatctgaaacttcggtttttcagcttcctttccttgtctcatgacctctttcctacccgctgcctctgttttctctaatatggaacagtgaaaatgggggccag

SEQ ID NO: 33699 - DNA, 398 bp, Homo sapiens
cgcgtaatacgactcactatagggcgaattggagctccaccgcggtggcggccgcccgggcaggtacttttttttttttttttttttttttttgcatgataagtttccaaggaaccttagtgatggggactgtctcttttaaaattaaattgtgtaaataactcccagagccatgctggtaagaaacaaaacaaaacaaaaagaactagaaacttgaaacaaacgtaggatttctgctggtaaaaggatgcaaagcaggcctgcctgctgcacttccccagagctaatccttgagccaaaagagcttcctggtgaagcctcgcactctccgtaacagggtgtggggggaccgagacatgtgggctccagacttgaccatctttacctagttatgggat

SEQ ID NO: 33700 - DNA, 399 bp, Homo sapiens
gactcactatagggcgaattggagctccaccgcggtggcggccgaggtacccaccagatgtgtctgtcacttccctacatccacctctattgtggttctcatgtttctgcctccctagagaccatttctctgtagagcagcgctttcgaatagaaatacaatgccagacacataagttgttttagattttctagtagtcactttagaaaagttaaaaagaaacaggtgaaattaatgttttatttcacctaaaatgttagcattatccaaaatatcacttcaacatcttatcaaaataaaattattaatgagattggttaccgttccgataaataggtgaactgagagcatacacagtagtattctgttctaatttctgcttcactatgagtgtcttga

SEQ ID NO: 33701 - DNA, 398 bp, Homo sapiens; identical to SEQ ID NO: 33699

SEQ ID NO: 33702 - DNA, 392 bp, Homo sapiens
gactcactatagggcgaattggagctccaccgcggtggcggccgaggtacaatcagagcctctggaaatttgattcaggcaagtcgggggagtctccggtattcttctctgagaactctgttttcattatacagctggacaatggaatctatgatttgcctgtagaggttagaggtgcatcctttagaaaaatacatattgccagaagcaggctgacttgggcctctcctaccattttcttcatcaaagctgctgtgatgacgttctagcttttctcacaggcagttgttgatgaaaagggtctccttcaggtgctgccactggctctggatctcatctttggctatttccatagccaaggggccttcctgtgcatcaaagaggaaggcata

SEQ ID NO: 33703 - DNA, 88 bp, Homo sapiens
actatagggcgaattggagctccaccgcggtggcggccgataacttgcgtctgatccaggtgccgaaagggtccggttgagggtatat

SEQ ID NO: 33704 - DNA, 355 bp, Homo sapiens
gcgaattggagctccaccgcggtggcggccgtggcgggggtcacaggcagccatcatgttcttggcatcgaggacctgctgggtgagttccggcactgtggagagtctcgatactggctggcttccacggctggtgagaggggcaaagccaggcataaagaaatggagacgtggggaagggggaccattgttgaactggccaactttggcgggagggtccagcatttggagccgggcccggggaaaacggaggcaggtggtgacaccactcatggtggctgagacaaggtggtttcagatccccgtaagttggttgtggttcagccttcagagttgcgggaaggcagataatcat

SEQ ID NO: 33705 - DNA, 303 bp, Homo sapiens
ggagctccaccgcggtggcggccgaggtaccccgccatggaaccaaacaccacgtcaactggaactcttcttgcaaacgaaggctgaagatcaagaatgacattctcacaccacagcacagcttaaatacttctttgacaaaaataataataaattatattgtgactgcaggaaaataaaattcttgttcaagcaggagtggccaggaaggggtccaattcatttggcattggccacgaggggctctacggaggggctgaggaatggggtgcaggaatgccacagtggacaaggggacatggg

SEQ ID NO: 33706 - DNA, 324 bp, Homo sapiens
actatagggcgaattggagctccaccgcggtggcggccgagctggtttcctgcccagcctggggcaaacctagccggaaggccgaggtcccattgttggcgctgaggtgtctggcctgaggtcaatggtgcaaaggagccgccaccgggcatgtctgcctggagtgctgtgctgtgtttaatcaggggaatacaggggcccctggggtttcttttttttcttttctttccttttctttccttggccaagagaagggcttacaggcatggacatgcaggtttggcaaacgggcttggactttggctgattttaaaaagttgagaa

SEQ ID NO: 33707 - DNA, 308 bp, Homo sapiens
tcactactatagggcgaattggagctccaccgcggtggcggccgcccgggcaggtacgcggggaagtgaggcagcggaggacgacctttttccggttccggcctggcgagagtttgtgcggcgacatgaaactgcttacccacaatctgctgagctcgcatgtgcggggggtggggttcccgtggctttccccctggcgccttgcagggccacccgaggttccggtatcttggccctgtggggaattcaaccccaacttcgtggcgcgtttgatacctaaagtggagtgggtcgggcgttcctggagg

SEQ ID NO: 33708 - DNA, 346 bp, Homo sapiens
  misc_feature 208: n = A,T,C or G
ctcactatagggcgaattggagctccaccgcggtggcggccgagctggtttcctgcccagcctggggcaaacctagccggaaggccgaggtcccattgttggcgctgaggtgtctggcctgaggtcaatggtgcaaaggagccgccaccgggcatgtctgcctggagtgctgtgctgtgtttaatcagggggatacagggcccctggngttttctttttttcttttctttccctttcttccttggccaagagaagggcttacaggcatggacctgcaggttggcaaacggggcttgactttggctgatttaaaaagtggagaaagaaagtaaaaaaggtttaattt

SEQ ID NO: 33709 - DNA, 310 bp, Homo sapiens
  misc_feature 165: n = A,T,C or G
aattggagctccaccgcggtggcggccgtccacaaatgtctgcagctacgatggaccctcagctgctggacaggaaagaggatcaagctaagaaggcccagagtgtgcaagcagagagagggtgtggacagaaaaccttgccttctccagggctagtggcgaaangctattctcaggctgggctcaaggtgggagagaaaaaaaggcattgagaatcaaagccaatgggaccagctggggaagggctggcttttaatttactcagatcccaagcttagttccctggcactgggcccgttggcctttgtag

SEQ ID NO: 33710 - DNA, 161 bp, Homo sapiens
tatagggcgaattggagctccaccgcggtggcggccgggtacgcggggcttttcacaagatggcgccgaaagcgaagaaggaagtctcctgtcccctgcctaaaggctgaagtccataaggcgatagggctttaaaggtccaaagaagcgcagttgttgaa

SEQ ID NO: 33711 - DNA, 312 bp, Homo sapiens
actatagggcgaattggagctccaccgcggtggcggccgaggtacagctggttggacctattcatgcatcttcaccagcagctggagcatctccacccttggtatttctggtgtaaattacttgagctctgtgctttgaaaccagtttgataagtcctttactaaggagctcctgaaggggcttgccctggcccaggggaggccctcgaattctttcaagtctctcaagagaaccaacaagtttggggttataagtttatagtttgggaacttttcttacagagttttatcataggtagctttttgtcaaac

SEQ ID NO: 33712 - DNA, 183 bp, Homo sapiens
gcgaattggagctccaccgcggtggcggccgaggtacgcgggctcctacttggataactgtggtaattctagagctaatacatgccgacgggcgctgacccccttcgcgggggggatgcgtgcatttatcagatcaaaaccaacccggtcagcccctctccggccccggccgctctagaacta

SEQ ID NO: 33713 - DNA, 415 bp, Homo sapiens
ctatagggcgaattggagctccaccgcggtggcggccgcccgggcaggtacataaagtgccatgtcaggccttctggctctaactctgcatctctctgattcttgctgcatggcaccaccacaatcatgtaagtaacatttattttcttagtaataaaactctacaacatgccgatagactgttctctgaaggcaaactgtgttaaaggtttccttttctggacaagcaagcccttacctgtaatcccagcactttgggaagccgaggcaggcagaccacttgagctcaggatttcgacaccagcctggacaacatggcaaaactccgtctcggcgcgctgttgctctccgcttccgccgtctccgcgaaagctcttatctctcccccgcgtaccctcgggccgctctagaacta

SEQ ID NO: 33714 - DNA, 166 bp, Homo sapiens
tcactatagggcgaattggagctccaccgcggtggcggccgaggtacgcgggaaccgctggatccgagaaattcaaaaagtgtaccaagactgggatgcgtagatgccgtgtcatgcacggaatctggcctctcacagggaaattagtttttttggctaaatcttg

SEQ ID NO: 33715 - DNA, 185 bp, Homo sapiens
  misc_feature 172: n = A,T,C or G
tactatagggcgaattggagctccaccgcggtggcggccgaggtacaggtctttgcggatgtccacgtcacacttcatgatggagttgaaggtggtctcgtggatgccgcaagattccatacccaggaaggaaggctggaacagcgcctccggacaccggaaccgctcattngccaatgggtgat

SEQ ID NO: 33716 - DNA, 194 bp, Homo sapiens
ctcactatagggcgaattggagctccaccgcggtggcggccgaggtacgcgggatttgatgtagttttcttttttaaattaatcagaaaccccacttccattgtattgtctgacacatgctctcaatatataataaatgggaaatgtcgattttcaataatagacttatatgcaggcttgtcgtttccggttta

SEQ ID NO: 33717 - DNA, 465 bp, Homo sapiens
ctactatagggcgaattggagctccaccgcggtggcggccgcccgggccggtaccgcgggagctcgggctcctgagggcgacggtcctctgatggcagatgcgggagaaactctggcgtcaggcggccctcgcgtggagcacacgaagtcgtggcttattctggcttcagtatgtggggtggagaaggcgatccacgcagctgcgtctatttcctgtggatcaatcgcaaaatacgttctgtaagccccgcccccactgcgtgcgggcggcttttgtctccatggcaaccgtcaactctggaaacgcctgtctttctccatggcaactgtctacgccgcaggctggagctgcccattaccggagcccatatggcaatgacccttggccagtctctgggaactaaactcctgggatgtttacacaggtgctgggtaagatgttcttccatatgctcaagaccacgg

SEQ ID NO: 33718 - DNA, 461 bp, Homo sapiens
ctactatagggcgaattggagctccaccgcggtggcggccgaggtacaaaaaattctacatgctgtggccatagctggcgagccactaggaccttgcacttttcctattaccttaaggcctgatccaaataatccacagcagtttattcatgaacacactccagtaaaatttaaattattgaaagaattaaaagctagtgtggttaataatggaatacagagcccatttactttaggattgttagaatctgtattcagcactatgcgcctcccacccttggatataaagcatttagcttgcacttgtttctctgctagtgcatatttgacatggaatttaaattggcaagaaatgtgtgcagaccaggctagacagaatctcaccgctggacatgggaacattacagaggaaatgctattgggtagtgactcttattcagatctggtgcaacaattgacac

SEQ ID NO: 33719 - DNA, 194 bp, Homo sapiens
actatagggcgaattggagctccaccgcggtggcggccgaggtactgtgctgagaaatgggccccttgccagatgctcccctctccttcctctctgcgaggcagaagtcagaaggtagagattgctggcaaaactgtgaagtcccaccctggggtctcaaccccaactccactggagggcaggccttccctgac

SEQ ID NO: 33720 - DNA, 186 bp, Homo sapiens
actactatagggcgaattggagctccaccgcggtggcggccgcataggcaagcaccggaagtaccccggcggccgcggtaatgctggtggtctgcatcaccaccggatcaactgtcgacaaatgaccacccaggctactttgggaaagttggtatgaagcattaccacttaaagagggaaccagag

SEQ ID NO: 33721 - DNA, 461 bp, Homo sapiens
cgactactatagggcgaattggagctccaccgcggtggcggccgcccgggcaggtactggtggccgtgggacccacgaccgagacccgagtgagaaaccaccccggctccagtggtttgaacagcaggcgaagaagttggcaaagcagcaggaggaggacagcgaggaggaggaagaggacctggatggagacgattgggaagatattgattctgatgaagaattggaatgtgaggatactgaagcaatggacgatgtggtggagcaggatgcagaggaggaagaggctgaggaaggcccaccccttggtgccatccctatcacggactgcttattttgttcccatcattccagctcgctgatgaagaatgtggctcacatgaccaaagaccacagtttctttattcctgatatagaatatctttcagatattaagggactgattaaatacttgggagaga

SEQ ID NO: 33722 - DNA, 336 bp, Homo sapiens
  misc_feature 174, 327, 328, 329: n = A,T,C or G
gcgaattggagctccaccgcggtggcggccggctgtggtggctcacgcctgtaatcccagcactttgggaggctgaggcaggtagatcacctgaggtcaggagttcgagaccagcctggccaacatggtgaaaccctgtctctactaaaaatataaaaattagccaggtgtggntgggcggtatgcccctgtaattccccagctactttgggagacctgaagggaggaacaaatcaactttaacccaggaggcagaggctgcagtgagccaagattgtaccattgcactccagcttgggcaatgggagcaagacttccattcttaannnaaaaaaa

SEQ ID NO: 33723 - DNA, 382 bp, Homo sapiens
actactatagggcgaattggagctccaccgcggtggcggccgaggtacttcctgcacacaggccacctgaccattgcaggctgcaaaatgtcaaagtcactaaaaaacttcatcaccattaaagatgccttgaaaaagcactcagcacggcagttgcggctggccttcctcatgcactcgtggtaaggacacccctgggactacttccagcaaacacccatggaagttcagggcctttaattatgagaaggtcttgaatgagttttttttaaatgtgaaagatatcctgttgcgctcctgttgacattcactgggtcagttttggagaagttgggggagaaaaaggaagcacgaacctggaataaggaactttttatggaca

SEQ ID NO: 33724 - DNA, 391 bp, Homo sapiens
  misc_feature 296: n = A,T,C or G
ctatagggcgaattggagctccaccgcggtggcggccaggtacaggggcccccaagactcgtatttgtgactggtctccaagggctgtggctgcatgctgctcggggattcctttgcagttcctgaggaggatatcttctcccacaccggtttctgttcgtttggaggagttgagacctggtgttcctggcctcatccagtttcccggttccaagatctttcgagggataagtgacagccctttttcagcgctcttcgggcaatgcttctgcacccaggcctggagcttcctgggngcaggtatggttcaggaactgcttccagcacccagttagctcccaggatctggctccttggtgtgggaatctcgggcccttcaggccacttcaca

SEQ ID NO: 33725 - DNA, 347 bp, Homo sapiens
ctatagggcgaattggagctccaccgcggtggcggccgaggtgcagacattgagatatatatggaagaggagatccatgtggtcttgtgtaaagggacaagtacagaaccagtaacagaaatccggcatgccaaggacgtgaggcctcccagcaatgccgaacccaatgccacaagtgtgcctgtccaccaaaactggggggcttttaccaagaacctggcccatggtccttcatgttggctgcctacagttctgagcagaaacaagtgggctcctaacttttgtgcatataattaaacgtccccagccactatgaacacaaatacagagggagagattgttcagtt

SEQ ID NO: 33726 - DNA, 467 bp, Homo sapiens
ctactatagggcgaattggagctccaccgcggtggcggccgaggtacgcgggggaactttgccaggtaaggaggcagagggatgatgcttggcagaaagagtatctaacaagcttgcatgtttgacagaagcagcagccatgaagaatgaaagttttaaaacacaaggagcaagttcaaaagtctcgctctatcaccagtctggagtccagtggcatgatctcagattactgcagccttcacctcccaggttcaagcaattctcctgcctcagcctcccgaggagctgggacaacaggcacatgcgaccatgcccagaaacagcagctatgaagcctgcaaatttgaaaaaaagaaaagaacgtgcaaaagaacacaacctaaaagtggcttcagaggaaaagcaagaaaggctccaaagaagtgaaaataaacagccacaggattctcaaagttacggaaaaaaga

SEQ ID NO: 33727 - DNA, 89 bp, Homo sapiens
ctatagggcgaattggagctccaccgcggtggcggccgaggtacagctctaggcggagttggggctcttcggatcgcttagatgtctcc

SEQ ID NO: 33728 - DNA, 389 bp, Homo sapiens
ctatagggcgaattggagctccaccgcggtggcggccgaggtacaaatggaataagtgacaaactctaatttgtagaaacattttaggccatgtataagttacactgattttagcactaagctatatttttatcacagatgggtcaccttaaaagaaaactaaggagatggaatgaatctgaaatctttctaaatacaaggtagttaacaccatactcaagcagaaaattataatcctgtatttagagatacttttttttgagacagagtctcactttatcactcaggctggagcgcagaccgtctcaaaaaaacaacaaaacaaaaacaatcatagacagcactgtatttcagtaggaaatatgcaaggaggaggtagaaacaactgt

SEQ ID NO: 33729 - DNA, 375 bp, Homo sapiens
tcactactatagggcgaattggagctccaccgcggtggcggccgaggtacaggcgctttgagaaggagaagctcaagtcccagtggaacaatgataatccccttttcaagagcgccaccacgacggtcatgaaccccaagtttgctgagagttaggagcacttggtgaagacaaggccgtcaggacccaccatgtctgccccatcacgcggctcgttctagaactagtgggatcccccgggctgcaggaattcgatatcaagcttatcgataccgtcgaccttgaggggggggcccggtacccagcttttgttccctttagtgagggtttaattgcgcgcttgggcgtaatcatggtcattagctgttttcctgt

SEQ ID NO: 33730 - DNA, 345 bp, Homo sapiens
cactatagggcgaattggagctccaccgcggtggcggccgaggtacataggtttatctcctattggaatattttctttatataggcgttttttttttttcttttttttgggagacagtagtcttgtctctgttgcccaggctggagtgcagtggcgcgactggagctcactgcaaccttccactttcccgggtttcaagttgatttgtccccaccttcaagcctcctggaattagctggggatttattagggtggcatgcttccatacctgtctctactaaaaatacaaaaatttgtttaagcttctgttttttcataaataggaaattagaaaagggtgaaaat

SEQ ID NO: 33731 - DNA, 350 bp, Homo sapiens
actactatagggcgaattggagctccaccgcggtggcggccgcacacacagccaggcgctaggctccctgcgggacctcgggaagggggaagagcgtcaacaatttacggagggtccagtccgctgggtcagattgagacaaaccattgtgtggttgggttcgggtcagcaggctggagagggttctgttctttttgatcattatcgtttgggggccccaaggggaagggttttgggagccacccgggccccaaagctgggaaatccctcagagctgctcatgtcagggagccttcttactggtgctggcggtccagggttacctcggccgcttctagaactagtggatc

SEQ ID NO: 33732 - DNA, 76 bp, Homo sapiens
ctatagggcgaattggagctccaccgcggtggcggccgaggtaccgcaagggaaagatgaaaaattatagtccaag

SEQ ID NO: 33733 - DNA, 197 bp, Homo sapiens
gactactatagggcgaattggagctccaccgcggtggcggccgaggtacgcgggggtgaacacctgggcagcttctatgctccccgggtctggtggatgttccgtgtgtttggccaccgcaccgtatcagtgctcaatggtggcttccggaactggctgaaggagggccacccggtgacattccgagccctcacgcc

SEQ ID NO: 33734 - DNA, 107 bp, Homo sapiens
gcatcactactatagggcgaattggagctccaccgcggtggcggccgagcgggaaatcgtgcgcgacatcaaggagaagctgtgctacgtgcgccctgggacttcga

SEQ ID NO: 33735 - DNA, 371 bp, Homo sapiens
ctcactatagggcgaattggagctccaccgcggtggcggccgaggtacccctccaagccggacaacccgggcgaggacgcaccagcggaggacatggccagatactactcagcgctgcgacactacatcaacctcatcaccaggcagagatatggaaaacgatctagcccagagacactgatttcagacctcttgatgagagaaagcccagaaaatgtttcccagaaactcgggcttggaagaccctgcaatgtggtgatgggaaatgagacttgctctctggccttttcctattttcagcccatatttcatcgtgtaaaacgagaatccacccatcctaccaatgcatgcagccactgtgctgaattctg

SEQ ID NO: 33736 - DNA, 355 bp, Homo sapiens
agctccaccgccgtggcggccgaggtacctgcaggcctcctacacctacctctctctgggcttttatttcgaccgcgatgatgtggctctggaaggcgtgagccacttcttccgcgaactggccgaggagaagcgcgagggctacgagcgtctcctgaagatgcaaataccagccgtgggcggcccgcttctaggaaactaggtgggaatccccccggggcctggcagggaaatcccatatcaagcttatcgataccgtcgacctcgagggggggccccggtacccagcttttgttccctttagtgagggttaattgcgcgcttggcgtaatcatggtcatagcctgtttcctgt

SEQ ID NO: 33737 - DNA, 474 bp, Homo sapiens
actatagggcgaattggagctccaccgcggtggcggccgaggtacaaccacttgacttgctctttaacatagtcctgtgagatgccagctgccatgaccaagcagtattcccactcctcctctacactctggcaaggctttcctggaacatccccatgcccacatctttacccagtaactcactaaagccactcttgactcaagcaggtgccgttccttgatcacggaatctacctttgatttcatcaggccagattcacaaacagaatgggagtgctttatctatacctttgagaggatggagagtgaaataactggaaacactgggttatcacagcttaatttcatccaggcttggtgtctttaccaaagatggttggggaaaggaagggagattcatcttgttcaggcagtgatttgctcagaattttacaagacataccctatacagacctatttgaattctactgtggg

SEQ ID NO: 33738 - DNA, 479 bp, Homo sapiens
ctactatagggcgaattggagctccaccgcggtggcggccgttcctctaagtctccgccacgcaggaaacaaaagcgatagaaggtccgttcctgtcctccggtgctttgatgagttcaggctgaagccgatgggggaggaggagaagctgcaagttaacagctgaagaataagttcatgaaaaaattgccacgtgatgcagaagcttccaacgtgcttgttggggaggttgactttttggatactcctttcattgcctttgttaggctacagcaggctgtcatgctgggtgccctgactgaagttcctgtgcccacaaggttcttgttcattctcttaggtcctaaggggaaagccaagtcctaccacgagattggcagagccattgccaccctgatgtctgatgaggtgttccatgacatttgcttataaagcaaaagacaggcacgacctgattgctggtattgatgagttcctag

SEQ ID NO: 33739 - DNA, 204 bp, Homo sapiens
cgcgtatacgactcactatagggcgaattggagctccaccgcggtggcggccgaggtacaccaaggtggtgcattaccggaagtggatcaaggacaccatcgtggccaacccctgagcacccctatcaactccctattgttagtaaacttggaaccttggaaatgaccaggccaagactcaagcctccccagttctactgacct

SEQ ID NO: 33740 - DNA, 185 bp, Homo sapiens
tactcactatagggcgaattggagctccaccgcggtggcggccgcccgggcaggtactgatgacacaaacatggcagacactttcaccgagattatgaccatgatgtcgccttcacagttcttgagttcatctcctttgagaatgacaaataatgaagacagtctgagtcccaccagcatcactc

SEQ ID NO: 33741 - DNA, 466 bp, Homo sapiens
gcgaattggagctccaccgcggtggcggccgaggtacttctatgggaaagtgaacagttctgtgacaggaaacatctctgtccatgccagcatagtagttgtatggacttctaaccagttgagttttttaaagcattgaggattttttcctcttaccaactcctcttcaggtttttaaagacccagccccttccaattttaaagagaaaaaggaaactgagttatcttgaataacataactttttaatcaaatgtttattttggcttgtggatcttggtgttatttaaaaaattgaggtgatggtcattgcaagctcatctattaagtacgcgggctctcggccttagcgccatttttttggaaacctctgcgccatgagagccaagtggaggaagaagcgaatgcgcaggctgaagcgcaaaagaagaaagatgaggcagaggtccaagtaaaccgctagcttgt

SEQ ID NO: 33742 - DNA, 494 bp, Homo sapiens
atagggcgaattggagctccaccgcggtggcggccgcccgggcaggtacgcggggcttctcgcctaacgccgccaacatggtgttcaggcgcttcgtggaggttggccgggagagacctatgtctcctttggacctcatgccgtaatattggtcgcgattgtagatgttattgatcagaacagggctttggtcgatggaccttgcactcaagtgaggagacaggccattgcctttcaagtgcatgcagctcactgatttcatcctcaagtttccgcacagtgcccaccagaagtatgtccgacaagcctggcagaaggcagacatcaatacaaaatgggcagccacacgatgggccaagaagattgaagccagataaaggaaagccaagatgacagattttgatcgttttaaagttatgaaggcaaagaaaatgaggaacagaataatcaagaatgaagttaagaagcttcaaaaggcagctctcctgaaagct

SEQ ID NO: 33743 - DNA, 170 bp, Homo sapiens
atggagagttgtggctgcaccccgggcaggtacttgaccccacagccatatgagccacttctcagccaccatgtcttcaaattcatcgacattgaactaggagaagccccatttctttgagaagtggatcgtctggcagccagagaacttgaacttggccctgtgcaggg

SEQ ID NO: 33744 - DNA, 491 bp, Homo sapiens
cgactcactatagggcgaattggagctccaccgcggtggcggccgaggtactctggatatgggaggagctcagggttgttggctaagatgtaattttaaggaaacactttatatttcataccaagtaagaatttcaatggcaatgaatattaccacatagctgtatactgtaactcagggattctgtcagatgagtgcaaacattaccgtgctgtaaccatccagagtcccagggtcacattggcagccaaaagtacctgcccgggcggccgctctagaactagtggatcccccgggctgcaggaattcgatatcaagcttatcgataccgtcgacctcgagggggggcccggtacccagcttttgttccctttagtgagggttaattgcgcgcttggcgtaatcatggtcatagctggttcctgtgtgaaattgttatccgctcacaattccacacaacatacgagccgggagcataaagtgtaaagcct

SEQ ID NO: 33745 - DNA, 199 bp, Homo sapiens
acgactcactatagggcgaattggagctccaccgcggtggcggccgaggtaccaaaccaaagccgtcatcattgcaatgatcatcactgcggaggtatccatttcagtcaccatcttctgctttcagaccaaggtggacttcacctcgtgcacaggcctcttctgtgtcctgggaattgtgctcctggtgactgggatt

SEQ ID NO: 33746 - DNA, 504 bp, Homo sapiens
ctactatagggcgaatagtagctgcacgcgcggtggctgcaccgcggcaggcggccgaggcacgcgggggctgatgccattttcagcctcagcacgcctgcacccaggcgctcattaaaacagcatgttgctccccactgcctcgtgttgtctgttggcgcgctgtcggggttcgaaccgatacaagaaccttccacctacctggtgctttggcctcatctataagcgggcagtcatctgccctaagtgctgccgccgaagactgaatgtcctggaaagtttgctgtcacatctccattatgacaaaagcattgtgccgaacagatgaaaaaaatgcattgtcaacggaatcttttatgtttgtttgtcttcctttaagcaacattgccttacttgttataaaagataaataaatatttgttcatttctaaaaacatacaatccagtaaaataaaaggtacctgcccgggcggccgctctagaactagtggatcccccgggctg

SEQ ID NO: 33747 - DNA, 363 bp, Homo sapiens
tcactatagggcgactcgtatcgggcgaattggagctccaccgcggtggcggccgaggtacgcgggatgaaagcaaagagaaaggatggaggcaaaataaaaaaaaatcacgtttcaagaaatgttaagctcttcttggaacaagccccaccttgctttccttgtgtagggcaaacccgctgtcccccgcgcgcctgggtggtcaagcttaagggatttctacctcacactgtgcattttgcacagcagatagaaagacttgtttatattaaacagcttatttatgtatcaatattagcttggaaggaccaggcgcactagccttctctctgtgacatgtgaactttgtcaaattgaagacag

SEQ ID NO: 33748 - DNA, 486 bp, Homo sapiens
ataaggcgaattggagctccaccgcggtggcggccgaggtacgttcctggcaatggcttcagcctcatcggggcccacacggacagcccctgccttcgggtgaaacgtcggtctcgccgcagccaggtgggcttccagcaagtcggtgtggagacctatggtggtgggatctggagcacctggtttgaccgtgacctgactctggctggacgcgtcattgtcaagtgccctaccttaagtcggttggagcagcagctggtgcacgtggagcggcccattctttcgcatcccacacctggccatccatctgcagcgaaatatcaaccaataactttgggcccaacacagaaatgcatctagtccccattcttgccacaaccatccaagaggagctggagaaggggactcctgagccaaggcctctcaatgctgtggatgagcggcaccattcggtcctcatgtccctgctctgtgcccatctggggc

SEQ ID NO: 33749 - DNA, 482 bp, Homo sapiens
gcgcgtatacgactcactatagggcgaattggagctccaccgcggtggcggccgagccctgcaggcccctgccctgaaggcctggggcgggaagaaggagaacctgaaggctgcgcaggaggagtatgtcaagcgagccctggccaacagccttgcctgtcaaggaaagtacctcggccgctctagaactagtggatcccccgggctgcaggaattcgatatcaagcttatcgataccgtcgacctcgagggggggcccggtacccagcttttgttccctttagtgagggttaattgcgcgcttggcgtaatcatggtcatagctgtttcctgtgtgaaattgttatccgctcacaattccacacaacatacgagccgggagcataaagtgtaaagcctggggtgcctaatgagtgagctaactcacattaattgcgttgcgctcactgcccgctttccaatcgggaaacctgtcgtgccag

SEQ ID NO: 33750 - DNA, 471 bp, Homo sapiens
tggagctccaccgcggtgtcggccgaggtacgtcggaaataaactatttccagactgatacttcagtgtttccttttattttttatagcgtataaaagtttctgaggtgggggcaatattttgataagagtagtcgtttagctaaaactaagtaacattaaggaaacacattgtctggtcttatatgttagtgcaacacacagtatatatatgtttaagcaactattggtgagtgggggctacagggattaccaggagatgatctctcaattcagaatggcattattgtgacaaaggccaccagatacccactcctcatagacccacaaactcaaggcaaaacttggattaaatcaaaggaaaaagaaaatgatttacaggtgacatctctgaaccataaatattttcgcacacacttggaggacagcctttccttgggccgaccccttctcattgaggacattcatgaag

SEQ ID NO: 33751 - DNA, 198 bp, Homo sapiens
cgactcactatagggcgaattggagctccaccgcggtggcggccgaggtaccttctggacaatttccagaacattgaatttgcctatcactaagatgtcaaataccgcatttaaacccagcacagtgatcccttgctctttgcacagcatggccactgctcccagaaagatactcagcagcacccagaaggtggaaaa

SEQ ID NO: 33752 - DNA, 181 bp, Homo sapiens
cactatagggcgaattggagctccaccgcggtggcggccgcccgggcaggtacggaaagttcccctgttccacaggcaatgcaattacctcggccacttcgtaagggtgcacagaacgaacaaaatctgtcaaagctgggaccaaggaactttgggttttaatcatcatcagcacctcact

SEQ ID NO: 33753 - DNA, 202 bp, Homo sapiens
acgacttactatagggcgaattggagctccaccgcggtggcggccgcccgggcaggtaccactgcactccagcttgggagacagagtgagcagagtgagaccaattcctgggaagccacaaggaaaccaaattctagtagcaactcagagtcagcattcattagcaggtcacagggccataaggatgccaagaaggaatttg

SEQ ID NO: 33754 - DNA, 486 bp, Homo sapiens
tagggcgaattggagctccaccgcggtggcggccgcccgggcaggtaccatctcctcgaacataaaaattttcagataaacaatgtccctttttaaaacgaagctgagtcttatcatatcttccatagtctcgaaataacagcattcccccaggtttcagtaacttggacagtcggtttacaacaccttgcatccttgcagggatgaatagaagagagcacaaagacaaggagaatgacatccaggatcccatctggaaaagggtaaggtaagccatcatcacatacatcatgaacaaaggcaaaacactgggttgctctgtaggacgagtgtgactttacgagctccacagctccagaagcaaaatcacaacaatacagaaaggactccggagagttctccaaagtgttcaaaattggaaacacactattttcagctccacaaccaacctctagtatcctgaaagtggcattgctaccaggaaac

SEQ ID NO: 33755 - DNA, 429 bp, Homo sapiens
  misc_feature 413: n = A,T,C or G
agggcgaattggagctccaccgcggtggcggccgaggtacgcgggggctgatgccattttcagcctcagcacgcctgcacccaggcgctcattaaaacagcatgttgctccccactgcctcgtgttgtctgttggcgcgctgtcggggttcgaaccgatacaagaaccttccacctacctggtgctttggcctcatctataagcggccagtcatctgccctaagtgctgccgccgaagactgaatgtcctggaaagtttgctgtcacatctccattatgacaaaagcattgtgccgaacagatgaaaaaaatgcattgtcaacggaatcttttatgtttgtttgtcttcctttaagcaacattgccttacttgttataaaagataaataaatatttgttcatttctaaaaaanaaaaaaaaaaaaaaaa

SEQ ID NO: 33756 - DNA, 481 bp, Homo sapiens
atacgactactatagggcgaattggagctccaccgcggtggcggccgcccgggcaggtacgcgggatttttaaaaagtagacggcctgccacggggatgaagaaaacacatttactgcgggcgggggtctgagggcctgcaaacaactcgagctggagcctcggccaggaccggcgcgagaggcggttcttgctatattgccccaggctggtctcgaactcctgggctcaagccgttctcccgcctcccactgcccgcctgtcactgccgtctgttccctgagctgtgctttacgctgggaaagacatagaagaactattaagaagatagaattgttttgctgcgcagtacctcggccgctctagaactagtggatcccccgggctgcaggaattcgatatcaagcttatcgataccgtcgacctcgagggggggcccggtacccagcttttgttccctttagtgagggttaattgcgcgc

SEQ ID NO: 33757 - DNA, 366 bp, Homo sapiens
ggcgaattggagctcaccgcggtggcggccgagttttccaagagataacttcaccaagatgtccagtgataggcaaaggtccgatgatgagagccccagcaccagcagtggcagttcagatgcggaccagcgagacccagccgctccagagcctgaagacaagaggaaagaaaccttctgccacccagcagaagaaaaacaccaaacttctttagcaaaaccactgctaagttatccactagtgctaaaagaattcaaaaggagctagctgaaataacccttgatcctcctcctaattgcagtgctgggcctaaaggagataacatttatgaatggagatcaactatacttggtccaccgggttct

SEQ ID NO: 33758 - DNA, 399 bp, Homo sapiens
ctactatagggcgaattggagctccaccgcggtggcggccgaggtactttagcatgttgcataatatatgcttatgtagctttccaggactaacagataaatgtgtaatgaacaaagatatgttgtatgagtcgtcgtttctgtcagatttgtattgtttccaagggaaaagcttgggggaggactcagttcacaaaatgcaaaactcaacgatcagattcacggacccagagcttttccatgtgtttatattgtaaatatttttgatttcatcaaattatttattcattaaaagaaatttttgtgaagcacagtgagtgacaatcatttttcttaaggcctggaaacgattttctgtatgatgttactttatgtgaattctcatctcaataaatgatg

SEQ ID NO: 33759 - DNA, 360 bp, Homo sapiens
gggcgaattggagctccaccgcggtggcggccgaggcacctgtggtggatttccaggctgaactgaggcaggcattcttagctgaggcaccaagaggtggttaaagccatattggagtagcgaggaatctgattccaagcaaaaaccaggctccatctactctttgaagcttctgcccagcttgcattgtttctaggagaacctgcgtcatacctttatctatagccttcccctaggtcttcagaagcatcaagttttaactgtggacattggatttggtggaacagcaatcatgactgttggcaagagtagcaagatgctgcagcacattgactatagaatgagatgtatcctgcaaga

SEQ ID NO: 33760 - DNA, 385 bp, Homo sapiens
ttggagctcaccgcggtggcggccgtgaccgtggctcacgtggcccctaagtttccgggtcttcctcagtctggatggcatgttggcagcccagacgaaaaagccccgcgtacctcggccgctctagaactagtggatcccccgggctgcaggaattcgatatcaagcttatcgataccgtcgacctcgagggggggcccggtacccagcttttgttccctttagtgagggttaattgcgcgcttggcgtaatcatggtcatagctgtttcctgtgtgaaattgttatccgctcacaattccacacaacatacgagccgggagcataaagtgtaaagcctggggtgcctaatgagtgagctaactcacattaattgcgttgcgct

SEQ ID NO: 33761 - DNA, 384 bp, Homo sapiens
ggcgaattggagctccaccgcggtggcggccgcccgggcaggtaccggaagcagcgaatggaagagatgcggcagcagcttcacaaggggccccaattcaagcaggtttttgagatctccagtggagaagggtttttagacatgattgataaagaacagaaaagcattgtcatcatggttcatatttatgaggatggcattccagggaccgaagccatgaatggttgcatgatctgccttgccgcagagtactgtttgcattaataaattaaagctccatagggtcttctcgtcttgctgtgtcatgcccgcctcttcacgggcaggtcaatttcactggttaaaagtaagggacagctgaaccctcgtggagccattcataca

SEQ ID NO: 33762 - DNA, 386 bp, Homo sapiens
agggcgaattggagctccaccgcggtggcggccgcataatttaataacatcgtccttccatttggccgcgactgctctggaaaattggttcagtagtaaacagaattctagcaggtggaacaagaacaggcgaggcatcctgggcctggtctctcctggaggtctgggtgttgcagcctttcaggactgcggctgctgtggcctacacacctgggcctgtgtgcctgtcccgggctttaggctgctttccctacccggctcccccgcgtacctgcccgggcggccgctctagaactagtggatcccccgggctgcaggaattcgatatcaagcttatcgataccgtcgacctcgagggggggcccggtacccagcttttgttccct

SEQ ID NO: 33763 - DNA, 400 bp, Homo sapiens
actcactatagggcgaattggagctccaccgcggtggcggccgaggtacctccttcagcggaaggcctcaccacccacagtgtgaatcctgaggtgccgtcattggcggttctgctgcttcgctgcagggataaggtggagctaccgaacagctgattcatatgccaagaatttggagtcttctttcaaaccagtgggggttggacaatgaatgtagttaactggttcctgctcacactccagaattaaattctattgaaaaaggaaaatcagcaattcagcaaaaaataaatataaaaaaaaataaaaataaaaaaaaaaaaagtacccttgcccggagcggtccgctctagaaactaggtggtatcccccggggctgcaggaaaattcgatatcaagc

SEQ ID NO: 33764 - DNA, 451 bp, Homo sapiens
ctactatagggcgaattggagctccaccgcggtggcggccgcccgggcaggtacaggggaaaagagctctccatttctcagcaggggacaccccggtccccactgccactttgtttgccctccaagggaaaaacctctcaataccaggtccaggagcagctggatgggatcactcagaacccgggccgtctagaactagtggatcccccgggctgcaggaattcgatatcaagcttatcgataccgtcgacctcgagggggggcccggtacccagcttttgttccctttagtgagggttaattgcgcgcttggcgtaatcatggtcatagctgtttcctgtgtgaaattgttatccgctcacaattccacacaacatacgagccgggagcataaagtgtaaagcctggggtgcctaatgagtgagctaactcacattaattgcggtgcgct

SEQ ID NO: 33765 - DNA, 428 bp, Homo sapiens
ggagctccaccgcggtggcggccgaggtacgcggggactgactggttgagccgggtagggaaagcagcctaaagcccgggacaggcacacaggcccaggtgtgtaggccacagcagccgcagtcctgaaaggctgcaacacccagacctccaggagagaccaggcccaggatgccttgcctgttcttgttccacctgctagaattctgtttactactgaaccaattttccagagcagtcgcggccaaatggaaggacgatgttattaaattatgcggccgctctagaactagtggatcccccgggctgcaggaattcgatatcaagcttatcgataccgtcgacctcgagggggggcccggtacccagcttttgttccctttagtgagggttaattgcgcgcttggcgttatcatggtcatagctgtt

SEQ ID NO: 33766 - DNA, 177 bp, Homo sapiens
tcactatagggcgaattggagctccaccgcggtggcggccgaggtacgcgggggccacgtccaagcaaaccgggaaaggagaggatcccggagccgcgtgatggccagaggcctgggggccccccactgggtggccgtgggactgctgacctgggcgaccttggggcttctggtggc

SEQ ID NO: 33767 - DNA, 246 bp, Homo sapiens
tcactatagggcgaattggagctccaccgcggtggcggccgaggtacgcggggaaagagcctagtaaagaagtcacagcctgcaatgaaagcagagaattctgatgaagaatagatctgacttctttcatttaggacccaacttaccatatctgatttatttgctaggtaacacttggaagctgactcccctgggtaagaagagggccaaaatgtttacaattgaaacccttaatgtgatgcaacc

SEQ ID NO: 33768 - DNA, 198 bp, Homo sapiens
actcactatatggcgaattggagctccaccgcggtggcggccgaggtacgcggggacgtcgctcgctccttgacggctgaccgacactgggtctgaggtgtaagcgctttccaggcccttccctggggcttggaggggaatggcgcaaaggactttttttacaagcagagcccactgcagtttaccaaagagtatgtc

SEQ ID NO: 33769 - DNA, 407 bp, Homo sapiens
cactactatagggcgaattggagctccaccgcggtggcggccgggttctgagtgatcccatccagctgctcctggacctggtattgagaggtttttcccttggagggcaaacaaagtggcagtggggaccagggtgtcccctgctgagaaatggagagctcttttcccctgtacctgcccgggcggccgctctagaactagtggatcccccgggctgcaggaattcgatatcaagcttatcgataccgtcgacctcgagggggggcccggtacccagcttttgttccctttagtgagggttaattgcgcgcttggcgtaatcatggtcatagctgtttcctgtgtgaaattgttatccgctcacaattccacacaacatacgagccgggagcataaagtgtaaagcc

SEQ ID NO: 33770 - DNA, 250 bp, Homo sapiens
aattggagctccaccgcggtggcggccgcccgggcaggtacaagttccactctgctacagatgcgtctgtgaagagccttgtgccatccaactagtgactgaatgatgtcccatctcttatccgagccagagcacacatcttccatgctgtccgctgattgcctccaaattccaaaagaccaaataattccttttattccccaaagtagggctcaaaacagtttggtttcagggcattcctgggatctgc

SEQ ID NO: 33771 - DNA, 409 bp, Homo sapiens
cgactactatagggcgaattggagctccaccgcggtggcggccgcccgggcaggtacatttccaaagtcaagagtcaaataaaaaaatcccatggaatttggagcctatttagaactcaaaataatgagaatgctgcaaatcaaaacttgtgacatcccactaaagctgttcttagagggaaatctatccaacacactaaatgcttacattagcaaagaagaaaggctaaaatgaacgagcatccaagttaacatgttagaaaaggagcaacagagaagactcaataaagtaaaaggaaggaaacaataaagataagattagaaatcaatgcaacaagaaaacaaagataaatgctggagaggatcttggttttctgaaaagacaaattaatgggtctcttggcaagac

SEQ ID NO: 33772 - DNA, 250 bp, Homo sapiens
cgactcactatagggcgaattggagctccaccgcggtggcggccgcccgggcaggtaccagggcagcaacccaatcagtgacatttgggctatccacgcgctgcggatcgtggctaagtatctgaagagggccgtcaacagcactgacaaatgaagaagaagaatgagtcttagggcaccttttcttggaagtggcccttcgccaatccaggggaccaagcgcgtttgccttcccccggctgctttttac

SEQ ID NO: 33773 - DNA, 418 bp, Homo sapiens
ctactatagggcgaattggagctccaccgcggtggcggccggggctggcgcggtgcatcgtgggcactgtagtttccgccgcgtttatggccgcgttaagtctgagtgccgctttgagttgctgaatgaagtgaacttcatttgtcagcgttcggtacctcggccgctctagaactagtggatcccccgggctgcaggaattcgatatcaagcttatcgataccgtcgacctcgagggggggcccggtacccagcttttgttccctttagtgagggttaattgcgcgcttggcgtaatcatggtcatagctgtttcctgtgtgaaattgttatccgctcacaattccacacaacatacgagccgggagcataaagtgtaaagcctggggtgcctaatgagtgagctaactcacattac

SEQ ID NO: 33774 - DNA, 400 bp, Homo sapiens
accgcggtggcggccgcccgggcaggtacctatgctttcagagtaagagcttacaagggttcaatctgtagtccttgcagcagagaattgattcttcatactcctccagctccagttttcagcttcctctttgatgaaaaatgtggctataataatgaacacctcctgctgaacttgaagagagaccgtgtagagagtatagctggatttaatcttctgcttgctgcagaacgcatccaagtgggttattacacaagcttagactacatcattggagatactggcattacaaaaggaaaacacttctgggccttccgtgtggaaccatattcatacctggtaaaagtgggagttgcttctagcgaataactacaagaatggctcctttctccccgggatg

SEQ ID NO: 33775 - DNA, 425 bp, Homo sapiens
cgactcactatagggcgaattggagctccaccgcggtggcggccgcccgggcaggtactgggcagggcttgggagataagacaggacatctgaagctaaacatggatcccctctgaaagctacaatcaaagtgtcatccacaaaatcttatctcaagccttgactagagaaggacccacttccaagaccacagagttgaatgaattcagtccttgcagcccgttgaactgagggcctccccaacatgctcacctgcttcatcaaagcctgcgagagagagagtccactagcaagaggacattgcagtcttatctaatgcaatcactgaagtgacatcctgtcaccttggtcaccttttctattctattcattataaatgagtcccaagtcctgccacactcaagtggaggggattacacagggct

SEQ ID NO: 33776 - DNA, 374 bp, Homo sapiens
tggcggccgtccgggcaggtacgcggggagaaatagcaagtgccgagaagctggcatcagaaaaacagaggggagatttgtgtggctgcagccaagggagaccaggaagatctgcatggtgggaaggacctgatgatacagaggtgagaaataagaaaggctgctgactttaccatctgaggccacacatctgctgaaatggagataattaacatcactagaaacagcaagatgacaatataatgtctaggtagtgacatgtttttgcacatttccagcccctttaaatatccacacacacaggaagcacaaaaggaagcacagagatccctgggagaaatgcccggccgctctaaaactagtggatcccccgg

SEQ ID NO: 33777 - DNA, 357 bp, Homo sapiens
ctactatagggcgaattggagctccaccgcggtggcggccgggatcttcggcaagactcacgtctccaacaaccaagctccccaaagtcctgacctcaagcaatccgcctgcctaggcctcgcaaagtgctgggattacaggagtgagccaccgtgcccagccaagaaagattttggaagagtgaatgaatacaaggatttccactagactgagaattagtttgtcaacagcatttcagtgtcttgagaagtatttacatttggcgtggacaaagctggcagatgacgtagaaagtaaaaagttgcctcttcaaagtttcccttcttgttaaagaataaatcataaatgttagaaac

SEQ ID NO: 33778 - DNA, 169 bp, Homo sapiens
  misc_feature 10: n = A,T,C or G
ctcactatanggcgaattgaagctccaccgcgggggcggccgcccgggcaggtacgcggggatttatgcaaatttgaactagcttctttgttcacaattcagttcctcccaaccaaccagtcttcacttcaagagggccacactgcaacctcagcttaacgtgaataac

SEQ ID NO: 33779 - DNA, 323 bp, Homo sapiens
tacgactcactatagggcgaattggagctccaccgcggtggcggccgaggtacgcggggagaaaaacagaggggagatttgtgtggctgcagccgagggagaccaggaagatctgcatggtgggaaggacctgatgatacagaggtgagaaataagaaaggctgctgactttaccatctgaggccacacatctggctgaaatggagataattaacatcactagaaacagcaagatgacaatataatgtctaaatagtgacatgttttttgcacatttccagcccctttaaattatcccacacacaacaggaagccacaaaagg

SEQ ID NO: 33780 - DNA, 123 bp, Homo sapiens
cacgtatacgactcctatatggcgaattggagctacatcgcggtggcggccgcccgggcaggtacgagtgagtgggctcatcggttgacctctgtgtgaagatggaacgtggtcctaccctgc

SEQ ID NO: 33781 - DNA, 421 bp, Homo sapiens
ctcactatatggcgaattggagctccaccgcggtggcggccgcccgggcaggtacagagatgaaagaggggtgggatccacactgagagagtggagaggtgacatgtgctggacactgtccattgaagcactgagcagaaagcctggaggcacaacgcaccagacactcacagcaaggatgggagcttgaaaaacataaacccactctgtcctgaaggcactgggaagcctagagaaggctgtgagccaaggagggagggtctttctttggcatgggatggggatgaagtaaggagagggactggaccccctgggaagctgattcactatggggggaggtgtattgaagtccttcagacaaccctcagatttgatgatttcctagtagaactcacagaaataaagagctgttatactgtga

SEQ ID NO: 33782 - DNA, 403 bp, Homo sapiens
ctcactatagggcgaattggagctccaccgcggtggcggccgatgtacgcggggtttgagtcactggtgcgccatgatccccgctttgaaatctgtgtggaagtcattctggggcttgtctgctttcggctaaagggttccaacaaagtgaatgaagctcttctgcaaagaataaacagtgccaaaaaaatccacttggttccatgtcacctcagggacaagtttgtcctgcgctttgccatctgttctcgcacggtggaatctgcccatgtgcagcgggcctgggaacacatcaaagagctggcggccgctctagaactagtggatcccccgggctgcaggaattcgatattaagcttatcgataccgtcaacctctagggggggcccggtacccagctttt

SEQ ID NO: 33783 - DNA, 428 bp, Homo sapiens
ctcactatagggcgaattgaacctccaccgcggtggcggccgcccgggcaggtacctccccacccaggcctcgctccttctccacggtttgcagggcccacatggcagctgtggtgcggggttccagccagcgggcgttgacagtggccagcgtaaggctcaggaacagcaggtaaagctggctggcctcccagaatgtgagctgagcccaagcatgctgtgaagccaagatgcagaggttgatgaaggcacagcccatggagatgtggaagtagaaggggaagagtttgctctgcactagtccgaaggtatgtcggggaaggcttcggaaaagcaggaagcctgagacgaaggtcacccacatttgcatgccccaggcacctgacaagaccagtagaaggaccatcttaatcaggcctcctaagttc

SEQ ID NO: 33784 - DNA, 413 bp, Homo sapiens
gcgaattggagctccaccgcggtggcggccgcccgggcaggtacaggggaaaagagctctccatttctcagcaggggacaccctggtccccactgccactttgtttgccctccaagggaaaaacctctcaataccaggtccaggagcagctggatgggatcactcagaacccggccgctctagaactagtggatcccccgggctgcaggaattcgatatcaagcttatcgataccgtcgacctcgagggggggcccggtacccagcttttgttccctttagtgagggttaattgcgcgcttggcgtaatcatggtcatagctgtttcctgtgtgaaattgttatccgctcacaattccacacaacatacgagccgggagcataaagtgtaaagcctggggtgcctaatgagtg

SEQ ID NO: 33785 - DNA, 419 bp, Homo sapiens
gcgaattggagctccaccgcggtggcggccgaggtacgcggggagggaaagcagcctaaagcccgggacaggcacacaggcccaggtgtgtaggccacagcagccgcagtcctgaaaggctgcaacacccagacctctaggagagaccaggcccaggatgcctcgcctgttcttgttccacctgctagaattctgtttactactgaaccaattttccagagcagtcgcggccaaatggaaggacgatgttattaaattatgcggccgctctagaactagtggatcccccgggctgcaggaattcgatatcaagcttatcgataccgtcgacctcgagggggggcccggtacccagcttttgttccctttagtgagggttaattgcgcgcttggcgtaatcatggtcatagctgtttcct

SEQ ID NO: 33786 - DNA, 199 bp, Homo sapiens
acgactcactatagggcgaattggagctccaccgcggtggcggccgaggtacgcggggtttctacctaataaatacgaagggctgtagaagctcagggcccttgctcactagaaggagccccctgaccccttcttccaaaaatactttttgtctttgtcttcgtttctgcattcattcccccttcgttcacttcccata

SEQ ID NO: 33787 - DNA, 175 bp, Homo sapiens
ctatagggcgaattggagctccaccgcggtggcggccgaggtactgtattctcatccaccatcaaagcccattcgtaggaaattcagaccataaaaccaatctacagaaaaccaagagccttccactgctgcaagtgggccagcttctgcggcaaccattgaaaccgcatccaac

SEQ ID NO: 33788 - DNA, 218 bp, Homo sapiens
  misc_feature 197: n = A,T,C or G
cgactcactatagggcgaattggagctccaccgcggtggcggccgaggtacagatctgggaactaaatattaaaaatgagtgtggctggatatatggagaatgttgggcccagaaggaaccgtagagatcagatattacaacagctttgttttgagggttagaaatatgaaaattgatttggtttatgaaccgcacnagtttagggcagcagtggcca

SEQ ID NO: 33789 - DNA, 398 bp, Homo sapiens
gcgaattggagctccaccgcggtggcggccgaggtacattagtaataaccttttcaaaaatatgcaatttctgtccttgaagcctagggagtgggatgcagccacattaagactcatgattaagcaccttattgtgttaatcatgatataaagagccttgtataacacaaaagccgagatcgcgccactgcactttagcctgggtgacagagtgggattctgtccgctcccgccaaaaaaaaaggagaaggtctaccctgcaagaggtggagagagagctagtggcttggatctttggggtgcacatgggaattgtgggcccacagtgtctggtgaaagaagaggaggcaggaggcctttttcttctcatatgggggttgagtggtgggggtgctact

SEQ ID NO: 33790 - DNA, 277 bp, Homo sapiens
ctcactataggcgaattggaacctcccccgcgggggcggccggggcagaagttgagaccacccagcagaggagctaggccagtccatctgcatttgtcacccaagaactcttaccatgaagaccctcctactgttggcagtgatcatgatctttggcctactgcagggcccatgggaatttggtgaaattttccacagaaatggatcaagtttgacgacagtgaaaaggaatgccgccactcagtttatgggctttctatgggctgccaactgttgg

SEQ ID NO: 33791 - DNA, 196 bp, Homo sapiens
ctcactatagggcgaattggaacttccaccgcgggggcggccgaggtacacagcaggcttttcaggcagggcacatggctcagggccccatgatgtgataccttgaagcacaccattacagacaagtggacccccagaatcccccccacaagtgtctttaccacctgtccaagagcccagcaacacaacattgaac

SEQ ID NO: 33792 - DNA, 404 bp, Homo sapiens
gcgaattggagctccaccgcggtggcggccgcccgggcaggtactcctttaaactgcttaatcatgttctgatggttttcaatggcttccttcaagatcatttcaggctggtccatcttccaccgccactcagtgcccacggggttggtgtggtgccgccaacagaagacacatttattagcacacgccaagctcggggtggtttccatgcagcgatggctctcaattccatagaatgtgtgtttgtaacaacctcctctccctcggagcatggactttgtccacctgcaaagcttcacccccgagtggctcccaatcaactgataaccttgtttagtaagggcttcttggagagcaggagttatcatagctcttctttcaccatcttcattcctccccatgtt

SEQ ID NO: 33793 - DNA, 183 bp, Homo sapiens
acgactcactatagggcgaattggagctccaccgcggtggcggccgcccgggcaggtacgcgggatatcaggtagtagaatgtgccatgcgagcacttcacttctcttccaggcacaataaagacattgccctggtcaacctggcaaacgttctacacagagcacactttctctgctgatgct

SEQ ID NO: 33794 - DNA, 411 bp, Homo sapiens
ctcactatagggcgaattggagctcaccgcgggggcggccgaggtccccggggtcagccgccgcgccgccgggctgctccttcttcctcctcgggcgcccgcggcgatgttcaaccgcgccgtgagccggctgagcaggaagcggccgctctagaactagtggatcccccgggctgcaggaattcgatatcaagcttatcgataccgtcgacctcgagggggggcccggtacccagcttttgttccctttagtgagggttaattgcgcgcttggcgtaatcatggtcatagctgtttcctgtgtgaaattgttatccgctcacaattccacacaacatacgagccgggagcataaagtgtaaagcctggggtgcctaatgagtgagctaactcacattaattgcgttgcgc

SEQ ID NO: 33795 - DNA, 224 bp, Homo sapiens
atacactcactataggcgaattgaacttccccgcgggggcggccgaggtactccttagggcgcttcaggagctcaggggcctcctgggattcctcatcttggtttttccgtcggcatttctgctgcttccgagtcagggcttccttcgtttgtttttccgcctgcttggtggacttccccgcctgcccttcagcttccttcaggcttttttctcttttgcttct

SEQ ID NO: 33796 - DNA, 415 bp, Homo sapiens
cgactcactatagggcgaattggagctccaccgcggtggcggccgaggtacgcgggggctctaagctgcagcaagagaaactgtgtgtgaggggaagaggcctgtttcgctgtcgggtctctagttcttgcacgctctttaagagtctgcactggaggaactcctgccattaccagctcccttcttgcagaagggagggggaaacatacatttattcatgccagtctgttgcatgcaggctttttggcttcctaccttgcaacaaaataattgcaccaactccttagtgccgattccgcccacagagagtcctggagccacagtcttttttgctttgcattgtaggagagggactaagtgctagagactatgtcgctttcctgagctaccgagagcgctcgtgaactggaatcaa

SEQ ID NO: 33797 - DNA, 348 bp, Homo sapiens
ctcactatagggcgaattggagctccaccgcggtggcggccgaattcaagacttctccaaaatcaccaccagcaggcttggttccccctactttagactttaagttttcgaccttttcttcaaatgatttaaaagttggggagttttttacatcttccagctttttggtgatgactgagccaacagacgaaaaagcagcctgaggccttctgtccagcctggtgataaggttttcagaatgtctttcttgtaagccagatgtttgcttgtcacgttcttgccaacccctttgggcaatgtttctgtttttaagttcctgtaggagaatttgatttccaagttttccgc

SEQ ID NO: 33798 - DNA, 265 bp, Homo sapiens
  misc_feature 216, 237, 238: n = A,T,C or G
acgactcactatagggcgaattggagcttccaccgcgggggcggccgcccgggcaggtactgacgaccagggccagctgttctagagcgggaattagaggctagagcggctgaaatggttgtttggtgatgacactggggtccttccatctctggggcccactctcttctgtctttcccatgggaagtggccactggggaatccctctgaccctangtcctcctgaatacaagactnngactgacatttgactgttgtcctgtgg

SEQ ID NO: 33799 - DNA, 414 bp, Homo sapiens
tacgactcactatagggcgaattggagctccaccgcggtggcggccgaggtacatgaaacgtcgggggcctatatcttccccagtgtgctcccaaattctgtccaattgatggaagcaagcttgcaggtccatgttcccacaagcaactttcagcccaggattctgcagatctttccagctctacatcccatgtcatatactccatattagaggctgttggatacacctgacttcgtaatttattatgaaggtccaaaatactctgcatgtcattgtctgtgatggcccttttccctcgttgtttggctatccaccactcaccatcctcatccatgtatttttccaaaagtttctccaataaagtggcattgggaaccaccatggctggaattgctctagccatgaacagcact

SEQ ID NO: 33800 - DNA, 206 bp, Homo sapiens
cgactcactatagggcgaattggagctccaccgcggtggcggccgtgtggcgcagggaggaccccttacagcaaccacagcgtcgggaatccgaaagggaaaagaggtgcgcaggcgccacacacggcctttacccccgcgtacctcggccgctctagaactagtgagatcccccgggctgcaggaaattcgattatcaaggctta

SEQ ID NO: 33801 - DNA, 167 bp, Homo sapiens
ctcactatagggcgaattggagctccaccgcggtggcggccgcccgggcaggtacgcggggaggaagactggacaaagggggtcacacattccttccatacggttgagcctctacctgcctggtgctggtcacagttcagcttcttcatgatggtggattcccaatg

SEQ ID NO: 33802 - DNA, 470 bp, Homo sapiens
atagggcgaattggagctccaccgcggtggcggccgaggtacgcgggggcagcctaaagcccgggacaggcacacaggcccaggtgtgtaggccacagcagccgcagtcctgaaaggctgcaacacccagacctccaggagagaccaggcccaggatgcctcgcctgttcttgttccacctgctagaattctgtttactactgaaccaattttccagagcagtcgcggccaaatggaaggacgatgttattaaattatgcggccgctctagaactagtggatcccccgggctgcaggaattcgatatcaagcttatcgataccgtcgacctcgagggggggcccggtacccagcttttgttccctttagtgagggttaattgcgcgcttggcgtaatcatggtcatagctgcttcctgtgtgaaattgttatccgctcacaattccacacaacatactagccgggagcat

SEQ ID NO: 33803 - DNA, 415 bp, Homo sapiens
tacgactcactatagggcgaattggagctccaccgcggtggcggccgaggtacgcgggggttggagaaaactaaacaatttgttataaaacatccttaaaagcatcagaaagttaatacagcaatgaagaattacaggaccaaattaagaatgcaaccaggttgccaagaactgagtgatgtgtccacatcccgggagagagaagccaccagaagctggaagagctaaatcagactgctccctagagcttcagaaggagccagaactgatgactccaagatcttagcccagtgaaactgatctggacttctgaactatgagagattccattcctgttgtttgaagctaccacattattgagaacttgttacagtagcccgaggacactaacacaaatggggctccgggaaaatcc

SEQ ID NO: 33804 - DNA, 421 bp, Homo sapiens
gtatacgactcactatagggcgaattggagctccaccgcggtggcggccgcccgggcaggtacttttttttttttttttttttttgtctttttcaccaaaattgggtgatgaggtggtggtgtctttcctctgagatgtctcttttttcccacaggattctttgctggacatccctaattccaagtcagctggatggacaggcaagctcgtcagctgctagtaaaccgccgcggcccgcgggctccgcacgaaccgaccagaccccaacccccgcgtacctcggccgctctagaactagtggatcccccgggctgcaggaattcgatatcaagcttatcgataccgtcgacctcgagggggggcccggtacccagcttttgttccctttagtgagggttaattgcgcgcttggcgtaatca

SEQ ID NO: 33805 - DNA, 407 bp, Homo sapiens
actactatagggcgaattggagctccaccgcggtggcggccgcccgggcaggtactttttttttttttttttttttttttttttattctgggcaacggcatttgcactcatgacgtctcatatgctccaaactcagggacccgggggaaggtaatacctacctcagtggcaggatccgtagtgggcagttgtgcgaatggccttggtattactgccgtggcttaattcggtcagagcaaaacatccaaaaatctaaatgtcaaagcacaaaatgatggaaagcaagaaaagttctttgtgcacattcccagaaggacctcactgccatctttcctttaaagatgaaaccacatatcaaagccccaaatttccatttacccaactagtgacttgactgagtcatgctg

SEQ ID NO: 33806 - DNA, 419 bp, Homo sapiens
actactatagggcgaattggagctccaccgcggtggcggccgcccgggcctccaaagtgctgggattataggagtgagccaccacacccggacccacagtcatatatattactaaagccaaccgacaaaaagaaatattgtaacagtaagacaagattgacaagagcaaacattcacgcaatcaccgttaacagaaaacggcaacaagaaataattaaaatcccacaatcttattttcaagtcagtgaaataaaaaatactcccaactcacccttgaatcaccaacggcaaatactttaggttttctttcttcccaaactgttttggcctcgctgctagggctgtcgccgagcttacacggactccaggtgatgagtttttcttgagtcactgcaaaggcagtttcactaggcttcact

SEQ ID NO: 33807 - DNA, 413 bp, Homo sapiens
actactatagggcgaattggagctccaccgcggtggcggccgaggtacactggaggctggggcctgcagatggcatggctctgcggctcaccttgctgcagttggtggtggtgacagagactgcagcttgactgtagtggtgattaccaggagctctgccactgcatgtccactagtgacgggttcgctccaccaccccagctgggtagccgctgctctcacataaggggtccaattaaaattgccaggaataaattcccccggactttgacttctcaagagctaagaaggtttgctgagtattctggcatgatgtttggtgatcaaacaactgctggccaaaaatgatgagtatttccccctcttgctgaagatgtgctccatacaatagtccatcacattcatcattcatt

SEQ ID NO: 33808 - DNA, 407 bp, Homo sapiens
actactatagggcgaattggagctccaccgcggtggcggccgaggtaccgaacgctgacaaatgaagttcacttcattcaacaactcaaagcggcactcagacttaacgcggccataaacgcggcggaaactacagtgcccacgatgcaccgcgccagccccggccgctctagaactagtggatcccccgggctgcaggaattcgatatcaagcttatcgataccgtcgacctcgagggggggcccggtacccagcttttgttccctttagtgagggttaattgcgcgcttggcgtaatcatggtcatagctgtttcctgtgtgaaattgttatccgctcacaattccacacaacatacgagccgggagcataaagtgtaaagcctggggtgcctaatgagtgagct

SEQ ID NO: 33809 - DNA, 402 bp, Homo sapiens
actactatagggcgaattggagctccaccgcggtggcggccgaggtacgcggggtggttgagccgggtagggaaagcagcctaaagcccgggacaggcacacaggcccaggtgtgtaggccacagcagccgcagtcctgaaaggctgcaacacccagacctccaggagagaccaggcccaggatgcctcgcctgttcttgttccacctgctagaattctgtttactactgaaccaattttccagagcagtcgcggccaaatggaaggacgatgttattaaattatgcggccgctctagaactagtggatcccccgggctgcaggaattcgatatcaagcttatcgataccgtcgacctcgagggggggcccggtacccagcttttgttccctttagtgaggg

SEQ ID NO: 33810 - DNA, 300 bp, Homo sapiens
  misc_feature 223, 253: n = A,T,C or G
atacgactcactatagggcgaattggagctccaccgcggtggcggccgaggtacttttttttttttttttttttttttttgttgctatacttttaaaaagtttaaaagaaaataattagtatctttgtcagcaagtttccagtgcggcaggaaaacctaactaatacaaataaaggaaaggaagaatccagaacctccttggcatttactggaccaattattnttgaaaggttatttctttaaaaatcctgtnaaaactagagatcactagaatgtatctacgtaagaaaattcttttta

SEQ ID NO: 33811 - DNA, 406 bp, Homo sapiens
tactatagggcgaattggagctccaccgcggtggcggccgcccgggcaggtacatctacctaaaggactattatgtggaataatacatactaatgaagtattacatgatttaaagactacaataaaaccaaacatgcttataacattaagaaaaacaataaagatacatgattggaaccaagttgaaaaatagcatatgccttggaggaaatgtgctcaaattactaatgatttagtgttgtccctactttctctctcttttttctttcttttttttttattatggttagctgtcacatacaactttttttttttttgagatggggtctcgctctgtcaccaggctggagtgcagtggcgcgatctcggctcactgcaacctccacatcccatgttgaagtaattc

SEQ ID NO: 33812 - DNA, 411 bp, Homo sapiens
actactataaggcgaattggagctccaccgcggtggcggccgaggtacaaagatttcctgtggtaaaccatctagtataaacactcaaataatcacttcaatccttagactatctaattcaagtgccactaaagtatgcctaaaactctcataggaaactgatgactctaccctaaatgtcctgcatgtctccagtttatctgatggagctgaactaatctgagtatattatgaacacaagcaaaaattgtgccatccttcatcaacaaagatacagaaaccataaatatgatgtcagaatttgttgctaatttgccacaggagctgaagttaaccctgtctgagatgcagccagcattaccacagctacaacaacatgtacctcggccgctctagaactagtggatcccc

SEQ ID NO: 33813 - DNA, 405 bp, Homo sapiens
tacgactcactatagggcgaattggagctccaccgcggtggcggccgcataatttaataacatcgtccttccatttggccgcgactgctctggaaaattggttcagtagtaaacagaattctagcaggtggaacaagaacaggcgaggcatcctgggcctggtctctcctggaggtctgggtgttgcagcctttcaggactgcggctgctgtggcctacacacctgggcctgtgtgcctgtcccgggctttaggctgctttccctacccggctcaaccccccgcgtacctcggccgctctagaactagtggatcccccgggctgcaggaattcgatatcaagcttatcgataccgtcgacctcgagggggggcccggtacccagcttttgttccctttagtgagg

SEQ ID NO: 33814 - DNA, 410 bp, Homo sapiens
actactatagggcgaattggagctccaccgcggtggcggccgaggtacgcggggtgctcttgtgatcttgattgacacgagtggcacccttctgcagaagtaaattgtctagcttagagaacttctgcctgagtgctggtttcactttgctgcaccaagcatttattcctagaacattttttatattcagcaattctgggggctcatccgggatccccattctccttcaagaaggggtcttcagtcaccctacccaggggagatgtgtcccactgccccattgtggtggcctcagggagggggagatcaagacccacccgttgttatgaataaacttggactctcagcaacacggggaggagaggcttgcagtatcgtggcgaccagctaaactctgtgcacagaccaag

SEQ ID NO: 33815 - DNA, 409 bp, Homo sapiens
gactcactatagggcgaattggagctccaccgcggtggcggccgcccgggcaggtacggggacagcaaaggcaagaaacacttttccgaccccttggccatggagcagagccaaaataaatactggctgggcggtaaggaacgcggggccttggtagagcaaagtgcggaccaaagactttgcgtctggttgcttttaccttgcctagtagggtcttcgttctggcgccatcttcatgaagcctcacgaacccgaagagacggctgtagagagagagacacagagcttgttaatggtctgagaaagccagtgacttgctccttcccgagtccaagagcgacagcgacagattggtgagtgccaagctgaggatgaccccgtcatcaacgtgggcaagctgcgtccaggc

SEQ ID NO: 33816 - DNA, 407 bp, Homo sapiens
gactactatagggcgaattggagctccaccgcggtggcggccgaggtacgcggggtggttgagccgggtagggaaagcagcctaaagcccgggacaggcacacaggcccaggtgtgtaggccacagcagccgcagtcctgaaaggctgcaacacccagacctccaggagagaccaggcccaggatgcctcgcctgttcttgttccacctgctagaattctgtttactactgaaccaattttccagagcagtcgcggccaaatggaaggacgatgttattaaattatgcggccgctctagaactagtggatcccccgggctgcaggaattcgatatcaagcttatcgataccgtcgacctcgagggggggcccggtacccagcttttgttccctttagtgagggttaa

SEQ ID NO: 33817 - DNA, 513 bp, Homo sapiens
atacactactatagggcgaattggagctccaccgcggtggcggccgcataatttaataacatcgtccttccatttggccgcgactgctctggaaaattggttcagtagtaaacagaattctagcaggtggaacaagaacaggcgaggcatcctgggcctggtctctcctggaggtctgggtgttgcagcctttcaggactgcggctgctgtggcctacacacctgggcctgtgtgcctgtcccgggctttaggctgctttccctccccgcgtacctcggccgctctagaactagtggatcccccgggctgcaggaattcgatatcaagcttatcgataccgtcgacctcgagggggggcccggtacccagcttttgttccctttagtgagggttaattgcgcgcttggcgtaatcatggtcatagctgtttcctgtgtgaaattgttatccgctcacaattccacacaacatacgagccgggagcataaagtgtaaagcctggggtgcctaat

SEQ ID NO: 33818 - DNA, 175 bp, Homo sapiens
actactatagggcgaattggagctccaccgcggtggcggccgaggtactctggtaagcttgttgttgtccaagtgaagctccctcagatgaggcgtgttggccagagagccattgtcaacagcagagatgctgttgaaactcaatcccaacttagccaaattattcagtcctttc

SEQ ID NO: 33819 - DNA, 377 bp, Homo sapiens
gagctccaccgcggtggcggccgcataatttaataacatcgtccttccatttggccgcgactgctctggaaaattggttcagtagtaaacagaattctagcaggtggaacaagaacaggcgaggcatcctgggcctggtctctcctggaggtctgggtgttgcagcctttcaggactgcggctgctgtggcctacacacctgggcctgtgtgcctgtcccgggctttaggctgcccccgcgtacctcggccgctctagaactagtggatcccccgggctgcaggaattcgatatcaagcttatcgataccggtcgacctcgagggggggcccggtacccaagcttttgttccctttagtgagggttaattgcgcgct

SEQ ID NO: 33820 - DNA, 644 bp, Homo sapiens
gcgtatacgactcactatagggcgaattggagctccaccgcggtggcggccgaggtacgcggggactgactggttgagccgggtagggaaagcagcctaaagcccgggacaggcacacaggcccaggtgtgtaggccacagcagccgcagtcctgaaaggctgcaacacccagacctccaggagagaccagcccaggatgcctcgcctgttcttgttccacctgctagaattctgtttactactgaaccaattttccagagcagtcgcggccaaatggaaggacgatgttattaaattatgcggccgctctagaactagtggatcccccgggctgcaggaattcgatatcaagcttatcgataccgtcgacctcgagggggggcccggtacccagcttttgttccctttagtgacgggttaattgcgcgcttggcctaatcatggtcatagcttgtttcctgtgggaaattgttatccgctcacaattccacacaacatacgagccgggagcataaagtgtaaagcctggggtgcctaatgagtgagctaactcacattaattgcgttgcgctcactgcccgctttccagtcgggaaacctgtcgtgccagctgcattaatgaatcggccaacgcgcggggaga

SEQ ID NO: 33821 - DNA, 605 bp, Homo sapiens
  misc_feature 42, 126, 127, 147: n = A,T,C or G
gcgaattggagctccaccgcggtggcggccgaggtacgcggnggtctgtgaaagctttaataaaaccacgtttgtttttctggcgaaagaggcgcaagatgaatgcttcttgacaaggactcgatnntattctgtgggctctatacnaccaagaaatgcctgagggggagaaacataattaaactacagaacaggtggcgggtgctcatgcctgtaatcccagcactttgggaggccaaggcagatggatcacttgaagtcaggagttcaagaccagcctggccaacatagtgaaaccctgcctctaccaaaaaatacaagaattagcccagcatggtggcgtgcacctgtagtcccagctactcaggaggatgaggtgtgagggtaaatctgacccccgttcctccatcttggctggaagtggaagtcccggtggacatttttgagcccctgatgtatgccaggcactgctgtaagcactgagtattcaaagatgaacaaaatgatgtggccccagtctcctaaaatttactatcaagagaagaagacaacagtgaagcatctgttgaaatggaggtgccacagatggaagcaaccatggcacg

SEQ ID NO: 33822 - DNA, 448 bp, Homo sapiens
tactatagggcgaattggagctccaccgcggtggcggccgcccgggcaggtactttcttttttttttttttttttttttttttggaatcacagacctttaatttttaaagcttaggaagtaaagagagagaggacactgcaaataacccaagaagccaggagaaagaagcagatgtgctcaagtcacgacttcttcttcacctttggatccagtggctggaaagccctggttattttctggaagatcctcttctccatccatcacaaactttcttatcttttaaggcaggagccagcaaacctttcctgccaccgctggggaggcacatagctcgccagcgtccctggagtcccctcaggaatccccgcgtacctcggccgttctagaactagtggatcccccgggctgtaggaattcgatatcaagcttatcgataccgtcgacctt

SEQ ID NO: 33823 - DNA, 444 bp, Homo sapiens
cactactatagggcaattggagctccccgcggtggcggccgaggtactttatagtttaggctggacattggaaaaaaaaaagccagaacaacatgtaatagataatatgattggctgcacacttccagactgatgaatgatgaatgtgatggactattgtatggagcacatcttcagcaagagggggaaatactcatcatttttagcccacagttgtttgatcaccaaacatcatgccagaatactcagcaaaccttcttagctcttgagaagtcaaagtccgggggaatttatccctggcaattttaattggaccccttatgtgagagcagcggctacccagctggggtggtggagcgaacccgtcactagtggacatgcagtggcagaactcctggtaaccaccactacagtcaagctgcattttctgtcaccaccaccaac

SEQ ID NO: 33824 - DNA, 474 bp, Homo sapiens
ctactatagggcgaattggagctccaccgcggtggcggccgaggtacgcggggagcagcctaaagcccgggacaggcacacgggcccaggtgtgtaggccacagcagccgcagtcctgaaaggctgcaacacccagacctccaggagagaccaggcccaggatgcctcgcctgttcttgttccacctgctagaattctgtttactactgaaccaattttccagagcagtcgcggcaaaatggaaggacgatgttattaaattatgcggccgctctagaactagtggatcccccgggctgcaggaattcgatatcaagcttatcgataccgtcgacctcgagggggggcccggtacccagcttttgttccctttagtgagggttaattgcgcgcttggcgtaatcatggtcatagctgtttcctgtgtgaaattgttatccgctcacaattccacacaacatacgagccgggagc

SEQ ID NO: 33825 - DNA, 508 bp, Homo sapiens
actactatagggcgaattggagctccaccgcggtggcggccgcataatttaataacatcgtccttccatttggccgcgactgctctggaaaattggttcagtagtaaacagaattctagcaggtggaacaagaacaggcgaggcatcctgggcctggtctctcctggaggtctgggtgttgcagcctttcaagactgcggctgctgtggcctacacacctgggcctgtgtgcctgtcccgggctttaggctgctttccctacccggctcaaccagtcagtccccgcgtacctcggccgctctagaactagtggatcccccgggctgcaggaattcgatatcaagcttatcgataccgtcgacctcgagggggggcccggtacccagcttttgttccctttagtgagggttaattgcgcgcttggcgtaatcatggtcatagctgtttcctgtgtgaaattgttatccgctcacaatttcacacaacataccaaccgggagcataaagt

SEQ ID NO: 33826 - DNA, 460 bp, Homo sapiens
agggcgaattggagctccaccgcggtggcggccgcataatttaataacatcgtccttccatttggccgcgactgctctggaaaattggttcagtagtaaacagaattctagcaggtggaacaagaacgggcgaggcatcctgggcctggtctctcctggaggtctgggtgttgcagcctttcaggactgcggctgctgtggcctacacacctgggcctgtgtgcctgtcccgggctttaggctgctttccctacccggctcaaccagtctccccgcgtacctcggccgctctagaactagtggatcccccgggctgcaggaattcgatatcaagcttatcgataccgtcgacctcgagggggggcccggtacccagcttttgttccctttagtgagggttaattgcgcgcttggcgtaatcatggtcatagctgtttcctgtgtgaaattgttatccgct

SEQ ID NO: 33827 - DNA, 513 bp, Homo sapiens; identical to SEQ ID NO: 33817

SEQ ID NO: 33828 - DNA, 508 bp, Homo sapiens; identical to SEQ ID NO: 33825

SEQ ID NO: 33829 - DNA, 508 bp, Homo sapiens; identical to SEQ ID NO: 33825

SEQ ID NO: 33830 - DNA, 531 bp, Homo sapiens
  misc_feature 463: n = A,T,C or G
gagctccaccgcggtggcggccgcataactaataacatcgtccttccatttggccgcgactgctctggaaaattggttcagtagtaaacagaattctagcaggtggaacaagaacaggcgaggcatcctgggcctggtctctcctggaggtctgggtgttgcagccttcagactgcggctgctgtggcctacacacctgggcctgtgtgcctgtcccgggctttaggctgctccccgcgtacctcggccgctctagaactagtggatcccccgggctgcaggaattcgatatcaagcttatcgataccgtcgacctcgagggggggcccggtacccagcttttgttccctttagtgagggttaattgcgcgcttggcgtaatcatgggcatagcttgttacctgtgtgaaattgttatccgctcacaattccacacaacatacgagccgggagcataaagtgntaagcctggggtgcctaatgagtgagctaactcacattaattgcgttgcgctcactgcccgctttcca

SEQ ID NO: 33831 - DNA, 451 bp, Homo sapiens
actactatagggcgaattggagctccaccgcggtggcggccgcccgggcaggtacgcagccgctgacgtcggaaagaacctgctgggcccctgtgctcaggccctaaacaaacttggtgtcccgaaggggaggcgcgaccaaaagaaatcaaaggtctttagggcggagatcacagaatcattggagatattaatgcaaacgggggcctgtccaataatcctgctaatgctaatgggttactggaaagatgagaagagaggaaagatcccaacgatcccgtcaacacgaaaatcccaggaatcagagaaatgctgagccgattatcaggattagcaaatgttgttttgcatgaattatcaggagatgatgacactgatcagaatatgagggctcccctagaccctgaattacaccaagaatctgacatggaatttaataatactacacaag

SEQ ID NO: 33832 - DNA, 428 bp, Homo sapiens
gcgaattggatctccaccgcggtggcggccgaggtacgcggggagggaaagcagcctaaagcccgggacaggcacacaggcccaggtgtgtaggccacagcagccgcagtcctgaaaggctgcaacacccagacctccaggagagaccaggcccaggatgcctcgcctgttcttgttccacctgctagaattctgtttactactgaaccaattttccagagcagtcgcggccaaatggaaggacgatgttattaaattatgcggccgctctagaactagtggatcccccgggctgcaggaattcgatatcaagcttatcgataccggcgacctttagggggggcccggtacccagcttttgttccctttaatgagggttaattgcgcgcttggcgtaattatggtcatagctgtttcctgtgtgaaat

SEQ ID NO: 33833 - DNA, 421 bp, Homo sapiens
cgactactatagggcgaattggagctccaccgcggtggcggccgaggtacactctaaagaaagccatgaggatgataatccactttgatacttccaatctgctggccttgctgaactctttggatcatggatatcataagttcgacaaaatattttttttgtagaagcacaaatgtgaagtgtcactcgttctgagacttccttctctgtgaaattccacaatctctttctatttatagacttttccacagcaaacattagtctacgcagggcattttgaaaatcatttgccagttctaaagtagtaataataaatactccaagaactaaaagtccccctggtagcattctggatacctggcaggcatgttctgtggcccattcttcatccaagttatccaacttagctttgggatgtttg

SEQ ID NO: 33834 - DNA, 444 bp, Homo sapiens
actactatagggcgaattggagctccaccgcggtggcggccgcccgggcaggtacctttcattggattgtccatggtgcatcgctttagcaagcggcgtgactctccgctgcccgtcatcttggccaatatctatctgctggttcctcctgtgctcaacccaattgcctatggagtgaagacaaaggagattcgacagcgcatccttcgacttttccatgtggccacacacgcttcagagccctaggtgtcagtgatcaaacttcttttccattcagagtcctctgattcagattttaatgttaacattttggaagacagtattcagaaaaaaaatttccttaataaaaatacaactcagatccttcaaatatgaaactggttggggaatctccattttttcaatattattttcttctttgctttcttgctacatataattatt

SEQ ID NO: 33835 - DNA, 442 bp, Homo sapiens
actactatagggcgaattggagctccaccgcggtggcggccgaggtacaaaagttaagctccatttaccactcacttgacagtgtcctttaaatctgaacttgctcttgctcatgcggagcttggctaagagaaaccagatcagaatgcaagctgtaggtgggtgggtgagtgtgtcccctcccacactgctctctggtgggtttgggcagtccctggctctagtctctgctgcagattctcaggaccaaaatgtgggtgatttgtctgggtccaggcaggagacagaaatcacacaagctcttttattagagataatataaagaatgattaaccaggtgacagtaaagggcaggaagggaatacaaaggtatccatggaggtagcaccccaggaagcaggcatcacacttgaggcttgggaacaaggggaagatgctggac

SEQ ID NO: 33836 - DNA, 286 bp, Homo sapiens
atagggcgaattggagctccaccgcggtggcggccgcccgggcaggtacgcggggtctgtgcctggaggggactcgccgccatctcaggtctcttggctttgccagggcccaccggagaaaactgacgacccgtttctgtaatccttatgggagaccaaccttgtgcctccgggagatccactctcccacccggaaacgcacgggaagccaagcccctccaaaaaaagcgctggccttcctcggctccgcgtttgggaattattccgggaaggaaacctccccaac

SEQ ID NO: 33837 - DNA, 427 bp, Homo sapiens
gggcgaattggagctccaccgcggtggcggccgaggtacctcaagatcatggcaggcagcaagtgaagccccagctggactcatggatgtgcaccctttgctccctgctcttattgcctatgaactcatgtatctgcgcaggtatggtactggatccccatttgtgttagtggctgggggcatttattgcctataaatctataccatgaaaagcctgccttattttttaccaagctgggtgccaatgctgttaaaagtacctgcccgggcggccgctctagaactagtggatcccccgggcttgaagaattcgatatcaagcttattgataccgtcgacctcgagggggggcccggtacccagcttttgttccctttagtgagggttaattgcccgcttggcgtaatcatggtcatagctgtttcct

SEQ ID NO: 33838 - DNA, 450 bp, Homo sapiens
tatagggcgaattggagctccaccgcggtggcggccgaggtaccgaacgctgacaaatgaagttcacttcattcaacaactcaaagcggcactcagacttaacgcggccataaacgcggcggaaactacggtgcccacgatgcaccgcgccagccccggccgctctagaactagtggatcccccgggctgcaggaattcgatatcaagcttatcgataccgtcgacctcgagggggggcccggtacccagcttttgttccctttagtgagggttaattgcgcgcttggcgtaatcatggtcatagctgtttcctgtgtgaaattgttatccgctcacaattccacacaacatacgagccgggagcataaagtgtaaagcctggggtgcctaatgagtgagctaactcacattaattgcgttgcgctcactgcccgctttccagtcgggaa

SEQ ID NO: 33839 - DNA, 436 bp, Homo sapiens
ctactatagggcgaattggagctccaccgcggtggcggccgaggtacgggggttatttccaatgacgtgtgtgcgcaagttcaccctcagaaggtgaccaagttcatgctgtgtgctggacgctggacagggggcaaaagcacctgctcgggtgattctgggggcccacttgtctgtaatggtgtgcttcaaggtatcacgtcatggggcagtgaaccatgtgccctgcccgaaaggccttccctgtaccattaaccaaatagcgtaactattttatgtccacatttcacttctgtatttacaaacatatcagtaaagagttaacaatgagatgcgatcaaacatccatattatctgttttgtagacagcaatgtagatgattttgtaatcacctttcatcggagtgaccttatataaaaaataagtcaattattt

SEQ ID NO: 33840 - DNA, 453 bp, Homo sapiens
ctatagggcgaattggagctccaccgcggtggcggccgcataatttaataacatcgtccttccatttggccgcgactgctctggaaaattggttcagtagtaaacagaattctagcaggtggaacaagaacaggcgaggcatcctgggcctggtctctcctggaggtctgggtgttgcagcctttcaggactgcggctgctgtggcctacacacctgggcctgtgtgcctgtcccgggctttaggctgcccccgcgtacctcggccgctctagaactagtggatcccccgggctgcaggaattcgatatcaagcttatcgataccgtcgacctcgagggggggcccggtacccagcttttgttccctttagtgagggttaattgcgcgcttggcgtaatcatggtcatagctgtttcctgtgtgaaattgttatccgcttacaattccacaca

SEQ ID NO: 33841 - DNA, 317 bp, Homo sapiens
tacactactatagggcgaattggagctccaccgcggtggcggccgaggtacgcgggtcagctgtccgggctgctttcgcctccgcctgtggatgctgcgcctctccgaacgcaacatgaaggtgctccttgccgccgccctcatcgcggggtccgtcttcttcctgctgctgccgggaccttctgcggccgctctagaacttaggggatccccccggcctgcaggaaattcgaatatcaagccttattcaataccgtccgaccttcgaggggggggccccggtaacccaagctttttggttccctttagttgagggt

SEQ ID NO: 33842 - DNA, 270 bp, Homo sapiens
actactatagggcgaattggagctccaccgcggtggcggccgaggtacgcgggggtaaaggccgtgtgtggcgcctgcgcacctcttttccctttcggattcccgacgctgtggttgctgtaaggggtcctccctgcgccacacggccgctctagaactagtggatcccccgggctgcaggaattcgatatcaagcttattcattcccgtcgaacctcaagggggggggcccggtacccagctttttgttcccctttagtggagggttaa

SEQ ID NO: 33843 - DNA, 346 bp, Homo sapiens
gactcactatagggcgaattggagctccaccgcggtggcggccgcataatttaataacatcgtccttccatttggccgcgactgctctggaaaattggttcagtagtaaacagaattctagcaggtggaacaagaacaggcgaggcatcctgggcctggtctctcctggaggtctgggtgttgcagcctttcaggactgcgggtgtctgggggcctacaccacctgggccctgtggtccccgcgtactctcggccgcctctagaactagtggatctccccgggcctgcaggtaattctgatactcaagccttattcgatactcgtcgactctcgagggggggggcc

SEQ ID NO: 33844 - DNA, 452 bp, Homo sapiens
cgactactatagggcgaattggagctccaccgcggtggcggccgccacgctggttttgcatcttcaggagacgctcgtagccctcgcgcttctcctcggccaattcgcggaagaagtggctcacgccttccagagccacatcatcgcggtcgaaatagaagcccagagagaggtaggtgtaggaggcctgcaggtaccttggcccgttctagaactagtgggatcccccggccggcaggaattcaatatcaagcttatcgataccgtcgacctcgagggggggcccggtacccagcttttgttccctttagtgagggttaattgcgcgcttggcgtaatcatggtcatagctgtttcctgtgtgaaattgttatccgctcacaattccacacaacatacgagccgggagcataaagtgtaaagcctggggtgcctaatgagtgagctaactc

SEQ ID NO: 33845 - DNA, 457 bp, Homo sapiens
agggcgaattggagctccaccgcggtggcggccgcccgggcaggtaccagcttcagcatcactgggaagcttattagaaatgcagaacctcaggccctgcttactgaacaaaaatccacagagtctccaggctgctcatgacttacttcctcatgtctgcctctccagctttctggaggagggactgggctggggcttgggcccatactcctggtttaagcccctggtgccagggttgtaagcagcacaccgaggctgctctgaaaccaactgatttagcttgagctatcaatattgtgtggctcagctgggggtccccttcctcctctgtctgcaatggttgtttgtttttgaggcagagtctcactctgtcacccaggctggagtgcagtggcacaatcagctcactgcaacttctgcctttccggattcaagcaattctcctgcctcagcctcc

SEQ ID NO: 33846 - DNA, 421 bp, Homo sapiens
ggagctccccgcggtggcggccgaggtacttatcattccatctgcgtgcttctccgcattactctggtctttggcaatctgcagcaacacaatgcagtgtttaattgattctaccatgctatttgttgtctctttgagagtttcaattttctttccctgttcatcttctttgcagttttgaaaccttggcttcaaaaaaaggctttaaattgttcaatcaagatttgttggtaagcatcacctcctgaagtttcttatcaaaatcttggacactaggaacaaatcctgaatccaaaccttgaagctggagagtatgtcgaagaattgtttcttctaaggcatggatccacttctctcgctcatcagcatcacgggcctggaaatggaaggttttttgatcaacagttattgtgaaggtgct

SEQ ID NO: 33847 - DNA, 468 bp, Homo sapiens
cgactcactatagggcgaattggagctccaccgcggtggcggccgaggtactcacacagtcatcacccctacccgtgcacagatggccacttctgcctccatccactcaatgccaacaggcacgattcctccactgacaacgctcacggccacagggtccacacacacagcctcaccaatgacggggaccaccattcggaccaccccaagcccacagctcattcagcatagcccggacaaaaaaaaaaaaaaaaaaaaaaggtccagagatttaaatgaaatcttcgaaagaataaatttgcttttcagtccactgtattttcaaaattgattatcaccaagcttggatgaaagctgtgaaccacaaaccatttgtttatttaatagaaaaaagaatgtgtagacccgcgtaccttcataacttcttcaagataccgggttgaacttccatttgcatatgcagtttgt

SEQ ID NO: 33848 - DNA, 475 bp, Homo sapiens
agggcgaattggagctccaccgcggtggcggccgcccgggcaggtaccagttgtaaaattaccaggaaccgccatgcctcaagatcgccctgttttctggcttcatcaatgactgcatgcagtgcaccaccctgtccactacgtgatgctgtaggattaagtctcacagtgggcggctgaggatacagcgccgcgtcctgtgttgccggtgaattagacgccatcgctgtgggttgctggtatggtgccgtgctatttggcacaggacacaccgcttgaggtctgtattgaacctctgaaggaggccgatactgaagctcggttggcagccggtattgataaactaccagcggttgggtcttattttctaccggctgatattgtggatactgtatctgagttggcattgccgggatagagactctgtccctttctacttgattttctcttggggtttgtgcttgtctaacctgcg

SEQ ID NO: 33849 - DNA, 460 bp, Homo sapiens
cgactcactatagggcgaattggagctccaccgcggtggcggccgcataatttaataacatcgtccttccatttggccgcgactgctctggaaaattggttcagtagtaaacagaattctagcaggtggaacaagaacaggcgaggcatcctgggcctggtctctcctggaggtctgggtgttgcagcctttcaggactgcggctgctgtggcctacacacctgggcctgtgtgcctgtcccgggctttaggctgctttccctccccgcgtacctcggccgctctagaactagtggatcccccgggctgcaggaattcgatatcaagcttatcgataccgtcgacctcgagggggggcccggtacccagcttttgttccctttagtgagggttaattgcgcgcttggcgtaatcatggtcatagctgtttcctgtgtgaaattgttatccgctcacaatt

SEQ ID NO: 33850 - DNA, 468 bp, Homo sapiens
cgactcactatagggcgaattggagctccaccgcggtggcggccgaggtacgcggggactgactggttgagccgggtagggaaagcagcctaaagcccgggacaggcacacaggcccaggtgtgtaggccacagcagccgcagtcctgaaaggctgcaacacccagacctccaggagagaccaggcccaggatgcctcgcctgttcttgttccacctgctagaattctgtttactactgaaccaattttccagagcagtcgcggccaaatggaaggacgatgttattaaattatgcggccgctctagaactagtggatcccccgggctgcaggaattcgatatcaagcttatcgataccgtcgacctcgagggggggcccggtacccagcttttgttccctttagtgagggttaattgcgcgcttggcgtaatcatggtcatagctgtttcctgtgtgaaattgttat

SEQ ID NO: 33851 - DNA, 469 bp, Homo sapiens
atacactactatagggcgaattggagctccaccgcggtggcggccgcccgggcaggtaccccactcccagacaccattgaccagatgctaagagtcaaaggaatgaaacacagaaaaactccaagtcacacaaggatgttaaaagatggtcaagaaaggcccacaatccttaaaagcacagccttctaacatcgctttcagtaagggagaaaactgaagaggaaagactgtcttgccagaaatggccagcttgtgcagactccgagtccttcagtgacaaaggcctttgctgtttgtcctcttgacctgtgtctgacttgctcctggatgggcacccacactcagaggctacatatggccctagagcaccaccttcctctagggacactggggctacctacagacaacttcatctaagtcctaactattacaatgatggactcagcaccttcaaagcagttaatttttc

SEQ ID NO: 33852 - DNA, 477 bp, Homo sapiens
ctactatagggcgaattggagctccaccgcggtggcggccgcccgggcaggtacaggggaaaagagctctccatttctcagcaggggacaccctggtccccactgccactttgtttgccctccaagggaaaaacctctcaataccaggtccaggagcagctggatgggatcactcagaacccggccgctctagaactagtggatcccccgggctgcaggaattcgatatcaagcttatcgataccgtcgacctcgagggggggcccggtacccagcttttgttccctttagtgagggttaattgcgcgcttggcgtaatcatggtcatagctgtttcctgtgtgaaattgttatccgctcacaattccacacaacatacgagccgggagcataaagtgtaaagcctggggtgcctaatgagtgagctaactcacattaattgcgttgcgctcactgcccgctttccagtcgggaaac

SEQ ID NO: 33853 - DNA, 614 bp, Homo sapiens
gcgcgcgtaatacgactcactatagggcgaattggagctccaccgcggtggcggccgaggtaccaggagggtattgatgtttgaggtccaaactgaaaacccatcacctccttcccactgctatagcagcgttagccctggggttcattatctagccagtccacaccttctaaagtggggctctgaaaatgtcttactccctcacagacaaagcaattctcaagcctcctgagatcacccaccaaccagagcaactgctgtcacttggaggtgcagctgaattcttctaattgtgacacaaactcttgaaactgtaaatgctgaaagattaaatgaggttataacactcagaaggttttacaagtaaaagtaagtcaaatcaataggtctttatttcatatctgtaatggtttagctctgcgggaagtgttagcagctatatgaattaggaagaatttagaagacaatccctaaacacatgaaatgtccaagtaagaagataacatatttatccaaatatttaaagtgaaatgctccagatatgggaagcttacagttttcaagcaaagctttttagaaaaaattatggaactattttaaagagagctaaacat

SEQ ID NO: 33854 - DNA, 479 bp, Homo sapiens
cgcgcgtaatacgactcactatagggcgaattggagctccaccgcggtggcggccgaggtacttgcccccaggcccagataatttatttaaaaactttttttgtagagacagggtctcactatgttgcccaggctggtctcaaactcctggcctcaaacaatcctctacctcaacccccctaagtgctggcattacaggatcagctgccatgcctggctacaaatcttaatgttttccccatggcttctttttctggcgttcttttctcaggtaatggaagtgggcagagaatgatcctttccctaggctccagtgtgtaagaattaaagaaagaggaaagaaacacaatggcttgatggtcgaggacaggtttattttaaagaaaacaaacccaagagtggcttctggctgagttagatcagaggcatgctctcttacagactaaaagtttttaaggattcagggtgggagagtttac

SEQ ID NO: 33855 - DNA, 542 bp, Homo sapiens
gactactatagggcgaattggagctccaccgcggtggcggccgcccggcaggtacaggggaaaagagctctccatttctcagcaggggacaccctggtccccactgccactttgtttgccctccaagggaaaaacctctcaataccaggtccaggagcagctggatgggatcactaaacccggcgttagaactagtggatcccccgggctgcaggaattcgatatcaagcttatcgataccgtcgacctcgagggggggcccggtacccagcttttgttccctttagtgagggttaattgcgcgcttggcgtaatcatggtcatagctgtttcctgtgtgaaattgttatccgctcacaattccacacaacatacgagccgggagcataaagtgtaaagcctggggtgcctaatgagtgagctaactcacattaattgcgttgcgctcactggcccgctttcagtcgggaaacctgtcgtgccagctgcattaatgaatcggccaacgcgcggggagaggcggtttgcgtattgggcgctct

SEQ ID NO: 33856 - DNA, 412 bp, Homo sapiens
agggcgaattggagctccaccgcggtggcggccgaggtactgaaccaaaacaaacaactgtgtatagactgctgttttcttttttatttgaaatgaggcattttggtgttctttcccctaccatacggcctgtctgcccttccctccccacattggctccagcagagtagccgaaggtcctgccgccgccgccaccaccaccactgcagcaacaacagcagcagcagcagcagcgcctgcatagctccactctgacctgtgaaggaatggggatgaggccaggagctagtgtctaccacggccacacagggagcagtgtgggcccttagcccccaaggggcctgctatgcatgtggctcttttttttttttaaacaccagaaactagattagtcgtaagggttttaattgcc

SEQ ID NO: 33857 - DNA, 233 bp, Homo sapiens
tatagggcgaattggagctccaccgcggtggcggccgcccgggcaggtacccaatcctgtccttgccggtccctcctcgccgggtgggaatcttcgtggattatgaggcccatgacatttctttctacaaagtgactgactatggctcccacatcttcactttcccccgctatcccttccctgggcgcctcctgccctatttttagtccttgctacagcatttggaaccaaca

SEQ ID NO: 33858 - DNA, 322 bp, Homo sapiens
attggagctccaccgcagcggcggccgcccggccaggtactttcttttcctttccactgccatgtctgtgggaataggtggctaggcattgaacaaagagctccgtggccttggccgtgagcaccaacgcctcctggttgatgctggacacctcgggggaactcttcatgatgacccggatgcgggatagaggcagcgagatgaaccgctgatccccgcccttgtctttacccacgaccacgttccgccatcttcccgcccgccacgcgggtccccgcgtacctcggacgatctagaactagtgggatcccccgggctgcag

SEQ ID NO: 33859 - DNA, 418 bp, Homo sapiens
ggccgcccgggcaggtactctctttcagttacccttttgcctccagaagtgcatgttgctccacctgggggcggatataaattacctctagattgtccaaagcccagtctttcccttccctgtgcagccttagaaactaagtagcagtaccagcatggttaggttctgttgagggctctcttctgggttgtagacttccagcttctcactgtgtcctcatgtggccttttgttagtatgtgtaggattcaagcagtgtaaccaggatttctccgggtctcttatctctgttggtctcatttactttcactccagataagctttcttcatgttgcaaatgacatggtcataaatagcctccttgagtccatgtcggtcccatttcagtgacccttttccacgttcccaaggccatccat

SEQ ID NO: 33860 - DNA, 468 bp, Homo sapiens
ctactatagggcgaattggagctccaccgcggtggcggccgaggtacgcggggagggaaagcagcctaaagcccgggacaggcacacaggcccaggtgtgtaggccacagcagccgcagtcctgaaaggctgcaacacccagacctccaggagagaccaggcccaggatgcctcgcctgttcttgttccacctgctagaattctgtttactactgaaccaattttccagagcagtcgcggccaaatggaaggacgatgttattaaattatgcggccgctctagaactagtggatcccccgggctgcaggaattcgatatcaagcttatcgataccgtcgacctcgagggggggcccggtacccagcttttgttccctttagtgagggttaattgcgcgcttggcgtaatcatggtcatagctgtttcctgtgtgaaattgttatccgctcacaattccacacaacata

SEQ ID NO: 33861 - DNA, 437 bp, Homo sapiens
ctactatagggcgaattggagctccaccgcggtggcggccgcccgggcaggtacgcgggggcggcgcgggtcctccatatgctgagcgccggtcccctgggcccacttttctttctctatactttgtctctgttgtctttcttttctcaagtctctcgttccacctgaggagaaatgcccacagctgtggaggcgcaggccactccatctggtgcccaacgtggatgcttttctctagggtgaagggacttctcgagtgtggtcattgaggacaagtcaacgagagattcccgaggtgaaggtacctcaaatttgagcagtttttgtgtttgtgtaaattaaagtaaaaagcaatccacaataatgttttgtaatactgcacaccagttctaccagattttgtaactatcagatttaaatgaaaaaagagaaggaag

SEQ ID NO: 33862 - DNA, 463 bp, Homo sapiens
cactatagggcgaattggagctccaccgcggtggcggccgcgaattagttcgcgcgcagattgccatttgcggcatgagcacctggagcaaaaggtctctgagccaggaagatgctcctcagacacctagaccagtggcagaaattgtgccatccttcatcaacaaagatacagaaaccataaatatgatgtcagaatttgttgctaatttgccacaggagcctgaagttaacccctgtctgagatgcagcccagcattaccacagctacaacaacatgttaccttggccgctctagaactagtggatccccccgggctgcaggaattcgatatcaagccttatcgataccgtccacctcgagggggggccccggtacccagcttttgttccctttagtgagggttaatttgcgcgcttggcgtaatcatggttcatagctgtttcctgtgtgaaattgttat

SEQ ID NO: 33863 - DNA, 447 bp, Homo sapiens
cgactcactatagggcgaattggagctccaccgcggtggcggccgcccgggcaggtaccatgaacaagctggccacagccatgcaggagggggagtatgatgcagagcggccccccagcaagcctccaccggttgaactgcgggctgctgcccttcgtgcagagatcacagatgctgaaggcctgggtttgaagctcgaagatcgagagacagttattaaggtagttgaagaagtcactcaagatttaagggagaggagctaagtgaggccaatgtgcggctgagcctcctggagaagaagttggacagtgctgccaaggatgcagatgagcgcatcgagaaagtccagactcggctggaggagacccaggcactgctgcgaaagaaggagaaagagtttgaggagacaatggatgcactccaggctgacatcgaccagctggaggc

SEQ ID NO: 33864 - DNA, 408 bp, Homo sapiens
gcgaattggagctccaccgcggtggcggccgcccgggcaggtacttgtggaacaacatcaaaaggtggcaggccatatacaaacagttcgacactgaccgatcagggaccatttgcagtagtgaactcccaggtgcctttgaggcagcagggttccacctgaatgagcatctctataacatgatcattccacgctactcagatgaaagtgggaacatggattttgacaacttcatcagctgcttggtcaggctggacgccatgttccgtgccttcaaatctcttgacaaagatggcactggacaaatccaggtgagcatccaagagtggctgcagctgactatgtattcctgaactggagccccagacccgccccttcaccgccttgctataggagtcacctggagcc

SEQ ID NO: 33865 - DNA, 277 bp, Homo sapiens
tatacgactcactatagggcgaattggagctccaccgcggtggcggccgaggtaccagtcaaacgtcactcagatgcagtcttcactgacaactatacccgccttagaaaacaaatggctgtaaagaaatatttgaactcaattctgaatggaaagaggagcagtgagggagaatctcccgactttccagaagagttagaaaaatggatgaaaaaagaccttttggagccaaagcctgatgacaaacttcccagtggaattctttgaaggaaaaatg

SEQ ID NO: 33866 - DNA, 407 bp, Homo sapiens
acgactcactatagggcgaattggagctccaccgcggtggcggccggggctggcgcggtgcatcgtgggcactgtagtttccgccgcgtttatggccgcgttaagtctgagtgccgctttgagttgttgaatgaagtgaacttcatttgtcagcgttcggtacctcggccgctctagaactagtggatcccccgggctgcaggaattcgatatcaagcttatcgataccgtcgacctcgagggggggcccggtacccagcttttgttccctttagtgagggttaattgcgcgcttggcgtaatcatggtcatagctgtttcctgtgtgaaattgttatccgctcacaattccacacaacatacgagccgggagcataaagtgtaaagcctggggtgcctaatgagtg

SEQ ID NO: 33867 - DNA, 521 bp, Homo sapiens
gactcactatagggcgcaatggagctccaccgcggtggcggccgaggtacatgttgtgggtgccgctccgggagtcatagcgcagccagatcccgaagttcttcacccgcacgggggacttctcaaacacctgcccacagtagacaatctcccctgaagacttcttcatcttctttaacatgagatacaaagtactgtgaagatattgtaaacacagctgcatggggaggtcagcttgagctaagagctctgtctcacattttacaaacaccaatagagataatacaggcagattctcctcccattatagttggtgaagaatattcaaaaaaaccactaatacttgtatatattgagacatgcatatggcttatgagaacattataattcggttacacggttggtaaacatagttactgaaaattgcagctaatttatacaatgttgtacctgcccgggcggccgctctaaaactagtggatcccccgggctgcaggaattccatatcaagcttatcgata

SEQ ID NO: 33868 - DNA, 588 bp, Homo sapiens
ctcactatagggcgaattggagctccaccgcggtggcggccgcataatttaataacatcgtccttccatttggccgcgactgctctggaaaattggttcagtagtaaacagaattctagcaggtggaacaagaacaggcgaggcatcctgggcctggtctctcctggaggtctgggtgttgcagcctttcaggactgcggctgctgtggcctacacacctgggcctgtgtgcctgtcccgggctttaggctgcccccgcgtacctcggccgctctagaactagtggatcccccgggctgcaggaattcgatatcaagcttatcgataccgtcgacctcgagggggggcccggtacccagcttttgttccctttagtgagggttaattgcgcgcttggcgtaatcatggtcatagctgtttcctgtgtgaaattgttatccgctcacaattccacacaacatacgagccgggagcataaagtgtaaagcctgtggtgcctaatgagtgagctaactcacattaattgcgttgcgctcactgcccgctttccagtcgggaaacctgtcgtgccagctgcattaatgaatc

SEQ ID NO: 33869 - DNA, 626 bp, Homo sapiens
gtaatacgactcactatagggcgaattggagctccaccgcggtggcggccgcccgggcaggtactttcataaacaaataggaaaatgtgatctattgcttcttttcttggtccgtgcccctcgccttgctaagtcagtttttcgactgcctgtgtgtgtgtgtgtgtgtgtgtgcatgtgtgtgtgcgtatgtgtgtccagaggccactgatccagtccaagtgtatttagaaattatttcagtggctcacaaaggtcttagaggccactactgcgctggggaaatccattgagcttggcttgttctctcttgctcttgccaatgtgcactctgcttacatgcacacactccttaggaagatgccagttatctctattttatgtacctcggccgctctagaactaggggatcccccgggctgcaggaattctatatcaagcttatcgataccgtcgacctcgagggggggcccgggtcccagcttttgttccctttagtgagggttaattgcgcgcttggcgtagtcatggtcatagcttgttcctgtgtgaaattgttatccgctcacaattccacacaacatacgagcccggagcataaagtgtaaagcctggggtgcctaatg

SEQ ID NO: 33870 - DNA, 573 bp, Homo sapiens
  misc_feature 145, 369: n = A,T,C or G
tggcggccgcccggcaggtacgcggggaagaaggacatttctggtagctggtcgaggttggtgacgttgaggatctaaattaagacagtattataggaatggggaagaggaggcaaagtcaagaacaatgtgaactatcaaaccncaggacctatactataaatgagagggaggaaggaccaaggatgcttcttatgtagctgccttctattcctgggtgactggttgcacagtctccttagagaatccaggaacagagagaatatataccttccactggaagaatctcaaacagcgctgcttactcaggatcagtggcaccagccaactcagctttgggacaaacccagccaagtgaccaggacactntagtgcaaagagctgagcacattccagcagggaaacgaactccgatgtgcgcccattgtaaccaggtcatcagaggaccattcttagtggcactggggaaatcttggcacccagaagaattcaactgcgctcactgcaaaaatacaatggcctacattggatttgtagaggagaaaggagccctgtattgtgagctgtgctatg

SEQ ID NO: 33871 - DNA, 530 bp, Homo sapiens
  misc_feature 19: n = A,T,C or G
ggcggccgaggtacgcggngactgactggttgagccgggtagggaaagcagcctaaagcccgggacaggcacacaggcccaggtgtgtaggccacagcagccgcagtcctgaaaggctgcaacacccagacctccaggagagaccaggcccagatgctcgcctgttcttgttccacctgctagaattctgtttactactgaaccaattttccagagcagtcgcggccaaatggaaggacgatgttattaaattatgcggccgctctagaactagtggatcccccgggctgcaggaattcgatatcaagcttatcgataccgtcgacctcgagggggggcccggtacccagcttttgttccctttagtgagggttaattgcgcgcttggcgtaatcatggtcatagctgtttcctgtgtgaaattgttatccgctcacaattccacacaacatacgagccgggagcataaagtgtaaagcctggggtgcctaatgagtgagctaactcacattaattgcgttgcgctcact

SEQ ID NO: 33872 - DNA, 456 bp, Homo sapiens
atacgactactatagggcgaattggagctccaccgcggtggcggccgcccgggcaggactgggctaaaaaatagccctcagcatcgcaattcctgatgagggtgtcccggttggagaccatgccccaagctgctatgccaatggccacaatattctcctctgaactcctgctgatggtgttatctctcaccacctccccgatgtacaagaagaacataggtaaatttcaagaggaagccaatatttatgctgccaaaacagctgtcactgctaccaatgtgtcagcccatggaagccaaactaactcgccctcaactcccaactcggctggttcttccagttcttttaacatgtcaaactctggagatttgttcatgagcgtgcagtcactcaatggggattcttaccaaggggcccaggttggagccaacgtgcaatcacaggtggatacccttc

SEQ ID NO: 33873 - DNA, 449 bp, Homo sapiens
  misc_feature 371: n = A,T,C or G
actatagggcgaattggagctccaccgcggtggcggccgcccgggcaggtaccgcctctgtccctaccttgtctgttagccatgtggctgccccatttatccacctccatcttctttgcagcctgggtggctatgggtacacaaatacaaacatgcactcccccacacacacacatacatggacacacacagaggcatatcatgcattatcttccctcattcatcgatattctcaaatggcttattacacagatttacattcacaaatattctattatgtaaatgtaaatctattctattatgtgaatgtaaacctatataatatatttagccattttctcagttggatattttggttatttctatgttgncacaattttaaatcacattgaaataaactaggcccctttgactcctttctttctctcttactccatgtggtagactaa

SEQ ID NO: 33874 - DNA, 446 bp, Homo sapiens
ctactatagggcgaattggagctccaccgcggtggcggccgcccgggcaggtaccctagttccacacccaaatcccataaaacaattatctccagcctctcatcctcatcccatccatttttggttagaccccaggtaaagggtagggtgcccaaatacttccttgctgagctgggaggaaggcagaggcagaaaatgtaaagctccagattcattttatacaggtccttctgggctctcactgccagtctctgagcttgatccatctccccaagccgaagcccaaagggaaatgcaatgaggtatttcaaaggcttattcttagcttctgagcttctgaatgaattgcattctattcatccagggagccctggatgcccctgttttcttgaggatgtcttggtcccccagaagtccttaaatcccagccaccccatgccttccag

SEQ ID NO: 33875 - DNA, 449 bp, Homo sapiens
tatagggcgaattggagctccaccgcggtggcggccgaggtacgcgggggcagacacccagccactctgagcagaactgacagcatgaaggcactcctggccctgccgctgctgctgcttctctccacgcccccgtgtgccccccaggtctccgggatccgaggagatgctctggagaggttttgccttcagcaacccctggactgtgacgacatctatgcccagggctaccagtcagacggcgtgtacctttagtggttgccaatctgggcatgtctgaacaactgggttataaaactgtatcaggttcctgtatgtccactggttttagccgagcagtacctgcccgggcggccgctctagaactagtggatcccccgggctgcaggaattcgatatcaagcttatcgataccgtcgacctcgagggggggcccggtacccagcttt

SEQ ID NO: 33876 - DNA, 449 bp, Homo sapiens
actactatagggcgaattggagctccaccgcggtggcggccgaggtacgaaggcagtttggagctggggctaagcagctgtcgcacggtcagatcatgggctccaccaagcactggggcgaatggctcctgaacttgaaggtggctccagccggcgtctttggtgtggcctttctagccagagtcgccctggttttctatggcgtcttccaggaccggaccctgcacgtgaggtatacggacatcgactaccaggtcttcaccgacgccgcgcgcttcgtcacggaggggcgctcgccttacctgagagccacgtactataaggaattcaagttaacagaggcttgatttatataaaagaaagctgcagttttaaagttgtgttccttaaagaccagattatagcttatctgaatgggcttgacactttcaaatggaataaagttacaa

SEQ ID NO: 33877 - DNA, 441 bp, Homo sapiens
atatagggcgaattgaagctccaccgcggtggcggccgaggtaccggcggatgtcggtggtctacgggatcggcacctggtctgtgttgggctcactgctttactatagccggacaatggcgaagtcgtcagtagaccaaaaggatggctcagcaagtgaagtactttcaggatgctttttgtatgtatatcacatagagtaggttggtttcctgagtaattgggattccaactagatagtcattggtgtgaccataataaaaacaaaagctaaaataaaagcatcagatttagactggcgctgtgccctctaccactatatgccaaaaattgcttctctagtgccattttgatattatatctagctataaattatacatgactattgttttctattgaatgtcaaagacttactgggtctttacacctctgtaaagtgga

SEQ ID NO: 33878 - DNA, 477 bp, Homo sapiens; identical to SEQ ID NO: 33852

SEQ ID NO: 33879 - DNA, 466 bp, Homo sapiens
tacgactcactatagggcgaattggagctccaccgcggtggcggccgaggtactgttacttccttttgctgtcagagggttgttgacaatggcaaggggggatgttagtgagatccaggtggtggtggcttcttggtccactcagcttgcacacatgcaagaggagggtctgtggcccctcagccgtgctggtggcctgcttcctcaagctttaacttgtgccctccctggcaacagggagtcatgggttaatgtcacctgtcatgcctctttcttcagggaaaatattaaaaggctcaaatccaagctgtgacttcccttagacagtgtaagcctgtagggtgcacccccaagtttatgtccaaaggctgcctcagaaccctggagggagcagcgcccagctggcagctcactctccccttgcagttcactggccttttcgcagccaggctaagataggcagtgc

SEQ ID NO: 33880 - DNA, 463 bp, Homo sapiens
tacgactactatagggcgaattggagctccaccgcggtggcggccgcccgggcaggtacaggtgaatgactggcccactctcccttgctccacttccacatgtttctcagcggtcggtcatgtttcaagctgcttgtgcagctcaccgacatttcttactgggttaatctcttcagagacattcaacttgctgacatccccacattttcccaggagattataagctgccccagcagcagggtttggggcagaagtgagaggggcaggctatctcaccaatctcctcttggactcaggaactcttgcaaaggtttcaaagatgaggaagaatctaaaagaaaagatcattaagctgtgcccagtgttcctcttgcaacaattctggaacaaaactttaccctgtttccaaatttaagctaaattcgttgtattatgcaaatgtagggacgtaacttgtaaaact

SEQ ID NO: 33881 - DNA, 461 bp, Homo sapiens
actactatagggcgaattggagctccaccgcggtggcggccgaggtactctgaagatggatagcaatggtgtgatcacagtaaagcctgacttcacgggcctcaaaggaccctacaggattgagacggagggggagaagcaggagctgtggaaatatacgatcgacaatgtttccccccacgcacagccggaggaggaggagcgggaacggcgagtgttcaaggatctttatggccggcacaaggagtatctcagcagcctcgtaggcaccgactttgagatgactgtcccaggtgccctccggctctttgtaaatggagaggtcgtttcagcccaaggctatgagtatgacaatctctacgtccacttctttgtagaattgccaactgctcactggtcaagcccagcattccagcagctctcaggagtaacacagacctgcaccaccaagtccctggcaa

SEQ ID NO: 33882 - DNA, 462 bp, Homo sapiens
atacgactactatagggcgaattggagctccaccgcggtggcggccgcccgggcaggtaccatggtggtgggagaaaatgaccactggccaagaggactgctgacctgtgcaccagatggaaaaactgcaactcagaaatgtaaagtgagtcgaccaaggctaaagcggcaaaaccactatactttataacacagagtttggcactatttccactttgttctctctcaaagatgaaggctcaggaggagggaagataaaaacaaatcactggagagtcctggcatgccggaacatggactctagctagcaagaagggctcaaggaggtggccttctcctagacctcaactttgatgcaaaagctgttttgcagcctgaacaaagacaatccaatcctccagcaaatggcgtcatttttccctacgtgtctagccttgagctacagaacaaaagaacaatcac

SEQ ID NO: 33883 - DNA, 459 bp, Homo sapiens
ctatagggcgaattggagctccaccgcggtggcggccgaggtacatctacctaaaggactattatgtggaataatacatactaatgaagtattacatgatttaaagactacaataaaaccaaacatgcttataacattaagaaaaacaataaagatacatgattgaaaccaagttgaaaaatagcatatgccttggaggaaatgtgctcaaattactaatgatttagtgttgtccctactttctctctcttttttcttcctttttttttattatggttagctgggactagaggaacgtgccaccatgactggctaattttctgtattttttagtagagacagagtttcaccatgttggccaggatggtctcgatctcctgaccttgtgatccacccgcctcaacctcccaaagtgttgggattacaggtgtgaaccactgtgcccggcctgtgtacctg

SEQ ID NO: 33884 - DNA, 454 bp, Homo sapiens
tatacggcgaattggtgctccaccgcggtggcggccgcataatttaataacatcgtccttccatttggccgcgactgctctggaaaattggttcagtagtaaacagaattctagcaggtggaacaagaacaggcgaggcatcctgggcctggtctctcctggaggtctgggtgttgcagcctttcaggactgcggctgctgtggcctacacacctgggcctgtgtgcctgtcccgggctttaggctgctttccctacccggctcaaccagtcagtccccgcgtacctcggccgctctagaactagtggatcccccgggctgcaggaattcgatatcaagcttatcgataccgtcgacctcgagggggggcccggtacccagcttttgttccctttagtgagggttaattgcgcgcttggcgtaatcatggtcatagctgtttcctgtgtgaaat

SEQ ID NO: 33885 - DNA, 440 bp, Homo sapiens
tacgactactatagggcgaattggagctccaccgcggtggcggccgaggtacgcgggggcagcctaaagcccgggacaggcacacaggcccaggtgtgtaggccacagcagccgcagtcctgaaaggctgcaacacccagacctccaggagagaccaggcccaggatgcctcgcctgttcttgttccacctgctaaaaattctgtttactactgaaccaattttccagagcagtcgcggccaaatggaaggacgatgttattaaattatgcggccgctctagaactagtggatcccccgggctgcaggaattcgatatcaagcttatcgataccgtcgacctcgagggggggcccggtacccagcttttgttccctttagtgagggttaattgcgcgcttggcgtaatcatggtcatagctgtttcctgtgtgaaattgt

SEQ ID NO: 33886 - DNA, 451 bp, Homo sapiens
actactatagggcgaattggagctccaccgcggtggcggccgaggtacaggaagcatggcggcttctggggaagacttacgaaactttgactcatggtggaaggcaaagtgggagcaggcgtcttacatggctgacgaggtccttgccttcctcccgcctcatcttttcaaactgtgtggtgctcttgatgctctggccaccttgaccttccttttgatccatgaatccccgagtatcattcttgctgggggacgcttttctcttgctgtctcccacggttggaatgcactttccctggatcttacaatggctggtgttttctcatcacatgtcacatccttaagagacggtttttctgacccctgtctccagtatgagtgtcctgcacccatcttcctctgtcctatcacccccgcgtacctgcccgggcggccgctctagaactagtgg

SEQ ID NO: 33887 - DNA, 459 bp, Homo sapiens
actactatagggcgaattggagctccaccgcggtggcggccgcataatttaataacatcgtccttccatttggccgcgactgctctggaaaattggttcagtagtaaacagaattctagcaggtggaacaagaacaggcgaggcatcctgggcctggtctctcctggaggtctgggtgttgcagcctttcaggactgcggctgctgtggcctacacacctgggcctgtgtgcctgtcccgggctttaggctgctttccctacccggctcaaccagtcagtccccgcgtacctcggccgctctagaactagtggatcccccgggctgcaggaattcgatatcaagcttatcgataccgtcgacctcgagggggggcccggtacccagcttttgttccctttagtgagggttaattgcgcgcttggcgtaatcatggtcatagctgtttcctgtgtgaaat

SEQ ID NO: 33888 - DNA, 428 bp, Homo sapiens
gcgaattggagctccaccgcggtggcggccgcataatttaataacatcgtccttccatttggccgcgactgttctggaaaattggttcagtagtaaacagaattctagcaggtggaacaagaacaggcgaggcaccctgggcctggtctctcctggaggtctgggtgttgcagcctttcaggactgcggctgctgtggcctacacacctgggcctgtgtgcctgtcccgggctttaggctgctttccctacccggctcaaccagtctccccgcgtacctgcccgggcggccgctctagaactagtggatcccccgggctgcaggaattcgatatcaagcttatcgataccggcgacctcgagggggggcccggtacccagcttttgttccctttagtgagggttaattgcgcgcttggcgtaatcatg

SEQ ID NO: 33889 - DNA, 671 bp, Homo sapiens
tatacgactactatagggcgaattggagctccaccgcggtggcggccgaggtacagaacagtaaagttaaaacggatgtctccattgatctgccaaatcgttatagagagcaatttgtctggactagaaaatctgagttttacaccatactgttaagagtccttttgaattaaactagactaaaacaagtgtataactaactaacaagattaaatatccagccagtacgcggggggctatttaggacggaagctcggttggtgtttctccagaagtttcccccttgggcggtggtggaggtggtaaccgtgatagtagcagctccggcggcagcaacagcgactacgagggatggcggcggctgcagcaggaactgcaacatcccagaaggtttttccagagcttctcggatgccctaatcgacgaggacccccaagcggcgttagaagagctgactaaggctttggaacagaaaccagatgatgcacagtattattgtcaaagagcttattgtcacattcttcttgggaattactgtgttgctgttgctgatgcaaagaagtctctagaactcaatccaaataattccactgctatgctgagaaaaggaatatgtgaataccatgaaaaaaactatgctgctgccctagaaaactttacagaaggacaaa

SEQ ID NO: 33890 - DNA, 512 bp, Homo sapiens
agctccaccgcggtggcggccgaggtacgcggtgagggaaagcagcctaaagcccggaacgggcacacaggcccaggtgtgtaggccacagcagccgcagtcctgaaaggctgcaacacccagacctccaggagagaccaggcccaggatgcctcgcctgttcttgttccacctgctagaattctgtttactactgaaccaattttccagagcagtcgcggccaaatggaaggacgatgttattaaattatgcggccgctctagaactagtggatcccccgggctgcaggaattcgatatcaagcttatcgataccgtcgacctcgagggggggcccggtacccagcttttgttccctttagtgagggttaattgcgcgcttggcgtaatcatggtcatagctgtttcctgtgtgaaattgttatccgctcacaattccacacaacatacgagccgggagcataaagtgtaaagcctggggtgcctaatgagtgagctaactcacattaatt

SEQ ID NO: 33891 - DNA, 565 bp, Homo sapiens
tacgactcactatagggcgaattggagctccaccgcggtggcggccgcccgggcaggtactttttttttttttttttttttttttggatttttatggactctttattagggtattaagatattgaaaataatacacgtaaaccacaaaagagtagcattccattttcttgaagtgcacatgatattatgaacaatcaaatgcattatttttatcattaatagtttaatcattaattatctcataagtcaatgcagagagtgaaattactatgaattaaacttctgttcacaatgtactgggcgggtgaaacgattaccacccatagtgcgaggaggagccatcgacagatactggcccaccgccgacgggcgcctggttgaatatgacatagatgaagtggtatatgacgaagattcaccttatcaaaatataaaaattctacactcgaagcagtttggaaatattctcatccttagtggggatgttaatttggcagagagtgatttggcatatacccgggccatcatgggcagtggcaaagaagattacactggcaaagatgtg

SEQ ID NO: 33892 - DNA, 623 bp, Homo sapiens
  misc_feature 47: n = A,T,C or G
tatacggcgaattggagctcaccgcggtggcggccgaggtacgcggnggaaacaaatcaaatgtttgttctcaaattcttactctgtcatttattattctccatgtttttgtaactgcttccttggagatatttaaacataaatatatacagagagggtgaagatggaggagtgcttttacagttcacagtcgtctttttcatgtgtgacaggtttttgctgtgttgcccaggctggagtgcaatgccacaatcttggctcactgcagcctcaacttcccgggctcaatcgatcccccacctcagcctcccgagtagcaaggactacaggcgcacaccaccacacctagctaatttttgtatcttttgtagagacagggttttaccatgttgtccaggctggttttgaactcttgggctcaattggtcctagcacctcagcctcctaggtgctgggattacaggtgtgagccgctgtgttcagccaatactcttaacgtttttacttttcacttttaaaaattaactctttttatgaaaaaagtagaattttttaaagagcagagaaaagcacaatgaagacagaaagatcacctgtatattcttattgaccaaagatgatct

SEQ ID NO: 33893 - DNA, 534 bp, Homo sapiens
tatcagtctgttgtttcttcatttcttctttttctatgctctttttacaatttcagctactccagaagctcagattttccctattccaagctatgagatgtgatgccacattgcattgccttcttgatatccccttctgagaatgcattgcctgctttttaactcattatattcaaaactaaattcatcatcattctctccttacaccagttctcaccctgactttgccatttttccttactaagtacgcgggggttttttttcttgctgcagcaacgcgagtgggagcaccaggatctcgggctcggaacgagactgcacggattgttttaagaaaatggcagacaaaccagacatgggggaaatcgccagcttcgataaggccaagctgaagaaaacggagacgcaggagaagaacaccctgccgaccaaagagaccattgagcaggagaagcggagtgaaatttcctaagatcctggaggatttcctacccccgtcctcttcgagaccccagtcgtgatgtggaggaagag

SEQ ID NO: 33894 - DNA, 518 bp, Homo sapiens
  misc_feature 309: n = A,T,C or G
ctatagggcgaattggagctccaccgcggtggcggccgaggtacatacatagttacatgaatagaacagatcaaaatttatgaacatttccaaaaagctgtccaaatattcttgtatattgccttacataaaatgaaacaaacgaaagttgataacactcagtctcttaatataatataaattaaaacctaataacatataatagataataggttcccgcgtacatgacaaggtgcggctccctaggcccctcccctcttcaaggggtctacatggcaactgtgaggaggggagattcagtgtggcggnggactgagtgtggcagggactccccagcagtgagggtctctctcttcctcttgtgctcttgctggggctggtggtccaggggtcttactccttggaggccatgtgggccatgaggtccaccaccctgttgctgtagccaaattcgttgtcataccaggaaatgagcttgacaaagtggtcgttgagggcaatgccagccccagcgtcaa

SEQ ID NO: 33895 - DNA, 543 bp, Homo sapiens
agctccaccgcggtggcggccgcataattaataacatcgtccttccatttggccgcgactgctctggaaaattggttcagtagtaaacagaattctagcaggtggaacaagaacaggcgaggcatcctgggcctggtctctcctggaggtctgggtgttgcagcctttcaaactgcggctgctgtggcctacacacctgggcctgtgtccccgcgtacctcggccgctctagaactagtggatcccccgggctgcaggaattcgatatcaagcttatcgataccgtcgacctcgagggggggcccggtacccagcttttgttccctttagtgagggttaattgcgcgcttggcgtaatcatggtcatagctgtttcctgtgtgaaattgttatccgctcacaattccacacaacatacgagccgggagcataaagtgtaaagcctggggtgcctaatgagtgagctaactcacattaattgcgttgcgctcactgcccgctttccagtcgggaaacctgtcgtgccagctgcattaatgaatc

SEQ ID NO: 33896 - DNA, 516 bp, Homo sapiens
  misc_feature 362, 478: n = A,T,C or G
agctccaccgcggtggcggccgaggtacgcggtggtccctgaggagcgacctgccggggccacctggctggacgaaaaagacacaccttggacttaagccgtgagaaaaaacttcatcagtaagaagaatgaataaacagactaggttgaatccatacaatggaatgttgcaacaataaaaagaaaatgaactattgatgtcccctactgcacagcagaagctctgaatcgtgttcctgaatgaaagaagtcagagatgaaaagatgggccaggagtccagtttctggaaggccaagaatcgaagtagcaagctgcagccgttttccagacaagcaggatgtggggatgcagaagaattcangactggaggggcaaactccgtaagcaggggctgtcacgattcccatctccctctataaacctctctcttttcatgtcgtacctgcccgggcggccgctctagaactagtggatccnccgggctgcaggaattcgatatcaagcttatcgatacc

SEQ ID NO: 33897 - DNA, 489 bp, Homo sapiens
ctatagggcgaattggagctccaccgcggtggcggccgcccgggcaggtacatttccaaagtcaagagtcaaataaaaaaatcccatggaatttggagcctatttagaactcaaaataatgagaatgctgcaaatcaaaacttgtgacatcccactaaagctgttcttagagggaaatctacccaacacactaaatgcttacattagcaaagaagaaaggctaaaatgaacgagcatccaagttaacatgttagaaaaggagcaacagagaagactcaataaagtaaaaggaaggaaacaataaagataagattagaaatcaatgcaacaagaaaacaaagataaatgctggagaggatcttggttttctgaaaagacaaattaatgggtctcttggcaagactgagaaaggaaaaaagaaggcacaaacacagtaggatgtaaccactcaaaagtatcatgacctgtttcttcccatcacgtggactc

SEQ ID NO: 33898 - DNA, 522 bp, Homo sapiens
cgactcacttagggcgaattggagctccaccgcggtggcggccgcccgggcaggtacgcgggaggccactggttctcaaacattagggtgcactgtaaccattacagagcttgtgaaaagtgcagaaacctgagcctcaccttatgagattctgattcagccagggggaggacaggaatctgtattttcattagcaacctcaagtaatctttattctgagggtctcgggattgcaggttgaaaaacacaaccttaatcagcagtaaattcttctctactcggccaggcgcagcggctcatgcctgtaatcccagcactttgggaggccgaggtgggtggatcacaaggtcaggagttcgagaccagcctgaccaacatggtgaaacgccatctctactaaaaatacaaaaattagccgggcgtggtggtgctcacctgtaatcccagctacccaggaggctgaggcaagagaatcacttgaacccgggaggcaaagggtgcagtaagccgagattgcaccac

SEQ ID NO: 33899 - DNA, 467 bp, Homo sapiens
acgactactatagggcgaattggagctccaccgcggtggcggccgaggtacagctgcccaagggcgttcgtaacgggaatgccgaagcgtgggaaaaagggagcggtggcggaagacggggatgagctcaggacagagccagaggccaagaagagtaagacggccgaggtacgggttctcaccaaaattgggcctgagaaatttgttatatcctgctgtgaggttctcaaagccaggcagggaaagcttgtcacttctgccgacctcgacgttgaactgactcccctggatgcacatcctctcagtgaagagactcagacacacgaaggccaagtggaggctgtagttcatgttgagaagctgctcacaccaaggggctgaagtaggaatcaccaggtagttgttgaggctctgttagggcaagtccttcaggcctacaggcaggacttccaggcaaggcacggtct

SEQ ID NO: 33900 - DNA, 602 bp, Homo sapiens
  misc_feature 40: n = A,T,C or G
agctccaccgcggtggcggccgcccgggcaggtacgcggngggaatgatgcgtatatgattctggcacaaccagttctttccccgaagcagctgttgccaccaccctcttcctgccaggcagtggaggaaggtgcttgcaggagctgcggacacactgttgtgtgtaggatctacttagctggcctcatgttctgcttttgctggcagaattccttgctgaagctgtaagccctcgaatctgatctgtgctctgcatttttaacaaaccaggaagaagctgctcaggtgcatggagtcaaggacccggcgccagcatcaacccagagcgtgcttgccgatgggacagattctgcaggtaagatacagggctgggggttgtcccaaattgtacctcggccgctctagaactagtggatcccccgggctgcaggaattcgatatcaagcttatcgataccgtcgacctcgagggggggcccggtacccagcttttgttccctttagtgagggttaattgcgcgcttggcgtaatcatggtcatagcttgttcctgtgtgaaattgttatccgctcacaattccacacaacatacgagccgggag

SEQ ID NO: 33901 - DNA, 435 bp, Homo sapiens
agggcgaattggagctccaccgcggtggcggccgcataatttaataacatcgtccttccatttggccgcgactgctctggaaaattggttcagtagtaaacagaattctagcaggtggaacaagaacaggcgaggcatcctgggcctggtctctcctggaggtctgggtgttgcagcctttcaagactgcggctgctgtggcctacacacctgggcctgtgtgcctgtcccgggctttaggctgctttccctacccggctcaaccagtcagtccccgcgtacctcggccgctctagaactagtggatcccccgggctgcaggaattcgatatcaagcttatcgataccgactacctcgagggggggcccggtacccagcttttgttccctttagtgagggttaattgcgcgcttggcgtaatcatggtcatagct

SEQ ID NO: 33902 - DNA, 444 bp, Homo sapiens
actactatagggcgaattggagctccaccgcggtggcggccgaggtacaatcagtatctgccatatggctggtctctgtagacgccctttgctgtcctcgctgaaggtgccttgtgtcttgagttagtccactcttcttgcccgtaggaatcataagtctcctcactgagtccatgtccgtaatcatagtaatcagcaccactgcagtgccaccttgggagtgtggcttccacgtgggagtcttcctgttcatctgccaaatcaggggctggtctagacgccgctcaggtctcctggcagctctaacatcttccatggctctttcacagcatctagctccacagtagtcaacataatttctcattttgttgaaaataaactggcaaatgcttcttggaaactcagtgctaaattaaatgaacctcagtcttctttccaagggtc

SEQ ID NO: 33903 - DNA, 453 bp, Homo sapiens
tactatagggcgaatttgagctccaccgcggtggcggccgaggtacgcgggtagcagcctaaagcccgggacaggcacacttggcccaggtgtgtaggccacagcagccgcagtcctgaaaggctgcaacacccagacctccaggagagaccaggcccaggatgcctcgcctgttcttgttccacctgctagaattctgtttactactgaaccaattttccagagcagtcgcggccaaatggaaggacgatgttattaaattatgcggccgctctagaactagtggatcccccgggctgcaggaattcgatatcaagcttatcgataccgtcgacctcgagggggggcccggtacccagcttttgttccctttagtgagggttaattgcgcgcttggcgtaatcatggtcatagctgtttcctgtgtgaaattgttatccgctcacaattcca

SEQ ID NO: 33904 - DNA, 460 bp, Homo sapiens; identical to SEQ ID NO: 33826

SEQ ID NO: 33905 - DNA, 452 bp, Homo sapiens
ctactatagggcgaattggagctccaccgcggtggcggccgaggtacacatatcctgagctatccacagtccccgaactctgcaacattgctttcaggtgatagagacaagatggtccatgcaaatgagctgacacaagtcatgtcgtgtgcaatcaagataggatcccagacatcttcagaatggtttacagtcacaagaaataaagttccaatgaagtggttggcatttggaagcacactgttttaaatatatctccctgaaggtatgtttatatattagtgcactggtcaatatctgacactatctgtcattttattgcaaaaggatatcagggcaattaataggagggatcttagcactactttagacaatctttaaagcctgggtaagattcattagctacccaagtggcatttctgacttcaaattgtagtatcatgcaagattta

SEQ ID NO: 33906 - DNA, 443 bp, Homo sapiens
  misc_feature 192, 193, 235, 236: n = A,T,C or G
acgactcactatagggcgaattggagctccaccgcggtggcggccgcccgggcaggtacgcggggaaggctcttctgtgtcttcctgaccagctgctctgttcccagcttagaggaccagagggagaagccacctgctacacgctggatgctgcagcctgtgccactgtggcttacatcgctgtggttggtnnggcagcaacggagacctggcagccagctggagtggctgtganntgacagtgcttatcaatcctgtccccgccacaccaccaacatacacagaaaaaaagcaggcaatgagttggctccgggatgacctcgtatgaagacgtttcattccttagtcttggcaattgacatcacaaacttgggtacctcggccgctctagaactagtggatcccccgggctgcaggaattcgatatcaagcttatcgatacc

SEQ ID NO: 33907 - DNA, 439 bp, Homo sapiens
acgactcactatagggcgaattggagctccaccgcggtggcggccgaggtactgttacttccttttgctgtcagagggttgttgacaatggcaaggggggatgttagtgagatccaggtggtggtggcctcttggtccactcagcttgcacacatgcaagaggagggtctgtggcccctcagcctgctggtggcctccttcctcaagctttaacttgtgccctccctggcaacagggagtcatgggttaatgtcacctgtcatgcctctttcttcagggaaaatattaaaaggctcaaatccaagctgtgacttcccttagacagtgtaagcctgtagggtgcagccccaagtttatgtccaaaggctgcctcagaaccctggagggagcagcgcccagctggcagctcactctccccttgcagttcactggccttttc

SEQ ID NO: 33908 - DNA, 525 bp, Homo sapiens
  misc_feature 219, 220, 234, 235, 247, 248, 275, 299, 300, 333, 334: n = A,T,C or G
gcgtaatacgactcactatagggcgaattggagctccaccgcggtggcggccgcataatttaataacatcgtccttccatttggccgcgactgctctggaaaattggttcagtagtaaacagaattctagcaggtggaacaagaacaggcgaggcatcctgggcctggtctctcctggaggtctgggtgttgcagcctttcagggactggcggcttgcnntgtggcctacacanncctgggcctgtnngtgcctgtcccgggcctttagggcttngctttcccttacccggcttcaacnncaccccgcgtaccctcggcccgctcttagaacnntagtggatcccccgggctgcagggaattcgatattcaagcttatcgataccgtcgacctcgagggggggcccggtacccagcttttgttccctttagtgagggttaattgcgcgcttggcgtaatcatggtcatagcttgttcctgtgtgaaattgttatccgctcacaattccacacaacatacgagccg

SEQ ID NO: 33909 - DNA, 443 bp, Homo sapiens
caggtacaaagcaacctggttggccaatagttgaattgacaaatgagatcaattaagcagtggctacttgtcaagccaaagtatttattcaggtgttcataaaatcttgaaattactcatattcacaaactttttggacacaatttgcataaagaggaatatatttgtaaacaagacctctgacttgtataagttccttggaaaacaggcaaagcactcttatatatgcagaattattttaattatttcaaagatcaaagttcccactcttggctccccaacttgcctgttcatgtttataggactcattcaagaattttctatatctctatcttatatactctccaagttcataatgctgctccatgcccagctgggtgagttggccaaatccttggggccatgaagattcctttatggggtcagtgggaaaggtgtcaatg

SEQ ID NO: 33910 - DNA, 376 bp, Homo sapiens
gctccaccgctgtggcggccgataactaataacatcgtccttccatttggccgctactgctctggaaaattggttcagtattaaacagaattctagcaggtggaacaagatcaggcgaggcatcctgggcctggtctctcctggaggtctgggtgttgcagcttcaggactgcggctgctgtggcctacacacctgggcctgtgtgcctgtcccgggctttaggctgctttccctacccggctcaaccaccccgcgtacctcggccgctctagaactagtggatcccccgggctgcaggaatccgatatcaagcttatcgataccgtcgaccttgaggggaggcccggaacccagcttttgctacctttagtgagg

SEQ ID NO: 33911 - DNA, 505 bp, Homo sapiens
ctatagggcgaatgggagctccaccgcggtggcggccgaggtacctttgccctcaggcgaggaaggggaatatgtcctggcactgaagcaagagctacgaggagccatgaggcagctcccctacttcatccggccagctgtccccaagggagatgtggagcgttattcagacaaatatcagatgtcaggtccgattgacaatgccatcgattggaaccctgattggcggcgtctaccccgggagctaaagatccgagtgcggaagctacagaaggaacggattacaattctgctccccaagaggccccctaagaccacagaagataaggaggaaacaatacagaaactagagaccctggagaagaaggaagaagaagtaacttcagaggaggatgaggagaaagaagaagaagaaaaaaaaaaaaaagtacctgcccgggcggccgctctagaactagtggatcccccgggctgcaggaattcgatatcaagcttatcgataccg

SEQ ID NO: 33912 - DNA, 542 bp, Homo sapiens
actattgactatagggcgaattggagctccaccgcggtggcggccgaggtacaccaatcaaacatagtgtgtccagaattggtgggttcttggtctcactgacttcaagaacgaagctgcggaccctcacggtgattctaagcacattaaaatctggatgacacttatctgaatcatttcgcacttgagagagatggagaagacacgcatggtgtaactgggcatcaccagaatgtgcactgccatctgtggctgtcttcctgctggcaaatccttttcattccaagcaaataagattccctaaattagacaaaaaggaagaaacacaacagagtccataattctgagaggaagagaagagtgatcatcagcagcaaaaggcaattgcagagaagcaccaccaagagccagcttcatgctcaggagtgaatgctgagccgcctcctcgtggtttccggtgctccacatgttcagagaaacttctctggtaagaaactatagaaatggtgcatggaagtgttactagaaagggttcctgatcc

SEQ ID NO: 33913 - DNA, 394 bp, Homo sapiens
cgactcactatagggcgaattggagctccaccgcggtggcggccgaggtacgcggggtccgccctcccttaagatcacggaagtatcacgcttgcctcttacacaactttttttccttagtctgtatactttctgctgtcactagcataacagaaaagacgaatggcttttgttttaaactgagggcacttttacaaaagtcatctttccatttatttttctttcagaaaaaagaatttgggttttgagcttttttaaaaaaaaaagacaaacactttccttgactttgagaaataatttaagtcaaagaatctgctctatgctaaccaagagatagagcacagcaaagatctgccagccccaggcctttacctagtggcctggaaattcaagt

SEQ ID NO: 33914 - DNA, 532 bp, Homo sapiens
gaattggagctccaccgcggtggcggccgaggtactttttttttttttttttttttttttgggggaaatgaactcattcctgttaagagtctgctctgacagtagcatttgagacattactgctttaaatgcattttcatggttcaaaataatagcactattaaaaaatgtttcttaacaaggatttgttttctccctaagaagcttaatgtggacactacaaataatgaccaaagctgctgagtatggcataacaaagagaaaacaaagcactcatcctgtcctccagatcatgcccagaacactgtctaccaacatgtggcttgccaactggaatgatgcaaatgtcagacccacatctgtggaaaaggggctcgtcccacaggaaacaagctattggggaatggggagaatgatataattagaaatttaagacacagtataactcagaaaaatgttggctgggcagcacattgctaagacttgaaatctttattttgttctcttttcaaaagccctgtgagcataatga

SEQ ID NO: 33915 - DNA, 204 bp, Homo sapiens
gtctgcacgtctactgtggggcgcacagcacaaatggacccagggcctggggctccagggcagttgctgccacacccgccgggtctaccacactacactgagaaacgtcacacggagttggaaaaaagccacagcttgctcagcttccgacaaagagcggattcacagtccgttcgatctcagagaactgagtggggcacccac

SEQ ID NO: 33916 - DNA, 225 bp, Homo sapiens
  misc_feature 218: n = A,T,C or G
ctcactatagggcgaattggagctccaccgcggtggcggccgcataatttaataacatcgtccttccatttggccgcgactgctctggaaaattggttcagtagtaaacagaattctagcaggtggaacaagaacaggcgaggcatcctgggcctggtctctcctggaggtctggatgttgcagctttcaggaactgcggctgctgtggcctacacancctgggc

SEQ ID NO: 33917 - DNA, 470 bp, Homo sapiens; identical to SEQ ID NO: 33802

SEQ ID NO: 33918 - DNA, 413 bp, Homo sapiens; identical to SEQ ID NO: 33784

SEQ ID NO: 33919 - DNA, 323 bp, Homo sapiens
tatagggcgaattggagctccaccgcggtggcggccgaggtacgcggggggaggcgaagaacgcaaagctgagaacatggacgttaatatcgccccactccgcgcctgggacgatttcttcccgggttccgatcgctttgcccggccgctctagaactagtggatcccccgggctgcaggaattcgatatcaagcttatcgataccgtcgacctcgagggggggcccggtacccagcttttgttccctttagtgagggttaattgcgcgcttggcgtaatcatggtcatagctgtttcctgtgtgaaattgttatccgctcac

SEQ ID NO: 33920 - DNA, 413 bp, Homo sapiens
tagggcgaattggagctccaccgcggtggcggccgcccgggcaggtacgcgggggacgccactgcgcacgcgcggccccttctaccgttcccgactccgcggctcttagagggtgggctgtgtcccggctgcggaaacgccaactccaggcgattggcgcgaaggaggcgaaaagggcggattcccttttccggttcgggcccgggctgaaggtcctaatcccgaagctggggttactaggtgaacacggccgctctagaactagtggatcccccgggctgcaggaattcgatatcaagcttatcgataccgtcgacctcgagggggggcccggtacccagcttttgttccctttagtgagggttaattgcgcgcttggcgtaatcatggtcatagactgtttcctgtgtgaa

SEQ ID NO: 33921 - DNA, 481 bp, Homo sapiens
tacactactatagggcgaattggagctccaccgcggtggcggccgctctgggagtgtctgtcctatgtggttgagataaggactgagatacgccctggtcgcctgcagtacgcggggggggtgccgccgaccgttccgctcttccggccaggtgcttttctgtcaatttctatggaatgcaaaaggaggtttttgttttatttttgtctttttggaaaaggttaaaaaaaaaatttacattttatacttgagcctccatacttaaaaaaagaaaagaaaagaaattaataaaaagaaactggggctcaaataaatataaataaaataaatagttcctcggccgctctaaaactagtggattcccccggtctgctggaattcgatatcaagcttatcgataccgacgacctttagggggggcccggttcccagcttttgttccctttagtgagggttaattgctcgcttggcgtaatcatgg

SEQ ID NO: 33922 - DNA, 467 bp, Homo sapiens
acgactcactatagggcgaattggagctccaccgcggtggcggccgcccgggcaggtaccagttgtaaaattaccaggaaccgccatgcctcaagatcgccctgttttctggcttcatcaatgactgcatgcagtgcaccaccctgtccactacgtgatgctgtaggattaagtctcacagtgggcggctgaggatacagcgccgcgtcctgtgttgccggtgaattagacgccatcgctgtgggttgctggtatggtgccgtgctatttggcacaggacacaccgcttgaggtctgtattgaacctctgaaggaggccgatactgaagctcggttggcagccggtattgataaactaccagcggttgggtcttattttctaccggctgatattgtggatactgtatctgagttggcattgccgggatagagactctgtccctttctacttgattttctcttggggt

SEQ ID NO: 33923 - DNA, 450 bp, Homo sapiens
ctactatagggcgaattggagctccaccgcggtggcggccgaggtacgcggggagggaaagcagcctaaagcccgggacaggcacacaggcccaggtgtgtaggccacagcagccgcagtcctgaaaggctgcaacacccagacctccaggagagaccaggcccaggatgcctcgcctgttcttgttccacctgccagaattctgtttactactgaaccaattttccagagcagtcgcggccaaatggaaggacgatgttattaaattatgcggccgctctagaactagtggatcccccgggctgcaggaattcgatatcaagcttatcgataccgtcgacctcgagggggggcccggtacccagcttttgttccctttagtgagggttaattgcgcgcttggcgtaatcatggtcatagctgtttcctgtgtgaaattgttattcgctc

SEQ ID NO: 33924 - DNA, 470 bp, Homo sapiens
acgactcactatagggcgaattggagctccaccgcggtggcggccgaggtacatcctcatagagaatctcagtggattaaggcagctgtaacttgttttggactgcagttacagaggccaaggtatagaagaaaggtaacgagagtgccaggataggaaagttctgagatgaagacaacctggcagctcaaagtcacagttcatgccctgttgcttcagaccaaattccctctacagcctgaagcaagctggccttgcccacagagaactgcctttctccatatgcagccacctccctcagggcaattccttgccttggatcctcactgcacctgcttcaccagcatcttggctcttcatctccctacccccagagaagctttccatttaggagctcgcaacgcccttcctaggccatgccagtgttttaatttgctggagactagcccacaggaacaatagtggctgtg

SEQ ID NO: 33925 - DNA, 434 bp, Homo sapiens
agggcgaattggagctccaccgcggtggcggccgcccgggcaggtactttttttttttttttttttctttttttattaagtgttctgttactatgactctgcttgagcatgccaacgaacgcctcagggagtatgcctacacgaaagcttggtaaggacatgttggcgtctccgctggacgagggcgaccgaacacctaacctaaagcccgtgacactgcaacaggtgctgcccacgcttgcaccgtacgaagaaaagcgcggcctaaagcgcgagtctggtgacttggcacccaccgtgcagctgatggtacccaagcgccagcgactggaagatgtcttggaaaaaatgaccgtggagcctgggctggagcccgaggtccgcgtgcggccaatcaagcaggtggcaccgggactgggcgtgcataccgtgga

SEQ ID NO: 33926 - DNA, 443 bp, Homo sapiens
  misc_feature 211: n = A,T,C or G
gactactatagggcgaattggagctccaccgcggtggcggccgaggtacgcggggccatcgcaaagttgttaaccccagagtcttctggctgtgctgcctcctctgcttttaatcttctgtggatatttctccgatttcccccaaaagcccacagatcctgggggaagccaccccattcggccaccgatcatggaagaaagtattactttntatttaccaaacattttaaagatgttggaagatccatatgctgcctggaggctgttgtttctagggacacaagtatccagcctatattgttacaatttttttcaagaactgccgtcttctttgtctgcactaatggaacatcatcttcagcgggctatttcagcacagcaggtgtatggcgagaagagggataatatggttataccggtcccagaggcagaaagtaatattg

SEQ ID NO: 33927 - DNA, 437 bp, Homo sapiens
tagggcgaattggagctccaccgcggtggcggccgaggtacgcggggagcagcctaaagcccgggacaggcacacaggcccaggtgtgtaggccacagcagccgcagtcctgaaaggctgcaacacccagacctccaggagagaccaggcccaggatgcctcgcctgttcttgttccacctgctagaattctgtttactactgaaccaattttccagagcagtcgcggccaaatggaaggacgatgttattaaattatgcggccgctctagaactagtggatcccccgggctgcaggaattcgatatcaagcttatcgataccgtcgacctcgagggggggcccggtacccagcttttgttccctttagtgagggttaattgcgcgcttggcgtaatcatggtcatagctgtttcctgtgtgaaattgttatccgct

SEQ ID NO: 33928 - DNA, 430 bp, Homo sapiens
gggcgaattggagctccaccgcggtggcggccgcccgggcaggtacggcttcggaggctaggccgccgctccagctttgcacgtttcgatcccaaaggccctttttagggccgaccacttgctcatctgaggagttggacacttgactgcgtaaagtgcaacagtaacgatgttggaaggcttatgattttactgtgtatgtatttgggagaagaaattctgtcagctcccaaaggataaaccagcagttgctttattggtctacagatgtggctgcaaacacttgagactgaactaagcttaaaacacggtacctgggccgttctagaactagtggatcccccgggctgcaggaattcgatatcaagcttatcgataccgtcgacctcgagggggggcccggtacccagcttttgatccctttagtgag

SEQ ID NO: 33929 - DNA, 435 bp, Homo sapiens
tagggcgaattggagctccaccgcggtggcggccgaggtacgcggggacacaggcccaggtgtgtaggccacagcagccgcagtcctgaaaggctgcaacacccagacctccaggagaggccaggcccaggatgcctcgcctgttcttgttccacctgctagaattctgtttactactgaaccaattttccagagcagtcgcggccaaatggaaggacgatgttattaaattatgcggccgctctagaactagtggatcccccgggctgcaggaattcgatatcaagcttatcgataccgtcgacctcgagggggggcccggtacccagcttttgttccctttagtgagggttaattgcgcgcttggcgtaatcatggtataagctgtttcctgtgtgaaattgttatccgctcacaattccacacaacatacga

SEQ ID NO: 33930 - DNA, 169 bp, Homo sapiens
actatagggcgaattggagctccaccgcggtggcggccgaggtacgcgggggaagccgcccagtgccctgagcgtctccatggcctgcctgagcccctcgcagctccagaagttccaacaggatggattcctggtgctggaaggattcttgtctgcagaagagtgtgtg

SEQ ID NO: 33931 - DNA, 447 bp, Homo sapiens
actactatagggcgaattggagctccaccgcggtggcggccgcataatttaataacatcgtccttccatttggccgcgactgctctggaaaattggttcagtagtaaacagaattctagcaggtggaacaagaacaggcgaggcatcctgggcctggtctctcctggaggtctgggtgttgcagcctttcaggactgcggctgctgtggcctacacacctgggcctgtgtgcctgtcccgggctttaggctgcccccgcgtacctcggccgctctagaactagtggatcccccgggctgcaggaattcgatatcaagcttatcgataccgtcgacctcgagggggggcccggtacccagcttttgttccctttagtgagggttaattgcgcgcttggcgtaatcatggtcatagctgtttcctgtgtgaaattgttatccgctcaca

SEQ ID NO: 33932 - DNA, 458 bp, Homo sapiens
ctactatagggcgaattggagctccaccgcggtggcggccgcataatttaataacatcgtccttccatttggccgcgactgctctggaaaattggttcagtagtaaacagaattctagcaggtggaacaagaacaggcgaggcatcctgggcctggcctctcctggaggtctgggtgttgcagcctttcaggactgcggctgctgtggcctacacacctgggcctgtgtccccgcgtacctcggccgctctagaactagtggatcccccgggctgcaggaattcgatatcaagcttatcgataccgtcgacctcgagggggggcccggtacccagcttttgttccctttagtgagggttaattgcgcgcttggcgtaatcatggtcatagctgtttcctgtgtgaaattgttatccgctcacaattccacacaacatacgagccgggagcataaagtg

SEQ ID NO: 33933 - DNA, 474 bp, Homo sapiens
ctactatagggcgaattggagctccaccgcggtggcggccgcccgggcaggtacgcgggggagtttcacgcgcgtatgctttgcccgctatggccgcagtcaaggagcctttggagttccatgccaagcggccttggcgccccgaggaggcagtagatgatcccgacgaggaggatgaggataatacttagtgaagccgagaatgggttctccctggaggaagtgttacggctcggaggcaccaagcaagattaccttatgctggctactttggatgaaaatgagggaagtgataaaaggaggcaaaaaagggagccaatcgatgaccttttacaagggggaattggggagccttttttttaaaaaatttttattttggggaaaagttttaaaaaagctttcttttttttgggaaaaaataaaaccccctttaaaaaaaaaaatttccccccaaaaaaaaaaaaaaaaaaaaaa

SEQ ID NO: 33934 - DNA, 287 bp, Homo sapiens
ggcaattgagctccccgcggtggcggccgacgcggccaggcactcacgagaggaagatgacttcattcaacaactcaaagcggcactcagacttaacgcggccataaacgcggcggaaactacagtgcccacgatgcaccgcgccagccccggccgctctagaactagtggatcccccgggctgcaggaatttgttattaagcttatcgataccgtcgacctcgagggggggcccggtacccagcttttgttccctttagtgagggttaattgcgcgcttggcgtaa

SEQ ID NO: 33935 - DNA, 317 bp, Homo sapiens
agggcgaattggagctccaccgcggtggcggccgcataatttaataacatcgtccttccatttggccgcgactgctctggaaaattggttcagtagtaaacagaattctagcaggtggaacaagaacaggcgaggcatcctgggcctggtctctcctggaggtctgggtgttgcagcctttcaagactggcggctgcttgtggcctacacacctgggcctgtgtgcctgtcccgggctttaggctgctttccctacccggctcaaccagtcagtccccgcgtacctcggccgctctagaactaggggaccccccggc

SEQ ID NO: 33936 - DNA, 465 bp, Homo sapiens
actactatagggcgaattggagctccaccgcggtggcggccgaggtactttttttttttttttttttttaatcaatcacaggagcaattcctgtgaactaatagggagaggtccaggtagagctatctgattgcaatgtaattctgaccctgagtgaaggaaaaaaggaaggaagactggggaagagtcccatgcctgtcttacaggtccagggaaagtttggtttggcaaggccatcatggagtcgttaatcaaaaaccagctgccaggggagtcccatttgtctcccaaatagcaggccttagcactaagttatgagctaggtgcagcccgtaagaactgtggcttcccttggcgggatcatggagatttcaactcgcagccggttaactccctatcgaaagaaggctgggaggcacattctcatggctgccacattctatcctgtgcattcttaacattcta

SEQ ID NO: 33937 - DNA, 400 bp, Homo sapiens
acgactactatagggcgaattggagctccaccgcggtggcggccgtgttcacctagtaaccccagcttcgggataaggacctgcagctcgggcgcgacccggaaagggaatccgcccttttcgcctccttcgcgccaatcgcctggagttggcgtttccgcagccgggacacagcccaccctctaagagccgcggagtccggaaacgggagaaaggggccgcgcgtgcgcagtggcgtcccccgcgtacctgcccgggcggccgctctagaactagtggatcccccgggctgcaggaattcgatatcaagcttatcgataccgtcgacctcgagggggggccccggtacccagcttttgttccctttagtgagggttaattgcgcgcttggcgtaatcat

SEQ ID NO: 33938 - DNA, 462 bp, Homo sapiens
agggcgaattggagctccaccgcggtggcggccgagggacatcctcatagagaatctcagtggattaaggcagctgtaacttgttttggactgcagttacagaggccaaggtatagaagaaaggtaacgagagtgccaggataggaaagttctgagatgaagacaacctggcagctcaaagtcacaagttcttgccctgttgcttcagaccaaattccctctacagcctgaagcaagctggccttgcccacagagaactgcctttctccatatgcagccacctccctcagggcaattccttgccttggatcctcactgcacctgcttcaccagcatcttggctcttcatctccctacccccagagaagctttccatttaggagctcgcaacgcccttcctaggccatgccagtgttttaatttgctggagactagcccacaggaacaatagtggctgtgtgt

SEQ ID NO: 33939 - DNA, 467 bp, Homo sapiens
acgactcactatagggcgaattggagctccaccgcggtggcggccgcccgggcaggtacccaatcctgtccttgccggtccctcctcgccgggtgggaatcttcgtggattatgaggcccatgacatttctttctacaatgtgactgactatggctcccacatcttcactttccccgctatcccttcctgggcgcctctgccctattttagtccttgctacagcattggaaccaacaacactgctcctctggccatctgctccctggatggggaggactaagaaagctaccaccctaaccacagaggcttggaattgggcctggcccccatggggcttggaggaccgagccactgacaggtatcccctgaaactgagctgagcccagtatccaaggattcctctgtctgatcctttggtctttgctaccaggctgaagtctgtcatgaaaccacttattttaaaaag

SEQ ID NO: 33940 - DNA, 319 bp, Homo sapiens
ctactatagggcgaattggagctccaccgcggtggcggccgagtcttcttcatcaacgaggaggccaagagcaccacctggctgcaccccgtcaccggcgaggcggtggtcaccggacaccggcggcagagcacagatttgcctactggctgggaagaagcatatacttttgaaagtgcaagatactatattaacccatattgaaaggaaagtgacctgcaaacattcagtcacaggacaaccatcacaggacaattgtatttttgtagtgaatgaacagactgttgcaaccatgacatctgaaaaaaaaaaaaaaaaa

SEQ ID NO: 33941 - DNA, 455 bp, Homo sapiens
atacgactactatagggcgaattggagctccaccgcggtggcggccgcccgggcaggtactttccgccgccgccacagcggccccctctctgaagaatgcagccttcctaggtccaggggtattgcaggcaacaaggacctttcatacagggcagccacaccttgtccctgtacagtggacagcttagcatgttgacaactgagaataaaatgctcagttctgaactggacaatgtaagacacaacgacgaaacactggaaatggaaattcaattacatcattgtagactggctactgctctacatgattgtgaccaaagtcagagagctgaaagagacttctttccagagaacaagatatgaacaggtttatttacagaagacaatgaattctcatttgtctaacctaaaagattacagaatctttctcaacaagtctaatgtagacagtaaaa

SEQ ID NO: 33942 - DNA, 405 bp, Homo sapiens
atacgactcactatagggcgaattggagctccaccgcggtggcggccgcccgggcaggtaccctaaagctatgtaacttatataaatagtttcaaaatgaagcaaaatatgatagaataaatgaagaaatatataaatctttaaacacagtcaaaacttttaatgctcctctctcaatatttgatagggcaaataaacaaaatttcataaggatatgaaacatctgaataacataattagtgaatcaaaagaaactgacatttatagaacaaagtactttttttttttttttttttttttttttttttctggctcttgggggttccttgagggctttgatgatcagggcagaggcagaaggcaccacctcaatctgggcctgtctgttctgaatggtcagtttca

SEQ ID NO: 33943 - DNA, 454 bp, Homo sapiens
gctccaccgcggtggcggccgcccgggcaggtacctgtttagccacgatggccgccaggcggcccaggagatggcctcgaccatcaagcaccaggacctgcacctccgccatcttcggcagccgcttggaaaagccccgcgtacagaatggattttggaagagggagtcaccactggaccttcaagggagccacgtgcagacatctacaaccttcgatctcctgacgagtttattgttggccaaaaccaggctttgattgaaccaggatgaatgcgggtgttggaagtagaatatatatatacatataaaattggttgggagccacgtgtacttttcattttggctcaccgtggattttctcataggaagtttggtcagagtgaattgaatattgtaagtcagccactgggacccgaggatttctgggaccccgcagttgggaggaggaagtag

SEQ ID NO: 33944 - DNA, 470 bp, Homo sapiens
atacgactcactatagggcgaattggagctccaccgcggtggcggccgcccgggcaggtacctgtttagccacgatggccgccaggcggcccaggagatggcctcgaccatcaagcaccaggacctgcacctccgccatcttcggcagccgcttggaaaagccccgcgtacagaatggattttggaagagggagtcaccactggacctccaaggaagccacgtgcagacatctacaaccttcgatctcctgacgagtttattgttggccaaaaccaggctttgattgaaccaggatgaatgcgggtgttggaagtagaatatatatatacatataaaattggttgggagccacgtgtacttttcattttggctcaccgtggattttctcataggaagtttggtcagagtgaattgaatattgtaagtcagccactgggacccgaggatttctgggaccccgcagttggga

SEQ ID NO: 33945 - DNA, 467 bp, Homo sapiens
ctactatagggcgaattggagctccaccgcggtggcggccgcccgggcaggtacgcggggaagaaggacatttctggtagctggtcgaggttggtgacgttgaggatctaaattaagacagtattataggaatggggaagaggaggcaaagtcaagaacaatgtgaactatcaaaccagcaggacctattactataaatgagagggaggaaggaccaaggatgcttcttatgtagctgccttctattcctgggtgactggttgcacagtctccttagagaatccaggaacagagagaatatataccttccactggaagaatctcaaacagcgctgcttactcaggatcagtggcaccagccaactcagctttgggacaaacccagccaagtgaccaggacactttagtgcaaagagctgagcacattccagcagggaaacgaactccgatgtgcgcccattgtaacc

SEQ ID NO: 33946 - DNA, 411 bp, Homo sapiens
ctactatagggcgaattggagctccaccgcggtggcggccgaggtaccgaacgctgacaaatgaagttcacttcattcaacaactcaaagcggcactcagacttaacgcggccataaacgcggcggaaactacagtgcccacgatgcaccgcgccagccccggccgctctagaactagtggatcccccgggctgcaggaattcgatatcaagcttatcgataccgtcgacctcgagggggggcccggtacccagcttttgttccctttagtgagggttaattgcgcgcttggcgtaatcatggtcatagctgtttcctgtgtgaaattgttatccgctcacaattccacacaacatacgagccgggagcataaagtgtaaagcctggggtgcctaatgagtgagctaactc

SEQ ID NO: 33947 - DNA, 477 bp, Homo sapiens
gcgcgaattggagctccaccgcggtggcggccgaggtacaaaagttaagctccatttaccactcacttgacagtgtcctttaaatctgaacttgctcttgctcatgcggagcttggctaagagaaaccagatcatattgcaagctgtaggtgggtgggtgagtgtgtcccctcccacactgctctctggtgggtttgggcagtccctggctctagtctctgctgcagattctcaggaccaaaatgtgggtgatttgtctgggtccaggcaggagacagaaatcacacaagctcttttattagagataatataaagaatgattaaccaggtgacagtaaagggcaggaagggaatacaaaggtatccatggaggtagcaccacaggaagcaggcatcacacttgaggcttgggaacaaggggaaaatgctggactcattgaaagggggttgcttggaaaagggacatggggctgaatc

SEQ ID NO: 33948 - DNA, 450 bp, Homo sapiens
tatagggcgaattggagctccaccgcggtggcggccgcccgggcaggtaccggggaaaaataatttccattttttctttttcaccgggaccaattgtaaatgctatgcggtaagaggagttacctgtggaaaggtggttaagagattaggtaaagaaaaggaaaggacaccaaaataaagtgctgcggaagaatttttggccagctgtgagacgacgagtgcgtgaagtgaaggcgattgagaggggctgagggaattgtcctctgtggaagggactttcttttggccctaggccccttcctgcccctgtcgtcagcagagagatggaaaacttgatgactagctccaccctaccgcccctttttgcagatgaagacggttccaaggagagtaatgatctggctaccactgggttaaatcacccagaagttccatacagtagtggcgcca

SEQ ID NO: 33949 - DNA, 508 bp, Homo sapiens; identical to SEQ ID NO: 33825

SEQ ID NO: 33950 - DNA, 459 bp, Homo sapiens
tatagggcgaattggagctccccgcggtggcggccgaggtacttaagctcatcggttgtgaaaacaaatctgatgaggtatcgaaggagccgtctcccacctttctttgaagaatttacagcctcatcccactgtttgctcgttatgtagacaggatagttgttcaacagctgcttgcttccctctgtcggctggtcagctggctgtggtatcaggagttggttgtggtgctgcagaaccatcttcaagtaatctaaaacggtctggcagggcactgggatgctctctaatttccttctgagctcttcattttcttgttgcagtgaaataacctcctgctccagctcttggcatcgaggacaatagccttcctcgtcctcctcctcctcttcttctggcagtgtagatgaagatgggtggccatgggattcggacgttgctggggaagtccagccacct

SEQ ID NO: 33951 - DNA, 420 bp, Homo sapiens
ctactatagggcgaattggagctccaccgcggtggcggccgaggtactccttcttccgccgccgactgtcctgagctgactgcttgttacggattttcctcctgaccttcttgaggaccctctcctctgccttggtgaggggcaggtgagagggcagggaaaccccttcctgccccagcagacgcttctcctcatcggtcaggaacagggtttgacagggcagctgggggtaggggcaggagaagatgcaataggagtgaggagggggtcatcccatttgcagcacccaggctactccccccacatgccttctggagagtgtttcctcactgggagacaactttaatctaaaggtggggtgaggggcagagactttaattcagacaggctctagatcaagccaaagggacatcctgaggc

SEQ ID NO: 33952 - DNA, 447 bp, Homo sapiens
ctatagggcgaattggagctccaccgcggtggcggccgaggtaccatgttcaggaaaccaaggacgatattgctctactgttggaaacagagtaatcaaattttctgtgctagccttaattcctgccctctttaagaggagcttaataaaatgtaaatatgcagaatgtttacttttggattgtcccatggtgtccctggaatgctccgagtgcacaagcttaccgcaaggccgaccacacgttctcgggagttcctggacagaccgttcttcacaacgaccacgctcaggtgtaacttcacctgggttcaaggagaccgtgttgggtgccaaagatgtaggggaacctgcctgatacaccacccgcaggctctccccttcccggtggagacgagggaatgagaaaagaaataaagacaaagacacaaagtttaagagttaacaaaa

SEQ ID NO: 33953 - DNA, 458 bp, Homo sapiens
taatacgactactatagggcgaattggagctccaccgcggggggcggccgcccggccaggtccccggaacccatagtaggcctaaaagcagccaccaattaagaaagcgttcaagctcaacacccactacctaaaaaatcccaaacatataactgagcccctccaccccatttgctcacactatcctgtcatctttgtattcttgctgcagttccctttgggttccatgttttccttgttcccttccatgcctagctggattgtagagttaagtttatgaatatgaaataaaatctaaataggccgggcgcggtggctcacgcctgtaatcccagcactttgggaggccgacgcaggcggatcacgaggtcaggagatcgagaccatcctggctaacacggtgaaaccccatctctactaaaaaaaaaaaaaaaaaaaaaaaaaaagtacgcggggct

SEQ ID NO: 33954 - DNA, 455 bp, Homo sapiens
cgtatacgactactatagggcaattgagctccccgcggtggccggccgaggtccaaagcaaagcaaagtgtggtccctgaatctgtctcacccccatgatctttacacacagagaccttcccaggagctgtgacttgaacttcacaatctgcagggtccacccaggagccgtgtcctcctcacaggcaattggatcccctcctctctcaacctgtgtgggaagattttgtgagcagcctcggcgcaccggatgtcgtctttgccatccccagtgggcgctggggccgcgtctggagagacggtggctctccccgcgtactttttttttttttttttttgactgaatgcgaggatttaataccaatgcgggcacaagaattttcttagaaaaggtcagtggggagggatcatggacaccttggtttcaacaactccaactccttcatacaccatct

SEQ ID NO: 33955 - DNA, 415 bp, Homo sapiens
attggagctccaccgcggtggcggccgaggtacaataaagattttagaattcatcaatttgcacacttatgatagatgcactttcctgtatgtatatttcaataaaatcttttaaaaagtaaaatgacaaaaagacactattaacaaaaatgacatattatattaactgttatactaaggaaaatataaaaatgagttctataacaggggctctgcaggtcatgtggtcatgccaaggaccatatgtgctcaagattctcatgacattttggaaggaggttgggctttctttatctttcctttcttctctcccttcccttcccctcccttcccttccctatttttaaacctaggtttggtattttcctggggtgatggtgactttggaaaattgtgtccggggcggaagtgaaag

SEQ ID NO: 33956 - DNA, 274 bp, Homo sapiens
ttttttatttatttagggtgcgctctactactcactatacggcgaattggagctccaccgcgggggcggccgaggtacaaatctgggaactaaatattaaaaatgagtgtggctggatatatggagaatgttgggcccagaaggaaccgtagagatcagatattacaacagctttgttttgagggttagaaatatgaaatgatttggttatgaacgcacagttttatgcaccagggccagaaatcctgaaccctctgcccccgtggttattctc

SEQ ID NO: 33957 - DNA, 298 bp, Homo sapiens
atagggcgaattggagctccaccgcggtggcggccgcggccactgtaaccaagaaagtggctaagagcccaaagaaggccaaggttgcgaagcccaagaaagctgccaaaagtgctgctaaggctgtgaagcccaaggccgctaagcccaaggttgtcaagcctaaaaaggcggcgcccaagaagaaataggcgaaacgcctacttctaaaacccaaaaggctcttttcagagccaccactgattctcaataaaagagctggataaatttctgtccaaaaaaaaaaaaataaaaaaaa

SEQ ID NO: 33958 - DNA, 476 bp, Homo sapiens
acactactatatggggcgaattggagctccaccgcggtggcggccgaggtacgcggggacacaggcccaggtgtgtaggccacagcagccgcagtcctgaaaggctgcaacacccagacctccaggagagacccggcccaggatgcctcgcctgttcttgttccacctgctagaattctgtttactactgaaccaattttccagagcagtcgcggccaaatggaagggcgatgttattaaattatgcggccgctctagaactagtggatcccccgggctgcaggaattcgatatcaagcttatcgataccgtcgacctcgagggggggcccggtacccagcttttgttccctttagtgagggttaattgcgcgcttggcgtaatcatggtcatagctgtttcctgtgtgaaattgttatccgctcacaattccacacaacatacgagccgggagcataaagtgtaaagcctggggt

SEQ ID NO: 33959 - DNA, 435 bp, Homo sapiens
cactactatagggcgaattggagctccaccgcggtggcggccgcataatttaataacatcgtccttccatttggccgcgactgctctggaaaattggttcagtagtaaacagaattctagcaggtggaacaagaacaggcgaggcatcctgggcctggtctctcctggaggtctgggtgttgcagcctttcaggactgcggctgctgtggcctacacacctgggcctgtgtgcctgtcccgggctttaggctgcccccgcgtacctcggccgctctagaactagtggatcccccgggctgcaggaattcgatatcaagcttatcgataccgtcgacctcgagggggggcccggtacccagcttttgttccctttagtgagggttaattgcgcgcttggcgtaatcatggtcatagctgtttcctgtgtgaaattg

SEQ ID NO: 33960 - DNA, 476 bp, Homo sapiens; identical to SEQ ID NO: 33958

SEQ ID NO: 33961 - DNA, 655 bp, Homo sapiens
gcgcgtaatacgactcactatagggcgaattggagctccaccgcggtggcggccgaggtactttttggcagaaagttgacccaagagtttactgaagtcgctggtgaaaactccatcagcatgcctggcatttctggatacatcataatagggtgtgtcattttcagctaatgcattttgcaacatgtcaatgtcttcttttaatgaaacttgatcaggttcatttgctccctcaaagggtattctgtcacccaacctgagagcagaaggtgccctgtaaagaggccatgccgaagtctgtgagaagagcacactgagaagagtcaggagcacaaggagctgggccttatttctggtgtccatttctgtgcctctcgcccagtcgtgctcccccggagctgactgttctggtttgttttgaagctgtcttaggtgctgaagtcctgggagtaagagaaaggctccaccagttctctgcccttagcaatggctaagggttggctgttactgcctgctggtgcttctcactctaccctccccgcgtacctgcccgggcggccgctctagaactagtggatcccccgggctgcaggaattcgatatcaagcttatcgataccgtcgacctcgaaggggggcccggtacccagcttttg

SEQ ID NO: 33962 - DNA, 671 bp, Homo sapiens
  misc_feature 628: n = A,T,C or G
gactactatagggcgaattggagctccaccgcggtggcggccgaggtacgcggggtcctcactcaccccaccctccccaattccagccctttgccctctcggtcagggttggccaggcccagtcacaggggcagtgtcaccctggaaaatacagtgccctgccttcttaggggcatcagccctgaacggttgagagcgtggagccctccaggcctttgctctcccctctaggcacacgcgcacttccacctctgccccatcccaactgcaccagcactgcctcccccagggatcctctcacatcccacactggtctctgcaccacccctatggttcacaccgcaccctgcactcacccacagcagctccatccactgggaaaactggggtttgcatcactccactgcacagtgttagtgggacctgggggcaagtcccttgacttctctgagcctcagtttccttatgtgaaagttgctggaaccaaaatggagtcacttatgtcaaactctaataaaatggagtcggggggccacatagaagccctcacacacacatgcccgtaacaggatttatcacaagacacgcctgcatgtaaaccagacacagggcgtatggaaagcacgtnctcaagactgtagtattccagatgagctgcagatgcttaccta

SEQ ID NO: 33963 - DNA, 461 bp, Homo sapiens
tatagggcgaattggagctccaccgcggtggcggccgcccgggcaggcaccatgttcaggaaaccaaggacgatattgctctactgttggaaacagagtaatcaaattttctgtgctagccttaattcctgccctctttaagaggagcttaataaatgtaaatatgcagaatgtttacttttggattgtcccatggtgtccctggaatgctccgagtgcacaagcttaccgcaaggccgaccacacgttctcgggagttcctggacagaccgttcttcacaacgaccacgctcaggtgtaacttcacctgggttcaaggagaccgtgttgggtgccaaagatgtaggggaacctgcctgatacaccacccgcaggctctccccttcccggtggagacgagggaatgagaaaagaaataaagacaaagacacaaagtttaagagttaacaaaagtgggtcca

SEQ ID NO: 33964 - DNA, 454 bp, Homo sapiens
tatagggcgaattggagctccaccgcggtggcggccgcataatttaataacatcgtccttccatttggccgcgactgctctggaaaattggttcagtagtaaacagaattctagcaggtggaacaagaacaggcgaggcatcctgggcctggtctctcctggaggtctgggtgttgcagcctttcaggactgcggctgctgtggcctacacacctgggcctgtgtgcctgtcccgggctttaggctgctttccctacccggctcaaccaccccgcgtacctcggccgctctagaactagtggatcccccgggctgcaggaattcgatatcaagcttatcgataccgtcgacctcgagggggggcccggtacccagcttttgttccctttagtgagggttaattgcgcgcttggcgtaatcatggtcatagctgtttcctgtgtgaaattgttat

SEQ ID NO: 33965 - DNA, 447 bp, Homo sapiens
actactatagggcgaattggagctccaccgcggtggcggccgaggtacctggtaaagaatcagtgaccttttaccttaacatcaaaatgtagtttaaccagttaatgtatttttcagttttctttccttatgtcatctgtgaacatcttgagctgtgagctattaagtgcatgtttccctcaaggccctctggtccattctggactaatgttgaaagatgggatggattggcatggaactgttggggtgatcagacccaacaccgggctgtgggggctaagaagtccagtggagtcaaaggaatgagaaaagacaagttaagaatgcataaggtgggtccagggggccaacgctagtatggaggctgcaatagacctgagctctggaagcccacactattagtgatcaaacaaagcaccaggtggtgaggatgtggggtttgaaagg

SEQ ID NO: 33966 - DNA, 565 bp, Homo sapiens
  misc_feature 458, 459, 460, 464: n = A,T,C or G
acgactcactatagggcgaattggagctccaccgcggtggcggccgcccgggcaggtacgcgggataccagcatcaccacaaacatgaataatgaattgagctgtgacattactaggcaataggaatgtttcagctccattataatcttgtgggatcaccgttgtatatgcagtcctgtgttgactgaaacgttatgtgactgcagttgggtaatggtttcttagccttatgtcagctctatgtatccaattagttcagtcagttgcctcccctcttcagtggaagattttgtttttagttcagtttaggaaggaagatttcctttcaggaggccaggtgtggtggctcacacctgtaatcaatcacagcactttgggaggctgaggcaggaagactgcttgagcccaggagtttgagatcagcctgtgcaacatagcaagatcccatttctaccaannnaaanaaactaaaaaaaaggtacctcggccgctctagaactagtggatcccccgggctgcaggaattcgatatcaagcttatcgataccgtcgacctcgagggggg

SEQ ID NO: 33967 - DNA, 618 bp, Homo sapiens
tacgactcactatagggcgaattggagctccaccgcggtggcggccgaggtactcagagtgaggattttctgcaacctacgtttgtccctccagcatctgctctggctccatggcggaccctgcaagtcacagtccccggataccagtccgcgcccaagccgttcgttcttaagagccctgcaccgcgccaccagctcccagcacaaacagctccggccgcccgggcaggtacgcgggcacccccaagtagtgcaacaaccggggctgctgctttgactccaggatccctggagtgccttggtgtttcaagcccctgcaggaagcagaatgcaccttctgaggcacctccagctgcccccggccgctctagaactagtggatcccccgggctgcaggaattcgatatcaagcttatcgataccgtcgacctcgagggggggcccggtacccagcttttgttccctttagtgagggttaattgcgcgcttggcgtaatcatggtcatagctgtttcctgtgtgaaattgttatccgctcacaattccacacaacatacgagccgggagcataaagtgtaaagcctggggtgcctaatgagtgagctaactcacattaat

SEQ ID NO: 33968 - DNA, 401 bp, Homo sapiens
cgtaatacgactcactatagggcgaattggagctccaccgcggtggcggccgaggtacagtgtgcgaggggaacagtgtgaaaacctggctaaagggtttgggtggagacctttgtgagagtagaataggattgggattataggtgtcaaagccagtgagcatctcacccctccgttcccttctctacgccaccctgtccctctccgaaccctgcctggagacactggatcatcatttctgggaccatgtcattctacttttgcttgtgttccttccagtctgccatgcacggactgatcatgggcggcctggaagtgatctcaatcacagacgacaccccaatcccacacaacggctgccgccccaagaaggctcggaagctgtgatgggaaggaggcct

SEQ ID NO: 33969 - DNA, 397 bp, Homo sapiens
atacgactcactatagggcgaattggagctccaccgcggtggcggccgcccgggcaggtacgatttatattcagctgtatgctgggcaggtccaacttggcatttcttggctgtatctctgaaggaaagtcatcttaatctctatgagcctccatttcctcagctgtaaaatgggaagatcttcctcacactgctgtgaggaagcggattttctgacgcatatgaagagtgagaactgtctacatctaagtcttctttgagaacaataccagctgagcggctatttacattccagcttcttttgagaatctctgaagatgattaagtcattgtcagctggcccagaaccatatcctgctccacaagcctcgtccttggcaagaagttgcacctgccc

SEQ ID NO: 33970 - DNA, 341 bp, Homo sapiens
gactactatagggcgaattggagctccaccgcggtggcggccgcccgggcaggtaccttactgagaaattcatcagctttttcctaccaaaggcagacatctaaccgttccgaaccctcaggggagatcaacatagacagcagtggtgaaacagttggatctggagaaagatgtgtcatggcaatgctgagaaggaggatcagggatgagaagaccaacgttaggaagtctgcactgcaggtattagtgagtattttgaaacactgtgatgtctcaggcatgaaggaagacctgtggattctgcaggaccagtgtcgggaccctgcagtgtctgtccggaa

SEQ ID NO: 33971 - DNA, 282 bp, Homo sapiens
ctactatagggcgaattggagctccaccgcggtggcggccgaggtactattttctaacaagaagccttcaggggaaataatggatcctagttatgtcaaagaaaacaatgagacaaaatggcaacttcacagtcttcaagtaaatagaatccctgatcccgcgtacgcggggctcttaccgccatcttggctcctgtgggaggcctgctgggaacgggaccttttaaaaggaaactatgtcctggaagggctgtggtctcaaggcgcatttttttgctggct

SEQ ID NO: 33972 - DNA, 400 bp, Homo sapiens
gactactatagggcgaattggagctccaccgcggtggcggccgaggtactttttggcagaaagttgacccaagagtttactgaagtcactggtgaaaactccatcagcatgcctggcatttctggatacatcataatagggtgtgtcattttcagctaatgcattttgcaacatgtcaatgtcttcttttaatgaaacttgatcaggttcatttgctccctcaaagggtattctgtcacccaacctgagagcagaaggtgccctgtaaagaggccatgccgaagtctgtgagaagagcacactgagaagagtcaggagcacaaggagctgggccttatttctggtgtccatttctgtgcctctcgcccagttcgtgctcccccggagctgactgttctgg

SEQ ID NO: 33973 - DNA, 278 bp, Homo sapiens
ctactatagggcgaattggagctccaccgcggtggcggccgcccgggcaggtacccacggcgaggacgaggatgagagcttgtgccgagatgtgccccagagcctcccccacttccttgtggcccactgtggagacccggcctcctggatctactcagaccaaaaatgtgatggcactaacaactgcggggactgttcagatgaactgagcccagtaactgtgtgcccaccctgcggccctgggtggtggcgctgtccttcaaccttcttcaagtact

SEQ ID NO: 33974 - DNA, 398 bp, Homo sapiens
actcactatagggcgaattggagctccccgcggtggcggccgcataatttaataacatcgtccttccatttggccgcgactgctctggaaaattggttcagtagtaaacagaattctagcaggtggaacaagaacaggcgaggcatcctgggcctggtctctcctggaggtctgggtgttgcagcctttcaggactgcggctgctgtggcctacacacctgggcctgtgcgcctgtcccgggctttaggctgctttccctacccggctccccgcgtacctgcccgggcggccgctctagaactagtggatcccccgggctgcaggaattcgatatcaagcttatcgataccgtcgacctcgagggggggcccggtacccagcttttgttccctttagt

SEQ ID NO: 33975 - DNA, 437 bp, Homo sapiens; identical to SEQ ID NO: 32673

SEQ ID NO: 33976 - DNA, 406 bp, Homo sapiens
gtatacgactactatagggcgaattggagctccaccgcggtggcggccgaggtacttttttttttttttttttttcctctcgctcggaatacagccactgaaggaggtaaaagatatctacaagtagaactttgatattattacttcttctactgaacttaaaccaattactgtttgctttggtgtctgttgtgatttctcttatttagttggattttgtagttactttaaaagttaacgaaatttcacatttcatcaagtccagaggccagagacacccaaatatgcacagacaggaatcagctgcaattgtccaagccagagctgattaggcctcaactggaatagtcccaccatgtaataaatcttcctgagtattgtgtataaggtcaaatatttccagctt

SEQ ID NO: 33977 - DNA, 380 bp, Homo sapiens
ttggagctccccgcggtggcggccgaggtactttttggcagaaagttgacccaagagtttactgaagtcactggtgaaaactccatcagcatgcctggcatttctggatacatcataatagggtgtgtcattttcagctaatgcattttgcaacatgtcaatgtcttcttttaatgaaacttgatcaggttcatttgctccctcaaagggtattctgtcacccaacctgagagcagaaggtgccctgtaaagaggccatgccgaagtctgtgagaagagcacactgagaagagtcaggagcacaaggagctgggccttatttctggtgtccatttctgtgcctctcgcccagtcgtgctcccccggagctgactgttctg

SEQ ID NO: 33978 - DNA, 397 bp, Homo sapiens
gactcacttagggcgaattggagctccaccgcggtggcggccgaggtactctgaaggtggatagcaatggtgtgatcacagtaaagcctgacttcacgggcctcaaaggaccctacaggattgagacggagggggagaagcaggagctgtggaaatatacgatcgacaatgtttccccccacgcacagccggaggaggaggagcgggaacggcgagtgttcaaggatctttatggccggcacaaggagtatctcagcagcctcgtaggcaccgactttgagatgactgtcccaggtgccccccggctctttgtaaatggagaggtcgtttcagcccaaggctatgagtatgacaatctctacgtccacttctttgtagaattgccaactgctcactg

SEQ ID NO: 33979 - DNA, 523 bp, Homo sapiens
  misc_feature 372: n = A,T,C or G
cgtaatacgactcactatagggcgaattggagctccaccgcggtggcggccgcccgggcaggtacgcggggagggtagagtgagaagcaccagcaggcagtaacagccaacccttagccattgctaagggcagagaactggtggagcctttctcttactcccaggacttcagcacctaagacagctccaaaacaaaccagaacagtcagctccgggggagcacgactgggcgagaggcacagaaatggacaccagaaataaggcccagctccttgtgctcctgactcttctcagtgtgctcttctcacagacttcggcatggcctctttacagggcaccttctgctctcaggttgggtgacagaataccctntgagggagcaaatgaacctgatcaagtttcattaaaagaagacattgacatgttgcaaaatgcattagctgaaaatgacacaccctattatgatgtatccagaaatgccaggcatgctgatggagttttcaccagtgacttcagtaaactc

SEQ ID NO: 33980 - DNA, 521 bp, Homo sapiens
ctacggcgaattggagctccaccgcggtggcggccgaggtactttttggcagaaagttgacccaagagtttactgaagtcactggtgaaaactccatcagcatgcctggcatttctggatacatcataatagggtgtgtcattttcagctaatgcatttgcaacatgtcaatgtcttcttttaatgaaacttgatcaggttcatttgctccctcaaagggtattctgtcacccaacctgagagcagaaggtgccctgtaaagaggccatgccgaagtctgtgagaagagcacactgagaagagtcaggagcacaaggagctgggccttatttctggtgtccatttctgtgcctctcgcccagtcgtgctcccccggagctgactgttctggtttgttttggagctgtcttatgtgctgaagtcctgggagtaagagaaaggctccaccagttctctgcccttagcaatggctaagggttggctgttactgcctgctggtgcttctcactctaccctccccg

SEQ ID NO: 33981 - DNA, 578 bp, Homo sapiens
gcgcgcgtaatacgactcactatagggcgaattggagctccaccgcggtggcggccgctttggtgttgtctccacagcggaggccgtcgcagaacccagctcccacagctacgatgttcttaagcgcaccacagagttcaacagtgtctgcatcatcaaccacggtaattcgaaaatttggagtctgcagaagttctttgaagagaaggccgttctccattactttgctgccgatggtggtctcacagaacttctctgcagccacctcattggcaatgttggctcccatcagcacactgatgtcaatacccatcttctcacggatgatgtcagaaatgagcttcagcccctcggggccctcgtctatgcccttgatgagggtgattcccagcgctttcttgggcactctcccagtgatctcatcacagattctgtgaatgaactggtggggaatgacaaacaccagcaggtctgcatcctgcacagcctcgctaagatttgacatggcaaccacattttctggcagcttgtgtccaggaagatattttacattttcatggccattatttatgatgtct

SEQ ID NO: 33982 - DNA, 387 bp, Homo sapiens
  misc_feature 29: n = A,T,C or G
tccaccgcggtggcggccgatgtactttntggcagaaagttgacccaagagtttactgaagtcactggtgaaaactccatcagcatgcctggcatttctggatacatcataatagggtgtgtcattttcagctaatgcatttgcaacatgtcaatgtcttcttttaatgaaacttgatcaggttcatttgctccctcaaagggtattctgtcacccaacctgagagcagaaggtgccccgtaaagaggccatgccgaagtctgtgagaagagcacactgagaagagtcaggagcacaaggagctgggccttatttctggtgtccatttctgtgcctctcgcccagtcgtgctcccccggagctgactgttctggtttgttttggagc

SEQ ID NO: 33983 - DNA, 684 bp, Homo sapiens
acgactactatagggcgaattggagctccaccgcggtggcggccgaggtacatgaagttcacattgtcaaagattatcactccttcatggggccaggctggtggtgggcgtttctgatattcccaaggtgcttctttttcaaggtctgtgtattcaatgaccctttctactgagatcatcatattctcaacttcagcactttgtcgaacacaccactgaaacatccccatgagcgtgagggcataggacagtgccaaaccaacctgcccggcatccagagtttttgccagaatcagggacccaaaggcaacgatgatgacaaacatggcacagatggcatccagacggacggcgaaccagcgggacgttgtcaaaaacaagaaccaagcctctgaatgtaaatcctggtgtgcatcaaacagttcctgacacctctcttctgctttgtatgcccggatggtccagagcccctggagagaagatgacaagtgggaaaacactggactccgagttgtagattccaagcgcttcacatctcttgacgtttccaaaaaatatcgccgaagaaaaatgaaaatgattccaaggggaaccaagggtattgcgatccaaagaatcacggccacagccacagagaccacaccaaccacttgttagcatgtctggatgaaaatctaaaacgtc

SEQ ID NO: 33984 - DNA, 513 bp, Homo sapiens
agcgcgcgtaatacgactcactatagggcgaattggagctccaccgcggtggcggccgaggtacgcgggggcactcggcctgagaaactcggcaagcgcgcagtgtcgactccccggtctatgccaggcgcatctcagctaatccaaaagtaaatgagaaacttagaaaaggattgccaattccaaatcaacatatttagagaaaattggaaaaggagaagcttactacagctttatttgaggactttttaaagaacgctgggttctatctgtgagctgcaaatcttggagcaaaaaccagagacattgccagagcaaacaagaacagaaatacaaatggagaactggtcaaaagacataacccacagttatcttgaacaagaaactacggggataaataaaagtacctgcccgggcggccgctctagaactagtggatcccccgggctgcaggaattcgatatcaagcttatcgataccgtcgacctcgagggggggcccggtacccagctt

SEQ ID NO: 33985 - DNA, 607 bp, Homo sapiens
gtatacgactcactatagggcgaattggagctccaccgcggtggcggccgcccgggcaggtacgcggggatgctgaccactcaccatcatctcaaggcagcagtgaggccccagcgtctcagccacccccccaggtcagaggttctgtcatgccctctgtgattagagcacatgccatcattaccttaggtaagctgtgcttacagcacgaggatctggcaaagaagagcatcccagccctggtgcgagagctcgaggtgtgtgaggacgtggctgtccgcaacaacgtcatcattgtaatgtgcgatctctgcattcgctacaccatcatggtggacaagtatattcccaacatctccatgtgtctgaaggattccgacccattcatccggaagcagacactcatcttgcttaccaatctcttgcaggaggaatttgtgaaatggaagggctccctgttcttccgatttgtcagcactctgatcgattcacacccagacattgccagcttcggggagttttgcctggctcacctgttactgaagaggaaccctgtcatgttctttcaacacttcattgaatgtatttctcactttaaataactatg

SEQ ID NO: 33986 - DNA, 458 bp, Homo sapiens
acgactactatagggcgaattggagctccaccgcggtggcggccgaggtacgcggggactgactggttgagccgggtagggaaagcagcctaaagcccgggacaggcacacaggcccaggtgtgtaggccacagcagccgcagtcctgaaaggctgcaacacccagacctccaggagagaccaggcccaggatgcctcgcctgttcttgttccacctgctagaattctgtttactactgaaccaattttccagagcagtcgcggccaaatggaaggacgatgttattaaattatgtggccgcgaattagttcgcgcgcagattgccatttgcggcatgagcacctggagcaaaaggtctctgagccaggaagatgcccctcagacacctagaccagtggcagaaattgtgccatccttcatcaacaaagatacagaaaccataaatatgatgtcagaa

SEQ ID NO: 33987 - DNA, 454 bp, Homo sapiens
tacactactatagggcgaattggagctccaccgcggtggcggccgcaaactgacacctcagggacaaagagatctggacagaatcgccggacaggtggcagctgccaacaagaagcattagaacaaaccatgctgggttaataaattgcctcattcgtaagaaaaaaaaaaaaaaaaaaaaagaaaaaaaagtactttttttttttttttttttttttttttgggaaatcttgcacaaatggcattttattaaagaaaatctaatttacaaagctttgtaaattttaagaaaaacattcatagatcataaacaaaaatttcaatatgcaatattcaaatttacaagaaaataagcacaaacttttagacagggcagttattgctgcactcctttaattccttatccagagcccaaaaaatgtagacaaaccctaaaaatgtagcagaagcattt

SEQ ID NO: 33988 - DNA, 505 bp, Homo sapiens
cactactatagggcgaattggagctccaccgcggtggcggccgcccgggcaggtacattttagaaagtgaaatgctgtggacatttaaggtggagccactgtgagagtctagggggatagatggtagtcgtctcggaatgaaacgaatacacccctctcagagccctttccaaggatcccctccttctttcagctccttccctccacctcaatacacactcctgtcccaggaacctaacctcatctagaaataccagggccagcatgccttacacctagaggtttggttggcttcagagaaacttctggaggctaaaagcagccaagaagaatcagccactacatgctgggcctggatgaacagagcagtgagctgtgatggggctggggctggggcccaggaggagcaggcaggagagtttgtatgcaccgtgattcaaatattataacaaaaatattcgatcatgtgttaggcactttacagttcccaaagcactttcccatc

SEQ ID NO: 33989 - DNA, 508 bp, Homo sapiens
cactactatagggcgaattggagctccaccgcggtggcggccgcccgggcaggtacgcgggggccgttactccgaggagataccagtcggtagaggagaagtcgaggttagagggaactgggaggcactttgctgtctgcaatcgaagttgagaggcccagtatttaggcgacagtgaatttattactctgaagagggttctgcacatatttccaaattatattggtggtcatcagaagtaggtgataggaagaaatacttctcaagggtgcaaaaatgcagagtaataaaacttttaacttggagaagcaaaaccatactccaagaaagcatcatcaacatcaccaccagcagcagcaccaccagcagcaacagcagcagccgccaccaccgccaatacctgcaaatgggcaacaggccagcagccaaaatgaaggcttgactattgacctgaagaattttagaaaaccaggagagaagacctttacccaacgaagccgtctttttt

SEQ ID NO: 33990 - DNA, 431 bp, Homo sapiens
atacgactcactatagggcgaattggagctccaccgcggtggcggccgcccgggcaggtactagtcagtatgctgtagtattaatcagtaggtcaagttcagtgaagtaaaggagaattgaattcttgaagttcacatttaggcaaaaatttggcgttttaggaggtgagtataagacatgatctttatagaaaacgctgatgataaaaacagcgctctctgttaggtgcctttatgcttgactccattgtcatcttttcttaagaaactaagctcaggactgggtgcaatggctcatgtctgtaatcccagcactttgggaggctgaggctataggatcagttgagctcaggagttcaagatcagcctgggcaacatagctaggcctcgtctctactaaaaaacgaacaaacaaaaaacaaaaaaaaacc

SEQ ID NO: 33991 - DNA, 505 bp, Homo sapiens
  misc_feature 408: n = A,T,C or G
tacgactcactatagggcgaattggagctccaccgcggtggcggccgaggtactatttttattttacagatgaagaactgtggattttgtttctaagaaaatttccaggctcacagaactaagcctaatttctttttattttttagcaaatacagtttttataagaatttgaattctatgaaaataaatggattactcctaaatctctgatgcctcagtgaacactttttccttattaacaaaattctcacttttggctttggattggctttgcaggagtgcagattgatcatagcttttttcatgtcctaagagttgtcagagttttctcttgtagcatttttttctttactttttttttttactatctttaaatatatgactgtaagagtatgataaatatgctgntttctaatctctgctgttgtcacataaactaatatattttgagtaattttgaaatgatattaataatgtcattagattttctttggattttttgaaa

SEQ ID NO: 33992 - DNA, 467 bp, Homo sapiens
ctatacggcgaattggtgctccaccgcggtggcggccgcccgggcaggtactttttttttttttttttttttttttttttttagagatggggtcttgctagcttgctcgggctgaactaaagatatcctcctgcctcagcctcccaggtagttggaactatagtaggagtatctaccctgccctgctagaacttcaagttttgatgggcaaatccaccccagaggacaggacaaatgccagtattctggttaatagccccagatgagccagcttcccacccatctcccgtaagggggcagacacataagggaagccaccttggacctttcaggtcaacccatctaccagggtgatacctacagagtggagcttttggatacattgacaatggaaaacaaaatggccacgcttgagtccccaacctaaattccctgagtctacaaaatttattaaaactataatattt

SEQ ID NO: 33993 - DNA, 445 bp, Homo sapiens
aatacgactcactatagggcgaattggagctccaccgcggtggcggccgcccggcctgtgacctcaggccctgaggttccctctattctgggagaaaagccacacgactgatgggccacataagctctggtctttttctgccggaatgccaggaccctatgataagccgtgatcctattgcacagatgactgcataataccacaggaattcaaatggggaacatcaatatcatacagagggagcactctactgggaacttacactatactctgtatctactctattggggcgactgtgtgcgctgcttgcagtcccccatagggtacatacagtgaccatgtctgtactatagtaggataatttgagcttatgggggtgtgccatgtgcccatcttcctacgatggaaagtgatagggacaggatattaccctaggagcctgact

SEQ ID NO: 33994 - DNA, 494 bp, Homo sapiens
ctactatagggcgaattggagctccaccgcggtggcggccgaggtactaagtcacacccagccagtcaataactgagaaatcaaaataaaataataatttcaaagaattacataaatacagggccttttgagatttttggcaattgtaaacaaaaacgaatggtttttacaattcagtgtaattctacgaatatttatttggcacccatgttaggcactgaggctacacagcagtgaaataggcctagttgttctcaactagagaacatagttggttaatgtagctgcactgaattgtagctgtttagaagataatataccctgaggctttttaaagtatactattactataagaagtaaaattattttatacttataaattttgttttggattattcaactgaatttggagtgttcagaattttcatggcggttgagacaaggaagaggtataatgctattttttttccttttctttttttttgagacggaat

SEQ ID NO: 33995 - DNA, 506 bp, Homo sapiens
  misc_feature 456: n = A,T,C or G
cgactactatagggcgaattggagctccaccgcggtggcggccgaggtacaagtcataaacacagtgtgcagcagtgacgatccacaggggcgtgatgacagagcccccgcacaggtggtagccctggaactgaaggctggcctgccagggccactgcgagagcaaggacatgtttccacccacgatgcgtgagctgtagccccttctatgaccacaggctgtgcactgcaaggtaaccacgtggccagaggcacatccctccctcacatatactgagtggtgtaatgcagtcaccttgtcatctggcaagaggtgatcgatggacacaaactcctcccggaactgcccctccagcgagctcactctgaggttatctgaactcacatagcttgggaaacccagctgggcacatgcaacatttgcgtagtgacccttccagtcatcggagcacatgngtcttccacgaagcagctgtgaacacctggagcacggcattctgaccact

SEQ ID NO: 33996 - DNA, 504 bp, Homo sapiens
tacgactcactatagggcgaattggagctccaccgcggtggcggccgcccgggcaggtacactagtatttaacctagacgtgaggaaggagtaggaaattttctggtgaatacagaagagcaaagaacagcaggtcagcaggaatgactaatgtttttctatgcatgtttaatggaatattcgtgtaggatattttgagtaggtaattggataatcagcatttgtaacttgcatcctagtagtctgactctcactaataagacttgtcaaagttccaagaatctgaaagtggatgataaatgtccatgtgtatcaccatccatgaccgaaagtcagcatccacagaacacagaattgggacagatgaacttaatagataaagatgaatatcggagttgttcctcttagggaatgatactctccatgagctgtgtgagtcacagctgccagaaaagaaagagcaaggagcgtatgaaggcagcacagcaaattcagtcctagagt

SEQ ID NO: 33997 - DNA, 437 bp, Homo sapiens
atacgactcactatagggcgaattggagctccaccgcggtggcggccgaggtacttttttttttttttttttgttttttttttttttttttttgatttcctttctttttgatcgagctttacttgaaatttattaatccagtatttagcacatatttagcattaagcctcaaacgatacagcaatatgttacattctcttgtgaaaacagttgttgtagactgttaattttttttaaatgtaactccgacttgtgcctaataggatttgacctttaagaggtttcttttgctgtggatgggggggctttgcttgaacttccattctgtgccttgtagctggagaggctgggagtatggatgggcctgatgcccttggcaccttgattcagtgagacggaggaggcaggaaaaggaggggaggaggaaaatgacaaag

SEQ ID NO: 33998 - DNA, 397 bp, Homo sapiens
gcgtaatacgactcactatagggcgaattggagctccaccgcggtggcggccgaggtacggattgagaagttgcccttcagtatgtcgctgtcataggtgtaatcgatggcaggggagatgtgctgcgagaagatctgggccatcatggtgcggtaggccttcccatccacgttggtcagcgtgtggtgcagcacttcatgcagctctgactcctccatctggggtgggggcagcagctcactcttgagcagttctgtggctgtgggccgttttgctggatcgtggttcaacagccaggagatgactgatttctgctttgcatgctctccatcgtcaaagtcttctggaaacttaggcgaagtgggctaaaaaaatatattcaaatcagcaaggttt

SEQ ID NO: 33999 - DNA, 238 bp, Homo sapiens
ggagctccccgcgggggggggcgcccgggcaggtacacaaactattacttccagaagagaattgtttaggttgttctggcctaaattttatgcaatgaataaaaatttaaatctcttcatccatgatctactgcaggtcaggatccttggcatcagatggtagtgataaaaaccggatattggggtgctgccggtggagaaaaatggaagaagccagaggtcagcaagaaggggaggc

SEQ ID NO: 34000 - DNA, 401 bp, Homo sapiens
  misc_feature 136: n = A,T,C or G
tacgactactatagggcgaattggagctccaccgcggtggcggccgcccgggcaggtacatcgagccctcagggtccctgactggttctccagccgccccataggctatgagcatccccgttccctacacaaaggnaccactgggatttattaaaggttatgccttgcaatgcagtactgttttcatatgtgtgatattatactactttctccaattttctcttcacatcctacccattctttttgctcaatcttttaagtcttttaatgaaatagttatacaaaaaagtgtatagagtcaggtgcggtggctcacacctgtaatctcagcactttgggaggccaaggtgggcggattgcttgagcccaggagtttaagacccagcctgggcaatgtggtg

SEQ ID NO: 34001 - DNA, 399 bp, Homo sapiens
taccactcactataggttgaattggagctccaccgcggtggcggccgaggtacatttgaaacataaccatggcagtaagttctgactgggagcaactgttcaacacaactctgtaggaatacaccgattttttataactgtgctgcctaatatggtagccacatgtggtttctgagcacttgaaatgtaggtagtccaaactgagatatgctagaaacatataatacacaccagacttcaaaggcttagtatgaaaaaaatgtatatgaaaaaatttcatatcgatgatcttgaatatagaggctggaaaaaattatttcatattgattatatactaaaagataacatttcagatacactgggttgagtaaactatattattaagtttaatttctcctg

SEQ ID NO: 34002 - DNA, 384 bp, Homo sapiens
tacgactcctatagggcgaattggagctccaccgcggtggcggccgaggtacaacttttgattcccccaaaacttaactgctaatagcctactgttgactggtaaccttattgataacataaataattgattaatcccatacttaaactagtatctacatgtattctatgcattcatgacatacctaaccttttcttgatttttttttttatgtttctaggctacatggttcatctgctagttttttcatattgtcacaattcccaaaaaaattttccaatatgtttattgaaaaaagccctacatataagtggacccacacagttcaaacttttgttgttcgagggtcaactgaaatgaaaattaaattaatgaatttttgga

SEQ ID NO: 34003 - DNA, 402 bp, Homo sapiens
agcgcgcgtaatacgactactatagggcgaattggagctccaccgcggtggcggccgcccgggcaggtactgatataatctaacaaatgaaggtgcacctttacttcctggaacatagacagccacctaagatacatagacataaatcatcacttaattttttgaagaataaaaactgagatggacatgtttttacaatcacaaaaaactaggaaaaggtttaaacacataatattacacataaacaaaaacagcaattaccttgtatggttggggtccaggtgataatacaaagtcattaattttttgcaaatgcaatttatttgcaattgtgtctaaaaaaagagtaaattaaatcagattgatgagagaacctaaaaggaacatgttaaactctgaata

SEQ ID NO: 34004 - DNA, 439 bp, Homo sapiens
ttttttttttttgagacagagtctttctctctctcccaggctggatgtgcggtggtgcattctcagttcactgctcactgcaacctccgcctcctgggttcagactgttctcctgcctcagcctcctgagtagttggggttgcaggtgcatgccaccatgcctggctaagttttgtatttttagcagagacagggtttcaccatgttggccgggctggcctcgagctcctgaccttgggtgatccaccctcctaggtctctcaaagtgctggaattacggggtgagccactgcgcccggcccttagtagcatcttttaatggaggtagagttgagatttcagtgactaacaactaaaggtattaaaggtaggggtttatatgatacatttgcattttagaaaactgatctaagcttcaatgtgaagaacagattgaaat

SEQ ID NO: 34005 - DNA, 516 bp, Homo sapiens
actactatagggcgaattggagctccaccgcggtggcggccgaggtacgcggggtctggcatcagcgttgcggctcgaggcaaagctggtcctgtgcctgctgtccattgccgctaaggcctgctgctgccattcaggcgtgtctccctctctctctctctttcatgccgctctctccaccccatcttgggacggccagctctaagaattcctgctacgacactgaattcaaccaggaggtgatgccacactcaatcagaaactatgctactgctgaagaggtatattgagccctgcctggttaacctccagtgaggttattagagaattgggagaggctcaaatcagcatcctgcacctggttatcaaaccattgtgaagtcttgattcctggatggccagaaaacttgtcattggtcaagagcaacattaagatctgcctgttactcatactgatgcttcctgcccagcaagttcatcagagggcgaggatgaattacggttgccatgaatgtc

SEQ ID NO: 34006 - DNA, 334 bp, Homo sapiens
gacagattggtttcagggggcggccctggctcttggggcttccgaggcgatcgggcagtgtcagtcttcagctgttaagctgagaagatctgggaaggagtcagtcagagagccttgggccagagttccaggagctctgggagtggctgtcagaaatggccaatttctttcaaatgctgtatactggaaaaatccaaaggactcatcagatgaacacatttcaaagagccgctaccaattttttttcttaagcaaagcatcaagcctctgatttgccgctgataaattctctaaataagcacttggaacagaaaggagctctacccaactaccc

SEQ ID NO: 34007 - DNA, 415 bp, Homo sapiens
ctactatagggcgaattggagctccaccgcggtggcggccgcccgggcaggtacctataaatgaagttgttttctggccgggcgcagtggctcacgcctgtaatcccagcacttcgggaggccaaggtggagggatcacttgagtccaggagtttgagaccagcctgggcaacatactgagactccgtctctccaaaaaaaataacatactaaattaccttaaaagaaattgctttttaagcagctttcatatagacctccttatctcagctatcacctccctcccacccccatcaccatcttttccagaggttgcctgatgctgataattcctgagcccttttgaagtattctgtagagtaagttccactgattcttggattttcttactaccagctttagattctgctttctc

SEQ ID NO: 34008 - DNA, 365 bp, Homo sapiens
cactactatagggcgaattggagctccaccgcggtggcggccgaggtactgctgaaacagaaattatgtgtttgggagaaccgagctaaggaaacatttcaaaaccaatgtatgttgatcccacctgagctgctttgatatatgacagcctctcataattactggtgtcactattgttgtaaatgaagaatagttaaatatggagagattaagacacaattcaaaacactttttaaaaaataaatggctgtttcataaacacaaacaaatctttaaaagaaaaataatcacatcaattgcaatatacattggcaaatagtaaaatgtcattttccaaaatagtagcttctttattatatgcccca

SEQ ID NO: 34009 - DNA, 82 bp, Homo sapiens
ggcgattggagctccaccgcggtggcggccgcccgggcaggtacttatactaaattatggtagttatttctgcctttccagt

SEQ ID NO: 34010 - DNA, 420 bp, Homo sapiens
  misc_feature 390: n = A,T,C or G
gcgtaatacgactcactatagggcgaattggagctccaccgcggtggcggccgaggtacttttttttttttttttttttttttttttgcgacagagtctcgctcttgttgcccaggctggtctcgaactcctgacctcaggtgatctgcccgcctcagcctcccaaagtgctgagattacaggcatgagccactgtgcccagcctgtttggtttggttttagcaattaagataatttggttgttaagccttgcttgtttgcaacaatgaagatggcacttgagattctggaaaggactttctaaactcaaggacctatgtgtgattgcttttattacctttttgtttattaggttttcaagacttgacattttgttttccttcatacagntcaccttgttggtctagtctatagagaaac

SEQ ID NO: 34011 - DNA, 417 bp, Homo sapiens
gcgtaatacgactcactatagggcgaattggagctccaccgcggtggcggccgaggtactttttttctttttcttttttttttttttttttttagtttttgagatcgtgtctcgctcctgttgcgcatgcctgtaatcccagctactcaggaggctgaggcaggataattgcttgaacccgggaggtggaggttgcagtgagccgagatcatgccactgcactccagcctgggcaacggagtgagactttgtctcggaaaaaaaaaaaaaaagatctggcggatgaaaataaccagaatgaaaatagctagaaaactcagcaagcaggaagctccctttctcacccttttgttcccttgccgatagaatcagtcactattggaaaaaatgaaagacgctctgtttaaaacaatgatg

SEQ ID NO: 34012 - DNA, 446 bp, Homo sapiens
actactatagggcgaattggagctccaccgcggtggcggccgaggtactaactcatccagtatctgattctgtcttttcctctatccatctgtcttccatctttgcatccatcattcaacgaaatttacagcctatgcagatgttctgtggtcttaaacatgttgtattcctctttgccttggccatgcttcctcccctcccagccgttgttctcccccacgagaatatcttctcttttctgcttcttagtggttctattctcagtatctgaaactctcattttctgtcccgcgtacctgcccgggcggccgctctagaactagtggatcccccgggctgcaggaattcgatatcaagcttatcgataccgtcgacctcggggggggcccggtacccagcttttgttccctttagtgagggttaattgcgcgcttggcgtaatcat

SEQ ID NO: 34013 - DNA, 449 bp, Homo sapiens
agggcgaattggagctccaccgcggtggcggccgcccgggcaggtaccttttattcctaaaagaaattacttggccaggtgcagtggctcacgcctataatcccaatgctttgggaggctgaggtggaagccaaggagtttcaggctgcagtgagctatgatcacaccactgtgttccagcctgggagacaaagcaagatcctgtctcttttaaaacaaaaaacaaacaaaccaaaaaaaaaacaaaaaaaaaacctaagaaatgtaattaatcattaagtagctgcaaattgaactgttctattttgatacttcctaagagtgtccagtgtaatcagatcattttataatgggttattgaccccaggtgtcctttagaaccacctggaaagctttacaaaaaaaaaaaaagggtgattttgatttaagttgttatggaataggaccca

SEQ ID NO: 34014 - DNA, 431 bp, Homo sapiens
agggcgaattggagctccatccgcggtggcggccgcccgggcaggtacctgctgtcccctctctgactagaaaacagtttccctagatacctgcatagttagccccctgagcttatttcaattctctgctcaaatgtcatgtaaatggtgacatcttccctgaccatcttatataaaataatacttccctttcccctgatattctctatccaccttatcctgtttgatttttctgcactgccccatcaaccattgacatataacatgtctacttgtttatatatgtattgtgtttcaccagcattgaaatgtgactttcacgagggtagggatttttgtctgttttatttaatactgtatccccaagaatgccttgcataaattgggactaacaaatatttattgaattgaataaatgaatacatttggga

SEQ ID NO: 34015 - DNA, 350 bp, Homo sapiens
ggccgaggtacctctgggccattttgcagaacccttcccttttttggtgtctgacgaaagctcgctccctgcccaggtttttcattgttgatcgaaattaacaccaggtggtgaatagagcccctcctaaggttgctcaggataaatcatttattaaataggtctgcttatcaggaggggcgtgaaggctcccaaaaggaaatgctggcacctgggcccagaagccagggcctctaactcctggggttgatttcttcagtgaagtttgcaccctacaaagggaatatggccaaagcggcactcaactgaaggctgatatcaggcgattagacagccatgcattctgcgtt

SEQ ID NO: 34016 - DNA, 422 bp, Homo sapiens
gctccatcgcggtggcggccgaggtacgtggtgaatagtcatatagccactattgctacttgaacttttcacgtttgtattttgtgttggcctatgtataagccaatctagcatgtttgagggcatgtgtgagagtaggtaagggagctgtaagttacattcaggtgggaatttagggctttctgcacaaaaaattctaatttctctgtccttttgctatgttgcatctcccagtgttgacaggttagtctgcatgattaataactgagcagctgtagagccatgccagtaagtctccaattcctgaacgtggccacatttgtcttttgatgtgactttcaaccacaagccacaaagtaagtctttcactaggctccgttgacttcagtctttatataaggggtttcaaggtattttgcagt

SEQ ID NO: 34017 - DNA, 460 bp, Homo sapiens
ctataggtcgaattgtagctccaccgcggtggcggccgcccgggcaggtacatagacgagctttctttgcctgctccaacctgagaggagtgttatcggggaacccaggatctcctccatctcctatagaaagcaagttacaaaatatcaaaaaagaaagcccaaattttccatgaagaggttacatatctaggtgtcatattgagccacgaggaacactggtttggctatgagaggaagcaagccatttgtgcacttctaaccccgactacccgatgacaaataggaatttttagacgcagcaacattctgccacatctggattccaagtttttcactgatggctaagctgttatatgacgccacaaaaggaggggaaaaggagcccctcttttaaaaaactaaccaagaaatagccttcaaacagatcaaggaagctttaacccaggccccagcctta

SEQ ID NO: 34018 - DNA, 440 bp, Homo sapiens
ggcgaattgtagctccaccgccgtggcggccgaggtacctgtcttggcctcctactgtcctttttaccttttttgttttttagaatagagacagggtcttactatgttgctcagactggtttcaaactcctaggctcaagcaatcttccagcctcagcctcctaaagtgctgggattacaggcatgagccaccacacccggccaagttctttaccatcttcagaaggcttagcttgcacttttggaagaagaatagactcccaggaagactgtgagagagatttggggcccaaattgatattaacaaatacactgaacttgattgtattcaccatgttctggctcttgagaaatgagagtgctagtgaggctggtgccactttgtgtatcttctgtacctgcccgggcggccgctctagaactagtgggatcccccgggc

SEQ ID NO: 34019 - DNA, 474 bp, Homo sapiens
tataggtcgaattggagctccaccgcggtggcggccgagtcggtaacggagaatgtttacgccgacattggcctgtattagcgcgtatggcctcgggccctcgttccccaaggcgtgccgcctccctgttctcagtcgcaggctgaagccttgtctgctctcctcctttttggtttggttttggaactgactccgagggttgggagagcgcgttggtggcgacggccgagtcagatcactataaacaaaatttccacaagagaaaatgttgaaataggagttgcggatacattggatatactggatgaaatacaagcggttaatttttgtaacgtgagggaaaagcccacattgctggttacatgtgtaaatcactgcgttattgctttagtcattgtctctatttagcaatgaccagactggaagaagtaaatagaggaagtgaacatgcattcttcagtgcggtatcttggc

SEQ ID NO: 34020 - DNA, 423 bp, Homo sapiens
atacactactatagggcgaattggagctccaccgcggtggcggccgaggtactggaacagggataagttcttggattaggtgccaacatacctataaaagctgatttttgagtaaattattgattctaacatatgtaatggatttggtgcgataattttctgatctttaactataagtgactttttattctccaccagaaaagataaatgactgagaatgtaagtctgcgctctgattaacacaatggagaaacggaaaaactatctctgttaaaaactgattcctgtcattcttctgatatcaaataagaggaaggaaaataaactttttgtgtgtagatagaaaaacatacctgaggccaggtgccagtggatcacgcctgtaatcccagcactttgggaggccaaggcgggcagattagc

SEQ ID NO: 34021 - DNA, 594 bp, Homo sapiens
gagctccaccgcggtggcggccgaggacgcgggggtgggggactccagccagcctgagtgacatgatccaaagagccctcttgggtaggaaattgccccggtggaatccctcaccagagaagcaggtagcaggccctcgcagaggattaacacagtggctgaacaccagaaggaactggcacttggagtccagacatctaaaatttggtatcgtgccttggatccaccacagtcagctgaaattatcagcccaggaccagtggaccaaccagcaggacatagaccatctgacccgaatgatcctgcaatgagaccacattgccagtggagatgacaacagcactgctctggtcactctggaagatgaccagtctatgcatggtggaagcttgagaaaatagcaagccctgctctagtcacaccaagaactgactagtctatgcacggccgctctagaactagtggatcccccgggctgcaggaattcgatatcaagcttatcgataccgtcgacctcgagggggggcccggtacccagcttttgttccctttagtgagggttaattgcgcgcttggcgtaatcatggtcatagc

SEQ ID NO: 34022 - DNA, 596 bp, Homo sapiens
ggagctccaccgcggtggcggccgcccggcaggtactgaggcagacgttgtggcggagaagggcagtggctgtagctgctctttccgtttccagggttccgaccaggtcgttgaggacttccacatggagattggcacaggaccagactcaagacacacaactatacagttgatgaaaaattggatatcactactttaactggcgttccagaagagcgtataaaaactagaaaagtcaggatctttgttcctgctcgcaataacatgcagtctggagtaaacaacacaaagaaatggaagatggagtttgataccagggagcgatgggaaaatcctttgatgggttgggcatcaacggctgatcccttatccaacatggttctaaccttcagtacacaagcgtgctgaagtggttggagaagagttcagtgaggacatcatgggtgagaaacttccgtaggttcaagccattctccagaaagaggcggacaaacttgggtctgtcctttatgagagccgtaaacatgacttcttgaaggtcagcagactcccatcggcggtcattggtgaaaatcccatcattggctaagtccagc

SEQ ID NO: 34023 - DNA, 538 bp, Homo sapiens
accgcggtggcggccgaggtactactcgattgttaacgtcaaggagtcgcaggtcttctggttctaggtaaatgggggaagtatgtaggagtggaagattagtccgccgtagtcggtgtacacaggccaagaaaaaaccgtatcaaaatgtaaatataattccacattacagccagttaaagaacaatgggaagaccaagaaggagatggcagtgacagaagaagggagaaggggaaataatgggcactaagaaagcagaaagagacatatttggagggagatggctaccgaaatctgggcttttcttagatcctctccaaggaaagttatcactggaaatacccaaggccctgattgtatgcactgtgctagggagaaagacattcagatgctgaaataaaaaactagggaattagtaaaaattggatctctaagacaaataaattgatcaaactataataataatcaaacttctaataatgtataacctctccagagatgaactccaagaacagctcaatggtttgttgaaaaaaa

SEQ ID NO: 34024 - DNA, 582 bp, Homo sapiens
gcgaattggagttccaccgcggtggcggccgaggtacgcggggattgttgatcgaaattaacaccaggtggtgaatttagccctatctaaggttgctcaggataaatcgtttattaaataggtctgcttatcaggaggggcgtgaaggctcccaaaaggaaatgctggcactgggcccagaagccagggcctctaactcctggggttgatttcttcagtgaagttgcaccctacaaagggaatatggccaaagcggcactcaactgaaggctgatatcaggcgattagacagccatgcattctgcgtttgtctggaatggattgtagagagatggacttatatgaggactaccagtccccgtttgattttgatgcaagagtgaacaaaagctatctctacttgtctcctagtggaaattcatctccacccggatcacctactcttcagaaatttggtctgctgagaacagacccggtccctgaggaaggagaagatgttgctgccacgatcagtgccacagagaccctctcggaagaggagcaggaagagctaaaaagagaacttgcaaaggtagaagaaga

SEQ ID NO: 34025 - DNA, 584 bp, Homo sapiens
gagctccaccgcggtggcggccgcccggcaggtaccataccaactggaatttaggctttaaaaataatgtttcaaggccatttgtggtgattcatgcctgaaatcccactacttggggaggctgcggctggagaattgcttgaggctagtgagctgtgattgactgagaacttgctttggggtgcaattaaacaataaactgattttatttgggagaaacaaggaagggtgcacttaactagcaacctaagcatgatttttcagcttttgcccttagggtttaaattacaattccaaaatgttagacatactgtattttttcgttcagtgtggctttaattttcccctcttgcagtttgttctgtagtgccttttacatttggacacatagtttatgctttttagattttggttgctttcttgccaaaataagtgttaactgtgtttcaaacttgattttctttctcttttctttttttttcttccagaatgtcttatttaaaaagaaagctaaaagcatacttctaagtcagagcctctattttggtgtaagacttgggatattttttacttcacattgaata

SEQ ID NO: 34026 - DNA, 490 bp, Homo sapiens
ggtgccggccgcccgggcaggtacgaatttaagcacttacatgagggggttaagtcagagtctgttgaggagctgaagaaggtggctgaggagctggaggagaagctaagcatgctcaacaataattataagattctgcaggcggaccagactgtagttccagctaactgggcggctgaggcaggagaatggcgtgaacctgggaggtggagcttgcagtgagccgagatatcgccactgcactccagcctgggtgacagagcgagactccatctcaaaaaaaaaaaaaagaatatattgacggaagaatagagaggaggcttgaaggaaccagcaatgagaaggccaggaaaagaaagagctgaaaatggagaaagcccaagagttagaacagttggatacaggagaagaaacagcggctccactacagacccagccccaggttcaatgtcctccgaagaatgaagtctttccctggggatggtcccct

SEQ ID NO: 34027 - DNA, 589 bp, Homo sapiens
tacgactcactatagggcgaattggagctccaccgcggtggcggccgcccggcaggtacgcaatgtgatgttttcatacagtatacactatgaaacgattactataatcaaattaattcatatgtctaacaccctcatagttgccttttattgttcggtgatgagagcatttaagatccactctcttaaaatgtcaagtaggatccttgcttccaaaatgccaaaggaaagaaggaacaatggtcatgccattcacttgcagcctgttcactgcaagaactgtgctcaatgcatgcccaggaataaggctattaagaagtttgtcattaaaaacatagcagaggccactgcagtgagggacatttctgaagtgagccctcaatgctcacagtgtttcccaagctgtatgtgaagctatattgctgtgcgaattgtacctcggccgctctagaactagtggatcccccgggctgcaggaattcgatatcaagcttatcgataccgtcgacctcgagggggggcccggtacccagcttttgttccctttagtgagggttaattgcgcgcttggcgtaatcatggtcatagc

SEQ ID NO: 34028 - DNA, 497 bp, Homo sapiens
  misc_feature 13: n = A,T,C or G
tatagggcgatgnggagctccaccgcggtggcggccgaggtactcatgttcctggtgtagcaacgtgtggtatggctacacttagaacatgagaacataaagccatttttatgcttactactaaaagctgtccactgtagagttgctgtatgtagcaatgtgtatccactctacgggtcagcttttagtagagagcataaaaatgataaaatacttcttgaaaacttagtttactatacatcttgccctattaatatgttctcttaacgtgtgccattgttctctttgaccattttcctataatgatgttgatgttcaacacctggactgaatgtctgttctcagatcccttggatgttacagatgaggcagtctgactgtcctttctacttgaaagattagaatatgtatccaaatggcattcacgtgtcacttagcaaggtttgctgatgcttcaaagagcttagtttgcggtttcctggacgtggaaacaagta

SEQ ID NO: 34029 - DNA, 565 bp, Homo sapiens
agggcgacattggagctccaccgcggtggcggccgaggactctgctcagcatggccacgtaggtttacagagggtcttgacttgttcttttatttagacggagactcactctgccacccaggctggaatgcagtggcgcactcttgcctcactttaacctcacttccctggttaagcattcccctgcctttgcctcccgagtagctgtgattacaggcacacaccaccacgcccagctagttctgttgtattcctagtagagacggggtttcaccatgcaggcccagctggccacgtacgttctaaagcaaggggcgtgaagaaggcacagggaggtatgtggctgctctcgcggtagttcattcggcctaaatcgacctggtattaaatttcacgaaggatctggcatttgctctgcttgacccttctctttaaagggtacaatattaatgtttagaatgacagagatgaattatcacaataaatctgatgtacctgcccgggcggccgctctagaactagtggatcccccgggctgcaggaattcgatatcaagcttatcgat

SEQ ID NO: 34030 - DNA, 240 bp, Homo sapiens
  misc_feature 32, 65: n = A,T,C or G
gccgcccgggcaggtacagagtctggacaggngcttccctgttatcctttcaattttagagcganaggagcatcatccggagtttacatgtgaggaaacagggtcaaggaatagcatttgcccagagtggcacagctagtcagtaggggagcatcagatttgagaaatccagagctattctcacatccagggctcctttctagactacatagagctgagggtttcggcagtaagatgagg

SEQ ID NO: 34031 - DNA, 500 bp, Homo sapiens
  misc_feature 50, 79: n = A,T,C or G
caccgcggcggcggccgcccgggcaggtacttctttaagctctattcagnagggatctagcctttgcaataatgtcgancctagccacggagggtgttttcttgttaccttataaaacaggtaataaccaatcattttgtgttcgtatttccatcctttttatgttctggcctttgtgtacgactgatgattaagtaaggcaaactagcttctacttttcaaacgagccgccaagggcattaatagaccccatttgtaaactgagaaatgattctcgttttagtaatcattctataaatgatactgctggattgattgccgagggttgatagctggaggaattgttttggacaatactaacatgtgaatctatgtcttagttttatttgcagccttgctaagtaaaatgagcctttgtatctacttattaattaaagtgaaatttagcgatagtgaatattaggtgacataaataaaacatcccagactagtgagttaag

SEQ ID NO: 34032 - DNA, 418 bp, Homo sapiens
  misc_feature 63, 68, 69: n = A,T,C or G
cgtaatacgactcactatagggcgaattggagctccaccgcggtggcggccgcccgggcaggnacttnntttttttttttttttttttttttttctgtcgccaggctggagtgcagtggcgtgatctcagctcaatgcaatctctgcctcctgggttcaagtgtttctcctgcctcacctcctaagtagctggactcaggcacgcaccaccacgcccagctactttttgtatttttggcagagacggggtttcaccatgttggccaagatggtctcgatctcttgaccttgtgatctgcctgcctcggcctcccaaagtgctgggattacaggcatgagccactgcacccggcccaaaagtcttaaacctctaaatatttgtttctaatctggctcttcaaaataaattttatctgaa

SEQ ID NO: 34033 - DNA, 426 bp, Homo sapiens
ggcgaattgtgagctccaccgcggtggcggccgaggtacattttttcaatgtccttcatttgacaccgtttggtttagctctctttgtatgtgttcaaaaaccaaagcgttttctttcagagcctctcttgtgttatggagctcagttttgaggcacctggacttactctcagctttagaaagttgctgagaaagaatcagaacatgagaattcaaattttcctgtaaatgacgcaatttatctactgtgccctggaaatcaagctcttggtctctttctgttgagtgactttgatcatgatcatgtagagcaacattcagtctacgatggtatgattccatttcgtcagtctttgcctgctttgtttttccttctccagtttagaacggagcattgtgttctcatctgtcagagcagtaagctgt

SEQ ID NO: 34034 - DNA, 425 bp, Homo sapiens
ttttttttttttttttttttgaaacaaatttggcattgagcagagatcacaccactgcactccatcctgggcgactcagggagcctccgtctcaaaaacaactttttttcatccatggacaattgttgtcttgttttggtcctctttaggaggtggttttataatcagctataaaactccaataggtgctcttgaatgcaggtttctgataactttggagattgtgacaacagaatagaggaagaaccttcaggactcatggagagctaaatgttcatgagtatcaagcaggaattaacaggaattaactgcatggactgaaccaatcttttttactttttgctcaaaatatttgctggtcctttgttttgcgtttccgagtcttatgacttttcttttgagctactgacagattttaacaattt

SEQ ID NO: 34035 - DNA, 477 bp, Homo sapiens
agggcgaattggagctccaccgcggtggcggccgcccgggcaggtacgcgggggcacacagatggcattttaaagtttataaatgaataatgtctgatgaaaacatcaaagctactttctagatttgtggagattgcccagataaacgaagtcacggtaaaaggctagtgtgagaaacaccaacagcaggcccatctcagatcttcactatggcaacttatgcaagaaactgttgaattagacccgtttcctatagatgagaaaccatacaagctgtggtatttatgagcctccatttcttatactactgcagtgaaccaacattggatgtgaaaattgccttttgtcagggattcgataaacaagtggatgtgtcatatattgccaaacattacaacatgagcaaaagcaaagttgacaaccagttctacagtgtggaagtgggagactcaaccttcacagttctcaagcgctacc

SEQ ID NO: 34036 - DNA, 479 bp, Homo sapiens
agggcgaattggagctccaccgcggtggcggccgcccgggcaggtacccagtgcggctggaatgtcgtttattgggagtgccaccacctcagatattttggaagaaagaaagtgaatcactcactcacagcactgaccgagtgaggtaagactgcacaatgagaacctgatccttaactgttcagtcctaatgatgtatcaaaagatacattttatatagcatggaaatctatgtgtaaaagccacatagatgttttgatttttgatgaaatcaatcaaagacaaaaaccatgcgttacccaatgtaggattaagcttttagaaggaagctatgggtgtttgatctaatggtgatttcttaaaagtgtttatcattctatctaaaagaaaagatgaattcatttgctttagtgataaaagactattcagtggtttttgtaaaggcagatcctcaactaggaattaagcacacagatgca

SEQ ID NO: 34037 - DNA, 465 bp, Homo sapiens
ggcgaattgtagctccaccgcggtggcggccgcccgggcaggtaccaccccatccccaggaggcccatttataccagaaatcccaagtccattagctacaggctgatattcagggacatcggtgtaaacaaagaagtgggatatgaactatatccctgattttttttcttttttttttttttttgagactaagcctcactcttgtcccccaggctggagtgcaatggcgcgatcttggctcactgcaacctccgcctttcaggttcaagagattctcttgcctcagcctcctaactgggataacagacacctgctaccatgcccggctcatttttttttgtatttttagtagagacggggtttcaccatgttggcctggctggtctcgaacacctgacctcaggtgttccgcccgcctcagcctcccaaagtgctgggattacaaggtgtgagccaccgcacccg

SEQ ID NO: 34038 - DNA, 495 bp, Homo sapiens
ctactatagggcgaattggagctccaccgcggtggcggccgagggactttttttttttttttttttttttttgggagacggagtcccactctgtcacccaggctggagtgcagtggcacgatctcagctcactgcaacctccaactcccaggttcaagtgatcctcctgcctcagcccctccagtagctggaatcacaggcacatgccaccacgcccggctaatttttgtatttttagtagagacagggtttcgccatgctggtcaggctggtcttgaactcctgacctcaggtgatccacccacctcggcctccaaagtgctgggattacaggcatgagccactgctcctggccccagcttctaattaattaaaagtgataaagatcatttcaatatcttcttcagttcatagagttctacaatgaaggcttttcatacaaatgaatgaagttaacagtgcacaatttttgaaagtccttttaataagcaccct

SEQ ID NO: 34039 - DNA, 483 bp, Homo sapiens
  misc_feature 443: n = A,T,C or G
gggcgaattggagctccaccgcggtggcggccgaggtacttcttttttttttttttaagagatgtgtattttgctacattggccaggctggtctcgaactcctggcctgaagtgatccttctgccttggcctcccaaaatgctgagattgtaggcatgagccgccatgcctagcccagcttgtctttttgtttacttaccagtgtttttcagagaacaaaaattttaatttgatgaagtccaattaattaaatttttaaaatagagtgtgatttttttgtcatgtctaagaaactattgtctagtcctaggtcctaattctcctttgttttcttctaaatgttttattattttacatgttaacgtttagatttatgatctattttaagttttttttaagtatgagggttatgttttttggttgtgtttaggagcatatggtgngatgtctaagttgttccagcaccattttgttggaaagact

SEQ ID NO: 34040 - DNA, 482 bp, Homo sapiens
  misc_feature 64: n = A,T,C or G
ggcgaatttgagctccaccgcggtggcggccgaggtactttttttcttttttttttttgagacnaggatttactgtgttgccaaggctggagtgcagtgtgtgatcacggcttaatgcagcctccacctcctaggctccagcaatccccccacttcagcccctcaagtagctgggactacaggtgcatgccaccatgcccagctaatttttgtatttttttgtagagacagggttttgctctgttgctcaggctggtcttgaactccaggactcagtctaaccaccagccttggcctctcaaagtgctaggattacaggcttgagccaccatgctcggcctatatttccttcaaatgtgtgttttgcgcttaagtatttcttctgttggccaaatctctgatttcccattttaattaagtcttaatgtttgcaaaatatttttttcatctttttaagctttttatgttgcatctcaacatta

SEQ ID NO: 34041 - DNA, 409 bp, Homo sapiens
  misc_feature 38: n = A,T,C or G
gcggccgaggtactgattccatgggatatgtcaatacnccctccgtgagcttggaccaggcaggagaagagagtggtatcacctgggtaatgaatggaaatatatgtcataatgctcctttttggcagtagagttacattaccagggtgtcaaacccagcaatatgtcacaattgcttatgtggtcggggaacaggcaggagagtcacataacctgggcatagggctcagagacatgtcccaacgccttccgtaggcagtgccaaggcaggggaggagactcaaatcatttaagtgtaaggtccagcgatatgtcacaatgtcccctgtgagcagcaccaatgcaaaaaaatagaatcacatcccctcagttctggggtcagctatgtgtcactattccatctgtgggc

SEQ ID NO: 34042 - DNA, 491 bp, Homo sapiens
tatagggcgatattggagctccaccgcggtggcggccgcccgggcaggtacgcgggaaatcaaggggtcttaagagttgtttccttctgaggctggaagagaatctgttctgtgcctctctcgtatctcctggaggtttgctagaagtctttggcattccttggcttgtgacagcataactctgatattcatatggctttctcactctatctctgtatccaaatctccccttttcacaaggacttgatcatattggattaggcccaccctaatgacctcaccttaactagatcatctgcaaagaccttgtttccaaggtgctagggtggtgggtggagacaggggagagactattcaattcataacacctaagtattgtgtctccttagtccgtttcagtccccacccagccctgacttgactctcagctgctttgggtctgagcaacaccgctgcagaagctctgatttggagctgacagaaaaagaagg

SEQ ID NO: 34043 - DNA, 357 bp, Homo sapiens
ccctagcagatgaatacaaagacattctgggtaaaagaaggggaaagaaaggaagagatggtctcagtagagatgaactcaggtgcagaatctgagtctcagcacagggctactatgcagaagtgggtaaaggaatgagaacactcaggagctcggtgggcacacagtcatggggactaggcagttccaaggattgaaatacggataagcaggtcgagaaaagcgacatccagagaacttgtagatgagtgctccgtggtttgtgacattgaaaaatgagacaatgcctgcctcatagtctaggaaaaccccaatacgacagggaggcacagccataaagagagtcaaaaccttggg

SEQ ID NO: 34044 - DNA, 211 bp, Homo sapiens
attgagctccacgcggtggcggccgaggcactttttttttttttttttttttttgattattactttaaaaggggagataggtaggagtagcgtggtaaggccgatgagtgtggggaggaatggggtgggtttcgtatcctccaactgacattttatttttccgttcttccatatggaaaaaaacgcacccccggtgccttaccttaggcat

SEQ ID NO: 34045 - DNA, 480 bp, Homo sapiens
ggcgaattggagctccaccgcggtggcggccgaggtacgcgggggctcactgcaacctctgccttcatgttcaagcaattcttctgcctcagcctcctgagcagctgggactacaggcccgtgccccactacgcccagctagtttttgtatttttagtagagatggggttttatcatattgaccaggctggtctcaaactcctgacctcgtgatccgcctgccttgtcctcccaaagtgctgggattacaggcatgagccactgcgcccagcccaagactcctatttttaaaacctgaaaaaattttcatgaatgaaatgcagatagaatctgtaagtcacttgctacattaaaatactcaggcaaagggaggtatttctatacattatgatgtgtgcctccaagcttgtttcagaaataaatattttaaaataggtacctgcccgggcggccgctctagaactagtggatcccccgggc

SEQ ID NO: 34046 - DNA, 408 bp, Homo sapiens
  misc_feature 38, 63: n = A,T,C or G
ggcggccgagcgactttttttttttttttttttacccnttttacgtaatttcagagacggggnttcgccatgggggcctttctggtctcgaactcctggcctcaagcgatccacctgcctcagcctcccaaagtgctgggattacaagtgtgagccaccgcaaccgtccctgtatactttttacccacacagcatagccacattgcctacaacacagggggtgttcaataaatgcctaaatgtttgttggctgaatttaaaataattaaagacctgcagtttatatgcataaaatcataaactctaatgggatcactaccacattgccaaatccaccagaatataaggcccccatgatgattttatctttccacagaattcttcttgaaggtcatttaaacacatttt

SEQ ID NO: 34047 - DNA, 444 bp, Homo sapiens
  misc_feature 48, 49, 70, 73: n = A,T,C or G
agctccaccgcgggggcggccgaggtttactatacggaggtattaggnncttcggatcactacttgaagntgntaaaatgatattttatagttttgatgtgcttaaaaactgggaattgagaattttttttttttattttttgttttaagttaaaaattaagcacaagatgccaggcatgggaggatcactttgtgaggccaaggcgagaggattgcttgagcccaggagttcaagaccagcctggagagcatagcaagaccccatctctgacaaaaaaaattagctggatgtggtgggcatgcctgtaatcccaactacttgggaagctgagatgggagcattgtttgaagccaggaggtcaaaactgcagtgagtgttgatcatgccactgccctttcgcctagatgacagagtgagaccgacacaaaaaaaaaaaaaagta

SEQ ID NO: 34048 - DNA, 367 bp, Homo sapiens
ggcgatattggagctccaccgcggtggcggccgcccgggcaggtacaggctatggtgaagttttgtagtcgacttggatgccaggtaggcatgtcttcaggttctagtcacggcagtggtaggccaaatattcctttccttgggacctagggcagtgtataatggcattagtgttggctagtccagatagctgattcttgaacctctaggtggcttgcctggttactggtagtgacagcagtaggccagttgggtgggcaggtttttgggctcctgggcatgaagtatgctatgggcaatatcagtagccgtggcaggacaaatctctggcttccgagttgtctatcccggtattgacagcgacagt

SEQ ID NO: 34049 - DNA, 440 bp, Homo sapiens
gaattggagctccaccgcggtggcggccgaggtacttaccatcttgtctctcagtaggttcatgtgacttaagaggaaaatgtttaatatttgctttatctattagatcagaacctcttcgaaaaaagaagaaggtagatcctaaaaaagaccaagaagcaaaggagcgcttgaaaaggaagatccgaaaactggaaaaggctactcaagagctaattcctattgaagattttattacccctctaaagttcttggataaagcaaggtaaggatccttctctagggatgaagtcctcaggacaaaggagtaatatcaacttcaggtagttgtgtctgtagttcacacctgtgatagtcattggtcagtaggcttgagctgacttggccctaatgagtccttgctccttttggaagcaggagaaagcatccttgggtggtac

SEQ ID NO: 34050 - DNA, 313 bp, Homo sapiens
cactataggtcgaattggagctccaccgcggtggcggccgagttgtgatgtttgcttcacaacaggggtcttttggcaatgtctggagacatttttattgttatagctgaacaggaaagtgctactggcatctgggaggaggctgctaaacatctcacaatgtgttaccctgtcccaaatgtcagtcgtgttgaggctgagaaacatggtttaaatgagtcagaggctggccacagtggcacgtgcctgtagtcccagctactcaggaggctgcggtggaagattgccttaacccaggagttcaagactagac

SEQ ID NO: 34051 - DNA, 222 bp, Homo sapiens
cgcggtggcggccgcctgggcaggtacagtgtcacaatcatggctttactgcagcctcgatctcccaggctcaagtgatcctcctacctcagcctcccgagtagctgggaccacagacatatcccatcgcacccagtttttgggttttttttgtttttttgttttttgttttttgtttttgtctttcagagagatggggtctcactatgttgcccaggatga

SEQ ID NO: 34052 - DNA, 213 bp, Homo sapiens
  misc_feature 69: n = A,T,C or G
caccgcggaggcggccgccttggcaggtacaactgaaacatgagccttttgggtctacatgcctgaggnagtgacagaccagctttggaagagtggaagccctatttccaaattcaagcatgctttgagtataaattaagtttacctctttttgcacagcaacatggccaatctttcctaagctgctcagcttacaagaaatggaatcatact

SEQ ID NO: 34053 - DNA, 419 bp, Homo sapiens
ctccaccgccgtggcggccgagggactttttttttttttttttttttttgggaaattcccctaaaagattcctgcttccttctggaacaacagagcaacagggcagttgtgatgttgggtttagatgacacttatttaggagatggagcaataagatcagaggtcttctaaggattctggggagtcagtgtatagatggaaaccaaatatgagtgtgtagccccagaaactgctcagataacctggtcagaaactaggcaagctggcaggggttgggaagcacagatgtagagcacatcaaggcaagtgaccaagagtattgtaaaaaaacattttggtatcatcttgtagcaagttctggggaagttcactgactcaaggatatgcacaagcatgggggtgctgataatattaacaat

SEQ ID NO: 34054 - DNA, 339 bp, Homo sapiens
ggcgaattggagctccaccgcggtggcggccgcccggccaggttcgcggggtcgatgatgaaatggaggccaatcttgaaaagttcgacatcagcgaggatgacatcgatgatggattcaggagactgtttgcccagttggcaggagagctcccacggggggccaatatctatgctctggttatgtgtgcacaggatgcggagatccctgcctttgagctgcagaccatcctgagaagggttctagcaaagcgccaagatatcaagtcagatggcttcagcatcgagacatgcaaaattatggttgacatgctagatttcgacgggagtggcaagctgg

SEQ ID NO: 34055 - DNA, 348 bp, Homo sapiens
actactatagggcgaattggagctccaccgcggtggcggccgagcgacccagtacttatgttgcattgtgggtgcgaaagtgaaaacactacctcttttgagactttgcccaggggcctgtgcctggatggaggcgcaggcagccttgaccacggctggtcccctcacccaaaagaattatcagcccaacaggcaagacccaacaggtgctgaactgtgcatcaaccaggaagagctctatccccaagctggccactatcacatatgcttactgttgcttaaaattaataaatcatgttttgatgagaaaaaccattccgactactttgatagcaagcgtgcctgccc

SEQ ID NO: 34056 - DNA, 550 bp, Homo sapiens
tatagggcgatttggagctccaccgcggtggcggccgcccgggcaggtacgcgggggcagtttgaatcgcggtgcgacgatttgttggtggtgggatctcaccgtgggtccgattagccttttctctgccttgcttgcttgagcttcagcggaattcgaaatggccggcggaaggtggaaaggactccggaaaggccaagacaaaggcggtttcccgctcgcagagagccggcttgcagttcccagtgggccgtattcatcgacacctaaaatctaggacgaccagtcatggacgtgtgggcgcgactgccgctgtgtacattttcctgaagaagcttagatatagttgtgttagtattttcccctggaatacgccccattatactttctcatggatagtcagtttggtgctttttaatcctctccttttaaaaaagcattttttggttaaacatttttggagtctgttgtgtaatagtggtgagtaaaacagatctagtcctggttcttatggaacttatagtctactacgtttttttttttttttttt

SEQ ID NO: 34057 - DNA, 326 bp, Homo sapiens
  misc_feature 197, 223, 289, 298, 311, 312, 313: n = A,T,C or G
ctatagggcgatttggagctccaccgcggtggcggccgaggtacttttttttttttttttttttttccgcattattatgaggatatccttaaaggttggggaacttgggcgactttggctaatgaggagctctgtgccttgagccccccaggccatagaatagtaaatagtctgtgcctccagccctgcagtgtganggttcacagtcctgtgggctccacancccatcactctgtatcagggaggctcatggttctcacctttgtctttcttgccagccttgaggatnggagtcttngagcctccatcgnnngcaccacgcaggg

SEQ ID NO: 34058 - DNA, 544 bp, Homo sapiens
  misc_feature 130: n = A,T,C or G
tggcggccgcccggcaggtacagctctcagtctactgatgtttaaggatggtctcggtggttaggcctactagaataaactgagtccaatacctctacacagttatgtttagactgggcttctttgacanccgggaagaaggtggcggggtttaggggcaaacttcaatggttatgcggggatgttcacagagcaagctttggtatctagctagtctagcattcattagctaatggtgtcctttggtatttattaaaatcaccacagcatagggggactttatgtttaggttttgtctaagagttagcttatctgcttcttgtgctaacagggctattgctaccagggactttggacatgggggccagcgtttggaaacctcatctagttgttttgagagataggccactggccttggccagggccctacagtctgggttaaaactccaactgccactttttctctttctgacacatagagtgtaaaaggttttgtcaggtcaggtagccccagggctggggctgacatgggttttttcttttt

SEQ ID NO: 34059 - DNA, 590 bp, Homo sapiens
atagggcgacttggagctccccgttgtggcggccgaggtacgagatgccacggcacgaagtctacgttctcctgatccgaaacatctttttgataatatcaatcattggcattctttgttactattggctcaacaccgtggccctgtctggtgaagagtgttgggaaaccctattgccagcatctaccggctccttctgatggattttgtgttctctttagtcaattccttcctgggggagtttctgaggagaatcattgggatgcaactgatcacaagtcttggccttcaggagtttgacattgccaggaacgttctagaactgatctatgcacaaactctggtgtggattggcatcttcttctgccccctgctgccctttatccaaatgattatgcttttcatcatgttctactccaaaaatatcagcctgatgatgaatttccagcctccgagcaaagcctggcgggcctcacagatgatgactttcttcatcttcttgctctttttcccatccttcaccggggtcttgtgcaccctggccatcaccatctggagattgaagccttcagctgactgtggcccttttc

SEQ ID NO: 34060 - DNA, 478 bp, Homo sapiens
tacctgagtctgggcaatttataaacaaaaggggttcatgtgactcacagttctgcatggttggggagacctcaggaaacttacaatcatgacgaacctcggggaacttacaattgtgacgaaggcaaaggggaagcagccttcttcacaaggtggcaggagagagtgcagggaaaactgccacttttaaaaccatcagatcttgtgagaactccctcactatcacaagaacagcatggggaaacagcccccatgatccaatcacctcccaccaggtccctcccctgacacgtggggattacaattcaagatgagatttgggtggggacacagagccaaatcatatcagcctcctaacttcacatttggtaaatttgatttctggtcctgcccgggcggccgctctagaactagtggatcccccgggctgcaagaattcgatatcaagcttatcgataccgtcgacctcgaggggggg

SEQ ID NO: 34061 - DNA, 479 bp, Homo sapiens
gagctccaccttggtggcggccccgacatgcaaaaaaaaaaaaaatttgatgaatctagaaccattttgagtgaaagactccagatgcaaaataataaatacggtatgactccatttacatgcaatcccagagcaggcaaactaatctatgggataggattagaaaggttccctcagcagggtgcagtagctcacacctgcaatcccagcactttgggaggccgaggtgtgtggatcatgaagtcaggagatcgaggccatcctggctaacatggtgaaaccccatctctactaaaaatacaaacaattagcctggtgtggtggtgggcacctgtagtcccagctcctcgggaggctgaggcaggagaatggcatgaacccaggaggtggagcttgcagtgagccgagattgtgccactgcagtccagcctcaaaaaaaagaaagtggttccctcagtgagaaggaaagggggtttgac

SEQ ID NO: 34062 - DNA, 603 bp, Homo sapiens
  misc_feature 119, 133: n = A,T,C or G
accgcggtggcggccgcccggcaggtacttaaatattatatattttccatttcataattgttttcctttctctgtggctttaaagtttttgactattttacaatgttaatcactaggtnaacttgccatattntctggttctatattaagttctatcctttatatgctgttattataaagctggtttttagcatttgtctgtagcaatagaaattttactaagtctctgttctcccagtaagttttttcttttctcagtaagtccctaagaaaacatttgtttgccactcttactattcccaatcttggattgttcgagctgaaaaaaaatttgatgagaaacaggaggatccttttctggtgaatataggttcctgctttaagaatgtggaaatccattgctttatataactaatatacacacagattaattaaaattgtgagaaataattcacacatgacaagtaggtaacatgcatgagttttgaatttttttaaaaacccaactgtttgacaaaatatagaacccaaattggtacctcggccgctctagaactagtggatcccccgggctgcaggaattcgatatcaagcttatcgata

SEQ ID NO: 34063 - DNA, 444 bp, Homo sapiens
ggcggccgacgacggattctgtgagctgggttgacagataccctttcattgttggcagtgggatgatgtagcaaaggaccaattttcctggagatcctattacgtgaagggacttatactggacacatcatggagaaaatcagaagaagtgttaataagacccactcctggatgcggccactctcaattctcagtgtctttgggaagcaaggttcgccatccacttgtctaaacagatgatgatagcagaggtgctgcacaccttctccctgtgacttgtgaatgcctttcatgctcccaaataaggaactcctctcactgctgtctgctctgagctgtatttcattttgatagccatttgcaggagacacctttgaactccatgcaatgtaaaagatgtcgttgagaaattcttcaatggaatttcttccccttttcccccac

SEQ ID NO: 34064 - DNA, 380 bp, Homo sapiens
ggcgaattgtagctccaccgcgggggcggccgaggtacttttttttttttttctttgtgagggacgtcttactctgtcgtccaggctggagtgcagcggtgggatcacagctcagcgcagtgaactcctggactaaagccaccctcccacttcagcctcccaagtagccgggacaacaagcacaagccaccacacctggctaatttttaaaatatttcgtagcgatgggggcctccctgtgtttcccaggctgatctcgacctccgaggctcaatcgatccccccacctcgggctcccaaagtgctgggattacaggcttgacaactgtgcccggcctgggctttttggaaggagtcttcctggtcccgacagttctcct

SEQ ID NO: 34065 - DNA, 441 bp, Homo sapiens
ctactatagggcgaattggagctccaccgcggtggcggccgcccggccaggtacgcggggacagaagcttctgggtaggggctggagaagggtcggggagatatttccgttaggacatcgctgaaacacagactgggatcaaactgtgctcatagtcctaaggatctccagcaccctgccggtggcactactgaaagacgaggtgccagggtggttcctgaaagtgcctgagccccaacttatcagcacggagctcatcatgctgacagaagtcatggaggtttggcatggcttagtgatcgcggcggggtccctcttcctgcaggcctgcttcctaaccgccatcaactacctgcttagcaggcacatggcccacaagagtgaacagatactgaaagcggccagtctccaggttcccaggcccagacctggccaccatca

SEQ ID NO: 34066 - DNA, 427 bp, Homo sapiens
gctccaccgcggtggcggccgaggtataaactatgcatattataactaccagctcattaggtcaagactaaatcaaaaattgtcaaggacttttctaaaaatttttttagcataaactgtttcctctaacttaaacttctcttaagtgaacctgtctttccactgggatgactgtctacatgctcaggaatcctgaattcatgactatgttcaactcccacgaccatttttaaatcatcaaaatggcagcaaatgtcattacctggaccaaaaagctgcaggttttgtggcaaatgggaaatgtgttatagaatatgactgggaaagagggatttcttagtgctgcccagaattaattcagcaaacactgaacattactacgtgccacatataggatcatactgcatttcgagcggccgcccgggca

SEQ ID NO: 34067 - DNA, 370 bp, Homo sapiens
taatggagagtgaatattttatttggtgatgtattcttcacttattaatgatgaggtcaatgaactgatgcaattattaaaaaaaaaaaaaaacagacaaccttataaaggaaaaaacaaaaacaaatacaaaaaaaaccaaacgtccattctaattctgaatctgttgactggagtgaattcagtggtcacaataccaccatcaaataagaatcaacttcctcagagtaaggagctgttccgatcttctcaatagttcacacaggtctctcagatataggcaccatgttttaagtctcacacaaaatgtctgggtcacttaaattacacaatatggcaatgtttgtcttatggggacatactgaaaggg

SEQ ID NO: 34068 - DNA, 490 bp, Homo sapiens
ctactatagggcgaattggagctccaccgcggtggcggccggccgggccggttccgaaaagaattaaggacctggataaacagttcgtaaagcctgatggtgagaatagagctcgcttccttccagggaaagatctgaccgaaaaagaaatgatccaaaaattagacaagctggaactacaactggccaagaaggaggagaagctgctggagaaggatttcatctatgagcaggtctccaggctcacagacaggctctgcagcaaaactcagggctgcaagcaggacacactgctcttagccaagaagatgaatggctatcaaagaaggatcaaaaatgcaactgagaaaatgatggctcttgttgctgagctgtccatgaaacaagccctaaccattgaactccaaaaggaagtcggggagaaagaagacttcatcttcacttgcaattccaggatagaaaaaggtctgccactcaataaggaaattga

SEQ ID NO: 34069 - DNA, 372 bp, Homo sapiens
ggagaaattatggcaccaggacttttcctgttctatcatgcgatgatttagattatgattcaaactacatttctcttttctaggctttgtcccataaaaatttgtgcagtttttcaacattagaattcttaattctattggaaacaaaacaaaacaaaacaaaacaaaaacaaaaccaaaccagacctcaagtcaacaaatctattgggatattgtttacgaacaaagtccaccttaagcattggtcctcaaaacagagctcctcaaaatattaggtgctgtgctcattacagaatcaaactgatcacactgattgaaaacttcctcaatgaaatttttaatcaacaacatgcttcaaataaaagtcaaaca

SEQ ID NO: 34070 - DNA, 470 bp, Homo sapiens
ctccaccgcggtggcggccgcccgggcaggtacgcgggcaaccatcaagcagctccattacccagcacttctacctgaatttcaccatcaccaacctaccatattcccaggacaaagcccagccaggcaccaccaattaccagaggaacaaaaggaatattgaggatgcgctcaaccaactcttccgaaacagcagcatcaagagttatttttctgactgtcaagtttcaacattcaggtctgtccccaacaggcaccacaccggggtggactccctgtgtaacttctcgccactggctcggagagtagacagagttgccatctatgaggaatttctgcggatgacccggaatggtacctcggccgctctagaactagtggatcccccgggctgcaggaattcgatatcaagcttatcgataccgtcgacctcgagggggggcccggtacccagcttttgttccctttag

SEQ ID NO: 34071 - DNA, 474 bp, Homo sapiens
gctccaccgcggtggcggccgcccgggcaggttcgtgtcacttttatgatctttattgttggtagccatgtgcatagctaaaaatggttttagtgagtgggtaactaatgagatagaaagggagaaaggatattgggaggaatcgtagtctttgctacaaggtaataccgtataattttttaaatgataaagttgtataagtaagggtcaaaagtcacttgtagctaactttcattagttccacctttaccttgcctagcacagttagcatggtcttggtatctagtgtaaatctgatcttatccaaacatgaatttgttactttttatattacttggttaactgttgatttcaagtctcttttcagacttgtctcccaagttcacatgaatagggccaggctttaagttctttttaatgcgttcattattaccaagcagtgctttttaacactagtgttcagtaagtttattg

SEQ ID NO: 34072 - DNA, 349 bp, Homo sapiens
  misc_feature 11, 12, 14, 19, 24, 27, 43, 51, 68, 78, 91, 92, 93, 96: n = A,T,C or G
cagggcgaacnncnaaccncaagnganccacccgcctcagccncccaaagnggaaggaacacaggcangagccaccgngcccactgagaannnaanacactttatgtaagttaattttttatgatagttatctagctttgccagaccaattttgttagtaaatttaaaacattaaaaaattttgaatcctcctaattctgtgtctctaatttagtaattttaagttttgatccttgtttcattctatcattcttttatttaaaaaaattgtcattggcttttctaaaagtgaatcgtgaatcatgattcatgtgaaataattaactctaaaacagcaaagatacctttt

SEQ ID NO: 34073 - DNA, 438 bp, Homo sapiens
gcggccgcccgggcaggttcggcacagaggttgactttgctgtttctccttctaccaagctggcccggatagaagaaccaaagagagtgctgctctacgttcgaaaggagtcagaagaagtctttgatgccctgatgctcaaaaccccatctttgaagggcttgatggaagctatctcagacaaatacgatgttccccatgacaagattgggaaaatattcaagaagtgtaaaaaggggatcctggtgaacatggacgacaacattgtgaagcattactccaatgaggacaccttccagctgcagattgaagaagccggggggtcttacaagctcaccctgacggagatctaaaggcctgcgggccacagctccccaggagttcagtgcaggtgtttctagatcttacggtttggcaactgcaggtaaccccagtcag

SEQ ID NO: 34074 - DNA, 419 bp, Homo sapiens
tactatagggcgaattggagctccaccgcggtggcggccgcccgggcaggtacattccactgcagtctggttgatggctttggccttgaggctaggtgcaggtgggcgaatccctctggtcataacatgctcaaatgccagagggctatcccccaagtcagtcttggcccaggcagaaatctcataggatgtatgagctgtcagattgccaactttgtgtgacaatatgcttcctcggaagttcaaagttctcctctcttgcttgtgggtgtcaaatgcccagaaaaggttcaccacatagccattcacctgccgagaaccaagaagcatgttagatgaacagctagtcatggggcacactaaatacaaaaggcaggattaaaaatacacctctttcctgttctttccttgggtatctc

SEQ ID NO: 34075 - DNA, 519 bp, Homo sapiens
tacgactcactatagggcgaattggagctccaccgcggtggcggccgcccgggcaggtactcagtttggtcttctttcaggtgtaggataacttttgttccacgacccataggttcacctgcaagagaagaaagaaaaattgacttaataatacattcaatttagtgcccaacgccatgcctaacacccttataacgtgtctataaagcaaggtttgccgttactacagatgcaaaggccaccacagcagaaccttttgggcaaggtgcctcgcccaaaagaaccgcccaccaagtcatgccattacactaattaagtgctctagcttgttcccgatcgttgggcaaacacaaattctgtaggcttcaccgcatccccaggggtccaagggttgcagcaccccacccttccaccgctcacttaaccagtgaatgttcaggtgcctacctgtgtctgtcctcactgtgaatgatccccctgctgaggactcccaagcgtacctcggccgctctagaacta

SEQ ID NO: 34076 - DNA, 403 bp, Homo sapiens
acgactaactatagggcgaattggagctccaccgcggtggcggccgcccggccaggtacgatcttggctcactgcaacctctccctcccgggttcaagtgattctcgtgcctcagcctcttgagtagctgggattacaggcgcgtgccactgcgttccggctaatttttgtatttttagtagagatggggtttcaccatgttggccaggctgatctcaaactctctgacctcatgtggtccacccaccttggcctcccaaagtgcttgggattacaggcgtggagccaccgcgctcagtcctacaagcaatttttttaaaaactgacaccttattactgataaaagttctcttgtttaaaaatcctatttactatttttaaagataagtattaagtttttttt

SEQ ID NO: 34077 - DNA, 113 bp, Homo sapiens
cactatagggcgaattggagctccaccgcggtggtcggtcgcccgggcaggtacgcgggggatgctgtggtggaaaagagcttatttagttatttggctaattaccttgaaaa

SEQ ID NO: 34078 - DNA, 383 bp, Homo sapiens
cgactactatagggcgaattggagctccaccgcggtggcggccgaggtactttttttttttttttttttttttttttttcttttttttttttttttttttttttttttttttttttttttttttttttttttttttttttttttttttttttttttttttttttttttttttttaaaaaagggaaaaaaaacccccttttttattttaaagagggccctttttttttattcccaaacaccctttgagggaactttttttcggggcgggtccttaccaccccttttagattggagaagggccccttttttccgggcgggggttttggggaaaaaaaccttggggggggggggttttttccggggggggggtttttttttggggg

SEQ ID NO: 34079 - DNA, 402 bp, Homo sapiens
acgactcactatagggcgaattggagctccaccgcggtggcggccgcccgggcaggtactttttttttttttttttttttttaaaaaagagagtatttcaaagtggaaataaataggttgaaactgttgagaggtctaattagatgagaactaaaacatcctttggatttggtaacagagttacaactgcatttttattgaaaatgaaaatgcttaattgagagtgtatataaacttctaggtaaagatggcaaattgaactcatgcatctaattttgcttgttcctgatgcctctcttatacgataaacagatttttttaatggagtctcgctctgtcacccaggctggagtgcaccatctcagctcactgcagcctccgcctcctgggttcaagtgatta

SEQ ID NO: 34080 - DNA, 416 bp, Homo sapiens
gtaatacgactcactatagggcgaattggagctccaccgcggtggcggacagttttccctcagtttttttccccttccttacccctacccccatcaaatacagcccaaccaaataactgtgttcttaatttaaaggaaaatggcagacttgatacctgctgaatatttcgtgtagacagagtatgacaatgaatgagatccccagtcattgcccttgtaagcctgggcaacaagagcaaaactcagtctcaaaaaacaaaacaaaaaacctgttggtatagtacctcggccgctctagaactagtggatcccccgggctgcaggaattcgatatcaagcttatcgataccgtcgacctcgagggggggcccggtacccagcttttgttccctttagtgagggttaattgcgcgctt

SEQ ID NO: 34081 - DNA, 405 bp, Homo sapiens
gtaataccactactataggtcgaattggagctccaccgcggtggcggccgaggtactaacagggtgtctggtcttagaagcctcccttcagatcccagctgaccctggtgactgcctggccttgatgttggctgcagccttctgatagaaccacatggattccacccacagctggccaggcttgttacatgggtcagggaatacaaatggccccccccagggagcaggtgttggcctcagttttcagggacccttggtgttgctccttacctagagcccattaatctaccccatcaactctctgccatgaaagccatcttccaggagccctgttttttggagctgaactgcacagattatagctgctattgtacctgcccgggcggccgctctagaactagtggt

SEQ ID NO: 34082 - DNA, 402 bp, Homo sapiens
tacgactactatagggcgaattggagctccaccgcggtggcgtgtcccttctcccctgattcttccctccgggtaggagggaagaatccgcctgagcagtggcctgccagcacttgagaggctccgcaagcacaagtgtgtttatgggagttgtgcacatgctcagttgaggcattcttcccttaccagtcgagtgtttctagaggaaggtcatagactaatagtctaatagtctatgacctttagtcatactagtgcacatgcctgagcccactcacctgtgaacccccaaaatttgagacaggtctcaattaatttagaaagtttattttgccaaggttgaagacatgcccagtgacatagcctcaagaagtcctgatgacatgtgcccaaggtggtccg

SEQ ID NO: 34083 - DNA, 408 bp, Homo sapiens
tacgactcactatagggcgaattggagctccaccgcggtggcggccgcccgggcagaactggaaaaggcctttgcagggacagagacggagaaggctcttcggtcgcgtttggaaagcaagctttcagagatgaagaagatgcacgagggggacttggcgatggctctggtcctggatgagaaagacagactgattgaggagttgaagctgtctttgaagagcaaagaagctttaattcagtgccttaaagaggagaaatctcagatggcatgtcctgatgagaatgtgtcatctggagagctccgaggactttgtgctgctccaagggaagaaaaggagagagaaactgaggctgcacaaatggagcatcagaaggagagaaacagctttcaagagaggatccaggc

SEQ ID NO: 34084 - DNA, 405 bp, Homo sapiens
gtaatacgactcactatagggcgaattggagctccaccgcggtggcggccgcccgggcaggtacttttttttttttttttttttttttttagggcttctttattttcttttaataatgttttatcattttcaacatatatattgtatgggtcttttgttaaatttatttctaagtagtttataaatttgcttctataaattatttttaaaaattaatgttttattttggggcttactctctccatgattttctgctaatcttcttgctgctctgccaatctcatattgtatcctctgacactttaagctagtaaggctgcagatttttgcccctggagcccattccagactggaaagttctctcaggcaaaaagtcacaaacttgcagatctcattcatcacagt

SEQ ID NO: 34085 - DNA, 228 bp, Homo sapiens
  misc_feature 112: n = A,T,C or G
tcacaggagcgccctatttctttcaattaactacaaggacaaacacatctaaaaggtgagataagagaccagtatgatttgccaaaaatctattttgcactgattttgaaanggataaaggttacctttggggatttgcactgcatgaattctgggaaaagcttgtcggatattgtgatagagatagagaaatgacgtctattatataagacactatgaggctccctg

SEQ ID NO: 34086 - DNA, 447 bp, Homo sapiens
agggcgaattggagctccaccgcggtggcggccgaggtactttttttttttttttttttttttggacatgtgaagtgtgagatgctcgtgggatatccagcaaaggtgaaaggtaggtggttggacaggagtctggagctcagggagccatcagcatggtgacccatgtggacaagcttaactcggtgatttcactgaaagtcccgggactgggcggcgtgattgcccagggcatgggctctcagtggtatcatactgccccctaggggctaccagaaactgcagtctatttttggtggtcagtaatacggggctactggcattggaaggaagggtatcagggaggggactctagatgtcctgcagtctccttcgtaatggagagttactctaaatcctggactttcaaaagccctgaataacattcatgtagataagaaaaatcta

SEQ ID NO: 34087 - DNA, 409 bp, Homo sapiens
gcgtaatacgactcactatagggcgaattggagctccaccgcggtggcggccgaggtaccaaaacagaaagagggtttaaaaaacagctgcacaaaccagaacaccgattcagaatcttttctccctcttgagtttttgtaaaatactttattattgatttttgctttttttctccctttccctcccaggagaagacatttgggtcttggcctgaggcaggggtgttgagcgatgatgctctgatatggagctgtcactctagagctcggccagatggaagacactatagaaccaggttggacagatttggggtcagggttggaggctgagttcttttgaggactggttggagtggcagccagatggtggctgctgacaaggcaagaggaatttcagagattaaacatt

SEQ ID NO: 34088 - DNA, 402 bp, Homo sapiens
agggcgaattggagctccaccgcggtggcggccgaggtacactcgccagcggttttgccacaagagtatacggaacaaaggagacaggctcatttataatctgacgcggccaccctcctgctgcgttcggtttccattggctgggacgggacctcaccttctgtatttgtcccgactggctagcacttagaactttttaaaagaggcaaaggcataggagaacaaaggaaggaggaagtaacttgtggaatattgagaaaggtaaaaacacctttaaataaggaagaggaacaggctatgacctaatgcttgtttggatcagtataagcatgttagggcaaatatttaggctaaattggggagctaagaacataaagtaattgattttttattatggctagc

SEQ ID NO: 34089 - DNA, 313 bp, Homo sapiens
tatagggcgaattggagctccaccgcggtggcggccgcccgggcaggtacatggtttgctttgaaggccaaaaggaactggtttctaattcttattcctctcctgactagttttgtgacctagggaaattttgcaatcttcttgagtttcgtttctcatcaggaacaggatgctacctaagtcacaggatagttgctagatttaaatatgatcgcatggcagtggacatgagccataattagtggctaagaatatattgacactgagctctcctttatccatgttaaaattgtagataaacaacatttgacaa

SEQ ID NO: 34090 - DNA, 405 bp, Homo sapiens
gtatacgactcactatagggcgaattggagctccaccgcggtggcggccgaggtacgttcctggagacatgggtgtgtctgtagactaatccttattctccaattattgagtataatatctcttgtttaacatgaggaaagggtcaaatttgaggaaaaatggcctcttgtttgatgtgttttagttcattattctcttctattaagagaaattcactgttaaaaaattgtttcccatttccgtatctgaaataatgactgtagttgaggtgatcttgccctgggtctgaaatcatacttccaaaccaaaaaggactttgaatacaaaacttttaagaaatcttgtatgaatacaagctatatctgaaaaattgtgttttataatattgatgcccagttttgccc

SEQ ID NO: 34091 - DNA, 412 bp, Homo sapiens
gcgtaatacgactcactatagggcgaattggagctccaccgcggtggcggccgaggtacttttttttttttttttttttttttggatttttagtagagacgggatttcactgtattagccaggatggtctcaatctcctgacctcatgatccacctgccttggcctcccaaagtgctgggattacaggcatgagccactgcgcccagccgagtcattttttaatactactgcatgtgagttaacacaatcattcccaaattgaagttttagatgggccctcaaaatttttaggatatggttttcctacaggtttatattgaaagtatggggtatctcctattactcctctttttatttgtcttaaaggagaaagggagaggccagagaccaaatgtccccatttccctatag

SEQ ID NO: 34092 - DNA, 397 bp, Homo sapiens
gactcactatagggcgaattggagctccaccgcggtggcggccgcccgggcaggtacgcgggaacaaaatgaaaggaaaaagcctcctgtagccacagaaggagaaagtgcattgaattttaatttatttgaaaaatctgcagctgctactgaagaagagaaagataaaaagaaagaccctcatgatgtaagaaattttgactatactgctcgaagttggactggaaaatctcccaaacaatttctgattgattgggtcaggaagaatcttcccaagagtccaaatccttcctttgaaaaagttccagtaggtagatactggaaatgtagggttagggtaatcaagtctgaagatgatgtcctggtagtatgccctacaatcttaacagaagatggc

SEQ ID NO: 34093 - DNA, 375 bp, Homo sapiens
  misc_feature 9, 36, 37, 38, 51: n = A,T,C or G
caccgcggnggcggccgcccgggcaggactcctttnnngtttttttattcnttcttcccttttttttttttaaaaacactactatattttattaaaacaaaaacaagagcccgtagagagcatattatgattacagtccttcactcattcactactgcacattaaatgccagcagtgtttggaatttttttgcccagtaggagggctgacactgaacaccacctctgggatgatgttcatcatcctcatatgcttctccattgtagtggcgccgtctttcccgatttggatcaaagtccaccagttccacttggtccatctcatcagtctcttccacttccttcctctcgggtaggagtttttccagcaaagaca

SEQ ID NO: 34094 - DNA, 408 bp, Homo sapiens
gcgtaatacgactcactatagggcgaattggagctccaccgcggtggcggccgcccgggcaggtacagaactgaaattcaaatatcgaggatagcaagaaaagctggcaacttctatgtatctgcagaacccaaattggcgtttgtcatcaggatcggaggttatcaattgggtgagcccaaaggtctgaaaggtgttgcaacttctttgcctcatcaaatcttcaatagaaactttgtgaagctcagcagggcttcaataatgtgctgaggtttgtagaaccatatattgcatgggcatacccaaatctgaagtcagtaaataaactaatctacaaatgtggttatagcaaaatgaataagaagctacttgctccaacagataatactttgattgctcgatctcttg

SEQ ID NO: 34095 - DNA, 418 bp, Homo sapiens
agcgcgcgtatacgactactatagggcgaattggagctccaccgcggtggcggccgaggtacaatctagttattcttacaagcagtcaaattctaaaaagggaataaacgaattttcagggtatcaagccaagtttaccaagtgggcttattatatgtatttataattcttcctagtatagccaataataaaatgaaaataagtgaagagaaataaaaatgaagggttaatttcagggtagcaatgtaatagttttttatgcagtttataagcaaatgacataggcatcaccatgaagctgacttgataaaatgaagaccacttatagaagacagtgattttcaaacccactcctcagatccaaacaactaaggctctagccaccactaactttaaacagagcagttccacttgttaa

SEQ ID NO: 34096 - DNA, 404 bp, Homo sapiens
tacgactcactatagggcgaattggagctccaccgcggtggcggccgaggtacctcatcaatatgtgcatttattatttgccaattaaaataatataaaactctttaaaaattaaaaaccatatatttccctagtatttctgggatgatttttttttctcaatgacttttgagaatgcttttgctttgttctcaaacctttgataatctccatcattactggttgggtatcccttatctgaaatgcatgggaccagaagtgtttcagatctcagattatttcatatttgaaaatatttccatacagataatgaaatatcttaataatggaaaccaagtataaacaggaattcatttatgtttcatacacaccttatgcatgtagcctgaaggtaattttattat

SEQ ID NO: 34097 - DNA, 474 bp, Homo sapiens
gtatacgactactatagggcgaattggagctccaccgcggtggcggccgcccgggcaggtacaacttaaatacgtccatatatgaccaggttcttcttatgccaagagtgaactctgtgctgaatcagttaatgttctactaaataaaggaaattcacattcgctttcttgttaggttcatgcaaatattgaaaactcttggaatgaggaagaagtttggagaattgaaatgtatatctcctttggcataatgagccttggcttactttccctcctggcagtcacttctatcccttcagtgagcaatgctttaaactggagagaattcagttttattcaggtatgtggggttttgtttggtgaaggattgtgcaggataggatttccttgttaagaacaactgcattttaaatatgttccttattaaaagggtgcctttgaggctgtatttatgcatctagatacattatgctg

SEQ ID NO: 34098 - DNA, 409 bp, Homo sapiens
gtaatacgactcactatagggcgaattggagctccaccgcggtggcggccgaggtacgcggggtaaccacctgggaaaacttcacagaaaatgagagtttcagatactgagaatagaaccactaagaagcagaaaagagaagatattctcgtgggggagaacaacggctgggaggggaggaagcatggccaaggcaaagaggtgggcattaataagaactgcttcttgctgccgccatatgaagaaggacgtgttcgcttccccttcctccatgattgtaagtttcctgagacctcgccagccatgctgaactgaatacaacatgtttaagaccacagaacatctgcataggctgtaaatttcgttgaatgatggatgcaaagatggaagacagatggatagaggaaaa

SEQ ID NO: 34099 - DNA, 188 bp, Homo sapiens
  misc_feature 37, 48, 143, 159: n = A,T,C or G
cactatagggcgaattggagctccaccgcggtggcgngccgcccgggncaaggtacttcatacaacttaagcctaaactagattagattatgtagaaacttattcttagagaatatatcgccttaatatttcttatcctgaanagagtatttcttaagntgcccctctcaaagtatatcgattaatat

SEQ ID NO: 34100 - DNA, 407 bp, Homo sapiens
agcgcgcgtaatacgactcactatagggcgaattggagctccaccgcggtggcggccgaggtacattttacccacactaaagaataggcctgagatgctaataaagcctctaagctattttgagggcagctcaaaatcagtgatatggtttggatctgtgtccccacccaagtctcatgttctgtattcatccccagtggtggaggttgggcctggtgggaggggatagaatcatggtggtgattcctcatggtttcacatcactctccttgatgctgtcattggattagtgagttctcctgagatctggtctttaaaagtatgtgacacatcccccactctcttccttctgctctggccacgtgaaatgctagctctccttttgccttcctccatgacagaaagtt

SEQ ID NO: 34101 - DNA, 404 bp, Homo sapiens
gtaatacgactcactatagggcgaattggagctccaccgcggtggcggccgcccgggcaggtacttttttttttttttttttttccttttttctgtgaatagcttaactcaggcctgggacagttgatcttgaaagaagagatggagaaagagagccgggaaaggtcatctctgttagccagtcgctacgattctcccatcaactcagcttcacatattccatcatctaaaactgcatctctccctggctatggaagaaatgggcttcaccgggtaagatttctccccgattcattgtttctgcctttactcccacctcggccgctctagaactagtggatcccccgggctgcaggaattcgatatcaagcttatcgataccgtcgacctcgagggggggcccg

SEQ ID NO: 34102 - DNA, 405 bp, Homo sapiens
gcgtatacgactcactatagggcgaattggagctccaccgcggtggcggccgagatacgcgggaggaggaaaaagtgaagcggcaggaacgactcaaggaggaccagcagacagtcctaaagccccagttttatgagatcaaagcaggaggagaatttagaagcttcaaagattctgccacaaagcagaaactgatgaacaaaacccttgaagatcgtttgaaaattgaagcaaaaaatgggacattgagtgtatccgacaccaccgccggcagcaaacaattgacattcacgttaaagaggtctgaacagcagaagaagcaacaggaggctgagaaactgcatcgacaagaaaggaaaagactccgtcgttcggccgctctagaactagtggatcccccgggct

SEQ ID NO: 34103 - DNA, 403 bp, Homo sapiens
gtatacgactcactatagggcgaattggagctccaccgcggtggcggccgaggtacccagaaaataagaaagggttccaaaatgaagaatcgctccttttgcaaaccttatggtgacaaatataatatttataaaaagtgaattaggtaatatgttaatggagaaataaacatcattatgaaatgctatcttaaacaaaaaataagagaaaatattagtttaaaaatagaacttatagtcgatttaaaaaacaagaccaaactcttagctatgcacaagaaagttactttacacattcacaaatataaaaggatgagaaaacatggattatgaaaatatgaaccgaaataaagctatagtagctgtgcaaatttcagacaaaatagacatcagaaaagacttt

SEQ ID NO: 34104 - DNA, 458 bp, Homo sapiens
actactatagggcgaattgggccctctagatgcatgctcgagcggccgccagtgtgatggatatctgcagaattcgccctttcgagcggccgcccgggcaggtacactggaggctggagcctgcagatggcatggctctgcggctcaccttgctgcagttggtggtggtgacagagactgcagcttgactgtagtgtccatgttctccagagaagcagaacgagttggatgtatgttttggaagagattatgaggaaccggctcatgtgatgaaggaggttgagaggtcctgtgctctgccatctgcaagctgaagacctggaaagctgagggtgtggctccagtctgagtctgaaggcccaagaaccaggggaaccaacggtgtagattccaggttgaaggcaggagaagatggatgtcccagctcagcaggcaggcaggaagcaaatgaggtaaat

SEQ ID NO: 34105 - DNA, 395 bp, Homo sapiens
cgtaatacgactcactatagggcgaattggagctccaccgcggtggcggccgcccgggcaggtacaggtttgaggaagcggtgaaggaggctcatgctgtagatcaaaagcttgcagagaagcaggaagatgaagccaccctggaaaataaatggcccttccttggggttcctttgacagtcaaggaagctttccagctacaaggaatgcccaattcttctggactcatgaaccgtcgtgatgccattgccaaaacagatgccactgtggtggcattactgaagggagctggtgccattcctcttggcataaccaactgtagtgagttgtgtatgtggtatgaatccagtaacaagatctatggccgatcaaacaacccatatgatttacagcat

SEQ ID NO: 34106 - DNA, 386 bp, Homo sapiens
atacgactcactatagggcgaattggagctccacgcggtggcggccgcccgggcaggtacatagactccattgatctggagaagatcactgaaaccgaggaccctgtgaaatttcatgaagcttggcagaagctatgcaaagctgatggtatccttgtgcctggaggctttggaatcagaggaacattgggaaaactccaggcgatttcttgggcaaggacaaagaagattccttttcagggagcttgtcttgggatgcaactagcagtgatagagtttgcaagaaactgccttaacttgaaagatgctgattccacagagtttaggccaaatgccccagttcctctggtgattgatatgcccgagcacaaccctggcaatttggg

SEQ ID NO: 34107 - DNA, 395 bp, Homo sapiens
gtaatacgactcactataggttcgaattggagctccaccgcggtggcggccgaggtactacaccactttttcctcaccaacccccatcctattcttgagttgcaggatacacttgctctctggaagtgtgtccttacccttctgcagagtgaggagcaagctgttagagatgcagccacggaaaccgtgacaactgccatgtcacaagaaaatacctgccagtcaacagagtttgccttctgccaggtggatgcctccatcgctctggccctggccctggccgtcctgtgtgatctgctccagcagtgggaccagttggcccctggactgcccatcctgctgggatggctgttgggagagagtgatgacctcgtggcctgtgtggagagcatgca

SEQ ID NO: 34108 - DNA, 380 bp, Homo sapiens
atacgactcctatagggcgaattggagctccaccgcggtggcggccgcccgggcaggtacttttctctgaaaggaatcttgtcttgttaaaccctaaagagagtgtccttaatagcaatcagcacttgtaagcttatatactggtgcatttggttttctgttgggtgaatgcggtgtgtgggcgtttgtggattctgaaagagaaagccgtgtgtcgtgtgccatgacatttctattgcacattctttgtactcagaggaatttttttgttttgttttgtcttttaagaaaggaaagaaaggatgaaaaaaataaacagaaaactcagctcaggcacaattgtcaccaaggagttaaaagcttcttcttcaatagaggaa

SEQ ID NO: 34109 - DNA, 375 bp, Homo sapiens
atacgactactatagggcgaattggagctccaccgcggtggcggccgcccgggcaggtacctcatgatatggtttggcttcgtgtcctcacccaaatctcatcttgtagctcccataattcccacatgttgtaggagggacccagtgggagatgactgagtcatgggagtggatatttcccatgcttttctcatgatagtgaatgggtctcacaagatctgatggttttaaaagtgggagtctccctgcacaagctctccttttgcctgctgccacccacgtaagacatgacttgctcttccttgccttctgccatgactatgaggcctccccagccatgtagaactgtaagtccaattatacctctttcttttg

SEQ ID NO: 34110 - DNA, 366 bp, Homo sapiens
gtatacgactactatagggcgaattggagctccaccgcggtggcggccgcccgggcaggtacatattttttaaaactggttagcgatagctacatgacccaattatattttctatatttatttgattatcagccagtaaactcataatgaagcagctgcgcactcccccaacaattgagaattgaacaaatttccagagagaagtgaaaaatatcaaaaattaaaatcctaaacttgaagacaagttgagagaccatttagtctggccacctgtatccaagattcatttaaaaccaagcagcggccaggcacgatggctcacgcctgtaatcccagcactttgggaggccgaggcgggcggatcac

SEQ ID NO: 34111 - DNA, 385 bp, Homo sapiens
tacgactcactatagggcgaattggagctccaccgcggtggcggccgcccgggcaggtacgcgggattccagggcaaaacacattgtcctaatgaagttgttgcagctctcttcgttttcttgtgccgctggaattggcttgtgggtcacttgttgtgcaaaagtgaattaatttcaaataggaatcatattgcttttgtgaaacaaagaaaatttaccaccttgtctgatacatagattggaaggcgctcttggtaaagaataacccacaaacacctgatcttgattggaaagcattgtaggtcattagggaaaactgatgatgctgactgttgctccagctgtgttggcaattcaagatgaccttgttactaactgaaagtta

SEQ ID NO: 34112 - DNA, 378 bp, Homo sapiens
gtatacgactactatagggcgaattggagctccaccgcggtggcggccgcccgggcaggtacagcaatgacttcagtaagccaggcatccttggatgtctccatgataataattatttccttaggagcaatttgtgcagtgttgctggttattatggtgctatttgcaactaggtgtaaccgcgagaagaaagacactagatcctataactgcagggtggccgaatcaacttaccagcaccacccaaaaaggccatcccggcagattcacaaaggggacatcacattggtgcctaccataaatggcactctgcccatcagatcttatcacagatcgtctccatcttcatctcctaccttagaaagagggcagatgggc

SEQ ID NO: 34113 - DNA, 383 bp, Homo sapiens
acgactcactatagggcgaattggagctccaccgcggtggcggccgaggtacatatatccaccatttctggtgctcttcatttcatcctgtggattcaggttaccatctggtgtcatttattttctgtgtgaaggatttagtatttcttgtaaggcagacgtccataggcaacaaattgtcttagtatttgtctgggaatgtctttaatttcactttttttccaactttcaacaaaagcttcatatcctggtgatgtctttgttataaggaaaaaaaaatccctaaatccagccttcaaattgaagtaactatctttaatgtgagagcaatcctattcacaaagcccctccccagagtcaatcaagggtttggggaccacatc

SEQ ID NO: 34114 - DNA, 397 bp, Homo sapiens
atacgactactatagggcgaattggagctccaccgcggtggcggccgaggtgtgatgtttgccccacacaggggtcatttggcaatgtctggagacatttttattgttatagctgaacaggaaagtgctactggcatctgggaggaggctgctaaacatctcacaatgtgttaccccgtcccaaatgtcagtcgtgttgaggctgagaaacatggtttaaatgagtcagaggctggccacagtggcacgtgcctgtagtcccagctactcaggaggctgcggtgggaggattgccttaacccaggagttcaagactagactgggtgatatagcaagacctctgtctcaaataaagaagtaaaaaataaatgaatcagagactagtaaatctacctcc

SEQ ID NO: 34115 - DNA, 368 bp, Homo sapiens
  misc_feature 105, 123: n = A,T,C or G
tacgactactatagggcgaattggagctccaccgcggtggcggccgaggtacgcggggcccttgctcactagaaggagccccctgaccccttcttccaaaaatanctttttgtctttgtcttncgtttctgcattcatcccccttcgttcactcccataacaaccaacagcgacaactggcacctaggacagggacgtgagtgaaggtctgctggagcagagaaactgacactgacaagaagaacgagaatgagaaaccctgcgacgagtctgctgacagctgatataagtctgcaaaatcagctggaccaccaaacggcaattgagagctgcacaacctgcaattacctttattcaattaatgcaaa

SEQ ID NO: 34116 - DNA, 398 bp, Homo sapiens
gcgtatacgactcactatagggcgaattggagctccaccgcggtggcggccgaggtactgtccaaagaaagtctgggaagaaactcacaaactctgtggaatcttctactccatcaggccttggggaggactttgccttaattagttctgtgagctccgtcacataatgcagctgctccagggcctggtggttgatggtgctcatgctgttgtagacaaaggtgctgcacaggagcacagccagggcaaagatccaggagtcattcttagggtcaccctgctctatagcaccgcaggtccaagaacagttttcagttgcctcactcacctcttgttttctttcctctccccgcgtcctgcccgggcggccgctctagaactagtggatcccccgggct

SEQ ID NO: 34117 - DNA, 373 bp, Homo sapiens
gtaatacgactactatagggcgaattggagctccaccgcggtggcggccgcccgggcaggtacatttcttgttaaccacgttattaaaacttgatcagcatgtaagctttcttctgttagatcttttggcagcaaacaaccttccccccaagcctctgaattttggaggagggtaggcttgatgaattgtttagaaattttgtgtttggtggtggcaggaggggagggatcatgcggccttctggtcacaagcaagcctgcagaagatccagtggcctttccagttgacttatacagcctgtgtccctggtgtcactgactggcacctatagcaatacttggtgttatttaacttcttgtcacatacaacttt

SEQ ID NO: 34118 - DNA, 327 bp, Homo sapiens
gcgtatacgactcactatagggcgaattggagctccaccgcggtggcggccgcccgggcaggtacttttttttttttttttttttttttttctttttgcacatttttacaaatttaattaaagctatgtccagtcttaaaaagacaaaccattatcactccttgctgcggcaccctttcttgggccaggtttgtaacttcaaacatcaaaagggtagggcatcaattttaactaaaaaatgaggagggcctaatatataatctgggcatcaaatttctttttttaaatatatccagattcacatatttttactcttataaaataatg

SEQ ID NO: 34119 - DNA, 616 bp, Homo sapiens
  misc_feature 491, 608, 609, 610: n = A,T,C or G
cgcggtggcggccgcccgggcaggtactttttttttttttttttctttttttttttttttttttttttttttttttttttttttttttttttttttctttttttttctcatttttttccctttaaattattttgtttttcccaaaggaaaaaaaaaaaaaaaaaccaaaaaccccccccctttccccccaaaaaaaaagggggggcccccccaaaaaaacaaaaataagccccccccccccctttttttttctttaaaaaaaaaaaaagggggagcccccccccacccccccaaaccaaaacaaccccaccgggggcccgtacaccaacagaaggggggggaaccccccccaaaccaaaaaaaggacccccccccccccaaaaaaaacccccccccccgttttgtatgaccccccccccccccaaaaaaaaaccccccccccccccgaaaaaaaaggaaccccccccggggaaaaaaaaaaaaaaaaaaanaaccccccccccccccccctgggggggccccccccccccccaaaaatccctccccttggggaggaaaaaaaagcgccgggccaaaaaaaaaaaaaacaaaccccggggggaaaaaannncccccc

SEQ ID NO: 34120 - DNA, 462 bp, Homo sapiens
tatacgactcactatagggcgaattggagctccccgcggtggcggccgaggtacttttttttttttttttttttgggctttttttcttttttctttctttttttttttttttttttttttttttttttttttttttttttttttttttttttttttttttttttttttttttttttaaaaaaccccgggaacccggggcggtaaaaaaaaaggggaccccccggggggggggggggggaaaaaaagcttaatgaaccccgccacccggggggggggccccgcccccaatttttggtcccttaaagggggggaaaagggcccccgggggaaaaaaagggaaaaaggggtcccgggggaaaaagggtatcccgtaaaaaatcccaaaaaaaaaaggggggggggaaaaaaggggaaagcccggggggcccaagggggggcccaacccaaaataagggggggggg

SEQ ID NO: 34121 - DNA, 405 bp, Homo sapiens
tacgactcactatagggcgaattggagctccaccgcggtggcggccgcccgggcaggtaccaagcctcaaaatacttgaactagaagccatctcttaaagttaaaagtaagaagctccaggaaaaataaagattgcatagtaaaaagggatagatggcaggattaattcaactcaacaaatatttatcaaatgtctactctggtcaggtgctgtgttagcagccagcttccctaaagggaggaaaggctagacacgaggacattgaggattgtttatttaaagtcactcataggcatgccataatggatttattaaggggaaattggggtttctgtgaatctttacaggacatagccatggagacaatcactatgttaagtaagttgctgttttcccaattgggc

SEQ ID NO: 34122 - DNA, 206 bp, Homo sapiens
agggcgaattggagctccaccgcggtggcggccgaggtacaggtaagccctggctgcctccacccactcccagggagaccaaaagccttcatacatctcaagttgggggacaaaaaagggggaagggggggcacgaaggctcatcattcaaaataaaaccaaattaaaaaaggttttaagggcggaaaattaaaaaaaaaaatttt

SEQ ID NO: 34123 - DNA, 621 bp, Homo sapiens
gtaatacgactactatagggcgaattggagctccaccgcggtggcggccgcccgggcaggtactttttttttttttttttttttgtctttgagacagtctcactctgtcgcccaggctggagtgcagtggcaccatctcatctcactgcaacctctgcctcccgggttcaagtgattctcatgcctcagccttccgagtagctgggactacaggcatgcaccaccacacccactaattttttgtatttttagtagagacggtgttttgtcttgttgcccaggctggtctcaaactcctgagctcaagtgatcctcctgcctcggcctcccaaagtgctgggattacaggcttctgaaccaccatgcccagcctagaaggtgggttttctttctttcacctgaggtcctcccagcctgtctttgctatagactcaggtatcagatcagctagcccctgtgagtattaacaaaataagactgccaatcttattcgagttcataggctctgagtgaaatgtatatgggcttcaaggtgacacgtccagggccttaaagacctttctttcactgccaggatgttttctggaaaagctaaggggagtctatcctaaaaaaaaaaag

SEQ ID NO: 34124 - DNA, 659 bp, Homo sapiens
gcgcgtatacgactactatagggcgaattggagctccaccgcggtggcggccgcccgggcaggtacatggcgaagctagagactgtaacctgaagattgggacaaattaaagaaaaaaatgtgatttaacacaattacaaaaactgttacgttagggtcaaacaagaaccattttatgaaactgaattacaacaaatgacattatatctaactcttccgggtctccacagcacttatacttacttaagcagcttaaacacttccgagtctccacagcactctgatacttacttaaacagctcttttaacctgccctagtattcttaagtgcagcatatctaattttttttttcctcagtagtttgaacacttgctggctattttttctgtccaagttctcagtaacttcggcctgtgtagtcagtggttctacacagccgacactacttcttacataacacttggtctctctggcttctggaaagggcgaggggttaccttccggagtccagtgctctttcggcacttctgcaaccaggcagtggtaaaaggggtgctctccaaaaccatcttctagcagatctttttcagttaagattacttgttcttccatgtattcatatttagccagctccttgatcagccgcagtatgtcactg

SEQ ID NO: 34125 - DNA, 638 bp, Homo sapiens
tacgactactatagggcgaattggagctccaccgcggtggcggccgcccgggcaggtacgcgggaatgtggttaaaactagaaatgaactaagccttgactttgactagcaaggctcctttgcaggagctggtcttaggtatgcgcggtaaggagagtgtgatggagatttcaccttcgagcctctttcaatggctttgttttcctctctcattccttcctactgtgacattctacagttaaggttatggaagaaaagcgaagttgaaaagacttttgtcagtattttgggaaagctgaaaccccctatttagtgccaagataaacaagacagaggagctagattgcaacattctctcacttgcagtagcagagaatcctgcaagtgaatctcagttcaaaatgtgaaaaaaaaaaaaaaaaaagtacctcggccgctctagaactagtggatcccccgggctgcaggaattcgatatcaagcttatcgataccgtcgacctcgagggggggcccggtacccagcttttgttccctttagtgagggttaattgcgcgcttggcgtaatcatggtcatagctgtttcctgggtgaaattgttatccgctcacaattccacacaacatacgagccgggag

SEQ ID NO: 34126 - DNA, 392 bp, Homo sapiens
atacgactactatagggcgaattggagctccaccgcggtggcggccgcccgggcaggtacaactttgtgttagagatgccaaaaaatatactttccaggacttcaagttgaattacttcaaatgttgttctacagtgattgtgcaatggaatgaattgggtccttgcaaaattcatatattgaagccctaaccccaaatgtaattgtttttgctgtaaggaagtaattcatattaaatgagctgagaaggtggggtcctgatctgataggattcttgtccttataagaagagccaccagagaggggccacctgcaagccaggaggagaaccctcacgagaagcagaaccctgccagaccttgatctgaaacttccagtttccagaactgtga

SEQ ID NO: 34127 - DNA, 409 bp, Homo sapiens
tacgactcactatagggcgaattggagctccaccgcggtggcggccgcccgggcaggtactgtgtctcatctatatgcactctctgatgggcaaggaggtatgaattacgactgaagcccttaccacatgccttacacttatagggcctctctcttgtgtggactctgaggtgaacattaagatctgaattccggctgaagcctttaccacactcatcacatttatatggtttctctctgatgtgatctctttgatgtaagtgaaaatatgaactgtaactgaagcactttccacacacttcacatttatatggtttttctccagtgtgaactctctgatgagtgtgaagaacagagctatacgcaaaatcctttccacacacattgcatttgtatggtttctcccctg

SEQ ID NO: 34128 - DNA, 404 bp, Homo sapiens
acgactactatagggcgaattggagctccaccgcggtggcggccgaggtacgcggggcagaagagatggttgtcaagatcttgttcctatttctgtatatgtgggagaattagaatcactcctcttatgctcgagcggccgcccgggcaggtacttttttgttctcttcttttttctttttttaatagcatcccgctcttatttcagaataaaaaaaattttaaggtatgttgagtacgaatctatagagcaatgaaaatgcaagagcaatagctatgggcaccaaatggtcaatcttcttatcataatgttgagtggaagaagccaggtccaccagacacatgctgctcatttatgcaaagtttggacacaggcaaaacaaaactagtttgatcgtgatggga

SEQ ID NO: 34129 - DNA, 413 bp, Homo sapiens
gcgtaatacgactcactatagggcgaattggagctccaccgcggtggcggccgccgggcaggtacaactctccagggcacaatacgtttacagctgcctttccttcacatacttttctaattcagaactactcacaattctaagcaaattcccattcacgaagtctgcccataatgcgaccttctctttttttaacatatacatcttaaaaaacaaatatataaaaaattcttattttgctggaatgctttcaatttttcacattttacatgatcatcacatttatttcttatattgaaaggcatggtttctgttgacatgtcgtgcaaagccaaaaaaaaaaaaaaaaaaaaaagggctggattgcttttcaattggtctaacacttttccttgtctaggctttggatttta

SEQ ID NO: 34130 - DNA, 409 bp, Homo sapiens
gcgtaatacgactactatagggcgaattggagctccacgcggtggcggccgaggtacagaggccggtgggctccctgacatcccttccaggcaacctgaaagcactgaaatagcttatggccctgtgccagggaccttggcccaagctgctgacctccagggtggggagggagctacccccaggagaagagtcactcagacagcagtatgagcaagccagccagcagctccgtgcctgcacccagctcaggggaatcccagggggttcagatgcccaggaaggaaaaggggacagcgctactgctatggaatgagaccaccacttctcctgttgtccttcccagcttctccccaacctccccttttccctagtttataagacaggagaaaagggagaaagcaaaaagct

SEQ ID NO: 34131 - DNA, 398 bp, Homo sapiens
  misc_feature 228: n = A,T,C or G
atagggcgattggagctccccgcggtggcggccgcccgggcaggtactttttttttttttttttttttttttttctttttttttttttttttttttttttttttttttttttttttttttttatttaaaaaacaaaaatttaatttttcttttaaaaaaaaaaaaaaacacacacaaacacacatatcaaaaaaaatgaaaaacaaacttgccttccgaaaagcccgnaaaggcccaaaataaactaaaaaaaaaatactgaaaaaatctttactgcaaaaaaaagaaaaaaaagggaaacactgtttgccttaaataactggggaagattaaaaaaaacactggaaattttgccagcaaactttccaaaaaaaacaaaaaaatcccgaaaaaaaaaa

SEQ ID NO: 34132 - DNA, 409 bp, Homo sapiens
gtaatacgactactatagggcgaattggagctccaccgcggtggcggccgaggtactttttttttttttttttttttttggaattataatttttatggcattttataaatttaccaattttttcttctggggtttttctttttttcttttttttttgtagacacagagtctctctatattgcccaggctggtcaggaactccatggctcaagtaatcgtcccacctaggcctccaaagtgactgagtatttttggtcatacttaggcctgttaaaccaaaactatacaaatttttcctgcattttctttaagaactttcatatattcatatttagtatttgactcatttggagtttaattttctcagaaataaggtagaaacccaacctgggtgttttctcagttttcc

SEQ ID NO: 34133 - DNA, 436 bp, Homo sapiens
cactatagggcgaattggagctccaccgcggtggcggccgccatcttgggtcatcgatgagcctcgccctgtgcctggtcccgcttgtgagggaaggacattagaaaatgaattgatgtgttccttaaaggatgggcaggaaaacagatcctgttgtggatatttatttgaacgggattacagatttgaaatgaagtcacaaagtgggcattaccaatgagaggaaaacagacgagaaaatcttgatggcttcacaagacatgcaacaaacaaaatggaatactgtgatgacttgaggcagccaagctggggaggagataaccacggggcagagggtcaggattctggccctgctgcctaaactgtgcgttcataaccaaatcatttcatatttctaaccctcaaaacaaagctgttgtaatatctgatctctacg

SEQ ID NO: 34134 - DNA, 459 bp, Homo sapiens
ctatagggcgaattggagctccaccgcggtggcggccgcccgggcaggtacttttttttttttttttttttttttttttttccaagaaaacgtttttatggaaaacactactatgccagaaggcaccatctttgaaaacacaaactacaatcattttcctgaggcagattcccactaggactgctttcaacttaaagccaactgttaaacaaactgagacaaaatgggaatacaacaacgggggcactgacctgtcccccgagcccaaaagcttaagttacccattgctctcatccccaggggatcagtttgaaattccgttaacccatcaactacagttccgtattccccaacaacgatgggagaagcttcatttctcatgttatctggaccttgaagacggactgccccgagacctatgtgcaagtgacctgggccaagctcatttccaggacaggc

SEQ ID NO: 34135 - DNA, 524 bp, Homo sapiens
actactatagggcgaattggagctccaccgcggtggcggccgcccgggcaggtaccatgagaaattgtagactttactcctatattctctttccaagccctaggattagccatttttccaagaaatgttgcataccattctgctatgaaaggaaccaaaactcaaatcttgattctgggtgtattttttgttaatttgctgtcttttcttgtagaacctctcaggtaatgactctaggaggtatgtgttgtgtattaacccatatatacacacacatataaactttttatttaatttttatacctatattatgctaaacttggaaatatattgacacatctgccctaagttaataccacatgaatgtttattacctaccttctattcctgcccctaacctcgcactccaaccgtgaggaaccccctcctgccacaccctgtctattccctttgtagtccagtttcaggattttctgtagactggaaccagattgtgtatgttttgctcttttgtggaacatcat

SEQ ID NO: 34136 - DNA, 443 bp, Homo sapiens
ctactatagggcgaattggagctccaccgcggtggcggccgcccgggcaggtacttggagtttccttgtagtagtaagcatagagtttgatgataagtaaacgtcccttaacaaaaacctcaaccttattactatcccattaaaaaacagcaaatacttactgagttcttgtaagagctaatgtcattgtaagatttaaaactaagggcttttatcactttgcaaattattttttaaatgcattcatcattggacagtgttctctcatttcttaaaatgcgagtcatcttccaaaagagttggttttaactgccctaaacatttttggggaagtatgcagggtttaaatttttaagtttaattagctctgaattaaaatatgcacatggaactggtctggcagactgatgcaatagttaaacaactgcagaattactattaat

SEQ ID NO: 34137 - DNA, 443 bp, Homo sapiens
actactatagggcgaattggagctccaccgcggtggcggccgaggtacttttttttctttttttttttttgatacggagtttcactcttgttgcccaggctggagtgcaatggcgcgatctcagctcactgcaacctccgcctcccaggatgaagccattctccttcctcagcctcctgagtagctgggattacaggctttgtagctgagcagtttctaaataacacagccactcaactgacataccatggattatgtgaactaacttcaacggttcaggaaggagaactttgtgtgttctttcggaataatcattttagcaccatgaccaaatacaagggtcaactgtatttgttggtaacggaccaggggtttcttactgaagagaaagttgtttgggaaagcctacacaacgtagatggtgatgggaatttctggtgact

SEQ ID NO: 34138 - DNA, 451 bp, Homo sapiens
atacactactatagggcgaattggagctccaccgcggtggcggccgaggtacaattgcatcaccaaaagctgtttaatttggattgtgtagaataaaagaaaactacataagtctttggtctttgataaaaattttaaaatataaaaatgaaaaaaagaaacccaaaagcagtattcaaaactaacaaatgtcaccttggactatttacagtaagacgcctttttgacaggagaatcttgttctcagcttgttcttttcctcacattttacttacagggattctcactcccccatttgatccctattcataccttgttccatttcctgtctcacatgacacagccatcttccatgcttatctaactcaatctttgagtctctctgtgacactcctttttcctactcttaaattattaataattttattcaacagacatttattgagcacct

SEQ ID NO: 34139 - DNA, 508 bp, Homo sapiens
tcactatagggcgaattggagctccaccgcggtggcggccgcccgggcaggacgcggggacactagccacacttcaggtgcccagtgtccacactgactagtggtgacggcgttggacagtgcagatacagaacatttctgtcatcacagaaagttcctttggacagagccatgttaagtgatgttatcacaggatggacagaaacattcccgtttgatttatttttcagacccagtttgtggagaaaaataatgatgctttacatatgtctcttgaatccttaatatgtgaatccagagataagtttatacgggaattatttgaatcatccacaaataacaacaaagatactaaacaaaaagcaggaaaacttagcttcatcagcgtgggaaacaagtttaagacacagttaaatttgcttctggataaacttcgaagtacctcggccgctctagaactagtggatcccccgggctgcaggaattcgatatcaagcttatcgatacc

SEQ ID NO: 34140 - DNA, 295 bp, Homo sapiens
gagctccaccgcggtggcggccgcccgggcaggtactatcttggctcactgcaacctcttccttttgggttcaagtgattctcgtgcctcagcctcttgagtagctgggattacaggcgcgtgccactgcgtccggctaatttttgtatttttagtagagatggggtttcaccatgttggccaggctgatctcaaactcctgaccccatgtggtccacccaccttggcctcccaaagtgctgggattacaggcgtgagccaccgcgctcagcctacaagcaattttttaaaaact

SEQ ID NO: 34141 - DNA, 515 bp, Homo sapiens
  misc_feature 50, 51, 434: n = A,T,C or G
ctactataggtcgaattggagctccaccgcggtggcggccgaggtacttnntattttttttttttttttttttctttaaaaaaaataggaatacaaggatttacaaaaaaacctcacacagtgcaataataaaggaaagcagacactagtggaacccctagggccactgcatcttgttcatggcaaagaggaagggaggtgaggtctgggtagagtgcttttcccagtcccctgctggcacttctccatgatgacaaggaagtctctgccatcctggccacagtgctgggctccctgcatgacagtgaaaacagtgacaatgttccagcaaagccaccagacaaagttcttaaggtcacaggagagaagggagcccaggatggaaggcacagcagagccatgagtcctggggcaaagagtgctgggctgagacntattgctttgctagacttccataggaatgggcttcttgcggcgagaaaagggtgccccaccctctacttggactacactac

SEQ ID NO: 34142 - DNA, 565 bp, Homo sapiens
gccggcggcccggcaggtacgcggtggcttactcttgaagtgaccgccctttagacggttgctcagagcaaggcccatgtagcatccctggagggcctcatccctgaagataaggttgtgcttctggcaggttctcccttacagaatgaagcccctgggtcagtgtggggtggaagccctgacaaccctggaagtggttggccgcaggctaggagttcacaatgtctaaaagtcagctgattttgtgttaaaattcagtgtctggctttgcttcaaaaattgggaagatcggccggacgcggtggctcacgcctgtaatctcagcactttgggaggccgaggtgggtggatcacgaggtcaggagatcgagaccatcctggctaacatggtgaaaccctgtctctactaaaaatacaaaaaaaaaaaaaaaagtacctcggccgctctagaactagtggatcccccgggctgcaggaattcgatatcaagcttatcgataccgtcgacctcgagggggggcccggtacccagcttttgttccctttagtgagggttaattgcgcg

SEQ ID NO: 34143 - DNA, 530 bp, Homo sapiens
ctcactatagggcgaattggagctccaccgcggtggcggccgaggtacctcacaggtcctcaaactttttggcttcaggagacttttttcactcttaaaaattattgagggctggccaggtgtggtagctcacgcctgtaatcccagaactttgggaggacatggcgagaggattgcttgagcccaggatttgagaccagtctggccaacataacgagacctcgtatctaaaaataataacccagcctggtggcacacgtctgtggtcccagctacttgggaggctaagatgagggaatcacttgagcccaggcaattgaggcctccagtgagccgtgattgtgccactgcactccagcctgggcaacagagagagtccctgtctcaaaaaaaaaattattgaagacctcaataattttttatgtgagttatatctattaacatgctaggaggccaatacagccttggggaattgagggactataacaaaagatctagtatttgtgttatcacaaaagatggggagagac

SEQ ID NO: 34144 - DNA, 495 bp, Homo sapiens
actatagggcgaattggagctccaccgcggtggcggccgaggtacctggaagaccaggcccctttccctccaagcagcaagtagctgatgaagatgaaatatggaagcaaagacgaagacaacaatcagaaatttctgcagcagtagaacgtgctcgtaaacggcgtgaagaggaagagcgaaaggaagaacaaaggaaggcagcttgtgcggagaaactgaaacgattggatgagaagcttggcatcctggaaaaacaaccatttccagaggaaattagggaaagggagcgagaaaaagaacgggagcgtgagaaagaacttgaaaaagaacaagaacaggagcgagagaaggagagggaaaaagacagagagagacagcaggaaaaggagaaagagctggagaaggagcaggaaaaacaaagagaaatggagaaagaaagaaagcaagaaaaagaaaagaactagaacgacaaaaaaaaaaaaaaaaagtact

SEQ ID NO: 34145 - DNA, 471 bp, Homo sapiens
ggccgcttcgaccaacatgtgtttagcattccacgggcgcatgaagtctgggtgttgtgctcgagtctctgaatattttgataggaagcgacaagaaaattcaaactgctctttgctgactactggaaagtgaaaagatgctaagttacattcaaagaaaccataggcatttcaaaaacctctttctaaactttggtttaaaaaaaatcagttcaccacaaacagaaatataaatcgaggctgtagccagctgctggtcatgtccttggcagtcttttgtgcaaaataaggcatatttgagctccacattaaccttgcggcaggcgtctacttgctctgcatgctgtagcagtgcacgtcctccttccccttggtggtgtagcctgggagaggctgcccatacttatccacacaccagcagaagccccgcttcctgcctttggaagggcgacaccgctttttcttataaaa

SEQ ID NO: 34146 - DNA, 612 bp, Homo sapiens
  misc_feature 438, 439, 440, 462: n = A,T,C or G
atacgactactatagggcgaattggagctccaccgcggtggcggccgcccggcaggtacctcaaagctgcaagtcagattctgatattgaaagatggtaaaatggtgcagaaggggacttacactgagttcctaaaatctggtatagattttggctcccttttaaagaaggataatgaggaaagtgaacaactccagttccaggaactcccacactaaggaatcgtacgcggggggttccgggcgttaccatcgtccgtgcgcaccgcccggcgtccagatttggcaattcttcgctgaagtcatcatgagctttttccaactcctgatgaaaaggaaggaactcattcccttggtggtgttcatgactgtggcggcgggtggagcctcatctttcgctgtgtattctctttggaaaaccgatgtgatccttgatcgnnnaaaaaaaaaaaaaaaaaaaaanaagtacctcggccgctctagaactagtggatcccccgggctgcaggaattcgatatcaagcttatcgataccgtcgacctcgagggggggcccggtacccagcttttgttccctttagtgagggttaattgcgcgcttggcgtaatcatg

SEQ ID NO: 34147 - DNA, 616 bp, Homo sapiens
ctatagggcgaattggagctccaccgcggtggcggccgcccggcaggactccaagtaaagctccagtgactaatatgtataaatgttaaatgatattaaatatgaacatcagaattactttgaaggctactattaatatgcagacttacttttaatcatttgaatatctgaactcatttactatttcttgccaattactcacttgggtatttactgcgtaatctggaacatttagctaaaatatacacttttggcttaaaaattattgctgtcaattccaataataattcttagcttataaccaaagagcagtgtttaaaaggagagcttctatacaaaacctattcctggcgttacttttcatacaatttttgttctgttttacctggaaataatttaccaaaataactgagtgttgctgctaaagaacaaaagtggggaggtatcagggaacaagaaaacaagaaagggtatgatcaatcattttcttctgctccaaacagctggagtaaaattcatgggaaatggcccttcatttaaaaaaagatgtacctcggccgctctagaactagtggatcccccgggctgcaggaattcgatatcaagcttatcgata

SEQ ID NO: 34148 - DNA, 501 bp, Homo sapiens
tacgactcactatagggcgaattggagctccaccgcggtggcggccgaggtacagcatatggaggtcaggaaggctatttgcagcacatgtgattaggggctactgatcttcagggtttagctttcttccaaacagtgtaaaatacccacaattccaagtatgaagggacacagacgatctcctttgaaattccacaggacaatacaggcgccccagctgttcttcatagagcgacagtgcttctgtcagattgacacagttcccctaaatcaaagagagataagcaaatgggattcttgagtccttccaagggccccactcatctgaaggtctttaataaaggagaacaattctagctttagataaaagttcatctttaaaaacaagataaggcttctgtattttcacaaatcacactgcattctatttatagacccattagagctcgttatccttctacctcatttaccaagccatttcaaattattagaatatgaaat

SEQ ID NO: 34149 - DNA, 439 bp, Homo sapiens
  misc_feature 281, 282, 283, 287, 288, 289, 290, 294, 295: n = A,T,C or G
atagggcgaattggagctccaccgcggtggcggccgaggtacacaaagttataattttaatgcttttcacatccatgctgaaaatctgcaatttggtaaaaatgaaaggaacataaatttttccaaaggaatttttcacgccattatatatacacttcatgagaaagtttcaaacactttctcaatgatcacgagttaccaagaaaataaaagattaaatttgtacttttttttttttttttttttgtaactgaagctttatctggagtggggaggggggnnntgtnnnncagnntggggcacccaaagacaaccatgctctcggtgaaggcgccgaggtcctggcattgtttctggttctcttcggcttggcattcgtcctcctcaggccagtgctccacccaagtgtccttcccgatgatgtagctgaggttgggct

SEQ ID NO: 34150 - DNA, 469 bp, Homo sapiens
  misc_feature 372: n = A,T,C or G
atagggcgaattggagctccaccgcggtggcggccgaggtacttttttaaattttttttttttggtggagatgaggtcatcgctatgttgcccaggctggccttgaagtccagggcttaagtgatcctcctgccttggcctcccaaagtgctggtgttacaggtgtgagccaccacacctggccaacatgtggctttcagttcttacttgaagacagctgctctagctagaaactttctatcggcatttgaacccactgggagaaggcattaacttccccacccccaagaacacttcttggaagttacacacaatacataaacttcaatttcaaacagttgcttggtcccactagccatgaagctggatggngacgtaatattctatctgggttgtcatgggccaaattaacattttgagatttctgttaagaagatgagaattggataatgggcaccttaacagtgtc

SEQ ID NO: 34151 - DNA, 250 bp, Homo sapiens
agctccaccgcggtggcgggcgaggtacttttattccagtttaatgacctagacagccttctacctccaaaatatacatgcagatatctacccaaacccaattctttctctagaacgaagcttggcccatttaggacactttctttttgacgcttccagagaactttagaaaaggtactatttgggttccttctataatcattcccctgcctagggaaactctcttttggtatcccggactataatgaag

SEQ ID NO: 34152 - DNA, 470 bp, Homo sapiens
  misc_feature 317, 375, 429: n = A,T,C or G
tacgactcactatagggcgaattggagctccaccgcggtggcggccgcccgggcaggtaccccagctgatgatgttccacaaaagagcaaaacatacacaatctggttccagtctacagaaatcctggaactggactacaaagggaatagacagggtgtggcaggagggggttcctcacggttggagtgcgaggttagggacaggaatagaaggtaggtaataaacattcatgtggtattaacttagggcagatgtgtcaatatatttccaagtttagcataatataggtataaaaattaaataaaaagtttatatngtgtgtgtatatattgggttaatacacaacacatacctcctagagtcattacctgagngggttctacaagaaaagacagcaaattaacaaaaaatacacccagaatcaaatntgagtttttgggttcctttattagcagaaatggtatgcaac

SEQ ID NO: 34153 - DNA, 237 bp, Homo sapiens
tggagctccaccgcggtggcggccgaggtactttttttttttttttttttttggcaagtcttcacaaaattttatattccccaagggcgggcgatcacaatgcctgtgaagcttgactggcagacactgaggcctgaagctgggggctgcagggggtcactggctcacccggtccccccgtaatctgtaaaacatactgggtgagggaggctgctggaggacctgaattctcccttc

SEQ ID NO: 34154 - DNA, 494 bp, Homo sapiens
tatagggcgaattggagctccaccgcggtggcggccgggcctgatgcctcaagcctgtaatcctagcactttgggaggcagaggcgggcagatcacttgaggtcaggagttcaagaccagcctggccaacacggtgaaaccccatctctctaaaaatacaaaaattagctgggcgtggtggcacacgcctgtaatcccagctactcaggaggctgaggctggagaatcatttgaacctgggagggggaggttgccgtgagctgagcttgcaccattgcactccagcctgggcgacaagagtgaaattccatctcaaaaaacaaaaacagattgacaacaaagacagtttcagaaaatgacaggactgggcaaattaacaaaatgtttgtaaacatggaatgttcaggaactactgatgtacccttggccgctctagaactagtgggatcccccgggctgcaggaattcgatatcaagcttatcgatacccgtcg

SEQ ID NO: 34155 - DNA, 317 bp, Homo sapiens
tggagctccaccgcggtggcggccgcccgggcaggtactgaatgagtattgcttttgcaccattgtgaagttgacaaatctaagaccatcataagtgggggaccatctgtatacacaaatacacgtaaacacacatgtattttttttttttttgagacaaaagtcttgctctgtcggccaggctggagtgcggcctcacatggtaaagtaagctggcctttcttatttgtcacctggaaatacatgcgaccatttaaagagacaaaagagagggtggtagcataccctgaacttgagttgggagctacacacaatat

SEQ ID NO: 34156 - DNA, 513 bp, Homo sapiens
actactatagggcgaattggagctccaccgcggtggcggccgcccgggcaggtacaggttgagtatcccttatccgaaatgcttgggagcagtggcgttttggattttggattttttaaaattttggaatatttacaaatacataatgagatatcttgaagatgggaaccaagcctaaacataaaattcatttttctttctttaaaaaaagaaaagccagtgtcttgctctgtggcccagctggagtgcagtggtggggtcatagctcgccgcagtctcaaacttgggctcagccaggtgccattgcaccctttttaaaaatgtttattgatacagcctccctatgtttcccagactgatctcaaactcctggcctcaagcaatcctcctgcctcagcctcccaaagtgctgggactacaggcatgagccaccacacccggctaatttatgttttatatacatctttgtagttataacccaagctactgttgacaactgttgcatttgatgca

SEQ ID NO: 34157 - DNA, 436 bp, Homo sapiens
gggcgaattggagctccaccgcggtggcggccgaggtactttttttttttggtatttttttttttttttgagatggggtcttgtcatgttgcccaggctgctcttgaactcctgggctcaagcaatcctcctgcctcccaaagtgctgggattacaggcataagccattgtgcctggccctcttggtaattttgtattactgacccatactctgctccttggctataaattcccacttgcttatgctgatatttggagttaagtccattcaccctctaccactgcaaaatcccattacatttgtctatatacctgtcataatggccctgaataaagtcttccttactgtgctttaacaattctcattgaataatttttttaaacatgtatagcttaattaaggaggtgagattccaacgcctttgccatattctga

SEQ ID NO: 34158 - DNA, 436 bp, Homo sapiens
ttggagctccaccgcggtggcggccgcccggcaggcactttgcttttttgttctgttttttttttttttggggaggtttttgctgtcttatcacttgaggtcaggagttcaagaccagcctggccaacacggtgaaaccccatctctctaaaaatacaaaaattagctgggcgtggtggcacacgcctgtaatcccagctactcaggaggctgaggctggagaatcatttgaacctgggagggggaggttgccgtgagctgagcttgcaccattgcactccagcctgggcgacaagagtgaaattccatctcaaaaaacaaaaacagattgacaacaaagacagtttcagaaaatgacaggactgggcaaattaacaaatgtttgtaaacatgaatgttcaggaactactgatgtacctcggccgctctagaacta

SEQ ID NO: 34159 - DNA, 448 bp, Homo sapiens
cactactatagggcgaattggagctccaccgcggtggcggccgaggtactccaagctctgagaccacctcttctgcaaagccttcctgattctgcagagaacaggtaggcatttcatccttgggacctcacagcaattcaggacacatttgtgtcccagccctgcgtggcttggctgtctccatgaatatacactttgcaacttctgcaccaggcatcataccaagcacacagtaggcactcctgtgttttttgaataagtgactatatcatcaccacatttcaaatgcggaatatatgagctactagaaaagacataagggtgagattttacatctttattgtatcctagatatacaagtctattactgccttttcccatgtttctgtcaacatagcataaagaatgtgcgatttacctgttagaaattgaataagcggccgctcta

SEQ ID NO: 34160 - DNA, 379 bp, Homo sapiens
ggcgaattggagctccaccgcggtggcggccgagggacttttttttttttttttttttttttcggcttccaaaagctttattggcaaatatgctctataaaagaatgatcaatcctgttgcctctaagtcaatggaatgaagagctgtgtccagggacacaccacgccgtgctgaaggagactgctgttgtgtccacctcttattcatagacccagtcatgagcacaagacttgtagtcaaccagttcttcaggcttaaaccacccgcgtactggaagcaggagggagccctggctagggcaggccttaaacgcaagggaagctgagcagagatctgcacactcaaccccatttgatattcttctcctcctcagtcatg

SEQ ID NO: 34161 - DNA, 513 bp, Homo sapiens
acactactatagggcgaattggagctccaccgcggtggcggccgggcatttctcccagggatctctgtgcttccttttgtgcttcctgtgtgtgtggatatttaaaggggctggaaatgtgcaaaaacatgtcactacttagacattatattgtcatcttgctgtttctagtgatgttaattatctccatttcagcagatgtgtggcctcagatggtaaagtcagcagcctttcttatttctcacctggaaatacatacgaccatttgaggagacaaatggcaaggtgtcagcataccctgaacttgagttgagagctacacacaatattattggtttccgagcatcacaaacaccctctctgtttcttcactgggcacagaattttaatacttattttcagtggggctgttggcaggaacaaatgaagcaatctacataaagtcactagtggcagtgcctgacacacaccattctcttgaggtccccttaggagatccacaggtcatatgac

SEQ ID NO: 34162 - DNA, 358 bp, Homo sapiens
ctcactatagggcgaattggagctccaccgcggtggcggccgaggtactttccttgggatggctttctaatttaaagaacagcctgcctcaaaagcttgcagtgactgagcagatatgctagcaccaacttttccaaaaaaaaaaaaaaaaaaaaaagggtactcccaactgtggtcgcgctctcaccccttctgctgctctcgtggccccctcgcgatggcgggcatcctgtttgaggatattttcgatgtgaaggatattgacccggagggcaagaagtttgaccgagtgtctcgactgcattgtgagagtgaatctttcaagatggatctaatcttagatgtaaacattcaaatt

SEQ ID NO: 34163 - DNA, 283 bp, Homo sapiens
gcgaattggagctccaccgcggtggcggccgcccgggcaggtactttttttttttttttttttttttttttcctttggaaacagggactcactctgttgcccaggctggaaaacactgacgccatcacagttcactgcagccttgacctcccaggctgaaacaatcctcccaccttagcctcccacatagctgggactacagatatgcccaccatgactagctaattttttgtaaaaacagggttttcgccatgtttgcccaggctggtcttcaaactcctgg

SEQ ID NO: 34164 - DNA, 459 bp, Homo sapiens
ctactatagggcgaattggagctccaccgcggtggcggccgcccgggcaggtacctttttttttttttttttttttttgtttattttttttttttttttttttgtggttttaccctttgatatttattaacaaaaatggtccacaaaaggattgagtcaaaattacaaagtgattaagagttaaaacaaaagttgttctttattggagtttctgggggactttaaccagtccccaaagctgtttttatttcctaaaataggacttaaatgacatccctcaagtgaccgattttaatagaaactcctcctctttccttttggcaaagcaaaatttacgggaaagtcatctgttggtacactcaaaccctcctttcctaataagatgtgcatgcctgtatatggattgggatgcagcgaagaaagaagtttaactaaaagggtaaaaaaaaaaaaaggcca

SEQ ID NO: 34165 - DNA, 459 bp, Homo sapiens
attggagctccaccgcgggggcggccgcccgggcaggtactaaaagcgggcaccaccatgcttggctaattttcatatttttcatagaggcggggttccaccatgtggccttgcttggtctgaaagttctgagctcaagcaacccacctgccttagcctctcaacgtcctggaatgacagcatgagttgccacacctggctgcatgccgaatactttagagttgtttatgcctgacacttccagggcatgcagaactatggtggcattaaccgacacattaaccaactgcctcacttacttttcttttgactcagtttataaattttcttaatttaaattttaatttcaacatgtatacatctttgaaataaataaaataagctctttgaatgtttgacataacgtagaagaaattgacaaatggacatctttacttcattttctgtctcaaaatgtgg

SEQ ID NO: 34166 - DNA, 214 bp, Homo sapiens
atagggcgaattggagctccaccgcggtggcggccgcccgggcaggtacttaacatgctttcaacaataaattctctgacaaaccctaagtgtaactcagaaaaaagctacactaactaaatgcagattgaattaacataatctaccataatcaagaaagttttctaaagaacttttcatattttctttgattaaacatttatggtcttataat

SEQ ID NO: 34167 - DNA, 451 bp, Homo sapiens
ctcactatagggcgaattggagctccaccgcgggggggggcgaggtacagatttgattatgattttaatgtttgaaagattgcacttgtttgcttttactatagggggggtaaaatatattttgtgttcacagtatatgaaaatatggagtaatttaaacagtaaataaacattctgtggatgcttatttttgtattgacaaagtatcaattaaactatatgtgttctttttcaaaaatgctggatccattcatgattggttcaaatatctaattatttcctcaacttaaatttgctttttaaattgcttaatatgtaggggtaggttaccaaatgatagttggataaggaatcatttagttatcagagcttcagagggtcatctgctttccaccaaggaagtttaagcattatggttcattagtgattttgcttgaagattttaaaaatg

SEQ ID NO: 34168 - DNA, 189 bp, Homo sapiens
actccctatagggcttattggagctccaccgggggggcggccgaggtactaaatgcatcctccatttcttataatctttcttttctaaatatcaacggcatgggtgaatagccagcttactgggtagttctaaaaacttttgcatttctttcaaaaactctttcagaaacactatatcccatgtctata

SEQ ID NO: 34169 - DNA, 478 bp, Homo sapiens
actcactatagggcgaattggagctccaccgcggtggcggccgcccgggcaggtacatatttactgtttctctcaactttaagaactctagtctcacttcagatatattatacaaatcctaatcaagaaaaaaaaaaatcaatggattttcacttttaaaaatctttcttccctctccttttaggaaacgcagaaaaactaagctttctttcaataccaacaccaacaatgggctttcaataccataagcacatcaggggaattaaactcttccatggcagaaagaggagataatttaaaatgaaacctcagcctactcctcatagtctaccttaaatagttatactatgtttttaaaaagcaagttattactttagtaaccatttaaaagaaagtaactagaactattttgttataaagcatagctaagaaaacaaaatgtcccaatcattatattaacttacaaaagcatactaaa

SEQ ID NO: 34170 - DNA, 456 bp, Homo sapiens
tatagggcgaattggagctccaccgcggtggcggccgcccgggcaggtaccatccacgtcactgggcacctggcctaacatggccaggtagggctcgtagatgaccgaacggaatatccacctccagcgctgctcattctgcctaaggatcccttgcctggccacgccaaaggccaccatccacaccgcaaagaggaacaggaagaagaacacatcgatcagcatcctctgcagcattataatcttgggtcctaagtttctgcttacagtaaaaatgtggatcaatcttagagtgaaaataatgtagtccagacagaaaatgactcgtccagaatacaaagagcttttattagaagagtggagccgaaatacaattcctgctatgaagaaaaaaagccccaacgtgtccatcacattccacagggcagtaaaataattcaccccatttacgtacct

SEQ ID NO: 34171 - DNA, 464 bp, Homo sapiens
gcgaattggagctccaccgcggtggcggccgcccgggctggtacaagaagcactatatagctcatttatcttcattaactccaatcttgctttgcataaatatggcatttcagaagtcaagcatacaaaatactttccttagagaaataaaaatatatgtaaaagccagacaggccaacagggcgatcacattcctcagaaccgcattgtccaattcaataaccatcattcacatgtggcaattaaacacatgaaatgtggcttgtccaaactgaaatgtgctgtaaatgttaaatagacactaggtttcaaagatcttgtacctcggccgctctagaactagtggatcccccgggctgcaggaattcgatatcaagcttatcgataccgtcgacctcgagggggggcccggtacccagcttttgttccctttaatgagggttaattgcgcgcttggcgtaatc

SEQ ID NO: 34172 - DNA, 535 bp, Homo sapiens
ctatacggcgaattggagctccaccgcggtggcggccgaggtactttttttttttttttttttttagtttatacaactcattaaagaaacttccaaggtctggtttgccacatgctatatagtctgaatgttagtatcttcccaaaattcataggttgaaaatctaacactcaaggtgacggtattaggaggtgaggactttgggaggtgattaggtcataaaggcagagccctcatgaatggaattagtgcccttataaaagaggcctgatagagaccccctagctccttctaccaggacataggtagaaggtgccatctatgaaccagaaagcagatcctcacccctcaccagacaccaaatctgccagtgccttgagttcggacttcctagcctctagaactgtgagaaatttctggtatttacaaactacccaatttatgattttttttatagcagcctaaacagactaagacaccacacttattcacgccccttgggatggtatattccttggatttcttattgcttttc

SEQ ID NO: 34173 - DNA, 358 bp, Homo sapiens
tccaccgcggtggcggccggcctacacacagagccacctgccacctatagatttttttttgcacaggaaagaagtttcttttaatggagcccatgtgctatgagtctctgttatagcagctgagccaggaagtgcgggctaacttctgattccttgccctatttcttcttctctcagctctgaggctgataccttaaatctgagaggaggtagatttactagtctctgattcaattattctcgacttctttatttgagacagagggcttgctatatcacccattctagacttgaactcctgggttaaggcaatcctcccaaccgagactcctgagtagctgggactacaggcacgtgc

SEQ ID NO: 34174 - DNA, 461 bp, Homo sapiens
  misc_feature 337, 349: n = A,T,C or G
taacggattttccgagcttaagcctctcacgaagcgggaatgggttgtcttctggcctcagagtatcccttatcagagccttgggcccctgggccccttcactcaatacttggtggaccaccatcacaccctcctgcacaatggttattggcttgcctggctgattcatgtgggagagtccttgtatgccttagtattgtgcaagcataaaggcatcacaagtggtcaggctcagctactctggttcctacagactttcttctttgggatagcatctctcaccatcttgattgcttacaaacagaagcaccaaaagtaaacttgaagatgtctgaanaaaaaaaaaaantttttgggaaaaaaatagtgaaaaaaaaaaaaatggggggggggcccccccctctttttaaaaaaaaaaacccccccccccccccgcgggggggaaaaaaaaaaaaaaaaaa

SEQ ID NO: 34175 - DNA, 462 bp, Homo sapiens
gagtcacccacgttcacagccatgctcccttccctcagagccgttcaggaccaggaactattcctagcatttggcatatatgtgcaggagtgccagcttcctctctcttcagtctcaatttctgtgctgcctcactattgacacttggtgttttatctccagagatctgcttaaagtatgtcggtgtattcaatattctgttatctttcagtggagataaaaacaccaagtgtcaaaagtgcggccgctagactagtctagagaaaaaacctgccacacctgcccctgaacctgaaacataaaatgaatgcaattgacgttggtaacttgtatattgcagcttataatggttactaataaagcaatagcatcacaaatttcacaaataaagcatttttttcactgcattctagttgtgggttgtccaaactcatcaatgtatcttatcatgtgtggatcccc

SEQ ID NO: 34176 - DNA, 286 bp, Homo sapiens
gccacatgctctcaaccttctgaggaatctcgtggtgttgattattctgggttgcgactgtatcctctgtttctctttttataggctcctaacgttgggattacgttgtccctattaactaaagttctacccgttactttaaataagaaagttcgttcttttcaccttccttttacagccagatttttcaaaccagtgttgcaggtgggtaggcagatatggttgctggcaggagcttgtgaaaatgaagcagggtttcagctgagagtgaggaggacggaggaga

SEQ ID NO: 34177 - DNA, 168 bp, Homo sapiens
tagggcgaattggagctccaccgcggtggcggccgaggtactttttactttttttttttttaaaaaaaccttgagctcttaaggattaatgctcttgagttatgagatatccctacattccaataactctaccttctatttttatggattaaactagttggagtagtt

SEQ ID NO: 34178 - DNA, 437 bp, Homo sapiens
tatagggcgaattggagctccaccgcggtggcggccgaggtactttttttttttttttttttttttttccctttctatggtctaaagtcaggcaataaatacaagaatatttggaagtttttatttttatcatacaatgagactatctttcctaccttggcttcctagtataaaaagctatttgaaaatttatattcaatgtaatttttgttgaggcctttattggaaaaaaaattgtaccatttttttgaggaagaaaaacacataatgtgaacagagctataactgctgaattaaagaaaaactatgttgcatttatttcttagaaaaaaattttgcaagaaaggtctgaggccccacttaggtccgccctgcaagtcaacacatcctgggtttgctccgactgaactcctcatggtccccttgcttgacaaaaa

SEQ ID NO: 34179 - DNA, 432 bp, Homo sapiens
tatagggcgaattggagctccaccgcggtggcggccgaggtactctttgttttggcacacttttcctgacaaatcagccagtgttctcaacacataaatactagtccacgttaacaacaatagcatatgagaccgctctccgtaaagatgccagattggatgcaaatggactggaaataccttggagggtttcacaaaaataagacaaagggcaaaggaactttgccaaaggagatggagagcaattctttaaagttagtgggagggaggaagcaaagagctcataaatacaagcctcttaaaatgggacgcatttgcctcgcgcctactgggtgtctgcagctcagcttggtgccccacacaggacaccgactttaagtggctgcctttgcaaggctgaaaggccatgagggttgatgcctgaagtgtcag

SEQ ID NO: 34180 - DNA, 375 bp, Homo sapiens
gactcactatagggcgaattggagctccaccgcggtggcggccgaggtacttacggagtgacaaagggaaaagtttgctttgaggcaaaggtaacccagaatctcccaatgaaagaaggctgcacagaggcctctctccttcgagttgggtggtctgttgatttttcccgtccacagcttggtgaagatgaattctcttacggtttcgatggacgaggactcaaggcagaaaatggacaatttgaggaatttggccagacttttggggagaatgatgttattggctgctttgctaattttgagactgaagaagtagaactttccttctccaagaatggagaagacctaggtgtggcattctggatcagcaaggat

SEQ ID NO: 34181 - DNA, 118 bp, Homo sapiens
tagggcgaattggagctccaccgcggtggcggccgcccgggcaggtaccgtggccagggtcagattgtgcagaaggttatggtgcagcccatcaaccttattttcagatacttacaaa

SEQ ID NO: 34182 - DNA, 439 bp, Homo sapiens
agggcgaattggagctccaccgcggtggcggccgaggtaccaatttgggttctatattttgtcattcagttgggtttttaaaaaaattcaaaactcatgcatgttacctacttgtcatgtgtgaattatttctcacaattttaattaatctgtgtgtatattagttatataaagcaatggatttccacattcttaaagcaggaacctatattcaccagaaaaggatcctcctgtttctcatcaaattttttttcagctcgaacaatccaagattgggaatagtaagagtggcaaacaaatgttttcttagggacttactgagaaaagaaaaaacttactgggagaacagagacttagtaaaatttctattgctacagacaaatgctaaaaaccagctttataataacagcattataaaggatagaacttaatatagaac

SEQ ID NO: 34183 - DNA, 401 bp, Homo sapiens
ctactatagggcgaattggagctccaccgcggtggcggccgaggtacttttttttttttttttttttttgttctttatctggagagattccctcaactttattttccagactgtataccaaatacttttagcagtcttattttattttcaaagagatcttcttattctcagtcttctctttcttttcttgctttttaagagacagggtctcactctgtcccccaggctggagtgcagtggcaccatcatggctcactgaagccttgaactcctgggctcaagtgatcttcccacttcagcctcccaagtagctaggaccacaggcacatgccaccatgcttggctaatttttaaaaattattttgtagagacgggatgttgccatcttgcctaggctggtc

SEQ ID NO: 34184 - DNA, 414 bp, Homo sapiens
ctactatagggcgaattggagctccaccgcggtggcggccgcccgggcaggtacttttttttttttttttttggtagaaatgggctctcaacctgttgcccaggctggtctcaaactcctggactcaagtaatccacctgcctcagtctcacacagtgctgggattacaggtgtgagccctggcacccggcctgcaggcactttttatggaattgtattacatgtatagtagggacattgccatcttggcatgtctatttattcaggtttatttttgtgtctgtcggaagtgtttaaagtttctcctatgaaggtattgcatatctcttgttgaagtttattcctaggtgttttattttttttcagttcagttgctattacatgggtgcttctcttccatcctggaatccaact

SEQ ID NO: 34185 - DNA, 430 bp, Homo sapiens
gactactatagggcgaattggagctccaccgcggtggcggccgcccgggcaggtactttccatttttcatctgtgacacagaaggcgggggttgcctctgatccttttgttatttggggcatggaaagtttgggttttccttttgattcagttccaggaagtcagcattaatcacccttaggtttcttgcctccataccctgttctcatacctcatttccccccgaaagacatgatcctcataaatctttatgggaggtaaagggattgatagtctttcttctgtaactgctttatgctgacctgaggcacagtccctacgtacctcggccgctctagaactagtggatcccccgggctgcaggaattcgatatcaagcttatcgataccgtcgacctcgagggggggcccggtacccagcttttgtcct

SEQ ID NO: 34186 - DNA, 163 bp, Homo sapiens
tagggcgaattggagctccaccgcggtggcggccgcccgggcagttactttttttttttttttttttttttctttttttttttttttttttttgggaacaaaaaaccccccaaatttatttagctaaaacatttcccctgatctaaagaaaaagatggcaaaa

SEQ ID NO: 34187 - DNA, 363 bp, Homo sapiens
gactactatagggcgaattggagctccaccgcggtggcggccgaggtacaaaaaaaaaaaatacttttcttattttccagatatggtctaaatgttttattatccataatgatctaaactaataagattcaccaaaaagtaaaaattcaattttacaatatacattttttttttaactatttggctttacctttttaccttgggtctccttactgaagtcctctggctttcacttagatctggtttttgaaggctcttaattattggctgggcatggtgactcatgcctgtaatcccggcactttgggaggccaagggaggtgatcacttgagcccaggagtaaagaccagcctgggcaacat

SEQ ID NO: 34188 - DNA, 334 bp, Homo sapiens
tatagggcgaattggagctccaccgcggtggcggccgcccgggcaggtacacgagaagctccgaggatggctgaagtccaacgtctctgatgcggtggctcatagcacccgtatcatttatggaggctctgtgactggggcaacctggaaggaacctggccagtcagcctgatgtggatggtttccttgtgggtggtgtcttccctcaagcccgaattcgtggacatcatcaatgccaaacaattgagccccatccatcttccctacccttcctgccaaagccaggggacttaatcaggcccaagaaagcccaggtaaactgtcccttttccct

SEQ ID NO: 34189 - DNA, 487 bp, Homo sapiens
tacgactcactatagggcgaattggagctccaccgcggtggcggccgcccgggcaggtactttttttttttttttttttttttttaaacttggctaagttgccctttattaacgaaaacatagagctttcggtcaattccaccacggagaacacaaaccagaaataaaacccacaccaagggctatttcccaagctggggaatttgagaacacacgggcagagttcacgccacacaactacactgggctcgtccttgggaggcgttcacaggaagcaatcacgagcgccaagccacccacaaggcagtgcggcaaggctcccgggatccttacaggcatccaagcgaggtacctcggccgctctagaactagtggatcccccgggctgcaggaattcgatatcaagcttatcgataccgtcaaccttaagggggggcccggtacccaacttttgttccctttagtgagggttaattgcgcgcttggc

SEQ ID NO: 34190 - DNA, 492 bp, Homo sapiens
agggcgaattggagctccaccgcggtggcggccgaggtactattattttctaacaggaatttgctatttcaaatatattatctgagatatctatatatttatattttgagatactatacaaatttgagccaatgacatagaattttacaaatcaagaagcttattctggggccatttcttttgacgttttctctaaactattaaagaggcattaatgatccataaattatattatctacatttacagcatttaaaatgtgttcagcatgaaatattagctacaggggaagctaaataaattaaacatggaataaagatttgtccttaaatataatctacaagaagactttgatatttgtttttcacaagtgaagcattcttataaagtgtcataacctttttggggaaactatgggaaaaaatggggaaactctgaagggttttaagtatcttacctgaagctacagactccataacctctctttacaggga

SEQ ID NO: 34191 - DNA, 467 bp, Homo sapiens
ctcactatagggctaattggagctccaccgcggtggcggccgaggtacaagcatggcgctggtatctgcttggtttcctggtgaggcctcaggtaggattcagtcatggtgaaaggtgcagcagtggcaggcacatcacatggtgaaagtgggaacaagagagggtggaggtgccacacacttttaaacaaccaggtcaggtgtgaactcactcatcgccaagaagacggcactaagccattcatgagggatccgtcctgtccccatgatcaaaacacctcccaccaggccccacctctgacactggggatcacatttcaacatgagatttggaggggacaaatatccaaaacatatcaatatgtttcactatggaaactttacaaggttcaatcccaagatggctggagaggctccaagtatcacattcacccacaataatggctaaagactgaaaggagggaaaa

SEQ ID NO: 34192 - DNA, 469 bp, Homo sapiens
tatagggcgaattggagctccaccgcggtggcggccgcccgggcaggtacagtggcacgatctcggctcactgcaacctgcgcctcctgggttcaggcgattctcttgcctcagcctcctgagtagctgggattacaggcacccatcaccatgtccagctaatttttgtatttttagtagagacagggttttcccatgttggccaggctggtctcgatctcctgacctcaaatgatccgcccaccttggcctcccaaagtgctgggatgacagttgtgagccaccacactcagcctgctctttctaatatttgaaacttgttagacaatttgctacccatctaatgtgatattttaggaatccaatatgcatggtttattatttcttaaaaaaaatattcttttacctgtcacctgaatttagtaatgccttttatgttacacaacttatcactttccagaaacaaaaa

SEQ ID NO: 34193 - DNA, 472 bp, Homo sapiens
tatagggcgaattggagctccaccgcggtggcggccgcccgggcaggtactttttttttttttttttttgagtaatctttttatctcttccaggcacaggactgatgcagcctgaaatcagacataaaaccaaatcctgcaggttgctgaattacaacgcaggttgaattcataggatctccaggtctcatatgcaaaaacatggctactgattagggaacaatgggaccttgagactaggaataggaacatcaggattgatttggatagatctgagcaccctaaaccccaaccctcactgagtttcccctggcagcagaagcagccctttttccccagtctatggggctggtcctgcctgacttggggaccctctcactgttaggctaaccttttcaagatccacccggatcatcttttgctgcctccagacccattactgaatttagattcctgtatgtcccaggaagta

SEQ ID NO: 34194 - DNA, 425 bp, Homo sapiens
ggcgaatttgagctccaccgcggtggcggccgcccgggcatgtacgcttcccttggcaccatgttatttcatctgtgctgggctgaatagtgtccccccaaaattgaataatgtccccccaaaattcgtgtataccctgaacattagaatgtgatcttacttggtattacttggtatagggtgttgtagaaataatcaaataaagatgaggtcatactgcatcagggtagaccctaaattcaatgaccaggatttttataagtgaaaggagaggcggattcagagaaaaagacacagacacacacagagagaagacagccatgtgaagacacaagcataaattgaagtgacacagctacaagccaaggaatgccaaaaattgctggtaaccaccaaaagtaggaagaggcaaaggggaatttttt

SEQ ID NO: 34195 - DNA, 239 bp, Homo sapiens
tacgactcactatagggcgaattggagctccaccgcggtggcggccgcccggcagggactttttttttttttttttttttaatacattctaattaacagtcaacatacagtccttgctggctacagaaaaaaatggagacttttagtccatcaccttgtgtctattccttcatgctaaatatttttttaagattttgttatacaaaacatttgaaaatttgttcaaccctttattttat

SEQ ID NO: 34196 - DNA, 411 bp, Homo sapiens
ggccaattgtagctccaccgcggtggcggccgcccgggcaggtacatacaagtcatccattaaaacaatgaatttgaatatagagtgccagcagcaacttagtattttctaaaaagaacatttattatttatttttagcctgtcattttaattcttcaagagattttactgctggtattttttaatgcactcctctttgtaatttcattcaagccatttgtctaaagtcatttctttgttttttgggagatggagtcttgctctgttgcccaggctggaatgcagtggcgtgatctcggctcactgcaacctccacctcccgggttcaagcgattctcctgcctcagcctcctgagtatctgggattacaggcgtgcaccaccatgcctggctaagttttgtgtttttttt

SEQ ID NO: 34197 - DNA, 436 bp, Homo sapiens
actactatagggcgaattggagctccaccgcggtggcggccgaggtactctttccctttatttctcagactggccgacacttagggaaaatagaaagaacctatgttgaaatattgggggcgggttcccccgatacttttggacatatatccagtagtgggactgctggatcatatagaagttctatttttagttttctcacaaacctccatactgttttccataatggctaaactaatttacattcctaccaacagtatatataagttcctcttctctgcgtctttgccagcatttgttattttttgtctttttgataatagccagtctaactgaagtgtcatggagaaactccagctgggcccagagattctgcagcgggaaaatccaaggcttatttatgccaggctgagtggatttggccagtcaggaagct

SEQ ID NO: 34198 - DNA, 405 bp, Homo sapiens
tatagggcgaattgtagctccaccgcggtggcggccgcccgggcaggtacttttttttttttttttttttttttaggcggaaagtaatgctttaaggaggaagctacatatgaataaattgaaagtgtctttctaaggcaactgtgaaacctccaaaacaggaacttctttataacaagaacattctaaaaaagggtcagtatatgcttgactgggccttaaacccatggtttttctagaacaccaatgtttaaatacttggcgtttttgcggtgaaaagcgttgttcgtatttggaatactgactacaggggaagggaaatgtgcctgtaaaagcctccacttttgtgttatacaaaaactttgtccactctatatctaggaggaaccttttttttgaaagcaa

SEQ ID NO: 34199 - DNA, 483 bp, Homo sapiens
ctatagggcgaattggagctccaccgcggtggcggccgaggtacatgtgatgattttcagtgtaaccatttacgtaatgattctgccaaatgaaatataatgatatcactgtaaaaccgttccattttgattctgaggttactctactaacaagcatcacatatttgtattttgccctgattaatatgttggcttcgctttcagggtttttaatgaccacaacaagcaagcatgcagcttactgcttgaaaggtgaggattggaaatgttgggactattataattgcagaatacatgatgatctcaatccaacttgaactctctcactgattacttgatgacaataaaatatctgatattctgcattcccatgtagcattttaattgaagtctgtaaatgtggctaaaagtcttgtcttattttttgagacagggtttttgcctcacccaagctagagtggagtggcctttgaagcttactac

SEQ ID NO: 34200 - DNA, 472 bp, Homo sapiens; identical to SEQ ID NO: 34193

SEQ ID NO: 34201 - DNA, 323 bp, Homo sapiens
gctccaccgcggtggcggccgcccgggcaggtactttttttttttgttttttttttttgattttttttttttttttttttttttttttttttgtgtctgctcagttctttattgatgggggtgccgttttctctggaagcctcttaaaagaagaacacagtggcgcaggctgggtggagccctccccccatgaagtacctcggccgctctaaaactagtggatcccccgggctgcaggaattcgatatcaagcttatcgatcccgccaacctttagggggggcccggttcccagcttttgtttcctttagtgggggttaattg

SEQ ID NO: 34202 - DNA, 410 bp, Homo sapiens
gcggtggcgggcgagggacttttttctttttttttttttttttttaagaatgtttttatggccgggatggtggctcatgcctgtaatcccagcactttcagaggccaaggtgggaggatcacctgaggccagaagtttgagagcagcctgagcaacatagtaagatgctgtctttatttaaaaaaaaagatcttctagagagatctagtaaaatattttatagatgatacaattggattctaaggttggtttcagaatcatcttggggagaagatgggcaggaatgtactagaggtaagtatggccatgaattgatcattgctgaagctggatgggcacttgggcgttcattatccagttctttctgctttcgcaaatgtttgagatttttttcaccataaaaagaaaac

SEQ ID NO: 34203 - DNA, 341 bp, Homo sapiens
ggcggccgcccgggcaggtacttttttttttttttttctttttgtggcttccgaaacttcttcaggtgcctgttcacatccaacagaactatcactccaagagtgatgtttctctccagtaagttggatataaatgtcaagcaggtgatcaaccactgccaataggctaggatatctgctctgaagaacctcattcagttctctcttgtccaggttatccaggtgaattttggtccaatatttgtctagcaaagtagcatgactgtttagcggtcgataccaatttcctccacagctcaagagtctcctggttgcaaaaaactgaaatccaggtgccactt

SEQ ID NO: 34204 - DNA, 348 bp, Homo sapiens
attggagctccaccgcggtggcggccgaggtactttttttttttttttttttttttttgagacggactcttgctcttttgcccagactggagtgcagtggcgcaatctcgggtcactgcaagctctgcctcctgggttcatgccattttcctgcctcagcctcctgagtagctgggaccacaggagtgcacaattacactcggctaattttttgtagttttggtggagacagggtttcaccatgttgcccaggctggtcttgaattcctgagctcaagtgatccgcctgccttggcctcccaaagtgctgggattgcaggcgtgagccaccacgcccgcctggcctgc

SEQ ID NO: 34205 - DNA, 462 bp, Homo sapiens
ctatagggcgaattggagctccaccgcggtggcggccgcccggccaggtactccatgttggttggtagtattttaaatctgaagcattttcagaggctaaggcaattcagactgcacagctgtcaactcaggagtcccattaaactgactctaaaaattcctaaaagaaggcatgatttattataagcaaatggctaacctggcttttttggtaatagaattctaaatgaaaataaaattatacaagatacacattgtttggatttttaaaaactctattaaatgtttaagtggttgtgaatatgaggaataattaaatgttaaccccagctgattagtgaacatataagaaaatggggggaactgatcccaaaagatcttctcttctaaggagaacttcacttgaggggcaaacactagaagatacaactgttattgtaaaacaaacactaatgagagtct

SEQ ID NO: 34206 - DNA, 451 bp, Homo sapiens
gcgaattggagctccaccgcggtggcggccgaggtacagacccaaacttaagttttgtattattttcctgctgccctcaaacatcctggaatgtttcccaaagacaggtctacaggtaataaaattacctttgatttagtttctcagaaacagtctttattttgccttcatttttgaaaacgtttttgacagtaacagaattctaggttgcagggtttgttgtttatttcattaaggaatttagagataatactccattgtcttatagcttgcatagttctcaccagatatatgctgccattctttgttcatgtgtatgtattatctttttttctcaaggtgttttaaaagtatttttgtttatcaagtgcttttcatgaattgtgactctgaggggccctgctgtgatgtaaattatgtttattctacttcagggcatttgaggcttttg

SEQ ID NO: 34207 - DNA, 377 bp, Homo sapiens
gagctccaccgcggtggcggccgaggtacagtgttaagcatctaaacgttagagtcccagaggaaggaggagtcccggacaggaatcatagcgttggtgtcactgtttttcatctaaatgaaaaataaaaacaagtcatacatgaaccctggggaagtagatattataattattttagaaatgaataaattaaaatttaatatacataaaagtcacagggaaccttttaaaattcagttccccaggactagagaactgcagtggatctggagaggccaaggacctagagtgataacaagcaccccagttgattgttgagacgtggtcccaaggtcactctctgattacttaggcttggcaatgcttttcaagatttg

SEQ ID NO: 34208 - DNA, 226 bp, Homo sapiens
gggcgaattggagctccaccgcggtggcggccgcccgggcaggtactttttttttttttttttatatttttttttttttagtagagacgggatttcaccatgttggccaggctggtctcgaactcctgacctcaggtgatccgccacctcggcctcccaaagtgctgggattacaggcgtgagccatcatgcccggcccaaagtcaacaatttttccaaatctttt

SEQ ID NO: 34209 - DNA, 302 bp, Homo sapiens
ggggggggaccgggcaggaacaatatttttttttttttctgttggcgagattatgggatcactatggggggggggctgaactcaaatgttggacctcaagggatctttcttccacagcctccttaagggctaggattatatgcatgatacaccatgcctattggagaggattacattattttcaaaaggcttattctaagagccattaattgcctttggcctaaataactaaatataaaagtcttgaaacttttttagacaaaattttgggcatgatgatgagagaagggggtttgaaactt

SEQ ID NO: 34210 - DNA, 318 bp, Homo sapiens
ctactatagggcgaattggagctccaccgcggtggcggccgcccggccaggtacaacacttggcaaggtaactaatttctataagtccaggctttctcacctgcaaaattgaaataataatgatattgattgataggtattggctgattttattagggttctctagaaggacagaactaataagatatacgtatatataaaggggaatttattaaggaggattgactcacactatcacaaggtgaagcctcacaataggtccatctgtaagatgaggaacgaggaagccagccggagttcccaaaacctcataagtag

SEQ ID NO: 34211 - DNA, 415 bp, Homo sapiens
ggcgaattgtagctccaccgccgtggcggccgaggtacatatcagttatttatgatatttttttttaattatttcattttttttcacgactttttctgccattgaattagcctttttctcgtgcactggtggtcaagaaatacatgccataataagatggcagttaaacttcatcagtattttttttttttaaataagattatttagccaggcacagtggctcgcacctgtaatctgaacactttgggaaggccaaggcaggaggatcacttgaggccaggagttcaagaccagcctaggcaacataatgagaccctgtctctacagaaaatgaatttgctgggcatggtggcattgtgcctgtaggaagcttaagtgagaggatcacttgagcccaggagttcaagaccagcct

SEQ ID NO: 34212 - DNA, 485 bp, Homo sapiens
tacgactcactatagggcgaattggagctccaccgcggtggcggccgaggtacaaatctttggcctttctcttgacattttcgtatgtcaaaaagcaaaaaaccttcatgtatttcaatctagtgattactttttgcaccataatttgtttttttacaccacaaaaggaggcactttcagtatctgtaaaaggtatttaatcctaaaacatacttacctagagaataattaaaacagaattcaatacaatctagtatctattaggaaattaagagttatcacttctaaaagtcatttgaaagtcaatgatgttatctggtcaatggcaggaaatgggaactggaacaaatataagaacttatgggatttcctacacggagacaaaaaaagatattcctttatgttgtttaaaagtggcagctgctctttctttattccattttaatcaatgaatattgatttaaagttttcctttctatttttcc

SEQ ID NO: 34213 - DNA, 395 bp, Homo sapiens
actactatagggcgaattggagctccaccgcggtggcggccgaggtactttttttttttttttttttttttctaagacatcttgttatagcatctctgcatttattctaattttatctgtgcacagaaccttagcttcaagctccttgaagggtagcatcgtgtcccagcctacactgtcacactcaggagaagcacccagtagatggtggctttgtatttacctacagagtgccactgaggagcacaggccttcaggtctgtagcccatcagctgagccttcgcatcagctcctagaacagtgcctggcttagagcaacacccagaaatcattgttaaatgaaattatccacaagggaggcacctagtgtctacatgatagaaattctttccct

SEQ ID NO: 34214 - DNA, 449 bp, Homo sapiens
tatagggcgaattggagctccaccgcggtggcggccgaggtacttcccatgttaaaagacatttattatcttgttttcctgtcatgggagttccagaaaaagttaaaacagacaatgggccaggttactgtagtaaagcagttcaaaaattcttaaatcagtggaaaattacacatacaataggaattctctataattcccaaggacaggccataattgaaagaactaatagaacactcaaagctcaattggttaaacaaaaaaaaggaaaagacaggagtataacactccccagatgcaacttaatctagcactctatactttaaatgttttaaacatttatagaaatcagaccactacctctgcagaacaacatcttactggtaaaaggaacagcccacatgaaggaaaactgatttggtggaaagataataaaaataaaacatggg

SEQ ID NO: 34215 - DNA, 476 bp, Homo sapiens
gagctccaccgcggtggcggccgcccgggcaggtactttaactcaagtgctggaagacagcaaatcttggaagtttattataaaaaaaaagatatttcggatagattcctttgttgtcatgggcaaaactgtatatccacacaggactgttagactcctagccaataaaatcagactaagtccatagggataaggtaagtgtaaataaatttccattggggaagacagggctcatggcccgtgtatcaaggtctcaagctgagcactggagaactccagggaacactgttcatacaggctatggtgtgaaggaattcccctgtaggtatgccatacttcagtctcttaagaagctgattagcatgaaagactggaagctgattatggacaattcagtttgaattattcctttctattttgctttgaactttcctcatacacttaagacatgagtaaatcacattgaaaaacatttg

SEQ ID NO: 34216 - DNA, 474 bp, Homo sapiens
ctccaccgcggtggcggccgaggtacaaaaccattttttcctacaaatagtttggtgtttgttgttgtttcttttttttgttttgtttttggttttttttttttttgcgttcgcggggttgtaaaagaaaagaaagcagaatgttttatcatggtttttgcttcagcggctttaggacaaattaaaagtcaactctggtgccaaaaaaaaaaaaaaaaaaaaaaaaaaaggttcctgcccgggcggccgctctagaactagtggatcccccgggctgcaggaattcgatatcaagcttatcgataccgtcgacctcgagggggggcccggtacccagcttttgttccctttagtgagggttaattgcgcgcttggcgtaatcatggtcatagctgtttcctgtgtgaaattgttatccgctcacaattccacacaacatacgagccgggagcataaagtgtaaagcctggggtg

SEQ ID NO: 34217 - DNA, 492 bp, Homo sapiens
ggcgaattggagctccaccgcggtggcggccgcccgggcaggtacaaacctggaagaaggacttacttactagtcaaacaaaggcacattgcctaatgaaacgttaactttaatgcgtccaaaggttccatacctccaagttttatgtagtctgagctttttcatactgccaaactgggtatatttaaattcattctgtcttcatataacacaatacacctacctcctaagcaacagaagcatccaacctgcttatcaaatatggctatctactcaaaacgttaaagaatctaagaaaaagaaaggtaactagctccaataacaaaatatagatgttagttaaaatttttttgcttagaatctctttggaaaaacaaaagaaaaaactcattaggatgtttcctctttctatatagaatgataagccctaagaaatgtaggtgttttattttagccttaaactgatatattatcgatgaatgaaaacctact

SEQ ID NO: 34218 - DNA, 403 bp, Homo sapiens
gcgaattgtagctccaccgcggtggcggccgcccgggcaggtactgctcccagtctactgatgttttaggatggtctcgggggataggcccactggaataaactgagtccaatacctgtacacagttatgtttaactgggctctctgaccccggcaggaaggtggcggtgtttaagcgttgcaaactatactggtaatgccgggatgtactcaaagcacgctttggtatctagctaggctaccattccttggctaatggtgtcctttggaatttattgaaatcaactcagcatagggggactttatgattaggttgtgagtaacaattaggttatttgcttcttgggctgacagggctattgctatcagggcctttggacatgggggccagcgtttggaaccc

SEQ ID NO: 34219 - DNA, 448 bp, Homo sapiens
tattactataggccgaattggagtctccaccgcggtggcggccgcccgggcaggtacttagagttttccaagtatgttctaatcacagaagtttctaaatggggccaaaattcagacttgagtatgttctttgaataccttaagaagttacaattagccgggcatggtggcccgtgcctgtagtcccagctacttgagaggctgaggcaggagaatcacttcaacccaggaggtggaggttacagtgagcagagatcgtgccactgcactccagcctgggtgacaagagagacttgtctccaaaaaaaagttacacctaggtgtgaattttggcacaaaggagtgacaaacttatagttaaaagctgaataacttcagtgtggtataaaacgtggtttttaagctatgtttgtgattgctgaaaagaattctagtttacctcaaaatc

SEQ ID NO: 34220 - DNA, 417 bp, Homo sapiens
ctccaccgcggtggcggccgcccgtgcatgtactgtgtccttcatgtcccaactggctgtgtgtggcacctgacagtgctttgtgccactgtggagcaggtgttactccctcatacgaattttaggattattttatttatttcagtgaaaaatgtcaatgaaattttgatagggattgcattgaatctgtagattgtttggggttgtatggacattttaacaatattaattcttccaattcatgaacatgggatgtcttttttttggcacctgatctcagatatgggacagctttctaattatttgtatcttcaatttctttcacaaatgttttattagttttcagcatacagatctttcacttccttggttggatttatttgcaagtatttttttggagctattgtaaatgacatt

SEQ ID NO: 34221 - DNA, 504 bp, Homo sapiens
cactactatagggcgaattggagctccaccgcggtggcggccgcccgggcaggtacttgcccccaggcccagataatttatttaaaaactttttttgtagagacagggtctcactatgttgcccaggctggtctcaaactcctggcctcaaacaatcctctacctcaacccccctaagtgctggcattacaggcatcagctgccatgcctggctacaaatcttaatgttttccccatggcttctttttctggcgttcttttctcaggtaatggaagtgggcagagaatgatcctttccctaggctccagtgtgtaagaattaaagaaagaggaaagaaacacaatggcttgatggtcgaggacaggtttattttaaagaaaacaaacccaagagtggcttctggctgagttagatcagaggcatgctctcttacagactaagagtttttaaggattcagggtgggagaatttaccagaggcttggactgcttctgtgtctcttt

SEQ ID NO: 34222 - DNA, 375 bp, Homo sapiens
ttggagctccaccgcggtggcggccgcccgggcaggtacttgcccccaggcccagataatttatttaaaaactttttttgtagagacagggtctcactatgttgcccaggctggtctcaaactcctggcctcaaacaatcctctacctcaacccccctaagtgctggcattacaggcatcagctgccatgcctggctacaaatacttaaggaggttcccatggctggattgtttggccttcttaggtcagggcatggaagtgggcagagaatgatcctttccctaagctccagtgtgtaagaattaaagaaagaggaaagaaacaccatggcttgatggtcgaggacaggtttattttaaagaaaacaaacccca

SEQ ID NO: 34223 - DNA, 442 bp, Homo sapiens
tacgactactatagggcgaattggagctccaccgcggtggcggccgcccgggcaggtactttttttttttttttttttttttttattctcgtatggcttgaagcaagatgatactaataaaaaccagttgggatttagatgctatcacaagacagagcttctgaaattactgaaattttgccattaaaatccctcaaggaattgtctctatttcacagatgatgttcctttaaaaaaaaagcaaaacaaaatatccatttttcaccttgtgatctctccctttgtgttttgaatattgttaaaatgtagcatggccttagcctggtcatggggcttgatcacctaccctcagtttccctcacagtgacctccacccctgatcctgagaaattgctctggtccacaggcagcctgggcagatgctgtgggtagagtggaggcc

SEQ ID NO: 34224 - DNA, 473 bp, Homo sapiens
ctactatagggcgaattggagctccaccgcggtggcggccgcccgggcaggtacgcggggcaaataaagccttggaattgaagaatgaacaaacattgagagcagatgagatactcccatcagaatccaaacaaaaggactatgaagaaagttcttgggattctgagagtctctgtgagactgtttcacagaaggatgtgtgtttacccaaggctgcgcatcaaaaagaaatagataaaataaatggaaaattagaagggtctcctgttaaagatggtcttctgaaggctaactgcggaatgaaagtttctattccaactaaagccttagaattgatggacatgcaaactttcaaagcagagcctcccgagaagccatctgccttcgagcctgccattgaaatgcaaaagtctgttccaaataaagccttggaattgaagaatgaacaaacattgagagcagatgaagatact

SEQ ID NO: 34225 - DNA, 416 bp, Homo sapiens
agggcgaattggagctccaccgcggtggcggccgcccgggcaggtaccaccacgcccagctaatttttttttggtatttttagtagggacggggtttcaccatgttagccaggatggtctcgatctcctgacctcgtgatccgcctgcctcagcctcccaaagtgttgagattacaggtgtgagccactgcactcagcccaaagaatacttttgatgttcctctttgttcatatttgtttttgatgtcccccttgatcatgttctgtgtttaccctcatggccggcctctccatctcctaggcagcctggcatcctcgctacaacctcattgttgtgggccgatacccagatcctaatttcaaaagttgtacctcggccgctctaaaactagtggatcccccgggctgcaggaatt

SEQ ID NO: 34226 - DNA, 453 bp, Homo sapiens
gggcgaattggagctccaccgcggtggcggccgaggtacgctgggggcgaagttttgtgctggtcgttgtagtagcaagtggccatggggagcctcagcggtctgcgcctggcagcaggaagctgttttaggttatgtgaaagagatgtttcctcatctctaaggcttaccagaagctctgatttgaagagaataaatggattttgcacaaaaccacaggaaagtcccggagctccatcccgcacttacaacagagtgcctttacacaaacctacggattggcagaaaaagatcctcatatggtcaggtcgcttcaaaaaggaagatgaaatcccagagactgtctcgttggagatgcttgatgctgcaaagaacaagatgcgagtgaagatcagctatctaatgattgccctgacggtggtaggatgcatcttcatggttattgagggcaag

SEQ ID NO: 34227 - DNA, 384 bp, Homo sapiens
ggcgaattggagctccaccgcggtggcggccgaggtactttttttttttttttttttttgagaagattgagaagtatatgcaatgtaagtgtattttaaaaagaaaagcaacaggtttgacttgaagctatatttttcttttccgttttttttttttttttttaaaacagagttacactctttttgcccaccctggattgcaatggcgctgtcttggttgacaaaaacctatgcctgccaggtttaagtgattcttctgcctcactttcctgagtaaagaaactgggattatttgtgcgcaccaccgagcccagctaacttttgtttttttagtaaagacaagctatggccatgctggtcaggctggctttaaactactgacct

SEQ ID NO: 34228 - DNA, 503 bp, Homo sapiens
atagggcgaattggagctccaccgcggtggcggccgcccgggcaggtacttttttttttttttttttttgcttgtcaatacttctaacttaagagcaagcaaacatatttcaggtttaattttatggaacaaacactctgcttgtgaattgtccacaatatttccataataactaacacactatcactccatcaggtttcactacacaaagtattgtgaaacggaggtggaaattttttccaggtgtttagacaagtatttaatgaagctgaagcaatatgttctttgagcatttaaaaatatttgagattaatttcaccagatgatttcttaatcagtaaactggcttagataagaaaaagtcagaatattattaatgaacctaatgttctctcatgtttgagatcagccaacaggccacttacttataccctacttgccttaaggagtatgaaagaagtccagctttcttagtctaactggtagtttccaacaactgaacc

SEQ ID NO: 34229 - DNA, 448 bp, Homo sapiens
acgactcactatagggcgaattggagctccaccgcggtggcggccgggcatttctcccagggatctctgtgcttccttttgtgcttcctgtgtgtgtggatatttaaaggggctggaaatgtgcaaaaacatgtcactacttagacattatattgtcatcttgctgtttctagtgatgttaattatctccatttcagcagatgtgtggcctcagatggtaaagtcagcagcctttcttatttctcacctggaaatacatacgaccatttgaggagacaaatggcaaggtgtcagcataccctgaacttgagttgagagctacacacaatattattggtttccgagcatcacaaacaccctctctgtttcttcactgggcacagaattttaatacttatttcagtgggctgttggcaggaacaaatgaagcaatctacataaagtcact

SEQ ID NO: 34230 - DNA, 415 bp, Homo sapiens
gggcgaattggagctccaccgcggtggcggccgaggtacgcgggttgaagtcaacttctatcaactttatgccaggcccgtggctcatgcctgtataatcccagcactttgggaggccgaggcaggcggatcacttgaggtcaggagttcaaaaccagcctggccaagatggtgaaaccccatctctactaaaaatacaaaaaaattagccaggcgtggtggcaggcgcctgtagaatcccagctactcgggaggctgaggcaggagaattgcttgaacctgggaggtggaggtttcagtgagctgagatcgtggcattgcactctaacctgggcaaccaagagtgaaactgtctcaaaaaacaacttttatcaatgtctgcaaaaagaaagtcttctgggatttatagatcaat

SEQ ID NO: 34231 - DNA, 482 bp, Homo sapiens
cgactcactatagggcgaattggagctccaccgcggtggcggccgaggtacccatcttgtcccaagtgccaagctcttcagttgtttctgctacttaagaaagacaccatctaatctgccatatagagagcttaaatggagctgtaaatatttgggggaaagagtttggtagtgttagcctggcctgtcctccactgtattataagtagctgttatctgaaacaattgagaacacaggggaaaaaaagacccaattatgcaccaggaagtccagtgccccatttttggagaaggaaagtgagagggcattgagtttcattgattgggtctccgtggcaggccagctgccccccaggaaggcctggtattcctgtcctctccgtgaacctgcctgaaagggatataggagttattgggtaatcaggacttgtcagcacctcggttatgcaagatggttcaatccgataatgtgaatggaacct

SEQ ID NO: 34232 - DNA, 440 bp, Homo sapiens
acgactactatagggcgaattggagctccaccgcggtggcggccgcccgggcaggtactttttttttttttttttttttttagacagggagatggggtttcaccatgttggccaggctggtttggaactcctgacctcaaaatgatccatccaccttggcttcccaaagtgctgggattacaggtgtgagcgacgatgccttgccaagatatttctgctttcaacatgcttacctgttcaagactccactggaaactagagcttctttaggatggaaatatttgtgatatacatttctaaccacagcatctatgagggaaaaagagaaggaggtatattttaggttagaaataaattcgatattatagactcataccaattttgacctgaagggcaccctggaacttggttccaatccatctcgctttataaatggaagc

SEQ ID NO: 34233 - DNA, 463 bp, Homo sapiens
gaattggagttccaccgcggtggcggccgaggtactggcgcgtgtggctgatgttctgatgccaccatctttcttggaggggacgtgcccgaggagcactgtcagtcttctgctgaccccgcagccccagagcacaccttgtctcgttcagtccagttcacaggagggctgaacagtgggaccaggtcgttctgtgaatttcacacttaatttttctctcttttaaaatctttaacatgaagatggcttttctaaactttaaaaaaaaaaaaaaaaaaaaggtacctgcccgggcggccgctctagaactagtggatccccccgggctgcaggaattcgatatcaagcttatcgataccgtcgacctccagggggggcccggtacccagcttttgttccctttagtgagggttaattgcgcgcttggcgtaatcatggcatagctgtttcctgtgtgaaattg

SEQ ID NO: 34234 - DNA, 428 bp, Homo sapiens
accgcggtggcggccgccgggcggttacttggtattgtattttttataaattatatttttatgtaaagcttagaatttgatggacagggaccttgctgcagtaaataccatctcaattttgtgccactggttcagctgttagcacagtaaaaaaatcatttgtatcaaaggggcaaatgctttattaaggtagtaaaagggaacattacttctgcttttaggaagttactgcaagcacaagcatttgtgcttttaagcaaattaaagtagtaaaagaaaaacttaagtgaaacctttgccatcttcatgttttataatataaagcttacccaacaccagttaagccatggttaacctaaatgcctcatgccccagttcagcaaaaggaggaaaatgtgcctgcctcacagtcatcagtctttttaaat

SEQ ID NO: 34235 - DNA, 506 bp, Homo sapiens
tatagggcgaattggagctccaccgcggtggcggccgaggtacttagggtaagcactaacaatattattcaaaatgttatatagagttcaactgtatacaatagagcatttattaaagtgtgtccaaagcgcttataaataaagcatcttcgaggcaggcggctcacttgaggttaggaggaaagcagactggccaacatggtgaaaccccgtctccactgtggtcccagctacttaggaggctaaggtgggaggatcacttgaggacaagaagttgaggctgcagtgagccaagtgtttgtgcaattgctctccagcctgggtgacagagcgagactctcaggaagccgcagtgttagttgcctctgatttttgacaagcatgggaagatgggggctgttcatacagggcaagcttcaagtgtcagtcaaataaaaaacatccttgcacgtcctttagggaactaccagcaggtcaaataatgacagttctctgggaatggggca

SEQ ID NO: 34236 - DNA, 409 bp, Homo sapiens
tatagggcgaattggagctccaccgcggtggcggccgcccgggcaggtaccagggcagcaacccaatcagtgacatttgggctatccacgcgctgcggatcgtggctaagtatctgaagagggccgtcaacagcactgacaaatgaagaagaagaatgagtctcagggcaccttcctggagtggccctcgccatccagggaccagcgcgttgcctcccccggcgcttttacatcacatgagcagctgacagcgtatttattatgcctttgctgaaacagttgatgagaaatatgtttcccttcagttttcatttagaagacaagggcgtcgtttgaataacttgcctgatttttcttcctaccgagtagcatttctttttttttcaccatatctttccctaaggcagct

SEQ ID NO: 34237 - DNA, 401 bp, Homo sapiens
agggcgaattggagctccaccgcggtggcggccgaggtacttttttttttttttttttttttttttttacttttttaacttctttttaagtagcccaaatgacacaagaccagtattgacacatctcacataaatacaattcttgacagatacacttttttttttactgtgtaacttttttttccaatttagagaaccgcatcctattccatgctgcttacccgcgtacctgggccgctctagaactagtggatcccccgggctgcaggaattcgatatcaagcttatcgataccgtcgacctcgagggggggcccggtacccagcttttgttccctttagtgagggttaattgcgcgcttggcgtaatcatgggcatagctgtttcctgtgggaaattgt

SEQ ID NO: 34238 - DNA, 458 bp, Homo sapiens
cactactatagggcgaattggagctccaccgcggtggcggccgcccgggcaggtactttttttttttttccttagagacatggcctcgctatgtttcccaggctgcagtcagtagctattcattcacaggcacgatcactgtgcactacagccttgaactcctgggctcaaaagcgatcctctcgcctcagcctcaccacatctggctactgtttatatttggtgtaaggacgggatgtttactttctggaaataagttagagttgttcataattgaagttgcagaatgaggaattattgtcaataataaacattaactcaaaatcccttcattaactgtttattgccttagaattaaaaggtgaaatgtatagttaaaaaaatctacacataaactgatgtgcaattccctatacttcacttaaagccctgttgcatcccaggagttaaagtataat

SEQ ID NO: 34239 - DNA, 369 bp, Homo sapiens
attggagctccaccgcggtggcggccgcccgggcaggtacccagtgaaacccaaccttcaggcctaaaacagcctgaaggctgaaagattggactgctggtcccagatgaaaaacacgacccagagggagaactgcccctgtttgtccaccctttcccaactgattctttctgaataatgcccacatgttgcactggaggaatggggtggagtgaccaggaatttgcaccttatgcagggggaggagtctggctcttcagctcatgtgtgggggcctgatatttcaatctgtgaaggggggaggccattggcaggacaccccctaatttgctgaaagtttttttttctttctttttggcccaaataaat

SEQ ID NO: 34240 - DNA, 162 bp, Homo sapiens
gggcgaattggagctccaccgcggtggcggccgcccgggcaggtactaagagaaagtagaagtcttttttgacaaaattcagttttaaagttgagttaaaaactgttgatagatggagatctattttcttctaaagagtgggaaattcatcctctggttttg

SEQ ID NO: 34241 - DNA, 192 bp, Homo sapiens
attggagctccaccgcggtggcggccgcccgggcaggtacacccagtggctcatatttaacttcccccagcttcccaattcaaactggggggaaaaaactaaatcattgggagttacttgccaacttggaagttgatatttctttacttttttcattctaagactttaaagttctctggcatgagtttatct

SEQ ID NO: 34242 - DNA, 259 bp, Homo sapiens
agggcgaattggagctccaccgcggtggcggccgaggtaccaccacgcccagctaatttctatactttttgtggagatgggagtctctccatgttgcccaagctggtctcaaactcctgggctccagtgatctgcctgtcttggcctcccaaagtgctgggattacaggcgtgaaccacgtgcccgtccccaaaaatggttttaaatacatccaacgtatcatcctccctctttaactgcactcattaaattacgtttc

SEQ ID NO: 34243 - DNA, 208 bp, Homo sapiens
actcactatagggcgaattggagctccaccgcggtggcggccgaggtacatttatttgctttgctctgtcaatatgcttgagttgcaaatgtagacattgaaatgatctgaaattccctctgacagagaggtttccaccactgatatacattttctccttgtatgttttagctgtgtgaacaaatacctttctttgtatcacacatta

SEQ ID NO: 34244 - DNA, 475 bp, Homo sapiens
tagggcgaattggagctccaccgcggtggcggccgaggtacaggttattagaatagggaaggaacaccttgggcccaggagtgagtgtttcttcttttacaggtgtaactaaaaagctagttggtctaacttgtgtgtctttgtcctataagcctctgcaggtgtgcgagcaggattgcttctgcaacaatagcctccacccagccacatcttgggaaaagaatggccacttcttggggcacagtctttttcatgctggtggtatcctgtgtttgcagcgctgtctcccacaggaaccagcagacttggtttgagggtatcttcctgtcttccatgtgccccatcaatgtcagcgccagcaccttgtatggaattatgtttgatgcagggagcactggaactcgaattcatgtttacacctttgtgcagaaaatgccaggacagcttcccattctagaaggggaagtttttgatt

SEQ ID NO: 34245 - DNA, 419 bp, Homo sapiens
gcgaatgggagctccaccgcgggggcggccgaggtactttcacacggatgctaaagttattgtgctggccgagttaagggtcaggcatcaaaatggccgctcaagagaatgaagctttctctttgtgcagatgcaacgggtgggatggggtgcacaattatcacagtgctggttgtggtgttacctcgacattctgccttacagctgaggggggatttgtttcgtccctgctaatgaaggtgttaaataaacttggatgctgttattgaagcttaaaaaataaatggaagctgggtgcgatggctcaagcctggaatcccagcgctttgagagaccgagatgggaggattgcttgagctcaagaggtttaagaccagcctagacaacatggcaacaccctggctcttcaggaaattaca

SEQ ID NO: 34246 - DNA, 403 bp, Homo sapiens
ctcactatagggcgaattggagctccaccgcggtggcggccgaggtcccctttttaagggcaaggcttttgttttgggcctatgggtaaaggttaacaaacccctgcccctaaggcatgagaatctaactttaagttgaactctagcactgttctccatgttacctgataagtgtcagagtgtcatcaatgtttcttagacaacccggcttatggtaaaaatgatccctgcctggtcacttccatctgaactgagtatctatgagctattaatgggaatgccatgctttttggcctttcctgagtgcagttgacacttgtaactgcatgttccctgtggcccctgaaagctacaattgttacaagaagaatttggtttctgtggggcattaggctttaagcca

SEQ ID NO: 34247 - DNA, 243 bp, Homo sapiens
ctatagggcgaattggagctccaccgcggtggcggccgaggtacacaaaatccattttccacttaaaggcctgagccaatgcccccaaccagcctatcttacttttattctttatgttagccccatatcgccaagtaggaacatggtccttctgcttagaaaacggaaataatgaactgtatgtttggttgtcattgtttttgaaaagagaataacaactccaaaagacacttcttacattct

SEQ ID NO: 34248 - DNA, 469 bp, Homo sapiens
ctcattatagggcgaattggagctccaccgcggtggcggccgaggtactttttttttttttttttttttttggggaggagaggagcacgtcaaacatcacgtaatatcattactcagccagtcatctgaaaaagcatgataaaacctgaaatcttccaaggccagatccaaacaagccacggcatttaagattaaggctacaccaggcaccgtgctatctcactacagcatgggggagcacaacgttcattaaggattgcagaggctggctttgagtcttaaatcagcatctgacagctgtctgagcccagagaagttatctattatctgggcctggtggtgagcacctgcccgcgtacctgcccgggcggcccgctctagaactagtggatcccccgggctgcaagaattcgatttcaagcttattcgataccgtcgacctttagggggggcccggttcccaactttt

SEQ ID NO: 34249 - DNA, 452 bp, Homo sapiens
ttggaacctccaccgcgggggcggccgccttcttgggtcatcgatgagcctcgccctgtgcctggtcccgcttgtgagggaaggacattagaaaatgaattgatgtgttccttaaaggatgggcaggaaaacagatcctgttgtggatatttatttgaacgggattacagatttgaaatgaagtcacaaagtgagcattaccaatgagaggaaaacagacgagaaaatcttgatggcttcacaagacatgcaacaaacaaaatggaatactgtgatgacatgaggcagccaagctggggaggagataaccacggggcagagggtcaggattttggccctgctgcctaaactgggcgttcataaccaaatcatttcatatttctaaccctcaaaacaaagctgttgtaatatctgatctttacggtttcctttgggcccaacattcttccata

SEQ ID NO: 34250 - DNA, 474 bp, Homo sapiens
ggcgaattggagctccaccgcggtggcggccgcccgggcaggacccacacagtttaagcaaactaaaagaacactgacactttctcagagaacagggatgggaactttctatctgcccattagtatctaccccaagctacgaagacttccattcctcttattaagcattcagcaactacatttagtgcctactatgccagtgatgcaagaatggataagacagtccctacactcaaggataacgcctctagtaggtgagagacaaaccgattaattctgcataagggataagtgctgtatgtgggaagcaatccaatgagggctctgaggatggcaaaggaagggttcctggaggatttacatttaactggtgccttgaaaggtgtgtagaagttggcaagatcaaaagggagtagagtccaggtggagaagagaaaagagcagggcaggctggatggcatggctcacacctgt

SEQ ID NO: 34251 - DNA, 187 bp, Homo sapiens
ggcgaattggagctccaccgcggtggcggccgcccgggcaggtaccaagtgaaagggctgcaggtctgtcatcagacttttcacattagtgtagcctgatagatgcaaatagagacccctccccacttgaagcttccctcctcatcacttcctcaagctaaaaaattatttcgataatcctgatcat

SEQ ID NO: 34252 - DNA, 266 bp, Homo sapiens
agggcgaattggagctccaccgcggtggcggccgaggtactacaggcacacaccaccatgcccagctaatttttttgtattcagtagacacggggttttgccatgttggctaggctggtctcaagctcctgacctcaggtgatccatcgcacccagcctcctttttttatgttgttttttgagacagggtcttgctgtcacccaggctatagcgcagtggtgcattcatagcttaactgcaacctcgaactcctgggctcaagcac

SEQ ID NO: 34253 - DNA, 460 bp, Homo sapiens
ctataggttaattggagctccaccgcggtggcggccgaggtacggcaaagcagtggaatgttttctgttagctgatgttttttaaaaacttaagttccttgtctttctttttctcttaatcaggattccggagtttgaatccacctttgacaattgtccgaaagacgtttgaatcaacagaaaacccagatgacttcttgccctctgtaatgacttgtgtgaactatcttaagttgccggactattcaagcattgagataatgcgtgaaaaactgttgatagcagcaagagaagggcagcagtcgttccatctttcctgattatagcaagaaatgcagtgtctgcctgttacagcaaaagaaacaaatcatgatttcttttctaatgttatcacctgagtcaaggaaacatgttacgccttcttgttgtaggaaaaacggcttgcagattataaagagac

SEQ ID NO: 34254 - DNA, 413 bp, Homo sapiens
tactatagggcgaattggagctccaccgcggtggcggccgaggtacgcgggtgctggaattacggtgtgagccactgcgcccggcccttagtagcatcttttaatggaggtagagttgagatttcagtgactaacaactaaaggtatgaaaggtaggggtttatatgatacatgtgcattttagaaaactgatctaagctttaatgtgaagaacagattgaaatggaagggggagaagactagaagcagaaacattactcatttaagtaatctggaccatgaaactgaaaaaaagtatagggactccaaaagtcataaagaagtgaaagcaggatttggcaattaactgctacgacagggaagagttgaggggagtcaaagaggaaagcaaggtttttgagctggcaaacagt

SEQ ID NO: 34255 - DNA, 272 bp, Homo sapiens
tagggcgaattggagctccaccgcggtggcggccgcccgggcaggtactttttttttttttttttttttttgggagaaggggtcagggagcaccttacctctagtggacaagggccctgagctttacacagccctccgtatttattaggcaaaagagataggagggtgggggggtggaagaaggggtccgttgctcagttcatattttgcttgcagggctgcattcttttgatggcccatttttttacctttgtgccagggtgtgattgtct

SEQ ID NO: 34256 - DNA, 421 bp, Homo sapiens
cgaattggagctccaccgcggtggcggccgaggtacccaatgctgatttgtcatctctctagattctactttttcatattgaaattctttttttagtctattctcttgtagcttttgttacatccaatgatcatttgcctctctccaggcactaccaaactcattactgtggatagttgctgcctttacaggctcataattgacaaattgagagacacatttttttcaattctcaaaacaactagactctttccagcagatttgctaaggcacactacaagaaatgtaaaaatctcacattcttgttctagttaatacatgggagaatattactaatacatacatttgttttctacatttgtggctgccttatacattttcttcacgtttaattccttaaacacataaatatgagtcatga

SEQ ID NO: 34257 - DNA, 347 bp, Homo sapiens
cactatagggcgaattggagctccaccgcggtggcggccgcccgggcaggtaccaaactaaactgacagtccttcgataatatgaaacattaatttacaaggacccgttagggcttcaatgatgctgagtctggaaaagggggggagacccttgggaggactccaggcagctgtgctcccagggctcatgttctctactggattagggatagtcacctctgaaatctccaccctgatgattggaatgaaacggagtgaacatgagcccaactgagagaggagcaggaatgtgtgaaaaacagctgctctccttgtcccagctttgtgattgagccctctgtcttgct

SEQ ID NO: 34258 - DNA, 357 bp, Homo sapiens
agggcgaattggagctccaccgcggtggcggccgaggtactagggaggctgaggtgggaggatccctggagcacaggaggtcaaagccgtagtgagccatgatcacaaccactgcactccagcttgagtgacagagagagaacctgtctcaaaaaaaaaaaaactaagtctaaacttgtagatcatctcatgatagattcatagggaaatgatacagttgaccattgttctggcaggttccatgtgctgagtcctcgggtatatatctcacaggaagtgattctagcttgggtgggtcatctgcgttctctgttggccgagtaatcactggccgggctgcgggcaccaaggggagag

SEQ ID NO: 34259 - DNA, 151 bp, Homo sapiens
ggcgaattggagctccaccgtggtggcggccgaggtactttttttttgtgtttttactagagacggggtttcactgtgttggccaggatagtcttgatctcctgaccttgtgatctgccctccttggcctcgtagctctttttgaccttta

SEQ ID NO: 34260 - DNA, 399 bp, Homo sapiens
ctatagggcgaattggagctccaccgcggtggcggccgaggtgtgatgtttgccccacaacaggggtcatttggcaatgtctggagacatttttattgttatagctgaacaggaaagtgctactggcatctgggaggaggctgctaaacatctcacaatgtgttacccgtcccaaatgtcagtcgtgttgaggctgagaaacatggtttaaatgagtcagaggctggccacagtggcacgtgcctgtagtcccagctactcaggaggctgcggtgggaggattgccttaacccaggagttcaagactagactgggtgatatagcaagacctctgtctcaaataaagaagcaaaaaataaatgaatcagagactagtaaatctacctcctctcaaattta

SEQ ID NO: 34261 - DNA, 440 bp, Homo sapiens
ggcggcgagttgcgagctccaccgcggtggcggccgcccgggcaggtccctggttttaacattataccaaggaaggaggcactgaagagggtaggaaagacagtcttgaatggctgatgccacccctcccctatggaggagtgtggtgctgagagagaatctgtgcttgggagagggagagcacagtgactatggcactttgtattggaactcactgtttgttggtctgtctgtcggaatggaaagcaatgcagggcacaatttcgctggtgccacacagaggctgcatttagaacagccctagccagagaagaattttccatcctagcaattggaacctgagttccagctagcccaccgctgtgggctaaagtgatgtaagctcctaaatagatttgaaagataatctatgccacaaggactacaatttctgggcacat

SEQ ID NO: 34262 - DNA, 478 bp, Homo sapiens
tatagggcgaattggagctccaccgcggtggcggccgaggtacctcagggtctggtggcttctcttctctacccttttcttaagagtcactggtgtcataaagccccagaggatcaactctgtatatcagcctcatgagaactgaccttctcctgacctcattaatgctcttatttaaaagttctctaattaagctttgtattttgatataattagagactcacctgcctgtgtcttaaaaataactctcccagctactatctcacatgatctgtgggcccatcttgtgaagcctagtattaaaaaatatttttgtttttcagtggcgtgcattttaattctcaggccatagctcctaccattgaacagattgaccagtcttttggcgcaacccatcctggaggtaagccaagtccatctgattcctctggtcatcagtggcagttcatagcaataaacctgcccgggcgggcgctct

SEQ ID NO: 34263 - DNA, 335 bp, Homo sapiens
agggcgaattggagctccaccgcggtggcggccgcccgggcaggtacctggttttaacattataccaaggaaggaggcactgaagagggtaggaaagacagtcttgaatggctgatgccacccctcccctatggaggagtgtggtgctgagagagaatctgtgcttgggagagggagagcacagtgactatggcactttgtattggaactcagtgtttgttggtctgtctgtcggaatggaaagcaatgcagggcacaatttcgctggtgcccacagaggctgcatttagaacagccctagccagagaagaatcttccatcctagcaattggaac

SEQ ID NO: 34264 - DNA, 257 bp, Homo sapiens
gcgaattggagctcctccgcggtggcggccgccgtactccctttccctgactcagccttttattgatgaaggcagggatgggatggggagagctcacctggcaaagactccacacaggtgtgcagcacaccctgatggggccagaaaatgtcactgtgagccctatgggtgaaagacacagtgatgggcttctgggcaactaccaagtgtagagatcctgagtgcccatagagttaccaaccacttccctttcctgt

SEQ ID NO: 34265 - DNA, 332 bp, Homo sapiens
ctatacactactatagggcgaattgcgagctccaccgcggtggcggccgcccgggcaggtacaatcagaggagcagaaccactaagataaagattatgtatatatgtattttaagggatttattatagggatctgaccgcatgccattgtgggagctggttaaacagtctctgtaaggctggtgaatttgcatctaatgctggagcttgaagtctgcagggcaagcactctggaagggaagatggatgtaaaagtggggagaacgaggacacatttgtatcccacgagcactagctggaacccacaaggattgactggaaccatctttaaac

SEQ ID NO: 34266 - DNA, 320 bp, Homo sapiens
actactatagggcgaattggagctccaccgcggtggcggccgacgcacctgcaacgctttcttttacttagacatattataaaaattattaaaaagattttcatgtttgaaaacttggggaaaaaagatataacactgtcctaatctcatcacatttaactgactaatatgaatatttttcaacaaaaagcatttgactcttattattatttgaggcataaactaaactgcaaccaaataaaatgttgaatttcgcaaaaagcgggaggctaactagaggacaggaggaataaaccaacctgggcaacaaggcaaagccc

SEQ ID NO: 34267 - DNA, 427 bp, Homo sapiens
ggcgaattggagctccaccgcggtggcggccgcccgggcaggtactatggaattaagaaagaaacttgtgtgttgtctggttttaaaactgttttttaaggcatgtaatgttgcttattttacctttttaattctccctgaataacattttctttcttccactcagtgaacatcccaaaatagaattttacttgaaaaactttacatcagccaaagatgttttgtttgccataaaggaagtaggtttcagagggggtaattccaatacaggtaagtagactttgatacctgggatgtaacataggagagggttatcagtgatcatacatgtaaaacagtattatgctattttatatgagcagatgtgaaatcctcctggaactgaaatcttggctaggtctgcatttgatcatctgagataaatttt

SEQ ID NO: 34268 - DNA, 321 bp, Homo sapiens
agacagtcttgaatgggtgatgccacccctcccctatggaggagtgtggtgctgagagagaatctgtgcttgggagagggagagcacagtgactatggcactttgtattggaactgagtgattgttggtctgtctgtcggaatggaaagcaatgcagggcacaatttcgctggtgcccacagaggctgcatttagaacagccctagccagagaagaattttccatcctagcaattggaacctgagttccagctagcccaccgctgtgggctaaagtgatgtaagctcctaaataaatttgaaggataatttaagccacaag

SEQ ID NO: 34269 - DNA, 390 bp, Homo sapiens
ggcgaattggagctccaccgcggtggcggccgcccgggcaggtacttttttttttttttttctttaggggcacagagctagcaaaagagccaggaatcaacccttattttgtcttattccaaatgatatagtgtttgtattctaccaagtcagataagtaggtggagaaaagacaaagtgacaaaacacaggagggacaaagagattatgccttcatgcttccccgctccttgaaaatgtagtatatgccaagttttcattgattcagtgggtaaggcaagggacactggcctggtgccagttcaaccactctttcagtctcttgtttattcaacaagctgttccactgggtcctggggaagagggaaatatttggggtggcagcccatg

SEQ ID NO: 34270 - DNA, 355 bp, Homo sapiens
ctactatagggcgaattggagctccaccgcggtggcggccgaggtactcagctgaaaacactgtttcagccccctctctggtgacctcagccttctccaggtgtatctcttgatgatcttggagaccagcagccacagctgctgctactcctgcaggagactgtcaggctgtggtggggggcaggggtgttggaggagaagttgaaaatccgtgtgttctctgcccctctgctcctccatcttatcttctggaggagttaaggcaccaagggcaccaagtcaggttggcagttttgctgcccttgcccaagcctccagcaaaactagctggtcccctgctttgctgggtcccagc

SEQ ID NO: 34271 - DNA, 411 bp, Homo sapiens
tcactatagggcgaattggagctccaccgcggtggcggccgaggtactgtggcatggcgcagtgggtgacagatggccacatagcggtcaaaagccatggccagcagcactgtggattccatgccagataaggagtggatggcaaacatctgtagcagacaagcatcaaactggatggtagtggaattgaaccagaagatggccagcattttgggcatggatgaggtggagatgaggatgtcaatgcctgaaagcatgcaaagaaatatatacatgggctcatgcaggctgtgctcagtccgcacaatgtagatgattgtcaagttacctagcacagcaataaggtagagggagcacaatgggaaggccaaccagaactgagcctcttctaaaccagggaggcctattaga

SEQ ID NO: 34272 - DNA, 372 bp, Homo sapiens
ctccaccgcggtggcggaaatgtcagatttttttttaatttaatgaaattgttaatgaggaaaaatttttaatatagtcttgtctaccacacatccccatagatttaaggattttaatagaaagtcatgatgtatgtatttaagccacgttaaaagaaaaaatataactatggaccggtattcagtgaatacagtttcatggtttttaattctttcaaagcacattaaaaatggtgtgctgataaaccccaagtaaattaaccctttttccgtataaatccattttttgttttgaagaggggaaattatacttattgttgattactgaatccttggtgtgaaagcattatcacatatgtatgaactgctact

SEQ ID NO: 34273 - DNA, 333 bp, Homo sapiens
tagggcaattgggtccgacccccaccgcggtggcggccgcccgggcaggcaccaacgcctcccaggcacagccccccaactcttgatttttgatgtcactaagcggccctcaggggtccctgatcgcttctctggctccgagcctggcatcacggcctccctgaccatctctgggctccaggctgaccatgaggctgattattactgctgctcatatacagggagctccagtttaccttatgtctttggaactggggcctaggtcaccgtgctaggtcagcccaaggccaaccccactgtcactctggtcccgccctcctatgaagagctcca

SEQ ID NO: 34274 - DNA, 296 bp, Homo sapiens
ctataaggcgaattggagctccaccgcggtggcggccgaggtacatcaccctgctgagggacatccatgacaaggtcaccacactctacaaaggcagtcaactacatgacacattccgcttctgcctggtcaccgacttgacgatggactccgtgttggccactgtcaaggcattgatctcctccaatttggaccccagcctggtggagcaagtctttctaaataagaccctgaatgcctcattccattggctgggctccacctaccagttggtggacatccatgtgacaaaaatg

SEQ ID NO: 34275 - DNA, 373 bp, Homo sapiens
agggcgaattggagctccaccgcggtggcggccgaggtactttttttttttttttttttttgacggagtttggctctgtcactccagctggagtgcagtggcgtgatcttggctcactacaagttccgactgcctggttcaagcgattatcctgcctcagcctcccaagtagctggaactacaggcacgcaccaccacgcccagctaatttttgtatttttagtagagacgaggtttcaccatgttggccaggatggtctccatctgctgacctaatgatccacccttgttggcctcccaaaatgttgggattacagagtgtgagccactgcacctggccccatgtctcttcttataagggccttaatcccat

SEQ ID NO: 34276 - DNA, 375 bp, Homo sapiens
cgcggtggcggccgcccgggcaggtacaaagatgctacaccggagaaagggggatctggtgatcctaattttgtcaccagctttgaaatctttagctaggcatttcagccctataaaaatccattttctcacttgtaaaaagaagagttgaagttatgtttttccagggcttttttctctgacaaaccgaattgcagaacaattttatgactcaaccaacgtagcagagtccagagagagtttgaaaaaaacaccttacaaaacttataactgaagttctccctccaagggcacttaattttttcaagtgaaagcatgcatgcagattcatccatctgttaccctggaagaggacagagtgaatatactccattt

SEQ ID NO: 34277 - DNA, 393 bp, Homo sapiens
actactatagggcgaattggagctccaccgcggtggcggccgaggtacagttcagcccttctcgactggaggcggttctgcctattccgctccccacctggacacttagcaatgcctggagacatttttgattgttgtaaatggcatctagcaaggatgctgctaaatatcctataatgcacaggacagctgggaccctccccccgccaacaaggaataatccacccaaggtctccatagcactgaggcgccgacagcttgcagtggctcacgcaggaggaaggagcctggcgctttctagacgcctcctctgagaatattacgaatgcactacatgctaggcagaaaggattgtgcaagatcattatgctaatccgttgtaaccctgtgcac

SEQ ID NO: 34278 - DNA, 324 bp, Homo sapiens
ggcgaattggagctccaccgcggtggcggccgaggtacgcggggggcatttccgggaagatggcggcgcacaagtcaggtccggcacatgtttccgcggagcggacccagcaatgacggatgatatcacctcttcttctctggtgagagtctgaggatagagacttttttctcaccatgaatgccaccccagaggtcaagagtcgtgggatgaagtttgctgaggagcagctgctaaagcatggatggactcaaggcaaaggcctcggccgctctagaactcagtggatcccccgggctgcaggaattcgatatcaagcttatc

SEQ ID NO: 34279 - DNA, 122 bp, Homo sapiens
agggcgaattggagctccaccgcggtggcggccgacgtgcacggggcctttctcattgactatgctgctggtggggaaaactgctgtctcatgacagggaagggttagatttcatagagaat

SEQ ID NO: 34280 - DNA, 412 bp, Homo sapiens
ctcactatagggcgaattggagctccaccgcggtggcggccgcccgggcaggtacaccctagcttcttcagaggaaatggaaatatcttgaactaagcagcattccagggaatcccctagcaaaaatacatacaataatcctgggctgggcagttgctcatgcctgtaatcccttgggaggctgaggcaggcagattgtttgagcccaggagttaaagaccagcctgggcaacacggtaaaaccccatctctacaacaaatacaaaattaggctgcacgcctataatcccagcactttgggaggccgaagcagatggatcacctaaggtcatggagttcaagaccagcctgactaacatggtgaaatccctactaaatacaaaaaaaattaccagggcgtggtagcacatgc

SEQ ID NO: 34281 - DNA, 464 bp, Homo sapiens
ggcgaattggagctccaccgcggtggcggccgaggtacaatagcaaaaatcaaagagcacagactgtattttcaagaacagaaaaatctctaatgctgaaagatatagtagaaagcagatttctttggggacattaatcaattagtttataattcattatgaagatttctcttttttattccggggagagtctgctacatttgaagttaatgttccattcacaccattttctgcaaaaagaaaagaatccatgttactctcttttataaataaatgcaagttataatctttatatgtaaagataccttcagaaaagaaaatgtaaaatccaattcactcaagtgaaatttacttaccagtatttaaccaatcacaaaacctggtaacatttttaacacaatgaacggaaagtagcaaattaaaagaaaactactattaaaagcaaaaaaaagtgacagcacaga

SEQ ID NO: 34282 - DNA, 379 bp, Homo sapiens
  misc_feature 197, 198, 266, 323, 332, 333: n = A,T,C or G
tcactatagggcgaatcggagctccaccgcggtggcggccgggcaggtacagaagaactgtatgggtatctgaagaagtatcacatagacctagatccacacttcaacgatatcctgggacaacattcacggaaacgctgggaaaactttatccatagtgagaacagacaccttgtcagccctgaggccctagatcnnttctggacaaacttctgcgataccgactcatcaacagagactgactgccaaagaggctcatggagcancccataccttctacctctgtggtgaaggggagcagtcccggcccttgtgccagaccnaatgctgtnngctttccagtggtctcaaacggcagcaccgaatgaagaaactggaa

SEQ ID NO: 34283 - DNA, 416 bp, Homo sapiens
  misc_feature 190, 380: n = A,T,C or G
gcgaatgggagctccaccgcggtggcggccgaggtcaggtttgggggctctttccagcctctactatgttgcccccttccccaaagcccttacaggggcagaagcacattccccgtgaccctgagtctggcctcatttgggaagtcttctgtggtgtatggatgcctgtgtgtgtgagtgagatggtggngggccacggctatctggctctagcacactcatgggagaccagctctgggaacaacaggatggggtgctgggatgggggtttaagaggtctctgctagatatttctgaactgacctccccaggtgcccaacctggccttgggaagagagtgcctagggcagcggggatggaaacccttgcctgcagcatangtccaggcctcatggccctacaccttgacctcttga

SEQ ID NO: 34284 - DNA, 647 bp, Homo sapiens
acgactcactatagggcgaattggagctccaccgcggtggcggccgggcatttctcccagggatctctgtgcttccttttgtgcttcctgtgtgtgtggatatttaaaggggctggaaatgtgcaaaaacatgtcactacttagacattatattgtcatcttgctgtttctagtgatgttaattatctccatttcagcagatgtgtggcctcagatggtaaagtcagcagcctttcttatttctcacctggaaatacatacgaccattgaggagacaaatggcaaggtgtcagcataccctgaacttgagttgagagctacacacaatattattggtttccgagcatcacaaacaccctctctgtttcttcactgggcacagaattttaatgcttatttcagtgggctgttggcaggaacaaatgaagcaatctacataaagtcactagtgcagtgcctgacacacaccattctcttgaggtcccctctagagatcccacaggtcatatgacttcttggggagcagtggctcacacctgtaatcccagcactttgggaggctgaggcaggtgggtcacctgaggtcaggagttcaagaccagcctggccaatatggtgaaaccccatctctactaaaaatacaaaaa

SEQ ID NO: 34285 - DNA, 558 bp, Homo sapiens
agctccactcgcggtggcggccgaggtacaggaggatggtgcccagatttgtatcaggcactggagaacctcccacctggtccatgcccggctcccggtgagcaccgagacccaaccttgtgcacagccagtcttgtcatcaacaaacagggtagtaaattataaaaaataaaataaggaaatgtagctgggcgtggtggcatgcgcctgtaatcccagctactccggaggctgatgcaggagaatcgcttgaacccaggaggtgaaggttgcagtgaggcgagatcgcgccactgcgctccagcgtggatggcaagagcgaaactccttctcgaaataataaataaaataaaggaaatagggccgggcatggtggctcacgcctgtaattccagcacttttggtggccgaggcgggcagatcacttgaggtcagaggttcgagaccagtctggccaacatggtgaaaccccttctctgctgagaataaacaattagccaggcatggtggcgggagcctgtaatcccagctatttgtggggcggagacacaagaatcg

SEQ ID NO: 34286 - DNA, 532 bp, Homo sapiens
gcgaattggagctccaccgcggtggcggccgcccgggcaggtacaacctttatctttttttcacttcagcaaacaaaaaatgtcaaatgacatgaaaagtggcaagtcttccgacaataaataataaattactttataatttttgcaatgcaagagcaaacaaaaaaagtttccttttttttcctttttatttccatagagagagaaaacagtcattttaaccaataactatacacatctttgggggaaaagttcttggacagacacaagtcaaacacaatcccgagacgcttgtggcaaaatagaggtaaccttgttgcaatgctttataagttggtttttaaatctgaattcaaaaacctttaaagtcgcttcagacttcttgataaaggatggatctcaaaaaaagtggggagggggcaaagtaaaaaataaaccagctacaggacaggccaagagacccaggatttcaattaaccccttgttaaagtcaactttaaacatatcaaaccaatgcagctccaccttcctg

SEQ ID NO: 34287 - DNA, 464 bp, Homo sapiens
actcacttagggcgaattggagctccaccgcggtggcggccgaggtactactatcatctctgtattgtttaacaaaatatttccacatttgacaataaagtcagtatttgaaaggagaaaaaaaaaaaaaaaaaaaaaaaaaaaaaaaaaaaaaaaaaaaaaaaaaaaaaaaaaaaaaaaaaaaaaaaaaaaaaaaaaaaaataaaaaaaaaaaaaaaaaaaaaagggccccccccatttttttggaaaaaaggggggccccccccccaaaaaaactttttttttccccccccccccctttttaacccaaatttttccccccaattctcccccaattttttacccggaaaaaaatttttaaacagaagggccccctccaaatttgcccggggttttttctttatgcaaaaagggggcttttttttaaattgaaaggccccttgcccctaacggggggaattttt

SEQ ID NO: 34288 - DNA, 595 bp, Homo sapiens
tggagctccaccgcggtggcggccgcccgggcaggtactattaaaaaaacagtttatgtgcaaggtgtataagaaaagtaaaacatacctttggtaaaaagattataaaggggcataagaatgtggatttttacctacattaaaaggttaaaaacaattattgttttaaaagtttaagcaagttttaaaacgttaattataaagaaaattctgcgtgtaaacatattagctaaagttaaaaaggtatcatccagtttttctgtgaactggacattaaagtaaaaaatgccacaggtttttcttaaagcatcaacctgctctttaacaaaaattataaaaggttaaaaagagtctataaaatcttaccttatggtcaaacatgaaaaattggataaatatgtctacaaggttttattaaaattcagtttaaaattaataacacactaatataaaggtaaaatttagcttatctggtataaaaatcatacaagaaacattattaaatataaaatggtgtttagctttctttggtctaaaaactaataaaaattggtgctaaaggaaacattcattttactagaggatcataaaagtt

SEQ ID NO: 34289 - DNA, 626 bp, Homo sapiens
  misc_feature 312, 410: n = A,T,C or G
gcgaattggagctccaccgcggtggcggccgggcgcagtggctcacacctgtaatcccagcactttggaaggccgaggtggccggatcacaaggtcaggagttcgagaccaacctgaccaacatggtgaaaccctgtctctactaaaaatacacaaaaaaattggccgggcatggtggcacgcgcctgtaatcccagctactcagaaggctgaggcaggagaatcacttgaacccgggaggcagaggttgcagtgagctgagatcatgccgctgcacttcagcctgggggacagagagagactctgtctcanaaaaaagaaaaaaagatgaggaaataatcaatcttcttctgatcaatttgtccatagttctggaaaagctactgcacagagcaggagaggaaactatntgctctctgtaatactgaaaaactgagagtgctattttaacttgtcaataactaaaaggtacctcggccgctctagaactagtggatcccccgggctgcaggaattcgatatcaagcttatcgataccgtcgacctcgagggggggcccggtacccagcttttgtttcctttaatgagggttaattgcgcgcttggcgtaatcatggtcatagctg

SEQ ID NO: 34290 - DNA, 503 bp, Homo sapiens
  misc_feature 342: n = A,T,C or G
gcgaattggagctccaccgcggtggcggccgcccgggcaggtacgcggggaagggagagagctgtgcgagcgtgggggagagtttttcgttggaatatacgttgcacatttatggcgattctgagtgtgagggcagacttctgccaggctcacacagcattttcgctgacaagtgagcttggaggttctatgtgccataattaacattgccttgaagactcctgggcaccgagactggcctcagaaatagttggctttttttttttaattgcaagcatatttcttttaatgactccagtaaaattaagcatcaagtaaacaagtggaaagtgacctacactntttaacttgtctcactagtgcctaaatgtagtaaaggctgcttaagttttgtatgtagttggattttttggagtccgaaggtatccatctgcagaaattgaggcccaaattgaaattggattcaagtggattctaaatactttgcttatcttgaaaagaga

SEQ ID NO: 34291 - DNA, 496 bp, Homo sapiens
  misc_feature 161: n = A,T,C or G
atacgactcactatagggcgaattggagctccaccgcggtggcggccgtgcgtagactagtcagcttctggtgtgtgactagagctgggcttgtcgtcccctccagcttcagctgtgcatagactggtcagcctccagagtgaccagagcagggctgtcgntcctcagcagcagcttggtctcatctcaggatcggctgagttggatgatctgggtcttgctggctgttccacttgtcctgaactgctggtttcagctgactgtggtggacctatggcatgattcctgcaaatttaacagcagtgggagtggacaagattacagtacctcggccgctctagaactagtggatcccccgggctgcaggaattcgatatcaagcttatcgataccgtcgacctcgagggggggcccggtacccagcttttgttccctttagtgagggttaattgcgcgcttggcgtaatcatggtcatagctgtttccttggtgaaat

SEQ ID NO: 34292 - DNA, 395 bp, Homo sapiens
atacgactcactatagggcgaattggagctccaccgcggtggcggccgcccgggcaggtacgtgaggaagaaacccggaaggggaagaggaaagcaaaggcgtcaggaatggttcttcctcagggtctattgacattcagggacgtggccatagaattctctcaggaggagtggaaatgcctggaccctgctcagaggactctatacagggacgtgatgctggagaattataggaacctggtctccctgggtgaggataacttccctccagaagtggggatgtgcccttgtggatctttgtattttctcttgtttctcttgggagttgcatccttgcttgactaaaatggaagccgtattgattttgaaatgaaaagcttcatgatgtagcatct

SEQ ID NO: 34293 - DNA, 394 bp, Homo sapiens
gtatacgactactatagggcgaattggagctccaccgcggtggcggccgcccgggcaggtactgggaactaaatggttgggggggtggtggggagtcaaaactattttgtgatatgttaaaatacatgaaatccacatttcagtgttaataaataaagttttattggaacagagccatactcattcatttatatatcatctatggttgctttcccattataatgacatagttgagtagttgtgacagaaactatgtctcacactttgggaggccaaggcaggtggatcatgaagtcaggagttcaagaccagcctggccaagatggtgaaaccccgtctctgctaaaattacaaaaattagccaggcgtggtggcgggtgcctgtaatcccagc

SEQ ID NO: 34294 - DNA, 395 bp, Homo sapiens
gtatacgactcactatagggcgaattggagctccaccgcggtggcggccgcccgggcaggtactttcttaaataaatgtggtcatgttatacatcattttaagcatatttctcacttttttttgctaatgacttattgctgtttatatttattttagactatggaaatgatgttagacaaaaatcaaatttagcgattttctgagttcaaaataggttataaagcagcagagacaacacacaacatcaacaatgcatttggcccaggaactgctgatgaacatacagtgccgtgatggctcaagaagttttgcaaaggagactagagccttgaagatgaggagtgcagtggccagtcatcggaaattgataatgaccaattgagaacatcatcga

SEQ ID NO: 34295 - DNA, 565 bp, Homo sapiens
  misc_feature 383, 384, 385, 387, 388: n = A,T,C or G
ctatagggcgaattggagctccaccgcggtggcggccgaggtacgcggtggtgtcgcatgagcatatcgagaccgcttaccgcatctggctggagccctgcattcgtggcgtgtgcagacgaaactgcaaaagaaatccgaattgcttggttggtattggtgagcatatttggtaggagaatagatgaaaatagttttcataacatcgatgatcccaactgtgagaggagaaaaaagaactcatttgtggacctgactaaccttggagccacttgttatgtcaacacatttcttcaagtgtggtttctcaacttggagcttcggcaggcactctacttatgtccaaacacttgtagtgactacatgctgggagacggcatccnnnannaaaaaaaaaaaaaaaaaaaaaggtacctgcccgggcggccgctctaaaactagtggatcccccgggctgcaggaattcgatatcaagcttatcgataccgtcgacctcaagggggggcccggtacccaacttttgttccctttaatgaaggttaattgcgcgcttggcgtaatcatg

SEQ ID NO: 34296 - DNA, 511 bp, Homo sapiens
  misc_feature 63: n = A,T,C or G
gcgtaatacgactcactatagggcgaattggagctccaccgcggtggcggccgaggtactttnttttttttttttttttttttttgccttgtggttcttaactttctaaaggtcattgactccttgcagcatgtgttactagaaatggatattctggctggacacattggcttacgcctataatcccaacacttgcaaggccgaggcgagtggatcagttgaggtggatacattgcaaatagcctagcaatcatgacagatgcacttcatatgttaactgacctaggcgccatcatactcaccctgcttgctttgtggctatcatcaaaatcaccaaccaaaagattcacctttggatttcatcgcttaggctggaatacaatgacaccatcatggctcactgcaccgtcgaactcctgagctctagaaatcttaccctcgcaacctccaaagtggctgggactgcatgcatataccaccatacccagctaattttttaattttttgtacc

SEQ ID NO: 34297 - DNA, 494 bp, Homo sapiens
gcgtaatacgactcactatagggcgaattggagctccaccgcggtggcggccggttttttttgttttttgttttgtttgtttttgagacagagtctcccccgtcccccaggctggagtgtagtggtgctgtcacggctcactgcagcctcaacctgccttcctgccttagtctttggagtagctgggaccacaggtgtgagctgtcacacctggctaagttttaaattttcttgtagagacagattctcgctttgttgccccagctgttctccaacgcctggactcaagcaatcttcctgccttggcctcccaaactgttgggattataggtgtgagccactgtgcctggtctccatgtctgttgtgtttatcactgtgtggctgacatatagtaggtgtttttttgtttgtttgttattttgaaacagagtctcgctctgtcacccaggctcgagtgtagtgttgtgatctcggctcactgcaacctccacct

SEQ ID NO: 34298 - DNA, 347 bp, Homo sapiens
gcgtcatacgactcactatagggcgaattggagctccaccgcggtggctgccgaccggtcaggtactaatgaaaggcactatttccatgaaacctcaacatattttatcttagggttgacatgttatttctcacagtaagaatctgcgctttagtggtttcataattaggtagaagcagatgcggtataaatgtaagacagttataattgttagaggtctatgccatcctccatgttcattacccagatttaaattagcttttcaagaaaaccctgatgataatgcaactatgtgaaaacccaccctagatctgagcctagaaacaggagttttcctatcttactat

SEQ ID NO: 34299 - DNA, 614 bp, Homo sapiens
gcgtaatacgactcactatagggcgaattggagctccaccgcggtggcggccgcccgggcaggtacaggtaaggcagaaggaaggaagggcaaagaaacaattccagggccctggtttctgggatgacaggcttcccaacactcatgccaggactattttccacctcggttcactatgggttttttttctttttttttttaatataatgaatttttaaaatgtgcgtttgttgcccagattattccagaaagagttgaagggaggaaaggtgtgcttggtgtgctggtgattctagcactctctccagcctgatttctagtttgtgtggtgcatccagacagctcacccaggtgcccgggctctttctggtatccagagccaacccatccagggcaggagggtgaagattaggaggggcaaaggttagcctggaggttgcaattaacaagaatcaaaatgggtttcaggattctcacacccaggtgctaatttcagctggtcctgtagaggtgacacgtagtaggacaacatggttttgggggcagtgctggggtgctggtctctgcttttctagggtagaaaggaatcatacattgaaaatgcttaaatcgat

SEQ ID NO: 34300 - DNA, 528 bp, Homo sapiens
  misc_feature 176, 263, 340: n = A,T,C or G
gcgaattggagctccaccgcggtggcggccgcccggcaggtacattttcactcctgctctaaaacttgcctcagtctctcactgtgccttatgcccctcagctgaattctttcttctgagcaggcaggaattgaggttgctgcagacgtgtatgcatttgccaccataacatactntggtgccacatgactaggatatgttctctagtgctaacatgttcgtttacagttcttaggactccctgatagaaaaaaacacataanaacacaaaataacccaaccaaccaaacaaacaaaaaaaacacaggagtttctcccaaaaagaagtctgcagtgtctnttctgttttctctgaaggtatcccagggtgttagatttctgttgttttcccttatgtggcaccgaagttggcaagaagaatgaagtgctgatataaataaatagggaaatgaacagagagagtacctcggccgctctagaactagtggatcccccgggctgcaggaattcgatatcaagcttatcgat

SEQ ID NO: 34301 - DNA, 284 bp, Homo sapiens
  misc_feature 211, 212, 238, 247, 248, 276: n = A,T,C or G
acgactcactatagggcgaattggagctccaccgcggtggcggccgaggtaccatcctgtggtttttgttcaaaaagaaaaagaaaagagggtaaaacagttattataagaattcttagaacagagcaagtaattggcaataatttttttagctctaaaaaagaaaaaaaaaaaaggtggtgtgtgagcccgaaagtttaaccgggcccannccacaaataccctttcagtagggaanatttaatannaaaatttgtggttccattttttatgaanacacaaac

SEQ ID NO: 34302 - DNA, 373 bp, Homo sapiens
gactcactatagggcgaattggagctccaccgcggtggcggccgcccgggcaggtactagaagcaaaatattaatctttgtgattattacttctccaaactagaggagagatatccaaaaaccatttcatgaaaataactagttgattcaggggtatgaaaatcagtcaaactggatatggaattattatcttcgaaggaaccagaaaaccaatcaaatatcttgctttctagatgacagtgccaagatcatattcactgagcaagaaacaggtaacagtgactaggttacaggctgaaaataattaggtacaaaatgtgatatttgaggtgcttgatggctgaaccaaaaaaaacacacacacacacacaca

SEQ ID NO: 34303 - DNA, 631 bp, Homo sapiens
tacgactcactatagggcgaattggagctccaccgcggtggcggccgcccgggcaggtacatgcagattaatgttgttttcatgcctgcaaacacaacatccaatctgcagcccatggatcaaggagtaattttgactttcaagtcttatcaagaaacacatttcataacactatgtatggctgccacagataatgactcctctgatgaatctgggcaaagtaaacaaaaagccttctaaaaaagattcatcggccaggtgtggtggcttacacctgtaatcccagcactttgggaggctgaggtgggcagatcacctgaggtcaggagtttgaggccagcctggccaacatggtgaaatgccatctctactaaaaaatgcaaaaatcagctgggcatggtggcgcatacctgtaatcccagctactcaggaggctgaggcagaattgcttatacccaggaggtggaggttgcagtgagccaagattgtgccgctgcactccagcctgggtaacagagcaagaccctgtctccccctaaaaaagattcatcattctacatgtcattaagaacatttttgattcatgggaggaggtctcaagatatcaacattaacagaagtttgaaagaat

SEQ ID NO: 34304 - DNA, 450 bp, Homo sapiens
tatacgactactatatggcgaattggagctccaccgcggtggcggccgcccgggcaggactcaccgtttctcttaggtaaagagctaagagtggaattcctgggttatgggatagatatatgtttaacttggtaggaaattgctaatttttcaaagtgtttatatcattttacacctccattaggaaagtatgagtgatcatttctcatctcaccaacatttggtattgtcaggtgggtttttttttttttcatttaattttggggaattctaatttatctgttttttgttgttgatgctgctgttgttgctgctgctggtgtatttgatattggatctaagaaattgttggctaatccaaagtcacgaggatttacacctgtgtatactcctagacgtggtatagctttatctcttacatttaggtgtatgaccccttggagttaactt

SEQ ID NO: 34305 - DNA, 538 bp, Homo sapiens
attggagctccaccgcggtggcggccgaggtactttttttttttttttttttttttcgtaaaaccgtagttcttgtcctgctttcctggcttcctccaactgcctcagggccattcgtagctcttgagagacaattcctggtgagtcccgctccttcatgatccagtccagggccatgtggctgcgcatcttttcatctagagaatactgagaatagtaggagatgacttcctgtcgggaacactttgtttcacgaagggcttttaggcttccattccagtgcaatagttggaagatggtcatcagctcctgaaactccagcatagtcttccccatgtttgactccagcatgtagtgataggccccaacactggtgctggggtcatctgcatcatctaaggtgccgctggtggaggctactgcttcctgaacactttccataatgaattccttggtgatcctgcgagagggcagctcattgaagagggagttgatcaggaccactttagctgctctagaactagtggatcccccgggc

SEQ ID NO: 34306 - DNA, 614 bp, Homo sapiens
gtatacgactcactatagggcgaattggagctccaccgcggtggcggccgaggtactgagtataaaacaatataaaacaatatgagaaggtctctctcttccctcaagagtgtatgactttgctgcccaggatgatcttgaactcctggcctcaagctattaatttcttcccaactcagcctcccaaagtgctgggattacaggcatgaaccatagcgcccagcttaacaggatttttcagagagaaaaagttttttaattttaatgaaatccaccaatttatctattttttcttttacggcatgtgcttttggtgtaatgtctaaaaactatacctacgcctaggttgtaaagatagtctgttttcagttttatagctttccattttacatttagatatatgatccattttgagttaagtttgtattacatgtaaggttggggttcctttgttttggtctttgacaaatggaagtccacaacatttattgaaactcttcttcctccattggttataagataaatccgttggccatacttctgaatgtctatttatggattccctatcttattttattgatgtgtatttttatctctcctccatggatcccgcg

SEQ ID NO: 34307 - DNA, 635 bp, Homo sapiens
tacgactcactatagggcgtattggagctccaccgcggtggcggccgaggtaccatgaccctaatgttaatggaggaacagaattagaacctgttgaagggaatccatatagacgcatttggaaaataagttgctggagaatggcagaagatgagctttttaatagatacgagagagcaatttatgcagctttaagtgggaatcttaagcagctgcttcctgtctgtgacacctgtgaagacacagtttgggcctacttccgggtgatggtggacagtctggtagaacaagagatccagacatcagtagcaactctggatgaaactgaagaactccctagagaatatctgggagcaaactggacgttagaaaaggtttttgaggaacttcaagctactgacaaaaagagagttctggaagagaatcaagaacattatcatatagttcaaaagtttcttatcctgggagacattgatggtttgatggatgagtttagcaaatggctttccaaaagcagaaacaatctacctggacacctgcttcgctttatgactcaccttattttgtttttccgtacccgcccgggcggtcgctctagaactagtggatcccccgggctgcaggaattcgatatc

SEQ ID NO: 34308 - DNA, 655 bp, Homo sapiens
cgactcactatagggcgaattggagctccaccgcggtggcggccgaggtaccagttttgtgctggttggcctcctgccaggaggtgacgctttcaagggagcaacagctgtggtagcataggaagaatcaggtggtgagcagggccctagaactcacaagagaatatgacctttgtcttcagctaccagggtgggtagaggaggaccatcaggttggggcagggctaggtgcgtctgagttcagactctctatgggcaggtcttgctgtggctgctgtaggggatgggggtggggttcccaggtcactagagttgtgtgcctaggaagattatggctacctctgctgagtcacgcatgttgtcagggaagtgggggaaagctggcagtcacaggcctcacccagctgccatgcaaactgaagggccagtcttacttccaccatggcccccaaaactgttgtgcccgagcgagttagaaaaatgccacactttgagatgaataaagagtcctttattagcccgcgaccgagagatggctaacgctcaaaattctctcggccccgaggaaggggcttaacttttatatcttggtttaagaaggggaggcgggggtctagttaaaacaattttacatgagttaagtacctgcccgggc

SEQ ID NO: 34309 - DNA, 681 bp, Homo sapiens
  misc_feature 11: n = A,T,C or G
gactactatanggcgaattggagctccaccgcggtggcggccgcccgggcaggtaccatgaaatacatatatttcataaggttcagttacaaaatggattgtttcaaatggcaatttcttacactaacctgattatgaaaaaaagaagtctgtatcatctgcttccaagtctgttatgtccaaatatattttaattatgcatttattttgctacttttataaatattagagatttcaccttaaattatttttgtaactagttctagaacatgttttccaattattatttttctaatggagacgtataattgacctatgtttatgcatatatgttctctacacagtgaaactttttttaaaaagaatagtaaagaaaatgcggaagctctggctctccaaggcaaagtcaaaaaaaaaagcggggggggatgcgaggaacattttattacacctcctgattttcactccttgagttttattttctccccttgtttatttgtttaatgctagaaactgtattcctaagagagcatacctctttcaggtgagcatgataattggaagattttgatacttagagtatgaacatataattaagaagtgattacctaataaagataacaatgtgactattttaattattttggtggccgggagttggttttacatcacccaaaaaaa

SEQ ID NO: 34310 - DNA, 661 bp, Homo sapiens
gtatacgactcactatagggcgaattggagctccaccgcggtggcggccgaggtaccagctaacgcatctgggaggcaacaaaacaatactctcctgaggttaatgtggaccaaaaactagatttcatataaaagagtttattccttctacttgaggtgtgacatgaaggaaagtaatggaaataattctgccctcccattctcaagggccagggggaattcaaatattgaacggaagtgattttggaattgcatggaattctcactgccatcccaaagaaatgctgatcttgtcactcttacctgtttcattccctgggggcagaacaaaaggacgcactccaaagatcggcatgaaccaagaactgggtttcatataaaatattttattctgtcctcttgagatgtgacatgagaaaagtattgagaatacttctatcacctcatcttcaagaatccgtaggaattctcccatggtggactttacggttaacctgaacaggtcttggaaaaaggactttaaacattctcctgttctgtggaataagtatacttttttctggacatacaccttgtcagtgagttccatgtgatactagagttgcatagagttttaacctttacgccaatgaagatctgaggcaaacattgcccctttttt

SEQ ID NO: 34311 - DNA, 550 bp, Homo sapiens
tacgactcactatagggcgaattggagctccaccgcggtggcggccgcccgggcaggtaccgtgttatgcaaattaagcacttttcttctaaattcacatgaacttttagagacgtagactatgttattgaagtaactcatcctaagtgtctgtagtgattggagatattcttgcttatcaaattgaagtatttataagtgagtgacgtgatgtctgagatctatcttaaagtaatccagtagggcaaagataacttgagattggccagttcttgataatttttgaagtaggctgatgagtacgcggggcttccttttcgatccgccatctgcggtggagccgccaccaaaatgcagattttcgtgaaaacccttacggggaagaccatcaccctcgaggttgaaccctcggatacgatagaaaatgtaaaggccaagatccaggataaggaaggaattcctcctgatcagcagagactgatctttgctggcaagtagctggaagatggacgtacctcggccgctctaaaactagtggatcccccgggct

SEQ ID NO: 34312 - DNA, 500 bp, Homo sapiens
  misc_feature 430: n = A,T,C or G
gccgaggtcctaacaaatgcagtagccaacaagattaccatgcaatcattaaggagaaccaaagtaagagagccactcaaaccagattttgaacgctactaaaattaaagtagttctttgatgaatataatgagtagggaaaggattctttgtaatagtgatacctctgtggtaagagaagggtggtatgtgagttttagtctacagattatggcaaattcagtgacaacaatcaaatggtctaagattgacagtagcacagttttactctgtgaaggtaatgttcaggacaaatttcaagaaaactagaaaaccattctttacagctgaaatctttccctaaccattgttatttccacttttaagtcctcaagagatgagaaaagggaggtaaggcttccttatacatttcctgcacaatgaaacattnttcctcctccaggcaaagattcaagcagaactggcaaatatcttatcttgctcttctcaataataataat

SEQ ID NO: 34313 - DNA, 545 bp, Homo sapiens
agctccaccgcggtggcggccgcccgggcaggtacttttatttcatgtaaactgcccctctgaggatttgggcatattttttggaaggtgcctaatgcttaggatagtctctagggtgatgcactgcacctgcttccttcccttcatgcggctgacccatttctgttgaacagatgtctcctgtgtgatgcccctgactcttacatttatctttctaaatcattttctgaagctgacttgctctagggtgcttcatcaccacttccatcttgcatcaccttataactgttctgtcttgttctctcccagcaatttattttaaaacaagggctagcttcaagcatgactgttaatggctcctctgtgacaaaacacaagttggaccaaggagaaagccctttggagaaactggaccctagttcagtttagatctcaaatataggctgaaatctcttaccaaagtgcgttccagataaaaatgagacttaaaagacagactggtctaatatgctcactggtcatcacattcagcttattcttacgtg

SEQ ID NO: 34314 - DNA, 558 bp, Homo sapiens
  misc_feature 453: n = A,T,C or G
actatagggcgaattggagctccaccgcggtggcggccgaggtaccctaaaacctagtatctttttctcttctatggaaaatccgaaggtctaaacttgacttttttgaggtcttctcaacttgactacagttgtgctcataattgtccttgcctttccagcttaattattttaaggaacaaatgaaaactctgggctgggtggagtggctcatacctgtaatcccagcactttgggaggctacggtgggcagatcatctgaggccaggagttcgagacctgcctggccaacatggcaacaccccgtctctaataaaaatataaaaattagcctggcatggtagcatgcgcctatagtcccagctgctcaggaggctgaggcatgagaatcgcttgaacctaggaggtggaggttgcattcaactgagatcataccacttcattccagcctgngcgacagagcaagactctgtctcaaaaaaaaaaaaaaggaaaactctgtgatggacatttgtttagtaaatcccttcagtatttatccctcctttccccacagca

SEQ ID NO: 34315 - DNA, 512 bp, Homo sapiens
  misc_feature 360, 463: n = A,T,C or G
ctcatatactatagggcgaattggagctccaccgcggtggcggccgcccgggcaggtacaattgttttagaagataatttgtttttctctcttcagtttcgcatattactaaagacaaatcatggtaggattggtttgtttattatacttggcctaactatttgtatacaatgcagcaagaatgattattttttacttaggcttttaagtaggctctgatggaactttgttccatagcaggaatctcagataagactttgtaaaacccgtaaaacccagccgagccatggatttatgccattaaatacccatgagttgggtgaaatttcctctccttttgagggcccaagataaacctgnggcgtctgcacttgtcaaaaagtgatattctttacttacacagtcagaaaccctgttcagggactgtgtatacagaatatgaggccagtttttccaagggctntattggctccgtaagtcaagtttgattccttataaggaaagcacatgat

SEQ ID NO: 34316 - DNA, 529 bp, Homo sapiens
  misc_feature 90: n = A,T,C or G
gactcactatagggcgaattggagctccaccgcggtggcggccgaggtacttttttttttttttttttgctcccagtggcgggacacggnggcttatttttactcttatttatttatttatttttggagactgagtctcactctatcacccaggctggagtgcagtggtgcgatcttggctcactgcaacctccacctcctgggttcaagcgattctcctgcctcagcctcccaagtagctgggattacaggcgcatgccaccacactcggctaatttatttttacaagcagataaaggtttcttttattttaatggctgatctatgtaatcacggaggccagtatgtacattagttccgtccggaaaggcggagacagctcaaagcaagaccccctattgggggcttcgaagtaacaggtaggtgagagacagatggttgcattcttttgagtttctgataagtctttccaaaggaggcaatcagaatatgcatctgtctctgtgagcaagtggatgacttgaataga

SEQ ID NO: 34317 - DNA, 530 bp, Homo sapiens
gaattggagctccaccgcggtggcggccgcacaacaggagtgagtggcaggtgagtgagcatcaccacccgagctctgcctcctatcagatcagtggcgacattagattctcataggagcacgaaccctattgtgaaccgcacacacaaggccagctccttatgagactctcatgcctgatgatctgtcactgtctcccatcacccacagatgggaccatctagttgcaggaaaacaagctcagggttcccactgattctacatgatggtgagttgtagaattagttcattatgtattacaatgtaataataataaagtgcacaataaatgtaatgcacttgaatcatcctgaaaccacctccacccccagcctggtctatggaaaaactgtattccatgaaaccggttcctggtacctcggccgctctagaactagtggatcccccgggctgcaggaattcgatatcaagcttatcgataccgtcgacctcgagggggggcccggtacccagcttttggtccctttagt

SEQ ID NO: 34318 - DNA, 175 bp, Homo sapiens
attggagctccaccgcggtggcggccgcccgggccggtacgcgggggggcttggaagcagctctctcctccttccccgctgcttataaacctcagccctgaggctccagctcactctaccccatctccttgccgggtcagccctgacaaaggttcaactagccccttgaggacaa

SEQ ID NO: 34319 - DNA, 585 bp, Homo sapiens
tacgactcactatagggcgaattggagctccaccgcggtggcggccgaggtacatctacttaaaggactattatgtggaataatacatactaatgaagtattacttgatttaaagactacaataaaaccaaacatgcttataacattaagaaaaacaataaagatacatgattgaaaccaagttgaaaaatagcatatgccttggaggaaatgtgctcaaattactaatgatttagtgttgtccctactttctctctcttttttctttcttttttttttattatggttagctgtcacatacaactttttttttttttgagatggggtctcactctgtcaccaggctggagtgcagtggtgcgatctcggctcactgcaacctccacatcccatgttgaagtaattcttctgcctcagcctcccgagtagctgggactagaggaacatgccaccatgactggctacttttctgtattttttagtagagacagagtttcaccatgttggccaggatggtctcgatctcctgacctcgtgatccacccgcctcagcctcccaaagtgttgggattacaggtgtgaacc

SEQ ID NO: 34320 - DNA, 436 bp, Homo sapiens
actactatagggcgaattggagctccaccgcggtggcggccgaggtacttttttttttttttttttttggatccagcgctggctaaaaaatgtcacgttaccctttttttcctttttgtggagatgggggcctcactatgttgcccaggctggtctcgaattcctgggctcaagtgaccctcctgcctctgcctcactgagtgctgggattacaggtgtgcgtcaccacacactatgcaaagaattttcttaacgaacccaaccacgtaaacagcattcagttcaacaaacagaacataaccagtccctagaagccccttttacatctcctccatcactataccctgcatatatatactatacatatacagtatatacatatacagcatatacatgtatacagtatatacaatatacatatacagcacatacgaga

SEQ ID NO: 34321 - DNA, 402 bp, Homo sapiens
tatagggcgaattggagctccaccgcggtggcggccgaggtaccactgtgatgcactagagccccatgctcaatcttctttttcatgtcataaatgtgaattgtttcatctttgctcccagtgaccacaaaacgactatttacagctactgctgacaaggaggcagtgtgagcatggtgagtgaagtcagccacaagagtccattgctgttggggagcttggttgttggagacgtgagtcttgccgaagatcccggccgctctagaactagtggatcccccgggctgcaggaattcgatatcaagcttatcgataccgtcgacctcgagggggggcccggtacccagcttttgttccctttagtgagggttaattgcgcgcttggcgtaatcatggtcatag

SEQ ID NO: 34322 - DNA, 563 bp, Homo sapiens
  misc_feature 10: n = A,T,C or G
actactatanggcgaattggagctccaccgcggtggcggccgcccgggcaggtacttttttttttttttttttttttcctggggggtttgtttgcttgtttccttgccagcttcacattttacagattctcataataattctaagaatagctctaatatggtttggctgccccacccaaatctcatcttgaattgtaactcccacaattcccatgtgtcatgggaggaaccttatgggaggtgattgaattatggagacaggtcttttctgcgctgttctcatgatagtgagatcagtctcataagatctgatggctttaaaaatgggagcttccctgcacaagctctctctctctctttgtctgctgccattcatgtaagacatgacttgctcctccttgccttctgccatgatttgaggcctccccagccatgtggaatggtaagtccattaaacctctttctttcataaattgcccagtctcagatatgtctttaccagcagcatgaaaaaggactaatacaaattccatcttgaatttgacaaccagagtaacaattac

SEQ ID NO: 34323 - DNA, 167 bp, Homo sapiens
ctactatagggcgaattggagctccaccgcggtggcggccgcccgggcaggtacttttttttttttttttttttgtccaggccacttttatttaaacagaagcagcggccccacagccacggggacatgtcttccagacagtagacacagtgcctgtggctgtaaga

SEQ ID NO: 34324 - DNA, 189 bp, Homo sapiens
ctatcactactatagggcgaattggagctccaccgcggtggcggccgcccgggcaggtaccatgagacactattctctcatgaaatagttttggcactcttgtagaaaatcagtaagccacagatgtatgagtttatttctagactcttaattctattccattgatctatatatttatccttctgacac

SEQ ID NO: 34325 - DNA, 185 bp, Homo sapiens
actactatagggcgaattggagctccaccgcggtggcggccgcccgggcaggtacagacagaattaaagacctggagaaacagttcgtaaagcctgatggtgagaatagagctcgcttccttccagggaaagatctgaccgaaaaagaaatgatccaaaaattagacaagctggaactacaactg

SEQ ID NO: 34326 - DNA, 425 bp, Homo sapiens
tatagggcgaattggagctccaccgcggtggccggccgcccgggcaggtaccactcagaagccttcactgtcaacttcggggacaccgaagaggccaagaaacagatcaacgattacgtggagaagggtacattggacatcctggactgattctgtaattttcgtatcttttttctcccatgttccctttatttgtcttttggttctgctttttgggagattttcttaacttgatctacctgaggctcagtcctcatctgtaaaatgctgataaaaggacctaccacctagcgttgctgtgaggtgtcagtgaaataaaatgtaaaatgcttagcacagtgaactttaataaatggtagttgtggttgcacataaaaaaaaaaaaaaaaaaaaggaaaaaaaaaaaaaaaaaaaaaaaaaaaaaa

SEQ ID NO: 34327 - DNA, 622 bp, Homo sapiens
acgactcactatagggcgaattggagctccaccgcggtggcggccgcccgggcaggtacagaaaattagcaagagacattttctgcattgtgagaaatcaacatagacaccttaaagacccctttgagagtgtggctttttgaacttttcagattttgctcagtgacctgctaacacttacgtgagaggctccaggtgtaaatagaatctaatggcagaatctgtaagtgtaaacaagcatcttaggagtgagagatcaagaccacaaaatgtccagagctatgaccacagctatacctacccataaaatacgatactggagtagggtatttttgtctttttttcttacctaagagctagctaatcaggacaggtgatgcaggttctggagctctaccagggcagttctattttctttttttgagacagagtctcactgtcgccctgggctggagcgcggtggcacgatcttggtgcactgcaagctccgcctcccgggttcatgtcattctccctcagctacttgggaggctgaggcaggagaatcgcttggaggttgcagtgagctgagattgtgccattgcactccagcctgggcgacaagagcgaaactccattttac

SEQ ID NO: 34328 - DNA, 507 bp, Homo sapiens
  misc_feature 11, 19: n = A,T,C or G
actcactatanggcgaatnggagctccaccgcggtggcggccgcccgggcaggtactcaaagacgaatcatgaaaaagaaaaaaaactttatttcaaacaggttcagtgatatatgtgtgtgctacagcaaaggctggttgtggcaaagtttcatttcaaactgtatgatgtggcgctgggcaaggtggctcacgcctgtaatcccagcactttgtgaggccgaggtgggctgatcaccctgaggtcaggagagaccggcctagccaacatgctgaaaccccgtctctactaataatacaaaaattagccaagtgtggtggcgcgcacctgtaatctcagctactcgggaggctgaggcaggagaatcgcttgaacccggggggcagaggttgcagatcacgccactgcactccagcctgtgtgacagagccagactcaaaaacaaaacaaaataaaacaaacaaaaaaacagaactgcatgatgtataattttgacattatgtggg

SEQ ID NO: 34329 - DNA, 459 bp, Homo sapiens
cactactatagggcgaattggagctccaccgcggtggcggccgaggtaccggccctccaagtagtgtttgcgaatacacgtcctgttgtgaaagaggtgaggagaaaggagtaggaaggctcagaggacataacaggcaaaaagaaacaagagaggtaaataaaaagaattaatctaatggcttcacccggcttaggcgcagttttaaggggcctgacccaggcttcgggacccatgtttctagttgggctctgttggcctttttgttgtgggagtgatgaatccaagcaggaattccatccaccttcagaaccgttggcgtcgtgaggatgatggtgtgaggtcccttccaagcaggagtgagtccttctttctggaactttttaacaaacactaggtttccctggcttgaaacaatggcagggcccctgttggtcaggaactggattggaatgagct

SEQ ID NO: 34330 - DNA, 322 bp, Homo sapiens
ggcgaattggagctccaccgcggtggcggccgaggtactttggtatgtttttgtcttgaaaagacggttttctagctagaaattcggggcccataaggtcaaggctccagagatccccttctcatcatccttcagttgtctgaggagacagaggatcacatgtgtcacagtgagtgctgtttccccagaatctgcagtcttaagctctcctgctgacgcacacagccagctctctgcttcatattcatgtgacccactgtgaagtgacaggcagttgccaattctgttatataagaagcagctttgtccatgcaacttttga

SEQ ID NO: 34331 - DNA, 329 bp, Homo sapiens
gactactatagggcgaattggagctccaccgcggtggcggccgcccgggcaggtacttttttttttttttttttttttttttgatttttttatttttatttcgtagaaacggaggtccagccaagttccccaggctggtctcgaactcttggcctcaagtgatcctccatgcctgggctggaaaacataaccttatgggaaagttcctaaaaatggttgaagaacaagactgaaggctagaatatgaaagcttaaattctgattctgccccttcctagttgcatattcctgaacaaatattttcaactggtatttctaaaattgtgatc

SEQ ID NO: 34332 - DNA, 440 bp, Homo sapiens
cccgggcaggtacagttcacattaatattcacatcccactttctgctacttctgtcagctatactctggagaaaaatacaaagaatggacttacacgctgggccaaggaaatagaaaatggtgtttatttgattagtggacaagttaaagatgaagattgtgacctatttgaaaggacagaaaaaaatcttctagagggaaatactcaagcaactagtcattcttttgatgtcagagtgctaacgcagttgctcctgaattcagaccacagatccacagccacagtccagatatgtagcggttctgtaaaccttaagggtgctgtgaaatgcagagcttatatccacagcagtaaacccaaagttaaagatgctgtgcaggcagtaaagagggatatattgaacacagttgctgatcgttgggaaatgctatttgaggat

SEQ ID NO: 34333 - DNA, 320 bp, Homo sapiens
gagctccaccgcggtggcggccgcccgggcaggtacatgtaatttgatctttatcaagggcatatcctgggaatcagggagaacttctgttgcctcatagacacgacctaacccccaaggcaccctgcgaagaaggggaaggcttgttttgcggtatttgggaaagcatgccaattctctctcttgaataagggcaccatgcctgggggcacactactttaatctctgaccagggtttcatattctgtcacttctcatttatcaactgaaacccagatgtcccttgagggcactttttgttcgagaaaccatggcatttt

SEQ ID NO: 34334 - DNA, 464 bp, Homo sapiens
cgactcctatagggcgaattggagctccaccgcggtggcggccgcccgggcaggtaccgaggtcattttgcttcctatagactgccaccttttggcaaaagctgttctaactccatctcagcatttacaattccatacctggtggtcagaggaggcccgcctgcaggctcagctaaatcgggctgatggcattccaattactcaggctcagctcacaggctccgataattactctgatactactgctcatttaggctttgatgctctcaccacggaacaagtaacaaaggtgtgtatgagagcttgggataaattacgcaccccaggccaagcttctgtttcttttactattgttaaacagggtcacaatgaattatatcttgattttttagctaaattacaagatgctgttgaaaaatctgtctctgatgagcacactcaaggtattcttcttcatatgttag

SEQ ID NO: 34335 - DNA, 441 bp, Homo sapiens
gcgaattggagctccaccgcggtggcggccgcccgggcaggtactttttttttttttttttttttgttgtgtgactgtcttatttctgggattccagatgcccatgataagagtgagttgctccttgcctgttcaactcacccactccacaggagtcactgaaggccatgaacaagtcccagtgtgcagtagccctgtgcagggttcccagcttcctcccctttcagcccagcatctgtttcttccttctgcccactctcaatgcctcccttctgaagatctgctaggagtgtacctcggccgctctagaactagtggatcccccgggctgcaggaattcgatatcaagcttatcgataccgtcgacctcgagggggggcccggtacccagcttttgttcccttttagtgagggttaattgcgcgcttggcgtaatcatgg

SEQ ID NO: 34336 - DNA, 418 bp, Homo sapiens
ggcgaattggagctccaccgcggtggcggccgcccgggcaggtacaagtatactccgactctataaacttactcttctttaaagcagatcatcctatttatcataagattattaaaaatgtatacctttgcttttatttgccataaaaaaagctttctttggaataaaatagatttttatccaaagatgcagaactgttttcaagataaatccaatctgatcaatttgacagattaagactctcttcaatagtaattcctcaaattatttaaataatttatgaaacagtaaaggcttaaaatatgaattacatagccttaaaagttctagatccttcatggattttatttttggtttattattgcaggaaaattacatacaaatcttttgagaaaaataacaaaacccagactttttt

SEQ ID NO: 34337 - DNA, 451 bp, Homo sapiens
ctactatagggcgaattggagctccaccgcggtggcggccgaggtacagttattaaaaataaaaactcgcattttaggattagggaagtctggaaaaaaatttttttaaacttggagatcacatattgaatagctgtcaaaattcaaactgactagttttgaagaacttcaaaaacgtgttcaaatgaataaagaacaaaaatgatcaaaagaaacccatagctgcctaagagtcttaaaaattattaatgtgacactctcatctctcatcaagtgtatccaaaccacttctcatttgctctttccatttaaagactcacagtagcttcactacacatatatttatactgaacatgtacctgcccgggcggccgctctagaactagtggatcccccgggctgcaggaattcgatatcaagcttatcgataccgtcgaccttaaaggggggc

SEQ ID NO: 34338 - DNA, 284 bp, Homo sapiens
tacgactcactatagggcgaattggagctccaccgcggtggcggccgaggtaccctgctctgcaaatcctagccatttcagccttctttgaaccccaatctgcctcctaaattcagcaagatcgccaggcagaaagttcatcctagcgctcatccctttccagtctactaaggaaatgcttttattatcactctatagtatatcgtattagtcaccagtacaacaaatttagattttcagaagtgtacaacatttatttcaactaaatattaaagggctctact

SEQ ID NO: 34339 - DNA, 271 bp, Homo sapiens
gtaatacactactatagggcgaattggagctccaccgcggtggcggccgaggtacgcgggggggcatcacggacctaccaatatgtgatgtcacccctggtggcccagctgtgtcatggagaaactccagctgggcccagagattctgcatcgggaaaatccaaggcttatttatgccaggctgagtggatttggccagtcaggaagcttctgccggttagctggccacgatatcaactatttggctttgtcaggtgttctttcaaaaatt

SEQ ID NO: 34340 - DNA, 456 bp, Homo sapiens
gtaatactgactactatagggcgaattggagctccaccgcggtggcggccgcccgggcaggtacagaaagctactatttatgtaaaaagctaaaatataaaaaaggtatactcacacacatagagtttggtcacagtggctatccctggagagtgaaaatggtaggagggagacaaacatttcactacatatttgtttaaaccttttgaatgttgtgatatttgcatatattatctgtttaaatatacagatacacacacacacacacacacacacacacacacacacacacacaaagattaagatttagttttcaggttggccttacgaggcagacaagctaattcgcaatattccccccgtttactgcatgggcttggaaacacagggaaacagacgcagagctaaattatcccccagcaacattgaccactggtcaggtgctgtgctgagccc

SEQ ID NO: 34341 - DNA, 478 bp, Homo sapiens
  misc_feature 191, 192: n = A,T,C or G
gcgtaatacgactcactatagggcgaattggagctccaccgcggtggcggccgaggtacagtagtatttaacctggatgtgaggacgaaggaggaaattttctggtgaatacagaagagcaaagagcagcaggtcagcaggaatgactaatgtttttctatgcacgtttaatggaaaattcatgtagatannttttgagtaggtaacttggataactcagctatttataagctcgcattcctacttagtttgacttctcacttaataagacttgtcaagagatcctaagaattctgaaagttgatgataaaatgtccatggtgtatcaccatccaatgatcaagaagttaagcatccacaactatagaatggggacagaatgaacttaatggattaaagatgaatatctggagttgttctcttttaagggaatgatacttctccaatgacctgtgtgagtcacagcctgccagaaaag

SEQ ID NO: 34342 - DNA, 294 bp, Homo sapiens
  misc_feature 196, 205, 214, 262: n = A,T,C or G
cgcgtaatacgactcactatagggcgaattggagctccaccgcggtggcggccgaggtactttattgatgatgtaaaaaatgaagctcagctcttgaagagctagaaaatttaagaagtatctttttttaaaccatataaaagatataatgactaagtccattatgatacatccttaacatggaatactctgtagnttatttaanaatgttatnagaaggtcatttaattgttatggaaaatatgttacacggaatatattntctctaaacaaagataaattacgaaatatata

SEQ ID NO: 34343 - DNA, 458 bp, Homo sapiens
gagctccaccgcggtggcggccgcccgggcaggtacaaagaagagcatccgttcgagaagcgccgctctgagggcgagaagatccgaaagaaatacccggaccgggtgccggtgatagtagaaaaggctcccaaagctcggataggagacctggacaaaaagaaatacctggtgccttctgatctcacagttggtcagttctacttcttgatccggaagcgaattcatctccgagctgaggatgccttgtttttctttgtcaacaatgtcattccacccaccagtgccacaatgggtcagctgtacgcgggggggcaaaaaaatcaaggtatttggtcccggaacaaagcttattattacagacaaataaaacaccaaaagctttaagttatttgatttgtggagcaacagaccttgttatgagcaaaatgaaccgggactggaaccctggtcttttg

SEQ ID NO: 34344 - DNA, 507 bp, Homo sapiens
cgtaatacgactcactatagggcgaattggagctccaccgcggtggcggccgaggactttttttttttttttttttttttttttcctaggatcatgatttttaatttgaattaaagcatttttttttgctttgttaagatgaggcaggccttcttgctgacattttaaaaagcaactatttttctttcatacactatgaggcattggctccaactgtcagcattgaaactgtcagcagttccctaccaggaaactggttccaaggtctagggtttccttaggtagaggctggcactgtgaaaataatggggctctttatccatgtcacctggaatggagttaataccctgccagtcttagttgatttgacatactaacaggatgggtctgaacgttttctatagtttactcatgagtgactttctttggcttacgtaaatggcaaggccagacaaattagcttatggacctagcaatcattcttggcccagactttgagaccctttt

SEQ ID NO: 34345 - DNA, 538 bp, Homo sapiens
gcgcgtaatacgactcactatagggcgaattggagctccaccgcggtggcggccgcccgggcaggtactatatggacaccaacatggagcagaaaatgagggcagcagtgtccaatctcattccaggtgagaagttgcacagtgtccaataggtgcatacatatccttagtaagtagttgcattaacaatgaaatagaaatgaaaaatatatttttttatttatgtgtattatatttttcaagcagctaataagttggtaggacataatatttaattcgttggggacctaattattgataaatcgaatggttagatattacttttggcctaagccaccatgaaaaaatcactgacgcgctaagggaaacatgagctaagaagcccttctgagtctctgttttgtcaactgtaagaggaagaaacctgctccaccttactcttgcgattgctgaacggtagctgagatactgtgcaaaatggaccttattggtggcctacccaacatccattctctacttcctctactctgatggcacc

SEQ ID NO: 34346 - DNA, 426 bp, Homo sapiens
atacgactactatagggcgaattggagctccaccgcggtggcggccgaggtaccgtttttgttggtttttttctccctcaaagtgaaatgagagactattgtagggttttgagccaaggagtgatattatctgaattctgttttaaaaggttcattatggctcctgtgtggaggcagggtagctacttagaaaccaagccatctcagcctcccgatttgtagagatgtggtctcactatgttgcccagactggtcttgaactcctggcctcatgtgatcctcccaccttggcctcccaaaatactaaaatgatagatatgagccgccacacctggccataagcttcagccttgagcagatactttctaaacactttatatagggaaaaaaaactaattcttgcgtagccaaagtgttcattttgcc

SEQ ID NO: 34347 - DNA, 435 bp, Homo sapiens
taatacactactatagggcgaattggagctcccaccgcggtgggcggccgagggactttttttttttttttttttttttggcttttttgtgttttttgtttttgtttttcattttttgtgtgtgtttatttttttatatttttttttatttttattttttgcagccacaggagttttagccatttcagatgccttgctccccacaatttggaagattcctttggatttgaccaagtcaggaagagatgggagaaaagtgaaacaaccaccataaaacccccaaccttaaccaaccgaaagagtttagccaaacaaacaaatgcccaattcatttgattactgggtgttcttatgcttaggggaaattaaaagccgctggggggtaatcttacattttatttatttagggaaaatttttagacaaaacttttattt

SEQ ID NO: 34348 - DNA, 428 bp, Homo sapiens
atacactactatagggcgaattggagctccaccgcggtggcggccgcccgggcaggtacatggatgagagccgcgttagtgcctgggaggaggtccagcagaggcttttgaatgtctgcagtgaagcactaagttacttcctcactctaacatcagaaagtcatcgagaagcctggactaacttactgcttttgtttctaactaaagttctaaagataagtgataatagggtaagtatgaggcttcgaatccagccccacatttctagcccaattcgcattgggatgcggggtcccagagccgccgtgcaagagctcttagagatgaatcaagcagtgcccaggctgcactgctgcttgtgcaaagccaccagtggcctttgctgtatcttcctcagtccttgcttttctccccccttacccagcttt

SEQ ID NO: 34349 - DNA, 469 bp, Homo sapiens
tttggcgagcgccgtatacgactactatagggcgaattggagctccaccgcggtggcggccgaggtacctgtttgttttacaactcaggcatgacattctttctggaaaattgaaatgcccttatgaaacagctgtggaattagctgctctctgtctacaagcggagcttggggagtgcgagcttccagaacacacaccagagcttgtgtctgagtttcggttcattccaaatcagacagaagcaatggaatttgatatcttccagagatggaaagagtgcaggggaaagagccctgcccaggcggaactctcctatctgaataaagcgaagtggctggaaatgtatggggtagacatgcacgttgtcaggggaagagatggctgtgaatattctcttggactgaccccgacaggcatattaatctttgaaggagctaacaaaataggcttattcttttggcctaaaat

SEQ ID NO: 34350 - DNA, 421 bp, Homo sapiens
tacgactcactatagggcgaattggagctccaccgcggtggcggccgaggtacctacaggttaagctatcttctaaagctctttagggaggacagctactttttgctttcccatttttgacttccagaaacacttttaattccttaaaaagtattctagttctgaaaatcctaaaaagctttgctacatattctactcacacaattaagctccatcaaagtatgcaagttgtgtttttacttatgcttgaaagttgatgctgcgaagtgaaaatacttcatgttgacagttaacactctgacctgattcaaggccaattctcagtccagcttttcaggaaaaagcactatgtggtgaggaataggagataaaaaagtggcaaacaaaacaaaacaaaaaaaaaaaaagtacctgcccgggc

SEQ ID NO: 34351 - DNA, 428 bp, Homo sapiens
tacactactatagggcgaattggagctccaccgcggtggcggccgcccgggcaggtacttttttttttttttttttttcgcattttattaaaacttgaaagctatggcttgccgccatcaatgacgcctattgggttccaatagcctcatgttcaaatctgactcgttagcaaatccacccaactcaacatcggtcatcttgacattgcaggatattcagcaagtctgaagtttttaatcgggaaggattttctaccgttactgaacaaataaaggttctttgtagcaatggctggaaatgcaaccccgcgtacaggaccagctcgggggggtgtggcaccgaatggaaatccatgagcagcacgtaggcaaacagcaggaggaaggcgatgtaaaagaccacattccaggagaagaccacgaagggg

SEQ ID NO: 34352 - DNA, 454 bp, Homo sapiens
  misc_feature 422: n = A,T,C or G
acgactactatagggcgaattggagctccaccgcggtggcggccgaggtactctggttccagggctcagagtagcaagagtgctgggacctgtctgagaagcagtgctgggctgtggatgcttgcctgtggcaccagatgccttacagtggccaggaatgctgcgggacagtctactttgattgctttctttcctccatggctgagatctgagtgtagtgttaactgggcttaaaaatcaagtccgttgtatctgcatggtcacgtagttcggcacctcatggcttttgcacctagaggtgtgaaccataatacctgaaacacaatttcataacctggctccttgggcttagcctatatggtggaggttagggtctgtatatcatcaagactgtgtctttgcatgggttgttcattctgttnggaattgaactttcttatttcctgtaggccta

SEQ ID NO: 34353 - DNA, 454 bp, Homo sapiens
tacgactactatagggcgaattggagctccaccgcggtggcggccgaggtacgcggggggattatgtgtcttgcagttgacaacggcagtgaccagtgcctttttactagcaaaagtgatcctttcgaagcttttctctcaaggggcttttggctatgtgctgcccatcatttcattcatccttgcctggattgagacgtggttcctggatttcaaagtgttacctcaagaagcagaagaagaaaacagactcctgatagttcaggatgcttcagagagggcagcacttatacctggtggtctttctgatggtcagttttattcccctcctgaatccgaagcaggtaaaaaacttgattattatttgtgcttgtatctctcattcaaaggctctgctcttccttcctttccctaccccctctgtttctcaatatacgtagctaacatctaacat

SEQ ID NO: 34354 - DNA, 397 bp, Homo sapiens
cactactatagggcgaattggagctccaccgcggtgggcggccgaggtacgatttcagctcactgcaacctccgcctcctgggttcaagcgattctcctgcctcagcctcccaaagtagctgggattacaggcgcccgccaccagacccagctaatttttttgtatttttagttgagaccagggtctcatcatgttctccaggctggtcttgaactcctgacctcaggtgatccacctgcctcagcctcccaaagtcccaacgtgctgggattacaggtgtgagccactgcgcccagcccacctatcttattttttaaagtgaacaattttaattctttcatcacatttccatcatactcttctctggtatagttcattagattacttctgtaacca

SEQ ID NO: 34355 - DNA, 418 bp, Homo sapiens
  misc_feature 334: n = A,T,C or G
actactatagggcgaattggagctccaccgcggtggcggccgaggtactttttttttttttttttttttttttttgggagacgggctcactctgtcagccacgctggagtgcagtgacatgatcttgactcatggcaggcttgacctcctaggctcaaggaccacctcccaagtagctgagaccacaggtttgccccatcacacctggccgatttttatttttttgtaaagatggggttgtccaggctggtctcaaactcctgagctcaagcaatgtgcccgccttggcttcccaaagtgctgggattataaggcgtaaaccactgcacgcagncctaccctctgcctttttaagatgatgttatttatttaatttttgccatcattgggtgcttcacctttcctgtgaagggaaatt

SEQ ID NO: 34356 - DNA, 408 bp, Homo sapiens
ctactatagggcgaattggagctccaccgcggtggcggccgaggtacgatcttggctcactgcaacctctccctcccgggttcaagtgattctcgtgcctcagcctcttgagtagctgggattacaggcgcgtgccactgcgtccggctaatttttgtatttttagtagagatggggtttcaccatgttggccaggctgatctcaaactcctgacctcatgtggtccacccaccttggcctcccaaagtgctgggattacaggcgtgagccaccacgctcagcctacaagcaattttttaaaaactgacacctattactgataaaatttctctgtttaaaattcctatttactattttaaagataagtatttagttttttttaaatacaattaattctgttattgata

SEQ ID NO: 34357 - DNA, 427 bp, Homo sapiens
  misc_feature 317, 367: n = A,T,C or G
cgcgcgtaatacgactactatagggcgaattggagctccaccgcggtggcggccgcccgggcaggtactgactgctgatctggaggctgggacaaagacttctggtgcacaagcaaaaagaagccttatataccatttacctgtatccaaatttccagcagccaacgatggcgaagagcctcatagcagatgtggcagtggccgccacttcccatgacaaagggaggtaggcatgattcatctctagtgcatggggacggttgccttttgccccaaatcaactcaagacccctttccaccatatgtctgtatgtaanctctaaatgcatctctaagacttaagaataaaaagccactgctacctggncaagttggatgagggcaaaagagaaagacattaccccaaaggaactataagcactctgct

SEQ ID NO: 34358 - DNA, 408 bp, Homo sapiens
  misc_feature 332, 347: n = A,T,C or G
acgactactatagggcgaattggagctccaccgcggtggcggccgaggtacatctgactatattccactggctttacacggctcgctttagggattgccacgctcagccgcacaggcttagaccccagtcccactgctccctggcactccgtcagggctcgcttctgttccagttcatctgtgaatttcacaaaaccataacccttagacacgcctgtctggtccaaaaccaccttgcctccccgacaggaggggtagactttgacgaagaattcatacagcatgccatcatccacgtccggggtcaggtcccccacaaagagggaatactncagggctgttatctnggttgtttcccggtaagtggcatagtttcagtttaaaaacgtttcggccttggccaaaaca

SEQ ID NO: 34359 - DNA, 416 bp, Homo sapiens
tacactactatagggcgaattggagctccaccgcggtggcggccgcccgggcaggtactgattggtctttccatccttcttaagatgttacggggtgaaagcccgggacgtgctagcaagctgctccagtgcgggacacagagtctctatcacaggctgctccggtgcgggacgcggagcctctatcacaggctgctctggtgtgggacacggagtctctattacacagccttcttttgtttggggggctagttgttgttgctgctgctgctgtttttcacaatcctttaagaatgtaaagactattattagctgacaagtcatttaaaaaaaaaaaaaaaaagtacctcggccgctctagaactagtggatcccccgggctgcaggaattcgatatcaagcttatcgataccgta

SEQ ID NO: 34360 - DNA, 435 bp, Homo sapiens
actactatagggcgaattggagctccaccgcggtggcggccgcccgggcaggtacgcgggggccagtgaccggaggcggcggcggcgagcggttccttgtgggctagaagaatcctgcaaaaatgtctctctatccatctctcgaagacttgaaggtagacaaagtaattcaggctcaaactgcttttttttgcaaaaccctgccaatccagcaatttttgtcagaagcttctgctcctatccctcacgatggaaatctctatcccagactgtatccagagctctctcaatacatggggctgagtttaaatgaagaagaaatacgtgcaaatgtggccgtggtttctggtgcgccacttcaggggtttggtagcaaggccttccagtataaactatatggtggctcctgtaactggtaatgatgttggaattcgt

SEQ ID NO: 34361 - DNA, 336 bp, Homo sapiens
actactatagggcgaattggagctccaccgcggtggcggccgcccgggcaggtactttttttttttttttttttttttttctaaaatgaggatttggccattcaaaaaaaaacaacatcaaagcaaaaccccaccacatacaagaagaaaaagagaggcatgctttacaaaacagctatttcaaagtcatgatttttaaaaaaactatttcagaatgtggaacgaaggggaaaaaaagtctcatgtgggttgcgtcggcactgcagcttgctcctcattaaaggttcctctttacctccctctggggctagtttccagcaagaaaatttttttaaa

SEQ ID NO: 34362 - DNA, 425 bp, Homo sapiens
actactatagggcgaattggagctccaccgcggtggcggccgaggtacaactgttcatagagttcagtttgacaattaacatgtatattagtatggttgcctgtgtttgtgttatgtttcactgtgtttcatcttcctgtgcctgggatcccccatgccctcctttcctatctctctcaaaaccagctgtttttccccatctgctgcattttggttatagatatttatttgtaggtttgctttaaaacaaaactcctctaaatcctacttgataaccatccatgctctttactctctcctgtcctgggagctctcttcctaactcctgcccttcattctcgacgcctgcctggcctccttttggttccttctctacagcattgcttccacccaccagctgtagtgcccctgtcccttaagagtat

SEQ ID NO: 34363 - DNA, 421 bp, Homo sapiens
tatagggcgaattggagctccaccgcggtggcggccgcccgggcaggtactcagcaaaaagctgagttattagaaaatggacactagcctgtgcttgtgggcataaattctccatctatgagaaggcatgaattgaggcactatattgattacattatgttgtttattctcatataactctctattggtgaaatgatttctagccccatctttaagatgggaaatggaatcctagagagacttcatttttctcctatatttgtatttagcaattgctattgctgccataagaaaataacacagggtggcttgaacaacagaaatttattttctcacagttctggaggctggaagtccaagatcaaggtgccaagcaaggctggtttctcctgaggcctctatccttggcttgcaaatggcc

SEQ ID NO: 34364 - DNA, 405 bp, Homo sapiens
ctatagggcgaattggagctccaccgcggtggcggccgcccgggcaggtaccatctatggaaaaagcaatggaaaatgaagtgtcaatcaaataatgcacccttggctgacacaaattaattgaagctaaacctagaacccttctttctcaccaagatggcaacttctcccaattgttctaaatataaaatcccggttatctgtcactttacccactccccctctccccagtccgatctgttgccaaatcctgtagtttctacctccataacggaactcgcaatcatctccttccatttctctccattccaaatctagaagaaaaaagaaaccaaatacatttagtttcatcagcaagttagaacctttctgtcaaaaatttcaagtgctcatgccctgtaaccc

SEQ ID NO: 34365 - DNA, 405 bp, Homo sapiens
tatagggcgaattggagctccaccgcggtggcggccgcccgggcaggtacgcggggagagaaggcccggaggggctctgcgtactgtagtggcgctgcttgggcccgtggcggattgtaagctgctggttttgcggctgggaagagcggcgagagggttcggcatttttcgtctggatccccgcagggtgactgctgccagagagtctcacccgcatggggtgaagcgttcagccttcccacacgacgatctgggatctagcaattgggaggcagcagacttgggtaatgaagagagaaaaccaaagttcttgagacttatgggtgcaggaaagaaagaacatactggtcggcttgttataggaagatcacagatcaacatcttacttccgaaccggtcagaaag

SEQ ID NO: 34366 - DNA, 220 bp, Homo sapiens
atacactactatagggcgaattggagctccaccgcggtggcggccgaggtacctcattttgtcccttgactttagtgtagtggtggggtcttttccaccaccccactaagccttggctacctcattttgtggccttattattaaagattgcttgttagtgaaaagggaagggcccagaatctgactggctgattctggctcctactctccctccttcttt

SEQ ID NO: 34367 - DNA, 427 bp, Homo sapiens
ggcgaattggagctccaccgcggtggcggccgaggtacccttcccctcctactccactttgagatatcccacctttttaggttaaaccaatatgtagcctcatgtattgatttatgactttgcctgtaacctctgccacgctgcctttaaaaacccttacctgtgtaagccatctgggagttcaggtcttaagcatgacctccctgatcctccttgcttggtgccctgcaacaaatgccccactttctctccctgcaatcccgatgtcagtgtgtggctttgctgctctgggtgggcagacccaagttcagcaagtaaccattctaaggagggtgtttacaccttcttcatgatcccttgtcactgtttcatcctaaatcctgattccaacccaattatctgttccttctcatcatcttccctctct

SEQ ID NO: 34368 - DNA, 440 bp, Homo sapiens
gactcactatagggcgaattggagctccaccgcggtggcggccgaggtacagaataatgcctgtcacatagtaagtatgtaataagcatttattattacttatcagggtatgatttatgaattgtggaacctgggattatgggagagtctggcttcaatcaagggctgaaattccatttccactgacatctcttccttccccatcccccgattctgtcctgcaacagggtaacaagaaggggcccttaggccgttgggactttgatacccaggaagaatacagcgagtatatgaacaacaaagaagctttgcccaaggctgcattccagtatggtatcaaaatgtctgaagggcggaaaaccaggcgcttcaaggaaaccaatgacaaagcagagcttgatcgccagtggaagaagaatagtgcaatcattgagaagagg

SEQ ID NO: 34369 - DNA, 410 bp, Homo sapiens
actactatagggcgaattggagctccaccgcggtggcggccgcccgggcaggtactaataacaatacctgactacatggttaccacccgtgactactgcattgcagcttaaaacatgctttggtcaataaatttaaaagatatacatcaaataacaaggccagaaaagctgttttaagaatttcctgaccttaagcaaactttaaatacattgacatggcataaaaaaatatgatcaaatattcagaaaggtttctattttttcaaccatttggcattttatattattaaattcgctgtttaaaataatattttatacttctgtgcactgattatcattgctctccgaattaaaactaaactacaattaccttgctagaatgttcagtagcatatatattaattgttcct

SEQ ID NO: 34370 - DNA, 415 bp, Homo sapiens
tacgactcactatagggcgaattggagctccaccgcggtggcggccgcccgggcaggtacagcctgtgtattcatatacccgacctgggctgatgattgggaattcaccaactactccaggtccttgaacttcttccacgtcacccttagcatttgttattctccaatagcgactggcccactgacaggccttctcaggaagtgcatcttttgacatttcaatcctgattcggtatgtgaagaaatagtggggtggatgtacccctccaagccggacaacccgggcgaggacgcaccagcggaggacatggccagatactactcagcgctgcgacactacatcaacctcatcaccaggcagagatatggaaaacgatctagcccagagacactgatttcagacctcttgatgaga

SEQ ID NO: 34371 - DNA, 395 bp, Homo sapiens
cttggagctccaccgcggtggcggccgaggtacgcggaggcaccttccttctgtcaatcgatgaaacaaatacttcatcctgctctggaaaccactgcaatgacattattcccagtgctgttgttcctggtagctgggctgcttccatcttttccaagcccatgaagagaaggttcccactttcactgcttagttaaccacccaaacacaagtgcaaagggagattgtgaataagcacaatgaactgaggatagcagaatatacccctgccagaaacatgctgaaaatggaatggaacaaagaggctgcaccaaatgcccaaaagggggcaaaccagtgcaattacagacacagtaacccaaaggatcgaatgacaagtctaaaatgtggtgaga

SEQ ID NO: 34372 - DNA, 416 bp, Homo sapiens
tacgactcactatagggcgaattggagctccaccgcggtggcggccgaggtacggaaacaaaagagataataaactaatagttatttaatatgctgtaacaacaaattagaaacattgagaattaaagtgtgttttctttgtaacaaacttatcaagagtagtttgaacaagggttgcccttcttctggtataatttagatacatatcagagcaaacatcttttctgtggctttgcaagttgtcatactgtattttgtttggatcagcttccaacattttatcttttatgctttcagtattgtaaaatacctctcagtttctttagcatgcagttttttttttttgttagcgtctcttcctctaggacgttgtcattcttttcatcactcccactttcttcattgctaagttggcc

SEQ ID NO: 34373 - DNA, 164 bp, Homo sapiens
ctatagggcgaattggagctccaccgcggtggcggccgaggtactaggagaggtcctgtgacctttccagtgcctcaaagagtgagaatgggaaagaggagtggatgaagtatggcttaccctcctgtgggtcacctctcttccctgctgcttctgaaccccac

SEQ ID NO: 34374 - DNA, 428 bp, Homo sapiens
ctactatagggcgaattggagctccaccgcggtggcggccgaggtactgatcgtgtaagccctgggacgctattgctggggctttggcttttactctgactaaaatgggaaccaccgagggcttctgagcagagaggcgacatgatccgtctcctgatttaaaagcacgacctggctgccgagttgagaaaagactatgggaagatttgggtagaagcatgggagccaagctgtggcaacatcccggtgggagatgatagtgatcctgacggggttcatggtggtggtgagagatggttagagcctggatacatgttgaagtcagtcagtaggattttcctgacagactggatgtgagctgtgagagaaggcagtggtcaaggttgagtttgattctgattgaaatattaagtaattttaaaaaacac

SEQ ID NO: 34375 - DNA, 424 bp, Homo sapiens
ctactatagggcgaattggagctccaccgcggtggcggccgaggtacacttagcaatgaggctgtgttgatgaggaagtgcgcagcatcatacttggtatagaagctggccaggagatagagcacaataggagagatgctgaggaacttgcgggaagaggtaaactggagcccatagtccatttgctcccagtgtgtcagtagccgagcctttccttggtcaggagtctcaaagggtgtccctttcaccgtatgaaggaagacatacgtagccaggttatggatgacgttggtcagggtccagacaacaggaatgctgaagaaggggatgcttgagtagaaccatatgcagcaaatcctaccaagatgatgtaggccagccagatgcctcggctattcatcactcgggtgttggggttttactt

SEQ ID NO: 34376 - DNA, 421 bp, Homo sapiens
agggcgaattggagctccaccgcggtggcggccgcccgggcaggtactgaatttctgtcagttaaggggttcactgctttggtggaaattggtggaaattgctagcaggttccacgatgtttatttttttctccatgttgtatatcattaccatttcacatacgcgtttctatttttcttcctcttcctccggatctccttaaaaatgaatctagagttggtggctttttccccctcctctttggccagttccacagttcagttcttcctgaaaacagggatgatgaacttgtaggatcaggacaaatgtgtgtttttcaaaaacttaaggctgggtgtgaaacaccttctgtggacaaggatttgtaaacttctctcctccctccagctgcggccccagcctaactgatagttacttgat

SEQ ID NO: 34377 - DNA, 442 bp, Homo sapiens
  misc_feature 395: n = A,T,C or G
ctactatagggcgaattggagctccaccgcggtggcggccgaggtacgatcttggctcactgcaacctctccctcccgggttcaagtgattctcgtgcctcagcctcttgagtagctgggattacaggcgcgtgccactgcgtccggctaatttttgtatttttagtagagatggggcttcaccatgttggcccggctgatctcaaactcctgacctcatgtggtccacccaccttggcctcccaaagtgctgggattacaggcgtggagccaccacgctcagcctacaagcaattttttaaaaactgacacctattactgataaaattctcttgtttaaaaatcctatttactatttttaaagataagtattaggtttttttaaatacaataanttctggttattggataaaattttaagggcattttcatttgccttttg

SEQ ID NO: 34378 - DNA, 436 bp, Homo sapiens
cactactatagggcgaattggagctccaccgcggtggcggccgcccgggcaggtacccagagtgcagagccgcatttccagcatgcaggggctgctcagcgtttagtcacatcaagaaatagaacagaattcagccatggccccaagaaagagaggtggacgaggtatttcattcatcttttgctgtttccgaaataatgatcacccagaaatcacgtatcggctgcgaaatgatagcaactttgcgcttcagaccatggaaccagcattgcccatgccccctgtggaggagctggatgtcatgttcagtgaactggtggtgagtcccagttttctatcctggcattggtggggagccagagaaggagaagaggagaggatgtgaatgagttggtttggtttgacatggactttttctttttagtgaaatggcccc

SEQ ID NO: 34379 - DNA, 416 bp, Homo sapiens
tagggcgaattggagctccaccgcggtggcggccgcccgggcaggtacttttttttttttttttttttttttgactttttttcagccttcctatacagccccaggaataaaaaaatcatgactaaaatgggatagctccctaaaaagggactaggaaagaagtcccaattggaggctgaaaaaaatcaaaaaagaaaaggaatagggcatcctttttaggagcggtcactgtagagcctccaaaacccattccattaacttgggggaaaaaaaacaactgtatggtaaatcagcagcgcttccaaaacaaaaactggaggctttacatttattagcaaagaaacaattagaaaaaggacattgagccttcattttcgccttggaattctgtttgtaattcaaaaaaaatccggcag

SEQ ID NO: 34380 - DNA, 168 bp, Homo sapiens
ctatagggcgaattggagctccaccgcggtggcggccgcccggccaggtacatagaatatgaacacatcacacacatgagagacgcaagtgccaaatgccttggcctgggcttaacgtgtcaagcccaacacagtcttaagaataagccgatatgagaaggagatgag

SEQ ID NO: 34381 - DNA, 417 bp, Homo sapiens
ctatagggcgaattgtagctccaccgcggtggcggccgaggtactgatactttttattcttttcagggaccgtttatctaaaaaatgttaaggcttatgctttcagatctcagtccaatttctagaaattaacaatgagtccttttatagcacttacctttctcttcctgccttccccacctccaccccaaacttgctttgggtgttctttaatctttcaagggagtgataaatgtcacaaactcttaaataaagggctgaaatggcagcgtatgactgttttgactgtctttaaagtagtattagtcttctagaatactaatctaattcttagaaacagaaaacagaggaagctcaatgttcgaaggggaagttaataataattgattcatcctggctacccaggaaatgcacagt

SEQ ID NO: 34382 - DNA, 398 bp, Homo sapiens
cccgcggtggcggccgcccgtgtcaggtacatcccctacatcagtatcagtactttatgaggacagtgacagtagcccgagtcacaaaaaaggagagagcaaacagcaacgcaaagctcggcacagaccacatggccctcttttgcctactattgaagattcttcagaggaagaagaattgagagaggaagaagaattattaaaggagcaagaaaagcagagggaaatagaacagcaacaaagaaagagttctagtaaaaaatcaaagaaagacaaagatgaacttcgagctcagagaagaagggaaaggccaaagacaccacctagtaatctctctcccattgaagatgcatctccgacagaagagttacgtcaggctgcagaaatggaggagctcc

SEQ ID NO: 34383 - DNA, 407 bp, Homo sapiens
cttaccgcggtggcggccgcccgggcaggtacgatcttggctcactgcaacctctccttcctttgttcaagtgattctcgtgcctcagcctcttgagtagctgggattacaggcgcgtgccactgcgtccggctaatttttgtatttttagtagagatggggtttcaccatgttggccaggctgatctcaaactcctgacctcatgtggtccacccaccttggcctcccaaagtgctgggattacaggcgtgagccaccgcgctcagcctacaagcaattttttaaaaactgacacctattactgataaaattctctgtttaaaatcctatttactattttaaagataagtattaggtttttttttaaatacaataattctgttattgataaaatttaaggcatttt

SEQ ID NO: 34384 - DNA, 424 bp, Homo sapiens
tagggcgaattggagctccaccgcggtggcggccgcccgggcaggtacttttttttttttttttttttttttttcattcttctccattacttaaattaaatgctgccaccattgagtatggcattgtataatcatattccttcagcggttaaaatagaaaaaaaatgcagatagagatgtgtataattggcatgcatagaaatacagaaccagttacatgacaaaagtaaacaaaactctaaaccttcatattttaaaaacaagattttccatttaacaagaattacattcattaaactggagagtatctcctatagagaaaacttttagagtcagatccaaacattactatattcatacttggaagcactttgacaactcaaggctgaaaaccccacactgggcttgttgtcagtccactgtt

SEQ ID NO: 34385 - DNA, 420 bp, Homo sapiens
cgactcactatagggctaattggagctccaccgcggtggcggccgcccgggcaggtactttcttcctcatactgactatagtcatccacctccattcgagactccaagagagaaagaggatcactgcagcacaccccattttcatgaagcccctctgtataagaccccctattttcctcatctcgttttagctggatttttaattttgtagaactactgcctgatcctgagttaaatccattattaagctttgctacatagagattgttatcgttgtcatggtctttgcttaacttgatgcttattttggaagagttcattccatcattctcttggtcatttgttttgctgctgctatcatgacgcctacgaagagtcaatttgggaatcccagagttattttctaggattaactgtgca

SEQ ID NO: 34386 - DNA, 428 bp, Homo sapiens
tacgactcctatagggcgaattggagctccaccgcggtggcggccgaggtacttttttttttttttttttttttttttgatatttttattttacaaatttttaattaaaataagtttatttaaaagttttatttttaatttataaaatagttaattttaaatagtctcagcaaaaaagaaggtgggcagaaaccctgctcgttctactttataaatagtagcttatcaaccggcagccagtgaaacactaaacccaaaatttgcctcattgtgtcatggagattatgctgcaagggagaaacctgccaagccctttccaagaggtgctgtgtgccagcccaatccccaaaccctgccaagccacggagtgctttctaggctggtgacaggccccagtgccagctagatgcccgtatgctcggggatgg

SEQ ID NO: 34387 - DNA, 427 bp, Homo sapiens
gactcactatagggctaattggagctccaccgcggtggcggccgaggtactatcttggctcactgcaacctctccctttcgggttcaagtgattctcgtgcctcagcctcttgagtagctgggattacaggcgcgtgccactgcgtccggctaatttttgtatttttagtagagatggggtttcaccatgttggccaggctgatctcaaactcctgacctcatgtggtccacccaccttggcctcccaaagtgctgggattacaggcgtgagccaccgcgctcagcctacaagcaattttttaaaaactgacacctattactgataaaattctctgtttaaaatcctatttactattttaaagataagtattagtttttttttaaatacaataattctgttattgataaaatttaaggcattttcat

SEQ ID NO: 34388 - DNA, 416 bp, Homo sapiens
tcactatcgggcgaattgtagctccaccgcggtggcggccgcccgggcaggtacttttttttttttttttttttttggcttttatcctgtttgttgttctctgagcttcctgaatctgtggtttcgtgtcacatattaatttagaaaaatctcattcattattgctttgaatatttcttctattcctttctctctttcctctccttctggggttccactatgcatacttacatcttttatagttgtcccactgttcttggatattctgttccttttttattcagtctttttccctttgctttcatttttggaagtttctcttgaaatatactgaagctccagattctttcctcacccacatccagtctgctaatgaggcttcaacaccatgcttcatttttgttagtttcttgacc

SEQ ID NO: 34389 - DNA, 184 bp, Homo sapiens
ctcactatagggcgaattggagctccaccgcggtggcggccgaggtacttcattcctttttgtgctgagtaatagtcagttataaggatacaccacgttttgtttatgcattcatcagttgatgaacatttgggttgttttcactttttggctattgtgactaatgctgctgtaagtattcctt

SEQ ID NO: 34390 - DNA, 418 bp, Homo sapiens
cgactactatagggcgaattggagctccaccgcggtggcggccgaggtacattttgcttcttagaaagctaagtcctgggttccgtctgattttaggttccaggaacttcctgagaacacccgatcgcagagggtaattttctggagtttgttttgcagggatagctgggagtatggccaccctgctccacgatgcggtaatgaatccagcagaaggtaatgtttcatggtcccagggaggggcagtaggggatgttcaaaggggcacaaaaaatggttgtgggagagtggagaggactgaaggtgggcagagcggctcctaatctccagtcagagcagacaggagaattgaattttttactacgttatcaaaggcctcaagaaaggacgtgaacataagagtttttggtattcctgt

SEQ ID NO: 34391 - DNA, 398 bp, Homo sapiens
gcgaattggagctccaccgcggtggcggccgaggtacttttttttttttttttttttttgtgttttttgtttttgtttttcattttttgtgtgtgtttatttttttatatttttttttatttttatttttggcagccacaggagttttagccatttcagatgccttgcttcccacaatttggaagattcctttggatttgaccaagtcaggaagagatgggagaaaagtgaaacaacaacatttaaacgcggaggggggacaaacagaaagagttaaggggaacaaaggggggcacaggtcatatgattactgactgttctaatgcttaggagaaattaaaagcagctggtgggtaatcttatattttaatcattaaggaaaaattttaagacaaaac

SEQ ID NO: 34392 - DNA, 407 bp, Homo sapiens
gtaatacgactactatatggcgaattggagctccaccgcggtggcggccgcctgggcaggtacttactaaatatatgctctattttttcttttggaaaaagcatggttttttgcttttgttctgtggggttttttttttttttggtgaccgaccaaccattgaacctaaattatatgtgtaacaatttcttaaagtgtaacgttagtttgaaacacctaacaactttgccaagttaaatttcataccaattttagaattgaatatgggaaattttaagctaccacttattttgggaaaatgccttttgttttctattcctgtggcagattttcttctgagtgaatttaaaactgaaagattaggacatcggcaaccttaaagagtaaggtgatgatttttgtatgta

SEQ ID NO: 34393 - DNA, 416 bp, Homo sapiens
ctatagggcgaattggagctccaccgcggtggcggccgcccggggcaggtacttccctcacctggacataattctcaatatctgaaaaattcaataatgttatcatagcaaattcagaaacaacttcagtatctactaataagggaatggttaaatcaaaccacaaataaggaggagactactgttgttacagaaatagtcttcaagaaacaatagcatttcctagaagttataaaatttttactggttccagactgatcctaatatcaggtatgattatttcctttggagtaagaaaaaaaattttttaaggctgaaatttttgcacaaaagtcttagattaaatatggtatatgatttgggacacaaggaaaagcctataatttaaaatcttggcttcttatcacaagtccaat

SEQ ID NO: 34394 - DNA, 448 bp, Homo sapiens
ctactatagggcgaattggagctccaccgcggtggcggccgaggtaccccaagataggatcagggctattttaatgatcatgtgatttattaaaaacttgagatttccaactactctttcacacgtatgtggaagaaatgtattccaagaagagttgctataatcagtattaatctgtaaaatcacattgatttatcttagaaggataaaaagaacagaaacaaaactctaccagctcatataatttttctttgcaaaaattttttgcttctttactatactgaattagttacatcaattgttgtatcaatgaaataattaggtattattacctgtaactattttgaaaattaataaaagaaccaagaagaatagagtaatatccctaggctaaaactaaaacaaaatctcagcaacccagaactttcgggaaactgatgttcaggaa

SEQ ID NO: 34395 - DNA, 447 bp, Homo sapiens
ctactactatagggcgaattggagctccaccgcggtggcggccgaggtaccagctctgggcatccccagggtttatgctcaccggttagtgctggtgtgacatgatggctgagcaccggcactgtgtccagcgcattgctaggcactagacacgtgctctttcatttattcctcaaattgctttgtgctgtaaatgctacccagaaaggctcatgttcattactcaagtcacttcaccagaaagtgacagagccagaattcaaacccaggtctgccagattccaggtcccttgcttcttctgttgttgctcattgcaagggagtcttcttcaaggttattctcaggagtttgattaagatacaggctcacagctgggcatggtgtctcatgctgtggtctcagcactttgggaggccaaggtgggtggatcacttgagctcagaagt

SEQ ID NO: 34396 - DNA, 444 bp, Homo sapiens
ctatagggcgaattggaatttcccccgcgggggcggccgcccgggcgggtacgcggggagaaacaagcagctgctgcctggtggtaacagcaaagggtggaagtcaatagggtctctgtgagactgtttcacagaaggatgcgtgtttacccaaggctgcgcatcaaaaagaaatagataaaataaatggaaaattagaagggtctcctgttaaagatggtcttctgaaggctaactgcggaatgaaagtttctattccaactaaagccttagaattgatggacatgcaaactttcaaagcagagcctcccgagaagccatctgccttcgagcctgccattgaaatgcaaaagtctgttccaaataaagccttggaattgaagaatgaacaaacattgagagcagatgagatactcccatcagaatccaaacaaaaggactatg

SEQ ID NO: 34397 - DNA, 348 bp, Homo sapiens
ggtggcggccgaggtactttttaattttttttttttttttttggatatatagtagagacggggtttcaccgtgttagccagggtggtctcaatctcctgacctcgtgatccgcctgtctcagcctcccaaaaagtgctgggattacaggcatgggccgccacgcctggccaagtagatgctttttattgagctctgtgaggtaggatcccagatcatccaagtatgagggggaaggtgaatgggtagggtttttgtgaaaaaagaacattattgtgaaaaatgagaggtaaaactgacaaggaaacaagtgctgagtggcagctagggtccagtttaggctggaaact

SEQ ID NO: 34398 - DNA, 446 bp, Homo sapiens
tacgactactatagggcgaattggagctccaccgcggtggcggccgaggtacccaaacctaagagctattatccctaaatttcaaaatctaaaaaaaaaaccttagaacctcagatgatataattaacataaaagcccaggtttttgtataaatgaaaagggataaaaattcatacaaaatccattagtaacattcataagcacccgaaataaattatttagatgtttgcaagtcagctgcaaggtgttcttcctcctcaaatatcctctaaggatgagcttatagacagattaacttaacaacgaaacctaacattccaccagtaagaatcttgtttgtgtgtgaagctgctttttactaagttggaggtaagagctcaaagtagagttttacttaagaaaattggggcaaacattgattttagttctacagctataaaatgatg

SEQ ID NO: 34399 - DNA, 446 bp, Homo sapiens
gactactatagggcgaattggagctccaccgcggtggcggccgaggtacagattaagcatataaaaaattagagactaactgggatttttaaaagattattccaaattaagagttgctttgttatgccttcagcaaatagcttcattttgccaatactgaataaaagagttatttctacatgtgaattagttttttcaagtcataatcccctaaaaaaactatttctagccagagcctttcacaataaaaatactaagattttacaaaaatactaagttttagaaagagcaacctagtttttaacctggtgtgtatcctgaagtgacttttaataacattgagattcttgcccactgcatagtcttctcctcagctggggattttttggattttttttttttctatttacttatctaaatgtttagcaatatcaagatgtaggctg

SEQ ID NO: 34400 - DNA, 400 bp, Homo sapiens
ccgcggtggcggccgaggtacgcggggggagcggccaacatggcggaacgcagtagacacaagaagcggatccaggaagttggtgaaccatctaaagaagagaaggctgtggccaagtatcttcgattcaactgtccaacaaagtccaccaatatgatgggtcaccgggttgattattttattgcttcaaaagcagtggactgtcttttggattcaaagtgggcaaaggccaagaaaggagaggaagctttatttacaaccagggagtctgtggttgactactgcaacaggctttttaaagaagcagtttttttcaccgagccctaaaagtaatgaaaatgaaatatgataaagacataaagaaagaaaaaggtaaagggaaagctgaaagtggaaaaga

SEQ ID NO: 34401 - DNA, 427 bp, Homo sapiens
cgcggtgttggtcgaggaactcgcccccaggcccagataatttatttaaaaactttttttgtagagactttgtctcactatgttgcccaggctggtctcaaactcctggcctcaaacaatcctctacctcaacccccctaagtgctggcattacaggcatcacctgccatgcctggctacaaatcttaatgttttccccatggcttctttttctggcgttcttttctcaggtaatggaagtgggcagagaatgatcctttccctaggctccagtgtgtaagaattaaagaaagaggaaagaaacacaatggcttgatggtcgaggacaggtttattttaaagaaaacaaacccaagagtggcttctggctgagttagatcagaggcatgctctcttacagactaagagtttttaaggattcagggtg

SEQ ID NO: 34402 - DNA, 335 bp, Homo sapiens
gcgaattggagctccaccgcggtggcggccgcccgggcaggtactcctatgaacaaaatttgaagcatgtttatttctctgcctggttcctctagaatttggaaattatctgtctggaagctctgagtttatcttgggacctcaagaggagaggatcacccaactcacaggcaatcaaaactccaaatggtgctataaactgaaccacacatggacacgtcagtcttccgaggacccttagatcaaccccaggaggagccctagctgctgttccccattctacgcccctttccagcaggaagaagccagaagacatcgtctcccaaacctttaac

SEQ ID NO: 34403 - DNA, 293 bp, Homo sapiens
tatagggcgaattggagctccaccgcggtggcggccgcccgggcaggtacagcagaactgcatgatcagctgtatggtagccttgaaaaccaacaggccacaatcacagtgaaaacctcaggttggcagccactggaggatacaaaatgagtttggatctccttcaatgccccattcccagagaactgtcattatttgacctgctggtagttccctaaaggacgtgcaaggatgtttttatttgactggacacttgaagcttgccctgtatgaacagcccccatcttcccatg

SEQ ID NO: 34404 - DNA, 379 bp, Homo sapiens
tagggcgaataggagctccaccgcggtggcggccgcccgggcaggtactttttttttttttttttttttttttttcaatgactcactcttgtcacccaagttggagtgaactggtgccattatataaagcttactgcagcctcagactcctacactcaagcagttctcccacctcggcctcccaaacagctggtattacaggcataagccactgtgccccaaccctactagccattttttaaatgctgaaaagccccatgtgactaggggctacaccattggacagctcagatacagaacatttctattcatctcaaagttctattggacagaattgctttaaggaattatcctcattataaaatgataagtatgctaa

SEQ ID NO: 34405 - DNA, 319 bp, Homo sapiens
gcgaattggatctccaccgcggtggcggccgcccgggcaggtacatttctctggctccagccttggctaagttgatgacctgagtcgatctccacattcatctacatgaacgtgggggcgttggttttggcggccaggctgtaaaatgtagggcttgtctcactttgctatttaatcaacatgtggacattttagcagagaaaccccatagcaaataggaatgaaaagctacctgattaaaatgatgaaatgatagagaatgttttttggctgggacattttaaccaaagttgcacaactgaagctgattgccttcctt

SEQ ID NO: 34406 - DNA, 211 bp, Homo sapiens
tatagcggcgaattggagctccaccgcggtggcggccgaggtacaattacattattattgaatatagtcaccctattgtgctatcaaatagtaggtcttattaactctctatttttatacccattagccatccccaccttcccacaacaccccctgccgctacctttcccagcctctgataaccatccttatactctctgtgtccatgagt

SEQ ID NO: 34407 - DNA, 431 bp, Homo sapiens
acgactactatagggcgaattggagctccaccgcggtggcggccgaggtacttagaaaacctagatactgcagtcagattttggaaactgccgtatagtcactgttttaaaaaccccggaggggctgtattaatttgtattgccccatggctgacaaaagccttttttttttggttttgatttttttttttttgtaactgttggggggaaaaaggctttttaacccatttttgaagagggtgaagtttggagaacaaatttaaaaaccatcagtcatgtgagcagattttttagaagggataggagacacacgcgcacacacacacacacgaaacttgaaatggctttgctttggctgtcgtcttctgccgtgtgccagatgagcttgtgatctgggaagccggggcacccccgttttgtttctctgggcg

SEQ ID NO: 34408 - DNA, 425 bp, Homo sapiens
gctaattgtagctccaccgcggtggcggccgaggtacttttttttttttttttttttttttggttgagatttggtttcaccatgttggccaggctagtgtcaaactcctggcctcaagtgatctgccagccttggcctcccaaagtgctggaattacaggcatgagccactgcacccggcctgcttattaatcaagattttcaaagttagatgtttaattaaaggataatatgtctataccactcatccaacaattttcactgtgaagaccacattagccagctcccagaggagacacattctggtgagggggtggctgggttcaccatattcgcttctaccatcctccaatcccagcctttccctctacctgggggattcactggaaccatccatttggattccccacattttttgggttctta

SEQ ID NO: 34409 - DNA, 158 bp, Homo sapiens
tagctccaccgcggcggcggccgcccgggcaggtacacggggaggcattgaggcagccagcgtaggggcttctgctgagggggcaagcggagcttgaggaaaccgcagataagatattttctctttgaaagatagagattaatacaactacttaaaaa

SEQ ID NO: 34410 - DNA, 440 bp, Homo sapiens
ctccaccgcggcggcggccgaggtactagtcagtatgctgtagtattaatcagtaggtcaagttcagtgaagtaaaggagaattgaatgcttgaagttcacatttaggcaaaaatttggcgttttaggaggtgagtataagacatgatctttatagaaaacgctgatgataaaaacagcgctctctgttaggtgcctttatgcttgactccattggcatcttttcttaagaaactaaactcacgactgggtgcaatggctcatgtctgtaatcccagcactttgggaggctgaggctataggatcagttgagctcgggagttcaagatcagcctgggcaacatagctagacctcgtctctactaaaaaacaaacaaacaaaaaacaaaaaaaaccccccaaaaaaaccaacaaaccagcttggcatggtggtgcgtgcct

SEQ ID NO: 34411 - DNA, 455 bp, Homo sapiens
tatagggcgaattgtagctccaccgcggtggcggccgaggtaccccagccaggcgcacgatgtcgtgtaagcagggtattcttgtgccagcatttgcttctctgtgaaaacacagcgccgtcaacattttgcactttccagggcccttcggaattggaagtgcctgtagctaagctgtttcccctggagagtccagctgttctcctgatccggccctgcacacacacacccagccacaaattactaggatgtcaaacccaggtgatcaggatactctcacggactgccctgctcccccagggctctccctacagtgtaatcctaaagccaaacttcctttcagcagtggctgaagcaaactctgcagtcagaggtcatacccagcaggcttcaccatgcagacttgaatgttgatttgagggcctagctgctcagcacagggcatttgggaagac

SEQ ID NO: 34412 - DNA, 217 bp, Homo sapiens
atagggcaattgagcttcccgcggtggcggccgaggtacgcgggtaatcaggctttttaaatgatgtaattcccactttaatagcatagggattttggaagcagctgctggtggcttgggacatcagtggggccaatggttctctgtccctggttcaactgtgatttggccttcccgtgtctttcctggtgatgccttgtttggggttctgtgggtt

SEQ ID NO: 34413 - DNA, 426 bp, Homo sapiens
gccgcccgggcaggtttcatgggactacattcacgccccacctttcccagctcatttttgtatttttagtagagacagggtttcaccatgttggccaggatgatcttgatctcttgacctcatgatccgcccgtcttggcctcccaaagtgctgggatcacaggcgcgagccaccacacctggccctctatttattctctttaaagagagagaaaactatgagaggccaaaattatttaattaaatctttaccttagcacaagggaaaaaaaatggaatttgcctaatataggtgatgaagcatacacaatgaattgaaacaatcacattttagtaaaaggcaaaaatttgagacttataagctttttgggagcttatttttgggtgggggaagaaatgagaaaaagaatttaaccttctcttact

SEQ ID NO: 34414 - DNA, 212 bp, Homo sapiens
cactatagggcgaattggagctccaccgcgggggcggccgcccgggcaggtacgcgggggcgcgcggcccaattcccttttccggtcggcgtggacttgcgagtggagtgtccgctgtgcccgggcctgcaccatgagcgtcccggccttcatcgacattattgaagaaagatcaggcctgcttgagcttccgtgcttaatctgaaatctaa

SEQ ID NO: 34415 - DNA, 398 bp, Homo sapiens
gcggccgcccgggcaggttcgcggggaggactgtcgacttcggtgtggcccaggtgagaaaggcccacctgtgtcctggttgagggtctccagggttctttggggcccgaggaatttcagacctgaacaatcaggtggacaacttcttgtgactttgggtattctgaaattactcatcttgactctactgtgcctggatgtagctgtgtgttttgtgtgtatcctgttcatggtttgtagaatttcttgagtttgccgatggtggcagagtctacatagaactatgcttcgtggtgttctggggaaaacctttcgacttgttggctatactatccaatatggctgtatagctcattgtgcttttgaataccttggtggtgttgtcatgtgttctggac

SEQ ID NO: 34416 - DNA, 388 bp, Homo sapiens
tagggcgaattggagctccaccgcggtggcggccgaggtacatactatggaattcctttcttttttttttttagagggggtgtcactatgttgcctaggctagtcttgaactcctgggctcaagtaatcctcccacctcagcctcccaagtgctagaattacaggtgtgagccaccacacctggcctatggcattctttagggtagcatttgcagaaaatgtcatttctctgaatgaaatcctatatggaaatcctatctccccattctccacaaggcctcagtcaagctttacatagcagaatttagccgtaatctggtccctacattatttcccacaggagctctgctctggtcatgctagcttcattatagggctaatacatgcc

SEQ ID NO: 34417 - DNA, 326 bp, Homo sapiens
acgactcactatagggcgaattggagctccaccgcggtggcggccgaggtacatgatagggaggagtgaggcaggtgggcactggagggctgtttcctctggcacagttgaactagagggtcactttccactcataattggtttcctaggtctaagtcaccacacctggggctgaagcaagtcttgcctgtgcaccaagctgtggccttggaccctggagagatgcaaggctcagtatctccagtgttgaagtggaagggactcccaaactgaagggagatcttttctcttccccaccttccagcctctttttccctttacaaaat

SEQ ID NO: 34418 - DNA, 455 bp, Homo sapiens
agggcgaattggagctccaccgcggtggcggccgcccgggcaggtacaatcttggctcactgcaacctccgcctcccgggttcaagcgattctcctgcctcggcctcccgagtagctgggattacaggtgcccgccaccacaaccagctaattttttgtgtttttagtggagatggggtttcactatgttggccaggctgttctcaaactcctgaccttagacgatccacccacctcggcctcccaaagtgctggagttacaggagtgagccaccgtgcccagccccatatactttaaattatctttagattacttataatatctaatacaatgtaaatggtatgttaacagttgttatactatattgtttagggaatcatgacaataaaaaagtctgtatgtgctcagttcagatgcttaaaaaatatatattttcaattctcagttggttgaa

SEQ ID NO: 34419 - DNA, 147 bp, Homo sapiens
tactatagggcgaattggagctccaccgcggtggcggccgaggtactgaggtgtaaagggatttatatggggacgtaggccgatttccgggtgttgtaggtttctctttttcaggcttatactcatgaaatcttgtctgaaagcttt

SEQ ID NO: 34420 - DNA, 104 bp, Homo sapiens
tatagggcgaattggagctccaccgcggtggcgtgccgcccgggcaggtactccctacaagtccggacaacccggagcgaggaacgcaccattcggaggacatg

SEQ ID NO: 34421 - DNA, 458 bp, Homo sapiens
ctactatagggcgaattggagctccaccgcggtggcggccgcccgggcaggtaccactatgcctggctaatatttttatttttttatttttgtagagacagggtcttgttatgttgcccaggctgttctcaaactcctatcctcaagccatcctcccatctcagccactcaacttgctggaattaccagcggaagccactgtgcccagcccagactcccttttacctagtatatcatgtctaatttctaacaaaaaattaaaaaaacattgtaagaggaaaaaaagaaaccctaaaacaaacaagcaaacaaaaaacccaaaacaacaaaaagtttcaagaaacagagctagctgacagaactatattcagatatggcaggtatattagaattatcagattggtaattttaaacaactatgactaatatggtaagagtgataatggaaaaaatagaca

SEQ ID NO: 34422 - DNA, 387 bp, Homo sapiens
gcgaattggagctccaccgcggtggcggccgaggtacgcggggctcttccggggacgttgtctgcaggcactcagaatggtccagcgtttgacataccgacgtaggctttcctacaatacagcctctaacaaaactaggctgtcccgaacccctggtaaatagaaattgttttaccttttataccaagaaggttgggaaagcaccaaaatctgcatgtggtgtgtgcccaggcagacttcgaggggttcgtgctgtaagacctaaagttcttatgagattgtccaaaacaaagaaacatgtcagcagggcctatggtggttccatgtgtgctaaatgtgtttcgtgacaggatcaagcgtgcttttccttatcgaggaagcagaaaa

SEQ ID NO: 34423 - DNA, 400 bp, Homo sapiens
gactactatagggcgaattggagctccaccgcggtggcggccgaggtacttccctgtgaaaagttcaggggccatatggattggtgtccccacaatgctgcctgacatcatggcctctggcttgcagaatcctaagtcagtgatcttggcacggttctgcttatccagcagcacattttttcagtttgatatcacgatggacaagtccctggctgtgcaggaagcggattccctccaccacatctagtgctatctgcaaacgtgtctccagggtcagcccagccttcagccctgtgtagagatcccggtgtagccgctccataatgaggagcacagcaatgctggagccaccaccatagttgtagtcaatgactgaaccatgggagatccaccaatcgct

SEQ ID NO: 34424 - DNA, 397 bp, Homo sapiens
gactactatagggcgaattggagctccaccgcggtggcggccgaggtacaacccctttacttgctacgactacagctacagggagaaggaactagaagtgcaaaaaagtccactcttccctgtcctttatcccaggagagagtcaggaacaatgagctcctacataaagatcaaaaatgtggtttctcatttcctgctttcaagtgtcctctcctatcaaagactcaagcaacttttgctgcagcaactggactatgggctgcactaaccaccgtatcaaatccaagcagagcagatcctgtgacctggagaaaggagccggctgtccttccctgctgtaacctagagaaaagccccgcgtacctgcccgggcgggccgccatcttgggtcatcgat

SEQ ID NO: 34425 - DNA, 383 bp, Homo sapiens
gcgaattggagctccaccgcggtggcggccgcccgggcaggtggagaaggacagctgcttttttatatagattaaaagaaatctcaatcttcaaagtttctatttactgtaacagtagatggtttcaaagaagcacttggccgggcacggtggctcacacctgtaatcccagcactctgggaggctgaggcaggcggatcatgaagttaggagttagagaccagcctggccaacatggtgaaaccctcgcctctactaaaaatacaaaaattagccaagtgtggtggtgcatgcctgtaatcccacctactcgggaggctgaggcaggagaattgcttgaatccaggaggcggaggttgcagtgagccgagatcatgccactg

SEQ ID NO: 34426 - DNA, 396 bp, Homo sapiens
ctactatagggcgaattggagctccaccgcggtggcggccgcccgggcaggtacaatattagatattaaaaatggattcaagagaagttactaagaaatgctgacatactgtatatacaaatttttagttcaatatatgccattatataaagcaccaagagtaatgcctttataaatcaagccattttttatgactctgtttctaatctttgtaacccttttacatttgttccaatatacacacatcataaatgttacttgctcaacacttcaccgatttggtctcaacttaaaaatatatatgtaggcaaaaattaatgtcaaaaggaactgttctaacagttacaagagaaaatagtaaatatttggaattaaactgtcatgaacaaagaaaga

SEQ ID NO: 34427 - DNA, 116 bp, Homo sapiens
tatagggcgaattggagctccaccgcggtggcggccgaggtaccaggcaccacacgaaaggatcactgaacgtctagtaggacatgagtaaaagggtaagatcagctactcaacag

SEQ ID NO: 34428 - DNA, 231 bp, Homo sapiens
actatagggcgaattggagctccaccgcggtggcggccgaggtacctgaacaaatcccatcaaggacagattctcagtcttgaagaggcagcacagtaaaggggaaagatcatgagttttggggccaggttcccttggatattgtggggcccccacacttctggatgatgttggaaaaactctttgagacttaggcttcacattctgtaaaatggaaattacttatttttt

SEQ ID NO: 34429 - DNA, 457 bp, Homo sapiens
tactatagggcgaattgttgctccaccgcggtggcggccgaggtactgtttaaaaagaataatcataattttatattatacaattgaaacatgtattcaatactgtttactgaatatctcaagtatacttatttacttagaaacaaaggaatcaacggatatctgttatataacgtttaaattactaaaaatactttatatagcattgctccataaatgctagtgtaaatgctgacgaaagtaaaaatgtcattccctacatttgctaaatatattgtgacacattataagtgttttttaaaacatatcactaaggggcaaaagaagtttgcaaaaataattgtaagtattttaattatggaaaaatttagaacacagcatagtattcatgtgaaggaaggattttaaatggaacccaaaaaatatcagcagcaggaagtttctattatactttaag

SEQ ID NO: 34430 - DNA, 174 bp, Homo sapiens
acgactacactatagggcgaattggagctccaccgcggtggcggccgcccgggcaggtacctcatcaatatgtgcatttattatttgccaattaaaataatataaaactctttaaaaattaaaaaccatatatattccctagtattttctgggatgtatttttttattctcaat

SEQ ID NO: 34431 - DNA, 308 bp, Homo sapiens
ggcggccgaggtactatggttaaaatatagtaagttagggacgaaactaattttcaagtgataagtcaactttaggatggcgtgacaagaaaagacttcactaagatagcgactttagaattaaacactgtaataagcaaggaaggcagccatgcagatattgggccgagggaggacattcaagcagaggcccaatgagagccaagaccgcaagaccttattgtgctatagcaaggggagaatacaattggaggtaagtgaaggagaagacagttttaaaagatgaggtcagtgtgataaaagggacc

SEQ ID NO: 34432 - DNA, 364 bp, Homo sapiens
tatagggcgaattgtagctccaccgcggtggcggccgcccgggcaggtacgcggggacgtcttccgttttctttttacatcaatgcagagtccctctgtgaatttacaacacccaacacccatgagtttagtccttaagaaggaaaattgagcaagtatttaattggttggacattgcataaaagaggtccatatccaggctaactttagaaattttattctcaaacttagttggcctcttttttttctgtcagaggaccattcttagtggcactggggaaatcttgggacccagaagaatttaactgcgctcactgcaaaaatacaatggcctacattggatttgttgaggagaaaggagccc

SEQ ID NO: 34433 - DNA, 362 bp, Homo sapiens
tatagggcgaattgtagctccaccgcggtggcggccgcccgggcaggtacatttgttgggggcgtgacattaacatatataccacttagagtggacatgcatttagagaaaatttaatgagctggaaccaagctgggaattccaacatgtataagttaaacacatgaggaggagccatctaaggaaacagaaacagagcttccagcatgtggggggcatttggaagaaaacgatgccatataagccaagatgaaatatacatcaaggagaaggaaggtgtcaatagttttgaatgctatgaagaaagataagaataggttaatagtccttatatttttataacagatgtcactattgatctt

SEQ ID NO: 34434 - DNA, 428 bp, Homo sapiens
  misc_feature 190, 203, 204, 207, 209, 211, 215, 227: n = A,T,C or G
tatacggcgaattggagctccaccgcggtggcggccgcccgggcaggacttaaattttaaaaatttagatttcagattattgtcttgcaaaaggggcagactaggtgcctgatgactataatcccagcaatttggaaggctgaggcgggaggattgtttgagcccaggagttcgagaccagcctgggccncatagtgagactnnatntncncccnaaattacccacngcggctatgctagtctatagtctcagctactcatgaggctgaagtgggaggaccacttatgcccaggaaaccaaggctgcagtgagccatgatcataccactgcactgcacttcaacctgggggacagaacaagacagaccctgtcgccccacaccttccctatacccccggaaaaaaaaagtgcaaaaaaaaaaaaacta

SEQ ID NO: 34435 - DNA, 437 bp, Homo sapiens
tatagggcgaattggagctccatccgcggtggcggccgaggtacttttttttttttttttttttttttttcgggacacagggtcttgctgttgcccaggctggagtgcaggggcatgaccatagctcactgcagccttgacttccttaactcaagcaatcctcttgcctcagcctcctgtagcactgtaggcacacacaactatgcctggctaattttaacatttttctttcacctttttgacccttatcttctatacccggctaattttttgtagagacagggtcttgctatgttgtccaagctggtcttgaattcctcgcctgaagcaatccttccaccgtagcttcctgagtgttaggattacaggcatgagccactgcacctggcccccaacaggtaattttagaacatttttccctctacactaattaccct

SEQ ID NO: 34436 - DNA, 362 bp, Homo sapiens
tacactactatagggcgaattggagctccaccgcggtggcggccgaggtactcatggagggcaccaccaagaacttcctcttgaatttctccctgtagccgcccacaccagccctggtcttggaggctgctgaaccacgattatgctgccatcagtgaaggaagctgaaattgtgaaagtgaaacaccatggctggtcatgtgccaaatgatgttgtgttctgcaaagtatctccaatcctgggttggatccagtaggtgcacttgggcacccaaaccggaaacagggattcttgttccttaaacacaagacactccaatgagaaagctgctctcagatgagttgcagatcaggcaggagga

SEQ ID NO: 34437 - DNA, 262 bp, Homo sapiens
tactactactatagggcgaattggagctccaccgcggtgggcggccgaggtactcagctgaaaacactgtttcagccccctctctggtgacctcagccttctccaggtgtatctcttgatgatcttggagaccagcagccacagctgctgctactcctgcaggagactgtcaggctgtggtggggggcaggggtgttggaggagaagttgaaaatccgggtgttctctgcccctctgctcctccatcttagcttctggagga

SEQ ID NO: 34438 - DNA, 391 bp, Homo sapiens
ctactatagggcgaattgtagctccaccgcggtggcggccgcccgggcaggtacgcggggatgcgtgaaaggtgctgtgaccgccctccgggttgtggctggtggccttcggtgtttcgggtttggcagttcactcaccaaggtgatctgatggagtgcacttcgcacgattccaaagaagggagaagacagaggagaatgccagatgaagacagaaacagagattgaagttatgtggccataattcaaggattgctggcaacaccagaagccaagagaaagatgaggaagaattctcccctagacctttcagaaggagcgtggcccagccaacaccctgacttcagacttctggcctccagaactgtgagaataaattcttactgttgta

SEQ ID NO: 34439 - DNA, 242 bp, Homo sapiens
tatagggcgtattggagctccaccgcggtggcggccgcccgggcaggtacttttttttttttttttttttttttttttgcatgtatttatttctccttgcatatttattggtttttcctcttctagttttccttactaatacctactctagtaaacctggcctccaataattcctgccgtcgggggtccaggctatgcaattcttccatcatttctggctggcagagcgtctcccgagacta

SEQ ID NO: 34440 - DNA, 442 bp, Homo sapiens
ctactatagggcgaattggagctccaccgcggtggcggccgaggtacgcgggatgtctcttgtcagctgtctttcagaagacctggtggggcaagtccgtgggcatcatgttgaccgagctggagaaagccttgaactctatcatcgacgtctaccacaagtacgcgggagatcccagaggctgaacagctcgaccttctctgcacagcaggtccagcatcctttgaagcatgagttcttaccagcagaagcagacctttaccccaccacctcagcttcaacagcagcaggtgaaacaacccagccagcctccacctcaggaaatatttgttcccacaaccaaggagccatgccactcaaaggttccacaacctggaaacacaaagattccagagccaggctgtacctgcccgggcggccgctctagaactagtggatcccc

SEQ ID NO: 34441 - DNA, 458 bp, Homo sapiens
actatagggcgatattggagctccaccgcggtggcggccgcccgggcaggtacaaccaagtagttagagtagttcatttattatggtaggaaataacaagagagaaacagattttgagtgggaaggaaaataagtattcttgtttagtcttgttagtttaagatgcatattaaacatccaaataaagacatcaaagaaacagttggatgtataggtctgaagatctatggtcaagactaactgtagagattttcatcccgaataaaatcatctagactattgcagatattaaggaaataaaggggttgaagatcaatccctgggaatctccacaaataagaggtgagggggaggactcataattcccaaggaggcttaagaaacattccttgactggctgatgccaaagaagcccaaagaagaaggtattttatgacagagcacaactgggccaaata

SEQ ID NO: 34442 - DNA, 396 bp, Homo sapiens
atacgactactatagggcgaattggagctccaccgcggtggcggccgcccgggcaggtacttgcaggtggtttggcctggaaaatctagatgagtggtttttaaatatacatgcttattagactcaccaaggaaattgaaaaaacaatactgattactgagaccagcttttctagattcttcattcattatgagtcaggaaaggccaatgaatgtgtattgataaaaaggttcctggccaggtgcagtggctcacgcctgtaatcccagcactttgggaggccgaggcaggtggatcacctgaggccaagagttcaagaccagcctggccaacatggggaaacgccatctgtactaaaaatagaaaaattcgtcacgtgtggtggcaggggcctgt

SEQ ID NO: 34443 - DNA, 184 bp, Homo sapiens
ctatagggcgaattggagctccaccgcggtggcggccgaggtacttttttttttttttttttttttttttttatttatttagagacaggttcttgttctgttgcctgggctagagtgcagcggtgcaatcctaattcactggggcctcaaattcctgggctcaagtgatcctcctgccccaccc

SEQ ID NO: 34444 - DNA, 306 bp, Homo sapiens
attggagctccaccgcggtggcggccgcccgggcaggtacttttttttttttttttttttttttaataaagatgtggttttgccatgttggccaggctggtctcgaactcctgacctcaagtgatctgccaaccatccataatatttaaataagcatattgacttcttcttaaactaaagggttaaatataaatattttattttaatagttcaggtatcatgtaatctcatatcttaatgctcaagttaataaattcctattttgctatacaatttatgaaaatagcgcttataaaatgtgtttta

SEQ ID NO: 34445 - DNA, 444 bp, Homo sapiens
tattgggcgaattggagctccaccgcggtggcggccgaggtacggtggctcacgcctataatcccagcaatttgggagtgccaaggtaggcagatcacttgaggtcaggagttccagaccagcctggtcaacatggtgaaaccctgtctctactaaaaatacaaaaattagccgtgcgtggtggcacatgcctataattccagctacttaggaggctgaggcaggagaatcacttgaacctgggaggcagaggctgcagtgaaccgagatcgcaccactgcgctccagcctgagtgacagagagaacatctcacacacacacacaaaaaaatccatttctttccttctgtaaatatcacatatatgcaaatccacccacccatatttctgtatatgttctattacccccctcaaatattaaatggtaaaagaaacacttatgtg

SEQ ID NO: 34446 - DNA, 402 bp, Homo sapiens
cggccgaggtacatcacatttctcagcttcagtttatttattgaggttcgagcaatagaacaatcataatgcacatgcctatgctttatcctagatgtgttactttagaattttggaggtggtagctggataagtgcattgtggaaaagcttcttcatgtattgtgacacactcctttcatgaagaggcattgactataccataaaccctagaaatacgttattggcaatgctactgttttaaaggagagaaaggcatctttttgtttttgacccataatggcattgcctataacaggtgaaagggaataatgctattgttacaggaatcaacattatccatttttgaagagtttcattaaacaggcaatatttaattggttgtctgttctacgttaggagc

SEQ ID NO: 34447 - DNA, 427 bp, Homo sapiens
gcgaattggttctccaccgcggtggcggccgaggtaccaggcaccacacgaaaggatcacgaacgtcgagaggacatgagaaaagggaagatcagcaccagcagaagcaatccagagaccaagagaaccattacactgaccgtgattaccggaaagaaagggattctcataggcacagagaggccagtcatagagattcccattggaagaggcatgaacaggaagataaaccaagggcgagggaccaaagagaaagaagtgacagagtatggaaaagggagaaagatagggagaaatattcccaaagagaacaagaaagagatagacaacaaaatgatcagaaccgacccagtgagaaaggagagaaggaagagaaaagcaaagcaaaggaagagcatatgaaagtaaggaaggaaagatatgaaaa

SEQ ID NO: 34448 - DNA, 414 bp, Homo sapiens
atagggcgaattggagctttcaccgcggtggcggccgcccgggcaggtacaaaggccgcagacaagttgtcagcaacattagataactcagggaatatcattcccataaatcttaaggcaatctacttatcagacgaatgagtaacatacaatcaaaatgactggatgatgactggggggacatcaacataaagactatgatgtgcattcaatatttacacgaagaactaggataaatgaaagatgagagagagaaagagagagagcaaacagtatataatggctctgtgctccaacaatgtgggaacaaccttataaagaatgtgtaaggacaggaagaacatatgcaaaaatgtcagtggtaacagtgttgggtggtgttattctaagaatgctttgcgtgtgaatagtaat

SEQ ID NO: 34449 - DNA, 423 bp, Homo sapiens
tatagggctaattggaactccaccgcggtggcggccgaggttcttatgagaagcggttttcattcccttgtattctacagagcagtttattagagtgaatgcattttaaggccttgcatttgatatgtcatccagttcataatcaagttgcctttttctggctaaaacataatgattatgtatttttctcatttgggcctacaggctgctggccctttgtccctccactgtgggaatcagatctagagcaggctgagcctgcagacacagcagtggccaaaaggtcactctaagtgttttgtcttgactccttacttgaagtccacccagctagcacacatctggtttatactgaagccccctgcctagaaatactcatttcaggaaccaccagtaagcatctgtgaccacacaggctttttg

SEQ ID NO: 34450 - DNA, 427 bp, Homo sapiens
atacacttttatagggcgaattggagctccaccgcggtggcggccgcccgggcaggtacaacaatgacatcacctaacagggcatttctcagaatgcatcccatcattaagcaatgcacgacggtattatacgctgtaaataactgtatgtgctatacttctatgactggcagcacaggtgtgtttacattagtatcactacaaacatgaatcatatgttgcgctatgatgtcataaggtagcaagtttttcagctcaattatattcttatgggaccactgtcgtagatgtagttcatcactgaccaaaatgtcgttatgtggtgaatgactgcggtaaaattcagggcccacgatgttttagtgcaattagacaattacaagagataaagctatatcttttattcctttcctcattatggataaat

SEQ ID NO: 34451 - DNA, 406 bp, Homo sapiens
gggcgaattttagctccaccgcggtggcggccgcccgggcaggtacttttttttttttttttttttttttttttgagacaggtctcactgtgttgcccagtctggagtgtagtggctattcacagacacgatcatgatgcactacagcctcaaactctcaaactcctgggttccagtgatccctccacctgagccttccctagtagctgggactacaggaacaagccactgcacccagctaatcccattcaattttccaattaatcacttactgctttgaagtgtcatctctgatactgctattctaccttttacatttctattttcccaactatttagtaagcttacccttaaggataagtaaggcctgtaattttttgcacatccaggcattttgtaccttggc

SEQ ID NO: 34452 - DNA, 144 bp, Homo sapiens
cccactataggcttaattggagctccaccgcggtggcggccgaggtactcaaagttcaaatggagcccagcaagccagatctcctttacttctaggttccctcaacagttatctcctctgctttagagactgccttgaaaatat

SEQ ID NO: 34453 - DNA, 119 bp, Homo sapiens
atagggcgaattggagctccaccgcggtggcggccgaggtacttaatgtttgttctacataatcactttgcttcttcgtaaataaatactatttaaaaataagagacaatatgaacttg

SEQ ID NO: 34454 - DNA, 185 bp, Homo sapiens
cgactcactatagggcgaattggagctccaccgcggtggcggccgaggtactttttttttttttttttttttttttttttatcatttacagctacctgttaaaatattcttttatgtagttgttttgatttttaacaaatattttcttttatttcaggagaaactgttttctcaaaaatttaacc

SEQ ID NO: 34455 - DNA, 443 bp, Homo sapiens
gcgaattggagctccaccgcggtggcggccgaggtactgtgcgctgaagtgattaatttacatattcattcttgctctgtgatatttaggtgtttgtttttggttagtgcatttattctgttaaaatttaaaatacatttgtgttttttatcctgttttaagtatatataacgtggaatgtatatataggatgtatacacagacacactcagacacatattttaatttagatttctagaagggaaattttaattaaaaataggtgaacattttaaatgacctaatacatatttagtccacattgaaactttggcattttgtcattgccattaaaattttgatggcattaaaatttgatgccattaaaattttgatcagtaggtagcatttttttcttagctacaattgttttttttaattataagtattaaaaattcatgaag

SEQ ID NO: 34456 - DNA, 394 bp, Homo sapiens
actatagggcgaattggagctccaccgcggtggcggccgaggtacttttttttttttttttttttttttttgatcaaggaattacaaagctacttttaatactttggggtgagccccacaggaataaaaaacactgggaaggggtaaccccctcacccccgggagtggcccatggggagagaggctacctgaggggaaggaagcacaaaagggacccgctgcagactcatggcaaagggaatgccatcggtgctgggacctgtgagcactacaggaggaaacgccagcctggtgggactggctccatgcccacaggccatgggcatgagggttggacacgaagccacaaagctacttgggttcctcctttttactcatggcctttttctgctta

SEQ ID NO: 34457 - DNA, 460 bp, Homo sapiens
cactactatagggcgaattggagctccaccgcggtggcggccgcccgggcaggtactttttttttttttttttttttttttttagtatactatttgtatactattgccatctgctgatgtcgatatagaactacaaatatgtaatccaaatgggaagatttcacctcacagggttaagagcagcacactcataacttggaaaatagttgagattttattttcaaaagtaattattataaaaaaatccttagtggatgaagtttaaaaaaacctctacaatgtttgcaagaatttgtgtgctccatccatcctacataacatagaagttggattactcatcttgattcaatgtaccattggtggccaattgatttgatggtaagggagggattcgttgacctcgtctgttatgtaaaggatgcctagggatgggagggcgatgaggactaggatgatggcg

SEQ ID NO: 34458 - DNA, 214 bp, Homo sapiens
gcgaattggagctccaccgcggtggcggccggctggccagcgcttgcctttttgtgctggctcaggcccctttcttgctccaaaagcatgaggggctccctgccttactgacttgcggcgctcctcgaactggctctgtattggtcgtgcagtgaggggctggggccaattgcaaaacactgagctaacctgatacacagagtgctgggtgtgg

SEQ ID NO: 34459 - DNA, 447 bp, Homo sapiens
gcgaattggagctccaccgcggtggcggccgcccgggcaggtaccactttgtataatattcaaaatctatacagcacattgctaagcagagtatacactcaagaaatgtagaattggtaatattatactagaaaatgaacttccagtattgctattattttactaatttgcatagtcactgacctgtgaagagtgaacagtatgtagaagtgcctttgagataggaaattgtgagagtccctaacttttacatacatattagattaatttgagcctacataaaaagaaaacaaatttgtgaggatttgaggggggaaaatcaggggacttcctgtttgcagctcttatcattgggagaacagtaaattagatctagactaatatatttggtctctctaatttatggcaatttgttaactttgtcattgaagtggaatgctgaacaaa

SEQ ID NO: 34460 - DNA, 445 bp, Homo sapiens
tatacactactatagggcgaattggagctccaccgcggtggcggccgaggtacttttttttttttttttttttcttagcatttttttttaagctgttttggggaaaaaaaatcacattccattttttttccccatgatatggataataaaggctggatgtctctgacctagggtgactgcagtctcaatttacatcttatgtccggacgtcccattcaatgtcgcattcattccagacaaaagcgtcccagtttagatgacagattatatgactgcccttttttgtcctcaaggtatgatccaaagggaagcatctttctctgccattgctgtttcccacgcgggccaactgctcagatgttcaagtggagtcacggctcggttatccaatctggctccaaagatgtcctttttggcgagatcaattccagaaacaacttttact

SEQ ID NO: 34461 - DNA, 395 bp, Homo sapiens
gactactatagggcgaattggagctccaccgcggtggcgccgaggtacgcggggctgcagcgggagctccaggtttatcctcagtgttctgtgtcctgtgcttatagaggcccgtcctctgtggccgtgtgacctgcaagtattgggagagccacagctaaaccccgggacccctggaagcctagaaatgttatgagttctcattttgtccaagacctttggccagagaacatacaaaattctttccaaatagggatgctgagaagatatgaagaatgcagacatgacaatttacagttaaaaaaaggctgtaaaagcgtgggtgagcataaggtgcacaaaggaggttataatggacttaaccaatgtttggcaactacccagaaagaaatatt

SEQ ID NO: 34462 - DNA, 405 bp, Homo sapiens
gccgaggtacttttttttttttttttttttttttttgctgaattgaatctgactaccattatgcaagtagggggggagatacatatacaggagtttctgagtgttctttcctaaaacttgtgcacattatgtttgtatatgaaatagaggcagtgtttagaatgaacgtggctgtgctatacttcttgatttcagtgttacaacaaagattagattaaaggaacaacaaacagcatgttacaagaagcattccaattttccagtaagaactgagtcatgcaagagagaccatacaggttccacaattaatctaatgcaaattttaaaagaatataggactcccagacatgaagaaacttgagccacagatttagtccaatgacttcagaaatatttccaggaaaa

SEQ ID NO: 34463 - DNA, 444 bp, Homo sapiens
gcgaattggagctccaccgcggtggcggccgaggtacttttttttttttttttttttttgagaaagggtctctcgctctgttgcccaggctggagtgcagtggcgtgatctcagctcactgcaacctctgcctccagggttcaagagattctcccaccttagcctcccttagcctgggaccacaggcacctgccaccacagccggctaatttttctattttttgtagagatggagtttcaccatgttgcccagggtggcctcgaactcctgacctcaagggatccgcccacctcagtttctcaaagtgctgggattacaagtgtaagccactgctccacatttaactccaatgacgctgagcacaacccagcactctaattacaaaaatttgttttgttataactgaacattccctttctattttagactttcttggctgaaca

SEQ ID NO: 34464 - DNA, 287 bp, Homo sapiens
atacactactatagggcgaattggagctccaccgcggtggcggccgaggtaccaaggtcctaaagccttcaattcttcgaaaggaattagaaagaaggccagtttggcttcaatgtgtaaccatgagggaaagaggcaggaggaagagatcaggcaggccctggtaggccatgttagatgagtgtagtttttattttaagtgcagtggaaagccagataagggtttttttgtttttgtttttgtttttattttgagacggagtatttctctttcgcccaacctgtat

SEQ ID NO: 34465 - DNA, 455 bp, Homo sapiens
cgactcactatagggcgaattggagctccaccgcggtggcggccgcccgggcaggtacatggttcttcctcagaaagtggttcttccttaatgtgtttctttttaccccttttcttcttcttcttcacagatgtttcttcttcttctgccactttttcttcttcctcttcttcaactgaatagggtaagtgtaaaggcacaacaaattaacactgtatcagatctcattccttccaaaaacgtttgagtcctagtttttttctgccattctcatcaactacccaatgtttgttttgtttattttataattgggaaggttctccaaggcctaccactaactttaacgaatgatatagatagagctcagagcaatcttctcacgatcatgaagtcatgtataaaaatcaggattaaaacaaaggtcatctgatctccaatcattattgggaaaaaag

SEQ ID NO: 34466 - DNA, 433 bp, Homo sapiens
tacactactatagggcgaattggagctccaccgcggtggcggccgaggtacgcgggggggactacaggtgcccgccaccatgcctggctaattttttatattttttagtagagacagtgtttcaccgtgttagtcaggatggtctcgatcttctgacatcgtgatccacccgcctcggcctcccaaagtgctaggattacaggcgtgagtcactgcactcagtcaggttttcaggtgctggctccatggctcttcctgagccgaaaataaggaaactccatagaccttgtccactggaactcgttcccatctaccctccactctatccagggtgatggatctctgcagtaagtggaagagttcttcatggcccccaaggttatatccatctagaacttcagcacgttatttcatctggaaatagtgcccttgc

SEQ ID NO: 34467 - DNA, 437 bp, Homo sapiens
atacgactcactatagggcgaattggagctccaccgcggtggcggccgaggtacttttcttttttttttttttttttaaactctttttctttttaaagataaaaatgaatgctttccttcactacccagaaaacgacttccagccctatacctgtgagtatatactgggcctctgcaggtcactgagcatgagatttacagtgtataatgttttctaaaaagttacttattgttatttttttaattgtaaagaatgttcattgaagtgaacttgggaaacatagggaactcaaacaaataaaatcagtcactctttttttaattttattattattattattttttaccacacagaagtagccaccattagcattttgggtctttttttctttactgaattgagagcataatatactgtggttttgtgtcctttcttt

SEQ ID NO: 34468 - DNA, 439 bp, Homo sapiens
tacactactatagggcgaattggagctccaccgcggtggcggccgcccgggcaggtactttttttttttttttttttttttttttttttttctgtcgttgttgctgtttgttgggtttgcttgtgtgcttttgtcctgtaactactcaataaataacacaaaagataaaaggctttgagaaccttaacttttttttctattggcttggggtgtaaatccactgcaacaactattactacttgaaaagatatgctagagtaaatagaacaatacagttaaattcacctgaagtctttaaaatcttttttttttccgggtatttttaacccatgtggcaaaaaggcattaccatacaattttagctgttggtaacaaattatctcttttacattgctttcccaactaattctgcatagcactttcatattttactagaata

SEQ ID NO: 34469 - DNA, 430 bp, Homo sapiens
atagggcgaattggagctccaccgcggtggcggccgaggtacttttttttttttttttttttttttaaagacaaggtcttgctctgttgtccaggcctggacaacacagcatgtgcagtggtgtgaacatggctcactgcagcctcgacttcccaggctgaagtgatcctcccgtctcagcttgagagtagctggaaaccacaggtgtgtgccaccatgcccagctagtttttaaacttcttgtagagatggggtcttgtcatgttgcccaggctggtcttgaacttctgggctcaagcgatcctcctgccttggcctctcaaagtgctgggattacaggcgtgagccactgtgctacaccaaatgttgacaaggctgtgtgcaacctgaattgtcatacatttgtggtgaaaggataaaatgatccaat

SEQ ID NO: 34470 - DNA, 325 bp, Homo sapiens
tagggcgaatcgaattggagctccaccgcggtggcggccgaggtacttttttttttttttttttttttttttttttgctgttgttgatgttgttgttgttgttgttttgcctttttttgatttttttggggttttttcttttggctttttttgtgtttaatgtttaagtttttcatttttagggtgggtaatttttttatatcttatttaattttaattttttgcagccacaggagttttagccatttcagaaaccttgctcttgaacttgctgcttgtttcctctctggggctccattcatagcacagttgttgcactgaggct

SEQ ID NO: 34471 - DNA, 431 bp, Homo sapiens
tacgactcactatagggcgaattggagctccaccgcggtggcggccgaggtacagcagccggatctcagctcactgcaacctccaccccctgggctcaaccgatcctgccacttcagcctccagaggagctgggaccacagacacgcactaccaggtcaggctaagtttttggtttttttggtagagagggggtttcatcatgttgccaggctggtcttgaactcctgagctcaagcgatcctcaggctcccaacgtgctgggattataggcatgagccactgtacccagccaaattgcttcattttttattactccatacttcctacataagatacttcctacacctggccaaattgcttcattttttaaaaatatattttatttaatgtagtctcactctgttgccctggctggagtgcagtggcatga

SEQ ID NO: 34472 - DNA, 174 bp, Homo sapiens
atagggcgaattggatctccaccgcggtggcggccgaggtacttttttcttttttttttttttttttctcccgactcagcttcccaccctgggctttccgaggtgctttcgccgctgtccccaccactgcagccatgatctccttaacggacacgcaaaaaattggaatgggat

SEQ ID NO: 34473 - DNA, 403 bp, Homo sapiens
tacactactatagggcgaattggagctccaccgcggtggcggccgcccgggcaggtacttttcttttcagtcctacccactttctattcccctgggactccaatgaaataaatgttagatcttttgttactgttccaaatgcccctgaagctctgtttgttggttggttggttttcttcccccagttgattttctctctattgttcttattgggtaatttctattttcaggtccactgattctctcctctccccactcccttctgctgttgaatccatctactaagctttttgttttggctactgtatttttcagttgaaaattttctactttttttaaatcatctatggctttgctgagacttttctatttttggcttgaaacattctaattttctacttgg

SEQ ID NO: 34474 - DNA, 153 bp, Homo sapiens
tatagggcgaattggagctccaccgcggtggcggccgcccgggcaggtacttttttttgttttttttttttttttttgctaaaaatgccctgagatatccttggagatactgaattggacttagtttggggcttcaatatgcctattctgaat

SEQ ID NO: 34475 - DNA, 399 bp, Homo sapiens
  misc_feature 337: n = A,T,C or G
tacgactactatagggcgaattggagctccaccgcggtggcggccgcccgggcaggtacgcgggggaaaacaagatggaggattcggcctcggcctcgctgtcttctgcagccgctactggaacctccacctcgactccagcggccccgacagcacggaagcagctggataaagaacaggttagaaaggcagtggacgctctcttgacgcattgcaagtccaggaaaaacaattatgggttgcttttgaatgagaatgaaagtttatttttaatggtggtattatggaaaattccaagtaaagaactgagggtcagattgaccttgcctcatagtanttcgatcagattcagaagatatctgtttatttacgaaggatgaacccaattcaactcctgac

SEQ ID NO: 34476 - DNA, 330 bp, Homo sapiens
gcgaattggagctccaccgcggtggcggccgcccgggcaggtacattttcctttgtggcatggtggcctgaaaatactgtgaggtttaacaatgaaggcaggtgactggtgaggagagttccagccactggattctccctcagtcccctgtgctgtggcccttggtgacccctaaatttcagtgcccctgcctgacactggagtccctctataaagaagcccctttctagctagctagctgttccatcccgcacacccccacagaagccttttgctgccattagtaagcacgccctctattttctcacctgtgattgattcatgcatgat

SEQ ID NO: 34477 - DNA, 160 bp, Homo sapiens
tcactatagggcgaattggagctccaccgcggtggcggccgcccgggcaggtaccattcttctagtgggggaggagcatgacatttttgtggtattcacccccagaacaggttggtatggctgggccaccctgttccaggttctttggctttccctgggt

SEQ ID NO: 34478 - DNA, 181 bp, Homo sapiens
tacttactatagggcgaattggagctccaccgcggtggcggccgcccgggcaggtactagatacccagtaaagtgcttaactaattctatccctttgtcatctacccaagtgttagttcagtccaaaagagtcaatacattctaaaaaggtttaaatagatttttggattcgtgatcactt

SEQ ID NO: 34479 - DNA, 437 bp, Homo sapiens
cgactactatagggcgaattggagctccaccgcggtggcggccgaggtacaatcttggctcactgcaacctccgcctcccaggttcaagcgattctcctgcctcagcctcccgagtagctaggattacaggtgcccgccaccacaaccagctgattttttgtatttttagtagagatggggtttcactatgttggccaggctgttctcaaactcctgaccttagacgatccacccacctcagcctcccaaagtgctggagttacaggagtgagccaccgtgcccagccccatatactttaaattatctttagattacttataatatctaatacaatgtaaatggtatgttaacagttgttatactatattgtttagggaatcatgacaataaaaaagtctgtatgtgctcagttcagatgcttaaaaaatatatatt

SEQ ID NO: 34480 - DNA, 400 bp, Homo sapiens
ggcggccgaggtactaaaattgtgttgggagcagggatttggaaatttctgagagatgtgtagttaatttagtaattctgtttcatgagatatgatctgttatgctagtggtttaataggcttgctatgtaagtagaacgtggctcaactagatatctttatatgtatgggcattactcttagtgatatttgtttcctgtcctttgttgctcatgctgtttaagtgcaggccgagacccagcctctttgtaagtaccaaaatgatgcaagaatgataagtaaatgtgtaaataatttgcagaggagcgttttagggtaggaatggcgattgctaaaaggtaaatttaataaaaaggtgcttcctttcctcaaatagtttcgcacccctcatcggatcatt

SEQ ID NO: 34481 - DNA, 237 bp, Homo sapiens
actcactaagggcgaattggagctccaccgcggtggcggccgaggtacttttttttcttttcttttcttttttttgatacagagtcttagtcacccagactagaggtcagtggcaggatctcaactcactgcaacctctgcctcctgggcttcaagagaccagcccacctccgcctccaagtagcctggggactacaggcgatgcgccaccaatgcccggctactttcttgaaattt

SEQ ID NO: 34482 - DNA, 454 bp, Homo sapiens
agggagtcacgactactatagggcgaattggagctccaccgcggtggcggccgaggtacttttttttttttttttttttttttttaatagagacagggtttcaccatgttagccaggatggtctggatctcctctgacctcatgatccacccacctcagcctcccaaagtgctgggattacaggcgtgagccaccgcgcctggccgggtcaggctctttctaatctgtttaaaaccatatcacccagaaggtattcagtatatacttatttaaatgaattgaaagtcatatgagcagcatggacttactactttaaaaaccacattattagaaacctaacaccttggaagctctgcatattctgaatgaagaatatactaaaccactcagagggaaatagttattaaccattttaccacagacgactaaacaactaccatggcccttcccttgt

SEQ ID NO: 34483 - DNA, 452 bp, Homo sapiens
atacactactatagggcgaattggagctccaccgcggtggcggccgaggtaccttctctctcttctttgcagaggcctttctgggcttcggctgtggctttggaggagcaggtttagcagacaaccttgtggatcttctctgcagttcctacttaaccttggttttatctcctttagcatccccttcagcctttctctcgggcagggtggcagcgacagtggtgggacataggcactgggcagtggagcacgggctttggtcggtctaggggtcatcgcctcttcttcttcacactgctctgctttgtgcatttctattcttttttgtagccagagaagtaaatgcatatctttgcaactaacacttccagactcatctgcaaaatcaagtgcactaaataaataaataaataaataatcaatcatgggtcctttttagatagtgtttcccc

SEQ ID NO: 34484 - DNA, 270 bp, Homo sapiens
atagggcgaattggagctccaccgcggtggcggccgaggtacgtgaaagcgctttgaagatcacaaacccatttagaaatatgtgggttgctcttcctcaaatcttagaaagctgcctactactataaatacattcattcatatctttccctcattcctttcagtaatttaaaaatgtataggtatccaacttacatgtaagcacttttgcaaacactcactgatttactatgaataacaatcctactatatgcacaattatcatttccc

SEQ ID NO: 34485 - DNA, 410 bp, Homo sapiens
atagggcgaattggagctccaccgcggtggcggccgaggtacttttttttttttcttttttttttcggtttggttcaacatttcttatctgctttctgtcataggaagaacacattgagtgtagtattggtaggatccttcagcaccctgcttctgttatggaagctcaatgggaaaattcctctctccccagcccttggcagacagagctcatgatggtagagttttgaatgaagatgtggtatgctctggtaatgagcatccaactgctgtgtggaatgttagtgtcttggcgagaatgttcataatacctaacttccagaatccctttgggcctcacacattttccagaactacctcccaccaatgtgcagactttttattctaccgggaatttcctttcttgcttg

SEQ ID NO: 34486 - DNA, 432 bp, Homo sapiens
tacgactcactatagggcgaattggagctccaccgcggtggcggccgaggtacagggtgtgaacaatgaaaaattataaaggcatgtaataaaaatgttccataaaaacaaagatacctcaagcaggtccacctatacctctagtttagtttagaaactaattcagtattttaagaatcatataattttaaactttgcactaagcctaacctttttaaaaaatggtcagggccaggtgcagtgcctcaagcctgtaatcccagtgctttaggaggctgaggtgggaggactgcttgagtccaggagttcgagactgcagtgagctgtgattacaccactgcactccagcctgggagagcaagaacctgcccattaaaaaaccaaacaaaaatgggcaggtgtggtgtctcatacctgaaatcccaacacttt

SEQ ID NO: 34487 - DNA, 399 bp, Homo sapiens
actactatagggcgaattggagctccaccgcggtggcggccgaggtacaaactctgtttagataaagaattaaacaaaacttccatttttattaataattcaagtataatccataatatgattattaggtgttataactaataagttgttattttatatcttaatgtaggtaaagagaactggtcttgtggtggtgaaaaacatgaaaattgttggtctccactgttctagtgaagatttacatgccgggcagattgctcttattaaacatgggtcaaggctgaaaaactgtgatctttatttttccagaaaaccatgttctgcttgtttgaaaatgattgtaaatggtaagtgcagaaaagggtttgttggggattaagagtatttatctgggatggg

SEQ ID NO: 34488 - DNA, 453 bp, Homo sapiens
atacactactatagggcgaattggagctccaccgcggtggcggccgcccgggcaggtacaccaaagtctttatctgacaggagctgagccagcgatttttcaaggcaagacagtgaccagctgaactcctgagataatgagtatatcatttctccttggcaaaggttatggaattaaagagaataaataacttagttcatacttcctccctcaaagttaaaagatattccctttgcagcgaaaaatggagctttgaggctccttcgagaaacgctccttggggttgtagaaaggaggaagaggttagcatgattttaaagcaactggcatctctgcagctaaccaagttggagacattagggcttcttgtggccattaacttttgtgtatctcacatctccttcagaacttacgctggaaaaactccaacagcttcatatggacagatggact

SEQ ID NO: 34489 - DNA, 347 bp, Homo sapiens
cggggcggccggccaggacccggggagagcacataactgcgttagaagcagctggtcaggcctcgtagaggtgggctaggacgactgtttactgctgtcaggtctatggggcctttagcaaaatcggatatactttcgtttaaataaacacaaatatattacaggttgaccatccctaatctgaaaattcaaaaccctacgaaatttgaaactttttgagtgccaacatgacacctcaaatggaaaattccacacgtgacacctttgcttctgatgggtctctgaaccatcataaacactgtttatttcaagaacaaaattattttaaattttgtataaaactggtc

SEQ ID NO: 34490 - DNA, 330 bp, Homo sapiens
tactatagggcgaattggagctccaccgcggtggcggccgcccgggcaggtacctgtctcatatgtggcaactacgtggggcagcacactcaaggaatgaaggaagtttcagtgaatgacaactttataaagacagtgttgaggcagcccagtgcagcggtttgggagccaggaacagcgtgtgggccggagtgtggctgcaggacaggaggtcaaaaataagggttgagggtggaataggaagaccccggaacgtcatcctgggagcttgagattttattctacatttctcttgttcttaactatttagggtgatggatctctgcaata

SEQ ID NO: 34491 - DNA, 437 bp, Homo sapiens
cgtaatacgactactatagggcgaattggagctccaccgcggtggcggccgcccgggcaggtacaactttgctatttattagctggtccttgacatgaccaggttagcaaggtagaaagattacaaaggttggcatgaagaaggtaggcttgtatgagtgatggtggatgataacaaatctggggaaatgaaatgaactacagacaggacacatgcgatgtgcttcagagtatgcagcttttccaatcaaggaaagcttcgtgcaggaggccaaacagaacctgaacgctgcagtatgacctcagggactcacatcactttctgaaatatctaacaaaaatcgcatttctgctgttgcactctgaattcctagaacctgtgcgtgaaccatttcactgcattcattttccccatgttattctttaaccagccttctt

SEQ ID NO: 34492 - DNA, 462 bp, Homo sapiens; identical to SEQ ID NO: 33419

SEQ ID NO: 34493 - DNA, 412 bp, Homo sapiens
ctatagggcgaattggagctccaccgcggtggcggccgcccgggcaggtacgcggggaggagaggcgtgaaggctcccaaaaggaaatgctggcacctgggcccagaagccagggcctctaactcctggggttgatttcttcagtgaagttgcaccctacaaagggaatatggccaaagcggcactcaactgaaggctgatatcaggcgattagacagccatgcattctgcgtttgtctggaatggattgtagagagatggacttatatgaggactaccagtccccgtttgattttgatgcaggagtgaacaaaagctatctgtacttgtctcctagtggaaattcatcttcacccggatcacctactcttcagaaatttggtctgctgagaacagacccagtccctgagga

SEQ ID NO: 34494 - DNA, 260 bp, Homo sapiens
actactatagggcgaattggagctccaccgcggtggcggccgaggtactgggaagttgagcattgctatgaacatacctgaaaatgtggaagcacctttggaagtgggtaatgggcacaggttgtaccactttgtagagcttaaaataatacaggaaggcctgcccccggtggctcatgcctgtcttcctcagcactttgtgagtctgatgtgggcagatctcaaggtcaggcatattgactaccattgctggactaaca

SEQ ID NO: 34495 - DNA, 404 bp, Homo sapiens
gtatacgactcactatagggcgaattggagctccaccgcggtggcggccgcccgggcaggtacgtatcatgtagaccgcaggcagtcttaattttgtagctggtctgacaatcttttccttttaattggagttttttcagtccatgctatagtttggatatggtttgtctgtctccatcaaatctcatgttggaatttgatccccagtgtggtggtattgggagctggggcccagagggtggtgtctgggtcatgggcatggatgcctcataaacagattaatgtcctccctgaaggtgagtgagttctcactcttgagataataaattagctctagaggagatgaaagagttcctggaagagtaggttgttataaagccagaccatctcttaggtttccctct

SEQ ID NO: 34496 - DNA, 220 bp, Homo sapiens
taatacactactatagggcgaattggagctccaccgcggtggcggccgaccggccaggtacgcgggattgtcaagtggaagatctaatcatactgaatattcattcatgccttgctttgccaatagggaaaaaaattacaaggacaatcggatattctctcagatgactgaacctttctttccatctacctgaaggcgacgaaaggaggagggagggagg

SEQ ID NO: 34497 - DNA, 186 bp, Homo sapiens
tcactatatggcgaatgggagctccaccgcggtggcggccgaggtacacgcagtcctaatccgttaaatatttctagctaacaatgcacgtggggctcttcagctctgcatacagtcatgttcttgctaaagtccatgcaagatataaaccaccttctgccctgctttttttgagggggaggggaa

SEQ ID NO: 34498 - DNA, 416 bp, Homo sapiens
tatagggcgaattggagctccaccgcggtggcggccgcccgggcaggtactttttttttttttttttttttttttcccattttatgtccaaggttggtggctcagcctaaaaaaacacatttcaaatactcaataattatcacatgtggctagtggctatcataccggcacagatctcaacattattttaagtcttaaataaactgatggagaaagatacctcatatgagagaaacacttaaaagacaactactgaaatgtaaatgaaatggtaacgacaggagtaaagaatctaagatggtaaggaaaaggacagcaaaccatttaattgaaatcgtcactgagaaatgaaagctctcctcggataagcaataggtttctggaaaatcaaagttattttccattataactggccc

SEQ ID NO: 34499 - DNA, 429 bp, Homo sapiens
gtaatacgactcactatagggcgaattggagctccaccgcggtggcggccgcccgggcaggtactatttaagccaattaattaaccatgatcactcaaacttaggcaatatgatacttatcatcttcatatacaaagaaaaatggataaactgcctataacaatatagcattaaaaatcctattgatgttcaatattctgtggctattaacactgtggggtgtttttaaaagtcaaaaatactgaactgtttagaaaattctgcatagtagtagtattacattgtgaattttattttcaaatttgatcaataaagatgaaaataataaaattaagcagtcaaaagaagtagcaaaaacaagatagtcattcatatatacagaacatatagattcatttctagttgattcaatcctatttatgtatttaa

SEQ ID NO: 34500 - DNA, 159 bp, Homo sapiens
tatagggcgaattggagctccaccgcggtggcggccgaggtacaggtagcttccaaatctaatggaaatattatcatgacatactttctagttcgtttgagattcatgggaaatggatgtcgcatggtatagacagtgaaacccctccacagtcccggg

SEQ ID NO: 34501 - DNA, 246 bp, Homo sapiens
cgactcactatagggcgaattggagctccaccgcggtggcggccgaggtacgcgggggggcatcacggacctaccaatatgtgatgtcacccctggtggcccagctgtgtcatggagaaactccagctgggcccatagattctgcagcgggaatatccaaggcttatttatgcctgtctgagtgggatttggccagtcaagatgcttttttgctcggttagctggccaccatatcaacatttttgg

SEQ ID NO: 34502 - DNA, 321 bp, Homo sapiens
tacgactcactatagggcgaattggagctccaccgcggtggcggccgcccgggcaggtacctgtctcatatgtggcaactacgtggggcagcacactcaaggaatgaaggaagtttcagtgaatgacaactttataaagacagtgttgaggcagtccagtgcagcggtttgggagccaggaacagcgtgtgggccggagtgtggctgcaggacaggaggtcaaaaataagggttgagggtggaatacgaagaccccggttcgtcatcctgggagcttgagattttattctacattctttttgttcttaactatttagggtg

SEQ ID NO: 34503 - DNA, 422 bp, Homo sapiens
gactactatagggcgaattggagctccaccgcggtggcggccgcccgggcaggtactttattttcaaaacactcatatgttgcaaaaaacacatagaaaaataaagtttggtgggggtgctgactaaacttcaagtcacagacttttatgtgacagattggagcagggtttgttatgcatgtagagaacccaaactaatttattaaacaggatagaaacaggctgtctgggtgaaatggttctgagaaccatccaattcacctgtcagatgctgatagactagctcttcagatgtttttctaccagttcagagatgggttaatgactagttccaatcccgcgtacccagaaaataagatagggggttccaaaatgaagaatcgctccttttgcaaaccttatggtaacaaatataatattta

SEQ ID NO: 34504 - DNA, 307 bp, Homo sapiens
atagggcgaattggagctccaccgcggtggcggccgaggtactttttttttttttttttttttttttggttgcctctataatcattttgactttaaaatgttttctgcagatcctttaataactgcaaatgtagaagtatggtgtaacaagtaattggtatgactaacactaaaaatgtatgggaaataaggatactattgtaaagaaaacaagaaaaacctggggtaggggagcagtattgattctctcttaggattcctaaaattttttgaccaaacccttttaccatggaacattctaatgggg

SEQ ID NO: 34505 - DNA, 206 bp, Homo sapiens
cgactgactatagggcgaattggagctccaccgcggtggcggccgcccgggcaggtacatttcaatacagatgcaatattttttctcaaatactttcagtccaaagttcgttgaattcactgatgtggaatcaacaaatatggagggccagtggtgtattttataaaatcacttgtatcaaaagaaaacaatttaagtatgtatgg

SEQ ID NO: 34506 - DNA, 435 bp, Homo sapiens
cgactactatagggcgaattggagctccaccgcggtggcggccgcccgggcaggtacacatctattattaccatggctgtgagatcatttaagaaacagacaaatgtcatttagaaacagactatagaatcaaatcacaactaaagagaatgctttatgatagctcagacagtggtaggaaatcaaaggcaaattcacatttttgattactcaccctaaaatatgctgaaattgaacatttgtgacccaagtaactaaaaatacattgaagaaaactataacttaactacatattgagttcatttcaatcgcagtagtctattttaaaaacaacctcccataaggaatacaggaatggaatccattgaaagcaacagctgtcaaaaactctgccaagaaactcagagtaacttattgcatcataaaaggtgaggt

SEQ ID NO: 34507 - DNA, 413 bp, Homo sapiens
  misc_feature 347: n = A,T,C or G
tacgactactatagggcgaattggagctccaccgcggtggcggccgaggtacacaggccgggcacagtggttcacacctgtaatcccaacactttgggaggctgaggcgggtggatcacaaggtcaggagatcgagaccatcctggccaacatggtgaaactctgtctctactaaaaaatacagaaaattagcccgtcatggtggcacgttcctctagtcccagctactcgggaggctgaggcagaagaattacttcaacatgggatgtggaggttgcagtgagccgagatcgcgccactgcactccagcctggtgacatgagcgagtaccccattctcaaaaaaanaaaaagttgttatgtggacaggctaaccattaatataaaaaaaaaagtaaaggaaaaaaaagagag

SEQ ID NO: 34508 - DNA, 160 bp, Homo sapiens
cgactcctatagggcaattggagctccccgcggtggcggccgcccgggcaggtacagtgataaatggagagacgggagtttaaaatgaaggataagccgcaaatgaggatgaagttaatggatagagaaaagatgggaggaagaggtctctctctttact

SEQ ID NO: 34509 - DNA, 303 bp, Homo sapiens
tacgactcactatagggcgaattggagctccaccgcggtggcggccgcccgggcaggtaccttgggtctgaaggggtcactcaagcgctctgctatctctgcagctaaaacgggtgtcaggttttcagctgctactaaagataatgagcataagcgttcactgaccaagactccagccagaaagtctgcacatgtgacccggtctgggggcaccccaaaaggcgaggctgtgcttgggacacacaaattaaagaccatcacggggaatttctgcctgctgtttattacccccattttcaagtt

SEQ ID NO: 34510 - DNA, 342 bp, Homo sapiens
  misc_feature 310: n = A,T,C or G
tactatagggcgaattggagctccaccgcggtggcggccgcccgggcaggtacgcgggatcctgaaccatccaggccaaataagcgccggctatgcccctgtattggattgccacacggctcacattgcatgcaagtttgctgagctgaaggaaaagattgatcgccgttctggtaaaaagctggaagatggcccctaaattcttgaagtctggtgatgctgccattgttgatatggttcctggcaagcccatgtgtgttgagaggcttctcagactatccacctttgggttcgcttttgctgtttcgtngatattgagaacagacagtttgcgggtgggtg

SEQ ID NO: 34511 - DNA, 352 bp, Homo sapiens
  misc_feature 300, 329: n = A,T,C or G
ctactatagggcgaattggagctccaccgcggtggcggccgaggtaccatgttttactatcctcagaaaattcccaataaaccagagtttgaggacagtaatccttcccctctaccaccggatatggctcctgggcagagttatcaaccccaatcagaatctgcttcctctagttcgatggataagtatcatatacatcacatttctgaaccaactagacaagaaaactggacacctttgaaaaatgacttggaaaatcaccttgaagactttgaactggaagtagaactcctcattacncctaattaaatcagaaaaaagggaagccntgggtttttaccagtaacccaaa

SEQ ID NO: 34512 - DNA, 404 bp, Homo sapiens
tatagggcgaatcggagctccaccgcggtggcggccgcccgggcaggtacatgggactacaggcacgccccaccatgcccagctcatttttgtatttttagtagagacagggtttcaccatgttggccaggatgatcttgatctcttgacctcatgatccgcccctcttggcctcccaaagtgctgggatcacaggcgtgagccaccacacctggccctctatttattctctttaaagagagagaaaactatgagaggccaaaattatttaattaaatctttaccttagcacaagggaaaaaatggaatttgcctaatataggtgatgaagcatacacaatgaaccagaaacaattcacatttttagtaaaaggcaaaaatttgagtacttataaagctatatg

SEQ ID NO: 34513 - DNA, 414 bp, Homo sapiens
atacgactactatagggcgaattggagctccaccgcggtggcggccgcccgggcaggtacgcggggtcccagagagctcgtaggggaggacagtcaagggactcaagcgtctctcttgactccccttctctcgctgtgcagtggcggcgccgaggggtcgacgctcagggctaatctctatgagtcaccctcgaagccccggggtaatattgggtggatcacaagaactaatctttcatgatttggaaaccggaaggaaagaagcacttttgtagctgacttacctcaatgacatgaccagtgtctgagcctacaactgcgctatcttccctggatttttcttcaccttttccttactcatgagccaggtatgtgtttttagttccataaaaaagagccctagccaggcgtggt

SEQ ID NO: 34514 - DNA, 259 bp, Homo sapiens
actatagggcgaattggagctccaccgcggtggcggccgaggtacgcggggatactaagccagggcagaatgcttgtgaagtagcaactaaagtggcagtgtttcttctgaaattctcaggcagtcagactgtcttaggcaaatcttgataaaatagcccttatccaggtttttatctaaggaatcccaagaaaaactggggaatggagagacagtcaagggttatgtcagaaaaggatgagttatcgtgtttcaacat

SEQ ID NO: 34515 - DNA, 335 bp, Homo sapiens
ggcgaattgtagctccaccgcggtggcggccgaggtactttatttttaaggttaaattccagaaacacatatttttccttttccttttgccccacccctgctcaagatgggctcttggtatgtcacccaggcaagattcaaactgctgagctcaacccatccttctactttagtcttgagtacctcgaactacatgagtaagccactactcctcactgattatcctatttctcatttgcattcttacttcaccataaaattcctataaggttagtcaactgacaacagttttctgtaagtcgcaatactcttgtcattaaaattgtttcctggcc

SEQ ID NO: 34516 - DNA, 395 bp, Homo sapiens
tatagggcgaattggagctccaccgcggtggcggccgaggtactttttttttttttttttttttcagagtattttctttcttgtccagattagctaaattggattgttctatgctaaattcacttaatcactactctattatttttgaattttttagttctgtttttttcacttggttctttttttaaaaaaaacttctactacctttctgagacttctacttttttacttttttcaagaagctttataattacttgctaaagcatttttaccatgactgtttttaacttcttcagataaccacaacatttggttaatcttgaggttggcttggttaactgtcttttctcatcctgcttatgattttccttctaattgtgatttttccggttctt

SEQ ID NO: 34517 - DNA, 237 bp, Homo sapiens
tagggcgaattggagctccaccgcggtggcggccgaggtactttttttaattttttttttttttttttttttttttgagacagtgtttcactcttgttgcccggctggagtgcagtggctcaatgttggttcacggcaacctccgcctcctgggttcaagcagttctcctgcctcagcctcccaaagtacctgggattaacaggcatgccgccaccatgcccccactaatttttact

SEQ ID NO: 34518 - DNA, 436 bp, Homo sapiens
  misc_feature 313, 326, 327, 328, 343, 344, 345, 356, 357, 372, 373, 415,416: n = A,T,C or G
tacgactcactatagggcgaattggagctccaccgcggtggcggccgaggtactcaacaaataatagctgacaagtttgatagccagaaaacggcaaagctgggatgcaaacccaagcagtctgactcccaagcctcttaaccattcttaagagaccacctacctccattcttcttcgaacacatgtttttcctggttgccacctgaatacgtggaaccaccatccacccagctggttaaaccagaatcactcagaaatctacctctccttcatattattcataactgccagtgttaaaattctaattggctngggccaggcacgnnntggctcatgccagtnnnaatcctagaannctttgggagggccgnncggcaggtgggatcaacgagggtcaagggaggattcgagacnncatcctggctaaccatggtg

SEQ ID NO: 34519 - DNA, 287 bp, Homo sapiens
gactactatagggcgaattggagctccaccgcggtggcggccgcccgggcaggtacttttttttttttttagagaaaatcattagtcccattcttcttttgaatgctacttttccttctctaaaaactgaccatgaattatattctcattcatcaatttcttatttctttgtcagaaaagcagttagcattttttaattattattgcaagtttttcaacattcattgtaaaaaaaaaaaaaaccaaacaggcatgaactttaaaaaaagaaagttatacagaccttt

SEQ ID NO: 34520 - DNA, 162 bp, Homo sapiens
ctcactatagggcgaattggagctccaccgcggtggcgggcggccgggcaggtacgtgccaccatgcctagctaattgctttcttatttttgatagacacagggtgtcactgtgttgctcaagctaatttcaaactgtttatctgaagcaatgtccctgcct

SEQ ID NO: 34521 - DNA, 283 bp, Homo sapiens
agggcgaattggagctccaccgcggtggcggccgaggtactttttttttttttttttttttttcttttcttttttttttaacttgtttacattttttttaaagatggagaggctaacaaactttgcaacctttccaggtaaggattcatgagacctgagcagccagccagcccctgaaatggttggaacaagagaaagaagaagagcttgacagataccctgcctgggctggcagctagctgcaccacaagtctggccaggtgacaacgggcacatctccctt

SEQ ID NO: 34522 - DNA, 270 bp, Homo sapiens
atacgactactatagggcgaattggagctccaccgcggtggcggccgcccgggcaggtacttttttttttttttttttttttttttctttttaaataacaaatttatttttcacagttctggaggttgccccaaaaagcttttattatctaaattagggttaatgcacttttaaatcataatgttaacattttttttttttaataaagacagaatttagccttgttgcccaggcttgaccttgaattccttgagctcaaagtgatccgct

SEQ ID NO: 34523 - DNA, 410 bp, Homo sapiens
  misc_feature 355: n = A,T,C or G
cactactatagggcgaattggagctccaccgcggtggcggccgcccgggcaggtactatgtcgattcgacagaacattcagaagattctcggccttgccccttcacgagccgccaccaagcaggcaggtggatttcttggcccaccacctccttctgggaagttctcttgaactcaagaactctttattttctatcattctttctagacacacacacatcagattggcaactgttttgtagcaagagccataggtagccttactacttgggcctctttctagttttgaattatttctaagccttttgggtatgattagagtgaaaatggcagcccagcaaaccttgatagtgctntttggttccttagattgatttttaatcaaattaagttggattggattagtttaag

SEQ ID NO: 34524 - DNA, 401 bp, Homo sapiens
ctactatagggcgaattggagctccaccgcggtggcggccgaggtaccatcctccaaaagaagtcaattttactgtataataacttttaaaaacaagtatacattttttttaaagatggagaggctaacaaactttgcaacctttccaggtaaggattcatgagacctgagcagccagccagccctgaaatggttggaacaagagaaagaagaagagctcgacagataccctgcctgggctggcagctagctgcaccacaagctggccagctgacagcgggcacatcccttcatcacccagtgcctttcttccctcttgtgaaaatggagatatgctgagaaggtttcttcagctcatccagagaaagcttcttcagctaactaggctgtagaaagggcct

SEQ ID NO: 34525 - DNA, 414 bp, Homo sapiens
gactcactatagggcgaattggagctccaccgcggtggcggccgaggtactaggaaggcagacggctcgggacttgcccagcatcctcaagctggcaccataccagcgtgactagagtcacctcccttggctccttgtccactgccctttgcatctcatgcgggtctccagaagaccccgctcctgctgtgcaggctcccacgcataccttagacactgctgtggtgttgggtggccacgtgacccacacaggccttttctagttcaccagttttctgcaaggatgctggttagggagtgtctgcaggaggagcaagtctgaaaccaaatctaggaaacataggaaacgagccaggcacagggctggtgggccatcagggaccaccctttgggttgatattttgcttaatctgc

SEQ ID NO: 34526 - DNA, 384 bp, Homo sapiens
cactactatagggcgaattggagctccaccgcggtggcggccgaggtacgcgggggggcatcacggacctaccaatatgtgatgtcacccctggtggcccagctgtgtcatggagaaactccagctgggcccagagattctgcagcgggaaaatccaaggcttatttatgccaggctgagtggatttggccagtcaggaagcttctgccggttagctggccacgatatcaactatttggctttgtcaggtgttctctcaaaaattggcagaagtggtgagaatccgtatgccccgctgaatctcctggctgactttgctgggtggtggccttatgtgtgcactgggcattataatggctctttttgaccgcacacgcactggca

SEQ ID NO: 34527 - DNA, 422 bp, Homo sapiens
ctactatagggcgaattggagctccaccgcggtggcggccgaggtacagtagtgcactcttggctcactgtagcctcgacctccggggctcaagtgatcctcctgccttagccccacaagtagtgggactataggcacacaccaccatgcccatctaagtttttgtattttatgtagagaccaggtttcaccatgttgcccaggctgatcttgacctcctgagctcaagtgatctgcccacctcggactcccaaaatgctgggattataggcgtaaaccaccatgcctggccttaaatcaactttagagtcaacatctcttatcactggagcttctagagaaactccatcacgtggtgctctctttcctgatgtgttgtgcccaaatagcttgttctcattagatgacttatttgctatgat

SEQ ID NO: 34528 - DNA, 385 bp, Homo sapiens
atacgactactatagggcgaattggagctccaccgcggtggcggccgaggtacttttttttttttttttttttttttttttagcagattgaacgcctttatttttctcaaatataaaatcagagtctcctgaggcagcacatgaactccagagagagaatcaacaacaagaatcacattgctaaaaagaacaggccttatttcttaattccagaattgcttcaatagttattctctgaggctccagtgtcttttctgtccaagctactgtcaggcaagtgcccaaaagcaccactcatcacatgtgcgtaataccgaagaatgtatacaggtttcttttgtgttccattgctttttagtctaaatttgcattgcattggcttttc

SEQ ID NO: 34529 - DNA, 421 bp, Homo sapiens
aatacgactcactatagggcgaattggagctccaccgcggtggcggccgcccgggcaggtacagcactgtaggcaagtaaacgaaaccaaaggctggctcccctggccgaggcctgggactgatgcaagacagccagccagtcacctccgcctcccatgaacctcttggaaaacttctcctgtcccacttctgccaccctccagctccttgagagagccagagttgagaagaaaatgagcctgaagttgaaagggaaagttcttgcctgaaacagtgctgggaataagtccagaccatttccctcaagagccacctcttcactccttaagccagaggacaccacaaagacacagtttaatggcctctcatgccactcctcaggtggcttgtgagggcagccagtgagggactgcaggattt

SEQ ID NO: 34530 - DNA, 325 bp, Homo sapiens
tcctatagggcgaattggagctccaccgcggtggcggccgaggtactttttttttttttttttttttttttttagagatggggtcttgctgttttgcccaggctgatcttgaactcctggcctgaagcaatcctcctgtataggcctcccaaaatgctgggattataggcatgagctactgcaccctgccttttgtttttaagattgatgcctaatgctaacagaataagctattagccacatttctacaaaggtgatttttaagtcaggtttattctctaaaaatgagaggcatttaaaaacaatagatagtttctttaacaac

SEQ ID NO: 34531 - DNA, 418 bp, Homo sapiens
cgactactatagggcgaattggagctccaccgcggtggcggccgcccgggcaggtaccaaattttgtaacataaaaaaatactaaatgatcttaaagcttcctaaattgtgaaaagggtatgtgctaacatctcagaactttagacctgcttgttgtcatctttaccgatctctgatgataaatgcagaagggatctgagagtttttaaagcaagtagagtcaatcagagttttgaacatcatagtaatacttccgtgattcagagttagatcatataaatcaaagtaacaatttggattttttttaaacaacaatatcataactgtcataaaacagatggtccaaccccaggagcagataataacttgggcagcttctgtggggaacaaagacggggaaaacaactgttctaactgc

SEQ ID NO: 34532 - DNA, 328 bp, Homo sapiens
tacgactcactatagggcgaattggagctccaccgcggtggcggccgcccgggcaggtacaggcatatgctcttcagcaaaaatggatttggccgggcgcagtggctcagcctgtaatcccagcactttgggaagctgaggcaggcagatcgcttgaggtcaggagttccagaccagcctggccaacttgatggagccccatctctgctaaatgcaagaattattagctaggcatggtggcgggttcctgtagtcccagctgcttgggaggctgaggcagccagaatttcttgaacccaagaggccggaggtttgcaattgagccaag

SEQ ID NO: 34533 - DNA, 438 bp, Homo sapiens
tcactatctcactatagggcgaattggagctccaccgcggtggcggccgcccgggcaggtacaaagagtagctgccccttctcagggcagatgatgctttgagaacatactttggccattacccccagctttgaggaaaatgggctttggatgattattttatgttttagggacccccaacctcaggcaattcctaccttttaacctgaccctgcccccacttgccataaaacttagctaagttttgttttgtttttcagcgttaatgtaaaggggcagcagtgccaaaatataatcagagataaagcttaggtcaaagttcatagagttcccatgaactatatgactggccacacaggatcttttgtatttaaggattctgagattttgcttgagcaggattagataaggctgttctttaaatggctgaaatggaac

SEQ ID NO: 34534 - DNA, 429 bp, Homo sapiens
actactatagggcgaattggagctccaccgcggtggcggccgaggtacagttttatgtgcttaattaaagactgtaaaacgtaaaggatcattctgactttttttatgagttttttttttcttttcccctgtctaaattgtgtgtgggcttccccagttttaaactcctatctttttctttagtgataccttacttgataatggacttgggaataggtttaacccagtttgcattctccaaatgtttccagtgatatgttttcctgggaaaagcaaatctgcctgtaataaatatttttaatctaaataaccaaatctgggtgcccaactttttgttgggatttatgctgctagtaatacattccataatatacttttgaaaagaaaaattaccattgtgtattgtgcttgtgcattaacttgtccttt

SEQ ID NO: 34535 - DNA, 355 bp, Homo sapiens
ctactatagggcgaattggagctccaccgcggtggcggccgcccgggcaggtactagggcaggtggagttggcatgaacttaacagcagcagatactgtgatttttgttgacagtgactttaatcctcagaacgacttgcaagcagctgccagggctcatcgcattggccaaaacaagtctgttaaagttattcggctgattggtcgagacactgtggaagaaatagtctataggaaagcagcctccaaactgcagctcaccaacatgatcatagaaggaggccattttactctgggtagcccagaaaccctgctgccgatgcttgaccctccagtttgaggtgaggattactca

SEQ ID NO: 34536 - DNA, 260 bp, Homo sapiens
actactatagggcgaattggagctccaccgcggtggcggccgcccgggcaggtacttttttttttttttttttttttttatttatttattttctgcggagatctgggagtctctagaccgagaataaaaatggtcaatatttaatgacagtatcaaatgcccaacatttttccaggggcttttcatggataatctcataggaggttcattccaggcctatgggggagttattgttattattcccatgatgagaaaatccc

SEQ ID NO: 34537 - DNA, 414 bp, Homo sapiens
actactatagggcgaattggagctccaccgcggtggcggccgaggtactttctccttgctgtttttttttttttaagacattcctcccagaatactccagggggcagtgttttataacacattttccccactgggtgattgaaggatggaggatttttgaaaatttgacagctacatgaaacatgagaaaacattttcctcacttctgaagtcggtttgcagctggtaacttgttcatccagaaaacattctaaagcaatgagactttgtgagctgtgcttacagtttgggagaatcatgaagattctttctatattttgcatttacttcccagtgcttcatagcctgcatttttgtttgtaactaaagacagaaagaaatttcgtaaatccttggaaattgaaaaaaaaaaaa

SEQ ID NO: 34538 - DNA, 406 bp, Homo sapiens
attggagctccaccgcggtggcggccgaggtacgatcttggctcactgcaacctctccctcccgggttcaagtgattctcgtgcctcagcctcttgagtagctgggattacaggcgcgtgccactgcgtccggctaatttttgtatttttagtagagatggggtttcaccatgttggccaggctgatctcaaactcctgacctcatgtggtccacccaccttggcctcccaaagtgctgggattacaggcgtgagccaccacgctcagcctacaagcaattttttaaaaactgacacctattactgataaaattctctgtttaaaatcctatttactattttaaagataagtattagttttttttaaatacaataattctgttattgataaaatttaaggcatttt

SEQ ID NO: 34539 - DNA, 417 bp, Homo sapiens
tactatagggcgaattggagctccaccgcggtggcggccgaggtacatacaaacaatgaaaacaaatcacatccttaggttccatgattaccgagatgatttcccctgccctaagtgctttattatatttcttaaaaaatataggagcagcagcttatcacaagtctccacaagtgcattaatgatggaatcaaaacaacacaacagattcataaggatgagagaactgcagaacaaccagaagtcagttttatgcttcttcttgttctggataattcagaattttgcggtgtgcctgtcgtaaatattgctgctgtttgaagtaaactttaaatgctccttttatggcaacaaacgcaattccaccctaaaataaaaaggaaaattagctttttataatgcagatttagagaaaca

SEQ ID NO: 34540 - DNA, 420 bp, Homo sapiens
ctactatagggcgaattggagctccaccgcggtggcggccgcccgggcaggtacagcaaatgtgccacttgaatatctagtatgaagctggtaatgaagaaattgccatttctgaagcagatatgaaatatgatctgcttaattgttaaggcaactgacctttcaaaagtgcagagtcttattaaaagaggggaggggtagaagcagaataatagtcatatgtctaacctgccccagttaactcctcttgttaaattataagccagttattttttttagatagtatttttgtcacttggataatcacaggaaatatataagaaaagagcttggactaacttgagaagttggacatggaaagcaagaccaagttccagttgggtttaattttccctcttggttattttcggacacaaaggg

SEQ ID NO: 34541 - DNA, 417 bp, Homo sapiens
tatagggcgaattggagctccaccgcggtggcggccgcccgggcaggtacatgggactacaggcacgccccaccatgcccagctcatttttgtattttagtagagacagggtttcaccatgttggccaggatgatcttgatctcttgacctcatgatccgcccgtcttggcctcccaaagtgctgggatcacaggcgtgagccaccacacctggccctctatttattctctttaaagagagagaaaactatgagaggccaaaattatttaattaaatctttaccttagcacaagggaaaaaaatggaatttgcctaatataggtgatgaagcatacacaatgaatagaaacaatcacattttagtaaaaggcaaaaattttgagacttataagctatatggtagcttatttttgggt

SEQ ID NO: 34542 - DNA, 426 bp, Homo sapiens
  misc_feature 369: n = A,T,C or G
tacgactactatagggcgaattggagctccaccgcggtggcggccgcccgggcaggtaccctgtctcgttgaatttttacaaaaaactgaaagagttagttttgtgttattactacctccatctcaaagatgagtcttggaaagcttaagtaactttaggtcacattgtaatcagtggcagaactgggacttaagaacataattcatgactgcattttcttttctttctttctctttctttctctctctctcttttttttttttttaaagagatagcatctcactcactatgttgcccagactggtcttgaactcttgggctcaagcaattcttccacctccgcctcccaaagtgttagggattatagnggcatgagccctcatggcctggccccttgcattttctatttaaggtgatcttgaagt

SEQ ID NO: 34543 - DNA, 418 bp, Homo sapiens
cgactactatagggcgaattggagctccaccgcggtggcggccgcccgggcaggtactatatggacaccaacatggagcagaaaatgagggcagcagtgtccaatctcattccaggtgagaagttgcacagtgtccaataggtgcatacatctccttagtaagtagttgtgattaacaatgaaatagaaatgaaaaatatatttttttatttatgtgtattatatttttcaagcagctaataagttggtaggacataatatttaattcgttggggacctaattatttataaattgaatggttagatatttcttttggcctaagccaccatgaaaaaatcactgaggcgctaagggaaacatgaactaagaagcccttctgagtctctgttttctcaactgtaagatgaagaaacctgc

SEQ ID NO: 34544 - DNA, 361 bp, Homo sapiens
tatagggcgaattggagctccaccgcggtggcggccgaggtacggaaacaaaagagataataaactaatagttatttaatatgctgtaacaacaaattagaaacattgagaattaaagtgtgttttctttgtaacaaacttatcaagagtagtttgaacaagggttgccttcttctggtataatttagatacatatcagagcaaacatcttttctgtggctttgcaagttgtcatactgtattttgtttggatcagcttccaacattttatcttttatgctttcagtattgtaaaatacctctcagttttctttagcatgcagattttttttttttggttagcgtctttttcctctaggaa

SEQ ID NO: 34545 - DNA, 365 bp, Homo sapiens
actactatagggcgaattggagctccaccgcggtggcggccgcccgggcaggtacacggattttagattctactaatccaacccactctagatggttttcttctgttgatgcgctggcagtcaatactatataatgtctatacttttgaaagaaattcggtggctcaagtagtttggaccaatctgactttccttgaagaatttcatctgtgactgcaagaccttgtttaaattcttctaccattactgttcgagttgatgtggacacattatacgtagaattctgttgtgggtaggcaggggtgattatgggcatgagatgatacctaatctgatggaatttaccccgaggaatcccaggacag

SEQ ID NO: 34546 - DNA, 340 bp, Homo sapiens
ctcctatagggcgaattggagctccaccgcggtggcggccgaggtacctttttttttttttttttttttttttttttgggtttaaaaaaaaaaaaaaaaaaaaaaaaaaattagctattctggtggatgtgtaatagtatctcattgtgggtttggttttcatttccctagtgactaatgatgttgaatgtcttctcagtgcctattagttgtgttacttattcaaaaatcttctgtgaaaaacctgaccttgggaaggtaaaatcttttgtcaatttgtaatttaaaaaaacatatttttacaatgggtcaaaggagttctttatattttctggatacc

SEQ ID NO: 34547 - DNA, 387 bp, Homo sapiens
tacactactatagggcgaattggagctccaccgcggtggcggccgcccgggcaggtacagtagtgcactcttggctcactgtagcctcgacctccggggctcaagtgatcctcctgccttagccccacaagtagtgggactataggcacacagcaccatgcccatctaagtttttgtattttatgtagagacaaggtttcaccatgttgcccaggctgatcttgagctcctgagctcaagtgatctgcccaccttggactcccaaaatgctgggattataggcgtaaaccaccatgcctggccttaaatcaactttagagtcaacatctcttatcactggagcttctggagaaactccatcacgtgggtgcttctctttcctgaatg

SEQ ID NO: 34548 - DNA, 427 bp, Homo sapiens
actactatagggtcaattggagctccaccgcggtggcggccgaggtacgcggggctctttctgatctctttttcatgctcctccttgctccaaagaaaagccggatggcagaagagcccagaacctattggtgagttccacgaactgacaaaatcaagtcacggcgcctacaaagatgaggggcagattctggctgccttttaatttcgtccttcacctgatatctgtgccagagaatgataaaaatcataataaaggaaataatggaagaggagacttatgttactggggacatctaacataattattttcctgattcagtggcatggttcagtcttccaggagttctgctacagagaagagagtaacccccatccatcatggccaaagcacccagtcaggctccgctctggatccagcccgacaa

SEQ ID NO: 34549 - DNA, 391 bp, Homo sapiens
gcgtatacgactactatagggcgaattggagctccaccgcggtggcggccgaggtacctgactcatcaactcatctgtcgcaggtgctcagtcgaaatttgttaaataaatggaggcgcttagttaagtttgcctttttcttttgtagcaatgtgaaagctaagggtggaagtctagagtgaagctgagttttcagcttgggcagaggcttaaggaataaaagatggaagagtaattaaggagtgggtcgtgctgtgggaagtgctgtgtcaagacacctgaggatggaattggtagccctctgttttgggactggttcagatggtgttttgggttcctttctatgacctttatctctgaaacttgattgtcttaaaatgtattttgtggg

SEQ ID NO: 34550 - DNA, 127 bp, Homo sapiens
gtatacgactcactatagggcgaattggagctccaccgcggtggcggccgcccgggcaggtactttttttttttttttttttgaacatattataattatttcaaagtcccttgttaattcaaacatc

SEQ ID NO: 34551 - DNA, 387 bp, Homo sapiens
acgactcactatagggcgaattggagctccaccgcggtggcggccgcccgggcaggtacctcatcaatatgtgcatttattatttgccaattaaaataatataaaactctttaaaaattaaaaaccatatatttccctagtatttctgggatgatttttttttctcaatgacttttgagaatgcttttgctttgttctcaaacctttgataatctccatcattactggttgggtatcccttatctgaaatgcatgggaccagaagtgtttcagatctcagattatttcatatttgaaaatatttccatacagataatgaaatatcttaataatggaaaccaagtataaacaggaattcatttatgtttcatacacaccttatgcatg

SEQ ID NO: 34552 - DNA, 374 bp, Homo sapiens
gtaatacgactcacttagggcgaattggagctccaccgcggtggcggccgcccgggcaggtacttttttttttttttttttttttttacaattaactaaacttttttttaaattaactaaagttggtatttcactaggacgatttagcagatgaaatgggttttaagtttagaacaccatttcttcttccttattacatttccctttttaatgttagccctctacaaacacacacatatacacacacacacacacacacactctgcatcaaaaaagccttcctacattaatacttgagcatgataaccttacaatgaaaggtaaatcattagttgaatcatgaaacattttcttccccttgtggagaaaaatca

SEQ ID NO: 34553 - DNA, 397 bp, Homo sapiens
gtaatacgactcactatagggtcgaattggagctccaccgcggtggcggccgcccgggcaggtacctttgtctgaagcctgtggactgtgcggttgttggtcaaggccacattagtttattgttaagtgcaaggtttctggtaacagaaataaagaattcaattgattcatcatcaagaccaaatatatttactaaagatctaccttaaattcattttttagcaggtattatggcattgtggttaagaatttacatttgtgaacatttaccagctgatgaccgaggtgagcttctgtttcctcctgcataaacttgagattataaaaatcccctagttggctgggcacagtggctcacacctgtaatcccagcactttgggaggccgaggcaggcat

SEQ ID NO: 34554 - DNA, 395 bp, Homo sapiens
gtatacgactcactatagggcgaattggagctccaccgcggtggcggccgaggtacttcccattgtaaatcacatttttagatagtccagtggccaaagcccccagacgaacaaaaacactcgtatcagccaagacatgccagaggcctagtgattgtttcccagtagctgagggcagaagccagacctctttcaataaggttgatctttcactgtattaacactgtatataaaggacttttataaaagcttgtagttatggtgttattgtcatcatccagtttaatgccctcttttttccagtaagaaaagaaaggtctgggataatcatgttaattgatttgtttacattttcattttaattagtagcacaactgagagtgaaaatggaaccc

SEQ ID NO: 34555 - DNA, 173 bp, Homo sapiens
gggcgaattggagctccaccgcggtggcggccgcccgggcaggtacaatttttttaacaggagaaagtttataaactagagctcaggggggaaaaaaagccgagagagaaaggcactctggacgctaatgagtggggacggtggtggaaatgcctttctgatgtgcatgtatt

SEQ ID NO: 34556 - DNA, 333 bp, Homo sapiens
  misc_feature 86: n = A,T,C or G
actactatagggcgaattggagctccaccgcggtggcggccgaggtacacgcagccctaacacatcaaatattactagctaacaantgcacagtggaggctgctgtcagactcgtagcatacacgtgcatagttcctagctaacgtcacatgccacatatcaaccaccttctgcctgcttttttgagggagggatcaacaagcctactgggatacacaagtgctgcaagcgacatacaaggctctaggcataacttaaccctacaggaagctccatatccattctctaggacctggctcactcactgagagcatgggaaggtctcaaatgaga

SEQ ID NO: 34557 - DNA, 331 bp, Homo sapiens
atacgactcactatagggcgaattggagctccaccgcggtggcggccgcccgggcaggtaccaggaacagtcaaagtcactgaaatgcttggtgagacatatgatcatttgctttctgcaataattgccatagacttatttcttagtccccctaccccaaatgctaaattgaaaccctacctttttttccagaatattcctgattatgaacttgatgaaagataccatgaaggtatcttttgaaggcaaggtggcgtcactcagacttaccataccaatcaaaggaaaaccattcccaatatgtaaatggaccaaggaaggccaggatatt

SEQ ID NO: 34558 - DNA, 416 bp, Homo sapiens
tatagggcgaataggagctccaccgcggtggcggccgcccgggcaggtacatatcaagcaattcagctttttcttgtgatgtcataactttccctgcttcttggggagcagttccagcatcactaatagtgctttgtttgggccacttgttatttaaggtttataataatcgcactaaacacaatgaaaaacaaaggagaacattgagagatcactttaactttttataatcagtttatgtgtattttatggtagtaaatgataaaatagctagtatctacatacagtttatacatttgtggcatacctttctcttaatttttaaggtatttttaggctacttggctcatctgagtttttcaaagtgttgcgagtctccaaaaacttctcagtgggtttactgaaaatttatgtgt

SEQ ID NO: 34559 - DNA, 386 bp, Homo sapiens
atacgactactatagggcgaattggagctccaccgcggtggcggccgaggtactaaaacaacacatacctgttaaaagtgtcaggttttaaccaagcgattttccattaaatattctcccagatgctctggaagttttttcgtgtatctaacaaaaaaagtaaatttcaaacgatgcaacagttcctattcctggtaatcaacaggtttactcctttagtttggaaactaagcttaactaagctcttacctttgcatcttcagagctgctccactgtgccacttaagacagcgccattgttcctgcgggaaatcggtatttaagcattctcgcagaaatgtcacactccaagggcgtttttccacacaaaacccttcccctttatt

SEQ ID NO: 34560 - DNA, 405 bp, Homo sapiens
atacgactactatagggcgaattggagctccaccgcggtggcggccgcccgggcaggtactggctgcaaatataccatgaggtgtgtcaactgtataattccaggctcgtaggaaatatccatcctctgtgaacactaatatctttgggatgttatcccctctctgaaggtatacaaaaaataacttcttaggatcagccttaaaggaaaggtaatctgtatcttggcgaagaaaaaaaataactgagaattttactacaaaaaccactttcaaaatctaacatatctttcacattcgaaaccaaaatacttgagaccaactcaaaaataaattgcacaattagcatgatataaacgcatatggttcagttactacagcaagacaggaagggctgttacttcctt

SEQ ID NO: 34561 - DNA, 348 bp, Homo sapiens
actatagggcgaattggagctccaccgcggtggcggccgcccgggcaggtactggacttgcctaatttctaggcatggagttggggcttgtaacaatggtgggagatgggcagtgctttgggaatgtagctgaccactgcatgggtgctaactagcccagggatcttaaagaatttgtgtaggccatgaggatccactccagccactgaatagtcatagaattgaatctaggacatcaccgtatgctactaccatgcagttttatcccttctaagaatccaaatgccctagtttaatttctaaatttttggtttgattattttcactaaagcaacatgtttagtggac

SEQ ID NO: 34562 - DNA, 392 bp, Homo sapiens
tcacttagggcgaattggagctccaccgcggtggcggccgaggtaccttctctaattccaatagatgaaaccttaatacttgtatggcttgaatcatcaagttatccagttctggattagaagaaaatagaggtttttctgcgcgaatctgtttggcgaacacggctatatcttcattgaatgactctgacgagcagacgtccccgcccgccacccccggctcgcggggggtacagcccaagacgttatgaatacccagggtttagcctgatttggtaaaagtgattgagataaaatgtgaacaacaattgtgcatgacatttacttggcattttccagtttccagggggcctgttctcggtagctgtcttcacgtgaaagcactttgaact

SEQ ID NO: 34563 - DNA, 351 bp, Homo sapiens
cactactatagggcgaattggagctccaccgcggtggcggccgaggtacatttgcttttaaaccaacagatactgggaagggggcactgaatacttacacactgatagaactgcccacgctgacctccagtcacaaagcgcttcccatctggattccaagccacacttgtcaaactgtcttcatgagactggctcatttttgtccttagttctcctgtctataaggaaataaaactgtaaatgagaccttcaagatacccctctaaaggaaatatatgagaaaaaaaaaaataactgggatgtctggctggttatcccagttgatttttaaggggagtaatgaatttaagt

SEQ ID NO: 34564 - DNA, 160 bp, Homo sapiens
actcactatagggcgaattggagctccaccgcggtggcggccgaggtacatgtcagtgaatcaaatatctttgtgtttaagcacagtaagactgtcattgaatgtgataatgctgcctaaaataaaacttttaagatgtgaagatccatggtagatttcc

SEQ ID NO: 34565 - DNA, 416 bp, Homo sapiens
  misc_feature 349: n = A,T,C or G
tacgactactatagggcgaattggagctccaccgcggtggcggccgcccgggcaggtaccaatgaaaaaactcttctcagtcattaaaacatgagtaacatgacaactacaaagctttctcaggagtaataatagaatggataagatttagagccaaacaagtgactatggggactcacccattttctatttatattgtatagaactcttaaaacaaagcaaaataaaacaaaacctgatttactctttaattcccagaaaaagctttccttttcttccactcatttgtatttccttaaacagctgtaaatcagcttcttgtattgtgctgacagagaaaataaacagntgattgccattactgaaatttaaagttaaatattaggtatttacatgagcttttatgaagaaatggg

SEQ ID NO: 34566 - DNA, 399 bp, Homo sapiens
gcgaattggagctccaccgcggtggcggccgaggtactcctggctggccccaggcagtctaatgatagagacagctgggtgaccacgggtgttctaatgggagagactcctggtcaaccccaggcagtctaattattaaagacacctgggctaccccagacattctaatgggagcaactcccgaccaaccccaggcagtctaatgatagagacatgtgggccatcacaagaattctaatggaagaggttcctggctgaccccaggagagacaccattctaatgggagagactctgggccgtttccaggctgtctaatgatagagaaacctgggcgactgcaggcattttaatgagagcggctcctgtccgaacaccagcagtctaatgatagagacacc

SEQ ID NO: 34567 - DNA, 385 bp, Homo sapiens
cagctccaccgcggtggcggccgcccgggcaggtacctggctcagcacgaacaccttctgctcaacacaagcattgcatcgcctgctgactcgtcagagttgctcatggaggtgcacggaaatgggaagaggcccagtccagagaggtgagcagatgagctttgctgtccttgccttcctggaaccgcactggtcctcccctttgcttataaaagagagagaatttgattgctgtggttgtaatgtctcaaactttttttgagacaaggcctggctctgtcgcccagactggagcgcagtggtgcaatctttgctccctgcagcctccatctcctgggctcaagcgatcctttcacctcagcctcctgagtatttgggattacag

SEQ ID NO: 34568 - DNA, 355 bp, Homo sapiens
ttggagctccaccgcggtggcggccgaggtacgatcttggctcactgcaacctctccctcccgggttcaagtgattctcgtgcctcagcctcttgagtagctgggattacaggcgcgtgccactgcgtccggctaatttttgtatttttagtagagatggggtttcaaccatgttggccaggctgatctcaaactcctgacctcatgtggtccacccaccttggcctcccaaaaagctggaattacaggcgaaaaccacctggtctcagcctacaagcaattttttaaaaactgatcacctatttactggataaaattcatctgtttaaaaatcctatttaactaatttttaaag

SEQ ID NO: 34569 - DNA, 129 bp, Homo sapiens
cgactcactatagggcgaattggagctccaccgcggtggcggccgaggtacccccgaatctaaaataaaagcagaaattatatgaaaaaactggggtgggagttggaaggaactttagatatgtaataa

SEQ ID NO: 34570 - DNA, 334 bp, Homo sapiens
actatagggcgaatcggagctccaccgcggtggcggccgaggtacctgcacaattattacactatgatttgtttgatggatagttcatgtctgctacttcctgtggcacagatatagcttcattaattacctattgatcatctccatcagtcccaaatccagctgctgcagcgcggtctggaacatcaggctcatccccgcgtacagagtgtaaacacgcattctttctgaggcttccggcgctgatgcgaatacagctcacagagaaacgcatgtgctattggagaacagggctttgtggagaactaaaggcagggatttgatttcacaggga

SEQ ID NO: 34571 - DNA, 393 bp, Homo sapiens
cgactcactatagggcgaattggagctccaccgcggtggcggccgaggtacgtaacaggacatcaataaatattagttgaatggaagattaaatcaacaaaatgggtgatggatctctgcagtaagtggaagagttcttcatggcccccaaggttatatccatctagaacttcagcacgtaatttcatttggaaaatagggcctttgcggatataagttaggtaaaactgaagatgagatcatactggattaggatgggatctaaatccaatgaaaatgtcttcataaaaaacaggaaagaacccatagaaacacaaggaagaaggtcatgtgaagatggaggcagagattggagggatgcaaccaccggcccaggaatgccagcagccaccc

SEQ ID NO: 34572 - DNA, 424 bp, Homo sapiens
cactatagggcgaattggagctccaccgcggtggcggccgccatcttgggtcatcgatgagcctcgccctgtgcctggtcccgcttgtgagggaaggacattagaaaatgaattgatgtgttccttaaaggatgggcaggaaaacagatcctgttgtggatatttatttgaacgggaattaccagattttaaaattgaagtccccaaagtgggcctttcccaatgagaggaaaacagacgagaaaatcttgatggcttcacaagacatgcaacaaacaaaatggaatactgtgatgacatgaggcagccaagctggggaggagataaccacggggcagagggtcaggattctggccctgctgcctaaactgtgcgttcataaccaaatcatttcatatttctaaccctcaaaacaaagctgttg

SEQ ID NO: 34573 - DNA, 423 bp, Homo sapiens
tatagggcgaattggagctccaccgcggtggcggccgaggtacatggtggatgattttaaatcaccctagtgtgctgagaccttgagaataaagtgtgtgattggtttcatacttgaagacggatataaaggaagaatatttcctttatgtgtttctccagaatggtgcctgtttctctctggggcttaaaagccttgggaatgggaggttggatggtttaaagtgtgtttcttaccgccctcctttttcctttaatcttatttttgatgaacacatatataggagaacatctatcctatgaataagaacctggtcatgctttactcctgtattgttattttgttcatttccaattgattctctacttttcccttttttgtattatgtgactaattagttggcatattgttaaaagtctctca

SEQ ID NO: 34574 - DNA, 442 bp, Homo sapiens
ctataggcgaattggagctccaccgcggtggcggccgaggtacttttttttttttttttttttttttttggaatgtaaattgtttttaatatatttaagagcacacagaagtcttgatttataaaaaaataaatatataacatgacaaatttactgatgatcctggagctctgaggtcaaactttttttaaatggaccagtgaaaaccttaaaacatccaatgatcctgtttaacaccacacagggagcattattccagtttgttaaaaaaaaccaaatttcctttgaaggcctctagaaccgaacaaaaattcagtctttatggcagaaagcacatccaaagctaggcaatgaagttcagcctgggccacgtgaacctttcaccagccagcctataacctatggagccaggacaggaaagcatgatccttcagctcatgac

SEQ ID NO: 34575 - DNA, 392 bp, Homo sapiens
gtaatacatactatagggcgaattggagctccaccgcggtggcggccgaggtaccaaagagggcataataatcagtctcacagtagggttcaccatcctccaagtgaaaaacattgttccgaatgggctttccacaggctacacacacaaaacaggaaacatgccaagtttgtttcaacgcattgaagacttcttcaaaggatcttcctttggcatcgaccacattcaggggcaaagaatttctcatagcacagctcacaatacagggctcctttctcctctacaaatccaatgtaggccattgtatttttgcagtgagcgcagttgaattcttctgggtgccaagatttccccagtgccactaaaaatggttcctctgacagaaaaaaaag

SEQ ID NO: 34576 - DNA, 428 bp, Homo sapiens
gcgctatacgactcactatagggcgaattggagctccaccgcggtggcggccgaggtacaagtcaaagggtcaacatgatacaaatgatcatccatagaatcaatgtttctaaatacaaagacaagaagcttagatttatctcactgttccatagaacttatacattcattgtcttctagcttgtaaaaaccaattggtggttttaataaaactggaaactgggaagattgagcaagactgctgtatagaatccaatcccaagtcatctgcccaagggtagattcagtttttctctagcgtttgataagtcaggctgatcttaaaggtagaagttggaaattttttcaaggcagtggttcttaaagcataagttcccaaaacaagcagtattgggcctcacctataaacttgtttagaaatacaaatt

SEQ ID NO: 34577 - DNA, 412 bp, Homo sapiens
cgactcactatagggcgaattggagctccaccgcggtggcggccgccatcttgggtcatcgatgagcctcgccctgtgcctggtcccgcttgtgagggaaggacattagaaaatgaattgatgtgttccttaaaggatgggcaggaaaacagatcctgttgtggatatttatttgaacgggattaccgattttgaatgggaatcccaaagtgagccttaccaatgagaggaaaacagacgagaaaatcttgatggcttcacaagacatgcaacaagcaaaatggaatactgtgatgacaggaggcagccaagctggggaggagataaccacggggcagagggtcaggattctggccctgctgcctaaactgtgcgttcataaccaaatcatttcatatttctaaccctcaaa

SEQ ID NO: 34578 - DNA, 413 bp, Homo sapiens
gactactatagggcgaattggagctccaccgcggtggcggccgaggtacttttttttttttttttttttttttgtagtaaaagtgatcagactgtttcctcttttaagaagaaaaagaaagcagaggtcaatattaagcttccaattaatgcttattcatcacaaatagtaagtaaataatgaccgaaaaaaattcccttagtcaccttttttgccaccttttggttttatttttaacatttttcactatgtgagatttccaagatttgttttattttctgtttccctctaactgcaatacaagctcttgtggactggaaccacacctgtcatattcatgctgaatctcacctgtcatattcactgccaaatcccacctgccataattactgccgtatcccacctgtcataat

SEQ ID NO: 34579 - DNA, 199 bp, Homo sapiens
gcgctatacgactcactatagggcgaattggagctccaccgcggtggcggccgaggtacagaaaaggtgaatctgtgttctgtatattctgcctaaggcaaagaaatgtttagctctctttaaaatagttccataattttttctaaaaagctttgcttgaaaactgtaagcttcccatatctggagcatttcactttaa

SEQ ID NO: 34580 - DNA, 414 bp, Homo sapiens
ctataggcgaattggagctccaccgcggtggcggccgcccgggcaggtacagatctgggaactaaatattaaaaatgagtgtggctggatatatggagaatgttgggcccagaaggaaccgtagagatcagatattacaacagctttgttttgagggttagaaatatgaaatgatttggtttttaaacgcccaattttaagcagcagggcccgaatcctgaccctttgccccgtggttatctcctccccagcttggctgcctcatgtcatcacagtattccattttgtttgttgcatgtcttgtgaagccatcaagattttctcgtctgttttcctctcattggtaatgctcactttgtgacttcatttcaaatctgtaatcccgttcaaataaatatccacaacaggatctgt

SEQ ID NO: 34581 - DNA, 424 bp, Homo sapiens
tacgactactatagggcgaattggagctccaccgcggtggcggccgcccgggcaggtacttttcattatttaccgtttataatttggaggtaagaccattagacccaaagaacttttgtcttggtgtgttcttgtttaaatatggaatttattttacaaaatagttttgttttgtatacatgtctagtcttaaggggcaaagtgaaattttaatgagtctacagaatgttctaagtggactgggtggtgcagcagcttcctcccatcgtgatatttacaagaatgccaggtctctcttgactgataggtcaatggctgtttgatgtgcagcggccaattgtctactataactacagaatgaacctgtatttatgtgtactgctcgaactagaaaatttagccactctctgctttaaggctttgg

SEQ ID NO: 34582 - DNA, 168 bp, Homo sapiens
ctatagggcgaattggagctccaccgcggtggcggccgaggtacagtaaaaatagaatataaaaaaatgctacacatgtgtagggcagtttcattataatttgtccatctttgactgaaacattattattcagcgtatgactatatatacaagaaaacatacacacac

SEQ ID NO: 34583 - DNA, 431 bp, Homo sapiens
cgactcactatagggcgaattggagctccaccgcggtggcggccgcccgggcaggtactccaaagattcaggtttactcacgtcatccagcagagaatggaaagtcaaatttcctgaattgctatgtgtctgggtttcatccatccgacattgaagttgacttactgaagaatggagagagaattgaaaaagggggaacctttcagacttggtctttcaccaaggaactgggtctttctatctcttgtaacttttattttttttttttttttttttttttggggcacggaagaaactgtcctcgggttggagcatgggacctttattcgttaagacatcaggctccagatatgaactttcagcagaagcgcttgccgggagcaaagggacagaaaagctgaaatgaacagtgcctggcagcaatcacagcc

SEQ ID NO: 34584 - DNA, 425 bp, Homo sapiens
acgactcactatagggcgaattggagctccaccgcggtggcggccgaggtacacattttaaaaatactaagtatccctccattaaataagcattttctggccaccgtgaggaccatgggaaagtatactgtgtagacaacatgaacacatatgaaacaattaaagggcagtgcaaagcagaaaacaattaaagggattcaattcaacctggcgaaattcactggcctagggtttttggccaataaaaataggtaagtgtttgaactatattttcttttgatgcttttggagtggtgtttttatttcatttcttaatatatttttcaagagaaattatctaatctagtttatctaaatcttttgagacatttcctatccgccttctcccttttccctggcaaaggagctcaacctgtgaaagtgca

SEQ ID NO: 34585 - DNA, 422 bp, Homo sapiens
acgactcactatagggcgaattggagctccaccgcggtggcggccgcccgggcaggtacgcggggaggcattgaggcagccagcgcaggggcttctgctgagggggcaggcggagcttgaggaaaccgcagataagtttttttctctttgaaagatagagattaatacaactacttaaaaaatattgtcaaataggttacttagaaattggtttaccgttaagtttttaacgtaattttattagcttaagattttaagagaaaatatgaagacttagaagagtagcatgaggaaggaaaagataaaaggtttctaaaacatgacggaggttgagatgaagcttcttcatggagtaaaaaatgtatttaaaagagaattgagagaaaggactacagagccccgaattaataccaatagaaggg

SEQ ID NO: 34586 - DNA, 160 bp, Homo sapiens
ggcgaattggagctccaccgcggtggcggccgcccgggcaggtacagcattattagctggggctttcactgaaaaccccagggtctctttctattgtccccatatggttggagtcacaagagtgggagagatggccaagcttctctgcagaggatcctgg

SEQ ID NO: 34587 - DNA, 173 bp, Homo sapiens
ggcgaattggagctccaccgcggtggcggccgaggtacaaaaagtatatgccagataaacttgcaagattggatccaagactattttgtaaggctttgtttaaagctttgggcttaaatgaaaatgactacaagtttgggttaaccaaagtattttttagacctggcaagttt

SEQ ID NO: 34588 - DNA, 427 bp, Homo sapiens
  misc_feature 362: n = A,T,C or G
cgactcactatagggcgaattggagctccaccgcggtggcggccgaggtactgcaccactctggaaaaaatgccttcaggttccttcccatcccccaaggcagcagcaaatccttcgtgtcgtctcctactggccaaggcagccaaagatttgaaagtctttggctcgtagatggccagatccgctagggacctttcctggttgagcttcccctggcacttaactaaattcccaatgagcgctggatacttcagtccatgttcctggctagcagctgtaattcgattaatccagagggtcctcatgttctttttcttcaggtatcgggctttggtgcatttcacaaaggctcgaatcacggnttctgaccgccaacctgtagcagcgatttttccttccccggaagtgcctggcgtgcttcagcacc

SEQ ID NO: 34589 - DNA, 395 bp, Homo sapiens
tatagggcgaattggagctccaccgcggtggcggccgaggtacactgtgcagaataaacaaacctcagtgtaatagctcagccaagtcggttaacaaataaggaaacaacacaacaagcagcagtccctggaagaggggagggaaaatcagtattccgagttgctacaaaatacttattttaaaatggccaagtttcaccacaaaattttgaggcatgcaaataaacagaaaagtttgacacacagaaagaagggaaaagcaggcagcagaaattgtccttgaaggcccagatgtcagacttagtagacaagacagcaaagcagctattataaatatgtttcaaaggaactaaaagggctgaatttctagccactcttggaaaaaaaaaagggac

SEQ ID NO: 34590 - DNA, 176 bp, Homo sapiens
cgactcactatagggcgaattggagctccaccgcggtggcggccgaggtacaaaacagccaggcaaggtggcgcacacctgtagccccagttactcaagggtcttgaggtggaagatccctcaagcccaagaggtcaaggctgcagtgagccatgatcacgccatgccatggcact

SEQ ID NO: 34591 - DNA, 441 bp, Homo sapiens
actcacttgggcgaattggagctccaccgcggtggcggccgccatcttgggtcatcgatgagcctcgccctgtgcctggtcccgcttgtgagggaaggacattagaaaatgaattgatgtgttccttaaaggatgggcaggaaaacagatcctgttgtggatatttatttgaacgggattaccgaattgaaattggaatttcccaaagttgagcctttaccaatgaagaaggaaaacagaacgaagaaaattcttggatggcctttcacaaggacatgccaaccaaacaaaaatgggaatacttgtgattgacatgaagggcagccaagctgggggaggagataaccacggggcagagggtcgggattctggccctgctgcctaaactgtgcgttcataaccaaatcatttcatatttctaaccctcaaaacaagctgttg

SEQ ID NO: 34592 - DNA, 183 bp, Homo sapiens
actcactatagggcgaattggagctccaccgcggtggcggccgccatcttgggtcatcgatgagcctcgccctgtgcctggtcccgcttgtgagggaaggacattagaaaatgaattgatgtgttccttaaaggatgggcaggaaaacagatcctgttgtggatatttgtttgaacgggatta

SEQ ID NO: 34593 - DNA, 184 bp, Homo sapiens
cgactactatagggcgaattggagctccaccgcggtggcggccgccatcttgggtcatcgatgagcctcgccctgtgcctggtcccgcttgtgagggaaggacattagaaaatgaattgatgtgttccttaaaggatgggcaggaaaacagatcctgttgtggatatttatttgaacgggatta

SEQ ID NO: 34594 - DNA, 110 bp, Homo sapiens
cgccggcgtcaaattggggggtcctgaaacgctgtgaccacactatcatattacagacactgaatggcttgccacccattgggtgccaattgatcagttatttttatttg

SEQ ID NO: 34595 - DNA, 435 bp, Homo sapiens
atacgactactatagggcgaattggagctccaccgcggtggcggccgaggtacccatcacgtgccagacacgttatctggagatagagatgtaaacaagacagagttcctgcctcaagcaacccaccatctagtaggcggaagacagactataaatacataatgcaagataatttctgatggtggcaagtgctcccaaagacaatatgacagttaaacaaagcaactgagtagagggagagggaaaaagcaactggggagaggaacatttatggctgagagatcaggaaaggcttctttggcgaaaagacactggagctgaagcctgaaggaagaaggctgagtggtgcggcagggctgggagttgcaggaagagctgacagcaagccccgtttgatggggggaagctggtgaaggatggcagagtccatgcagg

SEQ ID NO: 34596 - DNA, 422 bp, Homo sapiens
cgactcactatagggcgaattggagctccaccgcggtggcggccgaggtacttgattttttatcagatggcctggaaaacccagtctcacaaaaatatgaaattatcagaaggattatagtgcaatcttatgttgaaagaatgaactacctcactagtagttcacgtgatgtctgacagatgttgagtttcattgtgtttgtgtgttcaaatttttaaatattctgagatactcttgtgaggtcactctaatgccctgggtgccttggcacagttttagaaataccagttgaaaatatttgctcaggaatatgcaactaggaaggggcagaatcagaatttaagctttcatattctagccttcagtcttgttcttcaaccatttttaggaactttcccataaggttatgttttccagcccag

SEQ ID NO: 34597 - DNA, 68 bp, Homo sapiens
cgaattggtgctccaccgcggtggcggccgaggtacttttttttttttttttttttttttttttccca

SEQ ID NO: 34598 - DNA, 426 bp, Homo sapiens
actactatagggcgaattggagctccaccgcggtggcggccgaggtacgcggggaaggatgaccggaatggagacttctcagagaatagagactgtgacaagctggaagatttggaggacaacagcacacctgaaccaaaggaaaatggggaggaaggctgtcatcaaaatggtcttgccctccctgtagtggaagaaggggaggttctctcacactctctagaagcagagcacaggttattgaaagctatgggttggcaggaatatcctgaaaatgatgagaattgccttcccctcacagaggatgagctcaaagagttccacatgaagacagagcagctgagaagaaatggctttggaaagaatggcttcttgcagagccgcagttccaagtctgttctccccttggagaagcacttgcaaagc

SEQ ID NO: 34599 - DNA, 426 bp, Homo sapiens
actactatagggcgaattggagctccaccgcggtggcggccgcccgggcaggtacaagtgaagaaacaaggaggcacttcctgtaggagcactgatgtgccttgtccacactcccctctgagctttactggtaagagagctccgactgaacatgctgagcagttgagcacttttccatcagcaacaacagcgaggatggaaatggaaaggaaccgaactaaaacgcatttccctttgcagggcagagagctaagctcttaggaatagtgttatagaaataagcaccctaacttcaattcctgaaaatgttggttaatggagagaattttggagtttcacttaatattttcccatcggtcgccataaataagtcttcaggcgctcctagaagagtcccagcccaaggctcgattaaggaccacactg

SEQ ID NO: 34600 - DNA, 343 bp, Homo sapiens
cgaattggtgctccaccgaggtgccggccgaggtactattcagtctttaaaaagaatgttatcctgtcattatctcatagatggaactgtaagttactaagtgaaataatccaggcacagaaagacaaattttgcatgttctcacttatttgtgaaagccaaaaattaaaacaactgaactcatggagatacagagtagaatgatggttaccacagagtagaatgatggttaccaaaggctgggaagggtaatggtggggagagaagttggaatgattaattggtaccccgaataccaggcacacaaggaggcgaaagaccacgaaccaccaccttgagcagg

SEQ ID NO: 34601 - DNA, 414 bp, Homo sapiens
tacgactcactatagggcgaattggagctccaccgcggtggcggccgaggtaccaccacacccagctaattttttgtattttaagtagagatggggtttcaccatgttggctaggctggtctcgaactactgacctcaggtgatccacctgcctcatcctcccaaagtgctgggattacaggctgagccaccacgcccagccaactgctgttaatcattttagaatctaagctcccacactgatagggagaaaaggcataaaggaggagttagtgttgacatgtgtcaaatgctggtaagtcaagacttttggtaagaggaacagaccattggatttaacaacatggaagttactggtgactttgactagagctgttttgatgggatgatggatgcaaaggtctgactgcagtt

SEQ ID NO: 34602 - DNA, 380 bp, Homo sapiens
ctatagggcgaattggagctccaccgcggtggcggccgcccgggcaggtactacaataatcctcaagatactgaaagtaatgccaagtgaaagaccaagggggtgggtggagggctaatgggctggacgaaatagccacttgattgctagttcatacaagatgtggcagcaactccttttctggctggagatcttggatgtcacatcttagaatcaggtggcaaagcatctgtgaagggcaatgtggcatcccagacagtgggtggtgagatcaggaagaaaaaatggaaatcaacagatggtggatcctacagctgagaactgattcttcaatttgacgtggttggcataaacattttaaatggagcttggtaaagatc

SEQ ID NO: 34603 - DNA, 172 bp, Homo sapiens
atagggcgaattggagctccaccgcggtggcggccgcccgggcaggtacccctccaagccggacaacccgggcgaggacgcaccagcggaggacatggccagatactactcggcgctgcgacactacatcaacctcatcaccaggcagagatatggaaaacgatccagccca

SEQ ID NO: 34604 - DNA, 155 bp, Homo sapiens
ctcactatagggcgaattggagctccaccgcggtggcggccgcccgggcaggtacataggccttcctctgtatgagagggcttctgattcttattctttcttatggcggaagagggtgttgagaggggttcccttgctgttggttctgttgaatc

SEQ ID NO: 34605 - DNA, 364 bp, Homo sapiens
ctatagggcgaattggagctccaccgcggtggcggccgcccgggcaggtacaagaattgctggaacctgggaggcggaggttgcagtgaaccaagattgcaccactgcactccagccggggtgacagagtgagactccgactgaaaataaataaataaataaataaataaataaataaattttatggaatggtgaagggaatggtatagaattggagagattatcttactgaacacctgtagtcccagctttctctggaagtggtcgtatttgagcaggatgtgcacaaggcaattgaaatgcccataattagtttcttagctttgaatacactattaactcactggctgaaggaggaaatttt

SEQ ID NO: 34606 - DNA, 452 bp, Homo sapiens
actactatagggcgaattggagctccaccgcggtggcggccgcccgggcaggtacaccgggaccaccaaagggccatgaactctttgtcagtcaagtcccaaggtcccatagagagcagatggccactttaatgtcacctcaagcccttaggctgtttttagacatccatctccttagtggatgctttttatagacccccatccaagacctcacacatcttgtaattaaatttcatctggtagtattttgactttttttccagcctgtcaacaccttctgtgttcttacttgttgtatctcaaatatttgatacccttttcagtgttgtattaatctaaaatttgttgtttgtgtttatgttttcatgaagttactgttaaaaaatataggaagaagagaaggttaagatttgagcccttcagtgtatagttgagcttgtcctggaagacat

SEQ ID NO: 34607 - DNA, 311 bp, Homo sapiens
actactatagggcgaattggagctccaccgcggtggcggccgcccgggcaggtacgatcttggctcactgcaacctctccctcccgggttcaagtgattctcgtgcctcagcctcttgagtagctgggattacaggcgcgtgccactgtgtccggctaatttttgtatttttagtagagatggggtttcaccatgttggccaggctgatctcaaactcctgacctcatgtggtccacccaccttggcctcccaaagtgctgggattacaggcgtgagccaccacgcttagcctacaagcatttttttaaaa

SEQ ID NO: 34608 - DNA, 321 bp, Homo sapiens
atagggcgaattggagctccaccgcggtggcggccgcccgggcaggtactttttttttttttttttttttttttcttttcttttttttttttttttttttttttttttttttttttttttttttttttttttttttttttttttttttttttttttaaaccttggaaagccagaaccctttttaaaaaccccaataatcccaaggaacacggggaaaaaattggaaaaaaaaaccaaaggggctaaaaccatggggggggggggggaattttattaaacacaaaaaaaaagggggcaaaaaaaaaaaaagggcccaaaaaa

SEQ ID NO: 34609 - DNA, 302 bp, Homo sapiens
gcgaattggagctccaccgcggtggcggccgcccgggcaggtacgcggggtaatctcagttacttgggaggctgaggcagaactgcttgatcccgggaagtggaggttgcagtgagccaaggtcgcaccactgaactctagcctgggcaacagagtgagactcagtctcaaaaaattaaaaattggaacgactgacaggccatcttccaatgttctgatctcccctgactctgtgggtccaacaggaccattctgagcaggtcgcatttctgggcctggacaagtttgactggtcccatgcc

SEQ ID NO: 34610 - DNA, 454 bp, Homo sapiens
actcactatagggcgaattggagctccaccgcggtggcggccgaggtacgtaacaggacatcaataaatattagttgaatggaagattaaatcaacaaaatgggtgatggatctctgcagcaagtggaagagttcttcatggcccccaaggttatatccatctagaacttcagcacgtaatttcatctggaaatagtgcctttgcggatataagttaggtaaaactgaagatgagatcatactggattaggatgggatctaaatccaatgaaaatgtcttcataaaaaacaggaaagaacccatagaaacacaaggaagaaggtcatgtgaagatggaggcagagattggagggatgcagccaccggcccaggaatgccagcagccacccagaagctggaaggaaatgagggattctctcctagaacctttagagagaacatggtcctgtgaac

SEQ ID NO: 34611 - DNA, 450 bp, Homo sapiens
tacgactcactatagggcgaattggagctccaccgcggtggcggccgaggtactcagtctttgcttaaaataaattttacgtttatcaaagtaaaatttaccagctttttttcctaaagaggctagtcatatctcatcagtggttacaaagtatccttacaattgaacctacatttgttaatcctgttcagtgtgtatgaaaatcacttggtggccgggcatggtggctcacgcctgtaatcccagcactttgggaggccaaggcgggcagatcacaaggtcaggagttcgagaccagcctggctaatatagtgaaaccccatttctactaaaaatgcaaacattagtcaggcatggtggcaggtgcctgtagtcccagctacttgggaggctgaggcaggagactctcttcaacccgtgaggcagaggttgcagtgagtcgagatcatg

SEQ ID NO: 34612 - DNA, 371 bp, Homo sapiens
cgctcctatgggcgattggagctcaccgcggtggcggccgaggtactttttttttttttttttttttttgggtctttgggtggggtatgtaataagaaaaagcctgcaggcttctgaggtaggtagtgggttggaggcaggtgtcctcacccactaaagtgaggactgcgacagtccggcctctgtgccctcctctggaatggaatggggagtggcgaccatacagcctcaagagcatgctgttcaccaagacccttgcgccctgaaaaaaatgccttagcaccctggaatgggccatggacaccaatataataaattataatcagcgtatgaatatctttttgtaaaacaaacaaattaacaaagttatg

SEQ ID NO: 34613 - DNA, 159 bp, Homo sapiens
tggagctccccgcggtggcggccgcccgggcaggtactttttttttttttttttttttttttttttctttttttttttttttttttttttttttttttggcggaaaaaaaaaagattttattttaaacagctaaaataaattttaaggggcattaaaaa

SEQ ID NO: 34614 - DNA, 130 bp, Homo sapiens
  misc_feature 107: n = A,T,C or G
atagggcgaattggagctccaccgcggtggcggccgaggtacctgactcatcaactcatctgtcgcaggtgctcagtcgaaatttgttaaataaatggaggcgcttnagttaagtttggcctttttcttt

SEQ ID NO: 34615 - DNA, 559 bp, Homo sapiens
cgcggtggcggccgggcatttctcccaggatctctgtgcttccttttgtgcttcctgtgtgtgtggatatttaaaggggctggaaatgtgcaaaaacatgtcactacttagacattatattgtcatcttgctgtttctagtgatgttaattatctccatttcagcagatgtgtggcctcagatggtaaagtcagcagcctttcttatttctcacctggaaatacatacgaccatttgaggagacaaatggcaaggtgtcagcataccctgaacttgagttgagagctacacacaatattattggtttccgagcatcacaaacaccctctctgtttcttcactgggcacagaattttaatacttatttcagtgggctgttggcaggaacaaatgaagcaatctacataaagtcactagtgcagtgcctgacacacaccattctcttgaggtcccctctagagatcccacaggtcatatgacttcttggggagcagtggctctcccaatgctttctatgtctctgattaccttggctacctgtattctgactccaacatct

SEQ ID NO: 34616 - DNA, 404 bp, Homo sapiens; identical to SEQ ID NO: 34495

SEQ ID NO: 34617 - DNA, 422 bp, Homo sapiens
agcgcgcgtaatacgactcactatagggcgaattggagctccaccgcggtggcggccgcccgggcaggtactacagaggacatagcagtattaagggataatgaagtcacagcttcagagcctccatcctttctttagcaagttagctctacttgtatctgttctgttttatataatatggttgcatctaactgtttttaaaaaaagttctgttcttcaaaaaaattttaagctatgaaaatcactgattaagtcaaaccctcattttacaaaagaggcaacacaaactcagagcacttatgcctcaccataggtcacaaagccaagtagctccaggccagaaatgggctttaggtcttccgtctgagactggcatttgatgccagtgatttcctccatatttaggagaaatgtatagattt

SEQ ID NO: 34618 - DNA, 179 bp, Homo sapiens
  misc_feature 112: n = A,T,C or G
cgcgtatacgactactatagggcgaattggagctccaccgcggtggcggccgcccgggcaggtaccatacacaaggacatagcacctttgattagaagtatgttcaatacanttattgtgaactacactaaaaataatgattttttcatagcaaaatttctcagagtaacctgcaaaaa

SEQ ID NO: 34619 - DNA, 257 bp, Homo sapiens
gtatacgactactatagggcgaattggagctccaccgcggtggcggccgaggtacatgtttttctacatcaaacaattcttcaactctctgacaaactgggagtagatgaaatcaataaaattctgacactaactcctggagttagtccagaccctaaaggttaaggacttcatcccaggagcctaccccacatcagagatcagccacaaatagggccccaggcaacccaaacttcttcccagctggctaaacaatt

SEQ ID NO: 34620 - DNA, 294 bp, Homo sapiens
gcgtaatacgactcactatagggcgaattggagctccaccgcggtggcggccgcaccggccaggtaccatttttatcgtcataatgctgtaaaccatcagtagaagcagtttagatttggactgcatggtaaaatgaaaagtattaaccctccaaccacaacctagtcagggtattaataattatatgtagcatgagaactaagaagataatatatattgaaaaaatggagatgtcctcaaccagtttcatatttgaaggatctgagttgtattcttattaaggaaattttttt

SEQ ID NO: 34621 - DNA, 181 bp, Homo sapiens
actatagggcgaattggagctccaccgcggtggcggccgaggtacttcccataagtttaccttattttttaggaaaaccccattgattttaagtagaattcatgaagttgctttgtagcttggcttcaggatttgtttggatttgttatatattttttctttaatataggcaggcacaatt

SEQ ID NO: 34622 - DNA, 402 bp, Homo sapiens
gcgaattggagctccaccgcggtggcggccgaggtacgatcttggcccactgcaacctctccctcccgggttcaagtgattctcgtgcctcagcctcttgagtagctgggattacaggcgcgtgccactgcgtccggctaatttttgtatttttagtagagatggggtttcaccatgttggccagactgatctcaaactcctgacctcatgtggtccacccgccttggcctcccaaagtgctgggattacaggcgtgagccaccgcgctcagcctacaagcaattttttaaaaactgacacctattactgataaaattctctgtttaaaatcctatttactattttaaagataagtattagttttttttaaatacaataattctgttattgataaaatttaa

SEQ ID NO: 34623 - DNA, 408 bp, Homo sapiens
gcgaattggagctccaccgcggtggcggccgaggtacttttttttttttttttttttttgaatttatagtagagacagggtttcaccgtgttagccaggatggtctcgatctcctgacctcttgatccgcccacctcggcctcccaaagtgctgggattacaggcgtgagccacccatccggcctaacgagacttatttttactcaactagatggcgttcattcatttgcttactcagctgtgccaggaattaagttgggcactgggaattccaaaaccaacaagacattctctgtcatcagggaactcacagcctagtttgagagataaacaaatgaacatgaaattataattcagtaacaaagaatgagtgttatggcagagggaatgtgtaagagcttggcaggg

SEQ ID NO: 34624 - DNA, 388 bp, Homo sapiens
acgactactatagggcgaattggagctccaccgcggtggcggccgaggtacccacctcagggacagaactccacactatagtgggaaagcttcagggacccctccttttagtgctcagggctcacctatgctactggtccttttggcaaaaaaggaaaatgatagagccagggttgcccctgatgtatcagccttactgtggaggggccaaagctggtgttcagagctcacccaaggagggaggtgataaggtgtcatgcgttctgctgaacccactggctggtatgaacatgaggcttggggtgagggaaaccaagtaggggttggagaaggagcagcacctttgtaacacctggctacccatagctagctttttgcccttaaaaac

SEQ ID NO: 34625 - DNA, 371 bp, Homo sapiens
ttggagctccaccgcggtggcggccgaggtacacagatctctgcttaattcatttgaatgttcttctgtagtattcatacataatttatgttatcattttcctgttgaagaataggtaggtgttttccagttcttcagtattgcaaacaccactacattgaacatctttgtatccatgtgcaaatattcccgcaacatactgtgctagctgttcggccacatcacctttatgaaattctcacaggaacctgtgaaggctataggtaatttgccacattccacagatgagaaaaaggctaagagagcttacatgtcttgcctgaggtctcacaactcataaatgacggagcctaattgaagtaaagatctgc

SEQ ID NO: 34626 - DNA, 392 bp, Homo sapiens
cgactcctatagggcgtattggagctccaccgcggtggcggccgaggtacagctttacccaattgctctttcctgtttgtgttttttgttgttgttgttgatgtttggccactttacacaactcacctccaaacacacactgcatcatcaagggagttgggtcagagcgacattgggacactcactctgctgtgacctaataaggtgatggtgctatacttcagacgcaaggaataacttccattttggttcaggccttcacttccagctggttgaatataaactcaatcacaacatcatcttcaaacccaaggatttccgttactctttttgttatccaaggctttataaccttcaaatttacttttgttcatgttcacctttttttctag

SEQ ID NO: 34627 - DNA, 377 bp, Homo sapiens
gcgaattggagctccaccgcggtggcggccgaggtacggtggctctatcttggctcactgcgagctccgcctcccgggttcacgccattctcctgcctcagcctgccgagtggctgggactgcaggcgcccgccaccacacccggctaatttttttgtatttttagtagagacggggtttcacccttgttggccaggatggtctcgatctcctgacctcgttgatcccacctgccttgtgccctccaaagtgcttggaattaacaggcgtgaagccacccgcgccccggcccttatattgattatttcttaaagcaataaaaagttttactagtgttgtcccatattttgcccattatttatttgaaaaaacctttg

SEQ ID NO: 34628 - DNA, 514 bp, Homo sapiens
ttttttttcatttttatattagtcgagatttgacgcgcgtatacgactcactatagggcgaattggagctccaccgcggtggcggccgaggtactttttttttttttttttttttgaaatttgcttttatttacacgtttgagtcaattacatgcatgttttatttttgaggagtgattagcaaaatgcattaaaattttaaaatagcaattaaatatacaaaaatatagcttacaaaaaactggcgaatgtttaaaaatattctgctgcagaatttttagtgtacaaagacgtttatgaaacctgaggttcagcattttcaataaacctttttttgagggagttacacaatacctagtgaggaaacccgagggcccaaactacaagacgaaaaagtgccccgttcctggcaatgatgtcagaagaccaagaggcgatagttaccagcaacactctaggaagaccagctgtcaccagaagggagttcctaacacttgccacacctgctcccccg

SEQ ID NO: 34629 - DNA, 370 bp, Homo sapiens
tactatagggcgaattggagctccaccgcggtggcggccgcccgggcaggtacttagctaggtgttttctacagtatcttatataattgcatcttacagcatctttacatgcgaaatagtttatcagttatcttcaattgcatattacaaaattctgattaaatttttcttaaataagaaaactatcatttcatatgacaagaaatcctaatttaatgttactccaaggttggttaattcagtggctcagtgataacaccaaagactcagtttcttgaaatttttttgctctgccatcctccatgtttatcctcacgccagttcgcctcatggtcccgatatggctactgtaattctgggaaggaaatgc

SEQ ID NO: 34630 - DNA, 466 bp, Homo sapiens
ctatagggcgaattggagctccaccgcggtggcggccgaggtactaacaaatgcagtagccagcaagattaccatgcaatcattaaggagaaccaaagtaagagagccactcaaaccagattttgaacgctactaaaattaaagtagttctttgatgaatatgaatgagtagggaaaggattctttgtaatagtgatacctctgtggtaagagaagggtggtatgtgagttttagtctacagattatggcaaattcagtgacaacaatcaaatggtctaagattgacagtagcacagttttactctgtgaaggtagtgttcaggacaaatttcaagaaaactagaaaaccattctttacagctgaaatctttccctaaccattgttatttccacttttaagtcctcaagagatgagaaaagggaggtaaggcttccttatacatttcctgcacaatgaaacatttt

SEQ ID NO: 34631 - DNA, 442 bp, Homo sapiens
acgactactatagggcgaattggagctccaccgcggtggcggccgcccgggcaggtacccagaaaaccaaaatgagcttaaacattttgaaagatgtcaacaaagttatgcccttggaaataagtttggtttatgtaagagcattgttcctttaatgtaaagacacaataagtttggctcgcattgtaaaagtttgaaatctcatttaggttttgtaatccagagtagaagatatgcaggaaaagattctgatgcatttggtggatatgggagatcatgcctccatatcaagcgtgacaaaactcttactggagttaaataccatagatgtgttaaacccagcagccctaaatcacagctcaatgacctacaaaaaatttgtgcaggagggaaaccacatgaatgcagtgtgtgcgggagagccttctccaggaaagcacag

SEQ ID NO: 34632 - DNA, 446 bp, Homo sapiens
ctactatagggcgaattggagctccaccgcggtggcggccgcccgggcaggtacattactcatgaatggtttagcaccatccccttggtgataagtgagttcttactctgagttcacacaagatctagttgtttaaaagaacgtggcacctcctccctctgtgtcatgggaggaacccagttggaggtagctgagtaatgggggcagttatccccatgctgttcctgtgatagtgaatgagttctcatgatatctgatggttttataaggggcatttccccctttgcttggcacttctccttcctgctgtcatgtaaagaagaatgtgtttgcttccccttgcatcataattgtaagtttcctgaggcctccccagccatgctgaactgtgagtcaattaaacctctttcctttataaattacccagtattcaggcagttctttat

SEQ ID NO: 34633 - DNA, 130 bp, Homo sapiens
attgtagctccaccgtggtggcggccgaggtacaattcagtggcctaagtaaattcacagtgttgagcatccatcactactcttcatctctagaatcctaaacagaaactctatacccattaaacaactt

SEQ ID NO: 34634 - DNA, 391 bp, Homo sapiens
ctccaccgcggtggcggccgaccggcccggccctttgcagcatgatgcacccttgcacaaaaatgcttttctttagatcccttcagacagaaattgtggtcaaaaccattgagatggaagtcctgcaggtgttttccaagctccactggctttctcaggtcgaatgcagtgccttgcactggggcaacttctcctgtaggaatcagggtttcatccacaggcaaataagtatccgcttctatggtgacttcatggtcatttatatttggggaagcctggcctgccaggttgaagtaagaatggttggtcaggttgactggtgtggcctgactggcttgtgctctgtagttgactatgagctctccgccatccagggtgtatgtcacccaga

SEQ ID NO: 34635 - DNA, 449 bp, Homo sapiens
ctactatagggcgaattggagctccaccgcggtggcggccgaggtacagtagtgcactcttggctcactgtagcctcgacctccggggctcaagtgatcctcctgccttagccccacaagtagtgggactataggcacacagcaccatgcccatctaagtttttgtattttatgtagagacaaggtttcaccatgttgcccaggctgatcttgagctcctgagctcaagtgatctgcccaccttggactcccaaaatgctgggattataggcgtaaaccaccatgcctggccttaaatcaactttagagtcaacatctcttatcactggagcttctggagaaactccatcacgtggtgctctctttcctgatgtgttgtgcccaaatagcttgttcttatcagatgacttatttgctatgatatatatacttcaagagctgctatatgt

SEQ ID NO: 34636 - DNA, 448 bp, Homo sapiens
aatacgactactatagggcgaattggagctccaccgcggtggcggccgaggtactccatgttggttggtagtattttaaatctgaagcattttcagagtctaaggcaattcagactgcacagctgtcaactcaggagtcccattaaactgactctaaaaattcctaaaagaaggcatgatttattataagcaaatggctaacctggcttttttggtaatagaattttaaatgaaaataaaattatacaagatacacattgtttggatttttaaaaactctattaaatgtttaagtggttgtgaatatgaggaataattaaatgttaaccccagctgattagtgaacatataagaaaatggggggaactgatcccaaaagatcttctcttctaaggagaacttcacttgaggggcaaacactagaagatacaattgttattgtaaaaca

SEQ ID NO: 34637 - DNA, 439 bp, Homo sapiens
cctaatacgactactatagggcgaattggagctccaccgcggtggcggccgaggtacctgtaacatgcagaggtgtttgtgagctgcatcactattgcatcatttgcatctttcgaacaattgcctttgggatccattgagatgacctctgtctttattggaggaaagataattccttgatcaactccgtttttattattctcatgtctgacgatgcatctgtgttctttgtccattgacttttctggcaccgtggaccacctaaatgatcatgtatgggtcgaatagtcttcatggtgttcccctcctgggatcccagaatcgagttgctcttcttttcttgccaatgcatcttagtaacatcgcggaaaaattcctcaagaggacaaaggtgtgccccatcctcctggagctttgggccatcgcttgaaggaagaaa

SEQ ID NO: 34638 - DNA, 344 bp, Homo sapiens
actactatagggcgaattggagctccaccgcggtggcggccgaggtacagtagtgcactcttggctcactgtagcctcgacctccggggctcaagtgatcctcctgccttagccccacaagtagtgggactataggcacacagcaccatgcccatctaagtttttgtattttatgtagagacaaggtttcaccatgttgcccaggctgatcttgagctcctgagctcaagtgatctgcccaccttggactcccaaaatgctgggattataggcgtaaaccaccatgcctggccttaaatcaactttagagtcaacatctcttatcactggagcttctggagaaa

SEQ ID NO: 34639 - DNA, 428 bp, Homo sapiens
ctactatagggcgaattggagctccaccgcggtggcggccgaggtaccaaaattcattcaagaagaaatagataccagcctgagcaacatggcaaaatcccatctctacaaaacatcaaaaaaaaaaaaaaattagtcgggcatggtggtgcacacctgtaatcccagcttgtcaggaggctgaagtgggaggatcacctgagcccagggaggtcaaggatgcagtgagccatggtctcaccactgcactctagcctgggtgacagaatgagaccccgtctcaaaaaaaaagaagaagtagataatctgaatagccctatatctatagaaacttaatagtgctgggagatataggtattattatcctcattttacagatgtgaaaattgaggctcagagaagtaaagtctattgctcaaggtcatgtg

SEQ ID NO: 34640 - DNA, 443 bp, Homo sapiens
tacgactactatagggcgaattggagctccaccgcggtggcggccgaggtacattgaaagattttactgtgaatagttgacgaaaattggttaagtccattaagacatgcttcctgcccctcacaactcacccacgctgttctagtctctccgtaagtgtcaattctgaaggtcacaacttccataacttccatatcttctcagtattacatttcaagatgaatatattgtgctttactctggcaacatgtcttccataagatgagaatacacatcataatgtagaatccgtggaaactctgagcttatttttctgcaactagatggtctcatctgggggcaaagtgagacagtgacagatcatcaggcattagtttctcatatgaagcacacaacctagatccctcagatgagcagttcacaatagggttcatgctccaatg

SEQ ID NO: 34641 - DNA, 389 bp, Homo sapiens
gcggccgaggtacagccatccttgtcttcaagcactttgagaacattttagccattgatgtttacatgtggcacccacccatgcaagataggtttctgtatttatacattaaaataccaaaaaaaaaagtatgaaatgccttcaaaaatgttcaaagcttgagagaaaagcttttttcattagtcaaggtgttttgatatggtattaaaataatatctaacaaaatgaaaaaaaaattctcttttctccatgaatgctgacactggggagaatggcaattttaggctgtcaagagcatactaaataagtaaaatatctagaaatgcaatcgacttgcacgggattatgaaaattactggctttcagtcacttttggctatttcatactg

SEQ ID NO: 34642 - DNA, 400 bp, Homo sapiens
tatagggcgattggagctcaccgcggtggcggccgcccgggcaggtacgatcttggctcactgcaacctctccctcccgggttcaagtgattctcgtgcctcagcctcttgagtagctgggattacaggcgcgtgccactgcgtccggctaatttttgtatttttagtagagatggggtttcaccatgttggccaggctgatctcaaactcctgacctcatgtggtccacccaccttggcctcccaaagtgctgggattacaggcgtgagccaccgcgctcagcctacaagcaatttttttaaaaactggcacctattactgataaaattctctgtttaaaatcctatttactattttaaagataagtattagtttttttttaaatacaataattctgtt

SEQ ID NO: 34643 - DNA, 416 bp, Homo sapiens
tagggcgaattggagctccaccgcggtggcggccgaggtacctagaattgtgtaggaaggaggagtagcaatgactagatttaaacctagaaatacaagcaggaacctggctgtaaaaggctacactttatctaagagacagtgagatattaagatgtagagtgtatctgtttgtaaaaggtttaaacaggtgagagtttatctcatgtaataggaagtccaggacattggaaaaggaagtggcgtaagcagtccaaagctctaagcagctcaacaatgtcgtcatcgacccaagctctttctctctttctacttcatcatccttagcatgtagcttttattgtctttgtcataaaatggctgctacattgccatgactcaagttttcattccaggcaggaagaaggagagagaac

SEQ ID NO: 34644 - DNA, 436 bp, Homo sapiens
actcactatagggcgaattggagctccaccgcgggggcgggccgaggtcccccctctaagccactagtaatcaagtgttttaaaaagtagttaaaaaaaaaaaaaagggaaagctcaaattaacataatcaaaatgtttttaaaataaatctatgtaatgagaggtgaccagcaagcctgtatctatgccagagtgtggtagaagagaagaaggcactctcactgaattttataagtatactgaagtcacctaacctcttagtagacatggctcttgccaaagaataccacggaaagagctcttctcttccatgacatcctcaccatatcctgttcttaggtcactgccaaccaataaagcaaagctcccagcaagttgacaaaaagaagggggaggtctgggggaaaaggggaggagacgaaggacaagagcaga

SEQ ID NO: 34645 - DNA, 427 bp, Homo sapiens
  misc_feature 305: n = A,T,C or G
actactatagggcgattgagctcaccgggggggcggccgaggtccttaatcagtataccatgctggtataaagagattcttgcctccaaagggactcagaatatttcagggaacctgtattagtccatttttacactgttgtaaagacactaccccacactgggtaatttacaaagggaaggtgtttaattaattcacagttctgcatcgctggggaggcctcaggaaacttacagtcatggtggaaggcaagacagaagcaggcaccttttttcacaaggtggcaggagagagaagtgagtgcnctgaataaaaaaaaaaaaaccacctactcttaaaaccatcagatctcctaagaattcactcactatcatgaggataacatgaagtaaacttcttcgacacatggcgattacaggtccctctg

SEQ ID NO: 34646 - DNA, 300 bp, Homo sapiens
gcgcgtaatacgactcactatagggcgaattggagctccaccgcggtggcggccgcccgggcaggtacccgatgctcacaggcaccagcaccgatggcatgacattagacctgagattgcatcgagctccaattacgagcatccttacgctcaggaagcctctatcccaatgggccagtcccagaggtgagggggtatagcccgataggaaatgggacctgatgaatatgaagagatggaagaagaggaggaggaggaagaggaggaagacgaggatgatgattcagcaaatatggatga

SEQ ID NO: 34647 - DNA, 413 bp, Homo sapiens
ctatagggcgaattggagctccaccgcggtggcggccgaggtacataagcctgacgatatggtcttgaggggtcatcctaaggctgttagaccgaaattaaaacaaaccttaccagtagatctgtgtttgtaagacagttctatttagcaggaccatgctgattataccaagagataagccccacagaatgtaagggtgatcacttcaccaaacatgggcatggcattgcaatgttctagtatttcacctcacagaacagcacagatctcacaatcacttcgttaaatagcagcggattcctcaagacatacagtccgcggtatgcatgatcctgagtaagaggttgactttaattttttcagccttgaaaataagaaaagttaaatgctcacgtatataattggttcaatta

SEQ ID NO: 34648 - DNA, 446 bp, Homo sapiens
  misc_feature 190: n = A,T,C or G
actactatagggcgaattggagctccaccgcggtggcggccgcccgggcaggtacactagacctagagctctgggaacaagtgggaagaaatcttaaacgacgtgcgcaagggcagtaggtcccagtaacatcttaatgttatggtcctaatagggttgctttggccctgctcttcatagaagagcccanaaagataagggaagaggaaccactacccactttaatgcctcagcctccctcagccttgccgtcactggctaaagataccaaagaggagacggaggttttcctccccctccccccaatgaactgggaagaagacaagcgatatactacagttatgggaccctgccttaggcaagcagcattggaaggggaactcttggcctgcccagtgatgcaagatcaacaaggcaattgggtgcatgagcccattacattgaac

SEQ ID NO: 34649 - DNA, 445 bp, Homo sapiens
actactatagggcgaattggagctccaccgcggtggcggccgaggtacttttttttttttttttttttttatttttttttttttttttttttttttttttttttttttttttttttttgggggagcaagtgatttattaaagcaagacgttgaaacctttacattttgcagggaaaaacagggggtcattgaaagaccgtgggaaacccggatgaaagtttttacatgtcacacactacattttttcaatattttcaccaggacttccgcaatggggcttcttttttgaagggacatttgatccgggcattttttcactcctaacttgggtgcaacagcttccgggggggcatcaaatttggcaagacttaacttgaacagaggttcactaatgaaaaaaaagtttaacagctcaaaaacaaaagctgggtaaaactcggcattg

SEQ ID NO: 34650 - DNA, 358 bp, Homo sapiens
ctactatagggcgaattggagctccaccgcggtggcggccgaggtacttcatttaatttttgcctcttacagtctgatatcctgttgggcattctggacaacttggacccagtcatgttcttcaaatgcccttccccagagcctgccagcctggaggagctcccagaggtctacccagaaggacccagttccttaccagcctccctttctctgtcagtggggacgtcatcagccaagctggaagccattaatgaactaattcgttttgaccacatatataccaagcccctagtcttagagataccctctgagacagagagccaagctaatgttggtagtgaaaatcgaggaaagcacc

SEQ ID NO: 34651 - DNA, 453 bp, Homo sapiens
tacgactcactatagggcgaattggagctccaccgcggtggcggccgaggtacttttttttttttttttttttttttttggtcttcatggtatcacatcaccaggtcttatataacttgaacctgtattcatgcaacacttttcttactggattcccaaactctttatatctttctccactccatattacaaattaattttctatgacacaatttttttaaatcaaaacttcaatttcactctcttttactcagtatttaaacctcaaactacagcaactggtaattttaacacctttcctagaaagtcctaacaaatcttacctcccacatgggaaggagggccaacctgttaaactcactgtcccaagaatcccgcgtacctgcccgggcggccgctctagaactagtggatcccccgggctgcaggaattcgatatcaagcttatcgata

SEQ ID NO: 34652 - DNA, 419 bp, Homo sapiens
  misc_feature 331: n = A,T,C or G
ctactatagggcgaattggagctccaccgcggtggcggccgcccgggcaggtacttttttttttttccttttatcatctgatgatgaacttaatgtttccatttgtattaatggaatactaagtccctctgtgatttctgaaccaagctattcctaggcctgagttttattttgttgacacagaaataaattagaaggccaagcgtggtggcatgtgcctgtagtcctagttgctgaggtaagaggattgcttgagcccaggagttcaaggctgcagcaagctttgattgcgccactgcactccagccttggcgacagactaagacgctgntctcaaaaaaaaaacaaaaacgacaaaataaaaaacaaaacagtaaaaaaatataactaagggcaattgacagttccctgggcaaaat

SEQ ID NO: 34653 - DNA, 394 bp, Homo sapiens
actactatagggcgaattggagctccaccgcggtggcggccgaggtacagtccacaacacaacccctaagatcctttgtcactattcgactaatccttattatattcttatttttcatatattcaaaaggaatatttgacaatgaaacgtctaatatttatagaatattctctggaatcctttctataataattatgcaaaaccattataaaattatatatacaggcaagggtaattactcaaatctaaagtgccatcacacatttaaaaagccctgacaattactatgacattccagatcataagatgcttcacaatttaagacatggtaggcatgtgaagaagttgaatccatgaaatataaaaaattaaccttaatcgactgattgctttt

SEQ ID NO: 34654 - DNA, 328 bp, Homo sapiens
tatagggcgaattggagctccaccgcggtggcggccgcccgggcaggtacagcagtagcagttcatacatatctgatatgctttcacaccaggattcagtaaacaacaataaatataatttcccctcttcaaaacaaaaaatggatttatacggaaaaagggttaatttacttggggtttatcagcacaccatttttaatgtgctttgaaagaattaaaaaccatgaaactgtattcactgaataccggtccatagttatattttttcttttaacgtggcttaaatacatacatcatgactttctattaaaattccttaaatctatgg

SEQ ID NO: 34655 - DNA, 408 bp, Homo sapiens
ctatagggcgaattggagctccaccgcggtggcggccgaggtactttttatttaaatgtttataaggcagatctatgagaatgatagaaaacatggtgtgtaatttgatagcaatattttggagattacagagttttagtaattaccaattacacagttaaaaagaagataatatattccaagcagatacaaaatatctaatgaaagatcaaggcaggaaaatgagtataactaattgacaatggaaaatcaattttaatgtgaattgcgcattatcctttaaaagctttcaaaagaaagaattattgcagtctagttaattcagacagtgttaaatggtatcaggataaagaactgaagggcagaaagaattaattttcacttcatgtaacacacccaggatttaca

SEQ ID NO: 34656 - DNA, 451 bp, Homo sapiens
ctcactatagggcgaattggagctccaccgcggtggcggccgaggtacgcggggacctcattcatttctaccggtctctagtagtgcagcttcggctggtgtcatcggtgtccttcctccgctgccgcccccgcaaggcttcgccgtcatcgaggccatttccagcgacttgtcgcacgcttttctatatacttcgttccccgccaaccgcaaccattgacgccatgtcgggttattcgagtgaccgagaccgcggccgctctagaactagtggatcccccgggctgcaggaattcgatatcaagcttatcgataccgtcgacctcgagggggggcccggtacccagcttttgttccctttagtgagggttaattgcgcgcttggcgtaatcatggtcatagctgtttcctgtgtgaaattgttatccgctcacaattccacacaacatac

SEQ ID NO: 34657 - DNA, 442 bp, Homo sapiens
atacgactcactatagggcgaattggagctccaccgcggtggcggccgaggtactttttttttttttttttttttttttttctttttttttttttttttttttttttttttttttttttttttttttttttttttttttttttttttttttttttttgggggggggccaggaaccccttaaaatgggaaggccaaagggcccacttaaaaaaaagcccaaggcggaaaaaaaaaaagttggaaaaaaaaagtttctaccccccaaaaaacccgggccttttcccccccaaaaaaaccaaacccccccaaaaggccaaatccaaaaaaaaccccggggcccaaaaaacgcccccccccaaaacttttacccggaaaatccaaaaggggacccccctttaaacccccccccccccaattaaaaaaaggaaaaaaatcccccccc

SEQ ID NO: 34658 - DNA, 192 bp, Homo sapiens
actactatagggcgaattggagctccaccgcggtggcggccgaggtacttttttttttttttttttttttttttttagcctttgatctctttgtctcatacttcattcagaatgatttacagagaaaattgaggatatcagatggaactttactcaaactcctcctgccacatttgcacaccttcccttctt

SEQ ID NO: 34659 - DNA, 446 bp, Homo sapiens
actactatagggcgaattggagctccaccgcggtggcggccgaggtactttttttttttttttttttttttttttctttttttttttttttttttttttttttttctggcaagaacttttaataaaataaaaacggagaggtgagcaaatccagcatataaaaatgtgtctgaaataagctttttttaaaaaaagtttcaaaaagggtttataaaattgagttacaaacatgctagctattccacaaaaaagtgtcctttttttacccggacatgcaacttgactacatttcccagtcttccttgtagttaggggcagtcatatgacaaagttttggccaatggaatggggccaaaaggtttgaggccttttaaaaactggccccataagcccctcccactcagaagccttaattctcatccatgtctctccgagaaatggggaaa

SEQ ID NO: 34660 - DNA, 442 bp, Homo sapiens
gactcactatagggcgaattggagctccaccgcggtggcggccgaggtacgtcttcattaaaaacaggtgaagaatttgaacaaacatttgcaaactaaaatacaaatgaaatacactcaacaccattaaacaagaaaataaaattatgagatattcactaataatcactacatatgcaccacagtgattaaaaatttttttaagttaagccacgtgacccaacaaggtgcattcactcaagagaaacgcaaatatatgtccactcaaagacttgcacatgaatgttgagagcaggtttatactgaatagcgcaatgtgaaaaaaccccaaaatctagcaaaggatgaagggagaaataaactgtggtatatacatacaatagaacactactcaataataaaaaggattatattcctgatacatgcaatatgggtgaaccgt

SEQ ID NO: 34661 - DNA, 295 bp, Homo sapiens
ctactatagggcgaattggagctccaccgcggtggcggccgggatcattggcagactcgtgtcttaagagccgagctccccgaaaaagaaattcttagcccttttaagggcttacaactctaaggggtctacatgaaaaagtcataatagatcaagtaagcgtgagaaacatgactgggggctacatacatcagctaacagaacaaaaagttttacagtattttctcatacagtgtctggaatttacagataacaccaatagtctttggtcaggggtttaataaatattatttat

SEQ ID NO: 34662 - DNA, 438 bp, Homo sapiens
tactatagggcgaattggagctccaccgcggtggcggccgcccgggaggtaccagatcatgaagtcaaaaagggtgaagtccagtttgaaccaggcagcctaagtccagacacatggcatttggccagtcctctccctgcatccaacctgccctctcaaatccttgtcactcaggccgatgcccctgctcactgtgcccttccttttgggggttccttgtagaccacagctagaccagtgggtgccacaatcactgtgtcaagtatagaaagggcagctgagatcacatcaaagattccagaaagaattggcacaggatcattcgggatgcatctctcccttgcccctgttcctggctttccttacagctctcgacttcctcaaaggagtcataaattcggaatttggcttctcttcctgttgaggaagctggaaact

SEQ ID NO: 34663 - DNA, 443 bp, Homo sapiens
tactatagggcgaattggagctccaccgcggtggcggccgcccgggcaggtactttttttttttttttttttttttttgcaaaattaacacaaagctaataagctgaatacacaatgcaaagcatcctaaatcttgggcaataacaaaatctaagatcctaagatcatgatatttaaggtaggaaaaaagtaattagactaaactgggcgcggtggctcacgcctgtaatcaatcccagcactttgggaggcagagatgggtggatcacctgacgtcgggagtttgagaccagcctgaccaacatggagaaaccccatctttactaaaactacaaaattagccgggcgtggtgccacatgcctgtaatcctagctactccggaggctaaggcaggagaattgcttgaacccaggaggtgaaggttgtggtgagctgagattgt

SEQ ID NO: 34664 - DNA, 443 bp, Homo sapiens
atacgactcactatagggcgaattggagctccaccgcggtggcggccgaggtacttagggtaagcattaacaatattattcaaaatgttatatagagttcaactgtatacaatagagcatttattaaagtgtgtccaaagcgcttataaataaagcatcttcgaggcaggcggctcacttgaggttaggaggaaagcagactggccaacatggtgaaaccccgtctctgtggtcccagctacttaggaggctaaggtgggaggatcacttgaggacaagaagttgaggctgcagtgagccaagtgtttgtgcaattgctctccagcctgggtgacagagtgagactctcaggaagccgcagtgttagttgcctctgatttttgacaagcatgggaagatgggggctgttcatacagggcaagcttcaagtgtccagtcaaata

SEQ ID NO: 34665 - DNA, 439 bp, Homo sapiens
atacgactcactatagggcgaattggagctccaccgcggtggcggccgaggtacatgaattcctacaggagctagccagctggttctctatccctgggaaattcccaagtcaccaccgatagctttgccctaggtcatgaggacagaggggttcccaacagtttggtggtcagcagattgtcagaggggtgaagggagcagagcagcattcccacctttttttgaacggagtcttgctctgttgcccaggctggggtgcagtggcatgatcttggcccactgcaacttccacctccccggatcaagcagttctcctgcctcagcctcccaagtagctgggaatacaggcgtgccccaccatgccctgtaatggctttgtatgtttactggagacggggtttcaccacgttggccaggctggtttctaactcctgacctc

SEQ ID NO: 34666 - DNA, 410 bp, Homo sapiens
tatagggcgaattggagctccaccgcggtggcggccgcccgggcaggtacgcgggggatcgcttcctggtcctcgcctcctccgctgtctccctggagttcttgcaagtcggccaggatgtctcagtgtagacccttgtctgagaccgagctatgtggggcgacctctggctcctcccgcctgcctctgccaatccgggcactgggacagaggctgagtttgagaaagctgcagaggaggttaggcaccttaagaccaagccatcggatgaggagatgctgttcatctatggccactacaaacaagcaactgtgggcgacataaatacagaacggcccgggatgttggacttcacgggcaaggccaagtgggatgcctggaatgagtctgaaaggggacttccaaggaag

SEQ ID NO: 34667 - DNA, 322 bp, Homo sapiens
tactatagggcgaattggagctccaccgcggtggcggccgaggtacttgggaggctgaggcaggaaaattcttgaacccaggagacggaagttgcagtgagctgagatcacaccactgcactccagcctggtgacagagcaagactccggctcttaaaaaaaaaaaaaaaaaaaaaaaaagagagagagagagaataaatagaaaagaatgtggctgggaattgtgaatcaaaagattataccccccaattgtttttcagtccccttttctcaaataataaattagttaaatcagtttctgagttatgccactgggctgatg

SEQ ID NO: 34668 - DNA, 383 bp, Homo sapiens
gccgcccggccaggtggagaaggacagctgcttttttatatagattaaaagaaatctcaatcttcaaagtttctatttactgtaacagtagatggtttcaaagaagcacttggccgggcacggtggctcacacctgtaatcccagcactctgggaggctgaggcaggcggatcatgaagttaggagtttgagaccagcctggccaacatggtgaaaccctcgcctctactaaaaatacaaaaattagccaagtgtggtggtgcatgcctgtaatcccacctactcgggaggctgaggcaggagaattgcttgaatccaggaggcggaggttgcagtgagccgagatcatgccactgcactctagcctgggcaacagagtaaga

SEQ ID NO: 34669 - DNA, 424 bp, Homo sapiens
  misc_feature 374, 383: n = A,T,C or G
actactatagggcgaattggagctcccaccgcgtgggcggccgcccggccaggtccagcccatatttgtttactttttctgtagctcatatatctattattactggtggtttcttagtggaaatttttctttcactctcactttggctttacctccaagtgctttcttctcttggctgcaattgagcactataatttgtggctttccggagggggagccttggtggtcaggtggaggaggcaggccacattccaaaagtggagtggtaggtgttccagacagagtgctgattcaagagtgagtaggggtgtagggtgaaagttggctactaattcaagcctcacctgaggcagtgttgtctcaaaacagaaaangtgccctcntctaattaggctgcgcccccatatgcgcctttagattaatg

SEQ ID NO: 34670 - DNA, 372 bp, Homo sapiens
ctatagggcgaattggagctccaccgcggtggcggccgaggtaccaaggcaatgtaacttttgattttcggtcaatttaagttcttttgtcaccaaatattaataaacagttttgacttcaaaaaaaaaaaaaaaaaaaagaaaaaaaaaaaaaaaaaaaaaaaaaaagaagtccctcggccgctctagaactagtggatcccccgggctgcaggaattcgatatcaagcttatcgataccgtcgacctcgagggggggcccggtacccagcttttgttccctttagtgagggttaattgcgcgcttggcgtaatcatggtcatagctgtttcctgtgtgaaattgttaatccgctcacaatgtccacacaa

SEQ ID NO: 34671 - DNA, 412 bp, Homo sapiens
ctatagggcgaattggagctccaccgcggtggcggccgaggtacgcggggagaggtgagagtcgcgcccgggagtccgccgcctgcgccaggatggagttcgtgaaatgccttggccaccccgaagagttctacaacctggtgcgcttccggatcgggggcaagcggaaggtgatgcccaagatggaccaggactcgctcagcagcagcctgaaaacttgctacaagtatctcaatcagaccagtcgcagtttcgcagctgttatccaggcgctggatggggaaatgcgcaacgcagtgtgcatattttatctggttctccgagctctggacacactggaagatgacatgaccatcagtgtggaaaagaaggtcccgctgttacacaaactttcactctttcctttaccaaa

SEQ ID NO: 34672 - DNA, 407 bp, Homo sapiens
  misc_feature 50, 51, 52: n = A,T,C or G
ctactatagggcgaattggagctccaccgcggggggcggccgaggacctnnnttttttttttttttttttttttattagaggtggggtttcaccatgttggccaggctggtctcgaactcctgacctcaaatgatccacagccatgagtcactgcgcctggcctaaaagaactaaatcttgtagtaggaagttgtatgtaattacactgctatattacctacagctttgtgtatgtgatctgatctttctttgcagggcaaatgcaagaaaataggagacaaaggacaaggtagagcaaatcttcaagcacacagaaataatgtggggagtaaaagctgaaactacaggcaggagtaggggggcacataaatcaaagcttgtctgccatttgatcaatcttgggata

SEQ ID NO: 34673 - DNA, 201 bp, Homo sapiens
actactatagggcgaattggagctccaccgcgggtgggcggccggcccgggcgggtactctataaatctagtggaaacatttctgcacaaactagattctggacaccagtgtgcggaaatgcttctgctacatttttagggtttgtctacattttttgggctctggataaggaattaaaggagtgcagcaataactgcact

SEQ ID NO: 34674 - DNA, 362 bp, Homo sapiens
actactatagggcgaattggagctccaccgcggggggcggccggaggtaccagtaattgagtaatggtggaaatgtgaaagtcagtcacaggactctcattggtgccagtgtcatagttaagaaagaaagaaagaaagttttatatatcctgtaatctagactggaagctaaataattgctaggaagcaaacttaagtgatagctgttaagttttttggtttgtttttgaccagagatgatgaagtaggtgatcttttcttggtttgctcctagactcttccattttaacttatatttttagtttggtgcaaaagttaattgctgttttgggaccatgaaattgtaagttcatttataacta

SEQ ID NO: 34675 - DNA, 411 bp, Homo sapiens
actactatagggcgaattggagctccaccgcggtggcggccgcccgggcaggtaccaccacacccagctaattttttaaatttagtagagacggagttttgtcatgttggccaggcaggtctcgaactcctggcctcaagtgatccacctgccttggcctcccaaagtgttgggattacaggcgtcagccaccacgaccagctaacaaccatattcctaacacatatgctactaggactgtgtgattttataactacatcattaaaattcatcttgcctttggggagcttacaatttaatggaaatactgaattaaaaataacacacatatacacatgtgaaaacagctctaacacaagcacggtaaagatgtatgcagctagaatggagcctatgaaacatttcaattta

SEQ ID NO: 34676 - DNA, 369 bp, Homo sapiens
agtaaaaccaatgaatgtttaactccttcataagcaaaattatttttatgtgatctctaagaaattcctcctttcacatttttctgttttcatacaggtcctcatgctgataccgccagtggatgccagaatttgcagtgtggttttcgagcctgctgccgctctggcgaatgacccttgacttctgatctttgtctacttcatttagctgagcaggctttctttcatgcactttactcatagcacatttcttgtgttaaccatccctttttgagcgtgacttgttttggccccatttcttacaacttcagaaatcttaatttaccagtgaattgtaatgttgtttctcttgcaaattatacttttggt

SEQ ID NO: 34677 - DNA, 369 bp, Homo sapiens
aactcccccattatattagaaaataaataaaaggttaccataagtaagctccagaaaaacaacatattgccgacctcacggatttttaccaaccactcgctttccctgtggccttggcacactggcatgctggtctaggatcctctacgcacaacgcctgctcgcctcctccgtgtggttgccaagccaagccgcctgctaccttcatcaccaaattgcactcgctccttcctggaatcctttttcctagattcaccaccaaatcgttagcgctccttccttcttcctagcttccttcaccaaatcgcactggctcctggactcttttcctatcttcaccacgaactgctgcttgctcgcttgctcctc

SEQ ID NO: 34678 - DNA, 441 bp, Homo sapiens
  misc_feature 313, 321, 341, 347, 355, 356, 385, 386, 407, 408, 420: n = A,T,C or G
ccctatcactactatagggcgaattggagctccaccgcggtggcggccgaggtacaaagagtagctgccccttctcagggcagatgatgctttgagaacatactttggccattacccccagctttgaggaaaatgggctttggatgattattttatgttttagggacccccaacctcaggcaattcctacctcttcacctgacccttgcccccacttgccataaaacttagctaagttttgttttgtttttcagcgttaatgtaaaggggcagcagtgccaaaatataatcagagataaagcttaggtcaaangttcatangagttcccattgaactatantgactnggccacanncaggatcttttgtattttaaggggattcnntgagattttgcttttgagcannggattagataangggctgtttcttttaaatgta

SEQ ID NO: 34679 - DNA, 409 bp, Homo sapiens
ctatagggcgaattggagctccaccgcggtggcggccgaggtacttttttttttttttttttttttttttttttataatcaaatttttttttatttttctacagcaaaataaaaacattattttaaaaagcaatattctacattaaatacattaagatattgacaattttataaatacaatcattttaaacagtaaacatgataaatttctgatacaaggttttacatacgttaattgtgaaaatgtaaaaactttacacacttctcttaaaaagcattcaacgtaatcaattttacaaaattatcaatttaaaaagtgttagatatgcttctattttgttccattattaaggcaatgatagcatatcagatcttaaaaaagaaatggtgaattagggcctaagacatc

SEQ ID NO: 34680 - DNA, 306 bp, Homo sapiens
  misc_feature 44: n = A,T,C or G
ctatagggcaattgagctccccgcggggggcggccgaggacctncatgttcttttttttttttttttttattttgttttttttttttttttgggcaaaattttttattatgaagatacagatctaagaacagaaggataattatgtgctagcttatatatagttccttgtaaaaataatgatacatgaaaaatttggtgaaaaatgaaaatctgcagttatctgatatctgaaaatgttaagcaatttcccctgcatcttaaattctaaatgacttttgcaggaattaatcaaggcatattttggg

SEQ ID NO: 34681 - DNA, 325 bp, Homo sapiens
ggccgcccggccgggtacttactgtgctaggtgctggaaacacgaagatgaagagccagagcctttgcttttcagaagctcatggtctgttggagcaatagacttgaagaatgtgatgaggagggtattaattaaaagttgtaagccaggcgtggtggctcacacctgtaatcccagcaccctgggaggccgaggcgggcagatgacgaggtcaggagatcgagaccatcctggctaacacagtgaaaccccatctctactaaaaaatacaaaaaattaaccaggcgtagtggcgggtggcctgtaagtcctagctatttcggga

SEQ ID NO: 34682 - DNA, 386 bp, Homo sapiens
cgggggcggccgcccggccaggtccaatagcctctgatgctaacatgtagcaaaagtgcctgaaggcaaaggcgaagttaatttctaagtatttgtattttattattattattattttttttattgagacagagcttcgctttgttgcccaggctggagtgcagtggcacaatcttggctcactgcaacctctgccacctgggtccaagcaattctcccacctcagcctcccgagtagctgggactacaggcaccctccatcgtgcccagctaatttttgtatctttagtagagacggggttttgccatgttggccaggctggtctcgaactcctgacctcaagtgatccacctacctcggcctcccaaagtgctgggaccacagg

SEQ ID NO: 34683 - DNA, 422 bp, Homo sapiens
tacactactatagggcgaattggagctccaccgcggtggcgggccgaggtacaaaacagccaggcaggggggcgcacaacctgtagccccagttactcaagggtcttgaggtggaagatccctcaagcccaagaggtcaaggctgcagtgagtcatgatcacgccatgccatggcactccagcctgggcaagacagtgagaccccgcctcaaaataaagtaaaatataaaataaaaacagcaagtgggaactcagcattcaagttaacttgtagagctacccagctgctaagagcagtgtgatccttggtgctcttaggatcactttggtatctgctcattttcctttttgtctaccctataaagcacaaaatcgagtgggtaaaaagtatgaaaccagcactgtttctactttcttagagg

SEQ ID NO: 34684 - DNA, 420 bp, Homo sapiens
tactatagggcgaattggagctccaccgcggtggcggccgaggtactggtggagtatattttaatatatagaactataatatatagtaacaatagcacaaagcatggaaaggggtaatcgaaatatactacagtaaagttctgacattttacatgaaatgtagaatattatttgactatagactataagttaaagatatatattgtaaaccctaaagccacaactaaatatttaaaataaagatgtatagctaataagggaataattactatgcaatagattaataaaaaattctcactctgaaagagaaaaaaagaagaaaagaacaaacagagcaaatagaaaacaaatagcaagatggtaggtttaaacccaacattattgataattacattaaaggctgaatattccaattaaagg

SEQ ID NO: 34685 - DNA, 185 bp, Homo sapiens
actcactatagggcgaattggagctccaccgcggtggcgggccgagtacaaaaggacaatataattttcacatgaacccttggctgtagttgcctttcctagctccactctaaggctaagcatcttcaaagacgttttcccatatgctgtcttaattctttttactcattcacccgttcttccca

SEQ ID NO: 34686 - DNA, 407 bp, Homo sapiens
  misc_feature 387, 395, 396: n = A,T,C or G
ctactatagggcgaattggagctccaccgcggtggcggccgcccgggcaggtaccttcattgcgatcaaaccagatggggtccagcggggtcttgtgggagagattatcaagcgttttgagcagaaaggattccgccttgttggtctgaaattcatgcaagcttccgaagatcttctcaaggaacactacgttgacctgaaggaccgtccattctttgccggcctggtgaaatacatgcactcagggccggtagttgccatggtctgggaggggctgaatgtggtgaagacgggccgagtcatgctcggggagaccaaccctgcagactccaagcctgggaccatccgtggagacttctgcatacaagttggcaggaacattatacnatggcagnntgattctgtgg

SEQ ID NO: 34687 - DNA, 408 bp, Homo sapiens
tatagggcgaattggagctccaccgcggtggcggccgaggtacttttttttttttttttttttttttttttttttagtagacacggggtttcaccgtgttagtcaggatggtctcgatctcctgaccttgcgatctgcccgcctcggcctcccaaagtgttgggattacaggcgtgagccaccgtgcccagccccacctcaattttataatataattttctacacagagaacacagaaaatagttgtcttttgtttacaatagagaatcaacgtttttttttttactacttatagtttagaactaaagtttcagcttcacaactattggggatgctttgtaaatgtctcaaattactgaatttgtgaaaacctctcatgtttctttcacatgtgagttacaagaagat

SEQ ID NO: 34688 - DNA, 413 bp, Homo sapiens
ctactatagggcgaattggagctccaccgcggtggcggccgaggtacgcgggggctggaatgctgaggagacaggagtgaagtaaaaagacatggttccggcaggaaacaggcaaggagagccttgacttgacggagtctggctatatcgccaggctggaatgcaatggcgcgatctctccccactgcaacctccgcctcccgggttcaagcgattctcctgcctcagcacctcgagtagctgggactacaggcgcgcgccaccacgcccagtaagaggaaataactctacattcaaatttgagcagggcacttggtgacctacttagacatgacattccttggcctccctttcagcaagatgagaaaactgaggcacagagaggtgaaataaggcccccagaatgctcttct

SEQ ID NO: 34689 - DNA, 417 bp, Homo sapiens
cactactatagggcgaattggagctccaccgcggggggcggccgaggtacttgtatggggctgtcactgacttgacatgctgctgcagttccttggtcaactgatccttgtcatgggacaggaactgtggggtcaggacaataaaggccttcaccacccagaggcattaatgatgtcatcactcctccccaggaaacaaatgtagccctcttcatccatctttcctctgtccccagtgttgtagaagtccccacattccactttagctgtcttctctgggtcaccctcatagcacatgaagaggctcacaggcctgacaggtttgattctgatgccaatgtttccttctgtgttaggtggcaggatgctgcccttgtcatcaatgacctggacgtcatagggtggagtggccttccc

SEQ ID NO: 34690 - DNA, 267 bp, Homo sapiens
atacactactatagggcgaattggagctccaccgcggtggcggccgcccggccaggtacagagaaccatgggctgagccttacttttcagccacaaaataaaaatactatcattaaatcttagaatctgagttggcagataaccttgtctaatacccttctaactaaaactattccacagaattcctcaatcaactgacctctgttttaagtaatgacagacatctgatagctttagaggtggcaggttcttatgggtaggaacact

SEQ ID NO: 34691 - DNA, 428 bp, Homo sapiens
  misc_feature 223, 224, 226, 410: n = A,T,C or G
actactatagggcgaattggagctccaccgcggtggcggccgcccgggcaggtaccatgctgacttcttggtatcttttaaggcctaattttcccttccttgagattactgtagtgtgttccagctaatttctatttggaaacgagttggaacagctgaaaactaggtattattgaaggcaaagcagcctcacgtcagttttttatcagctcatttgggaagnncnttttttttttttgttttttttaattaattagaaagtaggctgggcacgggggctcatgcctataatcccagcacttggggaggccgaggatctcctctctggtggatcacttgagggcaggagttaagagaccatcctggccaacatgatgaaaccctgtctctactaaaaatacaaaaagtanctgggcgtggtggcatac

SEQ ID NO: 34692 - DNA, 328 bp, Homo sapiens
agggcgaattggagctccaccgcggtggcggccgaggtactctgtttttttttttttttttttttggggcttttatcctgtttggtgttctctgagcttcctgaatctgtggtttcgtgtcacatattaatttagaaaaatctcattcattattgctttgaatatttcttctattcctttctctctgtcctctccttgtgggggtccactatgcgtgcgtacatcttttttagttggcccactgcccttggatggtccgttccttttttattcagtcttgtcccctttggtttcatttttggaggtgtcctcttgaaatatacctgga

SEQ ID NO: 34693 - DNA, 426 bp, Homo sapiens
ctactatagggcgaattggagctccaccgcggtggcggccgacgtactttgtttttttttttttttttttcgccaaagtcaacatgttgtaatgtaacatatctttctttaacatctggtaaggcacagttctccattatatcaacggccttggaatctttatggctgtaattggatgtctgatcttccatatctatggtagatttagctgactacattccctccttaatttcgccaatattttgaataggatcttatcgaatacatcgtctgtcttaaaatgagtccccttttgcttattgcaagaaatgtgtttccagttattcgttaccacaaataaggtggaaataagctttaacagtcactacttctctcacaatacaattctaggaattatatttcacactgtgtacaggggtatagata

SEQ ID NO: 34694 - DNA, 355 bp, Homo sapiens
actactatagggcgaattggagctccaccgcggtggcggccgaggtacttgggactacaggcacgccccaccatgcccagctcatttttgtatttttagtagagacagggtttcaccatgttggccaggatgatcttgatctcttgacctcatgatccgcccgtcttggcctcccaaagtgctgggatcacaggcgtgagccaccacacctggccctctatttattctctttaaagagagagaaaactatgagaggccaaaattatttaattaaatctttaccttagcacaagggaaaaaaatggaatttgcctaatataggtgatgaagcatacacaatgaattgaaacaatca

SEQ ID NO: 34695 - DNA, 185 bp, Homo sapiens
tatagggcgaattggagctccaccgcggtggcggccgcccgggcaggtacagatctgggaactaaatattaaaaatgagtgtggctgggtatatggagaatgttgggcccagatggaaccgtatagatcagatattacaacagctttgttttgagggtttgaaatatgaaatgatttggttatga

SEQ ID NO: 34696 - DNA, 361 bp, Homo sapiens
actactatagggcgaattggagctccaccgcggtggcggccgcccgggcaggtactatagattatttgtcttgaagaagagctttgatatgtttcaaaattcgacgttggctttggaaggaaactgtaaatttacagatctttgtccttccccacaaagagccttaatctcacaggttggattatgtggaactcactgctatttttcagttctcctttaagtgactaaggaacatccagatactttcaaaaaaaaaaaagtctaagtttttcactttgtccattgccatttaattatctttctgcatattttaaagcatttcctgtgaacataaagtattgcccattccagaaaattttgc

SEQ ID NO: 34697 - DNA, 408 bp, Homo sapiens
  misc_feature 195, 197, 208: n = A,T,C or G
atacgactactatagggcgaattggagctccaccgcggtggcggccgaggtacgcggggacatactcattgcctactttaacacctgtcagagaaacgtgatatggggtaaggaggtgcttttttaaaatcgttcatagacttctgtaaaatgcaagataaattaaagttattataacagtgattctttcaaaananaaaaacacganaagaccaagaaaaaaaaaaaaaaaaaaaaaaaaaaaaaaaaaaaaaaaaaaaaaaaaaaaaaaaaaaaaaaaaaaaaaaaaaaaaaaaaaaaaaaaaaaaaaaaaaaaaaaaaaaaaaaaaaaaaaaaaaaaaaaaaaaaaaaaaaaaaaaaaaaaaaacaaaaaaaaaaaaaaaaaaaaaaataaaaataaaaaaaaaa

SEQ ID NO: 34698 - DNA, 437 bp, Homo sapiens
tacgactcactatagggcgaattggagctccaccgcggtggcggccgaggtactgtgtaacacatggcctttcagtaagaaaagcgttgatggcattgcctggcagaaggaagtagagagcagaggcttaggggctgtgtgccagatggcattttgggagaaggagaacatctcacttctttgaaggcttgagatctcaggtccaaaggagactgagtgtgtgggaggagtggtagctactgaccaggaagttgttgctggctgcacttccctcctgatagggaatcctggattgcctacagaggggtctgaggcaattgtatctggtttggggttctaccaagtgaagctggagatttgtaaaagcttgtcatctattgatcgttggtccttgtacttaagtaatccaaagctcgatcctgatctgcatgaattag

SEQ ID NO: 34699 - DNA, 443 bp, Homo sapiens
cactactatagggcgaattggagctccaccgcggtggcggccgaggtactttttttttttttttttttttttttgtttttcatttccctggggacactaagtgatgcctcttcggattatctgaaaatgtgggcactctgtatggcaagatggaactggctgtctttaaggaaatagtttcaactgttcatgcctctgtttctcccttcataaagttggttactgagcctgcattctaaagtgcctgttgtggccgggcatggtccctgtaatcccagcactttgagaggccaaagtgggcagatcacttgaggtcaggagttcgagaccagcctggccaacatagtgaaaccccgtctttactaaaaatacaaaaaattaactgggcatggtggcgtgtgcctataatcccagctactcaggaggctgaggtgaaagaatcg

SEQ ID NO: 34700 - DNA, 432 bp, Homo sapiens
atacgactactatagggcgaattggagctccaccgcggtggcggccgaggtacaaataaatgttaagacatgatccctgttgaaatccaaaagataaaaagcccttaagttttcttattttatattataaatggacaaggcagcaaatggtattaaggatacttttggtaagagaatagtttttatcagagcaggctgcaggtagaatatttctcaattactatttacagctgagtaacttttttcctatggacataaaaatatacactctgcaaatgattttttaatgaaaaatgacagcctattttctgcaacttggttttttacataataatcatggacatacatctaagattgcatatgtagatctcctgttttgatgatcacctagaattctgttttgtggttgtgcctttaattgaccaatgtctt

SEQ ID NO: 34701 - DNA, 415 bp, Homo sapiens
tacgactcactatagggcgaataggagctccaccgcggaggcggccgaggtacttttttttttttttttttttcctttttcctttttcttttttttttttttttttttttttttttttcctttttttttttttttttaattttttccttttctgaaaaaaggtcccctggggcggaaaacaaaatcccaggggaggggcaaagggcaaaaggaaccccccgggaaaaaaaaaaacgcccccggggggcccccccccaggggggggcccccccccccggggggggccccccaaaaccggggggcccccccgcaaaaaaaaaaacccccccccggggggggggccccccccccccggggggggcccccccccccacgggggggcgccccccgggggaaacaagcccccccccgggga

SEQ ID NO: 34702 - DNA, 427 bp, Homo sapiens
tactatagggcgaattggagctccaccgcggtggcggccgcccgggcaggtacacatatactaagctgtaaatagtctgccttccattagtttggtctctaagcactataaatatgtcgacttcatatcagtctatgagacccagtgacccccttttcagaggcatcggtaatacatttggcaaatgtcttgaaacatgaattgtaaattaacataggtagaaccttgataataagagtcccaaatatgtatttttaaaaatgttaacattaggaaaaaaatattataatcatcagctctatttcctgaaaaagttcagttgaggtaacctctgcaagtcacagctccacatttacatactgttctgaccctctttttggctgggctgtggtcaatagaatctgaagatatatctccagaacctttt

SEQ ID NO: 34703 - DNA, 442 bp, Homo sapiens
actactatagggcgaattggagctccaccgcggtggcggccgcccgggcaggtacataacatcaaaaactactgtgtgaaacttgagaatgtctgattaaagatttcaatgtatatctaaaaactaactcaaatcgttgaccagcactttcccagtatcataacaatgcggctgaccctcttctgccttcactttacaccccatcatagcacattatttgtgcacaactagtgaggtctgtgcggctcatcatccccataaccaagtcggtctgtgttgagtcatatcattctgtgctggttttagaagtcaccataggaaacatgaagtcacatcctggtcaaaaaactgtccatttctcaaaaacagagaaaaacctgagatacgaggcagcaactagcgacacttacaggaagggaaagaacaatgacaacacccgccc

SEQ ID NO: 34704 - DNA, 401 bp, Homo sapiens
gcgaattggagctccaccgcggtggcggccgaggtaccaggagtgggatgttctgaaaagatatctgaaaatgtggaaacgactttggaactgggtaataggcagaggttggaacagttttgagggctcagaaaaagacaggaaaatgtggaaaagcttggaactttctagagactggtgaagggctttgccaaaatgctgataatgatatggaccaataagacccaggctgacgtggtctccgatggagctgaggaacttactgggaactggagcaaaggtgactcttgttatgttttagcaaagcgactggcagcattttgcccctgccctagagatgtgtggaactttgaacttgagagagatgatttagggtatctggcagaagaaatttctaagca

SEQ ID NO: 34705 - DNA, 368 bp, Homo sapiens
  misc_feature 302, 331, 332, 333, 348, 351, 359, 360: n = A,T,C or G
actactatagggcgaattggagctccaccgcggtggcggccgcccgggcaggtacaccatttcattaataattactatgttgataacatgttgaaatataacattttggatatattagattaagtaaaatgtgttcttaaatttcacctgcctgtttcctttttattctttttttttttgaggcggagtttcgcttttaatcaccccaggcttggagttgccagcggcgccgatcatcggcttcactttgcaacctccgtcttcctgggggttcaagcgagttcttctttgccttcagcccntcccaagtagcttttggaattaccaagcnnnatgtgctcaccatgnccnccgtctannatttttgt

SEQ ID NO: 34706 - DNA, 441 bp, Homo sapiens
acgactactatagggcgaattggagctccaccgcggtggcggccgaggtactttttttttttttttttttttttttttttgaggcggagtttcacctgaccttaggtgatctgcccaccttggcctcccaaagtgctgagattacaggcgtaagccactgcgcctggcctcaattctttttaaattctttttaatgtaaaacaatagaattaggaatccaaaaaagaataaagaaaactggactgacataacaaagacaggaagaaaacaaacagaatgcataattatcagtataaaagatggcttaaaatcaaatgtagcagttattacaaaagagagtcaaattcccctactaaaaggtaaaaactctagagttaaaagacaaaagctatttgagacaatgtacctgcccgggcggccgcccgggcaggtacgcggggg

SEQ ID NO: 34707 - DNA, 192 bp, Homo sapiens
tcactatagggcgaattggagctccaccgcggtggcggccgaggtacttttttttttttttttttttttttaagggaaaacatcttttttattattattatttttatttatttatttagagacaggttcttgttctgttgcctgggctagagtgcagtggtgcaatcctaattcactgtggcctcaaatttc

SEQ ID NO: 34708 - DNA, 631 bp, Homo sapiens
gactcactatatggcgaattggagctccaccgcggtggcggccgcccgggcaggtacttagcttttatcaaatatataagtatttgataaaatactcacgtaagttacaggaaacacttccgcatatgttgtataatcaaggtcactgtctactttgtaattcagtgactattaagttcccaatagaaaatgaaagaattgctgggttcctactttctgataagaacagttccttgatttccccttttttcttggttgtcaggaagctccacagaaaagtctgtctaatcacagcaaccgtaataattatcatggcttagaaattcatttcttcattctaagatcataattttctattttcattttataaaccagattgttatttgaagcagcttcaaatctgtttgaaaaagagctgctaagatgatgcaatgtctgtgctgaaccaaaaagatattaactaaattttacaaagcaagcttttactgaataccagctaagtggtatataaataaaacaaattaaaagattaaccttgaacttgccaatctagtcatctttttaaaaaactactttgtagcattagactcctgtgactgattaaatatggcctttgcagctcttctcatca

SEQ ID NO: 34709 - DNA, 184 bp, Homo sapiens
actcactatagggcgaattggagctccaccgcggtggcggccgcccgggcaggacaatatggattgggatttcgattctctcatacctgtgaggcaatcagttcaggtcagtttttaaaccctgagttgttataatcagaagttctctacagttttaattggaagtttgggatatggcatactt

SEQ ID NO: 34710 - DNA, 494 bp, Homo sapiens
cgactcacgtatacgactactatagggcgaattggagctccaccgcggtggcggccgcccgggcaggtacttattttttttttatttttttttttggccggggatgatccacaatttaacaagtttaattacatatcaagttttgttatcaagttctatacactttacaatcaattagatgttaattcttttatagaaatcttatatcagaatcaagttattggctctcctacagatttgcctgtcccagagaactcctagctttgcaacttaataactgtgtaacgcagaagtcacttaaaatctctggcatccaaatttcctacaaggttgctataaggatcaaacaagaagatgtggtgaaagcaaagaagcaccatgccttgcatttattagaaattcaataaaaagctgaattcatgtcctttcttcactctaaagaagccaaaaacaaagattgatgcaattaaccttattgctttaacctacattct

SEQ ID NO: 34711 - DNA, 635 bp, Homo sapiens
cgcgcgtaatacgactcactatagggcgaattggagctccaccgcggtggcggccgcccgggcaggtacgcggggacagctgtgtttggctgcagggccaagagcgctgtcaagaagacccacacgcccccctccagcagctgaattcctgcagctcagcagccgccgccagagcaggacgaaccgcaatcgcaaggcacctctgagaacttcaggtaggagaaaagcaaactccctccaacctcttacttcgggcttaaggcagagaactcgcctccccagaatctcctccctccatgatcccccgctattcctctattttcttttccgcggacctgcagccttgggtcgaccctgccctaggggtgactgcaggagagcagggaggatggtcaggcgtcaccaacaaccccatcacccagtaacaagaaccttgactctctcagtccctctgcatcaagacacttacccatttcccacctcatgcctgctaacttgaatgaaacaatcgctgggaaagcattaagagaattaaggctgggcactgtggctcatgcctgtaatcccagcactttgtgaggctgaagcaggcaaataacttgagcccaggagtttgagaccagcctgggcaacat

SEQ ID NO: 34712 - DNA, 182 bp, Homo sapiens
tatagggcgaattggagctccaccgcggtggcggccgaggtacgatgtgggaagacctttatatttggtttctaccttactgaacaccagagaatttacactggtgaaaagccctattaatgtaaagaatgtggaaggcctttattcgtagagggaatcttaaagaacatctgaaaattcat

SEQ ID NO: 34713 - DNA, 598 bp, Homo sapiens
  misc_feature 380: n = A,T,C or G
atacgactcactatagggcgaattggagctccaccgcggtggcggccgaggtaccccagctgatgatgttccacaaaagagcaaaacatacacaatctggttccactctacagaaatcctggaactggactacaaagggaatagacagggtgtggcaggagggggttcctcacggttggagtgcgaggttagggacaggaatagaaggtaggtaataaacattcatgtggtattaacttagggcagatgtgtcaatgtatttccaagtttagcataatataggtataaaaattaaataaaaagtttatatgtgtgtgtatatatgggttaatacacaacacatacctcctagagtcattacctgagaggttctacaaganaagacagcaaattaacaaaaaatacacccagaatcaagatttgagttttggttcctttcatagcagaatggtatgcaacatttcttggaaaaatggctaatcctagggcttggaaagagaatataggagtaaagtctacaatttctcatggtacctgcccgggcggccgctctagaaactagtggatcccccgggctgcaggaattcgatatcaagct

SEQ ID NO: 34714 - DNA, 430 bp, Homo sapiens
tacgactcactatagggcgaattggagctccaccgcggtggcggccgaggtacgcgggggctcagtttgggcttggatggtaacgtttattttccttggcagagaagctgatcgtcgaagggcatctaaccaaagcggtagaagaaacaaagctttcaaaagaaaatcagacaagagcaaaagaatctgatttttcaaatactctgagtccaagcaaggaaaaaagcagtgacgacactacagacgcccaaatggatgagcaagacctaaatgagcctcttgccaaagtgtcccttttaaaagatgacttgcagggtgcacagtcagaaattgaggcaaagcaagaaatacggcatcttcgaaaggaattgatcgaagcccaggagctagctagaacaagtaaacaaaaatgctttgaacttcaagctct

SEQ ID NO: 34715 - DNA, 537 bp, Homo sapiens
tacgactcactatagggcgaattggagctccaccgcggtggcggccgcccgggcaggtacgcggggatatgaggggttccgtgactgaggttctgagctgctgttgatgtgctatacctccttcaattctcagctctcaaaggggaaaacaactgcagaggatgggaaatgctatactgccatgcctggaaacacccacaggaaaattaccagttttgagcttgctcaactgcaagaaaaactgaaggagacagaagcagccatggaaaaattaatcaacagagtgggacctaatggtgagagagcacagactgtgacttctgaccaagagaaacggttgctacatcagctccgagaaatcaccagggtcatgaaagaaggaaaattcattgacagattttctccagagaaagaagctgaggaggccccttacatggaggactgggaaggttaccctgaagagacttacccaatttatgacctttcagactgtatcaagcgtaggcaagacacaatcttggtggattaccctgaccc

SEQ ID NO: 34716 - DNA, 411 bp, Homo sapiens
tacactcacttagggcgaattggagctccaccgcggtggcggccgaggtacgtgaatgtttgcctagaagtcctgttccctatataataatactttgataatcatttcaaatgccaacccttccttaatataaaagttttgcgttatgttaaataaactatttttttctttattcttttcttttagctttatcttcaagccaggatgaagggagactgggcaagactcttacgccccacactgcaatttggtcttgttgccgtatccatttatgtgggcctttctcgagtttctgattataaacaccactggagcgatgtgttgactggactcattcagggagctctggttgcaatattagttgtaagtatacaggtcaacagcctacatcttgatattgctaaacattta

SEQ ID NO: 34717 - DNA, 424 bp, Homo sapiens
actatagggcgaattggagctccaccgcggtggcggccgaggtactggcatcaacaagataaggtttccatggagctgccataatttttctataacgctgcccctaggccagaattggttggtctacaggtagatacctgatccaaactatgacaaccacaatattccagcccttgacaatgattgactcttccaggacgggcacttaactcaagctaggccaatcatagtcatttctcaactagatcctgccccactggtcatagctaattggtgcaggactggaactggatgcaagctgactctctggattgagaactagaggtcagaccattccctgtcccatgtctgaaactgaaatatgcagcactggaaaactgctcatgctcatggccatggggatcagccttccccttagcctcag

SEQ ID NO: 34718 - DNA, 422 bp, Homo sapiens
  misc_feature 406: n = A,T,C or G
ctactatagggcgaattggagctccaccgcggtggcggccgaggtaccatttgcctcccgggctcaagcgattctcctgcctcagcctcccaagtagctgggattacaggcacctgccaccatgcccggctaatttttgtaattttagtagagacagggtttcaccatgttgcccaggctggtttcgaactcccgacctcaggtgatccacccgcctcggcctcccaaagtgctgggattacaggcttgagcccccgcgcccagccatcaaaatgctttttatttctgcatatgttgaatactttttacaatttaaaaaatgatctgttttgaaggcaaaattgcaaatcttgaaattaagaaggcaaaaatgtaaaggagtcaaaactataaatcaagtatttgnggaagtgaagactgga

SEQ ID NO: 34719 - DNA, 419 bp, Homo sapiens
tacactactatagggcgaattggagctccaccgcggtggcggccgaggtacttttttctttttttttttttttttttttttttttttttttttttttttttttttttttttttttaagggcaagcgaccctaaaacaggcgtagccccggggggaacccggggcccaaagggccttcaaagtgtcaatgatcaatgggtcctgcaattaacattaattttcgcaactagctgcgtttttaattgacccacaagccgggtgatccaccgttaaaagtggcccgcgttcctgcccggggggccgttttaaaactaggggatcccccgggctgcaggaattcgatatcaagcttatggataccggcgacctcgggggggggcccggtccccaacttttgttccctttaatgagggttaattg

SEQ ID NO: 34720 - DNA, 410 bp, Homo sapiens
tagggcgaattggagctccaccgcggtggcggccgcccgggcaggtactttttttttttttttttttttttttttttagaagagatggggtttcgccatgttggtcaggctggtcttgaactcctgaccttgtgatctgcctgccttggcctcccaaagtgctgggattacaggcgtgagccaccgcacccagcctatcatttcttaagtgggtaacaagaggcaagtcatccaaaaagacaatgacactactgttgtcatagaggaatagtaaaaccacagaaaatgtagtgtgctccaattcctctgagtcagcatttaagaggaattttaggtcatcaaggacttgtggtataggctgaaaactatggctttgactggggcaaaaaaagggaaagccaatatgccaa

SEQ ID NO: 34721 - DNA, 351 bp, Homo sapiens
acactactatagggcgaattggagctccaccgcggtggcggccgaggtactatcaataaaattggctgcttgggcggttttagttaccaccttagcctggttttctgctactgttatttatcatcgtaggttctgagttgctcattgtggttgctctttggaccaataaaaatggcaagtatgagatgaacatgataaaagtatgtttatataacaggaagaagctgggcgcggtgctcatacctgtaatcccagcactttgggaggctgagttgggtggatcacgaggtcaggagttcgagaccagcctgaccaacatggtgaaactaaaaattcaaaaattagctgggc

SEQ ID NO: 34722 - DNA, 372 bp, Homo sapiens
cactactatagggcgaattggagctccaccgcggtggcggccgcccgggcaggtacgggtgggaagcagaagcaatgaatcagaaaggagcagagcaacagaagtagacaggaagggtaggtgtcctctgtgtgtaggcagacgaaaaactagcaggaacaagagataagcgttaagggagagagacctcgggggcccagggagggcaggggtcacgggagtagtattggagctgcacaacctgctgcttctgctgatcttagattctgaaaggtggagaagaggggagagacgcaatgactggggagtcctcctacctaaatgatctgaatgatatgaatccttatgtgcctctacctgtattcctctttt

SEQ ID NO: 34723 - DNA, 433 bp, Homo sapiens
tacgactcacttagggcgaattggagctccaccgcggtggcggccgcccgggcaggtacagtgcaatgctttcatctgatatgccagtgtggtaagaaggctttccctggaggtagagactcttttatcagaaggttgggggtctccagaaggttttccccaccaggaattggatttgatggctggaatttagagcctacacatttgggtctcacaatcagggcagggcaggtaaggctaatggtgcaaactgtgtctctgcacaggcagtcatctaggggaaggggtgtggtgcagccagtaaaacctggaacctgcaagtggttcagaactttggtggccagtaagggaaaaactcctcaagcatgctacaatattgaaaggttcaaaagcactgacaaagtgttgttttgcccccggtgcagcacataat

SEQ ID NO: 34724 - DNA, 429 bp, Homo sapiens
tacgactactatagggcgaattggagctccaccgcggtggcggccgaggtacagtagtgcactcttggctcactgtagcctcgacctccggggctcaagtgatcctcctgccttagccccacaagtagtgggactataggcacacagcaccatgcccatctaagtttttgtattttatgtagagacaaggtttcaccatgttgcccaggctgatcttgagctcctgagctcaagtgatctgcccaccttggactcccaaaatgctgggattataggcgtaaaccaccatgcctggccttaaatcaactttagagtcaacatctcttatcactggagcttctggagaaactccatcacgtggtgctctctttcctgatgtgttgtgcccaaatagcttgttctcatcaggtgacttatttgctatgatat

SEQ ID NO: 34725 - DNA, 438 bp, Homo sapiens
  misc_feature 366, 389: n = A,T,C or G
actatagggcgaattggagctccaccgcggtggcggccgaggtacgatcttggctcactgcaacctctccctcccgggttcaaagtgattctcgtgcctcagcctcttgagtagctgggattacaggcgcgtgccactgcgtccggctaatttttgtatttttagtagagatggggtttcaccatgttggccaggctgatctcaaactcctgacctcatgtggtccacccaccttggcctcccaaagtgctgggattacaggcgtgagccaccgcgctcagcctacaagcaattttttaaaaactgacacctattactgataaaattctctgtttaaaatcctatttactattttaaagataagtnattagtttttttttaaatacaantaattctgttattgataaaatttaagggcatttttcattgccttttgca

SEQ ID NO: 34726 - DNA, 433 bp, Homo sapiens
agggcgaattggagctccaccgcggtggcggccgcccgggcaggtacacgaataccgagagtgaatgctgaagggaatgatccccattggtggtgaccctcaggtgagactagggtgcctgtgtttcagcaaagcctgggcaattggaatgcagggctcctaagattccatgacacccctaccttctaattctgttattgcaactgcagacggttacctggcacgctggccacaatctacctcactcttatcagagtctgagcagtgctttcagctctgagttgaggcacctcgaaccttgtttttgtggtgaaggatcctaaagtgctgtgggggagtgatcacatttttcacaacattaagttaagaattttcagttactgacattcccttcagttctgattaaacctattttgatttcaccagtttttta

SEQ ID NO: 34727 - DNA, 320 bp, Homo sapiens
agggcgaattggagctccaccgcggtggcggccgaggtactcaaagctcgtgcatccagggaggggaaaccggagataggggtcttcgggccccgggcagaccctctgtgccgctgcaaaccgttgcagcctgaggctgtcaggtcctcccccagacacctgcggaccctccctctcctggcttccccgtctggtcatggcgagattctgggtctgcgtagccggtgctggcttctttcttgcatttttggttttgcattcgcgtttttgtggctctccagttttgaggaactttacttttgcagtttcctggagaactg

SEQ ID NO: 34728 - DNA, 222 bp, Homo sapiens
agcagctccaccgcggtggcggccgcccgggcaggtacttttttttttttttttttttttttttttgggatttttagtagagacagggtttcaccatgttggccaggccagttttgaactcctaacctcaagtgctctgcctgcctcggcctcccaaggtgctgggattacaggcgtgagccaccatgcctgaccactgtttttcattcttttatccttttt

SEQ ID NO: 34729 - DNA, 424 bp, Homo sapiens
tatagggcgaattggagctccaccgcggtggcggccgaggtacttttttttttttttttttttttttcaaaattgtaaaattttattttccacacatcaatattcttattaacacagcttgattgaaagaattctgaccagtggctggtcattacatgcagtggctcatgcctgtaatccaagcactttgagaggcccaggcgggcggatcacctgaggtccggagttcaagactagcctgacaaacatggagaaaccccatccctactaaaaatacaaaattagctgggcgtggtggcacatgcctgtaatcctagctactcaggaggctgaagcagaatcacttgaacctgggaggcggaggtcgtggtgggctgagatcatgccattgcactccagcctgggcaacaagagtgaaactcca

SEQ ID NO: 34730 - DNA, 221 bp, Homo sapiens
ctatagggcgaattggagctccaccgcggtggcggccgaggtactatttttaagaaaacactgttggcatctaatatatagaaatgtatacattttgaaagtgtaatgtttggctttgaaactcttctcccagttattgagtagcaccaattcagaagcacccatcaggagtataaggaatttttctagacttaatgtatttatttgctttaacaacagcc

SEQ ID NO: 34731 - DNA, 430 bp, Homo sapiens
ctactatagggcgaattggagctccaccgcggtggcggccgcccgggcaggtacatatatttattttcttttgctagaagtgttaagacagaatccaagtcaggctgagagctcagtcataactattttatttaactacttccccaaggatgtggaccttacacttactttacagccagcctcagaaaacttcctagtggcaactaaggctagagcagcttgtaagtgggcgggagggggctcttccattctcacacgtgtgtgcatgaaccctttctcctatcctaaaggcccttcgggaagaagctctaactggtgatgagagcaaggtttgggggccgctacacttcggcagtgcagtgttgggaaggtgagaacacagttctaaagaacaagaattgttgagtctgaggaatatggggtctggacc

SEQ ID NO: 34732 - DNA, 191 bp, Homo sapiens
gcgaattggagctccaccgcggtggcggccgcccgggcaggtactgtggcatggcgcagtgggtgacagatggccacatagcggtcaaaagccatggccagcagcactgtggattccatgccagataaggagtggatggcaaacatctgtagcagacaagcatcaaactggatggtagtggaattgaacca

SEQ ID NO: 34733 - DNA, 432 bp, Homo sapiens
actactatagggcgaattggagctccaccgcggtggcggccgaggtactttttttttttttttttttttttttcctttatttattttttaaaacagggtctcaccatcgcccaggctggagtgcagtggcataaccacggctcactgcagcctcaacctcctgggctcaagtaatcctcccatctcagcttcctaagaagctgggactacaggtgcacaccaccacatgtggctaattcttgttattttttgtagagacgggatttcaccatgttgcccgcccagtttgttcttgaacttctgagctcaagcaatttgcccactttggccccacaaggtgctgggattacagacatgagccatggtgcctggccaatttgattttcaaatccaaatgttttctaaggcacacaagtttaattatgacctaaa

SEQ ID NO: 34734 - DNA, 430 bp, Homo sapiens
ctatagggcgaattggagctccaccgcggtggcggccgaggtacgcgggggcagcagagcgaaaggtggtggagtcctgaaggagggcctgatgtcttcatcattctcaaattcttaggacggtcgggccctggaaggaacgctctcggaattggccgcggaaaccgatctgcccgttgtgtttgtgaaacagagaaagataggcggccatggtccaaccttgaatgcttatcaggagggcagacttcaaaagctactaaaaatgaacggccctgaagatcttcccaagtcctatgactatgaccttatcatcattggaggtggctcaggaggtctggcagctgctaaggaggcagcccaatatggcaagaaggtgatggtcctggactttgtcactcccacccctcttggaactagatggggtcttggc

SEQ ID NO: 34735 - DNA, 273 bp, Homo sapiens
tatagggcgaattggagctccaccgcggtggcggccgcccgggcaggtactttttttttttttttttttttttttactttcccagagtctcttggaatttaggcattacattcttttagaaactgttcttttatttctttacatcagagaccttgaatatttaatttacttttcagtaaagctgtcagttgtaatctacaatttttaaaaaaaacaaatggaaacaaaatcctcgttttcacaattttaaacccttattggagtctaaattca

SEQ ID NO: 34736 - DNA, 437 bp, Homo sapiens
ctactatagggcgaattggagctccaccgcggtggcggccgaggtacttcttaggtttttttaagatcctcactggactaaatggaagagaattctaaattctcaacgtgttctaattattctgaactattctccctctcccaaaaacacatacagatacacacaaatttattttgtgtgtaacccttgactttcagaaagtttgggttattctatgcataatttttttaaaaaaccatttggtttaaaataatttcaaacttaaagaatttgcaagaagagtataaagcattcccatatattctttacccagattctccaaatattaacatcttatcacattatttaaccctccttttgtgtgtgtgcgtgtgtggttttccccccacatgaaccatttgagagtaagttgcggacctgttgcccctttattccta

SEQ ID NO: 34737 - DNA, 425 bp, Homo sapiens
tatagggcgaattggagctccaccgcggtggcggccgcccgggcaggtactttttttttttttttttttttttttttggcatttttagtagagacagggtttcaccgtgttagccaggatggtctcgatctcctgacctcttgatccgcccaccttggcctcccaaagtgctgggattacaggcgtgagccacccatccggcctaacgagacttatttttactcaactagatggcgttcattcatttgcttactcagctgggccaggaattaagttgggcactgggaattccaaaaccaacaagacattctctgtcatcagggaactcacagcctagtttgagagataaacaaatgaacatgaaattataattcagtaacaaagaatgagtgttatggcagagggaatgtgtaagagcttggcag

SEQ ID NO: 34738 - DNA, 424 bp, Homo sapiens
acgactactatagggcgaattggagctccaccgcggtggcggccgaggtacttttttttttttttttttttttttttcagcctgggtttctagggcagcctatgcctgcatcatttagtagtcagacaatgacctgggcaggggttgctcatagacctcaaacccataaagctttgccatctgccaatctatctgtatattgcctgaggaatgcattcaaagttacagccagttctcaagtcccctttaatttttactttttattgggttcccttgggtccctcctgcacatgcaggtaacttccctatcagccagagatatgtggagagcttatcgtagcccttctatggctctcttattttcaaggtcttcccatttagtttctggcaggtccaccatctactccaacaggcactgcaacct

SEQ ID NO: 34739 - DNA, 284 bp, Homo sapiens
acgacttactatagggcgaattggagctccaccgcggtggcggccgcccgggcaggtacgcggggagttcattccttaataaggaaaattgagcaagtatttaattggttggacattgcataaaagaggtccatatccaggctaactctagaaattttattctcaaacttatttggcctcttttttttctgtcagaggaccattcttagaggcactggggaaattttggctcctcagaataattcaactgcgctcactgtaaaaatacaatggcactacattgg

SEQ ID NO: 34740 - DNA, 435 bp, Homo sapiens
tacgactcactatagggcgaattggagctccaccgcggtggcggccgaggtacttactttagcattatcattaaggatgaaggttctagaaccatcaggaacaagggtcccatcttcacacaagttacttaactgctgggaggctctatttcatcttatgtaaactatagataatacctactcacctcaagggtgtatcaagggtttatgtaagctaaatttgtagaaagcagttagcacagtgccaggaaggatccaagaagaaatggtacgcgggcattgaaaagaaaaatactcaactaattattgagtgcccactgtgtataaaatgttagtatccacgaattctgaaaattctgtgagtttcccaaactcatagaatgtttcagaatccgtcctgggaacagctacattccagctccctgctcctcccgt

SEQ ID NO: 34741 - DNA, 445 bp, Homo sapiens
atacgactactatagggcgaattggagctccaccgcggtggcggccgcccgggcaggtaccttttttttttttttttttttttttttaaataacattctgttctccatctaaatgccacagaaacttcatgggagaaatcaaattaccttctcctaaatcatcagttaaatgacaagatatgtctactatatcttttaagaatttaaagttaatatattaaaactagatatcccaaatccacattttccaagttaatatgcattaaattacttacacggatggatgctcaaccttgtgaacacactaaaaaatattgaattgcccactttaaagaggataaattttggccgggcgcagtggctcacacccgtaatcccagcactttgggaggccgaggcaggcggatcacaatgtcaggagttcgagaccagcctggccaatatg

SEQ ID NO: 34742 - DNA, 215 bp, Homo sapiens
gcgaattggagcttcaccgcggtggcggccgaggtacttaacccttgtttttaatatgagttacagatttttttttctggtatgtcatttgtcttttgaccttggtgttttgttatggatttttttttttctcagacttatcttttatggcttctgcattttaagtcatacttagaaaaggccttttccatgttcagattttaaggaattttact

SEQ ID NO: 34743 - DNA, 439 bp, Homo sapiens
ctactatagggcgaattggagctccaccgcggtggcggccgaggtacaatggcatgatctcggctcactgcaacctctgcctcccaggttcaagtgattctcctgccttagcctccgaagtagctgggattacaggcacccaccttcatgcctgactgattttttgtatttttagtagagacagggttttaccatgttggccaggctggtctcgaactcctgaccttgggtgatccacctccctcgggctcccaaagtgctgggattacaggcatgagccaccacacccggctggaagtttgttttttggacaagccatagtttttgtcctccaggatatatcactgtctactttttaaagctctgtttatttgaattcaaaaaaaaaaaaaaaaaaaaaaaaagtacctgcccgggcggccgcccgggcaggtacttt

SEQ ID NO: 34744 - DNA, 159 bp, Homo sapiens
acgactcactatagggcgaattggagctccaccgcggtggcggccgcccgggcaggtacgcgggggagttggctatccctaatgtaatcactaaaagtatctagaatatctaaataaaggaatgatcatttcagagcgtatgctagaatgctgaagtta

SEQ ID NO: 34745 - DNA, 469 bp, Homo sapiens
gactcactatagggcgaattggagctccaccgcggtggcggccgaggtactttttttttttttttttttttttttttgtttttttaaaaaattattcttattaaggatgtgttaagggggaggtataaagcaacatcaaagttttcccaaatgggagtctgatgcaaaatcacagtgcaaactttgtgaacaagtgaagaaaactgtcgttttttttatcatctgtcatgctgggtgttacccatccaaaccttgcaagtcaacaaagtgtgaacagaaaattttttgagaaagaagcttgtctgtgatatccagagggaatgttttaattgacttaattttcattttctagctctcgtctatgtccacaactgggaagttaacagtgttcagggacctaatcaagtgagtgtgggagtgtaatctaaacttaaacgcctccaggggcccccgcgtacctgcccgggcg

SEQ ID NO: 34746 - DNA, 469 bp, Homo sapiens
ctactatagggcgaattggagctccaccgcggtggcggccgaggtactgggattacaggcgtgagccaccacgccctgccaaaaggtgaaaaagcttgataagtgggtgcctcatgagctgaccaaaaattttaaaaatcgtcgttttgaagtgttgtcttctcttattctacataacgacgacgaaccatttcttagttggattgtgacgtttgacaaaaagtgtattttatacaacaacagtgatgaccagctcagtggttggaccgagaagatgctccaaagcacttcctgaagccaaactttcatcaaaaagaggtcagggtcactgtttggtggtctgctcctggtctgatccgctacagctttctgaatcatagtaaaaccaatacatctgagaagtatgctcagcaaatcgatgaggtgcaccgaaaactgcgaggcctgcagctggcactggtccacagaa

SEQ ID NO: 34747 - DNA, 287 bp, Homo sapiens
gactcactatagggcgaattggagctccaccgcggtggcggccgaggtacttttttttttttttttttattttttttttttgcacaaatggcattttattaaataaaatttaatttacaaagctttgtaaattttaagaaaaacattcatagatcataaacaaaaatttcaatatgcaatattcaaatttacaagaaaataagctcaaacttttagacagtgcagtttttgctgcactcctttaattccttatccagagcccaaaaaatgtatacaaacccttaaaa

SEQ ID NO: 34748 - DNA, 234 bp, Homo sapiens
atagggcgaattggagctccaccgcggtggcggccgcccgggcaggtacgcggggaactacctacctaagcgatgaaatccaaaggtgaatcttttggatggtgattttgatgatagccacaaagcatgcaggctgtatggttagccttgaaaaccaacaggccacaatcacagtgaaaaccttaggttggcagcccactggaggatacaagaatgagttttgggatcttcctt

SEQ ID NO: 34749 - DNA, 287 bp, Homo sapiens
cgtaatacgactactatagggcgaattggagctccaccgcggtggcggccgaggtacaagcccaagggagattacagggaactcttgcagcagacaagaatgagattttgttttctgaattcaacatcaactataataatgagccgccgatgtataggaaagggactgtgttgatatggcagaaggtgggatgaagtgataacaaaagaaaattaagctgccaccagaaatggaaggaaaaaagatggcagtgacccggaccaggacaaagccagggcccttgcact

SEQ ID NO: 34750 - DNA, 429 bp, Homo sapiens
tacgactactatagggcgaattggagctccaccgcggtggcggccgtgggggtgggggctgagggaggatgcctataggaatatgcgtgtcaatcgcgcagcgggtcccctcctcctccagaaagcgattcgtgtaagtttaaacctgcggccaccctgcgtgcctcggtgaacactgtctggtgcaaaggaggtatacgaaatgtgtttgttgaattgatccaagccattatcagcacttcagtgggctgggaggacatgaaaatagctgcatggtgaagtggtgtttgctggtgcctgtcctgtcccctgcctctgccagctctctcatgacattccttaggcaacctggcccgtttgcaggaagctgacagcaggtattcagaaattttaggatttgggcttaatttcagataagcaggacaacct

SEQ ID NO: 34751 - DNA, 414 bp, Homo sapiens
cgactactatagggcgaattggagctccaccgcggtggcggccgaggtacgacatacactatttttcttaagaattctattctctatgtctctatgtaggagaggaaaatgtttcttttcttacccatcagttcggggtgggatccctatacaaagacgatggcagagaaagcctttaaattaattttaatgtaggttttaagtgacccaggagccttcaaaaatgaaaacccaaagaagcagggaaatgggtctatttttatgcttaggtctgacgaagaccagagagttatggggaagtgtgattggacaatgggaatatgatctaagggtaataaattggggaaaacttagcaacgcctgttggttcacattcttctgggtatctctctgtctttgaggataaggatggtc

SEQ ID NO: 34752 - DNA, 420 bp, Homo sapiens
cgactactatagggcgaattggagctccaccgcggtggcggccgaggtacataaaccttggaatgcccctcagttgtttccctgaaggtggccaggtggtcattacattttcccaaagtaaaagtaagcagaaggaggataaccacatatttggcaggcaggacaaagcatcgactgaatgtgtcaaattttacattcatgcaattggaattgggaagtgtaaaagaaggattgttaaatgtgggaagcttcacaaaaaggggcgcaaactctgtgtttatgctttcaaaggagaaaccatcaaggatgcactgtgcaaggatggcagatttctttcctttctggagaatgatgattggaaactcattgaaaacaatgacaccattttagaaagcacccagccagttgatgaattagaag

SEQ ID NO: 34753 - DNA, 485 bp, Homo sapiens; identical to SEQ ID NO: 33422

SEQ ID NO: 34754 - DNA, 394 bp, Homo sapiens
ctatagggcgaattggagctccaccgcggtggcggccgcccgggcaggtaccgggccttgtgccaaacaccttagatgggttatctctgaacttcacatcagtcatatgaggtgggtaatatcattatctacattttacaagtatggaaactggggattactgaggttatttgcccaagggtaacacagatggtagattctggagccagagttggaaactgggtagtttgctccagacccaatgatctagcatcctacatgtggtccattagggctctctcttttcatccgtttgtaaaagagaagttttcactttcttcttaaaccattgagaaacaacttggaactggaagtgcaaagggaagaattctaaagaaagcgttttaaaaaggag

SEQ ID NO: 34755 - DNA, 424 bp, Homo sapiens
cgtatacgactcactatagggcgaattggagctccaccgcggtggcggccgcccgggcaggtactttttttttttttttttttttggttttttttttaactttcaaaaaactaattttaatcaaaacaaaaattgttgatcattaacaagtttataaaacagggatttaggtacataaataaattggtatcagggtttcaaatcttaattactttcaacttgatgagcatgtttacatgggggatgaattacaacctttttttttctttttacctattataataaataaaatggagcgcatgaaatagttcttctaaacaaaaatacctacaaacatacctctaagcatgttctctagtgaagggaacaagagacactggacaacttttgcacctaaacataaaaattgctttaaaaagcacaa

SEQ ID NO: 34756 - DNA, 333 bp, Homo sapiens
actatagggcgaattggaggctccaccgcggtggcggccgcccgggcaggtacgtgcatatacacacatgtgtgtatatgcatatatacacacatgtatgtatatacatatatacacatgtatgtatatacatatatgcatatgtatgtctgtgtgtgtgtgtgtgaatatatatatgggccatataaagggtgaaaaagcatgtttgagaaacaataccacaggtgtggccaagggaccattagctaaagagattaccctgaatagaagggaaccaaatgctattaaagataatgggagaaagatcctgaagacatatcatagatcttagag

SEQ ID NO: 34757 - DNA, 346 bp, Homo sapiens
tatagggcgaattggtagctccaccgcggtggcggccgcccgggcaggtactttataatttgttaaaagttaaaggttcatgtttctctctagatataaaatagaaattgtcgcatcttataaaccgaacccttgaggtagaatacataattacatttggttaaagttaaggtcctcatagaccaatttcccctgccaattgttacttttcccaaaaaaatggttgccaaaaaggttcaaacctcaaacattaccattaagaaaaaaccaaacctataggcatattaacactaaacatacctaaagaaaatttcactgacaattcataatctgtattcaatcatat

SEQ ID NO: 34758 - DNA, 406 bp, Homo sapiens
gcgaattggagctccaccgcggtggcggccgccatcttgggtcatcgatgagcctcgccctgtgcctggtcccgcttgtgagggaaggacattagaaaatgaattgatgtgttccttaaaggatgggcaggaaaacagatcctgttgtggatatttatttgaacgggattaccgatttgaaatgaagtcacaaagtgagcattaccaatgagaggaaaacagacgagaaaatcttgatggcttcacaagacatgcaacaaacaaaatggaatactgtgatgacatgaggcagccaagctggggaggagataaccacggggcagagggtcaggattctggccctgctgcctaaactgtgcgttcataaccaaatcatttcatatttccaaccctcaaaacaaagctg

SEQ ID NO: 34759 - DNA, 114 bp, Homo sapiens
gggggcggcggactgttttataatggcctgaaacccagctcacaaaaatatgaaattatcaaaggattatagtgcaatcttatgttgaaagaaatgaactacctcactttagta

SEQ ID NO: 34760 - DNA, 432 bp, Homo sapiens
gtatacgtactcactataggagcgaattgcgagctccaccgcggtggcggccgcccgggcaggtacagtagtgcactcttggctcactgtagcctcgacctccggggctcaagtgatcctcctgccttagccccacaagtagtgggactataggcacacagcaccatgcccatctaagtttttgtattttaaggtagaaacaaaggtttaaccatgtggcccaggctgatcttgagctcctgagctcaagtgatctgcccaccttggactcccaaaatgctgggattataggcgtaaaccaccatgcctggccttaaatcaactttagagtcaacatctcttatcactggagcttctggagaaactccatcacgtggtgctctctttcctgatgtgttgtgcccaaatagcttgttctcatcagatgactta

SEQ ID NO: 34761 - DNA, 420 bp, Homo sapiens
actcactatagggcgaattggagctccaccgcggtggcggccgaggtacgaaaaaatcaggctactaagcccactgttaatatagacgcagaccaattgttaggaacaggtccaaattggagcaccattaaccaacaatcagtgatgcagaatgaggctattgaacaagtaagggctatttggcctaggccctggggaaaaattcaggacccaggaacagctttccctattaattcaattagacaaggctctaaagagccatatcctgactttgtggcaagattacaagatgctgctcaaaagtctattacagatgacaatgcccgaaaagttattgtagaattaatggcctatgaaaatgcaaatccagaatgtcagtcggccataaagccattaaaaggaaaagttccagcaggagtt

SEQ ID NO: 34762 - DNA, 436 bp, Homo sapiens
cgactactatagggcgaattggagctccaccgcggtggcggccgcccgggcaggtactaaagatatacaataaaagggaagaagattttcctagtttaagagagtataatgattttctggaagaagtggaggaaatcgttttcaatttgaccaacaatgtggatttggagaacactaaaaagaaaatggaaatatatcaaaaagaaaacaaagatgtcattcagaaaaacaaattaaagctgacgcgggagcaggaggagttggaggaagcattggaggtagaacgccaagaacatgagcagcgacggctgttcatacaaaaggaagaagagctgcagcaggctctgaaaaggaagaacaagcaggcctttttagatgagctggagagctccgacctccctgttgctctgctcctggcgcagcataaagacagatc

SEQ ID NO: 34763 - DNA, 435 bp, Homo sapiens
cgactactatagggcgaattggagctccaccgcggtggcggccgcccgggcaggtaccctttagcagtgtcatctggctgtgttctgtagtgtacatgagccattttccaaacgttgacattttttggaccagaagtgagctggatcttttctctggctaaggctacagtggaggatggaggaaaaggggatggtctaatggtcttttaggaagtggcatgacgtgggctctgaacgtgaagtggaaggaacacaaaacattctgttgattaggaccaataaaaaaacatgggaaattgcttgggacatgatatttaacatttattaatttttgtgggaaccagtaaaatgttcccttggtgccctatcaaacagatcctttgttgaatctgtcactattctaaccctgtgatgatctgttcttaaattcatcac

SEQ ID NO: 34764 - DNA, 292 bp, Homo sapiens
atacgactcactatagggcgaattggagctccaccgcggtggcggccgaggtacagcagtagcagttcatacatatctgatatgctttcacaccaggattcagtaaacaacaataaatataattgtcccctcttcaaaacaaaaaatggatttatacggaaaaagggttaatttacttggggtttaacagcacacccttttttaatgtgctttgaaggaattaaaaaccatgaaactgtattcactgaataccggtaccatagttatatcttttcttttaacgttggcttaa

SEQ ID NO: 34765 - DNA, 93 bp, Homo sapiens
  misc_feature 83: n = A,T,C or G
cgcggggaaaaagggggggagtgccctttcttgaaggaatcccttaagtgcacgtctcccgttttcttttcacatcaatgcanggagtccctc

SEQ ID NO: 34766 - DNA, 425 bp, Homo sapiens
actcactatagggcgaattggagctccaccgcggtggcggccgaggtacaaggctaagcattttaactttatactggaaaaaaaatcaaacaaaggggagggataaaggacttagtcatctttgcactggaaaacaaaatatgtaattaaattcccatagctgcatgtaacattgaattcttccagggtaaaaaaaaaaagttaatcctgtgatattaatggaatgacattttgaggtcttgagaatgggcacaaaagtgggaaatgaatttcagtatgggcaaagacactgaggatgatgttgattagataattcactccgtaatgatcatgctgtgtgctagtaagtataaccctggaaagatcttgagatgcttcccagcctgttcacagatcccctgggccagaacactccttaggaaaaa

SEQ ID NO: 34767 - DNA, 60 bp, Homo sapiens
atatactataggcgaattggagctccaccgcggtggcggccgaggtactttttttttttt

SEQ ID NO: 34768 - DNA, 138 bp, Homo sapiens
ctcactatagggcgaattggtactccaccgcggtggcggccgaggtactttttttttttttttttttttttgggatggagtcttgctctgtctcccaagctggagtgcagtggtgctacctcggctcactgcaacctc

SEQ ID NO: 34769 - DNA, 422 bp, Homo sapiens
tatagggcgaattggagctccaccgcggtggcggccgaggtacttttttttttttttttttgagacggaatcttgctctgtcgcccaggccggagtgcagtggcgcgatctcagctcactgcaagctccgcctcccgggtttgcgccattctcctgcctcagtctcctgagtagctggggccttccggggccccggccaaccacacccgggctaatttttttcgtatttttttagtagagacagggtttcactgtgttagccaggatggtctggatctcctgacctcaggatctgcccgccttggcctcccaaagtgctgggattacaggcgtgagccaccgcgcccggccccaaaagccttttttaaaatgggaaactcgtgtagtgccattcccttctacaaaattctgacatccttcca

SEQ ID NO: 34770 - DNA, 445 bp, Homo sapiens
cgactactatagggcgaattggagctccaccgcggtggcggccgaggtacagggtaaacaggaggatccttgctctcacggagcttacattctagcaggaggacaatattaatgtttataggaaaatgatgagtttatgacaaaggaagtagatagtgttttacaagagcatagagtagggaagctaatccagcacagggaggtcacagagacatccctaaggaagtggagtttaaactgagagaagcaagtgcttaaactgaaggatgtgttgaagaagaagggagagtagaacaatttgggcagagggaaccttatagaccctaaggtgggaaggttcaaagaactgaaagagagctagaacagctggagccgttctccggtgtaaagaggagtcaaagagataagattaaagatgtgaagattaagatcttggtggcattca

SEQ ID NO: 34771 - DNA, 358 bp, Homo sapiens
ctataggcgaattggagctccaccgcggtggcggccgaggtacctgtgttcatatcctgaactgcaccaaggaatagctccatgctaaactgtcttggctaaaatacaaccagtgccatcattcctaatcagactaataaacaaaatgtcttttaaggtaatgagttagatggctgtgtttaggttttgttcaggatttactttggattctcctgctttaagacccaaagaaagttatattgagtttttattgatgattctatgtgtttttaacagagtgtgataggtgaattaaacatattaaaagagttctatagcatctgttcagaaaagattatatactatacaaactattcaa

SEQ ID NO: 34772 - DNA, 97 bp, Homo sapiens
actactatagggcgaattggagctccaccgcggtggcggccgaggtaccgcacacaattgtatgcgctgcactttcatctgactggaagcacagtgg

SEQ ID NO: 34773 - DNA, 90 bp, Homo sapiens
ccacagcctctccccatccctccagccttatctgtcatcaccatcaacccctcccatgcacctaaacaaaatctaacttgttaattccta

SEQ ID NO: 34774 - DNA, 422 bp, Homo sapiens
cgactcactatagggcgaattggagctccaccgcggtggcggccgcccgggcaggtacttttttttttttttttttttttttttggcttataaagttaggtcaatttccaaaagtgctggagtttatgccaagaattaagtgactccctggttgcagtggccaaatagcctgaaatttttaaagtaaaacttaattttgcaaaaatttttcatgtaaactcctttgcctgaccatgccctaatttttgtgattaggaaaatctggctcttatcccactggaggaaaagtgtctagttcatattctaatggaaatcatcacttgggaggtgttttgacaaacatttctaaattttgtttaaaaattatgttaaaaattaagaaaaataacgaatggaaaacaaaatctaatttttggtatatt

SEQ ID NO: 34775 - DNA, 428 bp, Homo sapiens
cgtaatacgactcactatagggcgaattggagctccaccgcggtggcggccgaggtacttttttttttttttttttttgtcaggaaaatatctgatctgattcttcccagcttgcttcccctacaacttaataagcccttcactaacccctgtatgtattaactgcaattgcctagcccggcatttacactcttaaaagatttaacgccattacaatcaaaaaacacttgtcatatataacactttttcacatggaaataaattggtggtttaaggtttacaattcctttgaataaaatttcagttattagttacaaaatgctaagacagattgaggtctcaaagaaagaacttgagaaaattatgttttaaaggacttcacaaatatgaagcataattgttagaatcctgatacaaagtaacttttc

SEQ ID NO: 34776 - DNA, 424 bp, Homo sapiens
tacgactcactatagggcgaattggagctccaccgcggtggcggccgcccgggcaggtaccactgcactccagcctgggtgacagagtgagactccgtctccaaaaaaaactttgcttgtatattatttttgccttacagtggatcattctagtaggaaaggacaataagattttttatcaaaaagtggtcatgcccataagagaagttatattcttttctaatttcttccccacccaaaaataagctaccatatagcttataagtctcaaatttttgccttttactaaaatgtgattgtttctgttcattgtgtatgcttcatcacctatattaggcaaattccattttttcccttgtgctaaggtaaagatttaattaaataattttggcctctcatagttttctctctctttaaagagaat

SEQ ID NO: 34777 - DNA, 423 bp, Homo sapiens
aatacgactactatagggcgaattggagctccaccgcggtggcggccgggcatttctcccagggatctctgtgcttccttttgtgcttcctgtgtgtgtggatatttaaaggggctggaaatgtgcaaaaacatgtcactacttagacattatattgtcatcttgctgtttctagtgatgttaattatctccattttcaacagatgtgtgggcctcagatggtaaagtcagcagcctttcttatttctcacctctgtatcatcaggtccttcccaccatgcagatcttcctggtctccctcggctgcagccacacaaatctcccctctgttttctccccgcgtaccttggccgctctagaactagtggatcccccgggctgcaggaattcgatatcaagcttatcgataccgtcgacctcgag

SEQ ID NO: 34778 - DNA, 418 bp, Homo sapiens
acgactcactatagggcgaattggagctccaccgcggtggcggccgcccggggcaggtacagggaaatactactggaaacaaaattaagtgtagaaacagaccagaccagaatatacatgctgattcccgttacatgaaaggtccagcgccaggcgggcaggcagccagccacagaaaagggaaaagggcccaggaggaagtggctagacctgacgctaggcaccaggggaggcggggaaggagggcagaggcaggagagttcactgtgagagctcgacaaggagtagctgctgccaaacatctacattcatttacccgcatttcacagacacaggcttggggaggttaagtaacttgctcccagacataaagttgccaagtagtccagtcaggattcgaaccagctccagtgcccta

SEQ ID NO: 34779 - DNA, 425 bp, Homo sapiens
ctactcactatagggcgaattggagctccaccgcggtggcggccgcccgggcaggtactttttttttttttttttttttttttttggtaataatttaacttaaataccacacagaaaaaatgctacctaaagctgactgttttccagtaagaagtcagcaatattaccacagttgggacacaaattttgaaacctaactatgtttgcaaaggaccaaaaaggacctaaaaaataaaaggaaaagtgcacactcaaaaaactgtcatcaaatttgtagttagcttggaaatattctgtattttaaacttactattttctatgatccaaaaacatcaattatttaacaaataggtttatttagaggaggtaaaaaaaataggaggggaaaataccaagctgtaagagtaacaaaaagtttattttaa

SEQ ID NO: 34780 - DNA, 419 bp, Homo sapiens
cgactcactatagggcgaattggagctccaccgcggtggcggccgcccgggcaggtactgaggctgtatacagccacagcctctccccatccctccagccttatctgtcatcaccatcaacccctcccatgcacctaaacaaaatctaacttgtaattccttgaacatgtcaggcatacattattccttctgcctgagaagctcttccttgtctcttaaatctagaatgatgtaaagttttgaataagttgactatcttacttcatgcaaagaagggacacatatgagattcatcatcacatgagacagcaaatactaaaagtgtaatttgattataagagtttagataaatatatgaaatgcaagagccacagagggaatgtttatggggcacgtttgtaagcctgggatgtgaagca

SEQ ID NO: 34781 - DNA, 417 bp, Homo sapiens
acgactcactatagggcgaattggagctccaccgcggtggcggccgcccgggcaggtacatcggagcgtgcaggctgcgttccgtccttacgatgaagaccacgatgcagtttccaaacattgccactacatacatggaaaggagggggaagccaacccagaaatgggctttctctaatcctgggataccaataagcacagaggtggcatgtgtgaagttgcaggaactcatagctggaactgaggaggggtgactggagagggtgaggtcacactggcagtagagcccatacagcagttcggcctgttcctttcaggctgactcagaaggctgaggaggctttagattccaggggagggccgagcttgcaaatatgaggagacttattccagcctgactggagacaggcacagagc

SEQ ID NO: 34782 - DNA, 218 bp, Homo sapiens
ctacttcactcaaagtctctgcagctgcctgcactgggaaggctgcaacataaatctgtctcttcacttctccccaggccttggaagggtccactttgcttttcatatcaaacagagcatcataaattcctgggaatgactcccctgcatacttgttggggctgcttggagcatagatgacatgcctataaaaaggcctgtctggtaaccctaatgga

SEQ ID NO: 34783 - DNA, 425 bp, Homo sapiens
atacgactcactatagggcgaattggagctccaccgcggtggcggccgaggtactttttttttttttttttttttttttgggtatgaccaagttggccacaattatagcaggctccaagaaaagaatcagtcgagccagtttggttgccgtgcttcatggccggtgcccacagaatagctctgtgggtctccgatccaacgccttcacaagctttaatatatgcaggcaacacctcatgatcaggtaaattttgacgtaggatggaatgcacggccattttacactcatggttcgcattttgaaaagctaacatatgaagaagaataccttgagtgtgctcatcagagacagatttttcaacagcatcttgtaatttagctaaaaatcaagatataattcattgggaccctgtttaacaatagta

SEQ ID NO: 34784 - DNA, 426 bp, Homo sapiens
atacgactcactatagggcgaattggagctccaccgcggtggcggccgaggtacaaagagtagctgccccttctcagggcagatgatgctttgagaacatactttggccattacccccagctttgaggaaaatgggctttggatgattattttatgttttagggacccccaacctcaggcaattcctacctcttcacctgaccctgcccccacttgccataaaacttagctaagttttgttttgtttttcagcgttaatgtaaaggggcagcagtgccaaaatataatcagagataaagcttaggtcaaagttcatagagttcccatgaactatatgactggccacacaggatcttttgtatttaaggattctgagattttgcttgagcaggattagataaggctgttctttaaatgtctgaaatg

SEQ ID NO: 34785 - DNA, 447 bp, Homo sapiens
tacgactactatagggcgaattggagctccaccgcggtggcggccgaggtacatctagcctgaggcaacctccacggaagagccagggaaataaatgctctgccttccagtcctgtggggactgttcagtgtgttatggaaggggtcccgaacatcccgggccatggaccagtgagctgcgggcgaactagcactcactgcctgagtattactgcctgagcttcgcctcctgtcagatcagtggcggcatcagattctcacaaaagtgcaaaccctattgtgaactgtgcatgtgcaggagggatctaggttgcacgctccttatgagaatataactaatgcttgatgatttgaggtgtaacagtttcatccccaaacaatccccccaccgcctcacctactcaatctctgtagcattccacagtctttatagcaacagaatacccc

SEQ ID NO: 34786 - DNA, 412 bp, Homo sapiens
tatagggcgaattggagctccaccgcggtggcggccgaggtacaataattgctggaacctgggaggcggaggttgcagtgaaccaagattgcaccactgcactccagccggggtgacagagtgagactccgactgaaaataaataaacaaataaataaataaataaataaataaataaattttatggatggtgaagggaatggtatagaattggagagattatcttactgaacacctgtagtcccagctttctctggaagtggtggtatttgagcaggatgtgcacaaggcaattgaaatgcccataattagtttctcagctttgaatacactataaactcagtggctgaaggaggaaattttagaaggaagctactaaaagatctaatttgaaaaactacaaaagcattaa

SEQ ID NO: 34787 - DNA, 204 bp, Homo sapiens
ctcactatagggcgaattggagctccaccgcggtggcggccgaggtaccagctgaagcacttcagcgtgaacgccacagaagtggctccacggcttgttaccttagaaatccccataaatctccttgaacagacctgggacagaatgtgcaatgtccttgttgatttccttttgtgaaaattaccacagtctctaaatttataa

SEQ ID NO: 34788 - DNA, 379 bp, Homo sapiens
tacactactatagggcgaattggagctccaccgcggtggcggccgaggtacggttcagcctgtgatcacttcattccaatcaatttatggggccgagacttgttacaacaatggcatgcagagattactatcccagcctccctatacagccccaggaataaaaaaatcatgactaaaatgggatagctccctaaaagggactaggaaagaagtcccaattgaggctgaaaaaaatcaaaaaagaaaaggaatagggcatcctttttaggagcggtcactgtagagcctccaaaacccattccattaacttgggggaaaaaaaacaactgtttggtaaatcagcagcgcttccaaaacaaaaactggaggctttacattt

SEQ ID NO: 34789 - DNA, 430 bp, Homo sapiens
tatagggcgaattggagctccaccgcggtggcggccgaggtacactggaggctggagcctgcagatggcatggctctgcggctcaccttgctgcagttggtggtggtgacagagactgcagcttgactgtagtgaatttggaaattatctgtctggaagctctgagtttatcttgggacctcaagaggagaggatcacccaactcacagcaatcaaactccaaatggtgctataaactgaaccacacatggacacgtcagtcttccgaggacccttagatcaaccccaggaggagccctagctgctgttccccattcgacgcccctttccagcaggaagtagccagaagacatcgtcgcccaaacctctaacagcagttagtgcggcatctccacagggggaatgttgtaggagttattgataaattatt

SEQ ID NO: 34790 - DNA, 324 bp, Homo sapiens
ctatagggctaattggagctccaccgcggtggcggccgcccgggcaggtacttttttttttttttttttttttttaaaaacagctatattttggcactcaagaggcaaaagctaatacagatgatgaaagaacacaaagaaaataagatttgcctattcaaaatggtgcctcgggcaggtcctgtatccagaagaggatgttcatccagggtctggggctaaggtcatcttagcacagcccagctgccagcttccctcctctgccgtttccctgaacacaagccagcttcccttatctagcccttcttggccctgttaaaaaag

SEQ ID NO: 34791 - DNA, 399 bp, Homo sapiens
gcgaattggagctccaccgcggtggcggccgaggtactaaaagaaaatgaaacaggcaaatgatgaaatgtggatctttttcattcaagaatatggaaactcattggactgaaaaacccaaatcttcattataccaaacttctataatgatcttaatggtagttagctttaaaaaaacacaaaataggctgggcgtggcggctcaggcctgtaatcccagcacctcgggaggccgaggtgggtggatcacaaggtcaggagatcgagaccatcccggccaacacagaaaaaccccgtctccactaaaaatacaaataaaaaaaaaaaaaaaattaaaaagtacctgcccgggcggccgctctagaactagtggatcccccgggctgcaagaattcgata

SEQ ID NO: 34792 - DNA, 357 bp, Homo sapiens
ggcgaattttagctccaccgccgtggcggccgaggtacccagtaaataagaaagggttccaaaatgaatattcgctccttttgcaaaccttatggtaacaaatataatatttataaaaagtgaattaggtaatatgttaatggagaaataaacatcattatgaaatgctatcttaaacaaaaaataagagaaaatattagtttaaaaatagaacttatagtcgatttaaaaaagcaagaccaaactcttagctatgcacaagaaagttactttacccattcacaaatattaaaggatgagaaaacatggattatgaaaatatgaaccgaaatgaaactatagtagctgggcaaattt

SEQ ID NO: 34793 - DNA, 198 bp, Homo sapiens
ctcacttagggcgaattggagctccaccgcggtggcggccgaggtactaagttgccatttaagaacctcttcaggttccccgtctccttgagctatgaaagttttcatgaacacttcagttttaatggcatgccaaacattttgttccatgagcatctgcaacagttttaaaaattgccattgagtgttttaatagaa

SEQ ID NO: 34794 - DNA, 113 bp, Homo sapiens
cactatagggcgaattggagctccaccgcggtggcggctcgcccgggcaggtacgtcggggagggcatcacggtacctaccaatatgtagatgtcatcccctggtaggctcca

SEQ ID NO: 34795 - DNA, 420 bp, Homo sapiens
tacgactactatagggcgaattggagctccaccgcggtggcggccgaggtacgacatacactatttttcttaagaattctattctctatgtctctatgtaggagaggaaaatgtttcttttcttacccatcagttcgtggctgagatccctataacaaaagacagattgacaagagaaaagcatataaatttattttaatgtaggttttaagtgacccaggagccttcagaaatgaagacccaaagaagcagggaaattggtctatttttatgcttaggtctgacgaagaccagagagttatggggaagtgtgattggacaatgggaatatgatctaatggtaataaattggggaaaacttagcaacgcctgtttgttcacattcttcttggtatctctctggctttgaggataaggatg

SEQ ID NO: 34796 - DNA, 360 bp, Homo sapiens
tatagggcgaattggagctccaccgcggtggcggccgcccggccaggtaccacatttgtgaatttatgccacagactcatttacgtagtgcactaaaattataagtagagataatgattgcagcatggtttagagtactaaaggactggaaacaatctccatggcactgataaggcaagacgtagggaggagaaatggggagtgactgctcacatacagcgccttcttttgggggtgatgaaaatgttttggaacttgatagaggtgctagcatgcacagctttgtgagttttctacatagtacttaattgcccactgcaaaatgttacatcgtgggctgctggacaaatggctcatcgc

SEQ ID NO: 34797 - DNA, 405 bp, Homo sapiens
atacgactcactatagggcgaattggagctccaccgcggtggcggccgcccgggcaggtacttttttttttttttttttttttttttttcttatattttgaagagatgagttctcactatgttgcctaggctggcctcaaactcctgacctcaagtgatcctcctgcctcagcctcccaaaacactgggacaaggtcacaatatttatcttctcaagtaaggggtctgctctttttgtcttcttcttcttgaccttgcagcagcatctgaaatggttttccctccttcctttctgaaaaacttttctctctggaagattccaggatggcagactcccctgacttacccatagcttgttgattagcttcatgactgttgtctttctgcctaatttcctgaatcttc

SEQ ID NO: 34798 - DNA, 436 bp, Homo sapiens
aatacgactcactatagggcgaattggagctccaccgcggtggcggccgaggtactttttttttttttttttttttttcttaattcattttttttcccttggtataacttggaacaaattttttttcccttggtataacttggaacaaattttatttttaaaaagaaaaaaaaggaaaataatggtccacagctcctaccctcacccccatgagcccatccccaccacaaggacaagcttacagttcctgaaggtgaggccaacagctgctgaggagcaaggactcgttccagctgcttctaaacaagggggccaggcctttgccagagccttctccttcctgccctgtgtcaagctatccaagcttcctcctcaacctttaccctgccctatgccctgaaactacctgacacgtattttcctcttgtacctgcct

SEQ ID NO: 34799 - DNA, 420 bp, Homo sapiens
caccgcggtggcggccgaggtacattctttctatgaagatttttcccgtgggatttccttccatttacccaataattcattcataataaacagttgttgaacctagataaaatacacctctgtctcttcccatttgcctataagtttcttgccaagatgtgatacagcagctcaaagaatgcttgccaagtcactaatagtctttgctctctctagttcagtgactttccgatactgtgtaacattcagggcactatgtgaacttgtaagtgtgaccatactgcatgttttatggtgacctggtccagtaccacatcacaaagaaactcaggagtgacagcagcaggaggctccatttgagggatctcagtgacatcctactcggaaggacagtccagagagccgaggccatccacagca

SEQ ID NO: 34800 - DNA, 445 bp, Homo sapiens
acgactactatagggcgaattggagctccaccgcggtggcggccgcccgggcaggtaccttgggtctgaaggggtcactcaagcgctctgctatctctgcagctaaaacgggtgtcaggttttcagctgctactaaagataatgagcataagcgttcactgaccaagactccagccagaaagtctgcacatgtgaccgtgtctgggggcaccccaaaaggcgaggctgtgcttgggacacacaaattaaagaccatcacggggaattctgctgctgttattaccccattcaagttgacaactgaggcaacgcagactccagtctccaataagaaaccagtgtttgatcttaaagcaagtttgtctcgtcccctcaactatgaaccacacaaaggaaagctaaaaccatgggggcaatctaaagaaaataattatctaaatcaaca

SEQ ID NO: 34801 - DNA, 449 bp, Homo sapiens
actactatagggcgaattggagctccaccgcggtggcggccgaggtactgatgcaacagttgggtagccaatctgcagacagacactggcaacattgcggacaccctgggggagggaagatttcattttacgtgagattccctacaggaaaggaagtccaagtaagggtgaataaagagaacccttagcagacaataattgccaggttggcagctcagtctcaagagaggccatttcatctcataccaaatgctcctggcagagcaattcagccccatcaaataaattttgcccttattccaaatccaggtcttctgtatccattgttgatggcatttacttccaaagcccctaccacaacagtgaaaagcataaacgactaacgtagccattgagttccatgaacgaaaaatgttcaacgatttccagatgtgaacttcattcacttg

SEQ ID NO: 34802 - DNA, 400 bp, Homo sapiens
tatagggcgaattggagctccaccgcggtggcggccgcccgggcaggtacagtatgggcaagtgggagttaatttataaccaaggatcagggtggggttggtgggtggaaaaatcacaaagagaaaacatcaagggtaagggggattctggctaaaccaaccaaacaggattcttgctgaagacaggctgggtgatcagacatcacctgtggcacggtggaggctgaggaacccgatcagatatccagagtgatcagataccgagggtgggaggttctggctaaactgactgatcaaggttttttgctaaaactggattttacaaggaaatgcacagatggcctacaaggttcaggaacttgatataagtttgatcaagcgaagaatctttgtccatgga

SEQ ID NO: 34803 - DNA, 353 bp, Homo sapiens
tatagggcgaattggagctccaccgcggtggcggccgaggtactttttttttttttttttttttttttttcctgcacatctctaggggaaagcgtaagaagcataagattagcataggccagcagtaagtctgtattggttgcttgccagtcacttttatcagactccaaacactgtaaagactccagatattccttaagggtctgtacacttaaacagctttttttcacatcaagccttccagttgtctctgcttattttacccgggggctcaaagaagcagcgggttgcctggctattcctaggcagctcatctttgccagtatcctccttgtacgtcgaatttgaaaaca

SEQ ID NO: 34804 - DNA, 409 bp, Homo sapiens
gagctccaccgcggtggcggccgcccgggcaggtacctgaactgtatgcagctgtggccggcatcagagtggagagcctcttctacaactatagcatgctttgaagagtctcgggcaagaaacattcatgcatgagtatatgttcttggaatcaattcctctaagaacagagaatggtctttcccagggacacaaagggagaaatgggacatggattcttgatcttcctttacacatttctcgggaaatctgaaatgatgctggatgggactctacacatcctgagctaagacatactgtcagtctcacttctgctgtcccagtcctagaaatcctgggtagaagtgggggacctgtgcaaaggaggttttagaactctgcagtattttgttggggcatggcacaaata

SEQ ID NO: 34805 - DNA, 272 bp, Homo sapiens
ctcactatagggcgaattggagctccaccgcggtggcggccgaggtacttctttctttctttctttctttctttctttctttctttctttctttctttccttctttctttctttccttctttctttctttctctccttccttccttcctttctttctttcttgtcttgccaggctggagtgcagtggcacgacctcagctcactgcagcctctgcctcccaggttcaggtgattctcctgaccttaggtgatccccccctcctaggtctctc

SEQ ID NO: 34806 - DNA, 433 bp, Homo sapiens
  misc_feature 140: n = A,T,C or G
ggtggcggccgcccgggcaggtacgcggggtttacattgacctttacatttaaagctgttcatccatggtgcctccccaaatcataagaccaaagaccaccaaacgcagggtggactctgctcattattctttgacccanaaagactggagaaggtatgtgctttaagtgctgctctacctgaaaagaaatcctttaaattacctatggaagtgatgtcctcagataatcttaatgactattttggcatttataaatagaaatgattatggactttgatctgccatacggaggttcggaacctggagaacggctgtgataagtaggttttgattgagtgaaagcatgagcttgttcagagtgaggggcatagtgaaaaaggaacagccatgcctcaaaatcaaatcatttgcattcccacagcatcctgaata

SEQ ID NO: 34807 - DNA, 449 bp, Homo sapiens
tacactactatagggcgaattggagctccaccgcggtggcggccgaggtactcaaatttactacaaaattaataatagtaaatgtaaaatatgtatttatacagccttttgcagacttatgaactatctcaaattcacgaatcctattttttaaatacagttttaagtttcaaccacttgtatcaccagaattttgagacttaactcccatggttaagagatttccaagctgtgttcacacctgtagtcccagctacactgaaagctaaggcgggaggaccacatgagcccaggagttccagactagccttgctctatttaaagagcaagactccactgccaaaaaaaaagaaaaacaaagaagagaattccataaattacttggcttcttatattccatctcttcagtgaaacagtacctgcccgggcggccgctctagaactagtgg

SEQ ID NO: 34808 - DNA, 458 bp, Homo sapiens
actactatagggcgaattggagctccaccgcggtggcggccgaggtactttttttttttttttttttttttcctcttttaaacaggctgatatggtttggttctgtgtccccacccaaatctcatctctaattgtaatccccacgtgtcaaggaagggaccttgtgggaggtgactggatcatggggacagtttcctccatgctattcttgtgacagtaagtgagttatcacaagatctgatggtttagaagtatggcacatccccccctcactctctttctctctcctgccaccatataagatgtgtcttgctccccctttgccttccaccttgattataagtttcctgaggcctccctagccatgtagaaccgggagtcaattaaacctcttttctttataaattacgcagtctcaggtagttctttatagcaatgtgaaaacggactaatacaca

SEQ ID NO: 34809 - DNA, 292 bp, Homo sapiens
gagctccaccgcggtggcggccgcccgggcaggtacgcgggggcttttctttctgttctctgacttgttttctatagtcatccccaattttaatagcctgctttttaaaaggtaacgcctgcgaaatggttctgtcacattttctatgttctgttcctttccattgctcattttgcaagtgtatcctacttggaaaaaccctaattggcatctcacttttcacacgagtgtgttttcttttcccaaaggggttaaaaatctggctcggggaatccctgaccatcttcacagt

SEQ ID NO: 34810 - DNA, 458 bp, Homo sapiens
atacgactcactatagggcgaattggagctccaccgcggtggcggccgaggtactctctgagaaagatcgtgtcctctgtcttgttgggggtgaagtaaaagaaggttgcttggatctcctgaaccgacttattgtactgcattcttgcttaaatagtattaaccataaaggaggtcaggtttatagggtttggtttacctattaaaccatcattgactatggaaatacttactaagcaatatagagacagacaatattatctttccccttatatcttttaagacagccactcaagttttagaagagtatgatacaacattagagaaagaaagatacaaaggctttattcatgtgtgatagtaaaaatcaggatgagtcttagatatacaaaagataaatggatatttaaaatagttatatatgcttttttagcaaaatattcacgtgttaagtattt

SEQ ID NO: 34811 - DNA, 313 bp, Homo sapiens
gactactatagggcgaattggagctccaccgcggtggcggccgcccgggcaggtacttttttttcttttttttttttttttgaattgacttttttttttaaactgttgagggttctttaaatattctagatacaatcagttgccagatatgtgatttgcaaatgttcttccagtttgtagcttgtctttgcatcctcttaacagtctttaatcaggtaaaaattcttaattttcatgatgtccagtttactaatatttccttttatggctcatgcttttggcatcaagttgaaaaaaaacttggctgggcgcg

SEQ ID NO: 34812 - DNA, 467 bp, Homo sapiens
tagggcgaattggagctccatccgcggtggcggccgaggtacttttttttttttttttttttttttttcttttttttttgagataaggacttgctctgtcgccaaggctagaatgcagtgctgtaatcacagctaactgcagcctcaacctcccaggctcaagcgaccctcccacctcagtctcccacgtagctgagaccacaggcatataccattataccaggctacttttaaattttctatagagatgtggtctcactatactgctcaggatggtcttgaactcctggcctcaggcaagcctctcatcttgactttacaaagtgctggaattacagacttcagccactatgcccaggcttggctaattttttaatgtatgaaattagcactttcagctctatttgtatctccctaatttctttgctgaaaagggcagggaagggaaggagaggggagaagaggag

SEQ ID NO: 34813 - DNA, 371 bp, Homo sapiens
caccgcggtggcggcggagggacttttttttttttttttttgttccccttcatcagggaagttcatcaaagaatttcatcaaagttcagtgatgacctctttttaaaattttcttagtattctatgtaactatcaccgatcttttccccacacactccaagagctttttaatataattttctacatagccatcatcacagataaccaatcctctttttttccccactagagatgtgccttccgtaacctctgtcctcttcctttaacctggaatattgctcttcaggcctgttgtgcagataaaagctttattccttatcatcctggggtacctttccctctttcttgggctggaatccctattgcctgga

SEQ ID NO: 34814 - DNA, 308 bp, Homo sapiens
tacactactatagggcgaattggagctccaccgcggtggcggccgcccgggcaggtacttttttttttttttttttttttggcaagaagcttggagaattaaattgatcttcttaatgttacataatgctgccttgcaacaagtagtatatttattcttcaaagaatgttagaaatctttgctaactaactagcaaatcacgagcgaaaccagcaaggtgtaaagaaggtcgcaaaaagaaatgcatatggttataacagtatcaatctaaaaacctaaccacattctagagagttgagagaagaagt

SEQ ID NO: 34815 - DNA, 174 bp, Homo sapiens
ctcactatagggcgaattggagctccaccgcggtggcggccgaggtacctctggaagtgtgggtgaagaaggcagctaaaataaggaaagctagttaaacctatttaaaagccagtcagatataatagtaaaattgtataattagtatactcagagataaaagaatcacgttat

SEQ ID NO: 34816 - DNA, 162 bp, Homo sapiens
acgactcactatagggcgaattggagctccaccgcggtggcggccgcccgggcaggtaccaccctcttgctgaaagcactggttcccctgttgaagcttgctagggattacagtgggtttgactcaattcaagtaagtaagcaaacatttaaatatttttca

SEQ ID NO: 34817 - DNA, 165 bp, Homo sapiens
  misc_feature 15: n = A,T,C or G
tacgactcactatanggcgaattggagctccaccgcggtggcggccgcccgggcaggtacttgtcatggagctggcactgcggcgctctcccgtcccgcggtggttgctgctgctgccgctgctgctgggcctgaacgcaatgagctgtcatttgactggcccac

SEQ ID NO: 34818 - DNA, 144 bp, Homo sapiens
actcactatagggcgaattggagctccaccgcggtggcggccgcccgggcaggtactaaaaatacaaaaaattggccaggcatggtggcacatgcctgtaatctcagctactcaggaggctgaggcaggagaatcgcttgaacc

SEQ ID NO: 34819 - DNA, 157 bp, Homo sapiens
cgactcactatagggcgaattggagctccaccgcggtggcggccgcccgggcaggtactgggattataggcgtgagccaccgcgtctggcctctaacgagatatttctaaaggttaggccctcagtcaagaattttaaagctggatcttagaggtta

SEQ ID NO: 34820 - DNA, 165 bp, Homo sapiens
cgactcactatagggcgaattggagctccaccgcggtggcggccgcccgggcaggtacaattttaaatctctgatttagagatgaagaaactgaggggtagagaggttaagtaacatgcccaaagttacacagctgataattggttaggctcaggatttgaaacc

SEQ ID NO: 34821 - DNA, 401 bp, Homo sapiens
ggagctccaccgcggtggcggccgcccgggcaggtactttcttttttttttttttttttttgagacagagtctcagtctccagcctgggcgacagtgagactttgtctcaaaaatatctaaatcagatatgggtgagacccaaggtttagcttatcctgaggcaaaattcccctccagctgtgaacctatgaaaccagacaagttatgtgcttccaaaatacagtgatgggataggcaggattaggtattccaattccaaaagtgagaaattggaaggaagaaagggatgatgaggctgggtgtgatggctcatgcctttaatcctagcactttgggaggctgaggtgggaggattgcttgagtccaggagttcgagaccagcctgggcaacatagggaga

SEQ ID NO: 34822 - DNA, 203 bp, Homo sapiens
actcactatagggcgaattggagctccaccgcggtggcggccgaggtacaagaattgctggaacctgggaggcggaggttgcagtgaaccaagattgcaccactgcactccagccggggtgacagagtgagactccgactgaaaataaataaataaataaattaaataaattaaatatttatgggattggtgaaggggaatgg

SEQ ID NO: 34823 - DNA, 230 bp, Homo sapiens
ctcactatagggcgaattggagctccaccgcggtggcggccgcccgggcaggacgcgggggagtttcacgcgcgcatgctttgcccgccatggccgcattcaaggagcctttggagttccatgccaagcggtcttggcgccccgaggaggcagtagaagaaccggacgagggaggatgaggataattactattgaaagccgataatgggtttctccctggagggaagtgt

SEQ ID NO: 34824 - DNA, 355 bp, Homo sapiens
ggagctccaccgcggtggcggccgaggtacttttttttttttttttttttttgttcatttaaatgtttcagagatgttaatatccaattagcttttgttctgtttcccaaccctttggtttttttttttttgaaaactaacaacctaaatattaataataaattatttctatgcattggattaaacctcaatttttaccaggaactgtttggacaaaacctgttaattcaactagtcattcctcagtttaataatatcagatttgctttttttgtgagacagaagtcttgctctgtcgcccaggctggagtgcagaggcgtggatctcggttcactgtaaacctccgcctcctgg

SEQ ID NO: 34825 - DNA, 457 bp, Homo sapiens
ggagctccaccgcggtggcggccgaggtacttattggtcatttgcctagagtcaatttcttttttttttgagactaagtcttgctctgttgcctaggctggagtgcagtggtgcgctctcggctcactgcaacctctgcctcccagattcaagcgattctcctgtctcagcttcccaggtagctgggactacaggcgcacaccaccacgcccagctaatttttgtttttgttttttttaagtagagatgtggttttgccatgttggcagggctggccttgaattcctggcctcgagccatcctctcaccttggcctcccgaagtgctgggattacagatgtgagccaccgcacctggcctttcttaaactctttatccttttttattctcttcttttcattttgaaatctttcaggatgatgcacagaaaaatgcttatgtttaaagtctgatcttt

SEQ ID NO: 34826 - DNA, 382 bp, Homo sapiens
aggtacacaggccgggcacagtggttcacacctgtaatcccaacactttgggaggctgaggcgggtggatcgcaaggtcaggagatcgagaccatcctggccaacatggtgaaactctgtctctactaaaaaatacagaaaattagccagtcatggtggcacgttcctctagtcccagctactcgggaggctgaggcagaagaattacttcaacatgggatgtggaggttgcagtgagccgagatcgcgccactgcactccagcctggtgacagagcgagaccccatctcaaaaaaaaaaaagttgtatgtgacagctaaccataataaaaaaaaaagaaagaaaaaagagagaaagttgggacaacactaaatcattagta

SEQ ID NO: 34827 - DNA, 444 bp, Homo sapiens
gcgaattggagctccaccgcggtggcggccgcccgggcaggtactttatggagtatgttcttgagttctgcaaagattagcatcaaactctctcacagctgccctgtctgtattactgatcaatactcagttcgtttcacatgactaacaatttaaaaaaacaccttcatctgctgggccattcttttaaaatcagattccaaatagtctagaggtctgctgcgagctctagactaaaggctcttgtcaatcctggctgcacatcaagaacactcctgaggttccaaacaaagcatggattccaggtcccacctgaagctactgaatccgaatctctgaggggagggcccttgcactgatttaaaaacaaaaactggccagatgatcctaattcacagccagggttgagaacctctgctctaaaacatcggactcggctgaact

SEQ ID NO: 34828 - DNA, 430 bp, Homo sapiens
gagctccccgcggtggcggccgaggtacagcagaactgcatgatcagctgtatggtagccttgaaaaccaacaggccacaatcacagtgaaaacctcaggttggcagccactggaggatataaaatgagtttggatctccttcaatgccccattcccagagaactgtcattatttggacctgctggtagttccctaaaggacgtgcaaggatgtttttatttgactggacacttgaagcttgccctgtatgaacagcccccatcttcccatgcttgtcaaaaatcagaggcaactaacactgcggcttcctgagagtctcactctgtcacccaggctggagagcaattgcacaaacacttggctcactgcagcctcaacttcttgtcctcaagtgatcctcccaccttagcctcctaagtagctgggacc

SEQ ID NO: 34829 - DNA, 439 bp, Homo sapiens
gcgaattggagctccaccgcggtggcggccgaggtacttttcagttcaaggatttctgttgcatattataattattgtcaagtttccttaaaacgattattttgaattatttttcagagagttaatatatctctatttctttagggtcaatcgctggaaatttttttgtccttttggtgatgtcacgtttcttgtaattgttcttgatccttgtagctgtgtattgatatctgtgcatttgaaaaagtagctatttattcaaatctttacagtttggctttgcattggaaagtcatgtggcaggagcaatgatggggtgtgccagaagcccacggtacctgcccgggcggccgctctagaactagtggatcccccgggctgcaggaattcgatatcaagcttatcgataccgtcgacctcgagggggggcccggtaccc

SEQ ID NO: 34830 - DNA, 332 bp, Homo sapiens
gcgaattggagctccaccgcggtggcggccgcccgggcaggtaccttttttttttttctttcttttttttttttttttttccgtctccccaaagctttatctgtcttgactttttaaaaaagtttgggggcagattctgaattggctaaaagacatgcatttttaaaactagcaactcttatttcttttcttttaaaaattacattagcattaaatcccaaatcctatttaaagacctgacagcttgagaaggtcactactgcatttataggaccttctggcggttctgctgttacctttgaagtctgacaatccttgagaattttttcatg

SEQ ID NO: 34831 - DNA, 419 bp, Homo sapiens
gcgaattggagctccaccgcggtggcggccgcccgggcaggtaccttcaattccagtccaaagccacatggctcaacctagcctcaaactttttaaatttgccgctttcttcttcaatagtgagaaatcttgctcctattgtctttaatatatttatatattgtcttattctactttataaaacccgcggttttgttccacacggcataaccttcccagctttaacattgctagtcatctgtaaccatacccttagatttgactctgaatggcccttgttgtctcctcagcccgagttgtttctttggcactgtcaccctcctgacctctactcgattccttgggcctgaccctggaagtccttgcagactcacttgggttctggctctgtaagaccctgggtatcaccagggccctct

SEQ ID NO: 34832 - DNA, 168 bp, Homo sapiens
gcgaattggagctccaccgcggtggcggccgcccgggcaggtacctgaacaaatcccatcaaggacagattctcagtcttgaagaggcagcacggtaaaggggaaagatcatgagttttggggccaggttcccttggatattgtggggtccccacacttatggatgat

SEQ ID NO: 34833 - DNA, 452 bp, Homo sapiens
gcgaattggagctccaccgcggtggcggccgaggtacgtccacggtcagccttgcggtaagcttgtgtgcttagaggaacccagggtaacgatggggcaaactgaaagtaaatatgcctcttatctcagctttattaaaattcttttaagaagagggggagttagagcttctacagaaaatctaattacgctatttcaaacaatagaacaattctgcccatggtttccagaacagggaactttagatctaaaagattgggaaaaaattggcaaagaattaaaacaagcaaatagggaaggtaaaatcatcccacttacagtatgaaatgattgggccattattaaagcaactttagaaccatttcaaacaggagaagatattgtttcagtttctgatgcccctaaaagctgtgtaacagattgtgaagaagaggcagggacagaatcccagc

SEQ ID NO: 34834 - DNA, 432 bp, Homo sapiens
cggccgcccgggcaggtactaaaattagctgggcttagtggcacatgcttgtagtcccagctactcgggaggctgatgaacaagaatcacttgaacctgggaggaggaggttgcagtgagctgagatcgtgccactgcactccagcctgagcgacagagcaagactgtctcaaaaaaataaaaaagaaaaaaataataaaaaggaaaacaaagcctttagaaaaacaaagcctttgaaaaaggatgtaaaattgaatatatagatacaattatttttaaaaagttttatagaaaaatatcctggattgttgatgttgttttaatatattttaatcatttttgtataatgtcatgtataatatgtcataatgaaagtaaaaaaaaaaaggtcttagcagagcaggcagaaaaatgccaaactcagtgcctttt

SEQ ID NO: 34835 - DNA, 452 bp, Homo sapiens
gcgaattggagctccaccgcggtggcggccgcccgggcaggtactcttaaggcctgacctctgaagtaatcccagatatcattttccccatatggtattgggtcaaagcactcccagggccatcccaggttggaggggagggcaaaaagactcagaaatggttggtgttcatctttggagactatttacacagtgattgtatattaaaaaaaacagcaattatatctttgaatttgagtaaagttaaagaaatggtatctgtgaaacttcgaataaacaagtggagcttaaaatatttgattcttgcatattaggttaatgtgctctacgctaatcaggttggagaaatattaagctctgctaggaattctattggactgaaggtaagtcatcctgccagtaactacctaagtcaaggtgtgaacaagctggaatttcttcccattctaatt

SEQ ID NO: 34836 - DNA, 436 bp, Homo sapiens
tatagggcgatttggagctacaccgcggtggcggccgaggtactttttttttttttttttttttttttttttttttgcctttgatctctttgtctcatacttcattcagaatgatttacagagaaaatagaggatatcagatggaactttactcaaactcctcctgccacatttgcacaccttcccttctctcagttccttccctcctgcagatgtctcacctctgcccaaggctcttccccttcctatgtcctggatcccacctgcttccagttcctctttaactttctactatatcctctctttcttctccaacactaccaccctccttgccacaaggtttcttcccaccagcatttataatacatgctcattctctactgttttattaacaaccagccaacctttctccccatctgtctttccccaactacca

SEQ ID NO: 34837 - DNA, 252 bp, Homo sapiens
atatagggcgaattggagctccaccgtggtggcggccgcccgggcaggtacacttgaggaagcttgggctcagaggctttatgttaattccaacagtttttgcaacaggaggaggagaatatctgtccaggagccctaatcaagactcagcaggaagctggtggcttcctttcctttccttctttttgcttccctttcctggtactttacctggtgctctcctttcagtttcttaactttctacaatatggg

SEQ ID NO: 34838 - DNA, 454 bp, Homo sapiens
attggagctccaccgcggtggcggccgcccgggcaggtacgctaagctctctgctctgcatctgtagctccttgtggattatattgtctcagtgatcagaaatgattttctcggatatgaacaccgtttctggctcccctaaagtgcatcctcctaatgggacccggttttacacttttcaagaatttgctgcactgacaaaagaattaaatgcctgcagggaacaacttctagaaaaggaagaagaaatctctgaacttaaagctgaaagaaacaacacaagactattactggagcatttggagtgccttgtgtcacgacatgaacgatcactaagaatgacggtggtaaaacggcaagcccagtctccctcaggagtattcagtgaagttgaagttctcaaggcactgaaatctttgttttgagcaccacaaggccttggatgaaaaggtaa

SEQ ID NO: 34839 - DNA, 133 bp, Homo sapiens
gcgaattggagctccaccgcggtggcggccgcccgggcaggtactatagattatttgtcttgaagaagagctttgatatgtttcaaaattcgacgttggctttggaaggaaactgtaaatttacagatctttg

SEQ ID NO: 34840 - DNA, 436 bp, Homo sapiens
gctcaccgcggtggcggccgcccgggcaggtactttttttttttttttttttttggagatggagttttgctcttgtcgcccaggctggagtgcaatggtgccatcttggctcactgaaacctctgcctcctgggttcaagcgattctcctgcctcagcctcccaagtagctgggattacaggcatgcgccaccacacccggctaatttttgtattattaatagagacgggggtttcatcatgttggccaggctggtctcgaactcctgacctcgggtgatccacccgactcaacctcccaaagtgctgggattataggtgcgagcgaccacgcctggcctacaatgtcatatcattctattttttcaaaagccattctccccaaaggttagcaaatgctttctgcaaaaaggaaaatggtgaaccttacaaaacca

SEQ ID NO: 34841 - DNA, 205 bp, Homo sapiens
ctcacttagggcgaattggagctccaccgtggtggcggccgaggtacaatattttattttatgggtgtataataattgattttatttttgccttttttctggatgttttaatagttgccattggggggattgtgtttagctattggatttattgcagtctgcctttctgtaaatattttcgtataaatatcttgctgacatacct

SEQ ID NO: 34842 - DNA, 188 bp, Homo sapiens
gcgaattggagctccaccgcggtggcggccgaggtactttttttttttttttttttttttcctcttttaaacaggctgatatggtttggttctgtgtccccacccaaatttcatctttaattgtaatccccacgtgtcaaggaagggaccttgtgggaggtgactggatcatggggacagttttcctc

SEQ ID NO: 34843 - DNA, 232 bp, Homo sapiens
gcgcgtatacactcactatagggcgaattggagctccaccgcggtggcggccgcccgggcaggtacaaaaagcagggaccaagataaagcatcttgactcagtgagcttacaatctttgaaagctagggaggggagaagcacttagatcttatgctgcccccacgcaaccactatagcaggatgtcattcagccataaagcactttcagattcatcaccacaaggtgtgtgg

SEQ ID NO: 34844 - DNA, 282 bp, Homo sapiens
acgactcactatagggcgaattggagctccaccgcggtggcggccgacgggaaagaggtgctggagtatctgggtaaccctgctaattacccggtgtccattcgatttggccggccccgcctcacttctaatgagaagcttatgctggcctccatgttccactcgctctttgccatcggctcccagctgtctcctgaacagggaagctcaggcattgagatgctggagacagacacattcaaattgcactgctaccagacactgacagggatcaagtttgtg

SEQ ID NO: 34845 - DNA, 475 bp, Homo sapiens
  misc_feature 189: n = A,T,C or G
atacgactcactatagggcgaattggagctccaccgcggtggcggccgcccgggcaggtaccataacatttaaaagaatggaaaatgactgaaatccaatttagattatttttagagtatttttccagcaaattcaatttattctgaaatttaaatccagatcttttctaatatggtattacaatgaanagaataaagagacagatttgaattttcagtttcattttcaaaaactatttaccaaaacaaatggagaagaaacatccaaaagcacatttcatttctccaaactttgtgttttaaattatagttataaattgtaaggtaattttaaattgtccctcgtattatttctccacgtctgttttagtttaatgtctcctaagcttttctctcatagcgtagacctagggaagggatgggaagattgcccagtccccgatggctgcgcacacaggaggcggcggagcacaag

SEQ ID NO: 34846 - DNA, 446 bp, Homo sapiens
tacgactcactatagggcgaattggagctccaccgcggtggcggccgaggtaccagccaccaataggagatttgtcaaaggtcaggggcacctccactcagaatcccttggtggttaccaaaatgtgaaccctgaataactgagacaggtctcagttaatttagaaggtttattttgccaaggttgaggactcctgtgacacagctctcaggagggtcctgatgatatgtgcccaaggtggtccaagcacaggttggttttatacattttagggagacatgagacatcagtatatgtaagatgttccttggttctgttgggaacggcaggacaacttgaagcagggagggggcttcgaggtcccaggtaggtgagagacaaacacttggattcttttgagtttctgattagcctttccaaaagaggcaatcagatacgcatttatc

SEQ ID NO: 34847 - DNA, 574 bp, Homo sapiens
tacgactcactatagggcgaattggagctccaccgcggtggcggccgaggtacttttttttttttttttttttgttggaaaggggttaaacttcatagcagcttttgttgaggctgttactgttcatgcaaccttctgctggtctctaaaacatctacgtcattaacctttctcagaagatggtgccttgtctttagaatatgccattgcaaaaaagaatattcagtctcaacttttccctgttaaagaatactccgctcatttaaagtgcagcataagccagaagttaatattctttactttggtttctttactgtatggtcatgaaataaaaagcttatttaaaaatatagtaagaactttaaatgtattttggagaatgtaaaattaatctcaggacagaattgcactatcccttcctttaggaaataactttatgaaaaataccccatcctttgggtgctgcaattttgttggaaacttaaatcctttcacacttgcttttacctatgatcttgccacccagaacttctggcaaaatgatctatttaactacataagagaaaaaaattta

SEQ ID NO: 34848 - DNA, 458 bp, Homo sapiens
cggcggcggccgaggtactgtgttaatcactttacataaattatctcatttactcctcaggacaacccaaagaggaagtataatttttgcctgttactggtgaggacctcatgctcagagaggttaggcagcgtgttcgtgattcacaacttatgaaggaagggagggatgtcagcccaagtgagctgcctgcagagcctatgctctgatattgctccagctaccacttttaacatttagtgttctgacttactattataatggaagccctaccctatcttctgtgtatgtgagaggatttgcttttttattcatatcttcgaatgtctgtgaatgactctgacctcaatcctgtgtgtgtctggacctctactagaacgcatatggcatatgggtagcttacccaacacaaggatacaccaccgggagtggctgagtgctacacgagctcttaacag

SEQ ID NO: 34849 - DNA, 173 bp, Homo sapiens
actcactatagggcgaattggagctccaccgcggtggcggccgcccgggcaggtacgatcttggctcactgcaacctctccctcccgggttcaagtgattctcgtgcctcagcctcttgagtagctgggattacaggctcgtcgccactgcgttccggctaattttttgtatt

SEQ ID NO: 34850 - DNA, 333 bp, Homo sapiens
gggcgaattggagctccaccgcggtggcggccgcccgggcaggtactttttttttttttttttttttttttggggagaggtttgcaaatgtttaccaaatttcaattaagcaggaaaaataaggtcaaaatatatattatagaacatgtggactacagtaaacgtatacttgaaaattgcagagtagatatgtgtgagttaatgcttatggttaattagctcaacatagctagtccataatgtatacatatttcaaaacatgttgataccataaatatatataattatgtatcaaatgaaaactgtatatcacaacaaatttgtttccacata

SEQ ID NO: 34851 - DNA, 425 bp, Homo sapiens
atacgactcactatagggcgaattggagctccaccgcggtggcggccgaggtacaaaaacaagctgtagcctgaccaccttgggcacatgtcttcaggaccacctgaggcagtgtcacacgtgcatccttaactttggcaaaatacactttctaaactgattgagacctgtctcagatattttgggctaacacaatgaatatgaaaaaacttttttgttggcgggggtgggaggtgggacggagtctctctctgttgcccaggctggagtgcaatggcgcaatttggctcactgcaacctccacctcctggattcaagtgattctcctgcctcagcctcctgagtagctgggattacaggcacacgtcaccatgcctggctaatttttgcatttttagtagagacagggtttcaccatgttggtc

SEQ ID NO: 34852 - DNA, 423 bp, Homo sapiens
tacgactactatagggcgaattggagctccaccgcggtggcggccgaggtacagcaaacactatcctaagcttagcctcttcagatatttgatttaaaaatcactgtaaaaaacaccagtcacaaaaagccacattttatatgattctatttatatgaaatgtccaagataggcaaatctacagagataaaaattagatgagaggttgccaggatcaatggtgggggaaacgggaccatgttcacagccagcttccgcaggtcagcattgagctggcctgggaagcgcaggcaggtggtgaccccactcatggtagcagacaccaggtggttcaggtcaccataggtgggcgtggtcagctttagggttctgaagcaaatgtcgtagagagcttcgttattaatgcagtaggtctcgtctgtg

SEQ ID NO: 34853 - DNA, 238 bp, Homo sapiens
atacgactcactatagggcgaattggagctccaccgcggtggcggccgaggtacctgggattacaggcacatgtcaccgtgcctagctaatttcttgtatttttaccagagacaggggtttcaccatattggcctggctggtcttgaactccaggcctcaagtgatccacccattatggcttaccaatgtgctgggactacaagtgtgagccacatgttcatccataaaatatttttt

SEQ ID NO: 34854 - DNA, 415 bp, Homo sapiens
attggagctccaccgcggtggcggccgaggtaccatgttgacaaaaatgccagatcaaatggatttgagaaataacgcccaattcaaggctggctcagccctccacggggccttccagggaaaggaattcctttatgttcttggaagcccttttctagaaaagccattccattcatacctttgtagagcagtgggctgggtgtggagggcagcgcggagggtatctgcaagagcctgtattttccgcctcccttgcccccactccttttatccttttaaaagtcctatcagccctgccttcgtcccttccgccctaagccctaagagtggaggaggtttaatacggccaatggatcttgtataaagtctacgtaagttttactttaccagagctataacatggttaacgtaaact

SEQ ID NO: 34855 - DNA, 429 bp, Homo sapiens
tacgactactatagggcgaattggagctccaccgcggtggcggccgaggtacaaggttgcatggaaaagacacactagcgtaagacatggacagtggccctgagtgacgtgcagccggtttaggcgaattaagatttacatacttgaaaagggacaaacaagtctggacgtggtgactcatacctgtaattccaacactgtgggaggtggaggcaggaggatcccttgaggccaggagtttgcaaccagcctgggcaacatgggaaaacccctgtctctacaaaaattaaaaaaaaattagccatgtgtggcagcatgcccatagtcccagctactcacaggggctgaggtgggagaattgcttgagcccaggagatccaggctgcagagattgtgccactgcagcctgggtggcagaacgagacccta

SEQ ID NO: 34856 - DNA, 439 bp, Homo sapiens
tacgactcactatagggcgaattggagctccaccgcggtggcggccgcccgggcaggtacagaaaaggtgaatctgtgttctgtatattctgcctaaggcaaagaaatgtttagctctctttaaaatagttccataattttttctaaaaagctttgcttgaaaactgtaagcttcccatatctggagcatttcactttaaatatttggataaatatgctatcttcttacttggacatttcatgtgtttagggattgtcttctaaattcttcctaattcatatagctgctaacacttcccgcagagctaaaccattacagatatgaaataaagacctattgatttgacttacttttacttgtaaaaccttctgagtgttataacctcatttaatctttcagcatttacagtttcaagagtttgtgtcacaattagaagaa

SEQ ID NO: 34857 - DNA, 431 bp, Homo sapiens
tacgactactatagggcgaattggagctccaccgcggtggcggccgaggtacttttttttttttttttttttttttttactggtaaaacttcatttatttaagatgactagtgatgcagctagcaaacccaagaagccaactggaatggaaatgctcagtggtgctcagccattacccaggaccagagattcctttgttaacagttcaatttgttgaggcacaagtgaggataaattgggccatgacaaaactatgagattgaatgataatcatagtaacatctgacatatattaaatttggtgttatgccatttctcagttccaccaaatgtacctgcccgggcggccgctctagaactagtggatcccccgggctgcaggaattcgatatcaagcttatcgataccgtcgacctcgagggggggcccgg

SEQ ID NO: 34858 - DNA, 413 bp, Homo sapiens
gcgaattggagctccaccgcggtggcggccgaggtacgcttcccttggcaccatgttataccatctgtgctgggctgaatagtgtccccccaaaattgaataatgtccccccaaaattcgtgtataccatgaacattagaatgtgatcttacttggtattacttggtatagggtgttgtagaaataatcaaataaagatgaggtcatactgcatcagggtagaccctaaattcaatgaccaggatttttataagtgaaaggagaggcggattcagagaaaaagacacagacacacacagagagaagacagccatgtgaagacacaagcataaattgaagtgacacagctacaagccaaggaatgccaaaaattgctggtaaccaccagaagtttgaagaggcaaaggggaatt

SEQ ID NO: 34859 - DNA, 438 bp, Homo sapiens
  misc_feature 302, 303, 309: n = A,T,C or G
tacgactcacttagggcgaattggagctccaccgcggtggcggccgaggtacctacatcacgagtgttacttgaatggagatgtataaagtgcattttaaattcatttgtttccttaacattttcccttcatttcttatcttttcagagtttcttcttcaaggtctcaaggtctgaagcatcccacagaatgatcctactgaataactcccataagttgctggccctatacaaatccttggccaggagcatccctgagtccctgaaggtcagggaacagtgggaggtcagggtatgggatgnngggtgntgaaggatgagaaaatagcaggcttgtgattctagtccttcctgactgtttgcagagggttggagctgggaaacaggatgggactgggggcacaggctgcatatcaagagctgctgcttctctttggga

SEQ ID NO: 34860 - DNA, 426 bp, Homo sapiens
tatagggcgaattggagctccaccgcggtggcggccgcccgggcaggtacttctgtgagtctgcatgaactacaatgttactggacttggggtgccccctaatgcagatacagtgtcagtcacaacacccaagccatttcaaatacctggaaagccttcccaagaaggacagctacaaacaagcccagactgcaaagactacaataaggacctaattattcggtgcccaaacaccggtgacatctgcaagcatcaacatcatccaggaaaacagcctcaccaaatgaactagataaggcataaggtgccagggactaattctggagaaacagaggtatgtgacagagaattcaaaatggctgttctgaggaaactcaaagaaattcaaggtaacacagaaaaggaattcagaattctatcagataa

SEQ ID NO: 34861 - DNA, 557 bp, Homo sapiens
  misc_feature 145, 175, 176, 209, 295, 296, 368, 369, 379, 430: n = A,T,C or G
gctccaccgcggtggcggccgaggtgctgtaaaactgcagagaggagcactagcaagaggctctctgccccttccctgcttggtctcgaaacactaacagcctggctcctactccctaaattgggggtggcagtatacctctggngtaaactgagcagtcggaagatgaagtcanntgtgggggtgatcctcaaatgaaaaaaattcanttccttaatcttgcccccacttcctcaccgtaactgccaagtcaactatttaatggtgaacaaaaagccaggtatttgtgggaaanngcctgtaatataaaagagagcataaccaagcaaaccaaacagaaaaaaggggaactcagaaggaagcagaannacagtgcagngggaactgaagaaaaacttaaaaaagatacccagtcccttgggagacatgnagggaaggtatttcatcaaaagatgagaataagtcctataaaatgaaatattcaaaagaaaaaatagcttttggaacttaaaaacaggatagctggaaaaaaattttacttctttacctttggttcc

SEQ ID NO: 34862 - DNA, 443 bp, Homo sapiens
agctccaccgcggtggcggccgcccgggcaggtacaatcttggctcactgcaacctccgcctcccaggttcaagcgattctcctgcctcggcctcccgagtagctaggattacaggtgcccgccaccacaaccagctaattttttgtatttttagtagagatggggtttcactatgttggccaggctgttctcaaactcctgaccttagacgatccacccacctcagcctcccaaagtgctggagttacaggagtgagccaccgtgcccagccccatatactttaaattatctttagattacttataatatctaatacaatgtaaatggtatgttaacagttgttatactatattgtttagggaatcatgacaataaaaaagtctgtatgtgctcaattcagatgcttaaaaaatatatattttcaatcctcagttggttgaa

SEQ ID NO: 34863 - DNA, 548 bp, Homo sapiens
tatacgactcactatagggcgaattggagctccaccgcggtggcggccgaggtacttttttttttttttttttttggtttgagacagtttcacttttgttgcccaggctggagtgcaatgggatgatctcggctcactgcaacctccgcctcctgggttcaagcgattcccctgcctcagcctcctgagtagctgggattacaggcaatgcgccaccatgcctggctaattttgtatttttagtggagacagggtttctccacgttggtcaggctggtctcgaactcccgacttcaggtgatccgcccacctcggccccccaaagtgttgggattacaggtgtgagccactgcactcagccaatatctattattcttaaagtctttaccaggtttaaagttcttggattataattctgatgctaattgcttggaaatgtattgctatgtatttatgaatattctcttataactaaagatgatgcatgttatttttgcaaattttaaattgtttttcagagataaactaagataaaaattacaagttca

SEQ ID NO: 34864 - DNA, 574 bp, Homo sapiens
atacgactcactatagggcgaattggagctccaccgcggtggcggccgaggtactttttttttttttttttttcttttttgagatggagtctcgctctgtcgctcaggctggagtgcagtggtgtgatctcagctcactacaacctccactccctgggttcaagcctcaagcctcccgagtagctgggtttacaggcatgtgccactatgcccggctaacttttgtgtctttggtagagacagggtttcttcatgttggccaggctggtctcgaactcctggccttaggtgatctgcctgtctcagcctcccaaagtgctaggattataggcatgagcaatcacgcccggcctattggtttatttcaataagcagttatgagtaaagaaagataaaatactagctctatgcattattaattaaaatacatagcttctgacacagctactttttgctctcctgagaagccttttaaaactttctctgaattcctgattatgttctgaaagataaagctgctaaaactgggctccaaggatagttactgcaggaaaaaaactgaaggctaaatgaa

SEQ ID NO: 34865 - DNA, 577 bp, Homo sapiens
  misc_feature 545: n = A,T,C or G
atacgactcactatagggcgaattggagctccaccgcggtggcggccgcccgggcaggtacagtttacaaggtaatacctctaagtgtgcttttagcgttcagtgaattcttaaaactgctgctggagaattgtcccaaacatatttttttaacctttgtaggacatttagcccatcaaaacctgcaaaatctttacatacacagaagaacagacagttcttcaatgaaccagaagaaaatttctggatggtcatggtatttacatacacagtgtatctttctgaaattgtatggtgaagttatgggtgatctttactgttcagaatttaggaaagttctctggctgttgcatccaagtaaaattaaaataaaattggttgcaattttaaaatcaagttcttcctatttgctttattcattcttggggctgttttaagaagctatgtttctgatgctgtaacatgttcaaagtttttaaattaaagcaaaataaacatggtctaatgaattcattgataatttcagtttatcaaactttgtaggntgttcggaattctataattgaaaaacagagta

SEQ ID NO: 34866 - DNA, 533 bp, Homo sapiens
  misc_feature 399, 446: n = A,T,C or G
tatacgactcactatagggcgaattggagctccaccgcggtggcggccgaggtactactaggtttaccctctcatttcctttatcttcaacttattttctttgtgtcatctgaatcctccagatatctaacttttcctttttatgcctttcacatttccattggagatcactttgtccccttccttaaggttctgtcgggagagatttaagagttggttctagctaaaaaatatggctgtagctctgaagatgacataaaagtttttccctatgcctaagatttcaaatatatgtatacatttgaaagaaaaaacagggagagcattatttttttgtccagattatttttgctcattgtaggtaaaaaacaatctgtgtatatatgtaaaaaaaaacanaaacaaaaacaaaaaaaaaacctttcagtccctacataataactcanaaataaagtttcttcagccagctatggggatgggggaaacaattcccagggtacctgcccgggcggccggtctagaactagtggatc

SEQ ID NO: 34867 - DNA, 362 bp, Homo sapiens
tactcactatagggcgaattggagctccaccgcggtggcggccgaggtacaaagaagcctcactccccacgacacccttccgtgcatggtgtcactgacatctatatttcttttgtcacgttctgtaaatcacaatgaatggggtattcttcttctattatatatttgctaagtctttatggcatctataaaaaaaagtggtaactctatcctatgtaatatccctgtcaagtcctaaaagtctcttctgacgactatgttgtctgaaatatgcacagctactatagcttcatttcgggtcatatcatcataatccatgttgtctcatccatgcatatttgtgaatgcgtgaagtaactttc

SEQ ID NO: 34868 - DNA, 452 bp, Homo sapiens
  misc_feature 399, 422: n = A,T,C or G
gcgtaatacgactcactatagggcgaattggagctccaccgcggtggcggccgaggtacatctgcctatattccttgtgatagtgctttgctttttcatagataagcttcctccttgcctttcgaagcatcttttgggcaaacttctttctcaggcgcttgatcttcagctctgcgaaattccttcgcttttcttaagggtttctggcacagcaggaacctccttcttcttctcttctacaccctccatggttccagccggaaaaagagccccgcgtactatgtggcgttcttcacctcccccttcgtggtcttctcctggaatgtggtcttctacatcgccttcctcctgctgtttgcctacgtgctgctcatggatttccattcggtgccacacccncccgagctggtcctgtacgcggngttgcatttccagccattgctacaaagaac

SEQ ID NO: 34869 - DNA, 579 bp, Homo sapiens
actatagggcgaattggagctccaccgcggtggcggccgcccggcaggtactcttttttttgttctttttttttttttttgagatagagtctggctctgtcacccaggctggagtgcagtggcatgcaatctcggctcactgcaagctccgcctcctgggttcacgccattctcctgcctacctcccgggtggctgggactacaggcgcacgccaccacgcccagctaatttcttcatattttttttagtggagacggggttttactgtgttggccgggatggtcttgatctcctgacctcctgatcctcctgcctcggcctcccaaagtgctgggattgcgggcgtgagccaccgcgcctggcctgcttagagttttttatgtaattattttgtgacacaaacatttaaaatactgtagcttagaatgaaattgtctcaatcctaggagccaaaagtttgatgaatatgaatactaatattaaccatttttgtgttctgtgtcaggcactgttcttagccctttacaagtaagttaatacatcatctctaaatgtagttaccattatcgatcccattt

SEQ ID NO: 34870 - DNA, 516 bp, Homo sapiens
ctactatagggcgaattggagctccaccgcggtggcggccgaggtactttttttttttttttttttcttttttgagatggagtctcgctctgtcgctcaggctggagtgcagtggtgtgatctcagctcactacaacctccactccctgggttcaagcctcaagcctccgagtagctgggtacaggcatgtgccactatgcccggctaacttttgtgtctttggtagagacagggtttcttcatgttggccaggctggtctcgaactcctggccttaggtgatctgcctgtctcagcctcccaaagtgctaggattataggcatgagcaatcacgcccggcctattggtttatttcaataagcagttatgagtaaagaaagataaaatactagctctatgcattattaagtaaaatacatagcttctgacacagctactttttgctctcctgtgaagccttttaaaactttctctgaattcctgattatgttctgaaagattaagctgctaaaact

SEQ ID NO: 34871 - DNA, 315 bp, Homo sapiens
  misc_feature 78, 129, 130: n = A,T,C or G
actatagggcgaattggagctccaccgcggtggcggccgcccggcaggtacttttttttttttttttttctttctttnttttttttttttttttttttttttttttttttttttttttttttttttttnnggagaaaacatttaaaaattttttttaaagacaagtttaccatgtaccgaggtttatgcttctggtggaaatgaacaaatgtccccccataaggaaaaaaagttgagagatgccttttgtttaaagacatgggagccaaacttttttggaatcacatttttatgataaaggcctagtttaatttt

SEQ ID NO: 34872 - DNA, 504 bp, Homo sapiens
  misc_feature 372: n = A,T,C or G
gtatacgactcactatagggcgaattggagctccaccgcggtggcggccgaggtacttcgggaaaacaagaactgtgcttcaatgtctttataaccacactatatggctcattgtaaatgttcaacaaatgcttgatgaatgactcaatgagcaaaattacatgaaaacacttgctaacctatctcttttcatcaagtatgtagcaaacacatgcccacacctggcaccagaaactataagtgctatctaaatatcaacattttatttggcctgtgcacttatcagctagtggaaagcataaattattccaataaacagacgggaggtgtggaggcaaaatatcacacctaggtcttcaaaactaatgactntcaaatcaaaaactgcattacctgataaagacttaacttcatgattatttcaacagggactaaaaaaattacaggaaatcttggaaaccagctatctggccaaagacactaattttagagatgaagaaactg

SEQ ID NO: 34873 - DNA, 387 bp, Homo sapiens
  misc_feature 184: n = A,T,C or G
gctccaccgcggtggcggccgaggtacaactgatcagcaaaaatattatgattaatatgttaactgaggaagtatatcctacaatttagaaagattaatatttaaaatagttaaaattattgaaagttttaacttgcccgaaacagtccctaaccatacaggaacaattaatgatgctataaanattctatctaacattcctagtctacttgttgttttggagggcaggctgccattcctgcctattttaatctttcgaaggtggtctctgctcccatttaaaggtataagcaattaagagatacagaaccctcagaactaccttctataacttacctaatttctaagcttaaaatgtaatctaggctgggcatggtggatcacccg

SEQ ID NO: 34874 - DNA, 412 bp, Homo sapiens
ctactatagggcgaattggagctccaccgcggtggcggccgaggtacagtggctcatgcctataatcctagcaccttgtggggctgaggcgggagacttgcttgagctcaggagttagaggctgtagtgagctacgactgagccactacactccagtctaggcaacagagcaagaccctgtctcaaaaacaaaaacaaaaacaaaataacagaatatttgttgccagtgataaagttagaccctaaataaaaattagaactttagaaagcatgcattcaccaccatgaactttaaagcaacccaatatttaaagaccttcctgacgaaatcagtggaattattaacaaatgtctttatttaatactgtatgataaaatgtgtcaacatttagaaaatctgcgtaactcaaag

SEQ ID NO: 34875 - DNA, 406 bp, Homo sapiens
ctactatagggcgaattggagctccaccgcggtggcggccgaggtacagtggtgcgatctcagctcactgcatgctccgcctcctgggttcacgccattctcctgcctcagcctcccgagtagctgggactacaggcatctgccaccacgcctggctaattttttttgtatttttagtagagacgggatttcactgtattagccaggatggtctcaatctcctgacctcatgatccacctgccttggcctcccaaagtgctgggattacaggcatgagccactgcgcccagccgagtcattttttaatactactgcatgtgagttaacacaatcattcccaaattgaagttttagatgggccctcaaaatttttaggatatggttttcctacaggtttatattgaa

SEQ ID NO: 34876 - DNA, 408 bp, Homo sapiens
tacgactcactatagggcgaattggagctccaccgcggtggcggccgcccgggcaggtactaaagagacatgtcattaaaaaacaatttggctactaaattttgttcaagaactttactcactactggttaggaaaaaagcttatcattcactatcctacacaaataaaaacaccagttaaaggcgagagatggaagagagagaataggtcatttacttcagtagctacaccttctgtccccaatcacagggacgaaatgacccgagggtgggtgaagctatgcagtaatacagccttcaaaagataatcacatttgcattctcaatagcacagacacaaccatttaatttaacttgacaatcatttgaatgtatcataataaataaatatttctctactaagacatg

SEQ ID NO: 34877 - DNA, 600 bp, Homo sapiens
  misc_feature 524: n = A,T,C or G
gcgaattggagctccaccgcggtggcggccgaggtccaatggcccttccctccagaaaaacacacaaacaaaaaaatgagaagaaactatcagaattaacttcatctgaacgctggaaaatagtcaaaggtttacagcaactaagtaaatagtggctcaagaaagaggaaacatgaattttggtggcatttttacttgcccttgccccaatgccctccctgatttagtggcaatcttgacaatggcagcccacatttccagcgtgggactccagttctacagaaggcagagcagatcttattttcaaagaactgtgtttgtctgttttgacttatctggggacaaccttcaggcctgacaaaagacacttgccttactttcacctaactcaagactttctcaaggcagaaaagtggctatacagagggcattctttgaaaacattgaaaggcaaatgaacaaaccaccgtcacctgaagcaaaagattactgttaaggcacacaaaagatatgctgcaacctgngaagaaagattctttggagatttagtgcattgaaaagctgccatgtgttactggggaatttagaaagccatatgca

SEQ ID NO: 34878 - DNA, 699 bp, Homo sapiens
ggcgaattggagctccaccgcggtggcggccgaggtacctgtcccaagaaaaaagaagaagactggaaatgtgtcctcagaaccgactaaaaccagcaaaggtcctttccagtctcagaaaaagaacttattccacaaaattgtcagcaaatataagcacaaaaaggagaacccatgtccggaaaaaggaagtggggataaatggtcaaacaagcaactcttcttggatgccattcaccctacagaagccataatttcagaagacagaaacaccatggagcctgttcataaggttaaaaatatcccatccattttcaacactccagagccaacaacaacgcaagaacctttggtgggcagccaaaagagaaaggcaaggaaaaccaagattacacaccttgtcaggacagcagatggccgggtatcaccagcaggaggtacctgcccgggcggccgctctagaactagtggatcccccgggctgcaggaattcgatatcaagcttatcgataccgtcgacctcgagggggggcccggtacccagcttttgttccctttagtgagggttaattgcgcgcttggcgtaatcatggtcatagcttgttcctgtgtgaaattgttatccgctcacaattccacacaacatacgagccgggagcataaagtgtaaagcctgggtgcctaatgagtgagctaact

SEQ ID NO: 34879 - DNA, 686 bp, Homo sapiens
ggcgaattggagctccaccgcggtggcggccgaggtactgtttactaaattatagcactgcaataagacatttcaccaatatgatattgaagcataacaagttatttcataaggaatggtaattatctaacattctaagcaaatttggcagtgtgacttggtggggcgcagtgctgccctgacacaatgacagccttactctctaaattagtaacttccgtaggagaccccagaagcacacctccctcccagcagtgaaagccgaggattcccgttttgattagcaggcgccttctgttcacgataaagggataagaatcaggcagtgatggcagcggagttcatgcttcattaaggcaggcattgcaaactagttcagaggagagaatccacgatgacagcacattctgtgccatggagaacattcttaaatcaagcctccagtggaggaaggactcaagaatgaaatagcaccagataacggggcatcattagacttgtaaagcaaagcttccattttctatttttatataaaccattattaatgcctttaaaacaactgtgatatctggacaaataaaatagaaatgacttcttaagatgattgcaacttttagtcttgatttataaaaattattctacataattttaatagggtaactgataatttttctcacttttttttt

SEQ ID NO: 34880 - DNA, 523 bp, Homo sapiens
  misc_feature 57: n = A,T,C or G
tacgactcactatagggcgaattggagctccaccgcggtggcggccgaggtactttntttttttttttttttttttttttgagacagtgtctcactctgtcacccaggttggagtgcagtggcatgatctcggctcactgcaacctccctttcccaggttcaagcaattctcatgtccccgcctccaagcagctggaaccacaggtgcacgccaccatgcctggccatttttttttttaatatatatattttcagtagagacggggtttcaccacgctggccaggctggtctcaaactcctgacctcaggtgatccacccgcctcagcctcccaaagtgctgggattacaggcgtgagccaccgcgctgggccatctgtagtcttctgcaaaaaaaggttcctctaacatttttagctagtttgcaaaaaacttttctgtttttttgaatcctttaaaaaaatttgatgtccattattttaactgcatccttaaatattttacatgcctctatttttaatgac

SEQ ID NO: 34881 - DNA, 613 bp, Homo sapiens
tacgactcactatagggcgaattggagctccaccgcggtggcggccgaggtacgtaaaatgaaatttaaaacctcaaatggctcactgctcagaaacctcacagatggatgctgggtggtgagcagcagaaggggttgtgggtgagtctacattgttgtagttgtcctctcactacccatttgcaaggaaagcctggcatcaactggatatagaaccgggagctctgatgatgataactcatttcttagagagtcctttttctactttgcctgttttgatctctgcctcaggcatctgatgggtctctttgattctgatgccttgggtcaaatcatacagcataatggagtcatggaattgcaagtttattatgaatgtgatctgagcagacgcctacacatctacccaatagcctttaacctctaaagggctagagtcattgttcttcaaaccgttgcactgttaactggtcaagtctggcaacttcgaatagacctcacctcccacgttgctctctcctggtcagagctgaagcacatggagatagttggggttcacaaagctcatattatcaaccctcttactttacttttcctgattacttgcaaataa

SEQ ID NO: 34882 - DNA, 614 bp, Homo sapiens
  misc_feature 13: n = A,T,C or G
cgactcactatanggcgaattggagctccaccgcggtggcggccgcccgggcaggtacatggcgaagctagagactgtaacctgaagattgggacaaattaaagaaaaaaatgtgatttaacacaattacaaaaactgttacgttagggtcaaacaagaaccattttatgaaactgaattacaacaaatgacattatatctaactcttccgggtctccacagcacttatacttacttaagcagcttaaacacttccgagtctccacagcactctgatacttacttaaacagctcttttaacctgccctagtattcttaagtgcaacatatctaattttttttttcctcagtagtttgaacacttgctggctattttttctgtccaagttctcagtaacttcggcctgtgtagtcagtggttctacacagccgacactacttcttacataacacttggtctctctggcttctggaaagggcgaggggttaccttccggagtccagtgctctttcggcacttctgcaaccaggcagtggtaaaaggggtgctctccaaaaccatcttctagcagatctttttcagttaagattacttgttcttccatgtattcata

SEQ ID NO: 34883 - DNA, 433 bp, Homo sapiens
acgactcacttagggcgaattggagctccaccgcggtggcggccgcccgggcaggtacctcctccccactacctagctctagcttctgtccaacctggcctattttccatccttcaaaacaaaccccaatgtgtatggcttactccagctgcttccttaccttcaggtttgtgggcttcatttaagccatgggaatgccagcttaattaatgcatattaagataagaacattaaaccccaaaaatgatgggaaatcactctgtcttcaaaacaatataaaataataaaatctagttataaagattatataccattgtcactagtaagaagtggcactcttatttacaaaacataaagaaattagggtttaggtctggcatggtggttcacacctataatccccagcactttggaaggccaaggccagaggatt

SEQ ID NO: 34884 - DNA, 380 bp, Homo sapiens
tacgactactatagggcgaattggagctccaccgcggtggcggccgaggtactttttttttttttttttttgagacagagtctcactctgttatccaggctggagtgcagtggcatgatcttggctcactgcaaccttggactctggggctcaagctatcctatcactttagcctcctgaatagctgggactacaggcgcatgccaccacacccagctaattttcgtgctttttgtagagacaggatttcaccatgttgcccaggctggttaatcttactttcaaatgttactgatgagaaaacaggttctgagaagctaagtaactaaatttagatgaattagaacagagatgggactaagtcaaaagttctgcatcct

SEQ ID NO: 34885 - DNA, 416 bp, Homo sapiens
gcgaattggagctccaccgcggtggcggccgcccgggcaggtacttgccactgttctaggcactggggatacaggaatgaacaaaatcacccaaatctctgccctcccaattttctggtatggagagaaagttcttttgtagatagggatgagaatcccacagaaaactcaggagtgatgtaacaatgcaaatgctcacaaaatctctttcctcatctttcattccctatttggaaggaaaggtttcaaagacattgatgttgtataaatgaccatcttcttcattattttataaacatttgtcctgtgcagagtaaaaacaactggactgcataacaaattatacctattgagagttgggtaaagagttaccattggatccagtccaccaacccaaatgtttttctacatgtatt

SEQ ID NO: 34886 - DNA, 368 bp, Homo sapiens
gcgaattggagctccaccgcggtggcggccgcccgggcaggtactcatctgtttacaaatggtctatggctgcctttgtgctacaagggcagaactaaatagttgtgagataccaaatggactccaaaacctaaaatatatatttggctttttacagaaaaagctagttgaactctgctgaaagttataaactgaatttgcctcatggtaagtattatacataaagaaattcctgcctgttttttcttgatggaagaaagaggcaggacccagactagaaagtatgagagtcctagctagggaactgaagaaacaattttcaattaatgagaggaagtataatctaggccatcatgattttttgctat

SEQ ID NO: 34887 - DNA, 325 bp, Homo sapiens
gactactatagggcgaattggagctccaccgcggtggcggccgcccgggcaggtactgagtttcaggaaacagtgagatacattcagcaaaacagtgggcttcatgctgaaagaagtcactccaagtaaacacacatgacacacacacacacacacacacacacacacacacatacacacacccgcagacaccctagtggccaataggtcctctcaccaaaaacctgtgatcaggagagcagaaagcctcccaggggtccatcactgccctttctggagccccttatcagatggccagccccaggacagcactgtctgatcctgg

SEQ ID NO: 34888 - DNA, 438 bp, Homo sapiens
tacgactcactatagggcgaattggagctccaccgcggtggcggccgaggtacttaaacaacttgtctgttttctttaaatcttttcccttaggttagataatgctgctcatgattgtgagagcacagaaagttcttttgttttctagaattaagtctgctcacctggtttgcattctgcatctgcctttctttagtgcagggtagtgtcagtcccactgtggcccaaagtttgcattctgcgttaaccaagtcacaattaatgaggttttactataggcacaaatgcttaaaaaagaaaaaaacgattgttttgtgtggttaaaataaaaacttgtggggattttaatgtatttctttggtgaaaatacattagttgtttgtctctaattggatcactttcccttctagactctgaacaggaagtgcctcctggaac

SEQ ID NO: 34889 - DNA, 364 bp, Homo sapiens
tacactactatagggcgaattggagctccaccgcggtggcggccgaggtactttctttcatttttttttttttttttggtaatgtattttttttttttttttagcatcaaaaagctttatttccatttggtccaaggcttgttaggatagttaaaaaagctgcctattggctggagggaaaggcttaagcagaagccctattactttgcaaggggcccttcaaaagtccctgggctaaaaaggctcttagtcgtgcttgaaagtgagcctttcaaaaagatactttcccagcccaccctccgggccacccaacctgtggaggttggtcaggtggacacccatcttcttgataagcttcatttcc

SEQ ID NO: 34890 - DNA, 424 bp, Homo sapiens
tacgactactatagggcgaattggagctccaccgcggtggcggccgcccgggcaggtacgcgggtctgcgcttgtcatcatggcgacgcggggccatgtgcaggaccctaacgacaggcgcctccggcccatttacgattatcttgacaatggtaataataaaatggcaattcagcaagcagataaactgttgaagaaacataaggatcttcattgtgctaaggttttaaaggcaattggtttacagagaactggaaagcaagaggaagcctttactcttgcacaggaggtggcagcccttgaacccacagatgacaactcactgcaggcactgactatcctttaccgggagatgcaccgaccggagttagttacaaaactttatgaggcagctgtgaagaaagttcccaatagtgaggagtat

SEQ ID NO: 34891 - DNA, 403 bp, Homo sapiens
atacgactcactatagggcgaattggagctccaccgcggtggcggccgaggtacttcactgatttttctactgcatctttaccacctgaactctacattattcctccacatgtctgtcccgtctgctccaagactgcagaggacagtcttgagcatcatcttactcacattttactcagaaatttcttattgagtcctgctaaatacatgctaggcattagggtttaaaaacaattaaaataaagcatgtcagggatggcttttctagaaaacatgcccaagcagagacttaaatattgagactagccagattaaaaggggtagagggcaggaaagggtgacggcatgccacgcagcagcaagagcgggagcgaggcctgaaagagtgaaagtatttgcctac

SEQ ID NO: 34892 - DNA, 419 bp, Homo sapiens
cgactactatagggcgaattggagctccaccgcggtggcggccgaggtacttgaaaagaaagcatctgtggctgtgcccaaaaaaccggaagccccacgtgcaaaagtgcctgaagctgctcaagaagttgtcccagaaaagaaaattcccaaggcaccaatcaaaaaaccagaagcccccgcagttacagtgccagaagttcctcaagaagccacagaaaaagaaattcccgtggctccacccaaaaaaaccagaagctccaattgtcccagtgcctgaagctcaagaagttgtcccagaaaagaaagttcctaaggctcctcccacaaaaccagaagccccacctgccacagtgcctgaagtcccacaagaaattgtgccagaaaagaaaacactggtgcttcctaaaaagccagaa

SEQ ID NO: 34893 - DNA, 437 bp, Homo sapiens
cactcactatagggcgaattggagctccaccgcggtggcggccgcccgggcaggtactttttttttttttttttttttgtagctctttgtaaattctttattgccaggagtgaaccctaaagtggtttacaagagtgccctatttctttcaattaactacaaggacaaacatattttaaagttgaaataagtgaccaatatgatttgccaaaattctaaagcgcactcacaatgaaatggataaaggttacctttggggatttgcactgcatgaattctgtgaaaagcttgttggatattgtgatagagatagagaaatgaagtatattatataagatactatgaggttccctgcctttgctttacattccaggtttacaaacgtgccccataaacattccctctgaggcttttgcatttcatatatttatctaaac

SEQ ID NO: 34894 - DNA, 451 bp, Homo sapiens
actcacttagggcgaattggagctccaccgcggtggcggccgaggtacaaggattcctctagggaggaaatggtctctatctggagagagatcttcatgaggagatggagaggcgtggaggcatgtgatggtgctgcagccaaggccgtggggcaaaggccagcctcctcttcctatttttattaacccgggtcttctgcgcccaaagactcagcctcattcaggaccatattatgttcatacttctgctgcttccaaggagtgttgatgaaaaagtggggccttggaggggtagaggccaagggacagtttcccctctgccctttgaagttcacgatcttccatgcaacaaaattgttttctgtgaaaagcaggaaatgaataacaacagcgtaggtgcgttggctatgtccggtggcatttcttcagaattttcattaatgacacctga

SEQ ID NO: 34895 - DNA, 134 bp, Homo sapiens
ttgagctccaccgcggtggcggccgaggtactggcctttatgtgtctattcatagcagtggactgggctgctcgcaccagaccctccaattcagcaccactgaaattcttggtctccacggccagtttctttaa

SEQ ID NO: 34896 - DNA, 479 bp, Homo sapiens
  misc_feature 289, 290: n = A,T,C or G
cgtaatacgactcactatagggcgaattggagctccaccgcggtggcggccgccatcttgggtcatcgatgagcctcgccctgtgcctggtcccgcttgtgagggaaggacattagaaaatgaattgatgtgttccttaaaggatgggcaggaaaacagatcctgttgtggatatttatttgaacgggattacagatttgaaatgaagtcacaaagtgagcattaccaatgagaggaaaacagacgagaaaatcttgatgggcttcacaagacatgcaacataacaaannatggaatacttgtgatgaacatgaggggcagctcaagctggtggagggagataactcacgggggcagaggggtcagggattcctggccctgctgcctaaactgtgcgtttcataacccaaatcatttcatatttctaaccctcaaaacaaagctgttgtaatatctgatctctacggttccttctgggc

SEQ ID NO: 34897 - DNA, 460 bp, Homo sapiens
cgactcactatagggcgaattggagctccaccgcggtggcggccgaggtactttttgctttagcagatagatagggcatccaatacaactgaaacaacctgataacaaattaattttatttttcaataaaaaggaatgctctggttttttaactggctccttgaggaagccagaagatggcatctgctctttaaacaggcttctcttatctgacttgagacacaaatccaccaagattctttcttacagtggaagtaggcaccacccctcagatcacgaggcccctaggaagaagcctgtggaaatcagcctgtgatgtgtggtggtgggccagcacctagaagacacatggtggttgtgcacataaatcccttcagcggactcagtggaaggatgagaattctgtaagttcatgcccattttattgagttgtaatataaaatgctttttctttttcatt

SEQ ID NO: 34898 - DNA, 456 bp, Homo sapiens
gcgcgtatacgactcactatagggcgaattggagctccaccgcggtggcggccgaggtacttttttttttttttttttttttttttgggtagctctttgtaaattctttattgccaggagtgaaccctaaggtggctcacaagagtgccctatttctttcaattaactacaaggacaaacacatttcaaagttgagataagtgaccagtatgatttgccaaaattctaaagcgcactcaccatgaaatggataaaggttacctttggggatttgcactgcatgaattctgtgaaaagcttgttggatattgtgatagagatagagaaatgaagtatattatataagatactatgaggttccctgcctttgcttcacatcccaggcttacaaacgtgccccataaacattccctctgtggctcttgcatttcatatatttatctaaactcttataat

SEQ ID NO: 34899 - DNA, 441 bp, Homo sapiens
cgactcactatagggcgaattggagctccaccgcggtggcggccgcccgggcaggtactttttttttttttttttttttttttggctctttgtaaattctttattgccaggagtgaaccctaaagtggctcacaagagtgccctatttctttcaattaactacaaggacaaacacatttcaaagttgagataagtgaccagtatgatttgccaaaattctaaagcgcactcaccatgaaatggataaaggttacctttggggatttgcactgcatgaattctgtgaaaagcttgttggatattgtgatagagatagagaaatgaagtatattatataagatactatgaggttccctgcctttgcttcacatcccaggcttacaaacgttgccccataaacattccctttgtggcttttgcatttcatatatttatctaaac

SEQ ID NO: 34900 - DNA, 439 bp, Homo sapiens
tatagggcgaattggagctccaccgcggtggcggccgcccgggcaggtactttgagctgtgacatctcctgaatttcagtggctttgcttttattaagctctgcagtagagagcaccaaaatgatggatatatttaaaagctgcatatttttagaaacagcaaaaatctagggcttgttccttgttgaaagaggtagggcagtggttagaacctcctggctgactgtgggaattgatttgctgctagaggagggtagattgggttttccaaagtctttttaagacccagaccagctgaaacaagggaagggccatggtagttgtttagtcgtctgtggtaaaatggttaataactatttccctctgagtggtttagtatattcttcattcagaatatgcagagcttccaggtgttaggtttctaatatgtggtttttaa

SEQ ID NO: 34901 - DNA, 449 bp, Homo sapiens
cactactatagggcgaattggagctccaccgcggtggcggccgaggtaccaaggcccaatcaccccaaacagtgacaggaacataatttcctgttgggaccagttctcggaattttgcaccaacatgatcccatagttccacatctaacgttcccttttcaggaaaccaaggacagtgttcttccactgccctgaatagggtgaccatattttccatgggaacccgaactcccccattttaacaggaatttaatatagcagagataagcataatgtttagactctgcgtgacccatagttaccccggacaatacacagacaactcaccaatcgtcggggagccgaacaagcatttctgtggactggaccgatgaacatttctccgcacctaccaaagggaatcgggttcccacatgcacttaagaaaaagaaaaccacgttgggtgcca

SEQ ID NO: 34902 - DNA, 451 bp, Homo sapiens
cactactatagggcgaattggagctccaccgcggtggcggccgaggtactactactgcctagttaactaatacaatatttcaattataatcctgataacatggaatcctattattatcttcctccactggaactgctgattttaaacgctacttaattccttcaaattctctaaatttaaacacatctttcacagtattatgtcattacattagatatggtatttgtccctaagcactgcacattaaaacaagccatatttaccaatataaatgcaaaagtagatgaaatttggaatttttcataagaagagtcaaaaaattatacctatttcaaaaatgaacaagaaactaaattaataatcatttgtaagactgtggtattcttaaaaccagagggaccctggaatagaaatcattctccaggatgaattatgacaaaaaacttaaact

SEQ ID NO: 34903 - DNA, 443 bp, Homo sapiens
actactatagggcgaattggagctccaccgcggtggcggccgggcatttctcccaggatctctgtgcttccttttgtgcttcctgtgtgtgtggatatttaaaggggctggaaatgtgcaaaaacatgtcactacttagacattatattgtcatcttgctgtttctagtgatgttaattatctccatttcagcagatgtgtggcctcagatggtaaagtcagcagcctttcttatttctcacctctgtatcatcaggtccttcccaccatgcagatcttcctggtctccctcggctgcagccacacaaatctcccctctgtttttctgatgccagcttctcggcacttgctatttctccccgcgtacctcggccgctctagaactagtggatcccccgggctgcaggaattcgatatcaagcttatcgataccgtcgacctcg

SEQ ID NO: 34904 - DNA, 469 bp, Homo sapiens
cgcgcgtaatacgactcactatagggcgaattggagctccaccgcggtggcggccgcccgggcaggtacgatatgaaactacagttgttggatagctcgagtaaaataactttttgttgtttttagcctaagagtggtgacgccgctgcagctgctgatgcttctcctagtctcaatcgagaagaagtgatgaaactcctcagtatatttgagtctcggttgtcatttcttctccttcagtccattaaactgctatcttcaactaaaaagaaaacaaggtaaattaagtggttatttgtaggaatttctttcctagcaccctacctataaaaattttctctaccaacatcataaagaaaaactaggggccaggcacattggctcacacctgcaatcccagcactttgggaggccaaggcaggcagatcacttgagttcaggagttcgagaccagcccggccaacatggc

SEQ ID NO: 34905 - DNA, 437 bp, Homo sapiens
  misc_feature 417: n = A,T,C or G
atacgactcactatagggcgaattggagctccaccgcggtggcggccgaggtactggctcctaacgtattcttccaaagcacactgagacttttcctgcaagctttccacatgggctacatcagagagaccacaggcatctggaagaaagtttaaaaacagaagaagaagaagaagaaaaagaagaagaagaagaattcagtcatcagattaagaggtttgaattgggtcacatgaggtgtgtgcacagagctctgtcaaactgccccccccgcgtacctgcccgggcggccgctctagaactagtggatcccccgggctgcaggaattcgatatcaagcttatcgataccgtcgacctcgagggggggcccggtacccagcttttgttccctttagtgagggttaattgcgcgctnggcgtaatcatggtcatagc

SEQ ID NO: 34906 - DNA, 443 bp, Homo sapiens
tacgactcactatagggcgaattggagctccaccgcggtggcggccgaggtacgcggggagagacaaaaacagaagaggggaaacatgtttcctactgacgacaggtgattacacgtgtgcttctgatggagggatcaggaaaggatatgaaaaatcccgaagcttaaacaacatagcgggcttggcaggcaatgctctgaggctctctccagtaacatcaccctacaactctccttgtcctctgaggcgctctcgatctcccatcccatctatcttgtaaaccaaacaaccaaactgcatcagtcggctaaattgtattaattcaagtgctgtttaccccataatggaaataattaaatgtagagttactccaggctccattaatacagtataaatcttgcatgatactacaatttgaagtcagaaatgccacttgggtagc

SEQ ID NO: 34907 - DNA, 449 bp, Homo sapiens
tacgactcactatagggcgaattggagctccaccgcggtggcggccgaggtaccagcggttataacaccaccaaccggcatgcctcaggaactccctgctatctggcttcataaatgacggcatgcactgcaccgccgtgtacattacctgacgctgacggatacactctcacacacgcatgctcgcgctgcggtccaaaagagcctgggacgttggtgaagaagggctataaaaatgaccaatgggggggaggtaagtcagttaggtgaaagactacatggcacatgctgtcattctggtaactaaagaaataactcctctattggaaaattagctgttcaggcagattaacggatgtgtccacctgaagggtgacccccactgtggccttttactagcaggaaagggctcctttacaactgagctcctgcttttgtataaaattatt

SEQ ID NO: 34908 - DNA, 454 bp, Homo sapiens
ggagtcaccgttactatagggcgaattggagctccaccgcggtggcggccgaggtacaatcaactcacaaatactaaaaggtttcatgatcaaaatggctactacttcccccagaaccaaaacagagtaaagcacaagtctttggctctcctttaaagaaaacagcaggttaccattcttaaccagacctttgtttgactaccagtagggcaaataccacatttgtgcatcactgagtaataacaccattagaaaaggcaacttcacagaagttattggctaagcgaactcatttgaatgctctgttttgaggcagcaaactgtcactgtcgcagattggggagggcagtgggtaagtcaaggggaaattacagggtggaaaaaggtcaagaaaaaaaagacgtatatggaaaaatgtaaactttgagctccatccctgaagaactctggaaag

SEQ ID NO: 34909 - DNA, 143 bp, Homo sapiens
ctcactatagggcgaattggagctccaccgcggtggcggccgcccgggcaggtaccccagctgatgatgttccacaaaagagcaaaacatacacaatctggttccactctacagaaatcctggaactggactacaaagcggaa

SEQ ID NO: 34910 - DNA, 384 bp, Homo sapiens
agggcgaattggagctccaccgcggtggcggccgcccgggcaggtacagcgcaaattaaaacaccatgaagataactgttcttgctgatattcagctatttttcttgaataagtgctatgtgtataagcttttggctaatttccaaagttctgaaaaagctgaatttgactatttttgtccatgttttcattctttttgtgaagatgattttcagaggtccttacttttttttttttggctgatgtcaccaacatgtagctttttaagtttaggttaattaaaagtaaataattaagcctaggcaacatagcaagacctcatctcctgaaaaaaaaaaaaaaaatgtacctcggccgctctagaactagtggatcccccgggct

SEQ ID NO: 34911 - DNA, 403 bp, Homo sapiens
gactactatagggcgaattggagctccaccgcggtggcggccgaggtactgatactttttattcttttcagggaccgttgatctaaaaaatgttaaggcttatgctttcagatctcaatccaatttctagaaattaacaatgagtccttttatagcactgaccttactcttcctgccttccccacctccaccccaaacttgctttgggtgttctttaatctttcaagggagtgataaatgtcacaaactcttaaataaagggctgaaatggcagcgtatgactgtttagacgtgtctttaaagtagtattagtcttctagaatactaatctaattcttagaaacagaaaacagaggaagctcaatgttcgaagggaagataataataattgattcatcctggc

SEQ ID NO: 34912 - DNA, 162 bp, Homo sapiens
actactactatatggcgaattggagctccaccgaggtggcgggcgcccgggcaggtactctggtaagcttgttgttgtccaagtgaagctccctcatatgaggcgtgttggccagagagccattgtcaacagcagagatgctgttgaaactcaatcccaact

SEQ ID NO: 34913 - DNA, 450 bp, Homo sapiens
actactatagggcgaattggagctccaccgcggtggcggccgcccgggcaggtactatagcatctgtggaaaatcttagaaaaaaacattttctcccccaccctctctcttccctgttaagaccatcccaaaatgcttcaagtaaaaaataacaagtttaaggggttaagcacttttaaagtctgattaagggggtggggggaaaaaagagtaactaccagccatttctccaatggacatctcttccacagacctcaacgtgagaactgctctagtttctataaactgtaaacctgtggtggtctgattatcctgatattggattttcttgttttctgttacaccttgagtcatttgcctttaggattctagacagacctaagggaaaaagaactgaaaacatattttgcccccacccccacaaaaaaaaatactgaaaactcccccccg

SEQ ID NO: 34914 - DNA, 438 bp, Homo sapiens
agggcgaattggagctccaccgcggtggcggccgcccgggcaggtacataaattttccagaatcttgcatacagtcgcctgtgctctcttaaatggaactaaatacctggctggtcttttttcttttaacttttttttgtcaacgaatgtctttgttttagaaagaggcattttcaagtgttttgatgtgacccaacgtgacctaaaaccattaaaagattctaagcaaaaataataaggccaaactttagtgtaaatagcatgaaaggcttgaaaactaaataaaaaattattttttcctttaagagtaaatagctaggctaggcatggtagttcatacctgtgaacctgtgaaccattgctttggggggctgaggtgaaaggattgcttgagcccagaatttcaagacgagcctgggcaacatagcaagacccctt

SEQ ID NO: 34915 - DNA, 440 bp, Homo sapiens
agggcgaattggagctccaccgcggtggcggccgcccgggcaggtacctcagttttgtcctctttaaaataaggaaaatataccttgtagggttactgtgagacttaaatgaattactaaatgtaaaaaactttataagattcttggcacatggtaactgccatacctattacccataactaactgattttttacacaatttactataatataaccacaattcttattcaaacatcctggacctagctaacagtgacacgtgatgatttctgaatgagttttgagaagaaactgagtcccaaagagtgcaactttctcccactgtcagaaggcctacacaccactcttctcagagaggtggaagaattgagctgtgctttggaactctcgattacatcaggaacagattgctgattggtgacagatagcaagtgttaata

SEQ ID NO: 34916 - DNA, 459 bp, Homo sapiens
actactatagggcgaattggagctccaccgcggtggcggccgaggtactgctatcaattcaggtttccttagcaaataagtgcttcagatatactcgcaagggctcctgaattggagttttctgcatcatctccataaaaatattttttcacctctaaagtcatcaaagaattgaagcaggcccttgggaaatatccttaaggggagagagtggctccaaaaataaccttccttccagcaccacaccaccagctcagagaattcacttcacggtgggacggtcactcaaagtctactgtgaacctcatccccaaaaaggtaatggcaaaggctagaggaaaatcctaaacaatcacctatgccttgtatctttctctagaaacacaatctactagtagaaaaaccaatttgaaattttaaaaatgtggatgctactcatgagggctgtcatcaacgtag

SEQ ID NO: 34917 - DNA, 395 bp, Homo sapiens
tacgactactatagggcgaattggagctccaccgcggtggcggccgaggtacacggcgaggtattgaggacaaccaacgcaggggcttatgctgagggggcaggcggagcttgaggaaaccgcagataagtttttttctctttgaaagatagagattaatacaactacttaaaaaatatattcaataggttactaagaaattgctttagcgtaaggttttaacgtaattttaatagcttgagattctatgagaaaatatgaagacttataagaggagcatgaggaaggaaaagatataaggtttctgaatcatgacggaggttgagacgaaacttatttttggggtgggacttgtatttaaaagaaaagttgaagaatggactacggagtccaaa

SEQ ID NO: 34918 - DNA, 443 bp, Homo sapiens
tatagggcgaattggagctccaccgcggtggcggccgcccgggcaggtactggtctacagggacaagcagtctttaaaacgaaactcaccttcagacctcactctacggacagtgccacacatagaaagatgactctgtcacttgcagataggtgttcaaagacacagaagattagaatcttgccaatggctggtcgtgatcctgaatgccaacgcacagaaatgattaagaaagaagaagaacgtttgagggcttccatacgtagggaatctcagcagcgccgaatgagagagaaacagtaccagcgggggctgagcgccagttacctggaacctgatcgatacgatgaggaggaggaaggcgaggagtccatcagcttggctgccattaaaaaccgatataaagggggcattcgagaggaacgagccagaatctattcatc

SEQ ID NO: 34919 - DNA, 512 bp, Homo sapiens
ctcactatagggcgaattggagctccaccgcggtggcggccgcccgggcaggtacagtggtgcgatctcagctcactgcaagctccgcctcctgggttcacgccattctcctgcctcagcctcccgagtagctgggactacaggcatctgccaccacgcctggctaattttttttgtatttttagtagagacgggatttcactgtattagccaggatggtctcaatctcctgacctcatgatccacctgccttggcctcccaaagtgctgggattacaggcatgagccactgcgcccagccgagtcattttttaatactactgcatgtgagttaacacaatcattcccaaattgaagttatagatgggccctcaaaatttttaggatatggttttcctacacgtttatattgaaagtatggggtatctcctattactcctctctatatttgtcttaaaggagaaagggagaggccagagaccaaatgtccccatttacctatagctaatctc

SEQ ID NO: 34920 - DNA, 478 bp, Homo sapiens
  misc_feature 325, 400, 446: n = A,T,C or G
gagctccaccgcggtggcggccgcccggcaggtacttctctgcagccttaaactcctgggctcaagcaatcctgccaccttagccctccaaatagctgggactacggacatgcaccattaaattaaaaaaaatatatatatatacacacacacacacacacatatgatgtggtactcacttctgttgcccaggtctggtctcaaagtccttgagccttaagctatacctcccagccttgggcctcccagaagtggctgggatgtacaggtgatgagccacatgtgccatgagcctgatacaggtgatatattgtagcagagacantttaagaaagtgagaagaaagcagccatgtggttatctgacagtccagatattccagcacaaggggacagagggnggaacagtacttggtggtgtggtgagtatacatggagggaagcatnggctaagtggcatggaacaaagaaggtatggt

SEQ ID NO: 34921 - DNA, 405 bp, Homo sapiens
tacttttttctttttttttttttttttttttgggggatggagtctcactctgtctccaggctggagtgcggtggcgtgatcttggctcactgcaacctccactttccgggttcaagcggttctcctgcctcaacctccgagtggctgggactgcaggcatgtgccaccacacctggctcatttttgtatttttagtggagacagggtttcaccatgttggccaggatggtcttgatctcttgacctcgtgatccgcccaccttggcctcccaaagtgctggattgcaggtgtgagccaccgtgcctggcctaaataaataatttcgtaacatatacaatccacttcccactaagaattagggtcaaagacattctatttgaacacttgcaattacctagatctag

SEQ ID NO: 34922 - DNA, 534 bp, Homo sapiens
  misc_feature 172: n = A,T,C or G
gactatatggcgaattggagctccaccgcggtggcggccgaggtacatactcccattccacagcttagtctaacatgcaaaaagggcatgattagagattgttggtcattaagaagaacaggaggagacgttctggagccttggcactatgcctggggaagagaggatctcncacccctcagccatctctgggccagaggaaaatcacctaagggttgtcctaaagagttccacgggagaagagattatgctgtctgatgaccccttaccgttttctgcagtatgtccctactttttgggtgtcagctgaggctattaaactcgtgctgcttctgaagtcggtttcttatataccatgcgaaggtttaaatctgctgtactgactctgctctctgttcttacttttcccagagttcctacacttactacataactaaaaactggattttaagctgattgcactcttcaatgcgtttcatttctgagattgttctttcaaagccctaacaatagatttcggttcatatgacaaac

SEQ ID NO: 34923 - DNA, 539 bp, Homo sapiens
ctatagggcgaattggagctccaccgcggtggcggccgcccgggcaggtactgaatttctgtcagttaaggggttcactgctttggtggaaattggtggaaattgctagcaggttccacgatgtttatttttttctccatgttgtatatcattaccatgtcacatacgcgttctatttttcttcctctcctcctgatctccttaaaaatgaatctacagttggtggctttttccccctcctctttggccagttccacagttcagttcttcctgaaaacagggatgatgaacttgtaggatcaggacaaatgtgtgtttttcaaaaacttaaggctgggtgtgaaacaccttctgtggacaaggatttgtaaacttctctcctgcctccagctgcggccccagcctaactgatagttacttgattcagtgtgctagacacttaaatagcatctatgtctctttcaagggaatttgtcaaataatgctgtttagctaattgttgcaagcaattgcatattaacagctgtgattttgttgga

SEQ ID NO: 34924 - DNA, 615 bp, Homo sapiens
ctcactatagggcgaattggagctccaccgcggtggcggccgaggtacttagggtaagcattaacaatattattcaaaatgttatatagagttcaactgtatacaatagagcatttattaaagtgtgtccaaagcgcttataaataaagcatcttcgaggcaggcggctcacttgaggttaggaggaaagcagactggccaacatggtgaaaccccgcctccactgaaaatacaaaaaattagccaggcgtcatggcgcacctgtagtcccagccactttttagtatttttagtagagacggagtttcaacatgttggccaggctggtcttgaactcgtgacctcaagtgatccgcccacctcggcctcccaaagtgctgggattacaggcgcgagccaccatacccggcctcttatacaataaagagatttttttaaaaaaagatataaattcacacatatgaggaaaactggagaggaaaagatagcaacaaaaattttggaaactggaaaggaaacagataaagaactaactgacttagtagacccaagaaagcaaacacctaagccagcagtggggaaggctgagaaccatcacagtttatactacagcag

SEQ ID NO: 34925 - DNA, 449 bp, Homo sapiens
atacgactactatagggcgaattggagctccaccgcggtggcggccgcccgggcaggtacaaaattaatggtggttttggattacgaattttaaattattataactaggcccaaacacatctttatcaaaataggaaacgttacaatcaacacattttttgccaatgagaaataagtttgtttattcctgtagcgtaaaaatccatgctttgggattcgatgaactcttggaaagcattttctgcatcctgatggttgtggaagcattttccctgcaaaaaattttctagatgcttggaaaagtggtagtcggttggtgagaggtcagttcaatatggtggatgaggcaaaactttgtagcccaattcattcaacttttgaaatgttggttgtgcaacatgttgtcgggtgttgtcgtggagaagaactggaccctttctgtggaccag

SEQ ID NO: 34926 - DNA, 450 bp, Homo sapiens
tacgactactatagggcgaattggagctccaccgcggtggcggccgcccgggcaggtacgcggggggtatctctagccgggcctgagctgcgctagcaccccccccaggagaccgttgcagtcggccagcccccttctccacggtaaccatgtgcgaccgaaaggccgtgatcaaaaatgcggacatgtcggaagagatgcaacaggactcggtggagtgcgctactcaggcgctggagaaatacaacatagagaaggacattgcggctcatatcaagaaggaatttgacaagaagtactaatatttaaactgaactgtttaatgcctaaattttatatataattctactttaaaaataagccttatgtcttttataccaaatatgagtagttttctaaagcaatgaaattagaaaactatataatttcagtatctgattatactgcttg

SEQ ID NO: 34927 - DNA, 448 bp, Homo sapiens
actactatagggcgaattggagctccaccgcggtggcggccgaggtaccatctgcctcctgcttgcccacagcatggggttaacggctgaagttgggcagcaaagcctgaactgtgttttcctgttggcagggcaaattcatccgcatcaacttcgacgtcacgggttacatcgtgggagccaacattgagacctatctgctagaaaaatcacgggcaattcgccaagccagagacgagaggacattccacatcttttactacatgattgctggagccaaggagaagatgagaagtgacttgcttttggagggcttcaacaactacaccttcctctccaatggctttgtgcccatcccagcagcccaggatgatgagatgttccaggaaaccgtggaggccatggcaatcatgggtttcagcgaggaggagcagctatgtaagcctca

SEQ ID NO: 34928 - DNA, 425 bp, Homo sapiens
ttatagatactggggagtggtatgtggtagataatgtcaagtaacgccctcatggtgtgggtgaggaagtgaggccttagtgttgattggactgtgctgagccacacattcttcttattgccacactccccatacagtggagggttcttttatcattgggacagttctcagatcaataaagcctttgtccatagagctaaatataaggcttcgggaaatataaaaatatgatctgtaactgatagtcctgagtgctagccattagtggctaagtgattgtggccaaatcactcaaattgcgtgtacttatccttaaaattggcaatactaaaacctaccttatggggtggtcacaaggttagatgacatcatgggtttgaaatttctatgtgaatttgaaattactataaagatgggaaatgctg

SEQ ID NO: 34929 - DNA, 486 bp, Homo sapiens
actactatagggcgaattggagctccaccgcggtggcggccgaggtactaatctgggcattgttctaggcacctgaaataaattatctcaattcatccttcaaataacccagtgaagtagatcatactatatcccactttatagatcatactgtgtatcccattttatggatggggaacctgaggctcagagatgagaaatgatcatcccatcattcccattcactcaactagtaaacaattgggctaaacttcagctccagctccatgcaattccaagtcctcgttgaaccactttgttattgagcttgctccaactgatctcctgtgtctctggccatcccatcgtttcagtagtgccccagtttgaaagtccacttcatcatcaggcatccagtgccttccagcctttaattgtctcctatcaaactggaaacaattagtctgagaaaatcatccatgccagtgaattaatttattgaatttg

SEQ ID NO: 34930 - DNA, 482 bp, Homo sapiens
ctatagggcgaattggagttccaccgcggtggcggccgaggtactaagaaaaattgttttgccttgagatgctgttaatctgtaactttagccccaaccctgtgctcacggaaacatgtgctgtaaggtttaagggatctacggctgtgcaggatgtacagcaaaaaagaaactgagaagcccaaactgctttcttgttaacattcacttattcaaaccaatgtggaaaacttcttatactttggttcccattatgaaagttggacaattgctgctatcacacctggcaggtaaaccaatgccaagagagtgatggaaaccattggcaagactttgttgatgaccaggattggaattttataaaaatattgttgatgggaagttgctaaagggtgaattacttccctcagaagagtgtaaagaaaagtcagagatgctataatagcagctattttaattggcaagtgccactgtggaaagag

SEQ ID NO: 34931 - DNA, 404 bp, Homo sapiens
ccgaggtacgcgggggcgttcgtgtgtgtgcgctcgctactgtgtggttatggaggcgggggcagctgagttagagtcccaactcttgtactccatttgctattctcttctttctcccccacacctatctggtggtggtagtgggcgtttatatttggcgtccttttcattcatttcctaaatctcttaaaaaattttgggttgggggtattggggaaggcaggaaagggaaaaggagagtagtagctgaagagcaagaggaggacatggagatgaagaagaagattaacctggagttaaggaacagatccccggaggaggtgacagagttagtccttgataattgcctgtgtgtcaatggggaaattgaaggcctggatggtactttcaaagaactagaattt

SEQ ID NO: 34932 - DNA, 438 bp, Homo sapiens
ccgcccgggcaggtacgctgggggctctcggtgtcagagcgcatgctttccggctccaccacgaacatgtagtagaggttccacattttcatcgacagcagtcgcagaaacgtcaggccgtagccgaagcctcggaaggagcggcccacggcaaagagacatggtctggctatgtgccgtctgggctcaaacttctggccttgggtgattctctcacctcagactcctgagtagctgggattacagatgcgggccaccacacctggctaccagtgtgcttttcttggagaaagaagaaaagaagaaagaaggaagaagaagaagaaagaaaggaggaagaaggaagaagaagagccagtgtgataatacattgagtgattttttaaaaagtgcatatatgagcaaaaggttatttttcccttttctgaagtatggcag

SEQ ID NO: 34933 - DNA, 443 bp, Homo sapiens
gtggcggccgcccgggcatttacgcgggaatgttttgaaagtctttattttaatgaaatttacttcataagcattcaataaatatttgctattattactgatggttaatattgtcaacttgattggattgaaggatacaaagtattgatactaggtgtgtctgtgaggatgttgctaagggaattaacatttgagtcagtgagctgggaaaggcagacccacccttaatctggtgggcataatctaatcaactgccaacgtggctacaatataagcaggcagaagaatgtgaaaagagagactagcctagcttcccagccgacatctttctcctgtgctggatgcttcctgccctggaacatcagactccaagttcttcaattttggaactcagactggctctccttgctcctcagcctgcagacggcctattgtgggacctt

SEQ ID NO: 34934 - DNA, 444 bp, Homo sapiens
ggcggccgcccgggcaggtacgctgtggagtctcctccttatcgcagctgaaggatctgttgagcgcttcaggaaaggcggacaggcgacactaacaggtgaagatctcgggagaccatgactaagaaaagaattgctgtgattgggggaggagtgagcgggctctcttccattcagtgctgcgtagaagaaggcttggaacctgtctgctttgaaaggactgatgacatcggagggctctggaggttccaggaaaatcctgaagaaggaagggccagtatttacaaatcagtgatcatcaatacttctaaagagatgatgtgcttcagtgactatccaatcccagatcattatcccaacttcatgcataatgcccaggtcctggagtatttcaggatgtatgccaaagaatttgaccttctaaagtatattcgatttaagacc

SEQ ID NO: 34935 - DNA, 424 bp, Homo sapiens
gcgaattggagctccaccgcggtggcggccgaggtacatggtttactagaaatgtttattgattatatttccagctttaattttcttgagtaatttaactgaatttacacagtttgcttcattgtattttcaaacatatagaaaataaacttattaggaagcattttcttaaagtgtttttgctgtcttatctatttgctctaatggtttgggacctttcattgagttttcattgcttttgatgtcagggcttatttaatctctagtgcatgaaagtctcatatgtaaaaaatgattattctgaatttaatctgtcattggtcatacttctaagtgttcaaccttataaaaaataaatgactatcaaaaaagaaaaaccttacattatgttctagtagtaaagttttccaaggacagtgttcac

SEQ ID NO: 34936 - DNA, 171 bp, Homo sapiens
gcggtggcggccgcccgggcatgtactttttttttctgttgaccgaaacactactggataattattatttttaatgtccagaatgtgtaatacaagggccagagcttcctcctggactcaattttataaattctcaattggttggtgaggccaatagggatactttttctt

SEQ ID NO: 34937 - DNA, 533 bp, Homo sapiens
tgggccctctagagcatgctcgagcggccgccagtgtgatggatatctgcagaattcggcttagcgtggtcgcggccgaggttttttttttttttttttttttttttttttttggaagtagagtttaatttaaagcttattgatcatttgagcaaatctctggagggcagaacaagaaggagcaggcttcagttaacagaagcagccttgagttgccaggatagtggatggaataccaaagaaagagttcacaccagggaggaagcaatgccttctccctggagtctcccaaggggcagctttagaataagggaagaggatttgctggtcaccgtttgctgacatgggtctctatggtgagttcaggcctgaggacagggttgtctgcaaaaccacatggcccttgaaaaatgtccttgcagattgggcttcaaactgcttggagcaccaggagagggacttcctggatttcagggatagagagaggagaatggaggcaataggaggagaatgcacttctatcaggcccatcc

SEQ ID NO: 34938 - DNA, 436 bp, Homo sapiens
gcgaattggagctccaccgcggtggcggccgcccgggcaggtacgacctggacggaaatggctatatcagcaaggcagagatgctagagatcgtgcaggcaatctataagatggtttcctctgtaatgaaaatgcctgaagatgagtcaaccccagagaaaagaacagaaaagatctttcgccagatggacacccattgagacggataactcttcctggaagagttcatccgaggagccaaaagcgacccgttcattgtgcgcctcctgcagtgcgacccgagcagtgccggccagttctgagccctgcgcccaccaatcgaattgtagagctgcttgtgttcccttttgattcttctttttaacaattttttttttttttttgccaaacaatatcaaatggtgatgccgacccctgtgcggtctgatgcgccttc

SEQ ID NO: 34939 - DNA, 362 bp, Homo sapiens
cgtaatacgactactatagggcgaattggagctccaccgcggtggcggccgaggtactgtaaatgtgttttctcttccttatgattttcttgatacatgttcttttctctagtttactttattgttaagaatatactatataatacacatacaaaatatgtgttattgcctgtttatgttgtgggtagggcttctggtcaacagtgggctacattatcgaacggtcaactgtatccttaactttttttcctcaaatacaactttcaacaattctggctttagctaaaaaactttagctaaactaaagaacttcagccattactctttcagctcctttatgttcacagaccaagaggtagacc

SEQ ID NO: 34940 - DNA, 451 bp, Homo sapiens
ctactatagggcgaattggagctccaccgcggtggcggccgaggtacttttttttttttttttttttttttggagggaaaacatcttttttattattattatttttatttatttatttagagacaggttcttgttctgttgcctgggctagagtgcagtggtgcaatcctaattcactgtggcctaaattcctgggctcaagtgatcctcctgccccacccttgagtagataggactacaggcacacaccaccatacctggataatttttttatttttatttcgtagaaacggaggtccagccaagttccccaggctggtctcgaactcttggcctcaagtgatcctccatgcctgggctggaaaacataaccttatgggaaagttcctaaaaatggttgaagaacaagactgaaggctagaatatgaaagcttaaattctgattctgccc

SEQ ID NO: 34941 - DNA, 453 bp, Homo sapiens
tatagggcgaattggagctccaccgcggtggcggccgtctccaccagaaaaccatcgccaactcctgcgatcagcttgtggcttacaaaccttgtttaaaagctgcttacatggacttctgtcctttaaaagcttccccttggctgtggccctctgtgtatgcctgggatccttccaagcactcatagcccagataggaatcctctgctcctcccaaataaattcatctgttctggagagcctatctttctgaggttgacacttatcttgcagaatggggttcccacccatctttgatcatgaaggaaatctcagatttagaactatgttgcccaggctgctcttgaactcctggggtcaagcagtctacctcggcctcccagaatgctgggattacaggcgtgagccaccattcccagcccacatttcttaaaaatggtatttcagtccaaa

SEQ ID NO: 34942 - DNA, 462 bp, Homo sapiens
actactatagggcgaattggagctccaccgcggtggcggccgaggtacgcgggcatgcaatcagttgagagttcaaatggaacaaaaagccaaaggaagggcaaattatctctctcttcttgagttgtcacatccatctttttctgcccttggacatcggagcagggcccagtgcaccaggttttctagctctcaaacttgtgaatggtatctcatgggacttctcagcctccataatcatgtgagccagttctcgtaacaagttccctcttacgtctatatacataaaatctatctatatcctctctttatgtctctcaggagaactctaataatgcattaatcaaatattacaaaaatcttacgatgaaaagcaacagtatccctctactttgttctctaactcacatctattcccccaaacaacctcttaaccattctgttttaataactctgaataat

SEQ ID NO: 34943 - DNA, 189 bp, Homo sapiens
  misc_feature 49: n = A,T,C or G
actatagggcgaattggagctccaccgcggtggcggccgaggtactttntttttttttttttttttttttggatttttagtagagacagggtttcaccgtgttagccaggatggtctcgatctcctgaccttttgatccgcccacctcggcctcccaaagtgctgggattacaggcgtgagccacccat

SEQ ID NO: 34944 - DNA, 471 bp, Homo sapiens
acgactactatagggttaattggaactccaccgcggtggcggccgcccgggctggtacaaaccctactttttctagggctgttcataacaaaattaccatgaatgaggagacttaaaactacagaaatttattatctcacatttctagaggctaaaagactgaaattcaggcattagaaaggccacactttctctcaagtttcaaaaggagaattttttcctgggctgttccagcttttggtggctcctgcatgttttggttttagtggcacatctccaatgtctgctgccattttcatatgaccttctgcttgtgcgtcttcccttgcccttcctcttgaggacaccagtcatggatttgggacccaccctcatccagtatgacctcattttaagtaattacttatttccaaataagattacattctgaggttccaggtgaatgtgaatttggggtaaacatggatctac

SEQ ID NO: 34945 - DNA, 360 bp, Homo sapiens
ctactatagggcgaattggagctccaccgcggtggcggccgaggtacagacttatgcttatagggaggcctcaggaaacttacaatcatggcagaaggtgaaaaggaggcaagcacacattcacatggctgaaaagagtcaggggaggtgctacacactttttaaacaagcagatctcaggagaactttatcatcagacagcacgaggtgggattgagctaaaccattagaaaccacctctatgatccagtcaccttccagcaagcccctcctccaacactgacaattacaattccatatgagattgggggtggggggggcacaaatccaaaccatgtcaagaaggcattttaaaaattg

SEQ ID NO: 34946 - DNA, 200 bp, Homo sapiens
actatagggcgaattggagttccaccgcggtggcggccgcccgggcaggtactctttccctttatttctcagactggccgacacttagggaaaatagaaagaacctatgttgaaatattgggggcgggttcccccgatacttttggacatatatccagtagtgggactgctggatcatatagaagttctatttttagttt

SEQ ID NO: 34947 - DNA, 458 bp, Homo sapiens
tacactactatagggcgaattggagctccaccgcggtggcggccgcccgggcaggtactttttttttttttttttttttttgggatggagtctcgctctgttgcccaggctggagtgcagtggtgtgatctcagctcactgcaagctccacctcctgggttcacgccattctcccgcctcagcttcccaagtagctgggactacaggcacctgccgccacacccggctaattttggttttgtatttttagtagagacagggtttcactgtgttagccaggatggtctcgatctcccgacctcgtgatccgcccgcctcagcctcccaaagtgctgggattacaagtatgagccactgagcccggcctctctgtagcttttaagatgttcttaggtgacttatgagaatgaaaaaatggagaattttccgtcttcctgccatgaaatcaattaatggca

SEQ ID NO: 34948 - DNA, 479 bp, Homo sapiens
ctactatagggcgaattggatctccaccgcggtggcggccgaggtaccataattagtttagaattcagtcttttaaattatttgcaccttgagactctgtgaaatgaaaacatttaacagtaaactcttgtcccaagggagcaaagtgagagtaaatgctggtccataggatggggaaaaaggactgtgttcaccatgagtttttcaggatgcagcataaagcttatctaaatactacacagatcattatcttttaacccaaccaatcatatattcaaactaagggaaaaatatgtaagcttttcctttggaacctgagacaccaggagccttaaaccacaaataatctactgtagctatggacagggtagtcaaatttatttcaaaacaaaagctttgttgggctgcatcaaatgcaggagaaaaggaatacttaggggcatggttaaattaccagtgtgcgtaacagtgaagtatgc

SEQ ID NO: 34949 - DNA, 451 bp, Homo sapiens
  misc_feature 22, 23: n = A,T,C or G
gcggtcgcggccgaggtacttnnttttttttcttttttttttaaggcttcttcaaatatggataaaggaaggagataaagggccaagaacctccagatggagaccggagctgtttgagtttttaccttgaaggcgccaccacccatgtgcctctggtattcacagcagcacttgctatctctcactatggtggattctgacctttaggcagctcagggtttcattgccctagcgggaaacagattgagagctttctagcctgggatatgttgcacaccttatacattaatgactttaggtaggtgcttttttcacagccagtgctgtctgtgaaagttataacctttctgacatttctgacacacgttgcagctggatactcaaagttgtctctgttccttttcaaagaggctcatcttggcttgttaagtttccatgtggactattgaga

SEQ ID NO: 34950 - DNA, 203 bp, Homo sapiens
ctactatagggcgaattggagctccaccgcggtggcggccgcccgggcaggtactctgggaggctgaggcaggtggatcaccttaggtcaggcattcaagactaacctggccaacatggtgaaaccctgtctctactaaaaaatacaaaaattagctgggcagggtggtgcatgcttgtacagcatcgtagggttcccctaaa

SEQ ID NO: 34951 - DNA, 367 bp, Homo sapiens
  misc_feature 188: n = A,T,C or G
tatagggcgaattggagctccaccgcggtggcggccgaggtaccaaatacaatctgtaaataatggccatttcttcccaagcccacagccaagatgagtgttaggctaaattcagagccctggctcttcctcagatgagtggaaaacctgcgcatgacagggccggctcccccttctcaaagggcttnctcccactcatcccattccttaccagaatcggccgaggtgttcacggggccagagaaagcacaaacatggattcagaagtccaaagaaatgcagttcgttgcgcccaatcagagatagatgatttcattcaacaaggcttggaagccccagttgggaaagtcgataaaaaatctttgct

SEQ ID NO: 34952 - DNA, 453 bp, Homo sapiens
ctcactatagggcgaattggagctccaccgcggtggcggccgaggtacactggaggctggagcctgcagatggcatggctctgcggctcaccttgctgcagttggtggtggtgacagagactgcagcttgactgtagtggtggttaccaggagctctgccactgcatgtccactagtgacgggttcgctccaccaccccagctgggtagccgctgctctcacataaggggtccaattaaaattgccaggaataaattcccccggactttgacttctcaagagctaagaaggtttgctgagtattctggcatgatgtttggtgatcaaacaactgctggccaaaaatgatgagtatttccccctcttgctgaagatgtgctccatacaatagtccatcacattcatcattcatcagtctggaagtgtgcagccaatcatattatctatcacatg

SEQ ID NO: 34953 - DNA, 421 bp, Homo sapiens
  misc_feature 326: n = A,T,C or G
ctatagggcgaattggagctccaccgcggtggcggccgaggtacgatcttggctcactgcaacctctccctcccgggttcaagtgattctcgtgcctcagcctcttgagtagctgggattacaggcgcgtgccactgcgtccggctaatttttgtatttttagtagagatggggtttcaccatgttggccaggctgatctcaaacttctgaacctcaatgtggtccacaccacctttggcctccccaaagtggctgggattacaaggcgttgaatgccaccgcgccttcagcctacaaatggcaatttttttaaaaacctggacancgctattacttgggataaaatttcttctgttttaaaaattccttattttacctattttttaaaagaataaagtaattaggttttttttttttttt

SEQ ID NO: 34954 - DNA, 478 bp, Homo sapiens
actcactatagggcgaattggagctccaccgcggtggcggccgcccgggcaggtacgcgggaaagtgcttaattagtgtccatagctaaggaaagagagaagaagccagcaagtgcatgcagggaatgccaatctatggtccgtagctgaagcagctggacaacaggtgacaagaaatagtgagggaagccagatgaagtgactgagttgtttattaatgatctccatttgtcttttgggaagatacagggtcatatttcttatctactcaaataaaatgttatttaacaccagaagcaatagtatctgtggtgggcagaacaataccccactaaagatgtctacgtcctgggccaggcgcagtggctcacgcctgtaatcccagcactttgggaggccaaggtgggcagatcacgaggtcaggagttcgagaccagcctgatcaacatggtgaggccccgtctctactaaaaataca

SEQ ID NO: 34955 - DNA, 78 bp, Homo sapiens
gctccaccgcggtggcggccgggcatttcttccagggatctctgagctttcttttgtgcttctctgtgtgtgtggata

SEQ ID NO: 34956 - DNA, 226 bp, Homo sapiens
tatagggcgaattggagtctgccaccgccgccgcggcgcgcgggcgcccgggcaggtaccctcgaatctaaaataaaagcagaaattatatgaaaaaactggggtgggagttggaaggaactttatatatgtaataaaattgtgtgaaaactgttaatctctcatgctctcattaaaaaataattattctcaagaaaccccaaattcttccaccttaggaatgaaa

SEQ ID NO: 34957 - DNA, 437 bp, Homo sapiens
gcggaattgcacctccagccgcggtgcgcggccgcccgggcaggtacaaagcataacaaaattttcaatcttcaccattttaaaatgcaattcagtaatgttcagtatattcacattcttgggaaagagatctgcagaactttttatcttacaaaactggaggtctatgcatattaaagaactctttttccctctccctgcatcctttggtaaccaccactctacttcctatttctgtgaatttgactactttagatactccatataagtggtatcatacagtatttgtctttttgtgactggcttaattaccttagcataatgttctcaagattgtagaatttaagggattttcttccttttcaagactgaataatatttccgtcatatttgtatatcacattttgcttatctgttcatgttgatgaacatttggg

SEQ ID NO: 34958 - DNA, 441 bp, Homo sapiens
agggcgaattggagctccaccgcggtggcggccgcccgggcaggtacttcagttcctattgccatgaaaattgtatccagcagctaaaaaaaaaaaaaaaaaaaaagactacagttagtcattatccaatttgatgatttatggtccaacactaatgctcatttttttgtttgttttacaaacatttggtggataccacaatgaaaactgcacttaaaaaacaaaaatgctgaaagaggaaggaaatatcaaaaaggtctgaatagacaacaggcaaatatgcttccacctaccgaaagagttttaggttggcagacagatgggtgccttattttctgtgaaactgaagttttaaacactggccagaaaatgtttgattgccatttcaacacatggaaaaagttacattgatgcctaaattaccattttctgcaaaaagct

SEQ ID NO: 34959 - DNA, 112 bp, Homo sapiens
atacactactatagggcgaattggagctcccccgcggtggcggccgaggtacccggggagagcacatccggtgtaagaacccctggtaggccttgaaaaggcggtttaggaa

SEQ ID NO: 34960 - DNA, 537 bp, Homo sapiens
ggcgaattggagctccaccgcggtggcggccgaggtacttcgaagtttatccagaagcaaatttaactgtgtcttaaacttgtttcccacgctgatgaagctaagttttcctgctttttgtttagtatctttgttgttatttgtggatgattcaaataattcccgtataaacccttatctctggattcacatattaagagattcaagagacatatgtaaagcatcattatttttctccacaaactgggtctgaaaaataaatcaaacaggaatgtttctgtccatcttgtgataacatcacttaacatggctctgtccaaaggaactttctgtgatgacagaaatgttctgtatctgcactgtccaacgcagtcaccactagtcagtgtggacactgggcacctgaagtccccgcgtacctgcccgggcggccgctctagaactagtggatcccccgggctgcaggaattcgatatcaagcttatcgattccgtcgacctcgagggggggcccggtacccagcttttgttcccttta

SEQ ID NO: 34961 - DNA, 179 bp, Homo sapiens
tatacggcgaattggagctccaccgcggtggcggccgcccgggcaggtacaaaatggtcctctgagaatattgttcctctttgtcattgcaaagagatgcattctagctggatgttttcatttatactcccaaattctaagactcttgtttctcctccagagtttcacacagatggttt

SEQ ID NO: 34962 - DNA, 365 bp, Homo sapiens
tggagctccaccgcggtggcggccgaggtacacaccgacctggagcttacttaggattttctagtgcagtagttctaaaatatggtccctggatcagtagtgttagcatcccctgggattttgtgttttaacaagttctctatatgattctgatgcacactaaagcttcagaatcactgctgtagtataaactgtgatggttctcagccttccccactgctggcttaggtgtttgctttcttgggtctactaagtcagttagttctttatctgtttcctttccagtttccaaaatttttgttgctatactttccctctccagttttccttatatgtgtgaatttataatctttttttaaaaaaat

SEQ ID NO: 34963 - DNA, 260 bp, Homo sapiens
gggcgaattggagctccaccgcggtggcggccgaggtacttttctttttttctttctttcttcttttttttttttagacggagttttcttcttgttgcccaggctacagtgcagtggcatgatctcagctcactgcaactgattcaagcgattctcctgtctcagcctcctgagtggctgggattacaggcaccccgccaccatgcccagctaattttttgtatttttagtgaaaacgggagtttcaccatgtatggtca

SEQ ID NO: 34964 - DNA, 426 bp, Homo sapiens
gcggccgaggtactgatgcttattttttttgttttatgacacagggacttccttactcacccaggccagagtgcaggggcgtgatcgtggctcactgcagcctcagcatcccaggttcaactgatccctctggcctcagcctcctaagcagctgggactagaggtgtgtgccaccatgcccagctaatttttatattatttatagtggcggggttttgccatgttgcccaggctggtctcgaactcctgaactcaagcaatccacccgctgcctcagcctcccaaagtgccaggattacaggtgtgagccactgtgcccagcccctgatgctaatttttaaatggacatttgaattctcaaagaaatttgtgttgcctcttgtcaaaccaggtcactgaaatgataacccacacaataagccaatg

SEQ ID NO: 34965 - DNA, 188 bp, Homo sapiens
ctcactatagggctaattggagctccaccgcggtggcggccgaggtacattttcttttttctttttctttttttttttttgtttgagatggggccttgccctatcacccaggctggagtgcagtggcacagtcaccactcactgcagcctcagcctcctgggctcgatcgatcctcccacttcagcct

SEQ ID NO: 34966 - DNA, 227 bp, Homo sapiens
gcgaattggagctccaccgcggcggcggccgcccgggcaggaactatagcctttatccgtaacattacgtgttttagacattcctagaatctgaaattgattccccttccacagaacaggcccgggacttaccaacaccctgctaaggaagttctgtgtccaaggcccacccaggctgggttgtccccacctacatccagcccacacaagcccaggcagcaatccgg

SEQ ID NO: 34967 - DNA, 420 bp, Homo sapiens
  misc_feature 40, 41, 61: n = A,T,C or G
ggccgcccgggcaggactaagggtgacgaataggcgaaanngtttataaccttagcctggngacatgaatgagctgattgtggaactctcagcagcattttacgtattgttaacatgtatggcatttattagcatattgtatattatataagattgagggatgtcatattttcagctttcttttaaataaaaattgagtatattttcctattttatatcaggtaactaaattatgctagttatgtggaaaaaattgcaaagatgctttgacagatataatccctttggtgctccatctgatcaaagttgaaaagttgatgttttttaagagacaagctttatcattgtctctgatttcagtagaataatggtttattgttagacaatgatgtttctgcttggataaatcaaagataaatt

SEQ ID NO: 34968 - DNA, 401 bp, Homo sapiens
gcgaattggagctccaccgcggtggcggccgaggtacttaacaagcagaccatgtgtagaccacccatcctgaaccaagattcctgggcaaggctcttaattcatatgttactgaacaaaagcaaaactgctccacacatgggccacataatatagccacttgtttatttaaatttttgacctatgtgataaatcctgatgctcagttgtctaaaaatgtctttgtaagcatctgaatatacctaatactgaaataagagtttaaaaagctgacaacacaatccaagttttacatttatttactcataattaactcaataaacatactagattttacatttaatatatgttaaaatggctgaacaaaaatatttagcgtaattttcttttttttttggagg

SEQ ID NO: 34969 - DNA, 331 bp, Homo sapiens
ggagctccaccgcggtggcggccgcccgggcaggtacgatcttggctcactgcaacctctccctcccgggttcaagtgattctcgtgcctcagcctcttgagtagctgggattacaggcgcgtgccactgcgtccggctaatttttgtatttttagtagagatggggtttcaccatgttggccaggctgatctcaaactcctgacctcatgtggtccacccaccttggcctcccaaagtgctgggattacaggcgtgagccaccgcgctcagcctacaagcaattttttaaaaactgacacctattactgataaaattctctgtttaaaaa

SEQ ID NO: 34970 - DNA, 440 bp, Homo sapiens
tacactactatagggcgaattggagctccaccgcggtggcggccgaggtacgcggggggacctaaggagtcgcagttgtgaacaggttagagttacttgttattggtaaatagccactatggagactaaggaccagaagaaacacagaaagaaaaacggtggacccaaagctgcaaagaaaaagaagtggcatctgcaggatctccagctaggagactaagaaaatgcccagaagagaaatgccaatgcttttgcagttcagtctgctgtgtggatgtctcgatcctttcacaggactctggatttgaagacacaaaagcatcatattccagtggttgatggaactccactagagccgccaccaataccggtagtggtgacggggccttcaaagttggaaagagcactttgatataatgccttattcggaacttcacctg

SEQ ID NO: 34971 - DNA, 465 bp, Homo sapiens
atacactactatagggcgaattggagctccaccgcggtggcggccgcccgggcaggtacgcggggacattggagtggggtgggaagcctgagtcctgtattcacatgaacgaattcaggacacccaccatacactcagctcctttctgaaagtgtcctcccttaggcctctagaaacgccatggactttaggaagggccaagtgacaccttccatgatgtttggttctggtccagatggatctggaagacaaagatttggggagagtgaccacatggctggtagcaataacaaggcctctggctctgaattgcttcctatggtcccggtagaaactgcatagttcagagccaaggggagatgagaagccttaacgtggaagagggacaagagagatgaattggtccctctgcaacccaactcttcaaagtaagaatggttgagagcaatagtcaccaatttccca

SEQ ID NO: 34972 - DNA, 312 bp, Homo sapiens
tacgactcactatagggcgaattggagctccaccgcggtggcggccgaggtacagtggtgtgatctcagctcactgcaagctccgcctcctgggttcacgccattctcctgcctcagcctcccgagtagctgggactacaggcatctgccaccacgcctggccaattttttttgtatttttagtagagacgggatttcactgtattagccaggatggtctcaatctcctgacctcatgatccaacctgccttggccttccaaagtgctgggattacaggcatgagccactgcgcccagtcgagttcattttt

SEQ ID NO: 34973 - DNA, 415 bp, Homo sapiens
ggcgaattggagctccaccgcggtggcggccgcccgggcaggtactttttttttttttttttttttacactttaaatattcaagtttattgtatgtcaattatacttcaataaagctttttttttttttaaaccctcacaatttagttctgggctctgtgcttgggctcttgaaattcggtggcagtggcctgaatccccatgcccactgtgacagagcaggagcaccatcctctcggacaaacaccgccactttaagtgccagctccctttccagcctcatgcatttcaaaaaaatcacttctcttttaacaccaagcagacagaaagagcagacagtaaaacattgatgagacagctcaggcacaaagggaggtggggggaaagttttttgggtaattgccaaacttaaccct

SEQ ID NO: 34974 - DNA, 350 bp, Homo sapiens
ggcgaattggagctccaccgcggtggcggccgcccgggcaggtacatcccagctgattcagtatctccttctctttgaaaactctcacagaaactgccctataacttctactgacatctcatctcaatggctagatcagtgctatataacaaaactttctgcagtgatagaaatgtactatatctgaactatccaagatgttagctactagccacttatgactgtttagcatttaaaatgtcacttgtggaactgacaaaatcaacttttaattttacttgattttaataaatttaaatttaaatagatacatgtgtctagtggctaccacaataaataagtgcagggct

SEQ ID NO: 34975 - DNA, 359 bp, Homo sapiens
cgtatacactactatagggcgaattggagctccaccgcggtggcggccgcccgggcaggtaccgtcactgctgctccgctaggcttggtggtgtgaggattttcttctgttcctatcgtggactctctctcccctttctctctttttttttattattttctccattttactctgacattattgagtgtctccctctagttctcatctttctctgccttcactgtgggcaatgactcttttccctcctacttgttgactttttcatctccagcttttctgccttcctgcctgagttcactttatttttaatagagtttctcccctggttctcttttttctcctcctactctccatgttct

SEQ ID NO: 34976 - DNA, 481 bp, Homo sapiens
atacgactactatagggcgaattggagctccaccgcggtggcggccgaggtacctgctgtcccctctctgactagaaaacagtttccctagatacctgcatagttagccccctgaacttatttcaattctctgctcaaatgtcatgtaaatggtgacatcttccctgaccatcttatataaaataatacttccctttcccctgatattctctatccaccttatcctgtttgatttttctgcactgccccatcaaccattgacatataacatgtctacttgtttatatatgtattgtgtttcaccagcattgaaatgtgactttcacgagggtagggatttttgtctgttttatttaatactgtatccccaagaatgccttgcataaattgggactaacaaatatttattgaattgaataaatgaatacatttgggaaggcgccaaggaatccttgcccctgaaattcatttcttcagtcag

SEQ ID NO: 34977 - DNA, 344 bp, Homo sapiens
ggagctccaccgcggtggcggccgcccgggcaggtaccttttagctctgcctggtttatcgccttgtccccgcagcccctggcagcctctcatctaccctctgcttctgtgggtttgccgattccgggcattttatgtaaatggaatcgtatgatatgtggtcttttgtgatcgtccttttacacttagcatgatgtttttcatgtatattacggtcgggtgtggtggctcacacctgtaatcccagcgctttgggaggctgatgtgggcaaattacttgagctcaggagttcgagaacagcctgggcaacgtgggaagaccctgtctcaattttttttaattg

SEQ ID NO: 34978 - DNA, 428 bp, Homo sapiens
actactatagggcgaattggagctccaccgcggtggcggccgaggtaccatgagaaattgtagactttactcctatattctctttccaagccctaggattagccatttttccaagaaatgttgcataccattctgctatgaaaggaaccaaaactcaaatcttgattctgggtgtattttttgttaatttgctgtcttttcttgtagaacctctcaggtaatgactctaggaggtatgtgttgtgtattaacccatatatacacacacatataaactttttatttaatttttatacctatattatgctaaacttggaaatatattgacacatctgccctaagttaataccacatgaatgtttattacctaccttctattcctgtccctaaccccgcactccaaccgtgaggaaccccctcctgccaca

SEQ ID NO: 34979 - DNA, 313 bp, Homo sapiens
actactatagggcgaattggagctccaccgcggtggcggccgaggtactaaggaaggcttttaactatttaagataaaccaacctaattttgattttttacttgcttcaacgtgtttcagttcattaatgtttcaataataaggaatgaattctcttgtcttgacaaaccaagcatggaaatttccccctaagagaaaagaagaaatttaaatgatttccatattcaagtcacagcaccgctgaaaagagaactttgagttcttaggaaaggcatctgttaccttccaaaggaggggccaactcattacagtt

SEQ ID NO: 34980 - DNA, 379 bp, Homo sapiens
actactatagggcgaattggagctccaccgcggtggcggccgcccgggcaggtactttttttttttttttttttttttttagtagagatggggtttcactgtgttagccaggatggtctcgatctcctgacctcgtgatccgccctcctcggcctcccaaagtgctgggattacaggtgtgagccaccgcgcctggccaaccctgctcttgaaatgtctaaatcttttcctcactagcatatacaattcaaatgcacaggcctccatgacttctttggaatttaaaagaagccttcatttcaaggatagaaatatgtaaaaatttaccaaccatggctaagtttgttatgggagtagtggaagggacatggaaaaaaaa

SEQ ID NO: 34981 - DNA, 416 bp, Homo sapiens
actactatagggcgaattggagctccaccgcggtggcggccgaggtacgatcttggttcactgcaacctctccctcccgggttcaagtgattctcgtgcctcagcctcttgagtagctgggattacaggcgcgtgccactgcgtccggctaatttttgtatttttagtagagatgggtttcaccatgttggccaggctgatctcaaactcctgacctcatgtggtccacccaccttggcctcccaaagtgctgggattacaggcgtgagccaccgcgctcagcctacaagcaattttttaaaaactgacacctattactgataaaattctctgtttaaaatcctatttactattttaaagataagtattagtttttttttaaatacaataattctgttattgataaaatttaagga

SEQ ID NO: 34982 - DNA, 416 bp, Homo sapiens
actactatagggcgaattggagctccaccgcggtggcggccgcccgggcaggtacttttcttcagatgccttgttctgtttagaacaaaaatgcactatagtttttaaagaatcatgcatctttgggttggcccaggatcaaatttgatattgaataatttattccagggcagctttcataaacatacttcatagatgttgttttgaaatgtttctaaatatctaaaatcatttcaacagcagaaatgatttttattttaacaaaagattatgatagcccttgtagtgtttaaaagtggtcatatttattactgactttgagtcaggtgttaaaatagcagtgccacagctcgtctcttgccttagtgtgctgctgtgagagtcacagtggaaactgcagggaggaggtgtgttcc

SEQ ID NO: 34983 - DNA, 422 bp, Homo sapiens
actactatagggcgaattggagctccaccgcggtggcggccgaggtacatgttccgcatggataacgaccatgtgattgacgcgacgctcacaggagggcccgcaaggtatatcaaccattcgtgtgcacctaattgtgtggctgaagtggtgacttttgagagaggacacaaaattatcatcagctccagtcggagaatccagaaaggagaagagctctgctatgactataagtttgactttgaagatgaccagcacaagattccgtgtcactgtggagctgtgaactgccggaagtggatgaactgaaatgcattccttgctagctcagcgggcggcttgtccctaggaagaggcgattcaacacaccattggaattttgcagacagaaagagatttttgttttctgttttatgacttta

SEQ ID NO: 34984 - DNA, 421 bp, Homo sapiens
actactatagggcgaattggagctccaccgcggtggcggccgcccgggcaggtacttttttttttttttttttttttttttttttttttttttttccaattttgcagagatgggatcttaacattttgcccaagctggtcttgacctcctgggctcaagcaatcctcatacctcagcctcccaaagtgctgaaataacaggcgtgagccggcacacccagcccagactattcagacatgtaaatatttgacacttttgtggaataaaggctgaatatggtatttttctacactgattaaatctccaggaaactggttcctaaaaaaggtaactgcaatgttctcgactaatggagtttatgatgctgaaagttcaagacaaactcatttaagccataaaagcctatcaataacattttttg

SEQ ID NO: 34985 - DNA, 179 bp, Homo sapiens
ctccttcggcaattgttctccccgcggtggcggccgaggtacttttttttttttttttttttttttttgaggaaaacccggtaatgatgtcggggttgagggataggaggagaatgggggataggtgtatgaacatgagggtgttttctcgtgtgaatgagggttttatgttgttaatg

SEQ ID NO: 34986 - DNA, 285 bp, Homo sapiens
tacgactactatagggcgaattggagctccaccgcggtggcggccgaggtacaatagtcgtgaactgaataattaaaactttggcttctcttaggaaaagactacttcctagtcataggtgtcctatggggaaatttattttttttaatgtcctgatccttaatgctgcaaattatcagtattcataaagtaaactgattttgcaccacttttttgttactgtgaccacggtataacaatgtacttctagactatatctatgtaaagttattataatggtatctg

SEQ ID NO: 34987 - DNA, 182 bp, Homo sapiens
cactactatagggcgaattggagctccaccgcggtggcggccgaggtacgcggggggagctagcctggcacctggactctgcccatccacagctgacagattccaacagaagtgtatttaaattctccagtagacaatgctgggtaagggagggggtagggctgggttattaagattcaggc

SEQ ID NO: 34988 - DNA, 453 bp, Homo sapiens
atacactactatagggcgaattggagctccaccgcggtggcggccgaggtacgcgggcagcatcttcaagagatggacagtggacaggagccaacagttggaagtcagattcagagagtagtgagcatggctgccttggccatggtgtgtgaggccatagaccaaacctgagctgcagctggactctttcatgcctggcccttggaaagcttcctttcctctcttcagctcaatcagacgctgcagaagccccacgcagaggagcagagcagttatgctcaccccttggagtgcagcagtgttttggaagaatcgtcatcttcccaaggatggggaaaaatagttgcacaatatattcatgatcaatgggtgtgcctctctttcctgttgaaaaaatatcacacccttataccaaccacagggagtgaaattctggaaccgtttctacctgcc

SEQ ID NO: 34989 - DNA, 196 bp, Homo sapiens
cgactcctatagggcgaattggagctccaccgcggtggcggccgcccgggcaggtactttttttttttttttttttttttgcttccctgctgttcatgagctctagaaagctgtagaactattgcttacattttcaccaacatctaggtgttcttatttctttgggctctaaagctttttttttgtctgggggggg

SEQ ID NO: 34990 - DNA, 435 bp, Homo sapiens
tacactactatagggcgaattggagctccaccgcggtggcggccgagttacaagtgcttgtatagacaaatgtattaatttcacttgtataaatacctaagagtggaatggtggaatcagaaggtaggtatatgtttaatgtttttagaaactgccagctattttccaagttagttgtataatttttcattcctactaaccatgtatgaaagcacctgttgctccacctccttgtccacacttggtatgatcagtttttaattttagctattctaacagttgtgcagtggcatctcattgtggttttaacttatatttccctaatgactaatgatattgggcacctttttaatgtgcttattgtctacttctgagtaaatacaaagtgttttgctaaaactattgtgggggctgtattgggatgatctattcatg

SEQ ID NO: 34991 - DNA, 429 bp, Homo sapiens
tatagggcgaattggagctccaccgcggtggcggccgcccgggcaggtactttttttttttttttttttttcaaataggttagttaggaacaactttactcagaagacgtatttgagcaaagacatgaaagaggtgaataaagcatgtggatatctagagacagagcattccagacagaaggaacagcaactggaaaatagcaggggcagagtgtgcctgccactggtcagggcagagagtgtgaggaaacaaaggtaaagaagtaaaattttttccagctatcctgtttctaagttccaaaagctatttcttcttttgaatatttcattttataggacttattctcatcttttgatgaaataccttccctcatgtctcccagggactggtatctttttaagttttcttcagttccctgcactgtttct

SEQ ID NO: 34992 - DNA, 432 bp, Homo sapiens
ctactatagggcgaattggagctccaccgcggtggcggccgcccgggcaggtacttcaaaattcctcactttccagtggttcaaaagcaccacatcagatgactggctccccccaggattcaaagaaggctgcatcgatgctccttctactcttgccacacaggcgacccgatccaagaaagtcactgccacaaggacccgccacaaagaagcctttacaaaaggccttgatgtatcttttcacccacccttgtgactgtgccataccctttctcccgctcttcctcggtgagaaggggtaaagtggttattttgtgccctcgcccaatttggccaaaaccccgctgcgcagctcagcccgggggaaagtccccgcggcagaccccccccgcgtaccttggccgctctagaactaatgggatcccccgggct

SEQ ID NO: 34993 - DNA, 425 bp, Homo sapiens
ctactatagggcgaattggagctccaccgcggtggcggccgcccgggcaggtaccgtccatggcctgttaggctgcacaacaggtggtgagcagcgggccagcaggcattaccacctgaactccatccacctcctgtcagaccagcagtggcattagattctcatagagcacaaaccctattgtgaactgcgccatgcaagggatctaggttgtatgctgcttatgaaaatacaatgcctgattatctgaggtggaacagtttcatcccaaagccatcctccagcccccaccccagtccatgaaaacactgccttccacaaagctggtccctggtgccaaaaggttggggactactgtactctataaatctagtggaaacatttctgctcaaactagattctggacaccagtgtgcggaaatgct

SEQ ID NO: 34994 - DNA, 426 bp, Homo sapiens
tacgactactatagggcgaattggagctccaccgcggtggcggccgcccgggcaggtacttttttttttttttttttttttttttttacggttcatgagatttaaggaaaaaaagcaatctccataacataaaagtgcaagaagcggcagcaaatgctgatggagaaactgcaacaagttgtccacaaggggtagcttaaaataattaagggtgactacaataaacaacagattttcaatacaggggaaacagccttctattggaagattccacctagggctttcatagttagacagaagttgatgcctggcttcaaagcttcaaaggacaatcttactctcttgttagaggctaatgcagcccgtagctttaagttaaggccaatgctcatttaccattccgaaaattctagggccccgtaggaa

SEQ ID NO: 34995 - DNA, 428 bp, Homo sapiens
atacgactactatagggcgaattggagctccaccgcggtggcggccgaggtacgcggggtttcagcgcctgcaggttccgggaggtcagctcccagccgaggacgtcggatgtcatcgtccttgctgctttgccaccccattcccgtcaataaagtggtttgaacccaaaaaaaaaaaaaaaaagtacctgcccgggcgggccgctctagaactagtggatcccccgggctgcaggaattcgatatcaagcttatcgataccgtcgacctcgagggggggcccggtacccagcttttgttccctttagtgagggttaattgcgcgcttggcgtaatcatggtataagctgtttcctgtgtgaaattgttatccgctcacaattccacacaacatacgagccgggagcataaagtgtaaagcctggggt

SEQ ID NO: 34996 - DNA, 601 bp, Homo sapiens
  misc_feature 162, 453, 454, 460, 461, 462, 463: n = A,T,C or G
cgactcactatagggcgaattggagctccaccgcggtggcggccgcccgggcaggtcttgaactcctcacctcgggtgatccacccatctcggcctcccaaagtgctgagattacaggcgtgagccaccacgcccggccagagatccacatctatatttatncacatttatggatgaaaattaaacaggtgtccgggtgcggttactcatgcctgtaatccgagcacttgtggaggccgaggcaggcggattacttgaggtcaggacttcgaggccagcctggccaacatggtgaaatcccatctctgctagaaatacagaattggccgggtgtggtgtcaacgcacctgtagtcccagttacttgaacctgggaggcagaggttgcagtgagccgagattgcaacactgccactccagcctgggtgacagagcaagagaccctgtcccaaannaaaaannnnaaaaaaaaaagtacctcggccgcccgggcaggtacgcggggaattctgcggcaagcgctttgagaagccagacagtgttgcagcccaccgtagcaaaagtcacccagccctgcttctagcccctcaagagtcaaccca

SEQ ID NO: 34997 - DNA, 491 bp, Homo sapiens
  misc_feature 129: n = A,T,C or G
cgactcactatagggcgaattggagctccaccgcggtggcggccgaggtactttttttttttttttttttgagacagtcttgctctgtcacccaggctgcagtgcagttgtgtgatcttggctcattgnaacctccacctccagggttcaagcgattctcccaccttagtctcctgactatctgggactacaggcacacatcaccacacccaacatggtgaaactccatctctacttaaaaaataaataaataaataaataaaccggcatagtggctcacgtctgtaatcccagctactggggaggctgaggtgggaaaatcacttgagcccaggaggcggaatctgcactgagccaagatcacgccattggccctccagcctgggggacaaagcgagactccattctaaaaaaaaaagaaaagttatagaaaaaaatatgatgatatgatttactgaaagcaagtctcaaatgcctaaaaaaggccaaac

SEQ ID NO: 34998 - DNA, 579 bp, Homo sapiens
gcggccgcccgggcaggtaccaggacatgaaggaaagaactataacaaggatgtgaataacttctaaactggtcagccttggacaaaaggaaatctggaaatctcgacttggcctgagagaaacctatcctggcccttaaagtgccaattaaggctgagttgaaaaggagctgggcatcatcaaactgcaaacaaacttagcttaggcacccacagtgtgatgatgtgtttatttccatgaaggagcagtctatggagaagtgcaggaactttcaaagttgcatgggcagagctgcttcttatatgacagaattggcagctgcctgtcacttcacagtgggtcacatgaatatgaagcagagaactggctgtgtgcgtcagcaggggagcttaagactgcagattctggggaatcagcactcactgtgacacatgtgatcctctgtctcctcagacaactgaaggatgatgagaaggggatctctggagccttgaccttctgggccccgaatttctagctagaaaacctcttttcaagacaaaaacatgccaaagtacctcggccgctctagaactagt

SEQ ID NO: 34999 - DNA, 359 bp, Homo sapiens
  misc_feature 88: n = A,T,C or G
aattggagactccaccgcggtggcggccgcccgggcaggtacttttttttttttttttttttttttttttttttttttttttaggaantttttttttttttttttttttatttttttttttttttttttttttttattttttttagtttatttatgttttttagaaaaaaaatttggggttttttaaaaaaaaaaaaaaaatttttttttagggggaaaaaaaaaaattagaggtcaaaaaaaaatgggggggggtttttttaaaaatttttttttaaaaaccttaaaaaggaaaaagggcccccaaaaactttggaaaaaggggggaaaaaaaagggttttcttggggggggaaaaaa

SEQ ID NO: 35000 - DNA, 553 bp, Homo sapiens
tatagggcgaattggagctccaccgcggtggcggccgaggtactttttttttttttttttttttttttggagacaggtctttcaaccaggctgcagtgcagtggtggagtcagagctcactgcagccttgatctacagggctcaagcaatcctcccacctcaggctcttcagtagccagggctacaggcacccaccaccacacccagctaattttttaaaaatttttagtaaaaaggaggtcagactggtctagaattcctgagctcaagcgatcctcccgctttgggttcccaaagcgctgggattacaggcatgagccactgcacccagcccatacataggagttttataacaagcattttgacaaaatatgttgataaggtttggatgtcccctccaagtctcatgttgaaatgtgaactccagtgttagaggtgagcctggtgggaggtgtttggatcatgggggcagatccctcatggatggcttagcaccatccacttggggatgaatgagtttttgctgagttgacaagatccaattgttttaaaa

SEQ ID NO: 35001 - DNA, 662 bp, Homo sapiens
  misc_feature 60: n = A,T,C or G
gactactatagggcgaattggagctccaccgcggtggcggccgcccgggcaggtacctgngataaaaagtgcagttcttctgtttatatttgggtctggcatctgtgagagtgccctggggactcaagatatagactggcagaaacagctgcctgttacaggttaaaaaattgtgcctccctcacaagatatgctgaagtcctaacccccagttccttagaatgtgaccttatgtggaaatagaggttttgcagatttaatcaagttaagatgaggtcattagggtgagcctaataaaatgactggtgtccttacacaaaggagaaatttggacatagacacacacagagggaagatgatatggaaacacagagggagaactccatgtgaagacaggcagaggttggactgatgcaactgcaagcaatggaacattcaattgctggacagcaccagaagctagaagagccaaggacagattttatccacagtctcggatggagcaaggccttgctgataccttgatttcagactttgatcctccagaactatgagacgatgaatttctgttgtttctaagccacacattttgtggtacctcggccgctctagaactagtggatcccccgggctgcaggaattcgatatcaagcttatcgata

SEQ ID NO: 35002 - DNA, 323 bp, Homo sapiens
atacgactcactatagagcgattgagctcaccgcgtgggcgccgaggtactttatttttttatttagtcatttatgattaaccataatcaattctgatcatgaccaatttacccttgagactagtaactgcaggtgctcacaaaaaaatatgcagctgtccttcctgccttaggggatcattcatgaaagtaatttctcacctgaccaaaatgatcgcttaacatttattgcatcattgcccctgtctctgtatactactctaccgaagttttaatttgtcactagtttaaagggccaaatgatctgttttctttcaaatatt

SEQ ID NO: 35003 - DNA, 544 bp, Homo sapiens
gtaatacgactcactatagggcgaattggagctccaccgcggtggcggccggcccgggcaggtacttttttttttttttttttttttttgttagaaacagggtttcactgtgttagccaggatggtcttgatctcctggcctcgtgatccgcccgcctcggcctcccaaagtgctgggattacaggcgtgagccatcgtgcctggccgctgcttggttttaaatgaatcttggatacaggtggccagactaaatggtctctcaacttgtcttcaagtttaggattttaatttttgatatttttcacttctctctggaaatttgttcaattctcaattgttgggggagtgcgcagctgcttcattatgagtttactggctgataatcaaataaatatagaaaatataattgggtcatgtagctatcgctaaccagttttaaaaaatatgtacctcggccgctctagaactagtggatcccccgggctgcaggaattcgatatcaagcttatcgataccgtcgacctcgagggggggcccggtacc

SEQ ID NO: 35004 - DNA, 540 bp, Homo sapiens
  misc_feature 61: n = A,T,C or G
gtaatacgactcactatagggcgaattggagctccaccgcggtggcggccgaggtactttntttttttttttttttatttttttgggatttttagtagagacggggtttcaccatcttggccaggctggtctcgaactcctgacctcaggtgatccacccacctcggcctcccaaagcgctgggattacaggcatgggccactgcgcccagcctctttactgttcattcagtggggcttggggatggagcaaacaaaaacaaaaactgcatgtgttcaggctgccacttttacctggatgcctacactccccatgtgacagattagtcccaaatcccatttggtccctccccagtagttcagcctctagtccttcaacttcatctcataagagctctcctgctcctggtccttcatttgccaaggttctcataaccacacaggtgctccagacatggccagaccagccagggcatgaacaggaggtaatccacagggcaggggaccatgctgctacaaatgggctagcagtattcagtaa

SEQ ID NO: 35005 - DNA, 655 bp, Homo sapiens
tacgactcactatagggcgaattggagctccaccgcggtggcggccgaggtacagagacagaggaaggggggctccaaagccaagagagggaaccccacctgccacagataccagctaggtatatatacagaggctggaggaggcagtgtctgatttgcacaggctcaggggattggtttgactaggcatgtcattcacgtagcccgcaggaaaagctggctctcccaccctagccttttaatatgcaaatgcagggcaccatgatcttctacacaggtggggatacttcggggtgtccatgtatccaggaatgtggggaaagggcaagaagtccacaggaatcgccatgtttgggtggacccactttctaatggctggcatttggatatcgggtaactggcctggctttaagagctggagctttacaagaaacttttccagacgtgctttaaaaaacaaaaacttcctaaggaccccttttcctctctatctgcctaaaataatttatcaataactcctacaacattcccccctgtggagatgccgcactaactgctgttagaggtttgggcgacgatgtcttctggctacttcctgctggaaaggggcgtcgaatggggaacagcagctagggctcctcctggggttgatcta

SEQ ID NO: 35006 - DNA, 434 bp, Homo sapiens
atacactactatagggcgaattggagctccaccgcggtggcggccgcccgggcaggtactcttttacattcccaccagcagtgtatgagagttccagatgttcctttctctttagttcttggtattgtcagtctttttaaatttagccattgattagatgtgtatttgtatctcattatgattttaatttgtgttttactgatggatgatgttgagtatcttttcatgggcttattgaccaaaaatgagtgagactccatcccaaaaaaaaaaaaaaaaaaaaaataaaaatgtgcgcggggctcttcctgctctccatcatggcgcaggatcaaggtgaaaaggagaaccccatgcgggaacttcgcatccgcaaactctgtctcaacatctgtgttggggagagtggagacaggctgccccgagcagccaag

SEQ ID NO: 35007 - DNA, 397 bp, Homo sapiens
gcgtaatacgactcactatagggcgaattggagctccaccgcggtggcggccgcccgggcaggtacactttgaagactttctcaatggcattaacataggcagctgttctcaggtccaatcccaggttatacttcatggctgtgcgcataatttgcctggcagaacgctccattgtgtatgccaagccagagtgcacgatgtctttctcagatgcacccgatatcctgtcttggaactctgccgtgggtacccaggggtctgaaaatctctcatttagtagtcgatagcaaaattgttcatcagcattccttaatatgatcttgctataattagatttttctccattagagttcatacagttttatttgattttattagcaatctctttcagaagac

SEQ ID NO: 35008 - DNA, 313 bp, Homo sapiens
cgcgcgtaatacgactactatagggcgaattggagctccaccgcggtggcggccgaggtacgcggggattctggggttcgtttagaggtttgaattttctcggagaaagacaggccggccacgaggaaaacagaaacaagccgcagcaacatctaagcccttgaaaggatcctgagagaggggggaaagggaaaacagcagcctccagcccatccacttgtgtcttctgccccttcccacctatcttgtccaccccaccatccaacgctgcttgggactggaaatctgtggccgaaggaccgggacgtacata

SEQ ID NO: 35009 - DNA, 459 bp, Homo sapiens
actactatagggcgaattggagctccaccgcggtggcggccgcccgggcaggtaccagcagggggatgtgtttctggggaattgtggctctggaagcttcacggtttcccagaatgtggaaaatatatctgtgcaggatagaaatcctgcccagaggctgtttctgtctcatttgagctctccttcatgtggcagagctggctgtggcgtttaggagcctacattttagaaaagcttacctcaaagttctgcattgagcctgagactggaaaggagatacaataaaacagctgacaggagctttggtagtcacacatgcctgatggggtgcacagggccacagtctctgaaaggcaatttggcattgtctgtccacaatatacttttatccattggtccagcaatcctactctaggaatttttcctacatataaacctgtatgcatacaaaatgataga

SEQ ID NO: 35010 - DNA, 458 bp, Homo sapiens
cgactactatagggcgaattggagctccaccgcggtggcggccgaggtaccgggatgtgatgttggagaactacagcaaccttgtgtcagtggggtatcaagccggcaaacctgatgccttcaccaagttggaacaaggagaaccactatggacactagaagatgaaatccacagtccagcccacccagaaattgagaaagctgatgatcatctgcagcagcccttgcaaaaccaaaaaatactgaagaggacgggacaacgctatgaacacggaagaactttgaaatcatatttaggtttaaccaaccagagcagaagatacaacagaaaggagcctgctgagtttaatggagatggagcttttctccatgataatcatgaacaaatgcctacggaaattgaattccctgaaagtagaaaacccatcagcaccaagtcacaattccttaaacatcag

SEQ ID NO: 35011 - DNA, 466 bp, Homo sapiens
gcgaattggagctccaccgcggtggcggccgaggtacgcggggatgcagtaatcagaaagctattctgatagtctgactgctctgccgatacaggttatattactctcacacaatatgttatcacgtaagggctggggaggacatacatacttaagtgggtaaactgaggttagggacatagggagcttgactgtgattccaagtatgtggtaagctcacaacccccaagattatcttatgctctaaacggtcttgtcatgcgcttttcaagagtcacattagaatctgcctactaagaccatatctagtggctgggctgatttttaatggagcacttccccttgcatgttttgacactatatatccaattcttaagattctttgtctttcaaaacttcatgtgctgtattgaaacttttcattttctcagattaaaggaggtcttttaacaattagcatacttgc

SEQ ID NO: 35012 - DNA, 198 bp, Homo sapiens
gcgcgtatacgacttactatagggcgaattggagctccaccgcggtggcggccgcccgggcaggtacagttgttccccagtatccacaagggattggttccaagacccacctggcagatatcaaaatctgcagatgctcaagtccctgatataaaatttgcatataacctacctacatattcctgtatacttttaaaa

SEQ ID NO: 35013 - DNA, 490 bp, Homo sapiens
tactactcactatagggcgaattggagctccaccgcggtggcggccgcccgggcaggtacttcccatgttaaaagacatttattatcttgttttcctgtcatgggagttccagaaaaagttaaaacagacaatgggccaggttactgtagtaaagcatttcaaaaattcttaaatcagtggaaaattacacatacaataggaattctctataattcccaaggacaggccataattgaaagaactaatagaacactcaaagctcaattggttaaacaaaaaaaggaaaagacaggagtataacactccccagatgcaacttaatctagcactctatactttaaatgttttaaacatttatagaaatcagaccactacctctgcagaacaacatcttactggtaaaaggaacagcccacatgaaggaaaactgatttggtggaaagataataaaaataaaacatgggaaatggggaaggtgataacgtgggg

SEQ ID NO: 35014 - DNA, 450 bp, Homo sapiens
gcgaattggagctccaccgcggtggcggccgcccgggcaggtacgatcttggctcactgcaacctctccctcccgggttcaagtgattctcgtgcctcagcctcttgagtagctgggattacaggcgcgtgccactgcgtccggctaatttttgtatttttagtagagatggggtttcaccatgttggccaggctgatctcaaactcctgacctcatgtggtccacccaccttggcctcccaaagtgctgggattacaggcgtgagccaccgcgctcagcctacaagcaattttttaaaaactgacacctattactgataaaattctctgtttaaaatcctatttactattttaaagataagtattagtttttttttaaatacaataattctgttattgataaaatttaaggcattttcattgccttttgcagatttactcattactacc

SEQ ID NO: 35015 - DNA, 465 bp, Homo sapiens
tatagggcgaattggagctccaccgcggtggcggccgaggtacatctacctaaaggactattatgtggaataatacatactaatgaagtattacatgatttaaagactacaataaaaccaaacatgcttataacattaagaaaaacaataaagatacatgattgaaaccaagttgaaaaatagcatatgccttggaggaaatgtgctcaaattactaatgatttagtgttgtccatactttctctctcttttttctttcttttttttttattatggttagctgtcacatacaactttttttttttgagatggggtctcgctctgtcaccaggctggagtgcagtggcgcgatctcggctcactgcaacctccacatcccatgttgaagtaattcttctgcctcagcctcccgagtagctgggactagaggaacgtgccaccatgactggctaattttctgtattt

SEQ ID NO: 35016 - DNA, 413 bp, Homo sapiens
actactatagggcgaattggagctccaccgcggtggcggccgaggtactttaaatcatctcttgattactttataatacctaatacaacgtaaatgttatgcaaatcattggtatactgtattgtttggagaataatgacaagaaaaaaaatctctgtatgttcaatacagatgcttttttcttcttgaatatttcctatccacagttggttgaatccatgggtgcagaacccacagatacagagggagaactgtaaggagatttgagaagtttcttcaaaaagttccttcagaaagtgacacttgagctggggtttaaagtataagataatgtcaaagaagggagggaagaggatttatttaaaaaccagaaaaaacaaaggaaatgtagacatgcatgaaggtgtggtggg

SEQ ID NO: 35017 - DNA, 479 bp, Homo sapiens
atacactactatagggcgaattggagctccaccgcggtggcggccgcccgggcaggtacgatcttggctcactgcaacctctccctcccgggttcaagtgattctcgtgcctcagcctcttgagtagctgggattacaggcgcgtgccactgcgtccggctaattattgtatttttagtagagatggggtttcaccatgttggccaggctgatctcaaactcctgacctcatgtggtccacccaccttggcctcccaaagtgctgggattacaggcgtgagccaccgcgctcagcctacaagcaattttttaaaaactgacacctattactgataaaattctctggttaaaatcctatttactattttaaagataagtattagttattttttaaattcaataattctggaattgataaaatttaaggcattttcattgccttttgcagatttactcataactacctaacacggaaagaa

SEQ ID NO: 35018 - DNA, 436 bp, Homo sapiens
ctactatagggcgaattggagctccaccgcggtggcggccgaggtacgcgggggctcaaagattgattcaaaagtgtaagacaggccagtggattttaatgtattaacaatataagagtgcattaagttttcggagtctacattgcctttaagaaactatgacttgtagtaagccgggcgcggtggctcacgcctgtaatcccaacactttgggaggccaaggtgggtggatcacaaggtcaggagttcaagaccagcctggccaatatggtgaaagtccgtctctactaaaattacaaaaattagccgggcgtggtggcagatcccttgtagtcccagctactcgggaggctgaggcaggagaatagcttgaacccgggaggtggaggttgcagtgagtcgagatcgtgccactggactccagcctgggtgacag

SEQ ID NO: 35019 - DNA, 459 bp, Homo sapiens
actactatagggcgaattggagctccaccgcggtggcggccgcccgggcaggtactttttttttttttttttttttttcctttttttttttttttaaattgagatggggtcttgtcatgttgcccaggctgctcttgaactcctgggctcaagcaatcctcctgcctcccaaagtgctgggattacaggcataagccatcgtgcccggcccttttggaaattttgtattactgacccatactctgctccttggctataaattcccacttgcttatgctgatatttggagttaagtccattcaccctctaccactgcaaaatcccattacatttgtctatatacctgtcataatggccctgaataaagtcttccttactgggctttaacaattctcattgaataatttttttaaacatgtatagcttaattaaggaggtgagattccaacgcctttgcca

SEQ ID NO: 35020 - DNA, 485 bp, Homo sapiens
actactatagggcgaattggagctccaccgcggtggcggccgcccgggcaggtacttttttttttttttttttttttttggagatggagtctcactctgttgcccaggctggaggagatctcagctcactgcaacctctgtctcctgggttcaagtgattctcctgcctcagcctcccgcgtagctgagattacaggcacatgccaccatgaccagctaatttctgtatttttagtagagacggggtttcaccacgttggtcaggctggtctcaagcttctgacctcaggtgatccacccacctcagcctcccaaagtgctgggattacaggtgtgagccatagcacccggccagaatattttcatctggcttcgcagtaaactgtcataatcagagctgtgatgtcaagttcacagtctcacagtcattttcccagaggtctccaaatcaaacacttatgataaattccctccatgcacatgcc

SEQ ID NO: 35021 - DNA, 472 bp, Homo sapiens
tatagggcgaattggagctccaccgcggtggcggccgaggtacttttttttttttttttttttttgggtttttttttttttttttttttttttttttttttttttttttttttttaaaaccgggaaaaatgtaatttatttcatgcaaagctacattttttcctattttttaacagctaatcaaataaacttttcaaaaaattcattccatcccaataggttaaaattctacaagggaactgcaggtcaatcatttttttaaaaccaaactgggcgaaccctttgcataaataaggccaaagttactaatttgcttaaagggagcactttgcagttttttccaagaacctgcccgggggggcgttttaaaactaggggaacccccgggctgggggaattctatataaagcttatcgataccggcgacctcgagggggggcccggtccccaatttttgttccctttagggggg

SEQ ID NO: 35022 - DNA, 343 bp, Homo sapiens
acgactcctatagggcgacttggagctccaccgcggtggcggccgcccgggcaggtactttttttttttttttttttttttttttatttgataattaatatctggcagaagtttcacatgatcactttactctacccatttcctggaaatgtccccagtttccagcttcttaatgctgtttactcctgtgcgttctcaatctctctcccaggaggtagaatctagtataatctaggcactgaccacttctaaaaattataaattacctcttagtttttacattttgtcctatatttatgactgcagtctttttcagaaggtttattcttcaagggacaggaac

SEQ ID NO: 35023 - DNA, 430 bp, Homo sapiens
tacgactcactatagggcgaattggagctccaccgcggtggcggccgcccgggcaggtacttttttttttttttttttttgtaaagacggggtctggctttgttgccctggctggtcgcgaattcccggactcaagcaacctttctgcctcggcctcccaaaatgctaggattataggcataagccactgtgcctgtccaaaactttatttttaatgacaaaacctattttcctatagctctgcttggaatgctgtatttatcctaagcaccagttttggccctagctggcctgtatacagctttaggtaggctcttgatctagttttgctataggcagggtagatctcagtatttcatattttacttgtggcagagacagtgttaacctttctttcatggatagcggactcattgagaccgattttaac

SEQ ID NO: 35024 - DNA, 475 bp, Homo sapiens
actactatagggcgaattggagctccaccgcggtggcggccgaggtacttttttttttttttttttgggatggagtctcacttcttgcccaggctagagtgcagtggcacgatctcggctcactgcaacctccacctcccagattcaagcaattctcctgtctcagcctcccaggtagctgggattacaggtgtatgtcatcatgcccagctaatttttgtgcttttagtagagatggggtttcaccatattggtcaggctggtctcgaattcccgacctcaggtgatccacccacctcggcctcccaaagtgctgggattacaagtgtgagccactaggcccgacccaattctttaaaccagaataaaataatgatttaaagaaagttaaatatggaggaaacaggggagctttagcacctttgagtagtgaaaagattgtagattttagagacagaaaaacatgagttcaaat

SEQ ID NO: 35025 - DNA, 280 bp, Homo sapiens
tccaccgcggtggcggccgcccgggcaggtaccatccacgtcactgggcacctggccgaacatggccaggtagggctcgtagatgaccgaacggaatatccacctccagcgctgctcattctgcctaaggatcccttgcctggccacgccaaaggccaccatccacaccgcaaagaggaacatgaagaataacaccatcgatcagcattcctctgcagcattataatctttgggttcctaaagtttctgcttaccagtaaaaattgttggatcaattctt

SEQ ID NO: 35026 - DNA, 457 bp, Homo sapiens
gcgaattggagctccaccgcggtggcggccgcccgggcaggtactggctcctcatctcactcgggcttatgccaaagatgtaaaatttggtgcagatgcccgagccttaatgcttcaaggtgtagaccttttagccgatgctgtggccgttacaatggggccaaagggaagaacagtgattattgagcagagttggggaagtcccaaagtaacaaaagatggtgtgactgttgcaaagccaattgacttaaaagataaatacaaaaacattggagctaaacttgttcaagatgttgccaataacacaaatgaagaagctggggatggcactaccactgctactgtacctcggccgcgctctcttccaggacatcaagaagccagctgaagatgagtggggtaaaaccccagacgccatgaaagctgccatggccctggagaaaaagctgaaccaggc

SEQ ID NO: 35027 - DNA, 199 bp, Homo sapiens
tatatggcgaattggagctccaccgcggtggcggccgcccgggcaggtacggtgtggcattgcccacctaaagccccagctactgaggagactgatacagaaggattgcttgaactcataaggctgaacctgcagtgagctgtgatcatggcactgcactccagcctgggcggtaaaagtgagatcctgttccaaaaaa

SEQ ID NO: 35028 - DNA, 457 bp, Homo sapiens
attggagctccaccgcggtggcggccgaggtacagtttttctttgtaattaatattctattaaaccaccacatcacacggattcctttttgaggaaggacttgttgctcagttttggtcagtgcagtcagcagatagcttccagcactttctgcatgactcatatcacccaaggtcacacccttcctggtgcagcttgcacacaatgcctgagtgagatggggtggaactgcccacttcagagctccctgccggttgctgaagccaggactacatttcagtgagattgctcccttagcccaattatacctcttcccccttcctttcacatatgctggtccctagtaaatacattgcaccccaaactctgtcttagcatctgattccagagaacccaacctgagtcatttcttattgggagacattttgaaaccctgtgaataatctgtttgttatta

SEQ ID NO: 35029 - DNA, 473 bp, Homo sapiens
tatacgactactatagggcgaattggagctccaccgcggtggcggccgaggtacatgactctcagtgtctgtggaaacatgattgaagacattataagcgagtgcgtgtgacctataaggaaagtctcattggtagaagagacatgcatggtagaaaggatgatgcacaaaagcagcctgttaaaaatcagcttggattaaacccgcagtcacatctaccagaactgcagctatttcaagctgaagggaaaatatataaatatgatcacatggaaaaatctgtcaacagtagttccttagtttccccaccccaacgtatttcttctactgtcaaaacccacatttctcatacatatgaatgtaattttgtggattcattattcacacaaaaagagaaagcaaatattgggacagaacactacaaatgtaatgagcgtggcaaggcctttcatcaaggcttacattttactata

SEQ ID NO: 35030 - DNA, 343 bp, Homo sapiens
ctatagggcgaattggagctccaccgcggtggcggccgaggtaccaccatgcctggtttattgttttatttttttggcagagatgggtctcactgtgttgcccaggctgatctcaaactcctggccttaagcgatcctcccatctcagcctcccaaagtgctgggattacagacctgagccaccacacctgggcaacagagtgaaacctgtccctgttttcctgctcttactctcacctctgaggcctcctctgcctggaagagattacagggaaattccaggcagcccttgtcaattggttttatgaattctttacctgttccttttaaagacaaggaaact

SEQ ID NO: 35031 - DNA, 383 bp, Homo sapiens
tacactactatagggcgaattggagctccaccgcggtggcggccgcccgggcaggtactttttttttttttttttttttttttcctatatcagaagttaggtatcttactcagattcattgttaaatattgtcccttgaagaccacacattctgtatgtcactcctggctacagtaactcagttggtttgcatccttagggaggtgctgtgtctgaagtgaaaatgtgatgacccatccgtggaggactgtcactgccttggcatctgacaaacaccggcctgtcatttggggcatggattttctttcgactttttatacttattcatgtcaatatacatggtttctaaatgtccgcataataaaagttttggaacaaattgt

SEQ ID NO: 35032 - DNA, 464 bp, Homo sapiens
actactatagggcgaattggagctccaccgcggtggcggccgcccgggcaggtacttttttttactttggcaacaaatatttatacatacaagatgctagttcatttgaatatttctcccaacttatccaaggatctccagctctaacaaaatggtttatttttatttaaatgtcaatagttgttttttaaaatccaaatcaggggtgcaggccaccagttaaatgccgtctatcaggttttgtgccttaagagactacagagtcaaagctcatttttaaaggagtaggacagagttgtcacaggtttttgttgttgtttttattgcccccaaaattacatgttaatttccatttatatcagggattctatttacttgaagactgtgaagttgccattttgtcttattgttttctttgacataactaggatccattatttcccctgaaggcttcttgttagaaa

SEQ ID NO: 35033 - DNA, 470 bp, Homo sapiens
actactatagggcgaattggagctccaccgcggtggcggccgaggtaccaatatgcattcatcaatgtgcacatcagagaacaaaacacccagtgcagtgtgccagatcccagttgagtcatgataggctgggcacggtggctcatgcctgtaatcccagcaccttgggaggccaaggcaggtggattacccaaggtcaggagttcgagaccagcctggccaacatggtgaaaccccgtctctactaaaaatacaaaaaaattagctggatgtggtggtgggcacctgtaatcccagctactcgggaggctgaggcaggagaatcacttgaacccaggaggcggaggttggagtgagccaagatcgtgccattgcactccggcctgggcaaaaagagcaaaactaaatctcaaaaaaaaaaaaaaaaaaggagaaaagagtcatgacgaggccaggcatgacagtggctc

SEQ ID NO: 35034 - DNA, 631 bp, Homo sapiens
actatagggcgaattggagctccaccgcggtggcggccgcccgggcaggtacgcggggtcctcagcttccagccaaaatggcggagaacagcgagagtctgggcaccgtccccgagcacgagcggatcttgcaggagatcgagagcaccgacaccgcctgtgtggggcccaccctccggtctgtgtatgatgaccaaccaaatgcgcacaagaagtttatggaaaagttagatgcttgtatccgtaatcatgacaaggaaattgaaaagatgtgtaattttcatcatcagggttttgtagatgctattacagaactccttaaagtaaggactgatgcaaaaaaactgaaggtgcaagttactgataccaaccgaaggtttcaagatgctggaaaagaggtgatagtccacacagaagatatcattcgatgtagaattcagcagagaaatattacaactgtagtagaaaaattgcagttatgccttcctgtgctagaaatgtacctcggccgctctagaactagtggatcccccgggctgcaggaattcgatatcaagcttatcgataccgtcgacctcgaaggggggcccggtacccagcttttgttccctttagtgaggggtaattgcgc

SEQ ID NO: 35035 - DNA, 653 bp, Homo sapiens
tacgactcactatagggcgaattggagctccaccgcggtggcggccgaggtacacatatcctctgtgggaaaaactgctctcagagtgtgcactctccccacaagccagcgctcaaactggaaaaagtatctcaatgtcctgaatgtgggaaaacctttagccgaagttcttatcttgttcggcatcaaagaatccacacaggcgagaagcctcacaagtgcagtgagtgcgggaagggctttagtgagcgctccaacctcactgcccacctacgaactcacacaggggagaggccctatcagtgtgggcaatgtgggaaaagcttcaaccagagttccagcctcattgtccaccagaggacccatactggggaaaagccttaccagtgcattgtctgtggaaagagattcaacaacagttcccagttcagtgctcaccggcgcatccacactggggagagcccatacaagtgtgcagtgtgtgggaaaatcttcaacaatagctcccacttcagtgcccaccgaaaaacccacactggtgaaaagccttacaggtgttctcactgtgagagaggcttcactaagaactctgccctcacccgtcatcagacagtacctgcccggcggccgctctagaactagtggatcccccg

SEQ ID NO: 35036 - DNA, 505 bp, Homo sapiens
gcgaatcggagctccaccgctgtggcggccgcccgggcaggtactctgcacttttttttgtatgatgcttgaaactaaagacttaactgtttttttccgtatctcctcagccccatgttttagactattttaccccaaaattgtatttattaatttggctatcccatttgaaaaaacaaattgatcttagcatggtggctagcttgaggcagtctttactgagccagtataattttagctaacacagttgtgtctcatgtgaaagtatgattttctttaggttttttttttaattgaaagtaactcgtgaattctctttattatctattctaagggcttgaggatatcatgttatccctggatgagatatccttcccaggcctaacattctgatttaacaacactttcactaaagcctttggccccaccttggctcctgtgcattaatatattgagctatatgattaaaattgaactattttatcctacatggaaagtatcagat

SEQ ID NO: 35037 - DNA, 522 bp, Homo sapiens
gcgaattggagctccaccgcggtggcggccgaggtactttttttttttttttttttgtaagacgaggtcttgctctgttgtccaggcctggacaacacagcatgtgcagtggtgtgaacatggctcactgcagcctcgacttcccaggctgaagtgatcctcccgtctcagcttgagagtagctggaaccacaggtgtgtgccaccatgcccagctagtttttaaacttcttgtagagatggggtcttgtcatgttgcccaggctggtcttgaacttctgggctcaaacgatcctcctgccttggcctatcaaagtgctgggattacaggcgtgagccactgtgctacaccaaatgttgacaaggctgtgtgcaacctgaattgtcatacatttgtggtgaaaggataaaatgatacaatcactttgaaaaaaggtcttaaccagtgtcttacgaaactaaacatagacctacactaggacccagcaatttcactcccaggtatttatccaagagaaatgaa

SEQ ID NO: 35038 - DNA, 603 bp, Homo sapiens
tacgactcactatagggcgaattggagctccaccgcggtggcggccgccgggcaggtacaaaaatataaattggatctagaagaaagggcaattcaggcaatagaaaaattagtagaaatccctttaaaggttagtttgtaaaatcaggtaagtttatttataatttgctttcatttatttcactgcaaattatattttggatatatatatatatattgtgcttcctctgcctgtcttacagcaatttgccttgcagagttctaggaaaaaggtggcatgtgtttttactttcaaatatttaaatttccatcattctaacaaaatcaatttttcagagtaatgattctcactgtggagtcatttgattattaagacccgttggcataagattacatcctctgactataaaaaccctggaagaaaacctaggaaatattcgtctggactttgcacttggcaatgaatttatgggcgctttggaatcctgcagatataataatgataattaaacaaaacactcagagaaactgccaaccctaggatgaagtatattgttactgtgctttgggattaaaataagtaactacagtttatagaacttt

SEQ ID NO: 35039 - DNA, 394 bp, Homo sapiens
actatagggcgaattggagctccaccgcggtggcggccgcccgggcaggtactttggtagaggaactgctgtaaaatctttgttagataattccaacatctctgtcatcttgactttggcatctattaattgtcttttttttctttcaaattgagatgtttctggatcttggcataatgagtgattttctattaaaacctggacattttggatattatgagagtctggatattactttgactttctgttttagctggctttctctgacactgctctaaaagaggcagcgcagggaggcacttcccctgttactaccaactggaggtagaagtctaggttcccactcagcctttactggcaccagggatgggggcctccttgttactgcatggtg

SEQ ID NO: 35040 - DNA, 404 bp, Homo sapiens
gactcactatagggcgaattggagctccaccgcggtggcggccgaggtacgcgggggttcctcttggtaggtgcttctctcccagactaaaatctgattctcagcacaaatctcgccttctatttactcagctattcctcctctttagaaacaaaagaaattagtggatgctgggcttcagaaactcctgaccatggatccaaccaagagaattacctcggagcaagctctgcaggatccctattttcaggaggaccctttgccaacattagatgtatttgccggctgccagattccataccccaaacgagaattccttaatgaagatgatcctgaagaaaaaggtgacaagaatcagcaacagcagcagaaccagcatcagcagcccacagcccctccacagc

SEQ ID NO: 35041 - DNA, 455 bp, Homo sapiens
ctactatagggcgaattggagctccaccgcgggggcgggccagggtccggggggtatttccaggaaattaatgaggctttgtttgatattgaaagcaaagtggacccttccaaggcctggggagaagtgaagagacagatttatgttgcagccttcacagtgcaggcagctgcagagactttgagtgaagtagccctaagaggattctttagagaatccgtattgaatttgtgtggtatgtcactcagaaagaatcgtaatgggtatattgataaattttaaaattggtatatttgaaataaagttgaatattatatatataaaaaaaaaaaaaaaaaaggtacctcggccgctctagaactagtggatcccccgggctgcaggaaatcgatattaagcttatcggtaccgtggacctcgagggggggcccgggaccccacttttgttcccttta

SEQ ID NO: 35042 - DNA, 474 bp, Homo sapiens
tatacgactactatagggcgaattggagctccaccgcggtggcggccgcccgggcaggtacacagaaagagatcattttggagagtaaggcttttaggagttctgtgccagaaatggggttaaagataaaatatatgtttactagtatcataagggttatgatgtatagagggggctcaaactcactaggaatccaagaatacaaaataaagacaggccgggagcagtggctcacacctgtaatcccagcactttgggaggctggggcaggaggatcgcttgaggccaggagttcaagatcagcctgggcaacatagcaagaccctttctctgcaaaaaaatttaaaaattagccaggcatggtggcacatgcgtgtagtcctagctactcaggaggtgagaggattgtttgagcctggaaggtcgaggctgcagtgagccatgattgcaccactgcactccagcctgcgcaac

SEQ ID NO: 35043 - DNA, 178 bp, Homo sapiens
cactatatggcgcgtaggggcatccaccgcgggggcggccgcccggccaggtccccggggaaaaagggtggggagtgccctttcttgaaggaatcccttaagtgcacgtctcccgttttcttttcacatcaatgcagagtccctctgtgaatttacaacacccaacacccatgagttc

SEQ ID NO: 35044 - DNA, 461 bp, Homo sapiens
tatagggcgaattggagctccaccgcggtggcggccgcccgggcaggaccccaccatacaagccaagggagcttcaggtattacaacctggatcatagccacggtcttggcttctctcacttttcccctggttttggtcctcacttccagttctccaaaatctacctgtgtcctgactctggctgtgattctactctaagtgccatacacatccctttcaccactgacagattttgcttccctggttgtgacattcagcattctctactgcagggcttctcaaccttggcactattggcatttgggtctgggtaatgctttgctgtggcaactgtcctgtgcattgtaagatgttaagcagcatccctgacctctgtctactagatgccagtaacaccccatcattgtcaaatgtctcctggggcacaatgtggcacctggttgataaacactgatctact

SEQ ID NO: 35045 - DNA, 385 bp, Homo sapiens
cactactatagggcgaattggagctccaccgcggtggcggccgcccgggcaggtacttttcgtagagacagtgtttcaccatgttagccaggctgatctcgaactcctgacctcaagtgatccacttgcctcggcctcccaaggtgctgggattgcaggcatgagctcactgcgctctggcctctaaaatactttttcttagtaagaacataaccagttacactgaaggctttgaaagtcttcaactggtatgaatcctaaaaaaaaaaaagagcaccaagtctacaggagctttcaggatggagaaagcccttccaaatgggaaaggaggtcaaacggatgctgccattactgaaaacaaatgccttactatgtcattttccta

SEQ ID NO: 35046 - DNA, 466 bp, Homo sapiens
actactatagggcgaattggagctccccgcggtggcggccgcccgggcaggtacccccagctacctcccatgtttccaggtatcattggctcttaactcccacaagcccgccttttggctacccatcccaacaatatcaagagggaatgactaagtatcagctagaaacttagccatgtctcaacattcctggatatctgaaagctgtcgatgcccttttacaggtttatggtgacagacccgtatcatcttaaagtatgttcatagttaaggcttgacttaagaaaataagagaaccagacataatggaaagacctcttcaataatgttgtcatgcctctcagtgaacgtgctcacagtcacgcttggtttggctccccaaacccacaatagaaaaggaaaaatgagtattttgtttttcatctgttttgtatttaaaggcattgggttacttcctcctgccctc

SEQ ID NO: 35047 - DNA, 404 bp, Homo sapiens
ggagctccaccgcggtggcggccgcccgggcaggtacttaaacaattgctttgctgagatgttgttaatatgtagctttgccccagccactttgccccagccattttgacccaacctggagctcacaaaaacatgtgttgtatgaaatcaaggtttaagggatctagggctgtgcaggacatttctttgttaacaaaaagtttacaaacagtatacttggtaaaagtcatcgccattctctagtgtcaataaactaggggcacaatgcactgcggaaagccgcggggacctctgcccttgaaagcagggtattgtccaaagtttctccccatatgatagtctgaaatatggcctcatgggatgagaaagacctgaccgtcccccagcccaacacctgtaaaggg

SEQ ID NO: 35048 - DNA, 540 bp, Homo sapiens
  misc_feature 209: n = A,T,C or G
gagctccaccgcggtggcggccgcccgggcaggtacgcgggggggtgctcttgtgagctgctgctcctgcggttggtgagattacctgggtctagagtgcggagctgctccgtggccacgaggacgtcaccatgcccaaagcaccaaagggaaaaagtgcaggacgggaaaaaaaagtcatccatccatatagtagaaaagcagctcanattacgagagaggcccacaaacaagaaaaaaaggaaaaattgaagaatgaaaaggccttgcgtctcaaccttgttggtgaaaaactgcaatggtttcaaaatcatcttgatccccaaaaaaagagatattcaaagaaagatgcttgtgaactaattgaaaggtactgttacaatgagacagcaaagttatccgtttattcatccgatcatttaattgacatttatggagtgcctagtattttctcaatactgcgctagaggtgctgggaagagagagataaaaataaatgatactctcttgttctcaagttgcttgcaaatttgcatgcat

SEQ ID NO: 35049 - DNA, 479 bp, Homo sapiens
cgactactatagggcgaattggagctccaccgcggtggcggccgcccgggcaggtacgcgggaaggcagtggtaacaacccagactacgcggggatattatcagaaactaattgacctcagaaaaggaaatacccaattccagcctactctagttgtcctgtctccctaaagggataggggagaaactgagaagcacttgtgtaattcacagtccaggaacacaggctcacttaaagattgagacctaagcaagcatgggtctatagaatgttttcccctgcccctaaaccttagcaacacattactaaaagcccatacaaagcagttccttttacctggtccatcatatctggttatcaagaaaatattacaaaacatactaaaggcaaaaaaaaaaatccacaagtagaagaggcaaaagaagcattaaaaccagaatcagatatggcaaggatgctggaattattagaaagaaaat

SEQ ID NO: 35050 - DNA, 477 bp, Homo sapiens
cgactcactatagggcgaattggagctccaccgcggtggcggccgcccgggcaggtacgcgggaaggcagtggtaacaacccagactacgcggggatattatcagaaactaattgacctcagaaaaggaaatacccaattccagcctactctagttgtcctgtctccctaaagggataggggagaaactgagaagcacttgggtaggttacagtccaggaacacaggctcacttaaagattgagacctaagcaagcatgggtctatagaatgttttcccctgcccctaaaccttagcaacacattactaaaagcccatacaaagcagttccttttacctggtccatcatatctggttatcaagaaaatattacaaaacatactaaaggcaaaaaaaaaaatccacaagtagaagaggcaaaagaagcattaaaaccagaatcagatatggcaaggatgctggaattattagaaagaa

SEQ ID NO: 35051 - DNA, 463 bp, Homo sapiens
ctactatagggcgaattggagctccaccgcggtggcggccgtccacatcccgaaggccatagcgtcgagcaaggtcacaggatggcagcaccttaccactcaggctcaggatattgggatctgcttcaacacaggatcctgcaggacctcctcctttgccatatgctccttcagcagttctgtctgcacaatcccccccgcgtacctgcccgggcggccgctctagaactagtggatcccccgggctgcaggaattcgatatcaagcttatcgataccgtcgacctcgagggggggcccggtacccagcttttgttccctttagtgagggttaattgcgcgcttggcgtaatcatggtcatagctgtttcctgtgtgaaattgttatccgctcacaattccacacaacatacgagccgggagcataaagtgtaaagcctggggtgcctaatgagtgagctaac

SEQ ID NO: 35052 - DNA, 471 bp, Homo sapiens
ctactatagggcgaattggagctccaccgcggtggcggccgagccctgcaggcctctgccctgaaggcctggggcgggaagaaggagaacctgaaggctgcgcaggaggagtatgtcaagcgagccctggccaacagccttgcctgtcaaggaaagtacctgcccggcggccgctctagaactagtggatcccccgggcttgcagaatttcgatatcaagcttatcgataccgtcgacctcgagggggggcccggtacccagcttttgttccctttagtgagggttaattgcgcgcttggcgtaatcatggtcatagctgtttcctgtgtgaaattgttatccgctcacaattccacacaacatacgagccgggagcataaagtgtaaagcctggggtgcctaatgagtgagctaactcacattaattgcgttgcgctcactgcccgctttccagtcgggaaacctgtcgt

SEQ ID NO: 35053 - DNA, 435 bp, Homo sapiens
atagggcaattgagctcaccgcggcggcggccgaggtacgcggggatcttattctggccttggcggagttggggatggtgtcgcctagcaaccgctgccgctttggcttgctcgggaccatttggctggacccagagtccgcgtggaaccgctatagggatctgtcagggcccgcggccgctctagaactagtggatcccccgggctgctggaattgcgatttcaagcttatcgatgccgtcgacctcgagggggggcccggtacccagcttttgttccctttagtgagggttaattgcgcgcttggcgtaatcatggtcatagctgtttcctgtgtgaaattgttatccgctcacaattccacacaacatacgagccgggagcataaagtgtaaagcctgaggtgcctaatgagtgagctaactcacattaatt

SEQ ID NO: 35054 - DNA, 599 bp, Homo sapiens
gcgaattggagctccaccgcggtggcggccgaggtacaaattctaactagagtaagagttcctggatgtgtcaaaaatcgtcaccttcccaactcttacatatgtaggacagtgacatgactcctgcccacagaagaacacacctgtcctgccctctcccaacaatggaatgttacaaagcaggacacgcctgagttaaaatgagtatccctgaggttgataattcccaccatgcaccttgaagatggttcttgaatctttcattcagcccgatgaagagaagattcattgtagccagtgtcacattaggtgagaaaaattcagaaggcaacagatttgcgctgctgcaccagcgacccaaaccagcccgtgagtgcatagctactgccagcacttaaagaaaggtgagccgttggatactctgggaaaccgagaaagcaccttctactgcaagcgtgaagaacatgatgcccacagaaaacacaacagaaacaagaagtgagactcttgaaggtaatttccagaatagtacctgcccgggcggccgctctagaactagtggatcccccgggctgcaggaattcgatatcaagcttatc

SEQ ID NO: 35055 - DNA, 517 bp, Homo sapiens
tacactactatagggcgaattggagctccaccgcggtggcggccgaggtacctcaacaaataacttaaagatttccgtgtggcgtgaaaccatttcaatttgaactaatatccttgaaaaaaatcacattattacaagttttaataaatacagtaagaagagctggcatttttctaaaatactgaatttcagatctggagtttattccataaataggtttctttttaattgcttgctttcttggaaacatttgctcaagtattattctctatgaagtgaactctttcatagataccatataaaaactgtattaatatgtgcctcattatagaagcagctggaagaactggatcacacagttacctaactgaaaagtaacttaggaaaaagctctgctttttgtaaaactttaaatcacaggctgaagaataccaaagaaacatttatatagaactcccactagaaattttataaatatatatgtagcatatttatatatattatatttgcctcacca

SEQ ID NO: 35056 - DNA, 456 bp, Homo sapiens
tacactactatagggcgaattggagctccaccgcggtggcggccgaggtactctgccacaaactgatcacactgcttctggtaagggtctggcaggaagctgcagcctttctcaagagcagccaggatctcctgcttggtgctgtttttctccaggttgcgatccaaataacccaccagcttcttgcacacttcgcagaagccaccgtcctttggctgagtcaccgtgaacggtcagtgcaggcagccgcgtgccagagcagaggtgcagcatgctgcacaccagctcagggctgacctcctccagcaggatggacaggatggagctgccgtacgcgggtatctgtctttcacctagtgtgctttttgtgtgcacactattcaccaagctttgttcaaattgcaagggatacagaaaggactgagaaagtgactggtggatgagaaaaacaaaata

SEQ ID NO: 35057 - DNA, 211 bp, Homo sapiens
ctactatagggcgaattggagctccaccgcggtggcggccgaggtacttttttttttttttttttttttttttttttgaaagaaggggtcagggggctccttgatattagggaacagggacctgagcttttacagcccttcatatttattaggtagagtgaatagggaggaagggataactgttggtcagctatttgatttaacacaggcc

SEQ ID NO: 35058 - DNA, 293 bp, Homo sapiens
agggcgaattggagctccaccgcggtggcggccgcccgggcaggtacgcgggtctgatcgctaatgacagttggttctgttatcagccaccaatcatgttaaatacagtatgtagaatggttcaaatctaggaagcatttcgtttgcaaagaaacctgtatatttacagactttaaaagatggatttttttttttttagagagagacttttatatttttaaaaacaaagcttttgaaaaagtgggcagtttcttggggtggggggagggaaagcactaggagatacacctaat

SEQ ID NO: 35059 - DNA, 516 bp, Homo sapiens
tacactactatagggcgaattggagctccaccgcggtggcggccgcccgggcaggtacgcatttacttcataatttcttttttctgaagataacttgttgctttcagttgtgaaattaaagtccaatgagaccaagttagtataattctccaacatcacatctctgtactgggttcatctcactagggagtgccagacagtggacgcaggacagcgggtgccgggcaaccgtgcgcaagctgaagcagggcgaggcattgcctcactcgggaagcgcaaggggtcagggagttccctttccaagtcaaagaaaggggtgacagacggcacctggaaaatcaggtcactcccacccaaatactgcgcttttccgacgggcttaaaaaacggcacaccaggagattatatcccgcacatggctcggagggtcctacgcccacggagtctcgctgattgctagcacagcagtctgagatcaaactggaaggcagcagtgaggctgggggaggggcaccc

SEQ ID NO: 35060 - DNA, 481 bp, Homo sapiens
agggcgaattggagctccaccgcggtggcggccgaggtacgcggggtctctcggccttagcgccatttttttggaaacctctgcgccatgagagccaaggtgagcggttcctggtagtaagcttgggaggtaggagttggcgagtagtagcgaggagacgaaggcaagtccgccatacctcctgaactactgggtttcaagggtgcccaaaaacctgttgggagagagaaggtagtttgtgagagagctagcggttaagtgctatgggtagagagggtgggcttagaaaagggtggaattctgatcttatgttgggagggtgtccaagttactgatgtagttgttacgaccaatctttcatacttcttggttaagaatctgtccggttctaaagagtgcatttcatatccttgctaagcctactaataagcttcatcccttttttttttttttttaattatctgctgcttgtgatcggttg

SEQ ID NO: 35061 - DNA, 513 bp, Homo sapiens
tacactactatagggcgaattggagctccaccgcggtggcggccgtcactttcctgcgcccgctctcctgcgccagcttgaaggcatactcggcaatgcgcagggacttggccttggtgatgatcttcaggctctccaccactcccgccacactctcatgctccaggctgctgtacctcggccgctctagaactagtggatcccccgggctgcaggaattcgttttcaaccttatcgataccgtcaaccttcaaggggggcccggtacccagcttttgttccctttagtgagggttaattgcgcgcttggcgtaatcatggtcatagctgtttcctgtgtgaaattgttatccgctcacaattccacacaacatacgagccgggagcataaagtgtaaagcctggggtgcctaatgagtgagctaactcacattaattgcgttgcgctcactgcccgctttccagtcgggaaacctgtcgtgccagctgcattaatgaatcggccaacgcgcg

SEQ ID NO: 35062 - DNA, 523 bp, Homo sapiens
cgactcactatagggcgaattggagctccaccgcggtggcggccgtcgctcccctgctcctccttggtggctctgtttggagacagggcaggtgaatgctccctggatctgttgctctttttccttcagccttcgggctgacactgactccccgcgtacctcggccgaggtactcaggacttttgcggttctgtaaaatctgtttgtcagtttctttgttagcaaagtatctagtgcagcctcggtttaaataccgaaaattatctggtgaactcaaatgaagtttttctctaatatcttcagaagcaccagcacacaacctataaaagatatgataatttctttcctctttgccttgaacacagatcctagatttctctaggagataatgtgaaacaaatcctccaacaactgagctcttttcattaaaatgtatttctacaaatttcccaaatcgactgctattattgttgcgaacagtcttcgcatttccaaaggcttctaggagtgggttagcttcaac

SEQ ID NO: 35063 - DNA, 460 bp, Homo sapiens
ctactatagggcgaattggagctccaccgcggtggcggccgaggtactttttttttttttttttttttttggagacagagtttcacttttgttgcccaggctggaatgcagtggcacgatctccgctcactgcaacctccacctcccaggttcaagtgattctcctgccttagcctcccaagtagctgagactacaggcatgtgccaccatgcctggctaattttgtatttttggcagagacggggtttcgcgatgttggccaggctggcttcgaacccctgacctcaggtgatccacctgcctcggtctcccaaaatgctgggattacaggcaataagccaccgtgcctggccggctctggcctctttttttaaaactcactagattttatggaagtttcctgacaccgcagcagtctcaagacaccagtgcctgagtcactccctgttcctgacaggg

SEQ ID NO: 35064 - DNA, 445 bp, Homo sapiens
cgcggtggcggccgcccgggcaggtacaactgaataatatgagtcctgccatttcttttatttacactcttgactcagcaagaattatgacagaagtccgcatggttatctgcagcttgttaagtcttctacaatggcttggactttataacccactcagcatttgggttaagctgatataaatccttcatgtaagtgtcatcatcaaggcagcgttccccaatatttcctcccccgcgtacattcgtggtcataaaatctgcaatctgctgtaatgccaataggcctgtggggttcttccccttcttaaattgctcctgtatcattgattccaattcttcacagaaagcagggctttgcagaatcatggacaccctcttcttttgctccatcatgttgaagtcctggcgaaggtctggtgccatgttcctctccctcaagtact

SEQ ID NO: 35065 - DNA, 458 bp, Homo sapiens
gagctccaccgcggtggcggccgaggtacagaaaaacattccgcccacgacgccaccgaagctgtggcccagaatggagaatcgattccatttcaaggctgccacaactcttcggatctcactcacaaaagtctggaagtaatatgggacacctgggctgtaatgggacgagagcccatgacctccgaaatccatggcaacgtaataaaagtcttgcgggagaagagggatgagtctgtcgaaggagctggcattgtccagccagccgtgcaggcagagaactggagggccctgcagggagccccaggctttggctgcgatgtggccccagggcacagccagcttcagctctgagatcagaccttctagaatgtgctggggcgggggcgctggtcaggcctggaccccatcacttgctggctgggtaaccttggagaagttactaaaacgtcttgagc

SEQ ID NO: 35066 - DNA, 467 bp, Homo sapiens
actactatagggcgaattggagctccaccgcggtggcggccgcccgggcaggtacctcagtcctatagctgcaaggaattgaaacctgccaacaacctgaatgaacttggcagaggactctgagcttgtgatgagaacacatccccagcttgaaatcaaatcgacatattgattttagcactgtgagatactgagctgagaacacagttcagctgttcctggacttcagaaccacagaactgagatgataaatgagtggtgtttcaagttgctaagtttgtggtcatttgcttacagtaattgtaaactaatgcacaagtgtaagtttgttttcttaaagaagaaaaaaacggggaaggaggtaagtgttaaaggatcaaaactctgacaaaaggctggttgcagaacatggaaggttggtgcactggaaactatttgtcatgcaagtttatgttaaaataagtagc

SEQ ID NO: 35067 - DNA, 408 bp, Homo sapiens
tactatagggcgaattggagctccaccgcggtggcggccgaggtacacaatggtttattaaaggaatgtatggcccacatcaacctagcaaggattctactggtaaaccttcctatggccaaaggtaaaacaagcaggagtagagtggctggggtggggtgcatgctatggagagagggcagaaagttgtatcaactgcaggggtcttgaagcttactacagagtttcttacttctgtcttcaaatatttacttcttatggccaatgacccaagtgtttcataggctggaaatgcactcttctagactgctcgagacagtcagaaacaggggaggagggaagaatgatactgtggaaagggatggcggggctgacatttagagctagaaaccactactggaccgatgc

SEQ ID NO: 35068 - DNA, 460 bp, Homo sapiens
tactatagggcgaattggagctccaccgcggtggcggccgcccgggcaggtacaaggaccggtgagctttcaaaaggagacacttcgggagactcgccaggggccctcgtatccccggcagcgcgagttttggaggtcagtggagggctctcgcatcatgcatgtaactttcatactcaaagacttaccttcatcctgcatccctcacccccctgcagaaacttggggcttgaattcatttaaaaacatttgcggtttcagaagccttctttttattatgaagctgccaaggagatcttagaatgaaaggcatttttagagatgagaaagaaggaagccaggccaaggctgggccggctctcagccgtgggtctgtaaaggtgacacgtgggacatggccacctgcagaccctgcaggcggctgggcagaggcacccacagggacctgggtttgaatccc

SEQ ID NO: 35069 - DNA, 386 bp, Homo sapiens
gactcactatagggcgaattggagctccaccgcggtggcggccgaggtacgcgggattgtagagactatccgggttagtttgcaagggaagccaatgatgagtaatttgaaagaaattcacctggtgagcaatgaggaccctactgttgctgcctttaaagctgcttcagaattcatcctagggaagagtgagctgggacaagaaaccaccccttctttcaatgcaatggtcgtgaacaacctgaccctccagattgtccagggccacattgaatggcagacgatgtaattgttaattctgtaaacccacatgatattacagttggacctgtggcaaagtcaattctacaacaagcaggagttgaaatgaaatcggaatttcttgc

SEQ ID NO: 35070 - DNA, 371 bp, Homo sapiens
tggagctccaccgcggtggcggccgaggtacgcgggggcaggctcccagccgagtccgttatggccgctgccgtcccgaagaggatgagggggccagcacaagcgaaactgctgcccgggtcggccatccaagcccttgtggggttggcgcggccgctctagaactagtggatcccccgggctgcaggaattcgatatcaagcttatcgataccgtcgacctcgagggggggcccggtacccagcttttgttccctttagtgagggttaatttgcgcgcttggcgtaatcatgggcatagctgtttccttggtgaaattgttatccgctcacaattccacacaacatacgagcccggagcataaaagtgta

SEQ ID NO: 35071 - DNA, 373 bp, Homo sapiens
ctactatagggcgaattggagctccaccgcggtggcggccgaggtactccacacgggggtagtagcaggcaaacttcatcctgtagccatcctcgtcctgcagaccccgctccagggcgcgacgctggcgagggcacttcccctcagcacactggcagacttcagcagaacacaagggttggccaagagtactgctccttacttgggggccccgtaaaacacagaacatctgcgctcggggttgtagtagtcgtactgcggcgggtaggcctaggattgtgggggcaatgaatgaagcgaacagattttcgttcattttggttctcagggtttgttataattttttatttttatgggctttggtgagggaggt

SEQ ID NO: 35072 - DNA, 192 bp, Homo sapiens
ctatagggcgaattggagctccaccgcggtggcggccgaggtacttttttttttttttttttttttggcttgactcaggatttaaaaactggaacggtgaaggtgacagcagtcggttggagcgagcatcccccaaagttcacaatgtggccgaggactttgattgcacattgttgtttttttaatagtcat

SEQ ID NO: 35073 - DNA, 424 bp, Homo sapiens
tacggcgaattggagttccaccgcggtggcggccgcccgggcaggtactgagagggcaaaccaaggacagaatagagatatgtggcagtggcaacccttacaaaatcaaacactggacatgatacatgcctgcccttcttgcttacatgtgaagtataaccaagtgccaaatgcttttataattgactaaagcagccacaccccaccctgctcagaaacagaaagctactgcaggcccctacaaagtgagtgagagtgtgtgagctcctgctgaagaggtgagacccagatcatagttctacttgtttctctatgaagtggaaatacagaaaaagaagcaaatgtaagcataaattgtctatgttttaaaaacagtttcactcatgacttaaatttggtgtcaaactccttgctctagtatgtg

SEQ ID NO: 35074 - DNA, 444 bp, Homo sapiens
gactcactatagggcgaattggagctccaccgcggtggcggccgaggtacctggaaaataacttctttcttttcctctagattttcgaagaagcaaataaatcaagaatagaaacctatatataggaggttgggcctcctgcaaagaatgaagcactttttgttaaatacaggagaggctacttggctgcactaatatgtgcttttttgggaatcttatagagtgtcaccaaattgaactttggaatggcttgaatcatccctggagcatctgtgccgggcagtcatgagtgagtgcaccgtctcccacccagccccattgggcctcacaccctcttcattcctttccccatgaggcaggcaaacacggtcatgaccattttggggttcacttcaaccaggtcttctggcagggcatacactcttgctccaatttttcgggcca

SEQ ID NO: 35075 - DNA, 454 bp, Homo sapiens
gcgaattggagctccaccgcggtggcggccgtggctgcccagacgtatttggcgtcgcagtagccgacaatggcggcctcctggcagcagccatcgcacatcaggttatccacgtagctctgccaaccggccatcttcgagcccttcgcactgcagcgcggacggcgaggagcccccgcgtaccttggcccgctctagaactagtggatcccccgggctgcaggaattcgatatcaagcttatcgataccgtcgacctcgagggggggcccggtacccagcttttgttccctttagtgagggttaattgcgcgcttggcgtaatcatggtcatagctgtttcctgtgtgaaattgttatccgctcacaattccacacaacatacgagccgggagcataaagtggtaagcctggggtgcctaatgagtgagcttactcacattaattgcgttgcg

SEQ ID NO: 35076 - DNA, 356 bp, Homo sapiens
gactactatagggcgaatcggagctccaccgcggtggcggccgcccgggcaggtacccgagccccgcttaccctgccttttcatgtgggtcaggatatgtgatctccaaggacatcttcaagtggctggcaagcaactcggggaggttaaagacctatcagggtgaagatgtaagcgtgggcatctggattgctgccaaaaggacctaaaagataccaggacagtctgtggctgtgtgagaagacctgtgagacggaaatgctgccttctcctcagaattctacgcgggaactgacagaactgtggtaactgaaggaacagcgcggatatccttggcaatgtctaaccagataaca

SEQ ID NO: 35077 - DNA, 459 bp, Homo sapiens
gactactatagggcgaattggagctccaccgcggtggcggccgaggtacagcagcaacagcaaaggaatctctcactacatgaatacatgagtatggaattattgcaagaagctggtgtctccgttcccaaaggatatgtggcaaagtcaccagatgaagcttatgcaattgccaaaaaattaggttcaaaagatgtcgtgataaaggcacaggttttagctggtggtggaggaaaaggaacatttgaaagtggcctcaaaggaggagtgaagatagttttctctccagaagaagcaaaagctgtttcttcacaaatgattgggaaaaaattgtttaccaagcaaacgggagaaaagggcagaatatgcaatcaagtattggtctgtgagcgaaaatatcccaggagagaatactactttgcaataacaatggaaaggtcatttcaaggtcctgtatta

SEQ ID NO: 35078 - DNA, 434 bp, Homo sapiens
tatagggcgaattggatgctccaccgcggtggcggccgcccgggcaggtactttttttttttttttttttttttttcaggctttccagctcccgctgtctctgtcgttcctctctttggcgcttcactactttctcataatcattaggaaacatagggtcatattcgtcagctaagggaatcagaacttccccttccaaaaaacccactgggaacaggatccttcagcccagctgctacatgcggtggagtgtccacaatttgccggtcatctgaggagccacctcgcttcaggtcaatgactggggcgaggactgtactgcggcgggtaggcctaggattgtgggggcaatgaatgaagcgaacagattttcgttcattttggttctcagggtttgctataattttttatttttatgggctttggtgagggag

SEQ ID NO: 35079 - DNA, 477 bp, Homo sapiens
tactatagggcgaattggagctccaccgcggtggcggccgcccgggcaggtacttccaacagtaagtggaaacacagatattcaagttgagatagcactggccatgcaaccattaagaagtgagaatgctcagttacgaaggcagttgagaattttgaaccagcaactcagagaacaacagaaaactcaaaaaccatctggtgctgtggattgcaaccttgaattgttttctcttcagtcattgaatatgtcactgcaaaatcaattggaggagtcactaaagagccaggaattactgcagagtaaaaatgaagagctgttaaaagtgattgaaaatcagaaagatgaaaacaaaaaatttaatagtatatttaaagacaaagatcaaactatacttgaaaataaacagcaatatgatattgagataacaagaataaaaattgaattggaggaagccctagtcaatgtgaaaagctc

SEQ ID NO: 35080 - DNA, 305 bp, Homo sapiens
  misc_feature 32, 57: n = A,T,C or G
agctccaccgcggtggcggccgaggtactttntttttttttttattttttttctttnctttctttttttcttttgttcatttttttgttttttttgttcaaaattcatccaatatttattgaatcgggaacggttgcaaactgttgccacaatcaaaaacccacccatcctgtgcttttttggcttccccttgagaaggatgcctgaggcgggatgtccccccaaactccaggggacaactggggaaaacatggggtttgcaaagagatttgatgaaaccacgggacaggaggagggtggggtgg

SEQ ID NO: 35081 - DNA, 371 bp, Homo sapiens
atacgactcactatagggcgaattggagctccaccgcggtggcggccgcccgggcaggtacgcgggggagacttctccgccgcctccgccgcagacgccgccgcgatgcgctacgtcgcctcctacctgctggctgccctaaggggcaacttcttccccaacgcccaagaccttaaaaaaaacttggaccagcgtggttttcaaggcgaacaacaaccggttaaccagggttatcagtgacctgaatggaaaaaacattgaagacgtcattgcccagggtattggcaagcttgccagtgtacaggtgaaatgatatgttactggtattcgcttcaaaatcatctgagtgtggggtaattgagtacctcggc

SEQ ID NO: 35082 - DNA, 574 bp, Homo sapiens
ggcgaattggagctccaccgcggtggcggccgaggtacaatatgatggagtctttctctgtcgcccaggctggagtgcagtggcacgatctcggctcacttagaaacagggtttcgccgttttggccaggatggtctcaatctcctgacttcatgatccaccctcctaggcctccaaagtgctgggattacgggcatgagccaccgcgcccggccagaatagtcctaatttttaactcttcagagagtgaaggaataactccaaatagactcccagaagttatgttcagataagtaaaccatcatgcttacattcagaaagttctgcttctcaggtaacttaaatggaaatggaaatgatgagtgctgggaagaggtattaagtagctcaaagaatgcccttggcaataaactggggtctttaacctatgtgaagaatttgaataaaatgttgaaatgtgaaagtgaaaaatgagatatttaaataaaataccaattttaatatatgtagccaaatgtataagttaaagattacccataaatatttgtcaattttattcaaaactttaaattct

SEQ ID NO: 35083 - DNA, 260 bp, Homo sapiens
actatatggcgaattgcagctccaccgcggtggcggccgcccggcaggtacacgatcccagactggttcttgaacagacagaatgatgtaaaggatggacaatacagccaggtcctagccaatggtctggacaacaagctccgcgaagacctgaagcgactgaagaagattgggccatagaggctggtcacttctggggccttcgtgtccgaggccagcacaccaagaccactggccgacgtggccgcaccgtgggtgtg

SEQ ID NO: 35084 - DNA, 533 bp, Homo sapiens
acgactcactatagggcgaattggagctccaccgcggtggcggccgcccgggcaggtactgtggcatggcgcagtgggtgacagatggccacatagcggtcaaaagccatggccagcagcactgtggattccatgccagataacgagtggatggcaaacatctgtagcagacaagcatcaaactgatggagtggaattgaaccagaagatggccagcattttgggcatggatgacgtggagatgaggatgtcaatgcctgaaagcatgcaaagaaatatatacatgggctcatgcaggctgtgctcagtccgcacaatgtagatgattgtcaagttacctagcacagcaataaggtagagggagcacaatgggaaggccaaccagaactgagcctcttctaaaccagggaggcctattatgatgaagtatgtagcacgtggattcattgccattgggatccaccatcatgaagaagctgaactgtgaccagcaccaggcaggtagaggctcaaccgtatggaaggaatgtgtg

SEQ ID NO: 35085 - DNA, 523 bp, Homo sapiens
gcgcgtaatactactcactatagggcgaattggagcttcaccgcggtggcggccgggcaaaggagaaagaagatccaggccctcatggtgctgggaaccctcagtggcaggcaggcaggcggcaggcagagcgcgctctccgggcagtctgaaggaccgcgggaatgtccccgcgtacctcggccgctctagaactagtggatcccccgggctgcaggaattcgatatcaagcttatcgataccgtcgacctcgagggggggcccggtacccagcttttgttccctttagtgagggttaattgcgcgcttggcgtaatcatggtcatagctgtttcctgtgtgaaattgttatccgctcacaattccacacaacatacgagccgggagcataaagtgtaaagcctggggtgcctaatgagtgagctaactcacattaattgcgttgcgctcactgcccgctttccagtcgggaaacctgtcgtgccagctgcattaatgaatcggccaacgcgcggggagagg

SEQ ID NO: 35086 - DNA, 232 bp, Homo sapiens
cgcgtgcgccgcccggcaggtaccgggctcctcacagctccactaggcactgccccactggggactgtgtgggggctccgaccccacatttcccttctgcaccttcctagcagacgttctctatgagggctccacctctgcagcaaacttctacctgaacatcaaggcatacatcaaggcatttccatacatcctaggtggtggtgaaatctaagtggaggtaaccaaacat

SEQ ID NO: 35087 - DNA, 577 bp, Homo sapiens
gtatacgactcactatagggcgaattggagctccaccgcggtggcggccgcccgggcaggacttgggacagttacaggcatgctgctattgccatgatcttcgggaagctgaagtgatgagcagcagtgtgtgattctgaggacacagggggctggggtctaggagctatctcaggtgggctcagtcagtgccatcctcccttttggtgcctccctagaagtgctgagaagatgcaaaaccaaaagcttttactccaacattgcttagccaagctaagcacatgcattccctatgattcagcaattctgctcctagcatgtatcccagagaattgtcccatgggtccataggggcatataagaatggccattgcagcaaagttctggttggggtagggggagctgaaagtcatctggtgtccacaactggaggaatggatggataaaatgggatggatgcacaagtgggcagacagatgggtgaaaggatggtcagtccttacatggaccagtttccttattcttaggctaaggattagcatctccaggcaaaaggaaaacgtttctggattccctt

SEQ ID NO: 35088 - DNA, 606 bp, Homo sapiens
  misc_feature 167, 168: n = A,T,C or G
ggagctccaccgcggtggcggccgcccgggcaggtacttttttttttttttttttttttttttttttttttttttttttttttttttttttttttttttttttggtttttttttttttttttttttttttttttttttttttttttttttttttttttttttttttnngggggggggggggcctttttaaaaaacccccttttttccagggggaaaaaaaaaaaaattttgaaatatacccccggggggctccctttttgggggggggggggtcttctcttaaaacaaaaaaaaaaggggggaaaaaaaaaaaaaggggcaaaaaaattttttatttccccccccccccaggggggggttcaaaacccggggggggaaaaaattttggggtgtttttttaaaaaaaagggaaaaaaaaggggtgggggggaaaaaattttaaaaatttccggggggggaaaagggggaaaaaacccccccccccccacaaaaataacgcgccaccccccccgggggggccccccccccgggtttttcaatttgggggaggcccccccccccctcccacaaaaaaaaaacggggggggttttttgttaaaaaaaaaa

SEQ ID NO: 35089 - DNA, 565 bp, Homo sapiens
gtacatttttgtaaaacttcaaagatacttacctagtaatatagtatagaatttatattctgaaagctgtgtccactaaaagattaacagtggttatctctgggtgattttttctgttcttttttgttcatctgtccatttttcctaaaaacagatttctttagtcataaaaataataaaatataaagtattggaaaacagtgaatatttgaatttcattcatttgaataagcattcaaatgaactgcccagtgaacttataaagacagtggatatacttaaaattcttgttgtgaggacataaaatgataggtaaaagttgcattacctctgggactggaagctggaggagtcaactcgatggttattacagagccattgctgtaagggacagccttgacatctgtgaaatggggataaaattagcctagacatgtggagaagatcaaatgaggtattgagtgtgtgagctgtgttaggctggctcctactctctccccttgcactagcagaaccagtgcccagtcagatacttgggaagggctgaaggagggtctcacctgtg

SEQ ID NO: 35090 - DNA, 628 bp, Homo sapiens
  misc_feature 526: n = A,T,C or G
ctactatagggcgaattggagctccaccgcggtggcggccgcccgggcaggtacgcggggagctgccgctgagccgccggacggacgctcgtcttcgcccgccatggccgagagcgactgggacacggtgacggtgctgcgcaagaagggccctacggccgctctagaactagtggatcccccggctgcagaattcgatatcaagcttatcgataccgtcgacctcgagggggggcccggtacccagcttttgttccctttagtgagggttaattgcgcgcttggcgtaatcatggtcatagctgtttcctgtgtgaaattgttatccgctcacaattccacacaacatacgagccgggagcataaagtgtaaagcctggggtgcctaatgagtgagctaactcacattaattgcgttgcgctcactgcccgctttccagtcgggaaacctgtcgtgccagctgcattaatgaatcggccaacgcgcggggagaggcggtttgcgtattgggcgctcttccgcttnctcgctcactgactcgctgcgctcggtcgttcggctgcggcgagcggtatcagctcactcaaaggcggtaatacggttaatcacagaatcaggggataacgc

SEQ ID NO: 35091 - DNA, 644 bp, Homo sapiens
ctactatagggcgaattggagctccaccgcggtggcggccgcccggcaggtacaattcatagggacgaccaatgaggacagggaatgaacccggctctcccccagccctgatttttgctacatatggggtcccttttcattctttgcaaaaacactgggctttctgagaacacggacggttcttagcacatttgtgaaatctgtgtagaaccgggctttgcaggggagataattttcctcctctggaggaaaggtggtgattgacaggcagggagacggtgacaaggctagagaaagccacgctcggccttctctgaaccaggatggaacggcagacccctgaaacgaagcttgtccccttccaatcagccacttctgagaacccccatctaacttcctactggaaaagagggcctcctcaggagcagtccaagagttttcaaagataacgtgacaactaccatctagaggaaagggtgcaccctcagcagagaagccgagagcttaactctggtcgtttccagagacaacctgctggctgtcttgggatgcgcccagcctttgagaggccactaccccatgaacttctgccatccactggacatgaagctgaggacactgggctttaacactgagttgtcatg

SEQ ID NO: 35092 - DNA, 240 bp, Homo sapiens
tacactactatagggcgaattggagctccaccgcggtggcggccgccatcgccgtcgcttggcttcttctggactcatctgcgccacttgtccgcttcacactccgccgccatcatggtgaagctcgcgaaggcaggtaaaaatcaaggtgaccccaagaaaatggctcctcctccaaaggaggtagaagaagatagtgaagatgaggaaatgtcagaagatgaagaagatgattgcagt

SEQ ID NO: 35093 - DNA, 402 bp, Homo sapiens
ggccgaggtaccatatcctaaggctgcacagagcatgaggcccagccttgtaaacgatttttccctcctagacctctgggcctgtgatgggaggggttgccatgaaggtctctgacatgccctggagacattttccccattttcttggtgattacttactcaaatttctccagtgggtttgaatttctccccagaaaatggatttttcttttctatcgcattgtcaggttgcaaatcttccaaactttaatgttctgctttctcttgaatgctctgccacttagaaatttcttccactagatatcctaatcatttctctcaagttcaaagttccacagatctctaggacaaggcaaatgctgccagtctctttgctaaagcatagaaagagtcacctatgct

SEQ ID NO: 35094 - DNA, 396 bp, Homo sapiens
  misc_feature 301, 302, 355: n = A,T,C or G
agggcgaattggagctccaccgcggtggcggccgaggtacttttttttttttttttttttgatagagatgaggtctcactgtgttgtccaggctggtctcaaattcctggactcaagcaatcctcccacctcggcctcccaaagtgctgggattacaggcatgagccaccacgcccggccacagtattttttaaatgccagttaggttttataaaaaggtagattttttataactcccaacacaagaaatgacagggttgatgcttgcatgacttttggcaaactaaacttccaggaaagnnccctaggttttacaaagatgcttttgaggtgaccattagttcacaaagagatntgtttgcaaactataaccagaacacaggggatgataaaaga

SEQ ID NO: 35095 - DNA, 511 bp, Homo sapiens
tatagggcgaattggagctccaccgcggtggcggccgaggtacagacgcaagccgtcacacctggttagcttcatttttttgcagagacgagttctatgttgcccaggcaaatctgttaactcctgagctgaagaaagcctcatgcatcgacctcccaaagtgttaggattacaggatcttgccaacacaggagtatctcctgatcaatttttttttgagacgaagcctcgcctttgtcgcccaggttagaatgcaaaagcgccatgtcttttcactgcaacctttgcttgctgggtttaagtgattctcctgcggcagcctcccgagtctctgggatgacacgcgactgccccacgcccggctaatatttgtatttttagtagaaacgagatttaaccacgttagccaaactggtctcgatccgcacgcctcggcctcccaaagtgctgggattacaaaatcggaaaaattattccctagaaaacggcgaaattcaatattaaagctctt

SEQ ID NO: 35096 - DNA, 450 bp, Homo sapiens
  misc_feature 239: n = A,T,C or G
tacgactcactatagggcgaattggagctccaccgcggtggcggccgcccgggcaggtacaccaaggtggtgcattaccggaagtggatcaaggacaccatcgcagccaacccctgagtgcccctgtcccacccctacctctagtaaatttaagtccacctcacgttctggcatcacttggcctttctggatgctggacacctgaagcttggaactcacctggccgaagctcgagcctnctgagtcctactgacctgtgctttctggtgtggagtccagggctgctaggaaaaggaatgggcagacacaggtgtatgccaatgtttctgaaatgggtataatttcgtcctctccttcggaacactggctgtctctgaagacttctcgctcagtttcagtgaggacacacacaaagacgtgggtgaccatgttgtttgtggggtgcagaga

SEQ ID NO: 35097 - DNA, 465 bp, Homo sapiens
agggcgaattggagctccaccgcggtggcggccgaggcaccaggtacttttttttttttttttttcgctgggatatcttacagaggaaggaaaaattaaccttttttactttctttctcactttttaaatcagccaaagtcaagcccgtttgccaacctgcatgtccatgcctgtaagcccttctcttggccaaggaagaaaggaagaaatgaaaaaagaaacccaggggtctgtatcccctgattaaacacagcacagctctccaggcagacatgcccggtggcggctcctttgcaccattgacctcaggccagacacctaagcgccaacaatgggacctcggccttccggctaggtttgccccaggctgggcaggaaaccatctcggccgctctaaaactagtggatcccccgggctgcaggaattctatattaagcttatcgataccgtcgacctccagggg

SEQ ID NO: 35098 - DNA, 320 bp, Homo sapiens
agggcgaattggagctccaccgcggtggcggccgcccgggcaggtacgcgggaaggaagttgtggaagaggcagaaaatggaagagacgcccctgctaacgggaatgctaatgaggaaaatggggagcaggaggctgacaatgaggtagacgaagaagaggaagaaggtggggaggaagaggaggaggaagaagaaggtgatggtgaggaagaggatggagatgaagatgacgaagctgagtcagctacgggcaagcgggcagctgaagatgatgaggatgacgatgtccattccaagaagcaaaatacctacgaggatg

SEQ ID NO: 35099 - DNA, 451 bp, Homo sapiens
atacgactcactatagggcgaattggagctccaccgcggtggcggccgcccgggcaggtacatgcccatttatgggtctggttggtctctacagaggcagcaaagggaaaggaggaagactttttcccagatctctctaccttaaagcatggagccaagtagcttgtattagtcctaggattccttttctcctgcaaaactggtggtagaaacagtggcatgcgggggatggtacatcacaaaatacattttgatatcccaaagaagcaagacttgcaagtaggcgttttaaacataactaatctacagctacaaagttctactcttgatagcatttacctttttggggagtctcccaggctccaaaggataaaagcagagtagaatcagtataacatatacacagaagtccgtattgtaaaggctataaagatttgcagcacagtgagaa

SEQ ID NO: 35100 - DNA, 448 bp, Homo sapiens
acgactcactatagggcgaattggagctccaccgcggtggcggccgcccgggcaggtactgttcacagtatagataagaaaattaaagaaacttgcccaaggccacaaagccactaaggggtgaaccatgattcaaacttaggtttgtctgtcttcagaagttaacttcctaaccactgaatcatatttcatctgttccactaaatacatttttctggggcttagcaatgccagtttatttacctaagattatcaacaaacgagtggtaataccaggactcaaactcaagccatcaacactaagtcagtgagatcttcatcaccttacactgccccacaataaccccaacagtaaccctgtatacagtcagctgtattcacaggccagacacaagaggaaaaaggagagggaaaaggctactcaggagtcacaggcatagaatgctgc

SEQ ID NO: 35101 - DNA, 446 bp, Homo sapiens
actactatagggcgaattggagctccaccgcggtggcggccgaggtacgcggggggagctggcagagaccagagctgccaccgctgctgcttccaggagtgtgcaggtggcagctgccgctgagcccgcggcggaggatggcggggcttgttccagaaggcttgagggtccccgagtgcaccgccctcccaccaatttctggtttttcctgttggagcccaaggagccagggcagaatgaggaacatgatgtttcttaccgacagttactcatgacgtctccatccaggactgaggggggcatccttctccatctaggactgggggcatccttctccatccagtattgggggtcttcctcctccatccaggacttgggggtcatcctcctccatccaggacctgaggggtgtccttttctgcgcttccttggatggcagtctttcc

SEQ ID NO: 35102 - DNA, 448 bp, Homo sapiens
cactatagggcgaattggatctccaccgcggtggcggccgaggtactttttttttttttttttttgttttcatttagaaagaagatgaaagtgaaaacagaatagtcagattactgaaaccaaatgtcatcttaagaagcgaccttgtcagcttagctaaatagtaattccttccagtcatattcctcaatccttatctgcttcataggttatattatcaatgacaaaaaggactgtaactctgacatggacaatggctacagaaaacactaatttttgatattaaaattattcttgatggaattggttaaatatactataaaacttggcttataatcaggataaatcttaaacttgagggtctttaaaaatacatttttggcacttacctttcatcttatattactaatgatgggaatctcaaacatataaaaaaagaattcagttt

SEQ ID NO: 35103 - DNA, 449 bp, Homo sapiens
cgactactatagggcgaattggagctccaccgcggtggcggccgcccgggcaggtacctaactgccgagatcctggagctggcgggcaacgcagcccgcgacaacaaaaagacccgcatcatcccgcgccacttgcagctggccatccgcaacgacgaggagctcaacaagctgcttggtaaagttaccatcgctcagggcggtgttctgcctaacatccaggccgtactggaatgccatcagccagcaggcccctgccatcatctatgacttctatctgtggctcactggaaggaaacccaggcaaggccaagatggctcaaagagcaaccagccacctctgcagcctgccacctcctgctggcaagatttgtttttgcatcctgtgaagagccaaggaggcaccagggcataagtctactcacttatatctgtctggaacataacgc

SEQ ID NO: 35104 - DNA, 212 bp, Homo sapiens
atacgactcactatagggcgaattggagctccaccgcggtggcggccgcccgggcaggtacatttaaaattatcatcataaatttatgtgcccaaacccctcccaccccattccccctgaaaccaactgagctattttctgaattaaatttgaataacgaaataaatttgaataatcaagaaaaaatacacagcttgacagaatgccttttt

SEQ ID NO: 35105 - DNA, 457 bp, Homo sapiens
tacactactatagggcgaattggagctccaccgcggtggcggccgcccgggcaggtacacaatggtttattaaaggaatgtatggcccacatcaacctagcaaggattctactggtaaaccttcctatggccaaaggaaaaacaagcaggagttgagtggctggggtggggtgcaggcaatggagagagggcagaagggtgtagaagctgaaggggtctagaagcttactcctgagtttcttccttctgtcttcaaatcttttacttcttatggccaaagaacccgctgtttcataggctggagatgccctcttctagactgctcgagacagccagagacaggggaggagggaagaaggatactggggaaagggatggcggggcaaacatttaaagctagaagccacttctgggccaatgctaaagtttctgtccctaagcctaaaaaagccagtgt

SEQ ID NO: 35106 - DNA, 448 bp, Homo sapiens
tacgactcactatagggcgaattggagctccaccgcggtggcggccgaggtactttgctttagaaaatatcttagtattattacttttgttttccagtaaccttgctaagcttctgaagaacttttctctcatgttttctggttcaatttctgcttcattagtatctaagctactgaggttatcaccacccatgctttgagacatcatgggaaaccacaaaaatgacccattatcttgaagtgggtgtggctctggagattcacattccattctatcttccatagactgaagctgggtgcctaaagactcctttgcagaatccagagggatcatttcttccatagaaacttcctgcccatatgtgccctgtgagacctgctgtctaggttcatcaagctccctctccaaatcttccagcaaagtcaccacctcttctccactctcagg

SEQ ID NO: 35107 - DNA, 450 bp, Homo sapiens
atacgactactatagggcgaattggagctccaccgcggtggcggccgaggtacagaggccggtgggctccctgacatcccttccaggcaacctgaaagtactgaaatagcttatggccctgtgccagggaccttggcccaagctgctgacctccagggtggggagggagctacccccaggagaagagtcactcagacagcagtatgagcaagccagccagcagctccgtgcctgcacccagctcaggggaatcccagggggttcagatgcccaggaaggaaaaggggacagcgctactgctatggaatgagaccaccacttctcctgttgtccttcccagcttctccccaacctccccttttccctagtttataagacaggagaaaagggagaaagcaaaaagctggaaagaaacagaagtaagataaatagctagacgaccttggcgcc

SEQ ID NO: 35108 - DNA, 457 bp, Homo sapiens
tacactactatagggcgaattggagctccaccgcggtggcggccgaggtacctctttgcctgtgggcctttttccccctagacatggtggcatacacaataagtgtgtaggaaaagccagaagtgccacaaagttaatgtcttggaagcatctgtattccaatgttaagcaaggatttggtggatgaaaagcacagtttcctttccccttgatgggaataactcttagttatatctgacactgtcttccagactttcccagcaaaactgagctccagttgcccagatgggtaaccagcttgaaaattcatactttattccttccctgctctgtctactttactactccattcccagtatctaataatttgatgatttttaacttccagtataaactcttttacaagaagccttgcctcaggatcggtttttagaagtgccaagccaagccaggttgt

SEQ ID NO: 35109 - DNA, 289 bp, Homo sapiens
gcgaattggagctccaccgcggtggcggccgaggtactctggatatgggaggagctcagggttgttggctaagatgtaattttaaggaaacactttatatttcataccaagtaagaatttcaatggcaatgaatattaccacatagctgtatactgtaactcagggattctgtcagatgagtgcaaacattacccgtgctgtaaccatccagagtcccagggtcacatttggcagccaaaagtacctggcccgggcggccgcttcttaaactaagtggatcccccgggc

SEQ ID NO: 35110 - DNA, 270 bp, Homo sapiens
tggagctccaccgcggtggcggccggcctgggcagacttagatgctgtccatagctttgaactcgctgagggcctgcaccgggttcacgtgcttcttctgagatgcccgattaatcttggtctgtgtctcatcctgtttctctctcttcaccaatggctttttctctggtgccttcatcttccatgacacccccgcgtaccctgggccgctctagaactagtggactcccccgggctcgcaagacattcgatattcaagcttatctgata

SEQ ID NO: 35111 - DNA, 394 bp, Homo sapiens
tacgactactatagggcgaattggagctccaccgcggtggcggccgcccgggcaggtaccaaggattttctattgcagcagaccatgctacgagtgaaggatcctaagaagtcactggatttttatactagagttcttggaatgacgctaatccaaaaatgtgattttcccattatgaaagtttcactctactttttggcttatgaggataaaaatgacatccctaaagaaaaagatgaaaaaatagcctgggcgctctccagaaaagctacacttgagctgacacacaattggggcactgaagatgatgagacccagagttaccacaatggcaattcaaacccttgaggtttcgggcatattggaaatgctgttcctgatgtatacagggctt

SEQ ID NO: 35112 - DNA, 287 bp, Homo sapiens
cactactatagggcgaattggagctccaccgcggtggcggccgaggtacttttttttttattttttttttttttcggagagatactcttgttctattggccaggatggattgcagtggtgcgatctcagctcactgcaacctccacctcctgggtttaagcgattcttctgctttagcctccctagaaactgggattacaggcacacgccaccttgctcggctgatttttgtatttttagtaaagaacagggttttggttgttgcccatgctggtcttgaacacctg

SEQ ID NO: 35113 - DNA, 200 bp, Homo sapiens
tacgactactatagggcgaattggagctccaccgcggtggcggccgcccgggcaggtacgcggggtccagagtgcttgctaccgtgttcggagtctcgctgcctccctcccgcgggggtttctcctctttttgaaaattccgtctgtgggatttttagacatttttcgacatcagggtatttgttccaccttggccaggc

SEQ ID NO: 35114 - DNA, 209 bp, Homo sapiens
tacgactactatagggcgaattggagctccaccgcggtggcggccgaggtacttttttttttttttttttttttttttttttttacttttttttttttttttttttttttttttttttttttttttaaaaacaagcaaattttattaaaggaaaattttgcaggtttaaggtttgcaggggaaattttgtaggtgaaaaggtttacttt

SEQ ID NO: 35115 - DNA, 459 bp, Homo sapiens
actactatagggcgaattggagctccccgcggtggcggccgaggtactcaaagacgaatcatgaaaaagaaaaaaaactttatttcaaacaggttcagtgatatatgtgtgtgctacagcaaaggctggttgtggcaaagtttcatttcaaactgtatgatgtgggctgggcaaggtggctcacgcctgtaatcccagcactttgtgaagcccgaggtgggctgatcaccctgaggtcaggagagaccggcctagccaacatgctgaaaccccgtctctactaataatacaaaaattagccaagtgtggtggcgcgcacctgtaatctcagctactcgggaggctgaggcaggagaatcgcttgaacccggggggcagaggttgcagatcacgccactgcactccagcctgggtgacagagccagactcaaaaacaaaacaaaataaaacaaacaaaaa

SEQ ID NO: 35116 - DNA, 469 bp, Homo sapiens
cgactactatagggcgaattggagctccaccgcggtggcggccgaggtacaagggaaaaacctgtcttgggcaggctgggggggattcttctggtgagtccccagcccaccctgagtaacacaaccagataacagtcattttacacccaggtgcacatgagcacagcacacaaacacacacacacacactcacacacacacacacacacaagttgggttgagctcttcttccagggagggtcctgggtccagtcacagtatgagggtcctctctcttctgaatatcatcccagtagtggcagcagagagtacacttcagtgatctaaaacaccacaatatccaacatacacaaactctcagggaagggtttagtaaacacacacaatgattggaatcatggttgctctttgctcctgaatggaatggttcccacagaaaaaagcacagggatacaagcacaacataagg

SEQ ID NO: 35117 - DNA, 444 bp, Homo sapiens
ctatagggcgaattggagctccaccgcggtggcggccgcgtgatggggcagacatggtgggtcctgacggccttgtcttcaccaagtgctcctaactctcagcaaacttggggttcatgaccgtcgtggtggcgctcttgaaaaggggattatcattgttccactgggacttgagcttctccttctcaaagcgcctgtaccttggccgttctagaactagtggatcccccgggctgcaggaattcgatatcaagcttatcgataccgtcgacctcgagggggggcccggtacccagcttttgttccctttagtgagggttaattgcgcgcttggcgtaatcatggtcatagctgtttcctgtgtgaaattgttatccgctcacaattccacacaacatacgagccgggagcataaagtgttaagcctggggtgcctaatgagtg

SEQ ID NO: 35118 - DNA, 201 bp, Homo sapiens
actactatagggcgaattggagctccaccgcggtggcggccgcccgggcaggtacgcgggatgatagacacaatgaaatccacccccaaagaggactacttcggatacaatcacagcaaccctggccttggccctgccctgtccctgccatgcaacttcacaactcagctggcctagacccctgggaggcctccaagtccc

SEQ ID NO: 35119 - DNA, 201 bp, Homo sapiens
tacactactatagggcgaattggagctccccgcggtggcggccgaggtacattgtgcaatgacagtcacaatcaattcctcagcgcacccatcgccacggatacgatacattagatattctgaacttgctcatcttaggacttcacattggtgtcagtgttttctgacaaatcacgtgtatcaggaatgaatgagggaggt

SEQ ID NO: 35120 - DNA, 458 bp, Homo sapiens
actactatagggcgaattggagctccaccgcggtggcggccgaggtactttttttttttttttttttttttttttaatgaacaaatatttatttatcttttataacaagtaaggcaatgttgcttaaaggaagacaaacaaacataaaagattccgttgacaatgcattttttcatctgttcggcacaatgcttttgtcataatggagatgtgaccccaaaattttccaggacattcagtttttgggggcagcacttagggcagatgactggccgcttatagatgaggccaaagcaccaggtagggggaaggttcttgtatcggttcgaaccccgacagcgcgccaacagacaacacgaggcagtggggagcaacatgctgttttaatgagcgcctgggtgcaggcgtgctgaggctgaaaatggcatcagcccccgcgtacctgcccgggcggccgt

SEQ ID NO: 35121 - DNA, 455 bp, Homo sapiens
actactatagggcgaattggagctccaccgcggtggcggccgcctcggcctcccaagtgctgggattacgggcacaagccactgcacccagccacaaacagatcgcagatccaggtttctcaaactggagcatctgcttaattttcccataaaatcagtcttattctttctgacagctctgagactcctccggccacgactaggtgctgtcctggaggaaacggtggaggacggccgcacaaaaaccaatctacctgatgaaaactccgttcccttctcgccagaaacataaaatgcgatggagctacgaccaccgctgccgagacaaaatggcgccgacccccgcgtacctcggccgctctagaactagtggatcccccgggctgcaggaattcgatatcaagcttatcgataccgtcgacctcgagggggggcccggtacccagcttttgttc

SEQ ID NO: 35122 - DNA, 203 bp, Homo sapiens
actactatagggcgaattggagctccaccgcggtggcggccgaggtacgaagccatcgacagcagagatggagcatcttgtgcagagttggtgtcttttaaacatcctcatgttgcaaacccacgacttcaaatggcctctccagaggagaagtgtcaacaagtcttggaacccccttatgatgaaatgtttgcagctcattt

SEQ ID NO: 35123 - DNA, 393 bp, Homo sapiens
tatacgactactatagggcgaattggagctccaccgcggtggcggccgaggtacgcgggtgagagggtctgcgtttcttctagagctcctacctcagtggtgtgcacagagttggagacacctgagggctggtccacgtctcacctttgccatacgggtcatttcttgatcaaatatatgactggggtcctggtttactcccgcccaccgtttcttttaaagttttcttaacatgaaatccacaaaagcggaaacaatgaaccattcttgcactttacagaatcattgtccttagctttagaggttgttaatttcttgtttttaacatgaacagaatgtgtggttctgaaggtgtgtgggggttttcaagaaattgtcctttggggccgggcg

SEQ ID NO: 35124 - DNA, 612 bp, Homo sapiens
tacgactcactatattgcagctccaccgcggtggcggccgaggtacctgcccacagccttggtccctgggggctagactgctcaactgtggagcaattcattatactgaaaatgtgcttgttgttgaaaatttgtctgcatgttaatgcctcacccccaaacccttttctctctcactctctgctcactcagattgactttcaatagtttttctaagacctttgaactgaatgttctcttcagccaaaacttggcgacttccacagaaaagtctgaccactgagaagaaggagagcagagatttaaccctttgtaaggccccatttggatccaggtctgctttctcatgtgtgagtcagggaggagctggagccagaggagaagaaaatgatagcttggctgttctcctgcttaggacactgactgaatagttaaactctcactgccactaccttttccccacctttaaaagacctgaatgaagttttctgccaaactccgtgaagccacaagcaccttatgtcctcccttcagtgttttgtgggcctgaatttcatcacactgcatttcagccatggtcatcaagcctgtttgcttcttttgggcatgttc

SEQ ID NO: 35125 - DNA, 475 bp, Homo sapiens
ctactatagggcgaattggagctccaccgcggtggcggccgcccgggcaggtacccagcacatctcagagagatggaggcaagctgggttcctgatgatttccagctaatacaggtccttcctcctgcatgcaggcgccccgtaacgctttataacagacgcctctagacttctgtgggggtaaagtgaaggacccaaagcgacacaagtagtgtctgttcacacttccactttcaaagctaactactagctgttcaaatatactccatacagctttcagcaaatcaaagtgtttacctctcccacaccaagggaagaaaagatgcagactgcctttaaagcacctgtcagcaaggcgagggttttaaagatcagccttgagaatcaaagcagcagcagaagtgtcattactccagtgctctcccttcccgttcgtgggtcacacagagacaggcacatccccagcgctttgcaa

SEQ ID NO: 35126 - DNA, 405 bp, Homo sapiens
tatagggcgaattggagctccaccgcggtggcggccgaggtacatgctgcttgaattttcatcatcatcctccactccttccacctccaagaaaaaaaaagcgtgcaggaagtagcatttcagatccttctccaccacctctgcttcccttctcccttcttttcctccttgcagcattccctttagtacgcggggaggcattgaggcagccagcgcaggggcttctgctgagggggcaggcggagcttgaggaaatcgcagataagtttttttctctttgaaagatagagattaatacaactacttaaaaaatatagtcaataggttactaagatattgcttagcgttaagtttttaacgtaattttaatagcttaagattttaagagaaattatgaagacttag

SEQ ID NO: 35127 - DNA, 476 bp, Homo sapiens
actactatagggcgaattggagctccaccgcggtggcggccgagcctccgctcaggctggcagccccagctctgcacggggaaggcaatgttctgtccttcagcagaagtcatacaaaataaggatccaaagtgaactcaagaaaaaaaaaaacaaaacaaaataaaccccaacccctacagtggcccattctgcagatacggattcgcgaaaggaaaaatcagagggaagaggctaaaatccctcagtctaccccgcgtacgcgggacccactccctcttagccaatattgtgcctattgccatactagtctttgccgcctgcgaagcagcggtgggcctagccctactagtctcaatctccaacacatatggcctagactacgtacctgcccgggcggccgctctagaactagtggatcccccgggctgcaggaattcgatatcaagcttatcgataccgtcgacctcgagggg

SEQ ID NO: 35128 - DNA, 472 bp, Homo sapiens
cactactatagggcgaattggagctccaccgcggtggcggccgaggtacagcaaaatcaaccttacatctcaaccaaattttgggagatcagggactctctgcaggggagaagctccacaacctcagcaaattatcctattggtttgggcaattaaaacagcccaggttggtatcaagcaatgagatttatcaaaggtcaggaccacctttgtaatgtccttctcttttttatctttattcgcatagtctgttttgtcagaaagtaggagtgcaacacctgcttttttctgttttccatttgcttgaaatatttttctccattcctttattttgagcctatgtatgccaccgcatgtgagatgggtttcttgaagacagcatactccagtgggtcttggttctttatccagcttgccccatgtctttcaatgggagcatttagcccattttccccgcgtacctgcccgggcg

SEQ ID NO: 35129 - DNA, 549 bp, Homo sapiens
  misc_feature 39: n = A,T,C or G
ggagctccaccgcggtggcggccgcccggcaggtactcnattatttccattccctttatgttttggaggttgaatgcagggttttattgagtggtggaggtggttctctgaaggatggatgcatagctggaagcggggatggcacgggaagataatcttcctgctgggtggcaaacctctccgaccaccctcggctgaactcctctcggcgttcaaatgttcctcttctctctttctctgctgtatcgtttcaccattcatctgcttgtctgggatggagaagacaactgtttgctcatttgcttggcgataggtgattgtctcgccgctcagctataggcgatggtctcaccactcggtgataggcgattgtcccatctaggtcgccaaaatgtgtctggaattggtgggttcttcgtctcactgacttcaagaatgaagccgcggacactcgcagtgagtgttgcagttcttaaaggcggcatgtctagagtttgttccttctgatgttcggatgtgttcacagattcttccttctggtggggttcg

SEQ ID NO: 35130 - DNA, 461 bp, Homo sapiens
actactatagggcgaattggagctccaccgcggtggcggccgaggtacagttggaatccatggcagttttatggaggccaaatatatcagatgaataggctaatttccctgagttgctggccttattagtccctactctgttgccccctggttacctaatgcatgttcaaaaggtatagttttcatcacctgcttgatcttgattttcagacagcatcaaatcagttgcaaaacaaatccaagctaaaattttgagtgtatgattaatttactatagcatgtaattatgcagtattttattttttgttttttattttttttgagacagggtctcgctccattgcccaggcagaggttgcagtgagctgagatcacaccactgcactccagcctgggtgacagagcgagaccctgtttcaaaaaaataagaaataaaaagtgagtcttcatattcaaattag

SEQ ID NO: 35131 - DNA, 445 bp, Homo sapiens
agggcgaattggagctccaccgcggtggcggccgcccgggcaggtacaatactgaggcagcatactctggtccagcccttctatttgtttcagcttctcacatactgcatccacattcagtgaattcagtaataccactgggcctggggctgggcctgaccctaggccattgttctgatctctgggcaaactcgtttttactgatggacgtgaagatgagatgttgggagccgccagggtaataccttggcgtgtaaaggtatagggcaaagaatggcctgttgtagaagggatgctgagggcccgtcatgccgctgtaatagctgctgtgaggctgtggtgacaccactccacctgcgaagggcccattgaaggacgtggaagagcacacggatgggggctggctgtacctcggccgctctagaactagtggatcccccgggct

SEQ ID NO: 35132 - DNA, 465 bp, Homo sapiens
atacactactatagggcgaattggagctccaccgcggtggcggccgaggtacgggggacggggaatcagggttcgattccggagagggagcctgagaaacggctaccacatccaaggaaggcagcaggcgcgcaaattacccactcccgacccggggaggtagtgacgaaaaaaaaaaaaaaaaaaaagtccctgcccgggcggccgctctagaactagtggatcccccgggctgcaggaattcgatatcaagcttatcgataccgtcgacctcgagggggggcccggtacccagcttttgttccctttagtgagggttaattgcgcgcttggcgtaatcatggtcatagctgtttcctgtgtgaaattgttatccgctcacaattccacacaacatacgagccgggagcataaagtgtaaagcctggggtgcctaatgagtgagctaactcacattaattgcgt

SEQ ID NO: 35133 - DNA, 458 bp, Homo sapiens
cgactactatagggcgaattggagctccaccgcggtggcggccgcccgggcaggtacaagccttgaacatcgtcctgcttcccagtgggttcagacctcacctttcagggagcgacctgggcaaagacagagaagctcccagaaggagagattgatccgtgtctgtttgtaggacggagaaaccgcttgggtaacttgttcaagatatgatgcatgttgctttctaagaaagccctgtattttgtgattgcctttttttttttaagatgctttcattttgccaaaataaaacagataatgtggatggtttaagggttatagtattatagtttaaataataacaacaaaattcttcccaggaactctgctggaaggtaaattaaaatacttgtttttccattggtaaaatattgttgcactctgtgaaccaaaagacagtctaagttggaggacataga

SEQ ID NO: 35134 - DNA, 458 bp, Homo sapiens
ctactatagggcgaattggagctccaccgcggtggcggccgaggtactctcactgttccagcttccagcccaatcctagcagaatgaatgcattttaaaatcagtccacattcacatgtgctgagaaggttgttagtggtccctcatctgggcaaagcagacccaagatggtgctgagtgcagagtgcagagcattcttgtgctctcctctcatggctggaactatctgggctttgcgccctggtccagtgctacgtatcaaccccctcaacacgcctgtggctctgacacggggggatgaattaacttgcctctgttcaaatatacagacttggtgaggctgtcttttgttagtacctgcccgggcggccgctctagaactagtggatcccccgggctgcaggaattcgatatcaagcttatcgataccgtcgacctcgagggggggcccggtaccc

SEQ ID NO: 35135 - DNA, 452 bp, Homo sapiens
ctatagggcgaattggagctccaccgcggtggcggccgcccgggcaggtacttgattctgtctgtgtcataattacacatttacttgaacacagctatcctttatcttgtgctttctttaatagaaaaatgaacagaaactgaatgcagttaaatttttatttttagtaggttgtgaagttacttttactggagaaataaaaatatgttaaacttgattgactttttaagataaattgttaacacttttgcaggattagaattaatatgaagtatctctttaacattattgtatatattacctactgcaaacctatctgttctgtttctttgtgatttaaagaaaaataggccgggcattgtggctcacgcctataatcccagcactttgggaggccgaggcgggcggatcacaaggtcaggagttttagaccagcctgaccaatatgatga

SEQ ID NO: 35136 - DNA, 276 bp, Homo sapiens
tacgtactcactatagggcgaattggagctccaccgcggtggcggccgaggtacgcgggggtcggcgccattttgtctcggcagcggtggccgtagctccatcgcattttatgtttctggcgagaagggaacggagttttcatcaggtagattggtttttgtgcggccgctctagaactagtggatcccccgggctgcaggaattcgatatcaagcttatcgataccgtcgacctcgagggggggctccggtaacccagctttttgtttcccttta

SEQ ID NO: 35137 - DNA, 386 bp, Homo sapiens
cgcggtggcggccgcccgggcaggtacgcgggggttttacagtgtgttgctgttggaagccctattcctcactaccagtggttcaaaaatgaattaccattaacacatgagaccaaaaagctatacatggtgccttatgtggatttggaacaccaaggaacctactggtgtcatgtatataatgatcgagacagtcaagatagcaagaaggtagaaatcatcataggaagaacagatgaggcagtggagtgcactgaagatgaattaaataaaccttggtcattctgataacaaagagccaacaactgacacaactttggcaaaagacaagggtgcccttttgataggaaatatgaattaccgggagcaccccaagctcaaagctc

SEQ ID NO: 35138 - DNA, 407 bp, Homo sapiens
ggagctccaccgcggtggcggccgaggtacgcgggaagcaggtggtaacaacgcagactacgcgggcagctagagcagtgatccatcatggagttattcgaatttatacaagccctggccggctgcagtggcacacacctgtaaccccaccactttgggaggccaaggcaggcagatcacttgagttcaggagtttgagaccagcctggccaacatggtgaaaccccatctttactaaaaaatcaaaaattagcttgggcgaggtggcaggtgcctgcaatcccagctactcgggaggctgaggcaggaaaaatcacttgaacctgggaggcggatgttgcaatgagccaagattgcaccactacactccagcctgggtaacagagcaagactctgtctcaaaaaaa

SEQ ID NO: 35139 - DNA, 456 bp, Homo sapiens
cactactatagggcgaattggagctccaccgcggtggcggccgaggtacgcgggagtttttgatttaagttgcagttatagccaatttaggctaatgcttggttttggagcttttatacacaacgtttttgttaggcatcacagttttgcaacctctgctccaaagagaaaaatagaatgagttttctttcttttttttttggagtcagagtctcgctctcttgtccaggctggagtgcaatagcgcgatctgggctcactgcaacctccgcctccctggttcaagcaattctcctgccttgcctcctgagtagctgggattacaggcgtgtgtcaccacgctcggctaatttttgtatttttagtagagacagggtttcaccatgtcaagctggtcttggactcctgacgtcgtgatccacccgccttggcctcccaaagtacctgcccgggcgg

SEQ ID NO: 35140 - DNA, 415 bp, Homo sapiens
atagggcgaattggagctccaccgcggtggcggccgcccgggcaggtacctgcagtcagatgatgagatggagctggaggagacagaaccgcccctggagcctgaggatgccctatctgacgccgagtttgagggggagggtgactacgaggagggcatgtatgctgactggtggcaggagccggatgccaagggtgacgaggccgaggctgagccagagcctgaactcgcatgagaaggggacaccccacacccctcaagcttgggaagcctggtgccgatggccccaccctcaccagtcctgggcagcagcaagaactatttattaaaaacttaagatgggccaggtgcggtggctcacacctgtaatcccagcattttgggaggccaaggtgggtggatcacttgaggccag

SEQ ID NO: 35141 - DNA, 203 bp, Homo sapiens
tatagggcgaattggagctccaccgcggtggcggccgaggtacttttttttttttttttttttttttttggaatgaacaaatatttatttatcttttataacaagtaaggcaatgttgcttaaaggaagacaaacaaacataaaagattccgttgacaatgcatttttatatctggttcggcacaatgcctttttgtcataat

SEQ ID NO: 35142 - DNA, 430 bp, Homo sapiens
ggagctccaccgcggtggcggccgaggtacacaattaatttatttgtaaatactaaatgtttccttttttcattactcatatatttttttcttgccttactacactgcctagtaaaatatataaaatatgtgcttcacggaaaggggactttgattaaggacatgcctccttcagagctttttcttttccccctagtatttccaacttggggatgtttggcatcgacgaatttactgcagtgattaaccctcctcaggcctgcattttggcggttgggaggttccgacctgtgctgaagctcactgaggatgaagagggaaatgccaaactgcagcagcgccagctcataacagtcacaatgtcaagtgacagtcgagtggttgatgacgaactggcaaccaggtttcttaaaagttttaaagcaaacct

SEQ ID NO: 35143 - DNA, 452 bp, Homo sapiens
tacgactcactatagggcgaattggagctccaccgcggtggcggccgaggtacatagtgtcgcgaactcaaatcggcatttagatagatccagtggtttaaacggcacgtttttgcttataaaaaaagtgcaaaaaagatgtggtttacaagttaaagctacagaatccctttttgctgtaattgcaccagttttaaagcctctggacagagcagtatttcgtttaaaactttgtttttcttaaaagcttacagtgtttggctaattctcctcccctttttacaagacgggggccggagggtggacactggtggcaggttaagggatactgtcactttaagaagcctgcagattgaagtgtaaacatggagaaattaggggctgattttttaaactgtgtgagatattaaccagccgccctgttataaaatcaagaaatccaaacagcgatt

SEQ ID NO: 35144 - DNA, 447 bp, Homo sapiens
ctactatagggcgaattggagctccaccgcggtggcggccgcccgggcaggtacctaacaaacccacaggtcctaaactaccaaacctgcattaaaaatttcggttggggcgacctcggagcagaacccaacctccgagcagtacggccatcttccagctgcttgcctgcaaagatgagcctctgctggtcggggggaatgccttccttatcctggatcttggccttcacattttcgatggtgtcactgggctccacttccagggtgatggtcttgccggtcagggtcttcacgaagatctgcataccacctctcagacgcaggaccaggtgcagggtcgactcctttgggatgttgtagtcagaaagagtacctcggccgctctagaactagtggatcccccgggctgcaggaattcgatatcaagcttatcgataccgtcgacct

SEQ ID NO: 35145 - DNA, 452 bp, Homo sapiens
tacactactatagggcgaattggagctccaccgcggtggcggccgcccgggcaggtacttttttttgtttgtttgtttttttgtttttgagacaaggtctcactccgttgctcaggctagaatgaagtggagcaatcacggctcactgcacctcagtctcctgggctcaagcaatcctcccgtgtagctgggcctacaggcatgcaccactaatttgtttgacttttagtaaagacagggtttcaccacattgtgcaggttggtctcaaaactcctgagctcaagtgacccacctgcctaggcctcccaaagtgcagaaccagattcttaactgccacagactcttgtattatgtaatttatatacagaacacaaagcacttgatttgcttaactgatgtacaagccaaattgcgttctggtttggccataagctccttgggccaatgtgtt

SEQ ID NO: 35146 - DNA, 431 bp, Homo sapiens
ggagctccaccgcggtggcggccgaggtactgaagagtaacaaaaatgatagaagcttttgccgttatctcaaacatgagccccagcaggaagaccatcgccacacatgagacgatgtccgcgtgattctgcaggacgaattcgtggctcatcactggggggctcttggtgcttttcttgcgattcgccatggtggggccgccgcccgcgcctgcaggtcccgcgtgctcagattgcaccatgctcttagactgtcctagggattgggccaggaccagcagacctaatttgacaaagtcactggtcacctagaactttactaggtggactttgatatgacaacaacccctccatcacatgtgtttgaagcctgtcagattctaacaacacatgctgaatttcttcacccaacttaaatgttcttgagatga

SEQ ID NO: 35147 - DNA, 432 bp, Homo sapiens
cgactcactatagggcgaattggagctccaccgcggtggcggccgcccgggcaggtacattaagaattttgtgggaactgacagaagaggtcttgctcatgtttgggtgggcatggggaaagaggcgtcagggaacacttcatttctactctgagactgaaaagacaagtatgagttacagagatgatggggaggatatagacacgtgtttcaggtatttgtaaatgctgaggagaaagagggtgattcattcaacaattcaggcttaagtatgagataaagacatagaaagaaaattaatgagtgctgaggaaataggaagggaccagaaaagtcatattcgaattgcattttgagagtaatggaagaagagtggaggcagaccatttaattttttgaaccatttaaggagggctatttttttaaaaaaat

SEQ ID NO: 35148 - DNA, 159 bp, Homo sapiens
cggtggcggcgcgcccggccaggtactttcataattcagaagggaaaagtgaagtctcacattatgcctgcaaaattttcttcctgccccttgaactctgatgaagaagtgaataaatggttgcatttttatgaaatgaaagctcctttggtttgtcta

SEQ ID NO: 35149 - DNA, 425 bp, Homo sapiens
tacgactcactatagggcgaattggagctccaccgcggtggcggccgcccgggcaggtacgcgggatcacgacgcaggtctcgtgccaatcaaaacgtcaacgctgttcacagccattatacacgtgcccaagcaaatagtcccagaccagcaatgaactcccaagctgctgtacacggggaaagatgtcactgtcttgcagaacactgatggaaataacaatgaggcatgggctaaggatttgaagctggcagactttgcgctgctgtgcctcgatggcaaacggaagcctgtgactgaggctagaagctgccatcttgccatggccccgaatcatgccgtggtgtctcggatggataaggtggaacgcctgaaacaggtgctgctccaccaacaggcttaatttgggagaaatggatctgact

SEQ ID NO: 35150 - DNA, 452 bp, Homo sapiens
gcgaattggagctccaccgcggtggcggccgcgtgcctcttcgttaatgacctggcagcttgtttctcagctgcagatttcttttgttagtgtttctgccattgccagaggcatttctgttgaacctggcatctgttagtaaactttctccaaaacaaagctaatttaggttttgtagcatatgaagcccttctagctctttccacttttgattttatttcatccctaaattgccatcgtattgaggtcatttttaactatttttttcccaatgatttatttttcctagtgtatttttttttctcttggaatttgacctagggcatgtgtgcatgagttttactcgggacactttctattaataccccataacttttccaattgtgttctgccctctttccatcctcccacttcaacttcttggtctaagttgaatatgaactttcctttgc

SEQ ID NO: 35151 - DNA, 456 bp, Homo sapiens
tacactactatagggcgaattggagctccaccgcggtggcggccgaggtacttagggtaagcattaacaatattattcaaaatgttatatagagttcaactgtatacaatagagcatttattaaagtgtgtccaaagcgcttataaataaagcatcttcgaggcaggcggctcacttgaggttaggaggaaagcagactggccaacatggtgaaaccccgtctccactgaaaatacaaaaaaattagccaggcgtcatggcgcacctgtagtcccagctactggggaggctgagacacgagaatcgcttgaacctgggaggtggaggttgcagtgagccaagattgcaccactgcactccagcctgggtgacagagtgggactctgtcttaaaaaaagaaagaaagaaagagaaataaagcatcttatgtaggaagtatggagaaataaaaaatga

SEQ ID NO: 35152 - DNA, 453 bp, Homo sapiens
ctactatagggcgaattggagctccaccgcggtggcggccgaggtacgcgggggtcggcgccattttgtctcggcagcggtggccgtagctccatcgcattttatgtttctggcgagaagggaacggagttttcatcaggtagattggtttttgtgcggccgctctagaactagtggatcccccgggctgcaggaattcgatatcaagcttatcgataccgtcgacctcgagggggggcccggtacccagcttttgttccctttagtgagggttaattgcgcgcttggcgtaatcatggtcatagctgtttcctgtgtgaaattgttatccgctcacaattccacacaacatacgagccgggagcataaagtgtaaagcctggggtgcctaatgagtgagctaactcacattaattgcgttgcgctcactgcccgctttccagtcgggaaacc

SEQ ID NO: 35153 - DNA, 439 bp, Homo sapiens
ctactatagggcgaattggagctccaccgcggtggcggccgaggtacttgtatggttcacagagcagcagctatggcgtcacttggggagctgttagaaaagcagaatctgaggccctactctacacctactgaatcagagcatgtattttataagatccttaggtgattcacatgcacgttacatttttaatggttttaataaattatacttgagaaataataaactgcatatatttaaggtgtccagcttggctcagcctggtggttcacacctgtaattccaggattttgagacactgaggtgggaggattgcttgagtagctgagactacaggcgtatgtcacaccaggctaatttttgtatttttagtagagacggcattttgccatgttggccaggctggtctcaaactcctgacctcaagtgatccacctgc

SEQ ID NO: 35154 - DNA, 443 bp, Homo sapiens
actactatagggcgaattggagctccaccgcggtggcggccgaggtgctgaagatgtcccctcgctcagagaagtattcttgatgacgtagtctgtcacgtccttcgacccacatgttcacacgcacgatggctttgacgtaggcgtcccctgttcatgggctctagtgaatccctgccatctaatctatacactctcttgtgcgacgctcccgtgccggcacaattcaagtcttaaacgccccaacccacggccggtctagaactagtggatcccccgggctgcaggaattcgatatcaagcttatcgataccgtcgacctcgagggggggcccggtacccagcttttgttccctttagtgagggttaattgcgcgcttggcgtaatcatggtcatagctgtttcctgtgtgaaattgttatccgctcacaattccacacaa

SEQ ID NO: 35155 - DNA, 435 bp, Homo sapiens
actactatagggcgaattggagctccaccgcggtggcggccgaggtacacagtatcaatatgatttatcactgttgatgttaaccttgatctggcttggtagtatttgtcaggcttctccactgggaagttatttggttttgtccttttctgtattgtattcttgaaagaaagtcactgtgtgcagcccacacttaagtagttgtatattgtgctccccctcctttagggtggaaaatctataaattatttggaattcttctgcataggacatttgtttcttcagtttcatttatttattcagtcatttatatgagtgcgtagtcataaatatttattttatactttaacttagaatctaatggtacattttattacccttcagatctttgggaatacttaaaaatcctaaccattaagccttttcttttccttc

SEQ ID NO: 35156 - DNA, 438 bp, Homo sapiens
cactactatagggcgaattggagctccaccgcggtggcggccgcccgggcaggtacgcgggggtctgccgcggtggccgggtgccgatttgacaagatcaaagctgcaggaaaatggacagtgaggttcagagagatggaaggatcttggatttgattgatgatgcttggcgagaagacaagctgccttatgaggatgtcgcaataccactgaatgagcttcctgaacctgaacaagacaatggtggcaccacagaatctgtcaaagaacaagaaatgaagtggacagacttagccttacagtactcgtcttggtgagagcgtgagctgctgagatttgggagcctgcgctaggcccgcttggagttctgagccgatggaagagttcactcttgtttgcacccgcggtgatgcgtgcttttcgcaagaacaagactct

SEQ ID NO: 35157 - DNA, 366 bp, Homo sapiens
actataggagtcgcgcttatgactattgggcgaatcgcagctccagcgcggtggcggccgcccgggcaggtacgcggggaggcctttccttacctccctccatgctgtccacttcctctgtaaagctctcaaccctgtccccttccccctctctcctgggaaagagccctcccatgcctagctgctgctcttagggaccctgtggctaggtgcgcggatggaaatccaggtatgcccaaccccctcccggtggagtaggggttgggtggttatggaatgacggaaagaggcaaaggagtgtataattggagggtcagacaaggctgggagttgaggtccctcctaccccttacctgagccctcagg

SEQ ID NO: 35158 - DNA, 440 bp, Homo sapiens
actactatagggcgaattggagctccaccgcggtggcggccgcccgggcaggacgcggggtcaagcacctgtctgccagccagaaggcactgaaggagaaggagaaggcctcctggagcagcctctccatggatgagaaagtcgagttgtatcgcattaagttcaaggagagctttgctgagatgaacaggggctcgaacgagtggaagacggttgtgggcggtgccatgttcttcatcggtttcaccgcgctcgttatcatgtggcagaagcactatgtgtacgcgggcttatgagctgtgacatcgtaaaccatgcacaagggctcttccagggttaaacaaaatgcataacaatcaaatacagcaacatctgccaaaagaagtaacaccaataaattgcaagtgattgtttaactatctaatgtggtataatcagcc

SEQ ID NO: 35159 - DNA, 416 bp, Homo sapiens
cgctgggtgcagccgagcggtgtggagcggagagaatactcgaagggctctcctgatactagcagttttacgatttaaaacttcgccagaatttcgacagggtctcactgtattgcccaggttggtctcgaactcctggcttcaagcgattctcccacctcagcctcccaaagtgctgggattacaggcgtgagccaccacgcctggcctcactcaaacagtaaacgaggtatgtgacgcattcccagactcttcagccaactgagcatcagcttcttcacagcaattgggtcctgattaatgtcctcccaagacagacttcattggatccacgatcaagaggactctgccaggtttttctgacccctctacattgctataaagtgccaaggccttaagacttgggtacctcggcc

SEQ ID NO: 35160 - DNA, 446 bp, Homo sapiens
tacgactcactatagggcgaattggagctccaccgcggtggcggccgcccgggcaggtacaggtcttgcctaaaatcaagaagagagcaggagaactgagaaactcctccccttcccccaccagaagccttgtgtctagtaacaggtaacaacagccatctactgttggagaaagaacaaaagcatggaaaggatggagcatggaaagagggaaaaaacaacaaccactctccagcactccaggtcttaacattaagcacaaaataggagcagcctagcccaccaccggagggatttcaagtctgttgcacactgaaaataaccatggctacaacaaaacccaattcaccacaaatgctgactaaattgactaatagccccatgctaatagcttgatggaaggatagatattcccactttgaacatttgcttcagtgtctactttt

SEQ ID NO: 35161 - DNA, 467 bp, Homo sapiens
actactatagggcgaattggagctccaccgcggtggcggccgcccgggcaggtacggaatagaatggaatggatcgaattgtaatggaatggaattgaatggaatggaatggaatggaatggaatggaatcaacgtgagtgcaggggaatgtaatggaacggaatgcaatggaatggaatcatccggaatggaatggaatggaatggaatggaatggtatcaacccgagtgcaatggaatggagtggaatggaatggaatggaatggaatggaatggaacaacccgaatggaatggaatgtaatggagagtaagggagttgaatagaatcaatccaaacgtaatggaatggaatgcaacggaatggaatggaatggaatggaatggaatgcaatggaatggaatcaacccgagtgcaatcgaatggaatctaatggaacggaacggagtggaatggattggagtgga

SEQ ID NO: 35162 - DNA, 439 bp, Homo sapiens
tatagggcgaattggagctccaccgcggtggcggccgcccgggcaggtacgcgggggatttggcagcagcggaagaaggagaccggagggtgtgtgttgggcaaagccggaggcagaggaggacgattgttttacggatcccgtgatcggcccgtccttctcccctttccccccctccctaccgcccctgtcccgccggggagcggcggcggccttggactttgctgtctttcctcgcggagacagatttcaacactacacttgcacaatgtctttgaaaccaagagtagtagattttgatgaaacatggaacaaacttttgacgacaataaaagccgtggtcatgttggaatacgtcgaaagagcaacatggaatgaccgtttctcagatatctatgctttatgtgtggcctatcctgaaccccttggagaaagactt

SEQ ID NO: 35163 - DNA, 459 bp, Homo sapiens
ctactatagggcgaattggagctccaccgcggtggcggccgcccgggcaggtacttttttttttttttttttttttgattaatgaaaacattcttggcaaatgctttcgctctggtccgtcttgcgccggtccaagaatttcacctttagcggcgcaatacgaatgcccccggccgctctagaactagtggatcccccgggctgcaggaattcgatatcaagcttatcgataccgtcgacctcgagggggggcccggtacccagcttttgttccctttagtgagggttaattgcgcgcttggcgtaatcatggtcatagctgtttcctgtgtgaaattgttatccgctcacaattccacacaacatacgagccgggagcataaagtgtaaagcctggggtgcctaatgagtgagctaactcacattaatttgcgttgcgctcactgcccgctttccagt

SEQ ID NO: 35164 - DNA, 476 bp, Homo sapiens
tatacactactatagggcgaattggagctccaccgcggtggcggccgcccgggcaggtacttatttttttgagacagtctcactctgtcacccaggctggagtgcagtggtgcaaccttgactcactacaacctcctcctcctgggctcaagcgattctcctgcttcagctttccaagtatttgggaccacaggcgcacaccacaggcctggctaatgtttttgttttgtttttggtagagacggggtttcaccatgttgccaggctggtctcgaactcctgagctcaagtgattcacccaccttggcctcacaaagtgtcaggcttacaggcgtgagccactgcgcccggctcacagggtaaggcttctgtctggtgtgttgtattacggattttgcttaataggcacagtgaggcattaaaaagaaaattcagtatgcctgtagaaaggataatccttgtttaaagtctccaaa

SEQ ID NO: 35165 - DNA, 469 bp, Homo sapiens
cactactatagggcgaattggagctccaccgcggtggcggccgaggtacgggttgcccctggcttggcactgcaggacgtgtctcgttttatctttccatttcaagtgctgggggcatgtggctcggtcaattttgggaccatctgtggaaccaccatgtgtgatcagacacccaacacacccgatgcacagtggtgcagaggagcgtctaatcttttcagggcaggggtggagggaataaaaggtaagggggaccgactaacacaggactcgcagttgaacgctactgttcctgtgcaagaactcgccgtccacctcgaaagtggcactgcaaaagaagctgcgtccgttcgtcactctcggtagcatttagctgaagttgaactggctgccccggggccccgggcgctttagaactagtggatcccccgggctgcaggaattcgatatcaagcttatcgataccgtc

SEQ ID NO: 35166 - DNA, 378 bp, Homo sapiens
actactatacgggcgaattggagctccaccgcggtggcggccgaggtactttttttttttttttttttttacaaggttttttcctagtgtccaaagagctgttcctctttggactaacagttaaatttacaaggggatttaaagggttctgtgggcaaatttaaagttgaactaagattctacccgcgtactttaaaccagacagcagggttcagaggtggcacaccgggacaaagctgaggccctgcacctcaacagctgactgccaggtgcctgtgggtgaactgaggggagtatagggagagggcaggtggaactggggcagaatctagtcatgccctaaagctagccctgtacacaatggtgccccaaaaagct

SEQ ID NO: 35167 - DNA, 476 bp, Homo sapiens
actactatagggcgaattggagctccaccgcggtggcggccgcccgggcaggtacttcttttttttttttttttttttttttcctgattaaatgttctttatttgatgcttttgtgtgcacaacactataaggagttgcccaattcaccaagtcagcccgttcacacccttagttaaggtggccattaaggggccagggggtggcaatcagtaagctgcctcctgcctaactttttttttccaaccattctttataggttccagcgtatttgctagccccattgtatccaaaaaatccgggccagtttcgttggtctggaaggccccgcttgcccatttgacagaagaaaacgagatgctcattttcccagctttggcttctcagcagaatataaagcctgtaaggcagttggctccatttgcagagcactctccaactcggacaccgggatgttgagcgcccctgggatggtccc

SEQ ID NO: 35168 - DNA, 358 bp, Homo sapiens
acactactatagggcgaattggagctccaccgcggtggcggccgaggtacgcgggtatctggggatacccaaaaagcaaagcagttcctgccttttcttcagcgggcaggtcgttctgaagctgtggcggaatacgtcttcagtggttctcgtctcaaactctatttgccaaaggaaacttgccttaataccttcttgcttgcaggcattgaatgccccagaggagcccgaaacctcccatgcttggtgcatgaaggagagccctttatcgaggaagctacacttttcaccaaggaactggtgctgcaacgagaggtggaggcggaggcgtagagcatggacccggcccccaacttta

SEQ ID NO: 35169 - DNA, 448 bp, Homo sapiens
gcgaattggagctccaccgcggtggcggccgcccgggcaggtactttgggaggctgaggcaggcagattatgaggtccagatttgaagaccagtctgaccaacatggtgacaacccatctctactaaaaatacaaaaaaaaatagccagtcgtgttggcaggcgcctgtaatcccagctactagggaggctgaagcaaaagaaacacttgaacctgggaagcagaggttgcagtgagccaagattgcaccactgcactccaacctgggcgacagagcaagactccatctcaaaaaaaaagaaaagaaaaaatggcactacataatgtttctaatgctgcttttcttatatgattttcttgatggatttgcttcacaaacttaggagctaacatctttggaatggctagtctcctatagaagaacttctttttactttcttttcataca

SEQ ID NO: 35170 - DNA, 146 bp, Homo sapiens
atggcgaattggacctccaccgcggtggcggccgaggtacaggttcaatcatctgtttttttgattcaagagttacacttcttcgaaacctctgcacatattcttcctcagcatcaccacactgcgatgtcaattaacttttctag

SEQ ID NO: 35171 - DNA, 392 bp, Homo sapiens
actactatagggcgaattggagctccaccgcggtggcggccgcccgggcaggtacaaactgaggctcagagaggttaaggcactagaccaagatcacacagctgtttagtgcagagccaacactcaacccaggtctctgctccctcattctcttcccatttcttgacaccaagaatacgaaagaggttttctacttccctcttccctacccaaacaggattttcttttcactggtccatccacgcacaacctagtcagttccgaacaggaaaaggaacaatttatcaagttaattgtcacaatcccaggtgtggtgcagtgggctggggtaaaacattttgctgtatctttcatgatgttcctgatttctctcttttttttttctttttgag

SEQ ID NO: 35172 - DNA, 440 bp, Homo sapiens
cactactatagggcgaattggagctccaccgcggtggcggccgaggtacgcggggacacaccaggattcgagggccacacgcctcagccagccccggcaagggcctatcaggggtgggtcggggcatccgagcgggtttgacggaaggagcggcggcgacggaggaggaggatggaggcggtggtgttcgtcttctctctcctcgattgttgcgcgctcatcttcctctcggtctacttcataattacattgtctgatttagaatgtgattacattaatgctagatcatgttgctcaaaattaaacaagtgggtaattccagaattgattggccataccattgtcactgtattactgctcatgtcattgcactggttcatcttccttctcaacttacctgttgccacttggaatatatatcgatacattatggtgccgag

SEQ ID NO: 35173 - DNA, 464 bp, Homo sapiens
tatacactactatagggcgaattggagctccaccgcggtggcggccgaggtacctgcctcacagtgcagggcggtatgccgccaaacgcttccgcaaagctcagtgtcccattgtggagcgcctcactaactccatgatgatgcacggccgctctagaactagtggatcccccgggctgcaggaattcgatatcaagcttatcgataccgtcgacctcgagggggggcccggtacccagcttttgttccctttagtgagggttaattgcgcgcttggcgtaatcatggtcatagctgtttcctgtgtgaaattgttatccgctcacaattccacacaacatacgagccgggagcataaagtgtaaagcctggggtgcctaatgagtgagctaactcacattaattgcgttgcgctcactgcccgctttccagtcgggaaacctgtcgtgccagctgcattaatg

SEQ ID NO: 35174 - DNA, 443 bp, Homo sapiens
actactatagggcgaattggagctccaccgcggtggcggccgcccgggcaggtacgcggggggaagtggtttgcgttttcaagatggcgactccctatgttactgacgagaccggcggggtgggaaccgccaaacctctcccttctttttgacttcacccttggataccatcaaggccagaggatggaaccaagataacataaaataggtgctcctttgtgataatgggctatttgtatctctgagggcttccacacaggatggccattcaagaagcttctgctctgcctttcattacagtctatctttagtcctcctaaaccttcagctataatctctatgcaatcaacttaaatatatgtttgtagtattgtccctttctcccaaattccatgtaaaacacttgcctgaattgaattgtttccacaaagttgttttcccct

SEQ ID NO: 35175 - DNA, 441 bp, Homo sapiens
actactatagggcgaattggagctccaccgcggtggcggccgcccgggcaggtacagcctgcagaactgccccactcacctcctccaactcctctggggaaacccaagccctgcagctcatggaacagaagaagtggaaccgacgtttctggaacaggactatctgagagcggttcttcctggccctcgggttcatgcaacggcgtaactggaaccgacgcttacggaccaagggaagtggaagatgttttgtttggagtcctcgtcgtcctcctccatgtcattggccaggtagctgaggacaggaatcaggttgctgctcaggggcaccaccaggagagacctccggctgaggtcagcttcccagagaggaagagtaaagaggacaaataggtgaaggaacaaatgaaaggctggaatcccacttcccccgctgtccca

SEQ ID NO: 35176 - DNA, 448 bp, Homo sapiens
ctactatagggcgaatgagctccaccgccgggggcggccgcccgggcagggtacaccgactacggcggactaatcttcaactcctacatacttcccccattattcctagaaccaggcgacctgcgactccttgacgttgacaatcgagtagtacaggtaagccctggctgcctccacccactcccagggagaccaaaagccttcatacatctcaagttgggggacaaaaaagggggaagggggggcacgaaggctcatcattcaaaataaaacaaaataaaaaagtattaaggcgaagattaaaaaaattttgcattacataatttacacgaaagcaatgctatcacctcccctgtgtggacttgggagaggactgggccattctccttagagagaagtggggtggcttttaggatggcaagggacttcctgtaacaacgcatctcat

SEQ ID NO: 35177 - DNA, 443 bp, Homo sapiens
actactatagggcgaattggagctccaccgcggtggcggccgaggtacctgtggcagcccttcttcagacacggctacttctgcttccacgaggctgctgaccagaagaggtttagtgccctcctgagtgactgcgtcaggcatctcaatcatgattacatgaagcagatgacatttgaagcccaagcctttttagaagctgtgcaattcttccgacaggagaagggtcactatggttcctgggaaatgatcactggggatgaaatccagatcctgagtaacctggtgatggaggagctcctgcccactcttcagacagacctgctgcctaagatgaaggggaagaagaatgacagaaagaggacgtggcttggtctcctcgaggaggcctacaccctggttcagcatcaagtttcagaaggattaagtgccttgaaggagga

SEQ ID NO: 35178 - DNA, 330 bp, Homo sapiens
caccgcggtggcggccgaggtactgccttatggtaagccacatacctttttatcttgtaatatcttagtcttggaattctttatcttccctactctatatctacaaaacagtagcacctgacttatcaagttgcagagctcttaattctatccttagggccggattcagaaaagggggttcctcatgctggatctgaacaacccagcacaggcatgtctggggagcatggcgtgagcctgcatgtggactcataggaccggcgcccgaaacgaatctattggctggctcaggtgtgcaaaccaggcacgaaaagcagctgtccttcggag

SEQ ID NO: 35179 - DNA, 392 bp, Homo sapiens
cgactcatatagggcgaattggagctccaccgcggtggcggccgcccgggcaggtacgcgggggaagagtgagggttccaacttttctgcttatctgggaggtgttgggcgcggacagtcgagatgtcagagaaaaagcagccggtagacttatgtctgttagaggtagacgacgagtttgaagagttccctgccgaatactgggctggcttagatgatgatgaagatgcacatggtctgggaggataattgtgatgatgacaatgtagaggatgacttctctaatcagttacgagctgaactagagaaacatggttataagatggagacttcgtagcattcagaagaagtgttgaattaacctaaacttgacctgcttaatacattctagg

SEQ ID NO: 35180 - DNA, 391 bp, Homo sapiens
ctcactatagggcgaattggagctccaccgcggtggcggccgaggtactttgctgggcactgttctagaagctgggaaatacaagtgatcaaaatataacctaccccacaactcccaaatccagctcgaaaaaacttttagtgtggaggatgggatagtaaagataataagccaatgaataaggaaaacatagcatttcagatctttatattatgataaaaaaaaaagtcctaaattggaacaggaaacacagatggggtggctcaattacaagacagcagttaaagaaggcctcactgacaagatgagttcccagtgtcaggaccccaatatccttccttacaaagagtggggatcccaccctagaaaaggaatagcagttcagccaccc

SEQ ID NO: 35181 - DNA, 443 bp, Homo sapiens
actatagggcgaattggagctccaccgcggtggcggccgcccgggcaggtacctaggtttccttcaagacatcgtcttttgaatgagaactttcctgggttttagaggagggtggacattgtttattgatgcctcctgtccattaccgatgtttctcctgattgttattcatatgctcaccacccctccatggagcatccatggcctgtgacagagctctggggactgatatccttccactgactttggcgctggtgagagccctggtcatgtgattcagcttggccttaacccgacccagttgcacatattcctcaggccctttagagttgaagtcgagacctctctgagaacgcttgccagcccatgctcttctaaggctggagcaaacttcctccatctattccagacagaggggactgcaggggttggactcactcaag

SEQ ID NO: 35182 - DNA, 446 bp, Homo sapiens
acactactatagggcgaattggagctccaccgcggtggcggccgcccgggcaggtacagtagtgcactcttggctcactgtagcctcgacctccggggctcaagtgatcctcctgccttagccccacaagtagtgggactataggcacacaccaccatgcccatctaagtttttgtattttatgtagagacaaggtttcaccatgttgcccaggctgatcttgacctcctgagctcaagtgatctgcccacctcggactcccaaaatgctgggattataggcgtaaaccaccatgcctggccttaaatcaactttagagtcaacatctcttatcactggagcttctggagaaactccatcacgtggtgctctctttcctgatgtgttgtgcccaaatagcttgttcttatcagatgacttatttgctatgatatatatacttcaag

SEQ ID NO: 35183 - DNA, 448 bp, Homo sapiens
acactactatagggcgaattggagctccaccgcggtggcggccgaggtaccctgagggctaagtgcaacaaagagagtgatggggtcatccttcatacattctgaagaccgccgcactcgcatccatcgaggcacgattgtccctccacgctggaacacagggatactgcttagagttacaggcaggtacaattcaggcaattttgttttttcacttgggttcagattgcaaattcattgctgtgagaaaaggatggaggcaaattttagcagcaacctccacctgactgcttgactggagtgctctgaattttaacattggacttctcagcaccaccagctgttgctccgggacccattcgctttttaatctcagctgccatcgtcatgaaagactgttctacattcgttgcattcttagcactggtttccaaaaacggaattccaa

SEQ ID NO: 35184 - DNA, 417 bp, Homo sapiens
ccggccgaggtactacctactttttggttatgggtttactctttctccctgttttcacctctttctttcccaattcaaaacagccaattgagccctgttctggtattttgaatcattagagaaaagaaagggagtggctgttttgagttgtcctttctttgcagaaaggagaaaatgtgattatgtttttttttttaccagcctacttctaagtgtcactgcctggtttttctctttttcaaggattagaactaagaggacacaccagcatcggagtgtattaagcccctgaaacacatggtagctaggggctgaacacaggaaccgtatgacagcagcacaaacccccaaaggatgttcctgccttgtgggcccctgagccccttgggagactgagaatcatgaccagattcatcc

SEQ ID NO: 35185 - DNA, 434 bp, Homo sapiens
actatagggcgaattggagctccaccgcggtggcggccgaggtacgcggggagtcagtgtcagcccgaaggctgaaggaaaaagagcaacagatccagggagcattcacctgccctgtctccaaacagagccaccaaggaggagcaggggagcgacggccgctctagaactagtggatcccccgggctgcaggaattcgatatcaagcttatcgataccgtcgacctcgagggggggcccggtacccagcttttgttccctttagtgagggttaattgcgcgcttggcgtaatcatggtcatagctgtttcctgtgtgaaattgttatccgctcacaattccacacaacatacgagccgggagcataaagtgtaaagcctggggtgcctaatgagtgagctaactcacattaattgcgttgcgctcactggccg

SEQ ID NO: 35186 - DNA, 432 bp, Homo sapiens
agggcgaattggagctccaccgcggtggcggccgagtagctgccaggaaggagagactgggatggtttttttatctgttgctttcttaaatcaagggccgccgggccggagatggatggagggaccggggatttgggaactcgaaaacgagctgagagaagggagcctgtggaaatagactggagtctgggtagtgtcgtttcctagagaatggtctcgaagtaacttctcggtaaagtcttcacggaatttccagaccacacttgcccactgggaggcttttaggacccgagacgtgtgcaggcttttccagccaaaatgaagtttaatccctttgtgactttcgaccgaatcaagaatctcaaaaggcattttaatgcacctttccacattctaaggatgattatgttttcccctctttccaaagagctg

SEQ ID NO: 35187 - DNA, 410 bp, Homo sapiens
ctatagggcgaattggagctccaccgcggtggcggccgaggtacattgagaatgagaagctcatctcaggaaagcgccaggagctggtcaccaagatcgaccacatcctggatgccctgtagcccctgcccgcatcctccagggggcccagggtgcctgcactttgctgtggcaggcagattgggtggtagtgggaggatgtgcatggaggccaatgaaagctgacatctgtaaaaggccttcaaggaagagaaaccaggccctgcgtcaggcagtgtgagtttgccgtttgtccttaactttcttttgtttattgggttaaaaaaaagaaaactttaaaaaaactcccactaaaaacaaaacatttttgtgttttgaacaaaggaatttttcaaatatttgattggaat

SEQ ID NO: 35188 - DNA, 398 bp, Homo sapiens
ggagctccaccgcggtggcggccgaggtacaaagcaacagtaaaattaaacttaagtatattttaatttacctggtgtttccaaaacctattatttcaatttataataaaaaaaattgaggtattttacattttatgttgctaagtccttaatcttgttttttccatttatagcacatcttaattctttgtagctacatttcaagtattcagtagccacatatgactgttgttgactgcattggacggtgcaagtctagaatatagtaggggctcagtagatgtttgttgaatgaatgaaggagaggaagatgagttggttgttaaaggttgattgtagaatcgaggaagggttttgttctcacagtgaggcaggagtatattttttatgtttaagac

SEQ ID NO: 35189 - DNA, 67 bp, Homo sapiens
tcactaagggcgaattggagctccaccgcggtggcggccgtgcatcatcatggagttagtgaggcgc

SEQ ID NO: 35190 - DNA, 447 bp, Homo sapiens
acactactatagggcgaattggagctccaccgcggtggcggccgcccgggcaggtactgtgccctcttctggctcttgaggctctggagtcccaattgtctgtgttagtcagtgaccaggttccagggaaaatgatgtcatgtggtggtccaacttactggaaccaaagagacagtacctcggccgctctagaactagtggatcccccgggctgcaggaattcgatatcaagcttatcgataccgtcgacctcgagggggggcccggtacccagcttttgttccctttagtgagggttaattgcgcgcttggcgtaatcatggtcatagctgtttcctgtgtgaaattgttatccgctcacaattccacacaacatacgagccgggagcataaagtgtaaagcctggggtgcctaatgagtgagcttactcacattaattgcgttgc

SEQ ID NO: 35191 - DNA, 466 bp, Homo sapiens
cactactatagggcgaattggagctccaccgcggtggcggccgcccgggcaggtactccagcccggcactccagcctggcgacaagagtgagactccacctcaaaaaaaaaaaagaatccaatactgcccaaggataggtattttatagatgggcaactggctgaaaggttaattctctagggctagtagaactggatcccaacaccaaactcttaattagacctaggcctcagctgcactgcccgaaaagcatttgggcagaccctgagcagaatactggtctcaggccaagcccaatatagccattaaagatgacctacagtgctgtgtaccagtgaacaaaggcacgcttggcatacatcaggtcaaacttgtggtccaggcgagcccaggcctcagcaatggctgtggtgttgctcaacatgcacacagctctctgtacctcggccgctctagaactagtgg

SEQ ID NO: 35192 - DNA, 453 bp, Homo sapiens
ctactatagggcgaattggagctccaccgcggtggcggccgaggtactttttttttttttttttgctagctatttaatctaggaaatacagctcagaaaaaaaatgcagtcataaaacctgttggtataaagataagcagtttatttaatatctaattaaatgtggtcaccagagaaatcacagcttatgaaactttatcagaaaaagattaatccatttcaggcttaacccaaatgtcataagagaactcatgaatttagataggaatccacttattatccaaagacgttttcatatcaagttaggtgagcctatattactagctatatttatacttacttcaatcaaatttatatactttgtagctatcactgatgtggggcacaattatcgaaccagaataagataatagggagcctttctgtctttatcaaaaatttctagaatgttct

SEQ ID NO: 35193 - DNA, 446 bp, Homo sapiens
atagggcgaattggagctccaccgcggtggcggccgctctagaactagtggatcccccgggctgcaggaatccgatatcaagcttatcgataccgtccaccttgagggggggcccggcacccagcttatgctccctgtagtgagggttaattgcgcgcttggcgtaatcatggtcatagctgtttcctgtgtgaaattgttatccgctcacaattccacacaacatacgagccgggagcataaagtgtaaagcctggggtgcctaatgagtgagctaactcacattaattgcgttgcgctcactgcccgctttccagtcgggaaacctgtcgtgccagctgcattaatgaatcggccaacgcgcggggagaggcggtttgcgtattgggcgctcttccgcttcctcgctcactgactcgctgcgctcggtcgttcggctgcggcaa

SEQ ID NO: 35194 - DNA, 167 bp, Homo sapiens
ggcgaattggagctccaccgcggtggcggcccatgtacaagccatagcaacccctggtgcgactgaaaggcggtgcctacatctgggagggccgcgtggaggtgcttaaaaatggagagtgggggaccgtctgcgacgacaagtgggacctggtgtcggccagtgtg

SEQ ID NO: 35195 - DNA, 197 bp, Homo sapiens
cgactcactatagggcgaattggagctccaccgcggtggcggccgcccgggcaggtacgcgggtattccatctgtggatagaacccctggcagtgttgtcagctcaacctggtgggttcagttctgtcctgaggcttctgctctcattcatttagtgctacgctgcacagttctacactgtcaagggaaaagggaga

SEQ ID NO: 35196 - DNA, 84 bp, Homo sapiens
ttttggtctataaattggaaaggaaggctcggactgaaataaatacatttattctgagtaatgaccttttgggagcaatgtccg

SEQ ID NO: 35197 - DNA, 195 bp, Homo sapiens
cgactcactatagggcgaattggagctccaccgcggtggcggccgaggtacgcggggctaatgccattttcagcctcagcacgcctgcacccaggcgctcattaaaacagcatgttgctccccactgcctcgtgttgcctgttggcgcgctgtcggggttcgaaccgatacaagaacctttcacctacctggtgc

SEQ ID NO: 35198 - DNA, 475 bp, Homo sapiens
cactactatagggcgaattggagctccaccgcggtggcggccgtgcgtttgtggccgtccggcctccctgacatgcagccctctggaccccgaggttggaccctactgtgacacacctaccatgcggacactcttcaacctcctctggcttgccctggcctgcagccctgttcacactaccctgtcaaagtcagatgccaaaaaagccgcctaaagacctgctggaaaagaagcagttttagataacccgggcaagaccggggttggggggacggacctcaaagctgagagtgtggttcttgagcatcgcagctactgctcggcaaaggcccgggacagacactttgctggggatgtacctcggccgctctagaactagtggatcccccgggctgcaggaattcgatatcaagcttatcgataccgtcgacctcgagggggggcccggtacccagcttttgttccctttagtgag

SEQ ID NO: 35199 - DNA, 356 bp, Homo sapiens
ttggagctccaccgcggtggcggccgaggtacctattctttgcagtctcaggaattgttgacatgctcacctatctggtcagccacgttcccttgggggtggacagactggttatggctgtggcagtattcatggaaggtttcctcttctactaccacgtccacaaccggcctccgctggaccagcacatccactcactcctgctgtatgcccttgtcggaggggggtgttagtattttccttaagaggtgatctcccgggaccacattgtggctggaactttttccgaaccagtctcatcatttcttcatggaaccttggtttctggccagattgggttttagtgctgtttccca

SEQ ID NO: 35200 - DNA, 216 bp, Homo sapiens
tatagggcgaattggagctccaccgcggtggcggccgaggtaccagacccgccagaaccagtgcttctataactccagttacctgaatgtccagcgggagaatgggaccgtctccagatacgagggaggccgagaacatgttgctcacctgctgttccttagggacaccaagaccttgatgtttggttcctacctggacgatgagaagaactgggg

SEQ ID NO: 35201 - DNA, 191 bp, Homo sapiens
  misc_feature 31, 35, 36: n = A,T,C or G
atcggagctccatttcggtggcggccgaggnactnnaattttttttttttctctctccctcccccacaccgtatcggcgctcgagcgggccgggcgggcggccgttctagaactagtggatcccccgggctgcaggaattcgatatcaagcttatcgataccgtcgacctcgagggggggcccggttccca

SEQ ID NO: 35202 - DNA, 438 bp, Homo sapiens
ctatagggcgaattggagctccaccgcggtggcggccgaggtacttttttttttttttttttttttttttgccacacagactagggaataagagaacaaacagtaataactgagtagtgcaagattatattctttgagtctaaaataaattaaataacttccaaaaaaagtaagtgcttttgtttggaaggtgataacattataattttaaaccaaactgcttcactgatataactcccaccaaatatcttcatggggtaggttactgatttttatcttcctgaataaggaaacaaaggtcagtgacagataccagtaactgattatttttacaatcttaaaaaaaccccaacatatttcattggaaccataaaaactcatcattttctctttatgaataactcgtgtttttataccactttaaatgccgtcttcctt

SEQ ID NO: 35203 - DNA, 360 bp, Homo sapiens
actactatagggcgaattggagctccaccgcggtggcggccggttgtcctggtggaatgtgtccccctcgttccccagcgccacgatgtggatggacctgcacggacagagggggcgaggggagaagggaagcacggtcagcgcgcgggtctctcctcggaacaggaagtgccccgcgtacctcggccgttctagaactagtggatcccccgggctgcaggaattcgatatcaagctttatcgataccgtcgacctcgagggggggcccggtacccagcttttgttccctttagtgagggttaattgcgcgcttggcgtaatcatggttcatagctgtttccctgtgtgaaaattgttat

SEQ ID NO: 35204 - DNA, 442 bp, Homo sapiens
ctactatagggcgaattggagctccaccgcggtggcggccgcccgggcaggtacttttttttttttttttttttttttgagactgagttttgctcttgtcacccaggctggagtgcaatggcgtgatctcagctcactgcaacctccacctcccgggttcaagcgattctcctgccacggactcccgagcagctgggattacaggcgcctaccaccacacccagctaatttttgtatttttagcagagatggggtttcaccatgttggccaggctggtctcgaacccctgacctcaggtgatccacccgtctcggcctcccagagtgctgggattataggcgtgagccaccatgcccagccagagtaggaatattaaaatgaggtcagtaaagaaaaggctacattctcactaactggccacatcatttagtgtttcttttg

SEQ ID NO: 35205 - DNA, 74 bp, Homo sapiens
cgactcactatagggcgaattggagctccaccgcggatggcgggccgaggtacctcacaagacactacacatat

SEQ ID NO: 35206 - DNA, 184 bp, Homo sapiens
tcactatagggcgaattggagctccaccgcggtggcggccgctctagaactagtggatcccccgggctgcaggaattcgatatcaagcttatcgataccgtcgacctcgagggggggcccggtacccagcttttgttccctttagtgagggttaattgcgcgcttggcgtaatcatggtcatag

SEQ ID NO: 35207 - DNA, 446 bp, Homo sapiens
tacgactcactatagggcgaattggagctccaccgcggtggcggccgcccgggcaggtacgcggggactttataccagtcatgtggcagaaatcaggcctgctctgtgaatcggctttgtgcagatcatgaggcgcacctatgttggcagcatgcctggtcgcatcatcaacggcttgaagactgtgggagtgaacaacccagtgttcctattagatgaggttgacaaactgggaaaaagtctacagggtgatccagcagcagctctgcttgaggtgttggatcctgaacaaaaccataacttcacagatcattatctaaatgtggcctttgacctttctcaagttctttttatagctactgccaacaccactgctaccattccagctgccttgttggacagaatggagatcattcaggttccaggttatacacaggaggagaaga

SEQ ID NO: 35208 - DNA, 409 bp, Homo sapiens
  misc_feature 228: n = A,T,C or G
atacgactactatagggcgaattggagctccaccgcggtggcggccgcccgggcaggacttttttttttttttttttttttttttggtagagatgggacttcctacgttgctcaggctcgtcttgaactcctgagttcaagtgatccacccaccttggcctttcaaagtgctgagattacagatgtgagccaccacacctggccaaaataataaaattttaatcagtnaaaaaaaaaaaaaaggaaaagtgtaaatgtgttcatccaacaaagcctttctttcacacatatgaaatataaatagatccatttaaatacgatatccagttgaaccagccctgaagggctttctgaattggacatgttctgtcgctaccagtggggcttcctggaagctggcccaaagctg

SEQ ID NO: 35209 - DNA, 383 bp, Homo sapiens
gactcactatagggcgaattggagctccaccgcggtggcggccgaggtactttgttttttttttttttttttttttggaatgaacaaatatttatttatcttttataacaagtaaggcaatgttgcttaaaggaagacaaacaaacataaaagattccgttgacaatgcattttttcatctgttcggcacaatgcttttgtcataatggagatgtgacagcaaactttccaggacattcagtcttcggcggcagcacttagggcagatgactggccgcttataaatgaggccaaagcaccaggtaggtggaaggttcttgtatcggtttgaaccccgacagctcgccaacatacaacacgaggcaatggggagcaacatgctg

SEQ ID NO: 35210 - DNA, 517 bp, Homo sapiens
  misc_feature 338, 339, 384, 387, 411: n = A,T,C or G
actatagggcgaattggagctccaccgcggtggcggccgataccttaccgtggctgctgtcttccgtggtcggatgtccatgaaggaggtcgatgagcagatgcttaacgtgcagaacaagaacagcagctactttgtggaatggatccccaacaatgtcaagacagccgtctgtgacatcccacctcgtggcctcaagatggcagtcaccttcattggccattagcacaacccattccaggaagcttcttcaagcgccatctccggagcaagttcacttgccattgttcacgccggaaagggcacttcctccacttggtacaactgcccgtggcggnnccgctcttagaaaactagttggatctccccgggcttgcagggaanttntcgatatcaagcctttatcgattnaccgtcgacccctcgagggggggggtcccggtaacaccagctttttgggttccctttttagtgaaggggtttaattgcgccgccttggcgtaaatcaatgggtcat

SEQ ID NO: 35211 - DNA, 457 bp, Homo sapiens
tacgactcactatagggcgaattggagctccaccgcggtggcggccgaggtacaatttctgccactggtctaggtgtctgaggagcatcttcctggctcagagaccttttgctccaggtgctcatgccgcaaatggcaatctgcgcgcgaactaattcgcggccgctctagaactagtggatcccccgggctgcaggaattcgatatcaagcttatcgataccgtcgacctcgagggggggcccggtacccagcttttgttccctttagtgagggttaattgcgcgcttggcgtaatcatggtcatagctgtttcctgtgtgaaattgttatccgctcacaattccacacaacatacgagccgggagcataaagtgtaaagcctggggtgcctaatgagtgagctaactcacattaattgcgttgcgctcactgcccgctttccaatcgggaaacct

SEQ ID NO: 35212 - DNA, 185 bp, Homo sapiens
ccgcggtggcggccgttgggaactgtgtctccccagcctttgggccggcgcctggtcctggcttcggcgaatgagacctgcggacctgcccccgtgccccatggaagaatccccggcgtccagctctgccccgacagagacggaggagccggggcccagtgcagaggtcatggaagaagtgacaa

SEQ ID NO: 35213 - DNA, 472 bp, Homo sapiens
agggcgaattggagctccaccgcggtggcggccgcccgggcaggtacttgtctaaggctctggcggctccgcgaatctcatgtgctgggccatcatggacgagagtggtcttcagcaccgcttgtaaagcagtgttaacaaccatcacaccgccagcagcaatgccctcctcagccaccaaggcaggccacaggtaacgagtgatgccccatcttgaacggcacccaagcctccgcctccataactcaacagcagcagggaaaaagcatggtctcaattctcttgacaaatctcagaggtattatactcttattccaactacatctccctccccaaagaagcgcacacaaaacaattttaaaacttatgttttctacggaaaccttacctcaaagtgatgcacaaaactgaaatttatatggctgcttaaatgtcacatcctggctcctagcagggaaacaaaacgctctga

SEQ ID NO: 35214 - DNA, 66 bp, Homo sapiens
atagggcgaattggagctccaccgtgtgtggctggccgaggtcacacagtgcagttgtatcactgt

SEQ ID NO: 35215 - DNA, 479 bp, Homo sapiens
actactatagggcgaattggagctccaccgcggtggcggccgcccgggcaggtacgcgggaagccctcaccccacaaggggcaggtgggggcttggttgctgacccggcccaagtccccacagagcaccttctgtagctccagcttgtctccctggcttctctttgaaggagaaaaatgtaaaatatgcactgagaaagccagccccgcctgcttagtcagccccggcagcagggcagccatgggaactcaaggaaaagcaggaacccttttccaaaagcccagagaagccctgggctcagatctgtaattctcccaggagctgtgatagagcaggccacacaaagtccctacgcctccctgctgcctcccccagatgcattgtgatggcatcaccattccccaaattgaatatcagcatgcggcctgaccagggactctttagatgcatgaattaatttatatgaaggctctcacaga

SEQ ID NO: 35216 - DNA, 480 bp, Homo sapiens
  misc_feature 393: n = A,T,C or G
gactactatagggcgaattggagctccaccgcggtggcggccgaggtacaataatattatctttatgagcagcatggaaatttcattcctgatctggaagaataaaaggaaagaaaatgtcaggtgaaagagtaagtagcctccaacttaagcagacagaataattttctttaaaatgaaaagaacattttaagctgtcttcccccctaaaagatcagatctagaaagggctggaaatgaactgtgcccaggaatctgggggtgctctccagtaaggcgaactgaggctcatttgcagccaagacttggaactcgggatgagacctaatgggctattgctgccatctggctgccaaaaagtccctaatagatggattttccaggctgacccanctgtggggcggggggggtcctctggcttctgtgtcctctgaagcgtttgctgccctcaccctctctgaactgaccattgtcctgctg

SEQ ID NO: 35217 - DNA, 475 bp, Homo sapiens
ctactatagggcgaattggagctccccgcggtggcggccgaggcacttggtttgttctttttttttttttttctgatgttgagagtcagttttattgccatctctgggaggggctcaaatccgcccaatctccttcagcttggccaccaggtcctcagtggtctccaccttgacgccggccgctctaaaactagtggatcccccgggctgcaggaattcgatatcaagcttatcgataccgtcgacctcgagggggggcccggtacccagcttttgttccctttagtgagggttaattgcgcgcttggcgtaatcatggtcatagctgtttcctgtgtgaaattgttatccgctcacaattccacacaacatacgagccgggagcataaagggtaaagcctggggtgcctaatgagtgagctaactcacattaattgcgttgcgctcactgcccgctttccagtcgggaaacctg

SEQ ID NO: 35218 - DNA, 181 bp, Homo sapiens
gcgtatatgactcacttagggcgaattggagctccaccgcggtggcggccgaggtactttttttttttttttttttttttttttgcaaaataatggaagatccttttgaaacttaatatcttcagttatcaatattactgcattatggagctagtgcaatcctgcatagccttggtcaaaa

SEQ ID NO: 35219 - DNA, 344 bp, Homo sapiens
ccaccgcggcggcggccgaggtaccatatcctaaggctgcacagagcaggaggcccagcctaggaaacgatttttccctcctagacctctgggcctgagatgggaggggttgccatgaaggtctctgacatgccctggagacattttccccattattataggtgattacttactcaaatttctccagtgggtttgaatttctccccagaaaatggatctaacttttctatcgcattgtcaggttgcaaatcttccaaacttaaatgttctgctttatcttgaatgctctgccacttaaaaatttcttccactagatatcctaatcatatctctcaaggtcaaag

SEQ ID NO: 35220 - DNA, 400 bp, Homo sapiens
gcgtaatacgactcactatagggcgaattggagctccaccgcggtggcggccgcccgggcaggtactacaagcagggatgtgctggcctgtgcagagtggaatcccatgtggtgccactgttgttactgtgtaagaaacagggactgttccttgatggagctgatcatgtatgtcaaccatgactgcattctgctggggtggatgagcagcaggatgtagcagacggggagatacattcggagggtggaaggctcgaggctcctctattgcttgctgctgtgcgtaagggagatggtgatagttttcatcttgactaatggaattatgtcgagacagacgatcccttcttcctctctggcgcctgacaggaggacttcttctgttgcgtgcaggtgtgtt

SEQ ID NO: 35221 - DNA, 403 bp, Homo sapiens
cgtaatacgactcactatagggcgaattggagctccaccgcggtggcggccgcccgggcaggtacaggctgggtccccgtggtcgccaagcctcctgcctgctcaatgatgtaggccacgggattgcattcatacaggagccggagctgtggaggaacagaggcaggacaaattcaccaagagcctagcaacatgaagagagatgccaggaagaagagagaagccaggaaacaagccaaccgcacaatccccacatcagagcaggagaagatgggggcctgctggcagagctggggcttggctgtggtcactctgaacctgctctttggtgttttcatgagtggtgggaagaatagggaccatatggagcccacacaggaagctctagcagtaacacagcaag

SEQ ID NO: 35222 - DNA, 392 bp, Homo sapiens
atacgactcactataggtgcgaattggagctccaccgcggtggcggccgcccgggcaggtacaaacagaataaaaagtcattgcttttgatggtcagcaaacacccaattctgaggaggaggagaggtgatgcccagcaggtggattaggacccccagtggttggcggggtgcctggctttgcggccctctcccaggaggcagagagcacagctttaggtagtgtaagcctttttccttttatttagaataatcttttttttttttctttttctttttttttaagcaatttccccactcccaagttgggccagtaaagattacatgaaaactggcacacctattggctggaatacagatgcaccaaatgaggatttaaaaactttccgagcg

SEQ ID NO: 35223 - DNA, 387 bp, Homo sapiens
tactatagggcgaattggactccaccgcggtggcggccgaggtacctctgccaccgagttcaagggatcctcctgcctcagcctcccaagtagctgggattacaggcatgcaccaccacacctggcaaattgtcataattttttgtgaagatggggtttcaccatgttggccaggctgcctaggttttgtttttaagaagtaacctgaaatttcctacaacactgaataaagtggttcctgcccgggcggccgctctagaactagtggatcccccgggctgtaggaattcgatatcatgcttattcgatccgtcgacctcgagggggggcccgggtcccaacttttgttccctttagtgagggttaattgcgcgcttggcgtaatca

SEQ ID NO: 35224 - DNA, 279 bp, Homo sapiens
  misc_feature 16, 31, 60, 70, 82, 84, 89, 100, 162, 163, 172, 174, 175,206, 225: n = A,T,C or G
gcccagaaccagcccncggcagcttttcacnacaacgggccaccagccgcaaaaacacgngcagcagagnaagagaggcacnangggcnggcagaaggcngggcacccacacatttacagacaatttttagcaacagcggggggcccccccaggaccaagcnnggagaaggngnnggccgacagcaggcgcgggccaaacaagagngcaaggaggaggggggccnacagacccaggagaggccacccgccaaggcggccaagcacagcagcagcggaca

SEQ ID NO: 35225 - DNA, 397 bp, Homo sapiens
tacgactcactatagggcgaattggagctccaccgcggtggcggccgcccgggcaggtactttttttttttttttttttttttttggggaatcattccccatggtgatatgattgtttaaagagctgggtcaattgtggatcacttgtagaggtctgggttgtcccacagggcaaagaaagtctgtacttgtctggatgggtccacagctcgatctgcgccatcacctggttggtgaaggagttactcatcacgaagctggggtggcccatggcacaacccaggttgaccagccgaccctcggccagcaggatgatgcggcgcccattcttcaaccgataccggtccacctgcggcttgatgttcaccttctccacggcgttctcgttgagccactt

SEQ ID NO: 35226 - DNA, 160 bp, Homo sapiens
ctcactataggtcgaatgggaacccaccgcggtggcggccgaggtacctgaacaaatcccatcaaggacagattctcagtcttgaagaggcagcacggtaaaggggaaagatcatgagttttggggccaggttcccttggatattgtggggtccccacac

SEQ ID NO: 35227 - DNA, 391 bp, Homo sapiens
actcactatagggcgaattggagctccacgcggtggcggccgcccgggcaggtacattaataagacacctcagaagtgaaacaaacctagtttttactaaaatgatgggataaaggtagtgtctatgctgaagagcagcttcacttgtttccccacagaaaaaggcccaaaatttttggaggataatttaaaaactaagccaataaggccaggcacggtggctcatgcctgtaatcccagcactttgggaggccaaggcgggcagatcacctgaggtcaggagttcgagaccagcctggttaacatggcgaaatcccgtctctaataaaaatataaaaattatcccgggcatggttggcatgcacctgtaatcccagctactcaagaagct

SEQ ID NO: 35228 - DNA, 206 bp, Homo sapiens
agggcgaattggagctccccgcggtggcggccgaggtacttacatgggttataaatcctctctctggacatcaatgtagagtccatctttcaagcactttaatttttttagctgccaaagggtatgaattacattattgtatgctaatttccctgaaatcaatgccttctatgttcaccacagggatacaagcctgttatgtttga

SEQ ID NO: 35229 - DNA, 384 bp, Homo sapiens
aattggagctccacgcggtggcggccgcccgggcaggtacgcggggaatcccgcaaacacaagaagtcaaagaaatcccacaaaaaaaagcagaaaaaaaggtcacacaaaaaacagaagaaaagcaaaaaagaagccacagatataacagcagattcctcgagtgagttctcagaagaaactggggcttctggtacacgacatctgacttgggaatgcgcaagcagtcgagagcttcgtagaactctcccagttgctccttggtcgtctctggcttgtcagcatagacagacagcccccagttcttttcatcgttcacgttaaaagcatgcatgtaggtcttggtgtccctgacgatcatcaagtgagcgaaatgctcttggc

SEQ ID NO: 35230 - DNA, 583 bp, Homo sapiens
gcgtaatacgactcactatagggcgaattggagctccacgcggtggcggccgaggtacatgtgggagaaaaacttaagtgtgatgagtgtggtaaggaattcagtcagggcgctcatctacagacccatcagaaagtccacgtgatagagaaaccatacaaatgtaagcaatgtgggaaaggtttcagtcgtagattagcacttaatgttcattgcaaggtccacacggcagagaaaccttataattgtgaggagtgtgggagggccttcagtcaggcctctcatcttcaggaccatcagagactccacactggggagaagccattcaaatgtgatgcatgtggtaagagcttcagtcggaattcacatcttcaatcccatcaaagagttcatacaggagagaaaccatacaaatgtgaggagtgtggtaagggcttcatttgtagctcaaatctttacattcatcagagagtccacacaggagaaaaaccctataaatgtgaggaatgtggtaaaggctttagtcggccttcaagtcttcgggcccatcatggagttcacactggaagagaagtcatacata

SEQ ID NO: 35231 - DNA, 397 bp, Homo sapiens
atacgactcactatagggcgaattggagctccaccgcggtggcggccgcccgggcaggacagacatggctaatggaccagggcctctgtggtcagaagagagtcaagcaagcaggcggcagatctgggaccagcatgcccaccacccagtcaggccgctctgtttcgtgatgttttggacacccaacgtgtctgagaaaatcttgatagacatcatcggagtggactttgcctttgcagaactctgtgttgttcctttgcggatcttctccttcttcccagttccagtcacagtgagggcgcatctcaccgggtggctgacgacactgaagaaaaccttcgtccttgcccccagctctgtgctgcggatcatcgtcctcatcgccagcctcgtggtc

SEQ ID NO: 35232 - DNA, 361 bp, Homo sapiens
acgactcactatagggcgaattggagctccaccgcggtggcggccgcccgggcaggtacccccttttcactcaaagatgtcccggattggataataaattacatagctataccctgtccatagtagaacctgactacctttatctacggatttatttatagtttgtcacacggtcgaatagctccttcttctcagtaatacaagcttttttggtttgaaatatggatcctcttcccagcataataatgtgattttttttattcattttatgttattatattcacatttttacttaaaggaaaatgctgctatttgtgatgaaattgctcgtcttgaggaaaaatttcttaaagcaaaagaa

SEQ ID NO: 35233 - DNA, 358 bp, Homo sapiens
  misc_feature 119: n = A,T,C or G
ctactatagggcgaattggagctccccgcggtggcggccgcctcggcctcccaaagtgctgggattacgggcacaagccactgcacccagccacaaacagatcgcagatccaggtttcntcaaaccctggagcatctgcttaattttcccataaaatcagtcttattctttctgacagctctgagactcctccggccacgactaggtgctgtcctggaggaaacggtggaggacggccgcacaaaaaccaatgctaccctgatgaaaaactccgttcccttctcgccagaacataaaatgcgatggagctaccggccaccgcttgccgaagacaaaatggcgccgacccccgcgtacc

SEQ ID NO: 35234 - DNA, 372 bp, Homo sapiens
gactcactatagggcgaattggagctccaccgcggtggcggccggctcctttgacaacagtagtctctgctccggcggcggggacaaggcggtggttctgtgggatgtggcatcagggcaggtcgtgcgcaaattccggggccacgcaggggtgagtgaaagcctggagaccctcatttgagtggaggggacccgtattagcgcataggtggtgacacggccacccccattacaccgtaaggatcccttccccagatgacgatcccccacttcgtatgccaggttaggcagccaccaacccctgtccttgctgttccccgcaaaacctttcacctccccttcgcccttgctttaaccgacactgggaaccct

SEQ ID NO: 35235 - DNA, 390 bp, Homo sapiens
gtatacgactactatagggcgaattggagctccaccgcggtggcggccgctatgacatggctcagcttcggtttaaaaaaggtcagtgtctatctggaaatttctatgtgagaggtgatggaaccagagtttacttcttcacacaagaggaactggacacgcttttcaccactgctggactggaaaaagttcagaatctggtggaccgccgactgcaggtgaaccgagggaagcaactgacaatgtacctgcccgggcggccgaggtacagaaaaatcacagtaatccactccaatgtctgtaaagtccacaaaggtagaggacaaaatctggaatgcctgaggattatttttctttagtttttggcacacattaaacccatctacaatt

SEQ ID NO: 35236 - DNA, 397 bp, Homo sapiens
gcgtatacgactcactatagggcgaattggagctccaccgcggtggcggccgcccgggcaggtacgcgggggcggaagtgcgagggcccaggtggctgaaggggccgttaggaacatccaagcggtggggcacaggcagatccccgacctgacctggaccacccttctcctcttggcccgccccttcaactcgcctccgcttaggtctggattggccccgccccctgacctgagcctggtccttcttcaggccctgacccttgacctccggtggctcccccatctctcaggcgcgatggctacgggcgcggatgtacctcggccgctctagaactagtggatcccccgggctgcaggaattcgatattcaagcttatcgatcccgtcgacctcgagg

SEQ ID NO: 35237 - DNA, 82 bp, Homo sapiens
ctataggggcgaaattggagctccaccgcggtggcggccgcccgggcaggtacgcgggtgggacccgcagctcagctacagc

SEQ ID NO: 35238 - DNA, 113 bp, Homo sapiens
  misc_feature 86, 92: n = A,T,C or G
gactcacttagggcgaattggagctccaccgcggtggcggccgcccgggcaggtacgcgggtctgatcgctttaatgacagtttgngttttncttggtttattcagccaccaa

SEQ ID NO: 35239 - DNA, 394 bp, Homo sapiens
gcgtatacgactcactatagggcgaattggagctccaccgcggtggcggccgcccgggcaggtacttaaatcagaacagaatgatttaaggctacagatggaagcccaacgcatttgcctctctctggtttattcaactcatgtggatcaggttcgtgaatatatggaaaatgaaaaagataaagctctttgcagtcttaaagaagagcttatttttgctcaagaggaaaagatcaaggaacttcagaaaatacaccagttagagctacagactatgaaaacacaagaaacagaggccatggaggacgaggagagacagaagaagctggaggccggcaaagccaagcttgcccagtttcgacaaagaaaagctcagtcggatgggcagagtcct

SEQ ID NO: 35240 - DNA, 571 bp, Homo sapiens
tacgactcactatagggcgaattggagctccaccgcggtggcggccgaggtacatcaccctgctgagggacatccaggacaaggtcaccacactctacaaaggcagtcaactacatgacacattccgcttctgcctggtcaccaacttgactatggactccgtgttggtcactgtcaaggcattgttctcctccaatttggaccccagcctggtggagcaagtctttctagataagaccctgaatgcctcattccattggctgggctccacctaccagttggtggacatccatgtgacagaaatggagtcatcagtttatcaaccaacaagcagctccaacacccaacacttgtacctgaatttcaccatcaccaacctaccatattcccaggacaaagcccagccaggcaccaccaattaccagaggaacaaaaggaatattgaggatgcgctcaaccaactcttgcgaaacagcagcatcaagagttatttttctgactgtcaagtttcaacattcaggtctgtccccaacaggcaccacaccggggtggactccctgtgtaacttctc

SEQ ID NO: 35241 - DNA, 514 bp, Homo sapiens
ctatagggcgaattggagctccaccgcggtggcggccgaggtacacggctcagaagatcgaagtatcaaagtcacgttctctgtttctaacactgtatgatagacagctttgtggaaatctgtcaaagaacaatacaccatcttgtcttacttcttaggcaactgatccttgataagagtcttggtgcgcctgagaaaccatgccagacatctttttggcaagtctttgcatggcctttcggccagtggctagatctctctttgttgccgtgtgtctctgaccatgttctactgggtcagaaaactgcttcttgaagtacgtcccactccctaaaaggcctggcacagcccagtgcataacacaccacagttccttcatgttgttctgaaagatggttccagcgaggccaatgcggacattacatttcaaagcttgcataacttctggtactctagcttttggattcttgattctatgagcttcatccacaatgacagctgaccattccaaact

SEQ ID NO: 35242 - DNA, 622 bp, Homo sapiens
tacgactcactatagggcgaattggagctccaccgcggtggcggccgggaaagggccaggaaagggagtcaagcaggagcgtctgtccgaacggaggctaggtaagaatatttcaccatgaaaatgttaaaagacataaaggaaggagctaaaccatatggacccaactctccttatatgagaacgttattagattccattgctcatggaaatagacttattccttatgattgggaaattttacctaaatcttccctttcaccctctcagtatctacagtttaaaacctggtggattgatggagtacctcggccgctctagaactagtggatcccccgggctgcaggaattcgatatcaagcttatcgataccgtcgacctcgagggggggcccggtacccagcttttgttccctttagtgagggttaattgcgcgcttggcgtaatcatggtcatagctgtttcctgtgtgaaattgttatccgctcacaattccacacaacatacgagccgggagcataaagtgtaaagcctggggtgcctaatgagtgagctaactcacattaattgcgttgcgctcactgcccgctttccagtcgggaaacctgtcgggccagctgca

SEQ ID NO: 35243 - DNA, 593 bp, Homo sapiens
tacgactcactatagggcgaattggagctccaccgcggtggcggccgaggtaccgggaaccaaactctcattccccaggggcctaagccccccgtggccaggcccttctcaagtcagggttcctgcacattcacagttacgggtggccctgggagtaacacctggcacccaaacaggtcaccagagtccacacatagtccacctgccctccctgcgtaagatcagctcttcctcctcccgacgaatagatcagggtcaatgatccctgccaagatggcgactgctccagcctgctggtccaacctgtccagccacagctgttgctcgaaggcttgaagttcaatgggaccctctcccgctttctacaaactggttcctttatttttatgtttatttatttgggacgaggtctggctctgtcacccaggctggagtgcagtggtgcaatcactgctcactgcagcatccacctcccagcgtccacccatcctcctggcctcagcctccggaacagctggggtacctgcccgggcggccgctctagaactagtggatcccccgggctgcaggaattcgatatcaagcttatcgat

SEQ ID NO: 35244 - DNA, 466 bp, Homo sapiens
gcgaattggagctccaccgcggtggcggccgggcgcggtggctcacgcctgtaatcccagcactttgggaggccgaggcgggtggatcacgaggtcaggagatcgagaccatcctggccaacacggtgaaaccccgtctctactaaaaatacaaaaaattagccgggcgtggtggcgggcgcctgtagtcccagctactcgggaggctgaggcaggagaatggcgtgaacccgggaggcggagcttgcagtgagccgagatcgcgccactgcactccagcctgggcgacagagcgagactccgtctcaaaaaaaaaaaaaaaaaaaaaaagtacctgcccgggcggccgctctagaactagtggatcccccgggctgcaggaattcgatatcaagcttatcgataccgtcgacctcgagggggggcccggtacccagcttttgttccctttagtgagggttaattg

SEQ ID NO: 35245 - DNA, 509 bp, Homo sapiens
ggagctccaccgcggtggcggccgaggtacgcggggctcactagaaggagccccctgaccccttcttccaaaatactttttgtctttgtcttcgtttctgcattcatcccccttcgttcactcccataacaaccaacagcgacaactggcacctaggacagggacgtgagtgaaggtctgctggagcagagaaactgacactggcaagaagaacgagaatgagaaaccctgcgacgagtctgctgacagctgatataagtctgcaaaatcagctggaccaccaaacggcaattgagagctgcacaacctgcaattacctttattcaattaatgcaaaaacaaaaatggggagatgttacaggccgaaagaatgaaggtcgtgaccaactcagtataccactgaaggctatatgagcaaacagaaaactgttctcatgaaagcaggatgttggaaaactaacaactgtgtctgccgccagaaaggttgctgagggcagtcatgccccaag

SEQ ID NO: 35246 - DNA, 576 bp, Homo sapiens
cgcgtaatacgactcactatagggcgaattggagctccaccgcggtggcggccgacgtaccacaggacaatcccattagatgtatcccccaaataggaaaagttaatttccccaaccttaaactgctgggcttaaaattgagctcacgggaaaggaatccaaaagcctccccgcgtacttgggctttttgttgtttactacttgggaaattggcatgtattctgcaaacacttgttttacgccagttttaccccatctgctaaacgcaatgcatagtctgtatcaaccataagaacccatctgtaaaaacatcaatgttgatagtcaaagaccactgtgttacaaccaaaatcaggtcttgtatgattacatacatgagacagagcaatggtggcacatgctgagcatgacaatggctcatatgtttgacgcaaaagtaaacaaattcatggatgcattcacgaggaatgccttgcatggacaagggtaaagttcaatttaaaataaaagctccctaatattcttatagggcaccagctctaaaccggtctgtagaagagcttttgggctgaaaca

SEQ ID NO: 35247 - DNA, 615 bp, Homo sapiens; identical to SEQ ID NO: 33688
  misc_feature 171, 468: n = A,T,C or G

SEQ ID NO: 35248 - DNA, 398 bp, Homo sapiens
tacgactcactatagggcgaattggagctccaccgcggtggcggccgcccgggcaggtacgcggggggtatgaaggagctggccgtgttccgggagaaggtcactgagcagcaccggcagatgggcaagggcggcaagcatcaccttggcctggaggagcccaagaagctgcgaccaccccctgccaggactccctgccaacaggaactggaccaggtcctggagcggatctccaccatgcgccttccggatgagcggggccctctggagcacctctactccctgcacatccccaactgtgacaagcatggcctgtacttattggcacaaattcgggcagcctccagggcttcagaggacagctgctcatattcatctgacaccatgtggccccaaag

SEQ ID NO: 35249 - DNA, 372 bp, Homo sapiens
actatagggcgaattggagctccaccgcggtggcggccgaggtactataatggtccccatcttaatttgaaagcgtttgataatcttttaggacatgcactgacgaaggcactcgaagactccagcttcctgaaaagaagtggcagggacagtggctacagagacatctggtgtcctgaacgtggagaatttcttgctcctccaaggcaccataagagagaagattcctttgaaagctaggactctcagggctcgaggtcattgacaagctgctcctctgatatcacattaagaggggggcgtgaaggttttgaaagtgacacacatgccggaatttaccattcaagatgcaggattataataaagatgata

SEQ ID NO: 35250 - DNA, 444 bp, Homo sapiens
gcgaattggagctccaccgcggtggcggccgcccgggcaggtactttatagcatttgccccaccccacagcttaggtttttctgtcatcctcagatcccacaggcattgcgaagaagccgctccctatacccaggtataactcaaaatccaaagggatagggccaggatccctattcctaccccatctattctctgttggctccaagagctaccccagagaccttaaacagaaacagtagctgaggcttcttcctagatacctgactagggaagtttgtctctcctttcttgcccaaccaggtcaaagtaaaatgtgagttgacagctcaaagcacttgtaactgctgccccctccctacctctactccccaaaatggaatcatgggatagggaaggcccccatggggtcagaagggcacggtaggttcttgcaataatttttg

SEQ ID NO: 35251 - DNA, 396 bp, Homo sapiens
ctatagggcgaattggagctccaccgcggtggcggccgaggtactttttttcttttttttttttttttttttgctccaaacagatttattgaatacagcaaaattctatatacaaagggacctggacctgctgcttcaaaacatgatctttttttactaatatcttgatagtcgggccatagagcattagaaagcaattggctcttaaattaacagaaaagtgcctaatgcacattaaatgaatggcctaactactggaactttagtagttctataaggtaattaacataggtaggatccagttcctatgacaggctgctgaagaacagatttgagcatcaagaggccattttgtgcacttgccccgtgatgccatcgtgttactggatcataatg

SEQ ID NO: 35252 - DNA, 354 bp, Homo sapiens
cgcggtggcggccgaggtactgatgaacccgaacaggagttgcttctgttttaattctactactactggtgcatgatttacagctaaaccagagaggagtctgcaatgccgagtggaggaaggaggaaccggagtgtgagcagtagctgggtgggcaccatggctgggatcaccaccatcgaggcagggaagcgcaagatccaagttctgcagcaccaggcagatgatgcagaagaacgagctgagcgcctccagcgagaagttgagggagaaaggcgggcccgggaacaggctgaggctgaagtggcctccttgaaccgtaggatccacctgggtgaagaagagctggaccgt

SEQ ID NO: 35253 - DNA, 408 bp, Homo sapiens
gcggtggcggccgaggtactgcacgacgtgaatcatgacattggagaagacactgacgtagaggcactcgaagagtcttcgtaagctgtgcagccacagaaatactagcactaagaatgcagacagtgccagctcccctccctggaactgtgccgccccgagaattctgagcaaaccatgaagccagcttggaaaaggtgctcccaggaacagagattgagtaaggcaccaaagcaggaagccattccacagcactgagatgatataaaagtgggaaaaatatctcttggggacatcaaaggctcggcaggcggcggggcgcgacggctccccacacttggttttcccataacggatcaggtcctggaagatcgcgcagcccgggagcaggccgggcggcaggagctg

SEQ ID NO: 35254 - DNA, 445 bp, Homo sapiens
ggcgaattggagctccaccgcggtggcggccgcccgggcaggtacaagggcatgacaggctgggaggtggctggtgatcacatttacacagctgctggagcctcagacaatgacttcatgattctcactctggttgtgccatgatttatacctccgcagtcggtgatggcagacacagagaattaagaagggggccagaatcacatttgtctttgagaccctctgttctgtgaactgtgagctctacttcatggtgggtgtgaattctaggaccaacactcctgtggagacgtggaaaggttccaaaggcaaacagtcctatacctacatcattgaggagaacactaccacgagcttcacctgggccttccagaggaccacttttcatgaggcaagcaggaagtacctcggccgctctagaactagtggatcccccgggctgcag

SEQ ID NO: 35255 - DNA, 437 bp, Homo sapiens
ctactatagggcgaattggagctccaccgcggtggcggccgaggtacagaaggtagatttagaggtgaggggcaataagtaaatgactcgcacagatggtgttcatgctcaatgtttctcttctgaacaattttcagatttggtgttaaagcaccttctggccaggcgtggtggtttatgcctgtaatcccatcactttgagaggcggagtcgggtggggattgcttgaggccaggagttcaagactaccctaggcaacatagtgagatgctcgtctctattaaaaaaaaaaaaaaagaaaaaaaaaggggacccaaggccatatatctgtttcattcctagaaactctccacagtgtcagatgaagactgcaaatccagtggtcctacattcacagataattcctagcctttggttagtgaggagaatgggatggg

SEQ ID NO: 35256 - DNA, 434 bp, Homo sapiens
agggcgaattggagctccaccgcggtggcggccgagctcactgccgccccgccccccccgcgtacgtccaggcaccgccagccactgtcttcatgcaggaaccacagtgccagatccccacagctcgtctcttcatcttggttttgccacagaaagagcaagtgtacctcggccgctctagaactagtggatccccccgggctgcaggaattcgatatcaagcttatcgataccgtcgacctcgagggggggcccggtacccagcttttgttccctttagtgagggttaattgcgcgcttggcgtaatcatggtcatagctgtttcctgtgtgaaattgttatccgctcacaattccacacaacatacgagccgggagcataaagtgtaaagcctggggtgcctaatgagtgagctaactcacattaattgcgt

SEQ ID NO: 35257 - DNA, 447 bp, Homo sapiens
taaggcgaattggagctccaccgcggtggcggccgcccgggcaggtactatgctttactaatagaaatacctctttgctgggggaggggagtgcttctgaatagaaattacccactctgagttacagctttagtggcatattaatggggatttaaatttacagtaaaaacaaaaacaaaaaccaaaaccaaccctattccaattatgacaaatctatttttttttaaaacctatcttagatagaccatctccctacgataagatggcagaacagaatgtcaggaggagaggtttggtctgaagagggttatctgtccaggagacgctttatccccaaagcaatgcgcttcagtttgctgtgcgcagcagagcacctgttggggggagaaaagtagagcacctagaaagtccatgaacaaattccagcagcaaaaaaacttcctaccc

SEQ ID NO: 35258 - DNA, 432 bp, Homo sapiens
atagggcgaattggagctccaccgcggtggcggccgcccgggcaggtacgcggggaggcttgaagtgtggggagaacttggtctcctctgtgctatatgaaatatgggagacgacataccgtttgtgtgcaatgcaccccggctgtggacagagatttacaaacgaggaccacctgtcaaactattaaacccagccatgagatgacattgaaatttggcccataccgaactgactcacccatcattggggatcaaacccctactccaactagattcctgaagaactgttaggaggcgggactcttcaatgaactaactagctcctttgaacatgaattcaagaaagctgcatatgaggatgaaaaaaaggcttgaacctagactgttgccaaaaaagtggtgagtttcagacctaagctatttttattgcgc

SEQ ID NO: 35259 - DNA, 467 bp, Homo sapiens
actactatagggcgaattggagctccaccgcggtggcggccgaggtacaaagggcagccctgcacgctggagggacttccactcagccacaatgctgggaagtcacatgtatgtctttgggggccgtgccgaccgctttgggccattccattccaacaatgagatttactgcaaccgcattcgagtctttgacaccagaactgaggcttggctggactgtcccccgactccagtgctgcctgaggggcgccggagccactcggcctttggctacatggggagctgtacattcctcattagattgtgggtttcaagtttccatttgcaatttgaatgtttccagaaatctctgtcttaaccaaacctctctctccaggcacgattctgcacatgagtctgatctgtgtagagtagtatcatcaaaaatgccaaattttgatcaggaatatacctggactactctcttt

SEQ ID NO: 35260 - DNA, 466 bp, Homo sapiens
tatagggcgaattggagctccaccgcggtggcggccgaggtacctgtaatcctgaagaaaaggtcctaattccttccatgctgaaatgctagctttggtttcagagagagactttattgcaactgtgaccaccgtcactggtgagcactgctgttcggcccccagcggacttaaaagactggaatgtggtagtggcggtcgttctcggtcagcagggagatctccggccagtccctgagaggctcctctgggtagcagacttcaaagtctctggagttaaacttgaacagtctgaacacttttatctttacttcaagggagtatccaagtataaacatatcaatctgctctagtccacatgtgtcgcctacagaattcaggtgattcatcatgaagctcaaaggatcagaggatgtctccctggaaaacaggagtctaaaaagactgggaatgacctttttagtct

SEQ ID NO: 35261 - DNA, 467 bp, Homo sapiens
tacgactcactatagggcgaattggagctccaccgcggtggcggccgcccgggcaggtacctgtttagccacgatggccgccaggcggcccaggagatggcctcgaccatcaagcaccaggacctgcacctccgccatcttcggcagccgcttggaaaagccccgcgtactttttttttttttttttttttgagcagacacagacacagatgtttattccaggaagaggtctaagaaacgagcttcttagagcatgtgtcacggggcagccagtcctggggctctcagagccagccccctcccttcagcagctgaagcaatagcgcccccattttacaggcggagcatggaagccagaaaggtgggtgggggagggggtccttccctggctcaggcagatgggaagatgaagaatccgttgaatacgctgtcggccttaaagccctggtaaatgttaccctttttgg

SEQ ID NO: 35262 - DNA, 214 bp, Homo sapiens
actactcatatagggcgaattggagctccaccgcggtggcggccgaggtacttttttttttttttttttttttttttttgcatttttagtagagacagggtttcaccatgttggccaggatgatcttgatctcttgaccttatgatccgcccgtcttggcctcccaaagtgctgggatcacaggcgttgagccaccacacctggccccctattt

SEQ ID NO: 35263 - DNA, 469 bp, Homo sapiens
tacgactactatagggcgaattggagctccaccgcggtggcggccgaggtacgcgggggaattccggaggcggcattcggtggtcagaggcctgtgcggctgcaggtagagtgtcttaggaacctaggaaataactcggaacctgtaacgtcccactggtttggacatattcctctcctgatctggcctcatctgttccagggaggtgggattgaaacatatgcagtaatgtcacctcaaaagagagttaagaacgtccaggcacaaaacaggacttcacaaggtagtagtagttttcagaccacgctttcagcctggaaagtaaaacaggatccaagcaactcgaagaacatctcaaaacatggacaaaacaatccagtgggagattatgaacatgctgatgatcaagctgaagaagatgctttgcaaatggcagtgggatattttgaaaaaggtcccattaaagctt

SEQ ID NO: 35264 - DNA, 591 bp, Homo sapiens
ggagctccaccgcggtggcggccgaggtacaaactagtggggaaggtttttttaaaaagttttgcagtcttgtaatttacctttttaaaaaatttattttatttttctgagatggagtcttgctctgttgcccaggctggagtgcaggggccatctcagctaactgcaacttccacttcccaggttcaagcgattctcctgccttagcctcccaagtagctgggactacaggcgcatgccagcatgcctggctaatttttgtatttttagtagagcgggggttttgccatgttggccaggctggtcttgaactcctgacctcaggtgatccgcctgccctggcctcccaaagtgttgggattacaggcatgagccactgcgcccagccttgtaatttacctttgatggtgacctgaaatgcagtatgatcctatatgtggcacgtagtaatgttcagtgtttgctgaattaattctgggcagcactaagaaatccctctttcccagtcatattctataacacatttcccatttgccacaaaacctgcagctttttggtccaggtaatgacatttgctgccattttgatgat

SEQ ID NO: 35265 - DNA, 536 bp, Homo sapiens
tagggcgaattggagctccaccgcggtggcggccgaggtacaaggccaagaacagggagacagggcagctggtggccctgaagaagatcagactggatttggagatggagggggtcccaagcactgccatcagggagatctcgctgctcaaggaactgaagcaccccaacatcgtccgactgctggacgtggtgcacaacgagaggaagctctatctggtgtttgagttcctcagccaggacctgaagaagtactactcgattgtcaacgtcaaggagtcgcaggtcgcctggttctaggaataatgggggaagtatgtaggagttgaagattagtccgccgtagtcggtgtacctgcccgggcggccgctctagaactagtggatcccccgggctgcaggaattcgatatcaagcttatcgataccgtcgacctcgagggggggcccggtacccagcttttgttccctttagtgagggttaattgcgcgcttggcgtaatcatggtcatagctgtttcctgtgggaaattgttat

SEQ ID NO: 35266 - DNA, 630 bp, Homo sapiens
gcgaattggagctccaccgcggtggcggccgaggtacgggttgcccctggcttggcactgcaggacgtgtctcgttttatctttccatttcaagtgctgggggcatgtggctcggtcaattttgggaccatctgtggaaccaccatgtgtgatcagacacccaacacacccgaggcacagtggtgcagaggagcgtctaatctttccagggcaggggtggagggattaaaggtcagggtgaccgactcacacaggactcgcagctggacgctactgttcctgtgcaagaactcgccgtccacctcgagagtggcactgcagaagaagctgcgtccgtcgtcactctcggtagcatttagctgaagttgagctggctgccccggggccgcggccgctctagaactagtggatcccccgggctgcaggaattcgatatcaagcttatcgataccgtcgacctcgagggggggcccggtacccagcttttgtttcctttagtgagggttaattgcgcgcttggcgtaatcatggtcatagctgtttcctgtgtgaaattgttatccgctcacaattccacacaacatacgaaccgggagcataaagtgtaaagcctggggtgcctaatgagtg

SEQ ID NO: 35267 - DNA, 609 bp, Homo sapiens
  misc_feature 172, 202, 203, 204: n = A,T,C or G
atagggcgaattggagctccaccgcggtggcggccgcccgggcaggtacttgccgcccagccacgcccgcgcgccagccaccatgctaggtaacaagcgactggggctgtccggactgaccctcgccctgtccctgctcgtgtgcctgggtgcgctggccgaggcgactttntttttttttttttttttttttttttaaagnnntaacagatgtatttcaaatacagcatgttttacaggagttcacaagcttttcatctctaaaaaaaaactttcaactacctgactgttccattccaccccagacaaacctgacatgactgaactacttcatgtgttactttcccaaaaataaagttaaaaaaaaaaggaactcatgataaatgcagatctctaatacagtatctaacacaaaagaagctttaaaaagacagtttctttccttatttgattagctagaagtttatctaggtaaaagcaaaaaaaaaatttacaaagcataacataacattggggttctttttatactcaagatgtttaactgttcaaaatgacaacaattacatcttttaagaatataataaaatgggtggaaaacagcaacacaac

SEQ ID NO: 35268 - DNA, 591 bp, Homo sapiens
gtatacgactcactatagggcgaattggagctccaccgcggtggcggccgcccgggcaggtactttttttttttttttttttttttgcaacctagcagttcaaccaatttctcttttaataaaagctgcacattacagtggtataaatttatcttttaaacactccacataaaaacatgtgcaccctctccttctacatttaatcattagtagtctctaaaatggtaaaataaaactgaatttatattagcaaatgaaagtgcaagtttgtacgcggggggtggcctttggggccgaagtgggcgtgcggctcgcgctgttcgcggccttcctggtgacggagctgctccccccgttccagagactcatccagccggaggagatgtggctctaccggaacccctacgtggaggcggagtatttccccaccaagccgatgtttgttattgcatttctctctccactgtctctgatcttcctggccaaatttctcaagaaggcagacacaagagacagcagacaagcctgcctggctgccagccttgccctggctctgaatggcgtctttaccaacacaataaaactgatcgt

SEQ ID NO: 35269 - DNA, 622 bp, Homo sapiens
atacgactactatagggcgaattggagctccaccgcggtggcggccgcccgggcaggtacccagccccgcagggtcctggaggaggtctcatgtctgttctggggctcctggggctccctcctcctttgggggtggctccaggaaaattggggtgactgagggtggcttcttcactgagtagggggaagccgggacccccaccaccaggaagtggttcttcttccgaaacaatctccacaggccccgatggttgccacgcacatccaggtcccagatatggaggcacttggcaagctgggtccaggtggtgaagtcatcatctttctccattcgaataaaggccacgtaggtgtggccctctgtgtctggcaggaaagagtcttcacaagggttcttgctgtggtccagaacctcagcctcactgagcagcctgtaaactttcacttcatcccgcgtacctcggccgctctagaactagtggatcccccgggctgcaagaattcgatatcaagcttatcgataccgtcgacctcgagggggggcccggtacccagcttttgttccctttaatgagggttaattgcgcgcttggcgtaatcatggtcatagctgtttcctgtg

SEQ ID NO: 35270 - DNA, 462 bp, Homo sapiens
ctatagggcgaattggagctccaccgcggtggcggccgcccgggcaggtactttttttttttcttttttttttttgtgggtgtctttggggtttggttggttcggggtatggggttagcagcggtgtgtgtgtgctgggtaggatgggcgggggttgtgttgatgggattagtagtatgggagtgagaggctaaactcccgccccaacagacttttgacaaaaaagtgcccttcccgtcgaaacttgccctttgaccggccaatatggtgcagagagaaataagccccctctgctctctggcctaagttaactcaaaactgaaaatggggcggtccaaaccccctgaagctaaagttgcctctccttttgaagcacccgctatcggacacccaggtcccaaagaccacggatcggcatggggtacctgcccgggcggcccttctaaaacaaatagatccccc

SEQ ID NO: 35271 - DNA, 473 bp, Homo sapiens; identical to SEQ ID NO: 31841

SEQ ID NO: 35272 - DNA, 395 bp, Homo sapiens
atacgactcactatagggcgaattggagctccaccgcggtggcggccgaggtacttttttttttttttttttttttttttttttttccaataaatctttattaaatgaatgaaaggaggaaggagtccttaactgtagctaagcttccactcttaagtatcaattaagcttctctgttcagtccagcgtttagggcgcctactgcgcgccccgccccacacacttttgacaaaaaggtcgcctgctctgtgtgacttgccctttcgccggccagtatggggcagagggaaataagccccctctgctctctggtctcagtttactcgtaactgaaagtgggtcggttcaaaccccctggagctgaggttgcctctcctcttcgagcacgccctatc

SEQ ID NO: 35273 - DNA, 225 bp, Homo sapiens
atacgactcactatagggcgaattggagctccccgcggtggcggccgctggcccaggagagaacacggggaggtttgtttgtgtgaaaggaaagtagtccaggctgtccctgaaactgagtctgtggacactgtggaaagctttgaacaattgtgttttcgtcacaaggagtctttgtaatgcttggacctcggccgctctaaaactagtggatcccccgggctg

SEQ ID NO: 35274 - DNA, 392 bp, Homo sapiens
gactcactatagggcgaattggagctccaccgcggtggcggccgcccgggcaggtaccttggctccggctacttcactgccatccagaacttgaggaaaagtgaggaggaagtggctgcccggcgtgcgcgggtcgtgtggtgtgcggtgggcgagcaggagctgcgcaagtgtaaccagtggagtggcttgagcgaaggcagcgtgacctgctcctcggcctccaccacagaggactgcatcgccctggtgctgaaaggagaagctgatgccatgactttgtctgactacaatattcaaaaggagtctactcttcatcttgtgttgagacttcgtggtggtgctaagaaaaggaagaagaagtcttacaccactcccaagaagaataagca

SEQ ID NO: 35275 - DNA, 447 bp, Homo sapiens
tactatatggcgaattggagctccaccgcggtggcggccgtccgggcaggtacagtatatttggccaatctcagcttagctcacagtagctacccatcccccacccctcagccctgtagcaggcagctgtgcacatgttcctagagcagcttacttgcagctggcagaaaccagggttgacacaaaagaccccgtcctctaaatatcgtggatctgttctttctgctgattgctgcttctcactacagtgacacaaacacagaggcaagccgccattgttgcacatacccataccatgattgcaagcccctttatctttggctgaagttattttcagaggatttaaagagctgacaccgtcaccctcctcatccactttatgtttttcttttccctttttgggagccagtcattaaagactagcatattcaaaagcaactgcctata

SEQ ID NO: 35276 - DNA, 205 bp, Homo sapiens
cactactatagggcgaattggagctccccgcggtggcggccgagggcagtggacctggacttggagtggcgccaaggccggatcgcccgggtcgtgctgcaagatgaggacatcaccaccaagattgagggtgactggaagcggctcaacacactgatgcattataaggtgtcagacaggtcggtggtggctctggtccccaaac

SEQ ID NO: 35277 - DNA, 360 bp, Homo sapiens
tactatagggcgaattggagctccaccgcggtggcggccgcccgggcaggtacgcgggggagtcaaccggatcggtgactgtggagggcgagctgagccctggccgccgccacaatgggccgcgagtttgggaatctgacgcggatgcggcatgtgatcagctacagcttgtcaccgttcgagcagcgcgcctatacgcacgtcttcactaaaggaatccccaatgttctgcgccgcattcgggagtcttttctttcgcgaggtgccccagtttgtcgtgttttatcttatctacacatgggggactgaagagcttgagagatccaagaggaagaattccgctggcttatgaaaatgaca

SEQ ID NO: 35278 - DNA, 462 bp, Homo sapiens
tacactcactatagggcgaattggagctccaccgcggtggcggccgcccgggcaggtacgcggggaagtgaggcagcggaggacgacctttttccggttccggcctggcgagagtttgtgcggcgacatgaaactgcttacccacaatctgctgagctcgcatgtgcggggggtggggtcccgtggcttccccctgcgcccccaggccaccgaggtcccgtatttgccttgtggaattcaaccccaacttcgtggcgcgtatgatacctaaagtggagtggtcggcgttcctggaggcggccgctctagaactagtggatcccccgggctgcaggaattcgatatcaagcttatcgataccgacgacctcgagggggggcccgggacccagcttatgttccctttagtgagggttaattgcgcgcttggcgtaatcatgggcatagctggatcctgtgtgaa

SEQ ID NO: 35279 - DNA, 483 bp, Homo sapiens
ctactatagggcgaattggagctccaccgcggtggcggccgcggtacgcgggcggcctcatcgccgtcatcgtggtggtcgtggtggccctcgtcgccggcatggccgtcctggtgatcaccaaccggagaaagtcggggaagtacctcggccgctctagaactagtggatcccccgggctgcaggaattcgatatcaagcttatcgaatccgtcgacctcgagggggggcccggtacccagcttttgttccctttagtgagggttaattgcgcgcttggcgtaatcatggtcatagctgtttcctgtgtgaaattgttatccgctcacaattccacacaacatacgagccgggagcataaagtgtaaagcctggggtgcctaatgagtgagctaactcacattaattgcgttgcgctcactgcccgctttccagtcgggaaacctgtcgtgccagctgcattaatgaatcggccaacgcgcg

SEQ ID NO: 35280 - DNA, 191 bp, Homo sapiens
tatagggcgaattggagctccaccgcggtggcggccgaggtactttttttttttttttttttttttttttggttttttttttttttttttttttttttttttaaaggagttagcatttaatgaaactccctccatgtggcttcaagccaccaggacacaggcccccccaacacttttaattttctcctcag

SEQ ID NO: 35281 - DNA, 465 bp, Homo sapiens
agctccaccgcggtggcggccgaggtacgcgggggaggagaggcaggaggcgacggtcctgacatctcacacattgcccgactcgctggtgtatggagccgactggtcctggctgctcttccgttctctgcagcgggccccctcgtggtcctttcctagcaacctaggaaccaagacggcagacctgaagggtgcaagcgagttgccaacaccctgtcatgaatgcagagaggataacgatggggagggccatgccagaccccagagtggaatgaagccactcacagagggcatgaggaagaatggcacctggctgcaggctacagcagccaccacacgtgactgtggcgtgaacccagaagaagcagactcagccttcagcctcctggccacctgctccttctatgaccatgcgctccacctctgggagtgggaggggaactgagcttgaaatcatgaagcccc

SEQ ID NO: 35282 - DNA, 490 bp, Homo sapiens
actactatagggcgaattggagctccaccgcggtggcggccgcccgggcaggtacgcgggatcggattgtgatgtgtgccaaaaggtggattttatacgacaactggcgatgaccagctcagtggctggactgaaagaagctccaaagcacttcccaaagccaaacttgctccaaaaaatggtcatggtcattgtttggtggtttgctggcagtctgatccactacagctttctgaatccaggtgaaaccattacatctgataagtatgctcagcaaatcaatgagatgcaccaaaaactgcaatgcctgcagccggcattggccaccagaaagggcccaattcttttcacgacaacactgggccgcacgttgcacaaccaacgcttcgaaaattgaactaattgggctatgaagttttgcctcatctgccatattcacctgacctcttgccaacaaactaccacttctttaggcatctcagcaacgttt

SEQ ID NO: 35283 - DNA, 204 bp, Homo sapiens
actactatagggcgaattggagctccaccgcggtggcggccgaggtacgcgggggacacggatcaggtcacaactcgcgtgctgatcagtagtgggctcgcgcctgtcatcccagcactttgggaggcctaggtgggcggatcacgaggtcaggagatcgataccttcctggctaacaaggtgaaatcctgtctctactaaaaa

SEQ ID NO: 35284 - DNA, 469 bp, Homo sapiens
tggagctccaccgcggcggcggccgaggtacgcgggatgccaaactctaataaaatggagtcggggggccacatagaagccctcacacacacatgcccgtaacaggatttatcacaagacacgcctgcatgtagaccagacacagggcgtatggaaagcacgtcctcaagactgtagtattccaaatgaactggcaaattcttacctaccacggccgctctagaactagtggatcccccgggctgcaggaattcgatatcaagcttatcgataccgtcgacctcgagggggggcccggtacccagcttttgttccctttagtgagggttaattgcgcgcttggcgtaatcatggtcatagctgtttcctgtgtgaaattgttatccgctcacaattccacacaacatacgagccgggagcataaagtgtaaagcctggggtgcctaatgagtgagctaactcacattaa

SEQ ID NO: 35285 - DNA, 491 bp, Homo sapiens
tacactactatagggcgaattggagctccaccgcggtggcggccgcccgggcaggtacgcggggagaaaccctcataaagtagatgcagagggcagtaagatataactcaactttgaaaatgtcagccgttatagttgaagaaatctgacccaagagacctcgctccgctgcaagatggaaggaagcttaagtaagacataaatttgtaatgaactgggccccacatccgccgccactgtgacttgcagtcatcatccattaccacaaaattagttgcaggatggctactcgtatccctccacacatgatcatcagtatttgcctcctgtgtcccaaccggcctgagtcaaattcccactctgtcacccaagctggagtgcagtgatgtaatctgggctcactgcaaccttcacttcccaggttcaagagattcttctgcctcagccttcaaagtagctgggattacagggttacgactcactgattaaaa

SEQ ID NO: 35286 - DNA, 445 bp, Homo sapiens
agggcgaattggagctccaccgcggtggcggccgcccgggcaggtaccgcttggcggtgcggcctggtgtcggcttgcaggttctttctgtgtttgttctctgccctgccaaggccgtagagctggtgcgtgcgggtagcggggctctccgaggagccgcacgccggcggcaccatggtccacctcactactttccttttgcaagggccaccggggggggccacttaaccatccgccttgccctgggtggctgcaccaatcggccgctctagaactagtggatcccccgggctgcaggaattcgatatcaagcttatcgataccgtcgacctcgagggggggcccggtacccagcttttgttccctttagtgagggttaattgcgcgcttggcgtaatcatggtcatagctgtttcctgtgtgaaattgttatccgctcacaatt

SEQ ID NO: 35287 - DNA, 439 bp, Homo sapiens
agggcgaattggagctccaccgcggtggcggccgaggtacttctgatagctcatcactttctgtgtcagaactttgaaaagcaaagacaggacatcgacttccttcgagattgcctactgattcttctagaagacagagatctactggggtagtccgggactgactgcaaagagcctcaggtaaagcagaggccattggccggcctaaggttggcagtcaaagaggctgcggaaggttgaaaatgaaaaggagagtaagcagagggatgataagacccaaaacctctgatgggatcagggtctgtaggaagagagaaatgaagctggggagaatccagctcagggaaggtgccagcagaaggcctggtagtaaagcctccaggatgttgcagtggagcagactgtgcagagcttaatgagctccctgaaaaaacaatgc

SEQ ID NO: 35288 - DNA, 192 bp, Homo sapiens
cactacttatggcgaattggagctccaccgaggtggcggccgcccgggcaggacgcgggggctgcttagcaggggaaagatggcggtgacgggctggttggagagtctgcggacagcccagaagactgcgctgctgcaggacgggagaaggaaggttcactatttattcccagacggcaaggaaatggctga

SEQ ID NO: 35289 - DNA, 420 bp, Homo sapiens
ctccaccgcggtggcggccgaggtacctggctttttagactctacataggaattccaccataattaagatgtataaacttgacctacagcctaaagcccaatatgcttccctcaagaacatcaacagtgttcaagcttagctttgttacagaaaatgaggtagggtgcggtggctcacatctgtaattttaaacagttgggaggccatgcaggcgcatcagctgaggtcaagagtttgagaccagcctggtcaaaatgatgaaaccccatctatactaaaaatacaaaaattagctgggcatggtggcacacgcccgttatcccagctactcaggaggctgaggcactagaatcacctgaacccaggaggcggaggctgcagtgagctgagatcacgccactgcattccagggggaaaaa

SEQ ID NO: 35290 - DNA, 505 bp, Homo sapiens
tccccgcggtggcggccgagtacctagaagaaggcgggtcaaagaagtgtgaagaagcattctcagttcataggctatcccatcaccctttatttggagaaggaacgagagaaggaaattagtgatgatgaggcagaggaagagaaaggtgagaaagaagaggaagataaagatgatgaagaaaagcccaagatcgaagatgtgggttcagatgaggaggatgacagcggtaaggataagaagaagaaaactaagaagatcaaagagaaatacattgatcaggaagaactaaacaagaccaagcctatttggaccagaaaccctgatgacatcacccaagaggagtatggagaattctacaagagcctcactaatgactgggaagaccacttggcagtcaagcacttttctgtagaaggtcagttggaattcagggcattgctatttattcctcgccgggctccctttgacctttttgagaacaaaaaaaaaaaaaaaaaaaaaa

SEQ ID NO: 35291 - DNA, 443 bp, Homo sapiens
ctactatagggcgaattggagctccaccgcggtggcggccgaggtaccagtaaaagagagaaacacacaggttaaatatcttcttgtggggttaaggggtagaacctatcttgccttcactctcaagataacgactcaaattaagctttttgagcaccactcttgtggggacacacatacgctgatctaggaatgaaatcttcgtggtcttcaatcctagatctactatgccagtttctctctggctttagcctttgagaacctgtataagaatacgtaagtaatccagagctgtgaagagtttaaaggccaacttctccagtgaactcaacctctgggtcacttgcaaccagaaattggatacctcataatgatgcaggaaagacccgagttcatgatgagtttcaaaggccacgttcatttaggaaccaactctctctgga

SEQ ID NO: 35292 - DNA, 410 bp, Homo sapiens
  misc_feature 274, 279, 280, 306, 307, 338, 345, 346, 368, 379, 380, 381,393, 394: n = A,T,C or G
cactactatagggcgaattggagctccaccgcggtggcggccgaggtacgcgggaagcattctcaggtctggattagagacaggaatctgtctccacttccttacatggctagacacagagcccgggagggcaaaggaaaattggaggccccttcttcccatgagccattttctctgcatcccctgcccataagccttcactggcctctggacacccctcatgggttgactgcagactgctcctctcagtggccctcatgcccctccactgtgnctcanngcgcacggaaaggagtgaatacctcnnagttcttcctgaggggaaccctgaggcaccnagagaanngtggagggggcatttagaactnggccaagtggnnncagggcccatgnnataggaaccctaggca

SEQ ID NO: 35293 - DNA, 448 bp, Homo sapiens
actacttagggcgaattggagctccaccgcggtggcggccgtgaagtagccccccaacttgctggcgtgctgcttctttgggaacacccctgggtggcgtttcatgtaatgggacacgatgcccttcttgctgaacgactggaaagagcacaaggagcactttttcttctccactgcccgcctgagttcctcgctcagctgaggggaagtcgtccttgggcggggatgggatgatcaactttgttgggcttgtcgctgatggtcctggaggctgccaagcagtgagtgtaatacgcatcaatgtcgtggcgcttctggtagtgggctgccagacctttgcggatggggttggtgtaggcacacagggcacacttgaagaggttgttcttgccttctggctgggctcggacattattgtgcttgatgcggtagtgcctggcgatcccct

SEQ ID NO: 35294 - DNA, 444 bp, Homo sapiens
actactatagggcgaattggagctccaccgcggtggcggccgcccgggcaggtacatctggcaggggactgttcattcaactttcgaaagagttgcttagcctgactctgatactgttgaaggtcccggccagactgttcgtcctcctgcatcgaggcggccagcgggagcccgtccgccactcgggcgatcattgttagcaacacccttttttacaaactacagggatccaacactggcccggaaggcccttggcgccgtcctcacttcctccgccgcgacaacagttataccctatgtcccagttaccggagatccagctgcttgcgtccccgcgtacctcggccgctctagaactagtggatcccccgggctgcaggaattcgatatcaagcttatcgataccgtcgacctcgagggggggcccggtacccagcttttgtt

SEQ ID NO: 35295 - DNA, 191 bp, Homo sapiens
ggcgattgagctcaccgcggtggcggccgaggtacttttttttttttttttttttttttttggactcctccatgctgcagaacccacagtgctgtccatagaggagaacaagcaacgaagatcatggctaaagatcttagagatccttaaaatgccgattcctaatctcttgctgaaaactactgactttt

SEQ ID NO: 35296 - DNA, 204 bp, Homo sapiens
agggcgaattggagctccaccgcggtggcggccgaggtacttttttttttttttttttttttctttttttttttttttttttttttttttttttttttttttttttgggcgcagctgttttaattcaatcccacccccctgtccagcaggaaaccccttatagaaaacccaaatcctcatctgggagtttttccttcagccagg

SEQ ID NO: 35297 - DNA, 438 bp, Homo sapiens
gggcgaattggagctccaccgcggtggcggccgcccgggcaggtactttttttttttttttttttttttcattcttgtataaaccagtttatttcttctatcattagtctgttaaatgccaaacctcatttctgtggtctgttgaatgaatcctaaacagttctgtgagaaagcagcaattacacagttatatacatgggcagttaaatttaacattattgataattagttttaaaaaaaaaatactggccaggcacggtggctcacacctgtaataccagcactttgggaggccgaggcggttggatcacgaggtctgaggcgggcagatcacgagatcaggagatcgagaccatcctggctaacatggtgaaaccccatctctactaaagatacaaaaaattacccgggtgtggtggcaggcacctgtggtcccag

SEQ ID NO: 35298 - DNA, 448 bp, Homo sapiens
actactatagggcgaattggagctccaccgcggtggcggccgaggtactcctcgtttcgaaaggccgatgcgatataaaaccacttgccagtgatccggtccagggtggcgttggtgatgggcaccggaactttttttttttttttttttttttggggtctagtcatcctcggcggtcttctgcttcttggtatcgacatcgtcattcttattaatcttaagcttgcccgcttgcccgtagctgactcagcttcctcatcttcatctccatcctcttcctcaccatcaccttcttcttcctcctcctcttcctccccaccttcttcctcttcttcgtctacctcattgtcagcctcctgctccccattttcctcattagcattcccgttagcaggggcggtctcttccattttctgcctcttccacaacttcctttttttcctttaag

SEQ ID NO: 35299 - DNA, 313 bp, Homo sapiens
  misc_feature 303: n = A,T,C or G
ctatagggcgaattggagctccaccgcggtggcggccgaggtacctgttatcaatataaaataatcttcctgttgaatgcttcatgacttgaattctactttgataaaaacattgccatactgctttttatcttgatgaattcatctggcattgctttgccttatcatctcatctggagtttttaaatgccatttgtttcagttgtcttttaccaccttaattaattagacttttgccatttaacaaggtaggctcaaatttcttttactaattcgttaccatcgaaacccattctttcatcnatatttcctg

SEQ ID NO: 35300 - DNA, 279 bp, Homo sapiens
  misc_feature 262: n = A,T,C or G
agggcgaattggagctccaccgcggtggcggccgaggtacgcggggggagaaggggcgcaggtggccgccatcttggattgcgaactgggtcgctacgcttcacgccaggggcggagtggcggcccttctgttacccgccacacacgtcgccgctggggactgggaaatcagggcatcggagagtgccacattaatgggatggccttggctagttccaggggaaagaataactattagaatgaaaaggttataaagaataanagccctaaagtcctcaa

SEQ ID NO: 35301 - DNA, 446 bp, Homo sapiens
  misc_feature 204: n = A,T,C or G
gactactatagggcgaattggagctccaccgcggtggcggccgcccgggcaggtaccactatgcctggctactttttgtgtttttagtggagacggggtttcaccatgttggcccggctggtctcgaactcctgactttcagtgatccacctgcattggcctcccagagtgctgggattacaggcatgagtcaccttgccaggncctactttttgcctttttataagaatgaagccaagtgtggtggctaaggctacacagagacttgagagtctgaggtgggaggatcacttggtgccaggggtttgagagcagcctgggcaacataagcaacacctcatctgtagaaaaaaagtttacaaaaccttggtttacaggtgtgagcctccgtgtccagctcccaagtttctagtctctacctgcactgctatattgctagactgtaa

SEQ ID NO: 35302 - DNA, 567 bp, Homo sapiens
ctatagggcgatgtggagctccaccgcggtggcggccgcccgggcatgtacgcggggctgcgcggtatcggcgtccgcttcgggcggctgctgaggggtgactgttctttcagctcccagcactggagcgctcggcccctgccgcactggatgccagcagttactaaaagtgagcctggcatttcagctgccttgaggtgcagtgttggggatccagagccatgtcggacctgctactactgggcctgattgggggcctgactctcttactgctgctgacgctgctggcctttgccgggtacctcggccgctctagaactagtggatcccccgggctgcaggaattcgatatcaagcttatcgataccgtcgacctcgagggggggcccggtacccagcttttgttccctttagtgagggttaattgcgcgcttggcgtaatcatggtcatagctgtttcctgtgtgaaattgttatccgctcacaattccacacaacatacgagccgggagcataaagtgtaaagcctggggtgcctaatgagtgagctaactcacattaattgcg

SEQ ID NO: 35303 - DNA, 528 bp, Homo sapiens
ctcactatagggcgaattggatctccaccgcggtggcggccgcccgggcaggtactttatgtcttttttttttcttgaatctgccaggttctggctggggcatgagctttcttgtttttttccaaaacttgtaatgggagtcactgcttgcagagcggtctgattcaacttgatcgcgactgcctcagggttgtcggtcaggtagatctgtctggagatgttgtttattgcacatatccactcttcattttcctttctgctctcaacctggaggattattcccgattttccattgggcgtggtgatctggaagcagtagcgccggtcttcgcaatccacggccatcactgatcagttgtccaggtcccggatcaaacctccagccacggctcccctgggctgacacatgagattcccgccctgggtgaagaaataaagcctctcccaggtggtggtgaccagccctgttttgtttctaagattaaggtaaccagccttctggatgaggttcctgttgatctggggggc

SEQ ID NO: 35304 - DNA, 593 bp, Homo sapiens
ctcactatagggcgaattggagctccaccgcggtggcggccgaggtacgcggggatgaacctgtgtcttcaggctccctttgtctctgaggtttgggctgtggaggtgagcagaaggtgcctgtctttactaaacagccaggatggaggaatcctgacaagagctgctggtgttctgagccggaccctttcttcctctctgaaaattgttgaggaggccttgcgagcaggagtggtaaagaaaatgatgaaattcctgaagacaggaggtgagactgcatcacgttatgctataaagatactagctatctgcacgaatagttatcatgaagctcgggaagaagtaataagactggataaaaagttgagcgttatgatgaagctgctcagctcggaggatgaggttctggtgggcaacgctgccctctgccttggtaactgcatggaggtgcccaacgttgcgtcttccctgctaaagacggaccttttgtaggtcttgttaaagcttgcaggcagtgacacacagaagacggccgctctagaactagtggatcccccgggctgcaggaattcgatatcaagcttatcgatacc

SEQ ID NO: 35305 - DNA, 528 bp, Homo sapiens
ctactatagggcgaattggagctccaccgcggtggcggccgcccgggcaggtacttttttttttttttttttttgttttgaggtggagtttcactcttgtcgcccaggctggagtgcagtagtatgatcttggctcactgcaacttctacctccagggttcaagtgattctcctgtctcagcctcctgagtagctgagactacaggcacataccaccacacccagctaatttttgtatttttaatagagacggggtttcactatgttggccaggctggtctcaaatgcctgaccttgagtgatccacccgcctcggcctcccaaagagctgggattacaggtgtgagccaccaggcccggcctcctagattaattcttgacattttttggatcaagtaagaaccactggagcctttcctggaaaaaagaacacatactcagtctcacacacaatttctgggggctcacagaccctcttgaagcctatccataaaccccctggtgaagtccccctgcccgatagcctga

SEQ ID NO: 35306 - DNA, 446 bp, Homo sapiens
acgactcactatagggcgaattggagctccaccgcggtggcggccgcccgggcaggtacgcgggtggaattgggaagggatgaaggaggctgtgcctccgggttgcacgaagagtccgagtcatttctcagaaggttttgataggtgggccttagaggagacgccgccgagcaccgcaagaactggaaaacacacccctctctgtctgcctgggagagccacggaaattggcacttctctgagtgaagctgaggagaaggctgtaaatctgccaaaacagccttgaagtattcttttgtcatgaggaagtgacggctgctggagggaggtgaacaccacaaggagagatggcatctggcctgggccccgcctagcagcagctccacctcctaagccaggccctgtgggatgcgccactagaccaccatggacggatcccacagcgc

SEQ ID NO: 35307 - DNA, 433 bp, Homo sapiens
cgaattggatttccaccgcggtggcggccgcccggccaggtacgcgggatctttggtggctgtggtcgggtgttttctggtgcccccagctgaagccaacaagagttctgaagatatccggtgcaaatgcatctgtccaccttatagaaacatcaatgggcacatttacaaccagaatgtatcccagaaggactgcaactgtcttcacattggtggagcccatgccaatgcctggccatgacgtggaggcctactgcctgctgtgcgagtgcaagaacctccggtcggtctaaaactagtggatcccccgggctgcaagaattcgatatcaaccttatagataccgtcgaccttgagggggggcccggtacccagcttttgttccctttagtgagggtgaattgcgcgctaggcgtaatcatggtcatagctg

SEQ ID NO: 35308 - DNA, 433 bp, Homo sapiens
tacactactatagggcgaattggagctccaccgcggtggcggccgcccgggcaggtacctcagctggaaatacagaaagcacccaccttctgcgttgatctcactgggaactgcagatcagagctgttcctattcggccatcttgccagcctcctggctgaaggtttttctacatttcttacatttatatgttttttatccagggggacatctctgattaacagtaggggattggtgataactaaaggcttggccacatgcactacattcttaaggttcttctccagtatgacttctttgatgacaaattaaggataactttcttctgaacgccttcccacattcaaaacactgatagggcctttggccagtgtggagtctttgatgctgagcacaggatgagctatcactaaaagcctttccacattcagta

SEQ ID NO: 35309 - DNA, 367 bp, Homo sapiens
ctactatagggcgaattggagctccaccgcggtggcggccgcccgggcaggtacttttttttttttttttttttttttttttggatgcacccaacccactctaaagaatgtcagtgactttatacaaaagaggaagcatctagattggcattgtgaacataatgcataggggcgcggcgggagctctagagcctaatggttaaaaccgtggcctctggaatatgactaccttggacttgaatgctcactctgccatttattaactgcatgacctttgaaaaataacttttttatccttcggtccctcatgtgtaaaattgaggataattaactacttatcttacgggggttgtttctaagtttttaa

SEQ ID NO: 35310 - DNA, 443 bp, Homo sapiens
actacttagggcaattggagctccccgcggtggcggccgaggtacgcgggctcctacttggataactgtggtaattctagagctaatacatgccgacgggcgctgacccccttcgcgggggggatgcgtgcatttatcagatcaaaaccaacccggtcagcccctctccggccccggccgctctagaactagtggatcccccgggctgcaggaaatcgatttcaagcttatcgataccgtcgacctcgagggggggcccggtacccagcttttgttccctttagtgagggttaattgcgcgcttggcgtaatcatggtcatagctgtttcctgtgtgaaattgttatccgctcacaattccacacaacatacgagccgggagcataaagtgtaaagcctggggtgcctaatgagtgagctaactcacattaattgcgttgcgc

SEQ ID NO: 35311 - DNA, 447 bp, Homo sapiens
atacgactactatagggcgaattggagctccaccgcggtggcggccgcccgggcaggtacttttttttttttttttttttttttgctgggcgtggtggcgggtgcctgtaatcccagctactcaggaggctgaggcaggagaatggcgtgaacccaggaagcagagcttgcagtgagctgagatcatgccaccgcactccagcctgggcaatacagcgagactgcccatccacagatgaagggataaagtaactgtggtggacatacacaaagagaatagtcttcagccagaaaatcagaatgaaatttcatcctttggagccatactgttgaacctggaggacagcatggtaaatgacctgttcaaacacagctgcagggatgaggaaactgctgtacctcggccgctctagaactagtggatcccccgggctgcaggaattcgat

SEQ ID NO: 35312 - DNA, 680 bp, Homo sapiens
gcgtatacgactcactatagggcgaattggagctccaccgcggtggcggccgcccgggcaggtacccgcattcaaggggcaatttcatccatgtctatgccaaggactacttcccttttccctcccaaataatccctcccaacacaaagaaacaaacaaaaaagagctaggcaatggaatgaaatgacacccagtagtgctgtaggaattatgagaatgaatccagtcagtctaatcctcgaacacttccaagaacaaaggggggaagagttctgtggggcattccaccttcatgtgcaggaagcggctggcatggcaggctcctatcatccgcagatctgtcaccttcatcaggagttttggccaaaagtgtgtcacgtggtgttttcggtaattgatatagtgttcaaaggccagcaggaaactatcttggtacctcggccgctctagaactagtggatcccccgggctgcaggaattcgatatcaagcttatcgataccgtcgacctcgagggggggcccggtacccagcttttgttccctttagtgagggttaattgcgcgcttggcgtaatcatggtcatagctgtttcctgtgtgaaattgttatgcgctcacaattccacacaacatacgagccgggagcataaagtgtaaagcctggggtgcctaatgagtg

SEQ ID NO: 35313 - DNA, 446 bp, Homo sapiens
ggagctccaccgcggtggcggccgaggtacgcgggttttcttttcgccatcttttgtctttccgtggagctgtcgccatgaaggtcgagctgtgcagttttagcgggtacgcgggtgaagatcctcaccgagcgcggctacagcttcaccaccacggccgctctagaactagtggatcgcccgggctgcaggaattcgatatcaagcttatcgataccgtcgacctcgagggggggcccggtacccagcttttgttccctttagtgagggttaattgcgcgcttggcgtaatcatggtcatagctgtttcctgtgtgaaattgttatccgctcacaattccacacaacatacgagccgggagcataaagtgtaaagcctggggtgcctaatgagtgagctaactcacattaattgcgttgcgctcactgcccgcttttcaatcggg

SEQ ID NO: 35314 - DNA, 685 bp, Homo sapiens
gactcactatagggcgaattggagctccaccgcggtggcggccgccacgctggttttgcatcttcaggagacgctcgtagccctcgcgcttctcctcggccagtccgcgatgatgtggctctggaaggcgtgagccacttcatcgcggtcgaaatagaagcccagagagaggtaggtgtaggaggcctgcaggtacgcgggtatattcaggtgaatgagccctggaagcggattaaaggcagtgaggctgacaggcaacgggcaggaacagtgactggcttggcagtgaatatagctgccttgctctctgtcatgcttcagccttacatgcccacggttagtgccacaatccaggcccagctgcagctcccacctccagcctgcagtatcctgctgacaaacttcctgtgtacctcggccgctctagaactagtggatcccccgggctgcaggaattcgatatcaagcttatcgataccgtcgacctcgagggggggcccggtacccagcttttgttccctttagtgagggttaattgcgcgcttggcgtaatcatggtcatagctgtttcctgtgtgaaattgttatccgctcacaattccacacaaaatacgagccgggagcataaagtgttaagccctgtggtgcctaatgagtgagccaactcacattaattgcgttgcgc

SEQ ID NO: 35315 - DNA, 318 bp, Homo sapiens
attggagttccaccgcggtggcggccgaggtacgcggggagtcagtgtcagcccgaatgctgaaggaaattgatctacagatccagggagcattcacctgccctgtctcctaacagagccaccaaggaggagcaggggagcgacggccgatctagaactagtggatcccccgggctgcaggaattcgatatgaaggctttttttaaacccggccacctcgaagggggggcccggttccccagctttttgttccctttagctgagggttaattgcgcgcttggctgtaatcatgtgtcattagctgtttcctgttgtga

SEQ ID NO: 35316 - DNA, 448 bp, Homo sapiens
actactatagggcgaattggagctccaccgcggtggcggccgcccgggcaggtactttttttttttttttttttttttttttttttttttttttttaagaaaagatggcctttattgcagcacgaactgagggggactgcatgtccacagctctccaggagctgccaaaggcaacgggcccgccctgcccctgcaacaggccctccaggggccaaaaacattggctccccttaaggaagggtaacgcgtgcttgtaaacaagggcccagacaacacatagaggagaggcagcatcatcatgtgcagctttgctacaagaaagatagttcttaatttccccgcgtacctgggccgctctaaaactagtggatcccccgggctgcaggaattcgatatcaagcttatcgataccgtcgaccttgagggggggcccggtacccatcttttg

SEQ ID NO: 35317 - DNA, 444 bp, Homo sapiens
gcgaattggagctccaccgcggtggcggccgcccgggcaggtacttttttttttttttttttttttttttttgggtataatactaagttgagatgatatcatttacgggggaaggcgctttgtgaagtaggccttatttctcttgtcctttcgtacttgtctagctcctctcggttcttccgagccagctcggtctaattgggcccggatgtctgccatgatcttggcgaggtcctgagatttgggggcatttacctccacggtcaacccagagctggcaatctgggcttggaggccttttacttcctcttcgtggttcttcttcatgaagagcagctcctccttgagagcctcgatctctgtctccagctgcagtcgtgtgatattggtgtccccgcgtaccttggccgctctagaactagtggatcccccgggctgcaggaa

SEQ ID NO: 35318 - DNA, 428 bp, Homo sapiens
agggcgaattggagctccaccgcggtggcggccgtcggtcccctgctcctccttggtggctctctcagaggactccagagttgtatccccaggccgtcttccccgcgtacctgcccgggcggccgctctagaactagtggatcccccgggctgccggaattcgattcagcttatcgatccgtcacctgaggggggcccggcccagctttgttccttagtgagggtgaattgcgcgcttggcgtaatcatggtcatagctgttcactgtgtgaaattgttatccgctcacaattccacacaacatacgagccgggagcataaagtgtgaagcctggggtgcctaatgagtgagctaactcactttaattgcgttgcgctcactgcccgctttccagtcgggaaacctgtcgtgccagctgcgttaatga

SEQ ID NO: 35319 - DNA, 441 bp, Homo sapiens
agggcgaattggagctccaccgcggtggcggccgaggtacttttatattttaattcaaaacctaagatatgggtaaaagaaacaatccaaattttgacttggcaatcctgaccacatgatgccagtcgaaaaaactgaagaccttgttctccatcagaaactggctgtgaagaaaaatcgcagcaggtaattccaagaatcatgttgcttttttcactatgcagacacctcattttatcatcccacactgttaaatcaccacatgaggagccagtgacaaagaagcttccattaggagaaaatgcacatgccgccaaggagccatctttaacactaccacatctatataatttgtatgactgtgcattccacaaaaccacagttccatcagctgcccctgatgccaaacacgttggagtctggggtaaaactggcaaaccc

SEQ ID NO: 35320 - DNA, 420 bp, Homo sapiens
gggcgcccgggcaggtactttagttacttcttgcacttttcccctggtggagaaagccttaacttatcttgaaaaggtgcaaataagcaatagcatatacccatagcctctggcacggggcagttcggtaaagtttataagcaagttttcacaaggcacggctcctaattcttgaaatttttggggctgagtgggcccctgtcgtgggttattctcagcacaggttaatcattgttcacaaacatcttgagtgacagcagagagccacggcacatagaaatggcactttcgtgacccagcgcagtggctcatgcctgtaatcccagtacctcggccgctctagaactagttggatcccccgggctgcaggaattcgatatcaagcttatcgataccgtcgacctcgagggggggcccggt

SEQ ID NO: 35321 - DNA, 370 bp, Homo sapiens
tatagggcgaattggagctccaccgcggtggcggccgaggtacttttttttttttttttttttttttttggactgagtctctttcgctctgtcacccaggctgtggtgcggtggcgctctctcggctcactgaaacctctgcttcccgggttccagtgattcttctttggtagctgggattacaggcgcacaccatgacgggcgcttcttaaacctttttggtacccccgggctgaaggaattccatatcaagcttatcgataccggtaacctcaagggggggcccggtacccagcttttgttccctttattgagggttaattgctcgcttggcgtaatcatggccatagcctgtttcctgtgtgaaatt

SEQ ID NO: 35322 - DNA, 450 bp, Homo sapiens
tacgactactatagggcgaattggagctccaccgcggtggcggccgcccgggcaggtactatgctttactaatagaaatacctctttgctgggggaggggagtgcttctgaatagaaattacccactctgagttacagctttagtggcatattaatggggatttaaatttacagtaaaaacaaaaacaaaaacaaaaacaaacctattccaattatgacaaatctatttttttttaaaacctatcttagatagaccatctccctacaataagatggcagaacagaatgtcaggaggagaggtttggtctgaagagggttatctgtccaggagacgctttatccccaaagcaatgcgcttcagtttgctgtgcgcagcatagcacctgttggggggagaaaagttgaacacctagaaagtccatgaacaaattccagcagcaaaaaaactt

SEQ ID NO: 35323 - DNA, 490 bp, Homo sapiens
  misc_feature 301, 302, 416, 429, 430, 441, 442: n = A,T,C or G
agggcgaattggagctccaccgcggtggcggccgaggtacgcggggagtcagtgtcagcccgaaggctgaaggaaaaagagcaacagatccagggagcattcacctgccctgtctccaaacagagccaccaaggaggagcaggggagcgacggccgctctagaactagtggatcccccgggctgcaggaattcgatattaaagccttatcgatacccggcgaaccctcgagggggggcgccggtaccccagctttttggttccctttagctgagggttaatatggcgcgctctgcgcgtannatcatgtgtcagtatgctgttttccctgtgggtgaaattgggttatccgcgttcagcaattccacgacaatcatatcgatgccgtggagcccataaagtgtaaacgcctgggtnggttgcctaatgnnagttgagctannactcacattaatttgggcgtttgcgctttcactgcgccgcttttccag

SEQ ID NO: 35324 - DNA, 465 bp, Homo sapiens
agggcgaattggagctccaccgcggtggcggccgaggtcggccaaggtacaaagctactttaagtctgctcttaagatcagtttttgctcatattcaaaatacatggaatgttggcacaaaactgaagctgctgtagaaagatcacagatgttctgtgggttactcaaacttccccccgcgtaccgattgtttcattggacatgatgttatggaaacgtgccagctgtccaaacatctgtaggccagcctccttttctcggcgggcttctggagtcagactatcccattcacctcgatccttctcaatttgctgaatctttatcttgctcaaatactgtatggcttcatccaaaaggaagatggcatcattcattagcaggttaagaaagcggaggaaaagtgggggattcatggcttctaaattcttagaggcatagtcagccaaatccttaatgctctcccga

SEQ ID NO: 35325 - DNA, 179 bp, Homo sapiens
gtatacgactcactatatggcgaattggagctccaccgcggttggcggccgcccgggcatgtacgcggagaggtgcccagtgtccacacttgactatgtggatgacttgcgttgtgacatgtgcagtatacagtaacattttctgttcatcacagtaaagttctcttttggacagtagc

SEQ ID NO: 35326 - DNA, 478 bp, Homo sapiens
gctatacactactatagggcgaattggagctccaccgcggtggcggccgaggtacatggtggatgattttaaatcaccctagtgtgctgagaccttgagaataaagtgtgtgattggtttcatacttgaagacggatataaaggaagaatatttcctttatgtgtttctccagaatggtgcctgtttctctctgtgtctcaatgcctgggactggaggttgatagtttaagtgtgttcttaccgcctcctttttcctttaatcttatttttgatgaacacatatataggagaacatctatcctatgaataagaacctggtcatgctttactcctgtattgttattttgttcatttccaattgattctctacttttcccttttttgtattatgtgactaattagttggcctattgttaaaagtctcttaaattaagccagaattctaaaacatgctgcagcaagaggaccccgctctct

SEQ ID NO: 35327 - DNA, 312 bp, Homo sapiens
cgctatacactactatagggcgaattggagctccaccgcggtggcggccgaggtacacacatcacagcccagacagcggtgttgattgagacactctgtgccctgggggctcagtgtcgctggtctgcttgtaacatctactcaactcagaatgaagtagctgcagcactggctgaggctggagttgcagtgttcgcttggaagggcgagtcagaagatgaacttctggtggggtattgaccgctgtgtgaacatggatgggtggcaggccaacatgatcctggatgatgggggagacttaacccactgggt

SEQ ID NO: 35328 - DNA, 479 bp, Homo sapiens
cgctatacactactatagggcgaattggagctccaccgcggtggcggccgcccgggcaggtaccattccgggtcatccgcagaaattcctcatagatggcaactctgtctactctccgagccagtggcgagaagttacacagggagtccaccccggtgtggtgcctgttggggacagacctgaatgttgaaacttgacagtcagaaaaataactcttgatgctgctgtttcggaagagttggttgagcgcatcctcaatattccttttgttcctctggtaattggtggtgcctggctgggctttgtcctgggaatatggtaggttggtgatggtgaaattcaggtagaagtgctgggtgctggagctgcctgttggttgataaactgatgactccatttctgtcacatggatgtccaccaactggtaggtggagcccagccaatggaatgaggcattcagggtcttatctagaaagact

SEQ ID NO: 35329 - DNA, 478 bp, Homo sapiens
  misc_feature 302: n = A,T,C or G
cgctatacactactatagggcgaattggagctccaccgcggtggcggccgaggtacaaaataaattttcagaaaccaaccctaaagaaaaggggctatattaattacctgacaaggaattcaaaactattgtcataaagatgcttaatgagctcaggaaaattatgcatgaagaaaatgagaattttaacaaagagaatattaacaaagagaaaatataaagaagaactgaacagaaattttggagaagaatgtagtaacttaactaaaaagttcactagaggagttcagcacagactgttnaaaaaaaaaaaaaacaaagagggtccctggagttatcctgagccagggtcggtggggtcagacccagacccagcacgaagaccaacaacaaaacgcccaggcccatcaccatctcttccaacacaggctcctcggccttagaacaagtccgcataaacgggcaggacaatggaaag

SEQ ID NO: 35330 - DNA, 440 bp, Homo sapiens
acgactactatagggcgaattggagctccaccgcggtggcggccgaggtacttgtggctggttggaagggagccccaaaattaaaccctccagtgccagaggtggagaaagaaaaccctgtagcaggtgtggttgttgccgtctttgcagtgccaaacgtgaacccgcctgtaggggccccagtgcctccaaaattaaacccgctcatggctccggactctggtggcggcagctactctggctcccaaagcaaatccgtcggtgtctgcagccttgggaagatttctgtgggttttcaactgtcctctctctctcctccttaggtcacctggcattctggtcccattttcctccctgatgcctttcaacctacaggcataaccgacttgcattaaggaccgctcagtatcaggattccttcaccttctttggaccttgat

SEQ ID NO: 35331 - DNA, 591 bp, Homo sapiens
gcgaattggagctccaccgcggtggcggccgaggtacaaataggtgaaagaaagaaacttaactttttgtttagggtgtttgcaaggggacatattttcaatagaaaaatcagcaggttttggcctttggtctgtttctgaagggtgagtattctccatgacagaaaaaggcaaaggtaggtcagaggtggcgagtttcttcattctcaaacaagggagaagacatcctttgattaaagaatgaggcggggtgggggagggaaggacatggaccccctccctttaaaatttcatctgggccttcaaggcacttcaaaagacacagagtgaacagtgctggctgccacttcactcggtattgactggatagtttagactgttgggctagacctggctcacccttaaaaaaaaacaaacacaaacacacaaatacaataaataaaacaaatgtaggctacaaattttaaaccagacctctttcaaataaactgaaagataaatatcttcatctgcaaggccagcttgcaattcatcaataagcaccaagttacagatttttctttttttaagtgtgctcaaaagccccatgct

SEQ ID NO: 35332 - DNA, 570 bp, Homo sapiens
gtaatacgactcactatagggcgaattggagctccaccgcggtggcggccgcccgggcaggtacgtgttttccttcaggaccagagctgagaggagctgggatcgcggcggcaatggaacgggcctcagaaaggcgcacggccagcgcgctttttgcggggttccgggccttgggacttttcagcaacgacattccacacgtggtgcggttcagcgcgctcaagcgccggttctatgtaacaacctgcgtgggcaagagtttccacacctatgacgttcagaaacttagtctggttgcagtaagtaattctgttccacaggatatctgctgtatggcagctgatggcagattagtctttgctgcttatggaaatgttttctctgcatttgcccgtaataaagagatagtacctcggccgctctagaactagtggatcccccgggcttgcaggaattcgatatcaagcttatcgataccgtcgacctcgagggggggcccggtacccagcttttgttccctttagtgagggttaaattgcgcgcttggcgtaatcatggtcatagctgttt

SEQ ID NO: 35333 - DNA, 686 bp, Homo sapiens
cgaattggagctccaccgcggtggcggccgcccgggcaggtaccatgcttcctgtaaagcctgcagagccatgagccaattaaacctcttttctttacagattacccagtcttgtggatcatgaggtcaggagatcgagaccatcctggctcatacggtgaaaccccatctctactaaaaatataaaaaattagccaggcatggtggcgggcgcctgtagtcccagctactcgggaggctgaggcaggagaatggcatgaacccaggaggtggaggttgcatagagccgagatcgcgccactgcactccagcctgggcgacagagcaaggccccgtctcaaaaaaaaccccaaaaaaccaaaaaaccaaattacccagtctcaggtatttctttatagcaatccaagaacggcctaatacaatgggctcccaacacataaaacatacagcagccacaaaataattagaaacaatgttaagtaatgcccactaaattttgaatagcaaaatatagcatagaagtataaaacaaatgtatttcttatccctacaaaaaaggggcatctttttggttttgatattgctgtttgtataaaaactatggtgtgtgcatgtgggtgtatgtgtattccttatagaaaacttgaaaaatacagaagtaacttagaaagaattacctttcccta

SEQ ID NO: 35334 - DNA, 549 bp, Homo sapiens
cgcgcgtaatacgactcactatagggcgaattggagctccaccgcggtggcggccgcccgggcaggtactgcaagtaaaacctactccccaaaaatgtgtggctttgggtctgcattaaacgctgtagtccatgttcatgccaaaaatggctgggaacgtttgctttatttacattcagtcagcgttgctttcagatcacactttatccacacaggaaagccagtcagcctataatgaagtagttattaaaataaatgtaatgaatatgtctacaaagtatagtttagtggtttattttgctaaaatgcacatatatttgatataatttagtttgagaagttcagctagtttttctcctttgtttgactttgtcaatttctatctggtttttaagggtctgagcttagcttgtgcatgcaaggttttgggtttttttatttttttttgagcacagcttttcaccttttaatttgttgggtatttttctcttaataagagaaatattggccatcgatttttacatataatacaagtgtgtttttccagta

SEQ ID NO: 35335 - DNA, 577 bp, Homo sapiens
ttggagctccaccgcggtggcggccgcccgggcaggtacagggacgtgatgttggagaactacaggaacctcggcttcctggcaggactctgtcttcctgacctgaatattatctccatgttggagcaagggaaagagccctggactgtggtgagccaagtgaaaatagcgaggaacccaaactgtggggaatgcatgaaaggcgtgatcaccggtatctctcctaaatgtgtgatcaaggaattaccaccaatacagaacagtaacacaggagaaaaattccaagcagtgatgttggaaggacatgaaagctatgacactgaaaatttttacttcagggaaatccggaaaaatctacaggaagttgactttcaatggaaagatggtgaaataaattataaagaagggccgatgacccataaaaacaatcttactggtcaaagagttcgacatagtcaaggggacgtagaaaacaagcatatggaaaatcagcttatattaaggtttcagtccggtctgggtgaaattgcaaaaatttcaaactgcagaagaaaattatggatgtaatcaaattgag

SEQ ID NO: 35336 - DNA, 629 bp, Homo sapiens
tggagctccaccgcggtggcggccgatgtacggaatagactggaatggaacgaaatggaatggaatggaattgaatggaatggaatcaacccgagtgcaatggaatggaatggaatggaatggaatggaatggaaataacccgaatggaatgtaatgtaatggagtgtaagggaattgaatacaatcaatccgaatgtaatggaattgaatggaacggaatggaatggaatggaatggaatggaatggaatggaatgcagtggaatgaaatcaaacctagtgcaatggaatggaatggaatggaatggaatggtatggaatggaatggaatggaatggaacgcaaaagaatggaatggaacgaaatggaatggaatgaaatggaatggaatggaatggaatggaatggaatggaatcaacccgagtgcaggggaatggaatggaattgaaggcaatggaatggaatcatccggaattgaaatggaatggaatggaatcaacttgattgcaatggaatgcaatggaatggaatggaatggaatggaatggaatggaattaaacccgaattggaatggaattgaatggaatggaatgggaatggaaataatggaatggaatgtaatgaacc

SEQ ID NO: 35337 - DNA, 620 bp, Homo sapiens
taatacgactcactatagggcgaattggagctccaccgcggtggcggccgaggtacgcgggggacggtcactttttccaacaaaacccactccatagccatgtggatttttatccaaaggctcaacaaccagagggaatggtgagacctgataactaaaatactgtattggcaagggtttgaaatgtgtaagaacctaggagggaaaggaagattgagcaacataggaaaaggggaagagaggctgagtgtcaccaaggtccaaactccatttataaaaatactgcaaaaccaggagttgatggtagaagtgcatatgatccatggcaggagtaaatctctccacctcctctaactctctgaaaactctagagttggagcaagtcttccatttgcttcttatccccttaaaagaatgccttccacttcccaacagcccccatcaagggaccccaagaggccaccatgctcttatctcgcactttctttcctattccccttgcctgaatctggagtggggttgagccctctgccttcaaccttaagatttaggaagttctttccccaactgtctaacttggaaaggtagatgagtctgaattttgaagtaacgaatgcaaa

SEQ ID NO: 35338 - DNA, 438 bp, Homo sapiens
gcgaattggagctccaccgcggtggcggccggtttcccctcacggtggacttaccaagaatttttcagccgctaccgtgtcctaatgaagcagaaagatgtgctgagtgacagaaagcaaacatgcaagaatgtgttagagaaactgatactggacaaggacaaataccagtttggtaagacaaagatctttttcccggccgggtcaagtgggcctatttagaaaaattgagagctgacaaactgagagctgcctgcatccggatccagaagaccatccgagggtggctgctgagaaagaagtacctcggccgctctagaactagtggatcccccgggctgcaggaattcgatatcaagcttatcgataccgtcgacctcgagggggggcccggtacccagcttttgttccctttagtgagggttaattgcgcgcttg

SEQ ID NO: 35339 - DNA, 195 bp, Homo sapiens
ctactatagggcgaattggagctccaccgcggtggcggccgaccgggcaggacctgttaccatgacacataacgactatgaccacggtaccacaccaagaatcatctacctctattacaaccagacattcgcacttaaataaggaggtgctgccgtatacttatccgttgctggaggcagcatgaatgggaacca

SEQ ID NO: 35340 - DNA, 99 bp, Homo sapiens
ggcgaattggagctccaccgcggtggcggctcgaggtacagggttggctgctctgttacctcgattagctttccagactgtgtcatggtttcccattca

SEQ ID NO: 35341 - DNA, 196 bp, Homo sapiens
ctatagggcgaattggatctccaccgcggtggcggccgaggtacttttttttttttttttttttttttgggtaaatggtttggctaaggttgtctggtagtaaggtggagtgggtttgaacgctttcttaattggtggctgcttttaggcctactatgggtgttaaaattttttactctctctacaaggttttttc

SEQ ID NO: 35342 - DNA, 437 bp, Homo sapiens
attggagctccaccgcggtggcggccgcccgggcaggtacagaagtagaaggcccaaaatggagagataaattataatggtaaccttgattgtgacagagcttctttcttcatatttgcattcacagcgtagacagtatgcttctacatcaggcccccgcacaggcatgggctccacaacatgaaggcaatcacaaatcttttctgagaaatgttcttattataaatattgcccagaattttctttatagggagggcagatacatttacatctgacatcctcgaaattctgccgcccacgcgcctcctgaccacagcccccgtcggctttctaattctgtgagctgccctcgtgggcgtggcctcccccgcgtacctcggccgctctagaactagtgggatcccccgggctgcaggaaattcgatatcaagcttatc

SEQ ID NO: 35343 - DNA, 443 bp, Homo sapiens
gcgaattggagctccaccgcggtggcggccgaggtacgcgggaggagaggcaacatactccaaatagttgggttcttcagggaagctattagaaactcaggtgacttgttagagcactaacttggtcagagccaaatcctggcaaacgctgcctgaccttcactctgtggttggggcagtgagaaccactgaggtccaatgatgagacttggaggtctggatccagtctctctttgttttaatgtgacttaggtgctgtcaacattagcaagataatggaaatcacgacgccagtgggtgcttacctccctgctaggcatgcaggggctggcggttggcaggggaaggaggcccagtgagccgagtcccttaggggagggagagtttgtcctctttgccccacagtctacccttcaaggccttgtggcagtgccagtgttcgg

SEQ ID NO: 35344 - DNA, 478 bp, Homo sapiens
  misc_feature 342: n = A,T,C or G
actactatagggcgaattggagctccaccgcggtggcggccgaggtactttttttttttttttttttttttgtatttttagtagagacggggtttcaccatgctggccaggctggtctcgaactcctgacctcgtgatccgcccgcctcggcctcccaaagtgctgggattacaaacgtgagccaccgcgcctggccttccttggttttcttggcttcaattcctgggaacgcctgaatcaacaggcggacatctgtcaaaccttcctagcaactacgcctgcggatggccaacctgaccctggaagacagtggggtttagttaagcacagattggactttntttttttttttttttttttggggtttttgtttagtttatatccttctttttttttttttttttttttagggttggaattacagggatagatggtattcgcctcatttcatgtctttacatctggcaaacaggactg

SEQ ID NO: 35345 - DNA, 200 bp, Homo sapiens
tatagggcgaattggagctccaccgcggtggcggccgcccgggcaggtactttttttttttttttttttttttttgaaatgaacaaatatttatttatcttttataacaagtaaggcaatgttgcttaaaggaagacaaacaaacataaaagattccgttgacaatgcattttttcatctgttcggcacaatgcttttgt

SEQ ID NO: 35346 - DNA, 484 bp, Homo sapiens
actactatagggcgaattggagctccaccgcggtggcggccgaggtacgcggggagaacgtgtgcagctcagccagccacagaactggaatttttcaggagcagggggagcatggagtttggactttgctgagcaactgaagtggagcgcagagcttgctcgcttaggagagagcatcatggatggcaaacaagggggcatggatgggaagcaagcccgcggggccaagggactttcctggcatcaggcttctttcaaacccattgatgggcgatgctgtgtctgattggtctcctatgcatgaagctgcaatccacggacatcagctgtctctgaggaacctcatcagccaggggtgggctgtgaacatcatcacggcagatcatgtttccccactccatgaagcctgtcttggaggtcatctctcttgtgtgaagattttattaaagcatggagctcagcacggagccagcgttcaacctga

SEQ ID NO: 35347 - DNA, 176 bp, Homo sapiens
atatagggcgaattggagctccaccgcggtggcggccgcccgggcaggtacttttttttttttttttttttttttttgaaatgaacaaatatttatttatcttttataacaagtaaggcaatgttgcttaaaggaagacaaacaaacataaaagattccgttgacaatgcattttt

SEQ ID NO: 35348 - DNA, 471 bp, Homo sapiens
attggagctccaccgcggtggcggccgaggtacctcattagtaattgttttgttgtctcatttttttctaatgtctcccctctaccagctcacctgagataacagaatgaaaatggaaggacagccagatttctcctttgctctctgctcattctctctgaagtctaggttacccattttggggacccattattgggcaataaacacagtttcccaaagcatttggacagtttcttgttgtgttttagaatggttatcctttttcttagccttttcctgcaaaaggctcactcagtcccttgcttgctcagtggactgggctccccagggcctaggctgccttcttttccatgtcccacccatgagccctccactggacagatcagtaagcctggcccttcattctgcgctgtgtacttcctctgtgaaaatccaatacctcttacctgctctgcatgcaaagattctcag

SEQ ID NO: 35349 - DNA, 473 bp, Homo sapiens
ctactatagggcgaattggagctccaccgcggtggcggccgaggtactttgggcttgctggtgtgacaaaaaatacatttgaggtaattccagtgaattctgcaggctctcctgttggggatgtgccattcatccgatcaggattgctggggtttgtagggccgggtagtttggtgttcgtggttgggaaaatggatggcttactgatggtttaggggtcgaagacataatgctgatgacattgttgctactggattggctgtagaatcaataaagactgtttatagaggaagaattgctgtgttttctgtgtctgtattttatgatgagcgcattgtggtggttgcggaacaaagacctgatgcttctgaggaagatagtttccagtggatgagccgcgtgctgcaggcgatcgatagcattcatcaagtgggggtttattgtcttgctctggtgccagccaatacattgcc

SEQ ID NO: 35350 - DNA, 369 bp, Homo sapiens
ggagctccaccgcggtggcggccgcccgggcaggtactttttttttttttttttttttttttttccgaaaaataagacaatttattttgttgatgacatgattgtaaacctagttatgcctctgctccctcatttaaaaattaaaaatcaggccaggtgcggtggctcacgcctgtaatcccaacactttgggtggcccaagggggccataatcacctgtgatcaggagttcgagaccagcctgaccaacatagtgaaatcctgtctctactaaaaacacaaaattagccgggcgtgggggtgcatgccttgtaatccacagtttcttcgggggttctgagggcacgagaatttgcttgaaccccatgg

SEQ ID NO: 35351 - DNA, 481 bp, Homo sapiens
cgactactatagggcgaattggagctccaccgcggtggcggccgaggtacacgtgtgactgcggatggagctccagttttctcccaattttgcgctaggcagagaaaagtagaaacaaccagatgatgtccaccctgctagttctaaatcctcttttgggtgcttggtaaggagaggtggagggaagggaatatgaggaagggtcggttagggaaaataaatactggttgagcaatggggcggtggctctagctgtggtcagcactgcacagagtaggggtctggaaaggagaaagaggcagaagaatctggcttgaagtagatgcaaatacttacaacgaggaaactttctctgccagattcaaaggggcacatggcttttgtaacctggagaatgaggtgaggttagagctgtgtttcccttaccactggcttatcagtgcctggcacagtacctgcccgggcggccgctctagaacta

SEQ ID NO: 35352 - DNA, 481 bp, Homo sapiens
actactatagggcgaattggagctccaccgcggtggcggccgcccgggcaggtactgcagcatgcactggcatactatagcttggtccagctcttccagagccccaaccactttccaaattgaatcctaaagtttttggtgcaggacccaatttaaatccatgtttcttccccgcgtacaaattgctaatcaaaaaggaaaggtggaagatgggtagttttaataacaaatagtaaaacgggtgttgctgaatacagcacccggtagcctctatttgcaaacccggggagggaagggggtgccccaacaacagtggctccgcctcattgtccaggcacaggcaaaccgcagtagtgagctttggtacctcggccgctctagaactagtggatcccccgggctgcaggaattcgatatcaagcttatcgataccgtcgacctcgagggggggcccggtacccagcttttgttccctttagtg

SEQ ID NO: 35353 - DNA, 445 bp, Homo sapiens
gcgaattggagctccaccgcggtggcggccgcccgggcaggtacttttttttttttttttttttttttttttgcaaataaaaaagttgaagagcaaaacgacgtgtctaacgtcacacattgagctttaaagacagatgggatctggcatgcgtttgtcagttaacagtgctagcacaaataccaacttttgttaaaatcgtaaggattttatgtcgtgagacactcaggactcacctgatctcggtgttcagttgtgcgtagtttttgatttgcgcctcgcccttgggcaagtgcaaaatcctggggttatacaaagctcatcacagttaacccctttgtcccaatccgcagaatgagagctcagagcccggccatgggaggctcggttatttaggcaggaaaatcaaggaacccatgtttgagcaggggccttttgtggcgcg

SEQ ID NO: 35354 - DNA, 451 bp, Homo sapiens
tatagggcgaattggagctccaccgcggtggcggccgcccgggcaggtacttttttttttttttttttttttttttttgaggaaatatttgcttttaaacatttgattttcatcaatctttggatgatttgactttattgtcaatatctagtaaatttgccaaaatattttttttattccttgctcccctttatcccactaaaaaattgggcgggtagaattttctgttttcctaaacaggaaggaggcaaagctggtttcaccttgtcgtctaactgtaagcccataaaggaaatattggtccaaaattttgcttgagcaaagttctattaattcatttttacccaagaaatttaattcaagaaacttaaatatgtagtgaaaaaaaaataataattttttttaacaagaaaaaaatattctagcttaaaagtcaaagtaaaaacttttt

SEQ ID NO: 35355 - DNA, 478 bp, Homo sapiens
gcgaattggagctccaccgcggtggcggccgcccgggcaggtaccaatttactgtattagtccgttttcatgctgccgataaagacatacccgagactgggtaatttacaaagaaaagaagtttaattgaacttacaattccatatggctggggaagcttcacagtcatgatggaaggcaagaaggagcaagtcacatcttacataaatggtagcaggcaaaaagtgagatctcatgcaggggagctcctctttttaaaaccatcagatctcagctgggcacagtggctcacgcctgtaatcccagcactttgggaagctgagacaggcagattatctgaagtcaggacttcaaggccagcctggccaacatggtgaaatcccctctccactaaaaatacaaaaattagccaggcatggtggcaggcaactgtaatcccaactacttgggaggctgaaacaggagaatcacctgaacc

SEQ ID NO: 35356 - DNA, 502 bp, Homo sapiens
actactatagggcgaattggagctccaccgcggtggcggccgcccgggcaggtacttttttttttttttttttttttgagacagcgtcttagtctgtcgccaaggctggagtgcagtggcgcaatcaaagcttgctgcagccttgaactcctgggctcaagcaatcctcttacctcagcaactaggactacaggcacatgccaccacgcttggccttctaatttatttctgtgtcaacaaaataaaactcaggcctaggaatagcttggttcagaaatcacagagggacttagtattccattaatcccgcgtacctcggccgctctagaactagtggatcccccgggctgcaggaattcgatatcaagcttatcgataccgtcgacctcgagggggggcccggtacccagcttttgttccctttagtgagggttaattgcgcgcttggcgtaatcatggtcatagctgtttcctgtgtgaaattgttatccgctcacaattc

SEQ ID NO: 35357 - DNA, 456 bp, Homo sapiens
acgactcactatagggcgaattggagctccaccgcggtggcggccgaggtacgcggggcaccagaaacatatgaagaatatggatatgatgatacatacgcagaacaaagttacgaaggctacgaaggctattacagccagagtcaaggggactcagaatattatgactatggacatggggaggttcaagattcttatgaagcttatggccaggacgactggaatgggaccaggccgtcgctgaaggcccctcctgctagaccagtgaagggagcatacagagagcacccatatggacgttattaaaaacaaacatgaggggaaaatatcagttatgagcaaagttgttactgatttcttgtatctcccaagattcctgttgctttacccacaacagacaagttattgtctaagtgtttttcttcgtggtccccttcttctccccaccttattcca

SEQ ID NO: 35358 - DNA, 426 bp, Homo sapiens
actcactatagggcgaattggagctccaccgcggtggcggccgaggtactttttttttttttttttttttttggtagagatgggacttcctacgttgctcaggctcgtcttgaactcctgagttcaagtgatccacccaccttggccttttaaagtgctgagattacaggtgtgagccaccatacctggccaaaataataatatttttaatctgtaaaaaaaaataaagagaaaagtgtaaatgtgttcatccaacaaagcctttctttcacacatttgaaatttaaatagatccatttaaatacgatatccagttgaaccagccctgaagggctttctgaattggacatgttctgtcgttaccagtggggctttctggaagctggcccagagctggtcttgtccacgcagaggatctgaaagcac

SEQ ID NO: 35359 - DNA, 471 bp, Homo sapiens
gcgaattggagctccaccgcggtggcggccgcccgggcaggtacgtcccaccccctgctgggtcagtagcttctgggccagtggttgggggcagaaagaaggtcagaggccctgaacagataaagcaggaggttgagagtgaggaggaaaaacccgacaggatggatattgacagtgaatacacagattcaaacacatctttgcaaacaagggctagagaaaagaggaagcctcagctggagaaggacacaaagccgaaagagcccaggtatactcccgtgagcatctacaaggaaaagctgctgctcaagaggctggaagcttgtcccggtgctgttgccatgactccggaagctcggagactgaaactcaaactgattgttagacaagcgaaaagggataggggattaccactttttgacttggatcaagttgttaatgctgctcttttgttagttgacgggatttatg

SEQ ID NO: 35360 - DNA, 473 bp, Homo sapiens
gcgaattggagctccaccgcggtggcggccgaggtacgcgggggacatatcacctaagctctggattcgcagataggccccaatctcttttttgggcaatgctcgggtaagagagcagagtcacatcaagtggttgatgggcccagagatatatcacattgccccttgtggacagggaccaggcaggggactcacatcacaatagaggtaggacaaggaatacatcacaatacgttttgagagcagaaccaaaaaagagtaacataatctttgtgttgagtgcagcaatatgttacacttttctttgtgggcagaacgtgtaaagaaggaaaaagttggccggacacggtggcctgtaatcccaacactttgggaggtcaaggtgggcagatcacctgaggtcaggagttcaagaccagcctggccaacatggcaaaacgctgtctctactaaaaatacaaaaattggctggg

SEQ ID NO: 35361 - DNA, 384 bp, Homo sapiens
ggcgaattggagctcaccgcggtggcggccgaggtacactgggctctcaacgtggtgtggaaggtagcctgttacagtgctggattcataaaagggtctttatggtttgtgaaagaatatctgtgtgcttagggaggaaactttttgatctgcagaaaagccagaagacatctaggacatccataaaaattcatcagagagcattttactactgagctgcaaagggaaaaacttaaaatggatatgaaaagtgaagagagtgatcataggagaaaaccatttcagatgacaagagcacctcaaaggcagcagcctcaaggagcagccatggccccagacttgtcgcacggatgcagaaaacttaatggaggaggctgaggtcag

SEQ ID NO: 35362 - DNA, 193 bp, Homo sapiens
gcgcgtatacgactcactatagggcgaattggagctccaccgcggtggcggccgaggtacgcggggatgctgccatggctgcaagacctcattcaattgatgggagagtagttgagccaaaacgtgctgtatcaagagaggaatctggaaaaccaggggctcatgtaactgtgaagaagctgtatgttggcgg

SEQ ID NO: 35363 - DNA, 448 bp, Homo sapiens
gcgaattggagctccaccgcggtggcggccgcctgagcgccgacccacgccctgcctgctcttccagtccagccaacactctaagcaggcaccgcctccactcgcagcccccgggatgggtcccactccctaccgcagatccccaggccccctccacccagtcggctagccctcgcctttgccatccgatactaaaatgtctgatgatgctggtgacaccttagccactggagacaaagcagaagttactgagatgcctaatagtgattctttacctgaggatgcagaagtgcattgtgattcagctgcagtttcacatgagccaacaccagctgaccccagaggggaggggcatgaaaatgcagctgtgcagggtgcaggggctgccgccattgggccccctgtgcagcctcaggatgccaacgccctggagccccctcttcaatgg

SEQ ID NO: 35364 - DNA, 281 bp, Homo sapiens
cactatagggcgaattggagctccaccgcggtggcggccgaggtacatcaaagaaaataagatatacctttttttttgagagggagtctcactctgtcgcccaggctggagtgcagaggcgcgatcttggctcactgcaacttctgccttctgggttcaagctattcttctgcctcagactgccgagtagcttgggattaccattgttcacctaccacggcccgctctagaacttagtgggatcccccgggcctgcaatgaatttcgatatcaagctttat

SEQ ID NO: 35365 - DNA, 197 bp, Homo sapiens
cgacttactatagggcgaattggagctccaccgcggtggcggccgaggtactttttttttttttttttttttctgaaatgaacaaatatttatttatcttttataacaagtaaggcaatgttgcttaaaggaagacaagcaaacataaaagattccgttgacaatgcattttttcatctgttcggcacaattgcttt

SEQ ID NO: 35366 - DNA, 490 bp, Homo sapiens
  misc_feature 273, 285, 286, 287, 309, 384, 387: n = A,T,C or G
acgactcactatagggcgaattggagctccaccgcggtggcggccgaggtactgattttaaaaactaataacttaaaactgccacacgcaaaaaagaaaaccaaagtggtccacaaaacattctcctttccttctgaaggttttacgatgcattgttatcattaaccagtcttttactactaaacttaaatggccaattgaaaccaaaccagttttgagaccggttcttccaccaactgattaagaagtggggttggcagtgtatttaggganttaatattcatnnnttagccttcttgagctttctgnggcagaactttgatgacctttgccagcttctcagcagccctttcttggtccacttgcttttgatgaacaacccanccngcaactgttctgttcttcatatttcacgaacagcaaaagcgacccaaaagggtggaatagttctgaagaagcctcttcaaccacaccatggggcttggccagg

SEQ ID NO: 35367 - DNA, 458 bp, Homo sapiens
atacgactcactatagggcgaattggagctccaccgcggtggcggccgggtggcgggaggaaccgttacgggaactgaagttgcggattaagcctgatcaagatgacaacctcccaaaagcaccgagacttcgtggcagagcccatgggggagaagccagtggggagcctggctgggattggtgaagtcctgggccagaaagctggaggaaaggggttttgacaaggcctatgttgtccttggccagtttctggtgctaaagaaagatgaagacctcttccgggaatggctgaaagacacttgtggcgccaacgccaagcagttcccgggactgcttcggatgccttctagagtggtgcgacgccttcttgtgatgctctctgggaagctctcaatccccagccctcatccagagtttgcagtccgagtagggactcctcccctgtcctctacgaagg

SEQ ID NO: 35368 - DNA, 468 bp, Homo sapiens
tatagggcgaattggagctccaccgcggtggcggccgcccgggcaggtactttttttttttttttttttttttttttagttggttggttggttggtttttgtttgtttgtttcgagacggggctccggctctgccgccgggggctgcagtgcaatggcgcgatctcacctcactgcggcctactgggctcaagcgatccttccactgttgcccggcctgaagacagcctttagagaaagaagcagggggagttcttccgaggacagacaagatttctggagtttggaaagggtgagagactgggtcagcgaaaggaacattccggtctttatgttgggatgcaacgtattgatacagggatgagaccccccgcgtaccttggccgctctagaactagtggatcccccgggctgtaggaattctatattaagcttattgattccgtcgaccttgagggggggcccggtt

SEQ ID NO: 35369 - DNA, 469 bp, Homo sapiens
tacgactcactatagggcgaattggagctccaccgcggtggcggccgaggtacttgcaaaagcacttgaagtcattaaaccagctcatatactgcaagagaaagaagaacagcatcagttggctgtcactgcataccttaaaaattcacgaaaagagcaccagcggatcctggctcgccgccagacaattgaggagagaaaaagagcgccttgagagtctgaatattcagcgtgagaaagaagaattggaacagagggaagctgaactccagaaagtgcggaaggctgaggaagagaggctgcgccaggaagcaaaggagagagagaaggagcgtatcttacaaaaaaaaaaaaaaaaaaaaaaaaaggtccatgctaagacttcaccagtcaaagcgaactactatactcaattgatccaataacttgaccaacggaacaagttaccctagggataacagcgcaatcc

SEQ ID NO: 35370 - DNA, 185 bp, Homo sapiens
cgactcactatagggcgaattggagctccaccgcggtggcggccggtggccgcgctcaggtagcgcaactcccgcagaagtcctcgaaaagtgtgcgacggggaccctaaggccgacatagtcctgtccttctcccgcgtaccagacccttatcaggaccagtgcatctataacaccaacctacc

SEQ ID NO: 35371 - DNA, 397 bp, Homo sapiens
atacgactcacttagggcgaattggagctccaccgcggtggcggccgaggtactttttttttttttctttttttttttttttttttttttttttttttttcattgggggcacttttatttacagccaaggaaaaaagaaaactaccttctatttaaaatgggaaagcttgtttgtataaaaacaaatatttcatcatcacttattttctatactgttggaaactaagttttacatttttcattttcaacagagatttgaattttaatgtcccaaaaatataaagaagatggctttaaaatgtcctatatgttggcagccctaccctgaaaacttttttggcttatctttggttctgagctacagtcttcgcagagactaaattagtgactggacaac

SEQ ID NO: 35372 - DNA, 651 bp, Homo sapiens
  misc_feature 139: n = A,T,C or G
tatagggcgaattggagctccaccgcggtggcggccgaggtacagccacccctctgcaacccgaagagacaggaaggtatatacaatgaaaccccttatatacaacttctgttactcgcattccagactgctacagctntgtgtcacttcagagagcaaatccttttaaaaaacagatggtcaaagagaaaatgagaaagacttcccccaaaaaaaggatacttccattccactatactaatgcaggctcttcggatggggttattgagtgataaacagaaaagggcgcgggcaggtcggctgttggacgagttaccctgttttttgctcttggcgtattgctgacgttttctttgggagagagatcctacaggtgggggtgcagaggtgctcatagtttgggcagccttggcctgtctagcagcatcgattgtagcttgccaagacaggacagtttgcttggagctatgcggctgaaaagttggtccttcaccagaaagaggaagtctggtgcctcttgcatagtttgcctctggggagaaggagaaaaacaaagattttttttttaaatgaggatccaatgggtaggagaaaaaaatcaaaggttgtctcccatcaataacaggggaatcattcactcctatgtttcca

SEQ ID NO: 35373 - DNA, 624 bp, Homo sapiens
gcgcgtaatacgactcactatagggcgaattggagctccaccgcggtggcggccgcccgggcaggtacattaaataataacagaaaccaagagtttgtttctagtagtagaagtataagtggagagagtgctacatcagagagtgaatttaccttagggggtgacgacagtggtgtgtcaatgaacccagctaggagtgcacttgcactgttggccatggcccaatctggggatgcagtcagtgtcaagattgaagaagaaaaccaagatttaatgcattttaaccttcaaaagaaaagagctaaaggaaaagggcaagttaaagaggaagacaacagtaatcagaaacagctgaaaagacctgcccaaggcaaacgccagaatccaaggggaacagatatttacttaccgtatactcctccttcctcagaaagctgccatgatggttatcagcatcaagaaaaaatgagacagaagatcaaagaggtggaggaaaaacaaccggaagtcaaaacaggatttattgcttctttcttagattttctgaaatccgggcccaagcagcagttttccactcttgctgtacctcggccgctctagaactagtggatcccccgggctgca

SEQ ID NO: 35374 - DNA, 557 bp, Homo sapiens
  misc_feature 63: n = A,T,C or G
gcgtaatacgactcactatagggcgaattggagctccaccgcggtggcggccgaggtactttntttttcttttttttttttttttctttgtctgtgtttgtttgttggttggttggttggtttttgtttgtttgtttcgagacggggctccggctctgccgccgggggctgcagtgcaatggcgcgatctcacctcactgcggccttctgggctcaagcgatcctcccactgtgcccggcctgaagacagcctttagagaaagaagcagggggagttcttccgaggacagacaagatttctggagtttggaaagggtgagagactgggtcagcgaagggaacattccggtctttatgttgggatgcaacgtatagataccccgcgtacctgcccgggcggccgctctagaactagtggatcccccgggctgcaggaattcgatatcaagcttatcgataccgtcgacctcgagggggggcccggtacccagcttttgttccctttagtgagggttaattgcgcgcttggcgtaatcatggtcatagctgtttcctgt

SEQ ID NO: 35375 - DNA, 659 bp, Homo sapiens
tcactatagggcgaattggagctccaccgcggtggcggccgcccgggcaggtactgggccaagcacagttggcagggctggggcaaggaattctgacagaaacacaacaagggttaatggtagccagccctgctcagaccctcaatgacacgctggatgacatcatggcagcagtcagtggaagagcatctgcaatgtcaaacactcctacccacagtattgctgcatccatttcccaacctcagactccaactccaagtcctatcatctctccttcagccatgcttcctatctaccctgccattgatattgatgcacagactgagagtaatcatgacacggcgctaacacttgcctgtgctggtggccacgaggaactggtacctcggccgctctagaactagtggatcccccgggctgcaggaattcgatatcaagcttatcgataccgtcgacctcgagggggggcccggtacccagcttttgttccctttagtgagggttaattgcgcgcttggcgtaatcatggtcatagctgtttcctgtgtgaaattgttatccgctcacaattccacacaacatacgagccgggagcataaagtgtaaagcctggggtgcctaatgagtgagctaactcacattaattgcgttgcgctcac

SEQ ID NO: 35376 - DNA, 466 bp, Homo sapiens
atacgactactatagggcgaataggagctccaccgcggtggcggccgcccgggcaggtacgcggtggtgtcgggttcctgggcctgaggggcctgaactgatctcacttggctccgaaagcctttgctgtgttccctgcagcccctggccccccagccttggggctctggctccccccggcggaattgggggactgtttcctgacatcctggacaagggaagcccactagaggctggaacaggacctctccagcctcctcaccagcaccgtgcccatctcaactggacttcccgccctccttctccacctcctagtgcccgtggccggggattcaaagccgtgtgtgtgtgtgtgtgtgtgtgcgtgtgtgtgtgtgtagtgggtgtgcgtgtgggtgtgggtgtgagtgaatgtgggcgtgtgtgtctgcccgtgttattggggtggccgtgagtgtgtgctcac

SEQ ID NO: 35377 - DNA, 586 bp, Homo sapiens
atgggcgaattggagctccaccgcggtggcggccgaggtactttttttttttttttttcgttttttttgaggtcaggagttcgagaccagcccagccaatatggtgagccctcctctctactacaaataaaaaaaattagctgggtgtggtggcatgtgcatgtagtcctagctactcaggaggctgaggcaggagaatcacttgaaccagggaggcggaggttgcagtgagctgagatcacgccactgcactccagcctggacaagagagcgagaccctgtctcaaaataatgatgatgataataataataataataataattctgatctgtcataaatcttgtcttttccttaaagagcatgaaaaaaatgtttcccatgctagatggaaattgcaaactctttcgctgaaaataatcaacgcaacgcaatttcccgtttccaccacctggtcttggaagacagggacactgagatatcccagctgggaggacggtgctgagagaattgtgcaagcagagactagtgtcagcctttgcttggaacagctccatttcatttttatgatatagtttaaagggagct

SEQ ID NO: 35378 - DNA, 526 bp, Homo sapiens
ccgcggtggcggccgaggtacttctgcaggatgaaggacttcagctcatccttttgggggcctctgaggcgtctgggcaggtcctgcagagaggggaggcctggtctaggcccaagggcaccagcaggggaaacagatggggataggtaggggttggggcttaacaccaaggtggaatgtagctgaggctacatggtagagggtgctgggaaaagatacctggttggggccctcccaggctgcaggcccctcttcctttccctctaccagcatctgcacagcttcttccaagtccccccgagctttggccagcacccactgggcctgctccaccgaacaggtagggaacacctccaggagtacctcagtccacatctccttcacgttctccagcaccatgttgcagtgcctatcgaaggccttcacgcggcccaggagtttcttattgttgcggcagttgatgagcacttgggtattgttcttgactgactgtgtgagcacagagagtggaccggtgttaaattcc

SEQ ID NO: 35379 - DNA, 583 bp, Homo sapiens
ctatagggcgaattggagctccaccgcggtggcggccgcccgggcaggtacttttttttttttttttttttttttttttttggagacggagtctcacccttgttgcccagactgcagtgcaatggcccaatctcggctcactgcagcctctgcctcccaggttcaggcgattctcctgcctcagcctcccgaatagctgggaatacaggcatgtgccaccatgctcggctcattttgtatttttagtagagacagggtttcgtcatgttggcccggctggtctcgaactcccgacgtctggtgatccacctcccaaagtgccgggattacaggcatgagccactgcgcctggccctatatagactttttaatgtgactttgtcaaaacagatattcccaactttattattagaattgagaatgcaagcattacttagtaggaaaaatattttgcttgaattcccaatgatttgtggatataaattctactaaatcatgtacctcggccgctctagaactagtggatcccccgggctgcaggaattcgatatcaagcttatcgataccgtcgacctcgaggggg

SEQ ID NO: 35380 - DNA, 591 bp, Homo sapiens
ggcgaattggagctccaccgcggtggcggccgcccgggcaggtaccttgatggctgtttgtggtcatacactccgtggaccagtcttgagggatcacagggccaaccagctcagcaaacctctccagaggacagctgggactgccccgcgtacgcggggaaattgagtccttctatgaaggagaagacttttctgagaccctgactcgggccaaatttgaagagctcaacatggatctgttccggtctactatgaagcccgtccagaaagtgttggaagattctgatttgaagaagtctgatattgatgaaattgttcttgttggtggctcgactcgaattccaaagattcagcaactggttaaagagttcttcaatggcaaggaaccatcccgtggcataaacccagatgaagctgtagcgtatggtgctgctgtccaggctggtgtgctctctggtgatcaagatacaggtgacctggtacctcggccgctctagaactagtggatcccccgggctgcaggaattcgatatcaagcttatcgataccgtcgacctcgagggggggcccggtacccagcttttgttccct

SEQ ID NO: 35381 - DNA, 637 bp, Homo sapiens
gactcactatagggcgaattggagctccaccgcggtggcggccgaggtacgcgggggcacaagctgtaacatggcggcagcgactgcggcctgaactctagggagccgggttgatttttaaagcttcaaaatcctaagactcagcactgttgcggggagcacagggatcagttgtccttgtttttttttggtcttttcttcatttgaagattaagtattggagccatgggaataaaggttcaacgtcctcgatgtttttttgacattgccattaacaatcaacctgctggaagagttgtctttgaattattttctgatgtgtgccccaaaacatgcgagaactttcgttgtctttgtacctgcccgggcggccgctctagaactagtggatcccccgggctgcaggaattcgatatcaagcttatcgataccgtcgacctcgagggggggcccggtacccagcttttgttccctttagtgagggttaattgcgcgcttggcgtaatcatggtcatagctgtttcctgtgtgaaattgttatccgctcacaattccacacaacatacgagccgggagcataaagtgtaaagcctggggtgcctaatgagtgagctaactcacattaattgcgttgcgc

SEQ ID NO: 35382 - DNA, 472 bp, Homo sapiens
tacgactcactatagggcgaattggagctccaccgcggtggcggccgcccgggcaggtacttttttttttttttttttacagtttttgatatgctttattttgggtatgtagtttacaaaatataaaggaaatataaggagtgttctctttttttttaaataaaaagtgtatttttaactgggcatggtggctcactcctgtaaccccagcactgtgggaggctgaggctggtgaatcgcctgagtccaggagtttgagaccagcctgggcaacaaggtgaaaccctgtttctatcaaaaaaaaaaaaaaaaaaaaggaaaaaaataagtcaggcatggtggtatgcacctgtggtctcagcctcctaagtagctggtattacaggagtgtgccattagcctggctaatttttgtatttttagtagagatggattttcattgtgttggccatgctggtcttgaactcctgac

SEQ ID NO: 35383 - DNA, 455 bp, Homo sapiens
tacgactcactatagggcgaattggagctccaccgcggtggcggccgaggtacataccccatggcccgttacattaatatgcaactgaaaatccagaacagagaacttgggaaaaacaataataactttagtataagcctctcagctgacaatgacccaaggactgttcagcggcccaggcacctgaggagcaatgacagtctacgaggacatcttctgcagcaacagccatcaggagaccagcagcagcacagcactcagggctcggtgtccacctccctgcagatcactttctccctcactggaatcaaccgcagcacttggagtctactcatggagtagaaacttctttatggggtctggcagaggcagcgaaggaatcagatgaagccggtgtttgccaagagctcttctcacagccacacggcacagacacagcaaggttctgggaacac

SEQ ID NO: 35384 - DNA, 668 bp, Homo sapiens
gactactatagggcgaattggagctccaccgcggtggcggccgaggtactcccgtgattgatgcagatcaacccgagtcttctcagctccgggtccttacactcagtgaagactcgccctacgaaactttgcattctttcattagcaatgcagtggctccttttcttaagtcctacattagagagtctggcaaggcagacagggatggtgataaaatggctccttcagttgaaaagaagattgcagaactcgaaatgggactccttcacttgcagcaaaatattgaaattccggagatcagcctgccgattcatccaatgatcacaaatgttgcaaaacagtgttatgagcgtggagaaaagccaaaagttacagactttggtgataaggttgaagacccaacatttcttaatcagttacaatctggagttaaccgctggatccgagaaattcaaaaagtgaccaaactggatcgagatcctgcatcaggaactgccttacaggaaattagtttttggctaaacttggaacgtgcgtgataccgcatccacgagaaacgggagagcccggaagtcctcctgactctggatatcttgaaacatggtaagcgctatcatgccaacgtcaggtttgacactggcacaggtctaaaacaggctttggaaact

SEQ ID NO: 35385 - DNA, 379 bp, Homo sapiens
cgcgcgtaatacgactcactatagggcgaattggagctccaccgcggtggcggccgcccggccaggtactttttttttttttttttttgaaacggaggcgggttgctgaaccaatgtgaaagcttcattgttgcatttggacatgacaagaaactggatggcaaacccatagtcaccaagctgtataaaaaacctggctaccattttggctccatccagagactgggtctctttaacaatattgacagctttttcaagattattgaggcgatccacatagatgcggattacactttgccactgtttcgcattttcataagctacaacagcttctttggatcttgcatctgcttccttggcttaggcatactgcaaatgg

SEQ ID NO: 35386 - DNA, 689 bp, Homo sapiens
  misc_feature 174: n = A,T,C or G
gactcactatagggcgaatgggagctccaccgcggtggcggccgcccgggcaggtactttcttcatttccacctttgcccaagtcatctgctttttcatggaccaccagtgtgcggccaatgatgcaatggtctcctgagagtgagatcacagaatcttcaatagacacatcgngccacaccatctttgtcagcagtcacattgcccaagtctccaacatgcctctcttcatcctttggcccaccgtgttttctggatagaggattaaagtgaggacctgcactggtacgcggggagcactgcctggctccacgtgcctcctggtttcagtatggcgctgtcctgggttcttacagtcctgagcctcctacctctgctggaagcccagatcccattgtgtgccaacctagtacctcggccgctctagaactagtggatcccccgggctgcaggaattcgatatcaagcttatcgataccgtcgacctcgagggggggcccggtacccagcttttgttccctttagtgagggttaattgcgcgcttggcgtaatcatggtcatagctgtttcctgtgtgaaattgttatccgctcacaattccacacaacatacgagccgggagcataaagtgtaaagcctggggtgcctaatgagtgagctaactcacattaattgcgttgcgctcact

SEQ ID NO: 35387 - DNA, 402 bp, Homo sapiens
gcgtaatacgactcactatagggcgaattggagctccaccgcggtggcggccgcccgggcaggtacaggagccctgatagccatactcgcctgtgttttgacattattggtgttgatcctccttatcgtcactatgagaagacggaaaaaagagccccttatttttgacgaagaaagagacatcagagaaaatattgtgagatacgatgacgagggcgggggagaggaggacacggaagcgtttgacatggctgcactgagaaacctcaacgtcatccgagacaccaagacccggagggatgtgactccagaaattcaattcctgagtcgaccagcttttaaaagcatcccagataatgtcatctttagggaatttatttgggaaagattaaaagaagccga

SEQ ID NO: 35388 - DNA, 394 bp, Homo sapiens
cgtaatacgactcactatagggcgaattggagctccaccgcggtggcggccgaggtacgggaagggtataaccaacattttcggggtatgggctcgatagcttatttagctgaccttactttaggatggggtgtgataggtggcaccccgcgtactgccagctcagggcagccaaaagcatgacaaacgacaggtagatgggggagtagtggcttcgggaaatcagccgacagttgggaagattctgcgtccggatggtggagatgatctgccttgttttgctagaagatgggtctgagtcggggattctatgataaatctcttccatatactgatatatgatggctttgacagctggcatattggtggcatccatcatcagggtcactgcttg

SEQ ID NO: 35389 - DNA, 402 bp, Homo sapiens
gactcactatagggcgaattggagctccccgcggtggcggccgcccgggcaggtactttttttttttttttttttgaaaaaccacgtgggttccgagttcattactacaggaaaaactgttctcttctgtggcacagagaaccctgcttcaaagcagaagtagcagttccggagtccagctggctaaaactcatcccagaggataatggcaacccatgccttagaaatcgctgggctgtttcttggtggtgttggaatggtgggcacagtggctgtcactgtcatgcctcagtggagagtgtcggccttcattgaaaacaacatcgtggtttttgaaaacttctgggaaggactgtggatgaattgcgtgaggcaggctaacatcaggatgcagtgcaaaat

SEQ ID NO: 35390 - DNA, 622 bp, Homo sapiens
ctatagggcgaattggagctccaccgcggtggcggccgcccgggcaggtaccgggatgtgatgctggagacctacagccacctgctctcagtagggtatcaagttcctaaaccagaggtggtcatgttggagcaaggaaaggaaccatgggcactgcagggtgagaggccacgtcacagctgcccaggagagaaattatgggaccataatcaacatagaaaaatcatcggttataaaccagcttcctctcaagatcaaaaaatttattctggggaaaaatcctatgagtgtgctgaatttggaaagagcttcacctggaagtcacagttcaaggtacctcggccacctcggtcgctctagaactagtggatcccccgggctgcaggaattcgatatcaagcttatcgataccgtctacctcgagggggggcccggtacccagcttttgttccctctagtgagggttaattgcgcgcttggcgtaatcatggtcatagctgtttcctgtgtgaaattgttatccgctcacaattccacacaacatacgagccgggagcataaagtgtaaagcctggggtgcctaatgagtgagctaactcacattaattgcgttgcgctcact

SEQ ID NO: 35391 - DNA, 354 bp, Homo sapiens
gctccaccgcggtggcggccgcccgggcaggtacgcggggagagcatgctttttcctgtttggctgggaaagggaaggctgaactgctgagtctgacacttaacaggacttcggccttcccctgaatacagactagatcagagattttatttttttaattgaaaaggtacttgggttctctttagaaacccttatttggtgtgcgcatctggctattgcacagagatgtcatcttatgcgaagaagtcggagttgatttcttccctcagacaagctattggttgttggtgggcaacagaagttgctcagcatagacaggggaaaaaacgggtacggatgagactgaaagaaaac

SEQ ID NO: 35392 - DNA, 430 bp, Homo sapiens
tactatacgggcgaattgtagctccaccgcggtggcggccgaggtacgcgggggggggctggttcagggtctgaaacagagtttggggcttgtttgggattagtgaagctactgcctttgccgccagcgcagcctcagagtttgattatttgcaatgtcaggctttgaaaacttaaacacggatttctaccagactagttacagcatcgatgatcagtcacagcagtcctatgattatggaggaagtggaggaccctatagcaaacagtatgctggctatgactattcgcagcaaggcagatttgtccctccagacatgatgcagccacaacagccatacaccgggcagatttaccagccaacttatgcttttactccagcttcaccttagcctttctatggaaacaactttgaagattagcccccttta

SEQ ID NO: 35393 - DNA, 359 bp, Homo sapiens
aaacacaaagagcatgggctgttaataatgagccatatctcacaaaatatggccacaggaatcctattacaaacatctacaggtgacttcagattccattctccaccttctgccttaagatacgaagccttgacatgaccacatcccagtcagcataagctccttctagatggcgggatatctcagttcctgcttcatagctacgtcggccatgaagtaagcaccagttatcaaaaataatcacatcacctggattcatcttgaaggtaaacttggatcctttgctgttcatgaggtcaacaaactccttcagagcagcataaaaaggctgaactctttcaacaggcacattaaatatt

SEQ ID NO: 35394 - DNA, 422 bp, Homo sapiens
ctactatagggcgaattggagctccaccgcggtggcggccgaggtacgtttgggagcctgagctggaactgaagctggggctgcagcctgggccttggtttgatccttggccttggccttggccttggccttggcctttggccggcacagcctgagccccttggcaatacgggcacgagcacgctttccaagcttggggtgggcaatgtaagcaagtcgatcgagcttgcggctgacaccctttgggatcttgggcttaacactccttgggctttacgagggctcttgatagccctcggccacagtgcatctcatgggcctttggcatttgtttgggcctggcattctttctttagggccctttttttgttgttgctttcattggccaaaagcggcatgttatcctaaggaaacttttgggg

SEQ ID NO: 35395 - DNA, 380 bp, Homo sapiens
ctactatagggcgaattggagctccaccgcggtggcggccgaggtactgaaagagcccaacacaattaccctgtaaactctctgttagggcaaccaccaccacctgtcttccaggacacatttttagatactctgacaggccactgcatctcagattcaggggagaaaataagttgtcacctccccttcaaaggttccagagtaaacaaatggtgccatcattcaagataacgtgctgatcaccctcctcccaaaaagcaagagcttgtttatggttgaggaatcggcgggattgtctgaatgacacattatacagcagccccccacggaattttctgcaacactcttgggatcttgtgcttgggtggaaacatttgcca

SEQ ID NO: 35396 - DNA, 282 bp, Homo sapiens
  misc_feature 51, 259: n = A,T,C or G
ggcggggcgggcgcccgggcatgtacatgttgtgggtgccgctccgggtgntatatcgcagccaaatcccgaagttcttcacccgcaggggggacttctcaaacacctgcccacagtagacaatctcccctgaagacttcttcatcttctttaactgagattccaaagtacgcggggagtgaactgagggccaccctgggaggaagccgactaggcgaattcacttactgaccgcgcctgggctgctcctgagacatgngaggaagaccagtgaaggctgga

SEQ ID NO: 35397 - DNA, 231 bp, Homo sapiens
gcgaattggagctccaccgcggtggcggccgaggtacaaacctccagctcactcagataaaggaacatgaacgacctatcacagaaatgcctttgtttggccagccacggtggatcatgcctgtaattccaacaatgtcggaggcagatgtgggcggatcatctgaggtcgggaagttgagaaccagtcatgaaccaatatggtacaaaccctgttctttactagaaaata

SEQ ID NO: 35398 - DNA, 273 bp, Homo sapiens
tactatacggcgaattggagctccaccgcggtggcggccgcccgggcaggtacgcgggagagaagtttccgggactgtcctcacgacagtccggtttgtagattccctgatctgcaattcttcccgttccttcatggatttgaaggctctcctttcttccttgaatgactttgcatccctctcgtttgcttaagagttgggacaaatgttggattaactggtgtgaacccaagctccaccacatacttgtgaaatacacctctttcctgacca

SEQ ID NO: 35399 - DNA, 393 bp, Homo sapiens
attggagctccaccgcggtggcggccgaggtactccatcgggatctttttcacctacgcactccagttctacgtcccggctgagatcatcatccccttctttgtgtcccgagcgcccgagcactgtgagttagtggtggacctgtttgtgcgcacagtgctggtctgcctgacatgcatttttggccatcctcatcccccgcctggacctggtcatctccctggtgggctccgtgagcagcagcgccctggccctcatcatcccaccgctcctggaggtcaccaccttctactcagagggacatgggctccccctcaccatcttttaaggacgccctgatcagcattcctgggccttcgatgggcctttggtggtgggggacctattgaggct

SEQ ID NO: 35400 - DNA, 179 bp, Homo sapiens
tactatagggcgaattggtgctccaccgcggtggcggccgaggtacttttttttttttttttttttttgctttccattttttttagcacaaagtataaactctttcacaaatacaaaaattaaccaggcatggtggtgcatgcctgtaatcccaactacccgggaggccgagacgagaa

SEQ ID NO: 35401 - DNA, 148 bp, Homo sapiens
cggccgcccgggcaggtatttatccgtaacttttttctcccctgcgattggtaacatccctccaggcaaacagcagctgaaaggttgtcaactgctgtgtgttaaggtgcttcttctgcttcctatagagttcaaggtaggactcatc

SEQ ID NO: 35402 - DNA, 369 bp, Homo sapiens
ctactatagggcgaattggagctccaccgcggtggcggccgcccgggcaggtacgcgggggacctatgagcagaggaaaatcgtggagttcacctgccacacagccttcttcgtcagtatcgtggtggtgcagtgggccgacttggtcatctgtaagaccaggaggaattcggtcttccagcaggggatgaagaacaagatcttgatatttggcctctttgaagagacagccctggctgctttcctttcctactgccctggaatgggtgttgctcttaggatgtatcccctcaaacctacctggtggattctgtgcacttcccctactcctctttctcattcttcgtaatattgacgaagttcggaaaa

SEQ ID NO: 35403 - DNA, 306 bp, Homo sapiens
ctatagggcgaattggagctccaccgcggtggcggccgcccgggcaggtacttttttttttttttttttttttttttttggggcttattcagtcgctttattaataaaagagatcaattaagctttcctctccccacccaccccggaggtgccgggctttgaatcctcgggaggaaaaaatggcagggctgcaagcttcctccccaagtttccaggagcacctgccaccagccttgaacacctcccccaccgaggctccgaaatccacaattcctggctcgtaaaactttgccaaaacggagggga

SEQ ID NO: 35404 - DNA, 253 bp, Homo sapiens
gcgaattggttctccaccgcggtggcggccgcccgggcaggtacgcggggagcgtcataaactttgagtgctttaaaaccgcaggtaacgatgggaaaggaactcctgtattcacaggggaggttgactgcacctacttcttcacatgggacacggaatacgcctgtgttaaggagaaagaagaacctccctttgcggtgccaccgaacgggaagaagacgctatgacactgtccgcgcctggtctccgccat

SEQ ID NO: 35405 - DNA, 410 bp, Homo sapiens
ctatagggcgaattggagctccaccgcggtggcggccgcccgggcaggtacaaaagtcccagtccttccgcagttctaggtttacagtcaggctcaaccttacttgccccgctcctgcatgaaaacaagtgcgttttatacagcctctgccacccagtggcatagtttaaggctctatattatattttaaaattaaaggttttttttcctatcatacacatcaatttggaacctgctggtgactcttctaccacagagggtaaataaaaagaccagtttttaaagtaagaggattcagctcatcttataaaagtataatagttttcggccagacgtccattaacatctgtttaaattagatacagacacaatgccaaatattagaatcataaatgtaattttggagataa

SEQ ID NO: 35406 - DNA, 400 bp, Homo sapiens
gactactatagggcgaattggagctccaccgcggtggcggccgcccgggcaggtacttctcctccatctcagcatagtgttggtctttcactttacgcttgtcgctcttcccatcatcctcgccggagccatagtccaggggtgggggctcatccatgtcattcttccgctggtagtttcgatacataacccaatggaagatttccagctgaagctccttggcccaggagcagtgccagtaggatagtcctacccacttgacaaagaactctcgctctgatctgccttgaagaggacgggggggtgggacatctggatttccatctgcctgttgaggggctggcactgctacaggtggctccccccaccgccaatgtaggatcttctgcactcgaccctt

SEQ ID NO: 35407 - DNA, 397 bp, Homo sapiens
gaattggagctccaccgcggtggcggccgaggtacaaaaggcaacatactgtagggttctgtttatatgaaatatccagagtaggcaaatccatagagacagaagacagactagagattgccagagggtgggaggaggaatgagtaactgcttaatggggatggagtttcctctgggatgataaaaatgtcctgggactagatagtggtaatggctgcacaaagttatgaagacacttaacatcactaatgataaatctgacgttatgcatacgtcaccacagtaaacatacccctgcagtggaataggttctgagaccatttagaggtcgcacagaaaattagaagatttaaaaagaaaaattgattctcagacaaggtgcctgaataggaacagc

SEQ ID NO: 35408 - DNA, 391 bp, Homo sapiens
cgcggtggcggccgaggtactttttttttttcacttttttttttttctttttttttttttttttttccattgggggcacttttatttacagccaaggaaaaaagaaacctaccttttttttaaaatgggaaagcttgtttgtatgaaaccaaatatttcatcatcacttattttctatcctgttggaactaagttttacatttttcatttccaacagagatttgaattttaatgtcccagaaatttaaaaaagatggctttaaaatgtcctatatgttggcagtcctcccctgaaaacttttttggcttatctttggttctgagctacagtcttcgcagagactaaattagtgactggccaccataaaaaaattgcccctcctggctaaaa

SEQ ID NO: 35409 - DNA, 267 bp, Homo sapiens
tatagggcgaattggagctccaccgcggtggcggccgcccgggcaggtacttttttttttttttttttttgatgtcattttgtgtaagggcgcacactgctgcgaacagagtggtgatagcgcctaagcatagtgttagagtttggattagtgggctattttctgctagggggtggaagcggatgattaaaaaaaattcctgctacaactatagtgcttgagtggagtagggctgaaactggggtggggccttttatggctgagggg

SEQ ID NO: 35410 - DNA, 428 bp, Homo sapiens
  misc_feature 348, 349: n = A,T,C or G
ctatagggcgatattggagctccaccgcggtggcggccgcccgggcaggtaccacaatagcagggggatgccgatggagggaagggtcatgaccccaaaggctgcccagtccagaaaatgaggggagaatcgcctgtcaaactcccgctgagccaggattcctccctgtccaggtgcactggtagagccaatcacaacgggcccatcctcctgggccaggtaagtaattgttgccgaggtgaagttgacccgcgtacctcggccgcccgggcaggtacggccagggctattggttgaatgagtaggctgatggtttcgataataactagtatggggataaggggtgcnnggtgtgccttgtggtaagaagtgggctagggcatttttaatcttagagcgaaagcctataatcactgcgcccgctcata

SEQ ID NO: 35411 - DNA, 459 bp, Homo sapiens
tatagggcgaattggagctccaccgcggtggcggccgcccgggcaggtacttggaggtggggcccttgggattagtgtcctaaaaagagacacagcgagctccctcactccttccaccatgtgaggacgcagtgagaaaacagctatctacaaacctggaagcagaccctcaccagacaccaaaactgctggtgccttggtcttgaacttcccagtctccagaactgtgagaaataaatttttgttgtttataagccacccagtttacggtattttgttatagcagcccaaatagaccaagacaatacccaatatatacttactgactgatgctgcttgagcaaccagcacagcttatggttcctaagggcctagcacagtgcctggtacctcggccgctctagaactagtgggatcccccgggctgcaggaattcgatatcaagcttatcgataccgt

SEQ ID NO: 35412 - DNA, 456 bp, Homo sapiens
tactatacgggcgaattggatgctccaccgcggtggcggccgaggtacttgcacatttctggactacaaaggcatttcttcctgcaatgacgaagaataaccatggccatattgtcactgtggcttcggcagctggacatgtctcggtccccttcttactggcttactgttcaagcaagtttgctgctgttggatttcataaaactttgacagatgaactggctgccttacaaataactggagtcaaaacaacatgtctgtgtcctaatttcgtaaacactggcttcatcaaaaatccaagtacgagacattgctcacctacagtgacgtcgtgggcgcggatgtgctggacgaggtggtgactgtgctcagtgacactgcgtgggacgcagagcttgcaatggtgagagagcagcgcaaccgtctgtgtgaccttctgggcgtacctgcccgggc

SEQ ID NO: 35413 - DNA, 416 bp, Homo sapiens
acgtgccgtacaatgccgaagcacgttttcaagctggcgcaggaccacgccaaggaaggcgacttcgtgatggtgctgggctaccctggccagaccaaccgccaccgtctgccgttcgaagtggccttcaccttcgactggaactatccggccttcgtgcaagcctcgggcgagaccctggccatcatcgaccgcgagaccaagaacgacccggccgctctagaactagtggatcccccgggctgcaggaattcgatatcaagcttatcgataccgtcgacctcgagggggggcccggtacccagcttttgctccctttagtgagggataattgcgcgcttggcgtaatcatggtcatagctgtttcctgtgtgaaattgctatccgctcacaattccacacaacatacgagccgg

SEQ ID NO: 35414 - DNA, 363 bp, Homo sapiens
cgcggcggcggccgacgtcggatgacatgttaccatgacacaaaacgacaatgaccagggcaccacaccaagaatcatctacctgtattacaaccagacatttgcactcaaataaagaggtgctgccgtatacttatccggtgctggaggcatcatgaatgggaaccagacacagctggaaagcaatcgggtaacagagcgccaaccctgtacctgggccgctctagaactagtggatcccccgggctgcacgaattcgatatcaagcttatcgataccgtagacctagacggggggcccggtacccagctttagttccctttagagagggtttattgcgcgcttggcataatcatgggcata

SEQ ID NO: 35415 - DNA, 443 bp, Homo sapiens
cgcggcggcggccgaggtacatataatttgcctggccgggcacggtggctcacgcttgtaatcccagcactttaggaggccgaggtgggcggataacgaggtcacaagttctagaccagcgttgcctaccaagtttagcaattccgggaatgccaactgtccttacagtcactctcgtatttgcttagctatgagaataatttggggctaacttcaccaaaaaagaaaaacaggcgagaacgtcactctagtaacaataaaagccactggattttgctttcatcaaatgtggcaccttgtgaaccacctttcttaaaagtatttattttaacctttaaaaatttctgccaagtagagctttcttcttttacactgagcaacccacttcagtgccagcagcctacgggcacagaagccaggcaatggttctgggacacagtttg

SEQ ID NO: 35416 - DNA, 441 bp, Homo sapiens
ggcggcggccgaggtaccttttttttttttttttttttttttacacgcacaatggaagctcattgcaaggatacacacaaatgttgatgtgcaagggtcctcccaccatcagcacactatcacaggtcccatcctcctatcttctggaagtcaagaagttcaaacccgtttcacttgcattcatatgacccaaagacagattgccaccctgtgggtaaagtcctactcagcaacatttaccttcctaacaaacttttatgttcaagagatagcacctaacgggggcaaaaaacatgattggaaccacttttctcaataagaaactttgtataggccggccgctctagaactagtggatcccccgggctgcaggaattccatatcaagcttatcgataccgtcgacctcgagggggggcccggtacccagcttttgttccct

SEQ ID NO: 35417 - DNA, 407 bp, Homo sapiens
actactatagggcgaattggagctccaccgcggtggcggccgaggtacgcgggggcaagcggttcagctgtctgctccctagcagccggccttcgggtcgggcgtctccgccggctactgccgcttcagttctcccggtgtggccacgagtcggtagccatcctaatggatatgggttggttcctgttttctatttggaactttaaaaaaaattaaagcaggttgcactgctgtgatccatcctcatctcctaaagatgcatcctgacttatctccacacttgcacactgaagaatgcaacgtcttgattaacttgcttaaggaatgtcacaaaaatcacaacattctgaaattttttggttattgtaatgatgttgatcgggagttgagaaaatgcctgaagaatg

SEQ ID NO: 35418 - DNA, 475 bp, Homo sapiens
agggcgaattggagctctcccgcggtggcggccgcccgggcaggtactttttttttttttttttttttttttttttttctctttcatatattttaatgtaaggtagttggcaatgacttttttgaagactgtagaccattattttgtagtatttctctcaaagtgaattggtctgttctcatgatgaggagtcacatcaatattttggccaggaatactacatcagggatgttgggttcttcattgctttctaaacagctttgttctcaaaaacttggcggctacaaggaattaaatgtgaatgggaaaggaagaaagaaaaacacagatcatagaagctgtgccttcgaggaaataaatcctcttaagggggggaggtgtcctctttgatctgagggcacacctctgggagagaggccagaggctgacagtcagcctcgtcagccagatgcgtcatcagccctgggaagggctg

SEQ ID NO: 35419 - DNA, 462 bp, Homo sapiens
actatagggcgaattggagctccaccgcggtggcggccgaggtaccccattaactgtgaatgaatctgagcttggtttcctttattgcttcctctgcaatatgattgctgaaacacattttaaaaattcagaagcttgtcactcctgttaatgggaggatcagtcacacatgtgtagtactctgctatggtgctggcttcctttaaactcaggatagatgccaggtgggctccgtttccgtaagactgacactcgagctcggcatcagaccagttcctcagcttcctgaagtaaccatagcaattggacttgtggtaaaaccatccaggagcacagctgggtctcatgatgatatcacccaggactcctgttttggccaggcagctcagcaataggagcagccgcatgcttctggaagccatcttcctcctaccctgaggatgtagctagtgcaaggatctc

SEQ ID NO: 35420 - DNA, 428 bp, Homo sapiens
ctatagggcgaattggagctccaccgcggtggcggccgaggtacttttttttttttttttttttggaagtagaatacagttatcaaaacgttaatttctaagcattagcattatgcaagaaaagagctgataaatggcaaggaagtaattcatccatgcatttattcatgcaatgacctttcaacaattttctttttttaattctactctggtgcaaggcctcactgataacttgggggaagatggctgacaaaaaaaaaaaaagaaggaaaggggaaagggaagggcatgcggaagaggaagaggaaggggaagaggaaggggaaggaaagaaaaaaagaaggagggaggaaggggaaagggaaggacaagggaggaaggaagggttattacaggaagatgaacctgttaatggcacactcaaagga

SEQ ID NO: 35421 - DNA, 155 bp, Homo sapiens
tacactactatagggcgaattggagctccaccgcggtggcggccgcccgggcaggtacgcggggggcatcatggtttttgaaggctttagttctgctttctgcctctcctccacagccccaacctcccacccctgatacatgaaccagtgattat

SEQ ID NO: 35422 - DNA, 461 bp, Homo sapiens
attggagctccaccgcggtggcggccgcccgggcaggtacgggggaatggaatggaatggaatgcaatggaatggaagcttccggaatggaatggaatggagtggaatggaatggaatggaatggaataaacccgtttgcaatggactggagtggaatggaatggaatggaatggaatggaatggaatggaatcaactcgattgcagtcgaatggaatggaatggaatcaacccgactgcagggcaatggaatggaatggaatgcaatggaatggattcaacttgaatggaatggaaagaatggaatggaatggaatggaatggaatggaatggaatggaatcaactccattgcagtcgaatggaatggaatggaattaacccgaatagaatggaatggaatggaaatggaacggaacggaacggaacggaatggaatggaatggaatggaatggaacgga

SEQ ID NO: 35423 - DNA, 192 bp, Homo sapiens
gactcatatagggcgaattggagctccaccgcggtggcggccgaggtacgcggggtagtaaacttggaaccttggaaatgaccaggccaagactcaagcctccccagttctactgacctttgtccttaggtgtgaggtccagggttgctaggaaaagaaatcagcatacacaggtgtagaccataatgtttc

SEQ ID NO: 35424 - DNA, 472 bp, Homo sapiens
tatagggcgaattggagctccaccgcggtggcggccgaggtactttttttttttttttttttttttagtagggacggggtttcaccatgttggccaggctggtcttgaactcctgacctcaagtggtctgccacctcggcctcccaaagcactgggattacaggcatgagccaccatgcccggcgcatcactctttttaattttttttttaagttgcttcttccattcaggcctaagctggaaacaccactgtctgataaacactggccacaccaacgacatggtaggccagggggtgatagcaatcttccagtaaatcagcttttcagtctaaacataccagtcatcctacttgaaagaaatgtgtccctggggacaacctgtgagccttagccttctgtagggagaagcactcttgaatgggaggaaatttgggagcgaatattttttttaagacagaacctaagcggaa

SEQ ID NO: 35425 - DNA, 456 bp, Homo sapiens
gcgaattggagctccaccgcggtggcggccgcccgggcaggtacaccatcccttccattggactggctttgttggaagaaaagctcagatatagcaatgagaaataccaaaagtttaaggcagtggaagaaagcctgcgtaaagagctggtggatatgctaggtgatgatggtgtgttcttatatccctcacatcccacagtggcacctaagcatcatgtccctctaacacggcccttcaactttgcttacacaggtgtcttcagtgccctgggtttgcctgtgacccaatgcccactgggactgaatgccaaaggactccctttaggcatccaggttgtggctggaccctttaatgatcatctgaccctggctgtggcccagtacctcggccgctctagaactagtggatcccccgggctgcaggaattcgatatcaagcttatcgataccgtcg

SEQ ID NO: 35426 - DNA, 287 bp, Homo sapiens
cgactatatagggcgaattggagctccaccgcggtggcggccgcccgggcaggtaccactggcatcgtgatggactccggtgactgggtcacccacactgtgcccatctacgaggggtatgccctcccccatgccatcctgcgtctggacctggctggccgggacctgactgactaccttatgaagatcctaaccgagcgcgggttacagctttaaccaaccacggccgcttctagaactagtgggaatcccccgggtctgcaaggaatttcgatattcaagcttta

SEQ ID NO: 35427 - DNA, 455 bp, Homo sapiens
ggagctccaccgcggtggcggccgcccgggcaggtactgaagaagagatgctgtggttgagatttgttttcctctctcctgggttttagatcttaattctcgttccttgttcacaccactggtatgctttatcctggtgttttccaaatgctctgatttgtcagagttgttgcctgtgaatgggaggatggaccagctgggattagcctttgcgctgtccttggaaggaaccattttgggtttatttttcgttgcgtctagtgctttgaccttcttggcatgtttacttcctttgtagtgggcctcggcctggctatctgagttaaagcgaagctgacagacattacaagaaataacttgtttcttctttgggggaatggatactccaaatgtatggttaataaccgctttttgcacaggatccattgtgttaaaatttggaaagagcccaacag

SEQ ID NO: 35428 - DNA, 484 bp, Homo sapiens
ctctatacgactcactatagggcgaattggagctccaccgcggtggcggccgcccgggcaggtacagagggctggggagaggatgcaaagctgcagttggatgaagatgggtttgtggaggctacagaaggtttggggaatgatgctcttggcaagggacaggaagaaggaggtggctgggatgtagaagaagatctggagctccctcctgaacctggattttatcccctggggcaactggtggggctgaagatggtttctttgtgcccccaaccaagggaacaagtccaactcagatctggtgtaataactctcagcttccagttgatcacatcctggcaggctctttcgaaacagccatgcggctccttcatgaccaagttggggtaatccagtttggcccctacaagcaactgttcctacagacatacgcccgaagcccgccaacctatcaggctctgccctgcctaccctccatgtatgg

SEQ ID NO: 35429 - DNA, 459 bp, Homo sapiens
gcgaattggagctccaccgcggtggcggccgcccgggcaggtacgcgggtatgcttgactggtgtttcttttgttgttgtttgtttttctttcaattggaattctgtatttaagatgttatgtcagctgacacatgggacactcctgaagaggtgactggccccccaccctgtttggcggtgagtttccgcaccatcggcctcagaagtgtccctcttgcttcgtctcttgttcgcttgctttgtaaatactttggtcccaagctgagacaattgctgtgtaaaacgtgaagagtcaatcccaaagggtgttatttgtcagaagaacttgccgtgtgccttcaccgaaggcagtcaagtctgcagttggatttttctcactggtgaatgacaagaaacagggataattttgcactgcggagatattaccggggttgtctatttgattatttatagtacc

SEQ ID NO: 35430 - DNA, 440 bp, Homo sapiens
ggagctccatccgcggtggcggccgaggtacgcgggtaagtatagactaattaacctaagctacctttaacaacgtagaatttagatgggttcatatatgtgagaaaaacctgaatataggacaggggtccctcttttttccccacctctgtcgcccaggctagagtatagtggtgtgatcttggcccactgcaacctctgcttcctaggttcaagtgattctcctgcctcagcctcccaagtagctgggattgtaagagtatgccaccacgcccagctactttttgtatttttagtagagacagggtttcatcatgttggccaggatggtcttttaactcctgcccttaagtgatccaccagagaggagatcctcggcctccccaagtgctgggattataggcatgagccaccgggcccagcctactttctaattaatt

SEQ ID NO: 35431 - DNA, 464 bp, Homo sapiens
ctcactatagggcgaattggagctccaccgcggtggcggccgaggtactgcagccacgttggccttcttggtattctttgaatacaagggagcttctacttcaaggcatttacattggctgttgccttagcttagaacgctctttctccatatagccgcagagcccgctctctcacctgactcatgtctctgctcaaatgttaatgatcaagaggcagtccccggcctcccccttaaaattacaacctgtcactctccaatcctttcctcacgattttctcaaaagcacttaccgctaaccaacattatatctaaattttttttgtctctttttattggaatgtaagtttcatgtaagcaggaactgtatatcactgctataccctcagcatttaaaacaatggctgtacctccggggtggcgctggggttggctccatgaccaagatctatgggggacgtcag

SEQ ID NO: 35432 - DNA, 464 bp, Homo sapiens
gcgaattggagctccaccgcggtggcggccgaggtactaatactcctgttaaaattcaacagctttattgtgaaagaatccagagatctcacactgaaaaaatactaacacagctcatatataaattacttatctataagaacaattatagaaggaatctaaatggggcaattttaacaaaccaggcaaaatatcacatatacctgaatataaggtaactccaagccatgagtataagattaaggcagttactttattttgaacaaggaagtggcataagcaactcagtgtgtgccccttagggtgggagctcttccccctaccactccccaccccaaggcatcattttggagaaaaaagtgtcttctatctggctagctgtgttatctaggattgcaccttcttacacggcaggcgcggcatcacgtccagatgggcatttaaggaactgcatttcgggagat

SEQ ID NO: 35433 - DNA, 476 bp, Homo sapiens
tacactactatagggcgaattggagctccaccgcggtggcggccgaggtactcaatacatctttcaataaaaatggggatcggcttctctggagtcacgacagttgttaagggcaccccaaaatagttactctcccaggttgcctttgtgatggatggccggggtttgggctttggtttcttagtgttcctccttaggctgcgaagaatattcctcctccgcgggtcttcgtctgtttcgtatggaatgacagcattgtcccctttataaccccgggatgcctgatcctcctctttcttccggatgggccccagctcatcatcactccccacgctgaagctggtccggtaactagcaaaccgccccagccgggtgcatctcgtcctgtacctgcccgggcggccgctctagaactagtggatcccccgggctgcaggaattcgatatcaagcttatcgataccgtcgacctcgagg

SEQ ID NO: 35434 - DNA, 471 bp, Homo sapiens
cactatagggcgaattggagctccaccgcggtggcggccgcagagccgccaggagcagccgctggagtgcgaaaacgctctcaattttcgggtctcaaagacccacaagcccacaccacgcaggccgggacaggaaagagtcccccgcgtacctcggccgctctagaactagtggatcccccgggctgcaggaaggcgagatcaagcttatcgataccgtcgacctcgagggggggcccggtacccagcttttgttccctttagtgagggttaattgcgcgcttggcgtaatcatggtcatagctgtttcctgtgtgaaattgttatccgctcacaattccacacaacatacgagccgggagcataaagtgtaaagcctggggtgcctaatgagtgagctaactcacattaattgcgttgcgctcactgcccgctttccagtcgggaaacctgtcgtgccagctgcattaa

SEQ ID NO: 35435 - DNA, 189 bp, Homo sapiens
gactcactatatggcgaattggagctccaccgcggtggcggccgaggtacatggtgaaagtgccttatacaggttgaataaaaatcactgccattttcagaatattgatggcacctgaggacttgaaattgtgtccagaactggtgggttcttggtctcactcacttcaagaatgaagccgcggaccct

SEQ ID NO: 35436 - DNA, 371 bp, Homo sapiens
actcactatagggcgaattggagctccaccgcggtggcggccgcccgggcaggtactttacaattcattcgtgaagctttagccaaagaccttgaaaactaacagttgtgctcttccagttttcatatgtgaattcagtgcaagaaacttggtgttctgtttcttcttttaagctctatgcaatcatgcaaacatagtgatcatagcgtcaacatggtctggagtgtgttgcagactacagaacattgttctcccttcaagcgctgtaaagcaccaacccggatagtggcaaggcacagtaaggaagggctgtgatcgggtccccttttggtgtaaaataagattcctgtgtgcttgctttatggtttcgc

SEQ ID NO: 35437 - DNA, 476 bp, Homo sapiens
gcgcgtatacgactcactatagggcgaattggagctccaccgcggtggcggccgcccgggcaggtacagggaaggcctttcgggcagggcacatggttcactgccccatgacgtgataccttgaagcacaccattacagacaagtgggcccccattaatcacccgagcaggtgcttttgccccctgtccagcgtccagcacacagcatgaacttggtcaccttctgagggtgaacttgcgcacacacgtcattggaaataacatggaggtccacacactgaagtttctttggggtcaagaactcctctggttcaatgctgccccagcctgaggcgtagcaaatggtccccagtgctggctcctgggtgggcaggtccatgaccttcacagcatccgtgagctcggcaggctctgacaggcggaacaacatgaggtcgtggctggagtcatcacctggcctgaggaatcgattcttt

SEQ ID NO: 35438 - DNA, 495 bp, Homo sapiens
cgactcactatagggcgaattggagctccaccgcggtggcggccgcccgggcaggtactgttcctgttggccgagtggagactggtgttctcaaacccggtatggtggtcacctttgctccagtcaacgttacaacggaagtaaaatctgtcgaaatgcaccatgaagctttgagtgaagctcttcctggggacaatgtgggcttcaatgtcaagaatgtgtctgtcaaggatgttcgtcgtggcaacgttgctggtgacagcaaaaatgacccaccaatggaagcagctggcttcactgctcaggtgattatcctgaaccatccaggccaaataagcgccggctatgcccctgtattggattgccacacggctcacattgcatgcaagtttgctgagctgaaggaaaagattgatcgccgttctggtaaaaagctggaagatggccctaaattcttgaagtctggtgatgctgccattgttgatatggttcctg

SEQ ID NO: 35439 - DNA, 274 bp, Homo sapiens
acgactcactatagggcgaattggagctccaccgcggtggcggccgcccgggcaggtactgttattatccctatttgccaatgagagaaagaaggcaagatagcttaaggaagttttcctaattgcccagctagaaggcaggacacatttgccagcagggggccgtttgcccccatgtgtaagggaggcagggcccatctctcccacggcgaggttgagctgattactttctgagaacagttagagtgggtgcgtgatctgaaatgggttacct

SEQ ID NO: 35440 - DNA, 489 bp, Homo sapiens
ctcactatagggcgaattggagctccaccgcggtggcggccgcccgggcaggtactttttttttttttttttttttttttaacttttcacttcttttatttgttaaaatagtcacatccatatacatgaaaagatttgaccattttgcattcattgattgtggctcttgccatctcgtggcatccaggatcctggctgaaaggttttaccagtgctgctgggagccactgagggtttttcctttccaaagtatggagcataggcatggcctttaatttgagtttgaactggtggaggcaggagttcctcactggtctctttactaaggagtttttctttttcataaaaatcttggctttttattttgatttcttctctgtgtttttcattctttagtatttcctccatagtaggtggagtctttcttgttcttctaatccaagcttcccattctgttggaatatcccctgcttcatagactacttcttt

SEQ ID NO: 35441 - DNA, 486 bp, Homo sapiens
atatggcgaattggagctccaccgcggtggctgccgcccgggcaggtactttttttttttttttttttttttttttttttttaggtattttaatattttagctctaagagtgtaatagaggggggtcaatggaattttatcctaaatactggcataaatctgagtgctcgtctttccccaaataatgatgtttctaaatgggaagttcattagaaacattcttctcttcttcatctcttagggtgatagctagcaacatacccttccttatctacgaaaattatttcttaattataagaatcatcattaagtttatcatttctttttttttccaaagtgtaataaaaatacagaatttgcaggacatgaaacagaagaggagaaaggagttttataaaaaagtggagatccgcgtactgggattacaggcgtgagccactgtgcccagcccaaaatgttttcttaaatgtgttctgtgcctgggct

SEQ ID NO: 35442 - DNA, 242 bp, Homo sapiens
tcactatagggcgaattggagctccaccgtggtggcggccgaggtactttccttgacaggcaagactgttggccagggctcgcttgacatactcctcctgcgcagccttaaggttctccttcttcccgccccaggccttcatggcagaggcctgcagggctcggccgaggtacgcgggtatcctgaggagcagaatgccttctgccagctttcttcacatgagaccaccagtcctcctttca

SEQ ID NO: 35443 - DNA, 337 bp, Homo sapiens
attggagctccaccgcggtggcggccgctggtcttggcgctcctgcttgtgtccgccgctctatccagtgttgtatcacggactgattcaccgagcccaaccgtacttttagtagagacagggtttcaccatgttggtcaggctggtcttgaacacctgatctcaggtggtccacccacctcggcctaccaaaagtgctgggatcacaggcgtgagccaccatgcctggcctatttaatcttttcatactgctgtcaggtccttcaaggctatgcttctgattgcccacacactttacttctgagtatttcatattttacgggtaggtagggtacct

SEQ ID NO: 35444 - DNA, 532 bp, Homo sapiens
tacgactcactatagggcgaattggagctccaccgcggtggcggccgaggtaccggctcagttcccgaggcccagagccccgcgtcccggctccttcagcctcactcgccacaaccaaccatcctccaacctgcacagaggacccgggagtccggatggcggcggataccggcagtgcgggaaaccacttacctgctgctctccagagacggccgctctagaactagtggatcccccgggctgcaggaattcgatatcaagcttatcgataccgtcgacctcgagggggggcccggtacccagcttttgttccctttagtgagggttaattgcgcgcttggcgtaatcatggtcatagctgtttcctgtgtgaaattgttatccgctcacaattccacacaacatacgagccgggagcataaagtgtaaagcctggggtgcctaatgagtgagctaactcacattaattgcgttgcgctcactgcccgctttccagtcgggaaacctgtcgtgccagctgcattaatgaatc

SEQ ID NO: 35445 - DNA, 453 bp, Homo sapiens
acactactatagggcgaattggagctccaccgcggtggcggccgaggtactttttttttttttttttttctgatgttgagagtcagttttattgccatctctgggaggggctcaaatccgcccaatctccttcagctgggccaccaggtcctcagtggtctccaccttgacgccggccgctctagaactagtggatcccccgggctgcaggaattcgatatcaagcttatcgataccgtcgacctcgagggggggcccggtacccagcttttgttccctttagtgagggttaattgcgcgcttggcgtaatcatggtcatagctgtttcctgtgtgaaattgttatccgctcacaattccacacaacatacgagccgggagcataaagtgtaaagcctggggtgcctaatgagtgagctaactcacattaattgcgttgcgctcactgcccgc

SEQ ID NO: 35446 - DNA, 182 bp, Homo sapiens
cgactcactatagggcgaattggagctccaccgcggtggcggccgcccgggcaggtacgcggggaaaaaggagagacatggaaagggagacagccaggtggcacctgcagcggctgccctctggggccacttggtagtgtccccagcctacctctccacaaggggattttgctgatgggttc

SEQ ID NO: 35447 - DNA, 449 bp, Homo sapiens
tatagggcgaattggagctccaccgcggtggcggccgaggtacctgcccacagccttggtccctgggggctagactgctcaactgtggagcaattcattatactgaaaatgtgcttgttgttgaaaatttgtctgcatgttaatgcctcacccccaaacccttttctctctcactctctgcctccaacttcagattgactttcaatagtttttctaagacctttgaactgaatgttctcttcagccaaaacttggcgacttccacagaaaagtctgaccactgagaagaaggagagcagagatttaaccctttgtgaggccccatttggatccaggtctgctttctcatgtgtgagtcagggaggagctggagccagaggagaagaaaatgatagcttggctgttctcctgcttaggacactgactgaatagttaaactctcactgcca

SEQ ID NO: 35448 - DNA, 191 bp, Homo sapiens
tactactcactatagggcgaattggagctccaccgcggtggcggccgcccgggcaggtacgcggggaggcattgaggcatccatcgcaggggcttctgctgagggggcaggcggagcttgaggaaaccgcagataagtatttttctctttgaaagatagagattaatacaactacttaaaaaatatagtca

SEQ ID NO: 35449 - DNA, 442 bp, Homo sapiens
attggagctccaccgcggtggcggccgaggtactcccagacatggatggttcactttccagggctgtcattgatgaaaatgctttgggatgagtactttttttttttttttttttttttttataatataatctgttttattttacacttctctgattattgaaatctaaatagaggtttttgctaacaaacaaaaaggataattaaaagacagcaaggacacgattaaatgttgagtgcaaatgaagggttgtatgaggccccatcctggggaggctgtacctgcccgggcggccgctctagaactagtggatcccccgggctgcaggaattcgatatcaagcttatcgataccgtcgacctcgagggggggcccgggacccagcttttgttccctttaatgagggttaattgcgcgcttggcgtaattcatggtcatagct

SEQ ID NO: 35450 - DNA, 453 bp, Homo sapiens
accgcggtggcggccgcccgggcaggtacagacaaggtaactgagacagtgatgaatggcggcatgaaggaaacgctcagcctcactgtagatgccaagacagagactgcggtcttcaaaagtgaggaagggaaactgtctacctctcaagatgctgcttgtaaagacgcagaggagtgtcccgagactgcagaggcgaagtgcgcggcgcccaggccttccagcagcagtcccgagcagaggactggccaaccaagcgcaccaggtgacacttcagtgaatggccctgtatgacgggtgacgtctgctgctgctgactgaggactgcagaccgccaccactcaggggctctggaggggtcagctggagcccaccaagctgtcactgctgcactcactctgcaagggattaggaccagcaacctttatattctaaattctaagacattgtacc

SEQ ID NO: 35451 - DNA, 479 bp, Homo sapiens
ctactatagggcgaattggagctccaccgcggtggcggccgaggtacgcggggaggggcgggcgtcggggacattaccggacaggccttgtccggcaataccaagtttcatgcaggctcttgggaaagctggtgctgctgctgcctgattcccgccgacagaccttgggaccggggccaacactggcagctggagatggcggacacgagatccgtgcacgagactaggtttgaggcggccgctctagaactagtggatcccccgggctgcaggaattcgatatcaagcttatcgataccgtcgacctcgagggggggcccggtacccagcttttgttccctttagtgagggttaattgcgcgcttggcgtaatcatggtcatagctgtttcctgtgtgaaattgttatccgctcacaattccacacaacatacgagccgggagcataaagtgtaaagcctggggtgcctaatgagtgag

SEQ ID NO: 35452 - DNA, 164 bp, Homo sapiens
atagggcgaattggagctccaccgcggtggcggccgcccgggcaggtactttttttttttctttttttttttttttgagacagagtctcgctctgtctcccaagctggagggcagtggcacgatctcagctcactgcaagctccaacttccgggttcacgccat

SEQ ID NO: 35453 - DNA, 425 bp, Homo sapiens
attggagctccaccgcggtggcggccgaggtacatttcctgccccagatctgggatcaccatttcttcagcaaactctggttcctttgagagggaaatggtatttagagatcacaatctgaatgctaggggtgttggttactacttgttattgcttttaggcatttccaggagagagtgctagaaaatatttttactaaggtaaaaaaataaattatgagccaggagtggtggtggtgtaatcccagcactttgggaggctgatgccagtggatcacctgaggttggagttcaaaaccagcctgaccaacatggagaaaccctgtctctactaaaaatacaaaattagccgggcatggtggcacacgcctgtaatcccagctactcatgaggctgagacaggagaatcgcttgaactggggaggt

SEQ ID NO: 35454 - DNA, 423 bp, Homo sapiens
actatagggcgaattggagctccaccgcggtggcggccgcgtgggtgagttggctgccggtgagttgggtgccggtggagtcgtgttggtcctcagaatccccgcgtagccgctgcctcctcctaccctcgccatgtttcttacccggtctgagtacgcgggattgaaaaactttttgagcgttatggtgaaaatggaagattatccttttttggtttggagaaacttttaacaaacttgggccttggagagagaaaagtagttgagattaatcatgaggatcttggccacgatcatgtttctcatttagatattttggcagttcaagagggaaagcattttcactcacataaccaccagcattcccataatcatttaaattcagaaaatcaaactgtgaccagtgtatccccaaaaagaaac

SEQ ID NO: 35455 - DNA, 451 bp, Homo sapiens
tggagctccaccgcggtggcggccgaggtacgcgggagtctctttggaaacttctgcaggggaaaagagctaggaaagagctgcaaagcagtgtgggctttttcccttttttgctccttttcattacccctcctccgttttcacccttctccggacttcgcgtagaacctgcgaatttcgaataggaggtggcaaagtgggagaaaagaggtgttagggtttggggtttttttgttattgtttttgttttttaatttcttgatttcaacattttctcccaccctctcggctgcagccaacgcctcttacctgttctgcggcgccgcgcaccgctggcagctgagggttagaaagcggggtgtattttagattttaagcaaaaattttaaagataaatccatttttttctcccacccccaacgccatcttcactgcatccgatctcattatt

SEQ ID NO: 35456 - DNA, 194 bp, Homo sapiens
actcatatagggcgaattggagctccaccgcggtggcggccgcccgggcaggtactcgggggcggcgacgacccattcgaacgtctgccctatcaactttcgatggtagtcgtcgtgcctaccatggtgaccacaggtgacggggaatcagggttcgattccggagagggagcctgagaaacggcctaaccaca

SEQ ID NO: 35457 - DNA, 405 bp, Homo sapiens
  misc_feature 270: n = A,T,C or G
ttggagctcaccgcggtggcggccgcccgggcaggtacttgattaaggtagcgtctgctggcttcctccttgtgcagttgccctttttcccttccacaactattttgtggggaggaactttgaaactattaaatattgtggaactgggcacagtggtggctcacgcctgtaatcccagcactttgggaggctgagacggttggatcacttgaggccgggagttcgagaccagcatgggcagcatggcagaaccccatctctttctttttnaaattaaaaaaaataaataagtacctcggccgctctagaactagtggatcccccgggctgcaggaattcgatatcaagcttatcgataccgtctacctttagggggggcccggtacccaacttttgttccctttt

SEQ ID NO: 35458 - DNA, 509 bp, Homo sapiens
tatagggcgaattggagctccaccgcggtggcggccgaggtacgcggggctcactctttgggtccacactgcctttatgagctgtaacaccgcgaaggtccacagcttcactcctgagccagcgagaccacgaaccccaccagaaggaagaatctgtgaacacatccgaacatcagaaggaacaaactctagacatgccgcctttaagaactgcaacactcactgcgagtgtccgcggcttcattcttgaagtcagtgagacgaagaacccaccaattccagacacattttggcgacctagatgggacaatcgcctatcaccgagtggtgagaccatcgcctatagctgagcggcgagacaatcacctatcgccaagcaacaagcagatgaatggtgaaacgatacagcagagaaagagagaagaggaacatttgaacgccgagaggagttcagccgagggtggtcggagaggtttggccacccagcaggaagattatcttcccgtgcg

SEQ ID NO: 35459 - DNA, 505 bp, Homo sapiens
tatagggcgaattggagctccaccgcggtggcggccgaggtactctctgagaaagatcgtgtcctctgtcttgttgggggtgaagtaaaagaaggttgcttggatctcctgaaccgacttattgtacgccattgcgttctggaatggcagaaaaaggaaatatcattggcagccgcatctaagaactctgtgcagagtggagaatcagatagtgatgaagaagaggaatccaaagagccccctatcaagcttccaaagattattgaggttggcctttgtgaagtttttgaattgatcaaagagacacgattttctcatccatccctgtgtctcaggagtctccaagccctgctcaacgtgctgcagggccagcagccagaaggcctccagtctgagccacctgaggtcctaaagactctcttccagcttcttttggaaatcaccgttcgaagtacctgcccgggcgggcgctctagaactagtggatcccccgggctgcaggaat

SEQ ID NO: 35460 - DNA, 501 bp, Homo sapiens
gactactatagggcgaattggagctccaccgcggtggcggccgaggtacatgtgggagaaaaacttaagtgtgatgagtgtggtaaggaattcagtcagggcgctcatctacagacccatcagaaagtccacgtgatagagaaaccatacaaatgtaagcaatgtgggaaaggtttcagtcgtagattagcacttaatgttcattgcaaggtccacacggcagagaaaccttataattgtgaggagtgtgggagggccttcagtcaggcctctcatcttcaggaccatcagagactccacactggggagaagccattcaaatgtgatgcatgtggtaagagcttcagtcggaattcacatcttcaatcccatcaaagagttcatacaggagagaaaccatacaaatgtgaggagtgtggtaagggcttcatttgtagctcaaatctttacattcatcagagagtccacacaggagaaaaaccctataaatgtgaggaatgt

SEQ ID NO: 35461 - DNA, 356 bp, Homo sapiens
acgactactatagggcgaattggagctccaccgcggtggcggccgaggtacgcgggggatcctgcttgtcgccaaggcaggaagtgagtttctcactgcaattccgggcggtgtcacgagtgaaaagatttgttcttttttttcggctgagatcctagctggggctgggaaactcctgcacaactctagaccaggaagccagcccgtaccccaacccccaccaaagccacctgctcttcttctgtgggaggccagtccacattcgctctcacccgagagagatattcagctggatccaaaatgactgatcaagggaaggaaatcatgtcaagcgaagccttgaaaaagctgccctg

SEQ ID NO: 35462 - DNA, 335 bp, Homo sapiens
ggagctccaccgcggtggcggccgaggtacgcgggggatcctgcttctcgccaaggcaggaagtgagtttcgcactgcaattccgggcggtgtcacgagtgaaaagttttgtttttttttttccgcggagatcctcgttggggctgggaaactcctgcagaactggagaccagtatgccagaccgctcccaaacccccaccaaagccacctactcttcttctgcgggaggccagtccacattcgctctcacccgagagagatattcagttggatccaaagtgactgatgaagggaaggaaatcatgtcaagccaagccttgaaaaaagctgccct

SEQ ID NO: 35463 - DNA, 377 bp, Homo sapiens
ggcgaattggagctccaccgcggtggcggccgcccgggcaggtacggtgatattggcggacttaaggacatcgaattgtttatcaggaataaagtattatgtgtgttttctgcggccctggataatgttgtagcattcagggtcgattgagtaaaaaaaatgtagagatggtttcctgtttgtttttgcttctagttttcattcatttgctatttattctcttctggctttgcttgtgtatgcatatatataaaaccattattattattatcattatgcttagtatctagtggaaggcttttattcggttctgtgaatagtcattttgtttcctaagaacttccagcaagttgtattcattccattcatctagaatt

SEQ ID NO: 35464 - DNA, 158 bp, Homo sapiens
acgactcactatagggcgaattggagctccaccgcggtggcggccgcccgggcaggtactttttttttttttttttttttttggcactctatccttttattccttcccaggctattgcaggaaaagtcttgtttcccaaacgctgtgcctttctcctc

SEQ ID NO: 35465 - DNA, 376 bp, Homo sapiens
agggcgaattggagctccaccgcggtggcggccgcccgggcaggtacgcgggaccccaacctgagcacatccctcgacgatgccttcctgctgcgcttcctccgagcccgcaagtttgattacgaccgggccctgcagctcctcgtcaactaccacagctgtagaagaagctggcccgaagtcttcaataacttgaagccatcagccttaaaagatgtccttgcttccgggttcctcaccgtgctgccccacactgaccccaggggctgccatgtcgtctgcatccgcccagacagatggataccaagcaactatccaattactgaaaacatccgagccatatacttgaccttagaaaaactcattcagtctgaag

SEQ ID NO: 35466 - DNA, 369 bp, Homo sapiens
ttggagctcaccgcggtggcggccgaggtacaaatcctctgaagcctttgcagttccagtcccaagattacactcatatacttgcaaatgtgcaaaataaactccatacaagtattgtcactggtgcaactacattcactctaattttctttcttgctacctctttagcaagagcacgtgaaaatccaactaatcctcctttactggcactgtaaacggactggccagagttgccttttaagccaacaatgcttcctacattaacaatagaccctccctgttgttgaatcatagtcctcatggcagctttacaggtcagcatggaacccaagaggttagtatgaagctgagataccatatcttcagttt

SEQ ID NO: 35467 - DNA, 372 bp, Homo sapiens
gtggcggccgaggtacaatgcaaacagtgccgcttccagtgctacccacacgggtgcagcctcacgggagagttgcggagagagggaatgcgttcagttcagccagcggacggccaggggtaagcggcccctagtgggtcacatggcctatgatgtctggagaccgcagatcttcaccctctggagtctcatttgcagagtctcatttgtcgtccggtcactgtggccacctcaccctcgtcaccacgggcctttcctgtgccgtgctcactctgacactgagatgctgccaggcagttttttttttaaaatcagtggagtaagttctaagggagccccatgtgcttaagataaaaacgtagctggtaaagt

SEQ ID NO: 35468 - DNA, 347 bp, Homo sapiens
tggagctcaccgcggtggcggccgcccgggcaggtactgtaacaaaaagctggctttaggcgtggcttgtagaatcaatctaactactagacaagttacatctcatatatgtgtggcttctttttcttcttttggggggctacaaggaaggtttggagaaattatttccatcatacctttttgttagcctttttccatttctggccagtaagtaatcccgttcctgacaacagtccctttgttttctcaagtggtctgatgaaggactgcaaaccacagctcttgtgttttttgcaccatgggttttaaaatccgtcctttgcctcccacaaggagctactacccaa

SEQ ID NO: 35469 - DNA, 378 bp, Homo sapiens
ttggagctcaccgcggtggcggccgcccgggcaggtactgagtgaagacaccagagtgaaggagagaggccatgctgtgtccgagaagctcctactggggtggaagggacagctccacaaaggctgctcttgcaggggctctcctgcagcaaggtgcctgctgactgtccccagactgtctcccgacacagagggatgcaaaggcagcctcttcctgctcagtggaatagggaaattatatcacctttcacttcccactctcacttctgcccctgctacccttagtctttggcttttgctgacattttcccctcttatcttttctcctgaccaagttctaggtatttcatagggcagtctaggtgagggttggaaccc

SEQ ID NO: 35470 - DNA, 404 bp, Homo sapiens
gactcactatagggcgaattggagctccaccgcggtggcggccgcccgggcaggtacccgattaaaccagagcaaaaaactaccttctgcaggtcagggagctaatgacatggcattggccaaacgttcccgcagtcgaactgctacagaatgtgacgttcgtatgagcaagtctaagtcagacaatcagatcagtgacagagctgctttggaggccaaagtgaaggatcttctcacactggcaaaaaccaaagacgtagaaattttacatttgagaaatgaactgcgagacatgcgtgcccagctgggcattaatgaggatcattctgagggtgatgaaaaatctgagaaggaaactattatggctcaccagccgactgatgtggagtccactttattgcagt

SEQ ID NO: 35471 - DNA, 315 bp, Homo sapiens
ggcgaattggagctccacgcggtggcggccgaggtacttttttttttttttttttttaggttttttttttttttttttttttttttttttttttttttttttggacaatggttatttagtttttatttcataatcataaacttaactctgcaatccagctaggcgtgggagggaacaaggaaaacatggaacccaaagggaactgcagcgagagcacaaagattctaggatactgcaagcaaatggggtggaggggtgctctcctgagctacaaaaggaatgatctggtggttaagataaaacacaagtcaaact

SEQ ID NO: 35472 - DNA, 364 bp, Homo sapiens
  misc_feature 73: n = A,T,C or G
ctactatagggcgaattggagctccaccgcggtggcggccgaggtacttttttttttttttttttttttccgnctccccaaagctttatctgtcttgactttttaaaaaagtttgggggcagattctgaattggctaaaagacatgcatttttaaaactagcaactcttatttctttcctttaaaaatacatagcattaaatcccaaatcctatttaaagacctgacagcttgagaaggtcactactgcatttataggaccttctggtggttctgctgttacgtttgaagtctgacaatccttgagaatctttgcatgcagaggaggtaagaggtattggattttcacagaggaagaacacagc

SEQ ID NO: 35473 - DNA, 237 bp, Homo sapiens
ttggagctcaccgcggtggcggccgccggaccaggtacgcggggagacttttgccacacacaaatttgtgaaaattaaacgagatgtggaaggagaacctcagtgattttattccctagtgaggcctctgagggcctacacactgcctggcagaacataccactgaactagtatgtgctagaggagggcacaaacatccgctccttacctaggcctgctggctctggttttctatgc

SEQ ID NO: 35474 - DNA, 355 bp, Homo sapiens
ctactatagggcgaattggagctccaccgcggtggcggccgaggtacgcggggtgggcgctaagatggcggcggcgtgagttgcatgttgtgtgaggatcccggggccgccgcgtcgctcgggccccgccatggccgtcaccatcacgctcaaaacgctgcagcagcagaccttcaagatccgcatggagcctgacgagacggtgaaggtgctaaaggagaagatagaagctgagaagggtcgtgatgccttccccgtggctggacagaaactcatctatgccggcaagatcttgagtgacgatgtccctatcagggactatcgcatcgatgagaagaactttgtggtcgtcatg

SEQ ID NO: 35475 - DNA, 362 bp, Homo sapiens
  misc_feature 271, 288: n = A,T,C or G
agggcgaattggagctccaccgcggtggcggccgaggtaccaggagctgcggtgcagggacggcaggctgccgttcacctggtccagggcctctgactgctccacttggatcaggggggtgtagcactgtgtccagtcccggtagggaggggttgctggaggggtggcccacgaccgggtcgagtgactcggtgagtacaggggaatggaatggaatggaatgcaatggaatggaatcatccggaatggaatggaatttaatggaatgcanagcaatggaatcaactncgattgcatggaatggaatggaatgtaaaggaatacattggaatcaacccgagtggaatggaatggaaaggact

SEQ ID NO: 35476 - DNA, 399 bp, Homo sapiens
cgactcactatagggcgaattggagctccaccgcggtggcggccgcccgggcaggtacgcgggggtctgccgcggtggccgggtgccgatttgacaagatcaaagctgcaggaaaatggacagtgaggttcagagagatggaaggatcttggatttgattgatgatgcttggcgagaagacaagctgccttatgaggatgtcgcaataccactgaatgagcttcctgaacctgaacaagacaatggtggcaccacggaatctgtcaaagaacaagaaatgaagtgggcagacttagccttacagtactcgtcttggtgagagcgtgagctgctgagatttgggagtctgcgctaggcccgcttggagttctgagccgatggaagagttcactcttgttt

SEQ ID NO: 35477 - DNA, 387 bp, Homo sapiens
gactcactatagggcgaattggagctccaccgcggtggcggccgcccgggcaggtacatggcatcagctctgtcttcaggaatctttggctgtgtgggaggataaaggatgtgatttctttctttctctcacccaacgtgcttattccatttctttgattaaatactggtatcattgaggctgggtgttctgacattaaagccaccagtaactgtagcacatcatgaatattttcatcctcatcctttaggtgtaatgccgctactgtcagctggattaataacccagtagtaatattttaaggtgtgcattatctttaataactgttcctattctgcgtatggtggtgtagatggtagcagttccaataaattcagcagacaaatc

SEQ ID NO: 35478 - DNA, 405 bp, Homo sapiens
gcgtatacgactcactatagggcgaattggagctccaccgcggtggcggccgcccgggcaggtactaaccaggcccgaccctgcttagcttccgagatcagatgagatcaggcgcgttcagggtgatatggccgtagacgtctttacaaaattcctgacaggtggttactgaatctctctatgaactttccattcaaaactttccaagtttttccttatgtggaaccgaaatctttctttctcccgtgaaactttactactatcagataattgaagacagatctctttgtattctcttcaagcccaaaccaattctgttccttcaatctaaatagtggtaatatgaatgtttaagaaatgaaataagaaacatgtgcaggcactttggaaggtgctaagtgactg

SEQ ID NO: 35479 - DNA, 399 bp, Homo sapiens
ctactatagggcgaattggagctccaccgcggtggcggccgaggtacctgtgcacatttcaagatagcagcactcagtccatgccctattatccatcttaaaagttcacacattattgtttactgaataatatttctactgtctttacccccaaacattgcaaaacctgcaatggaacaatgctgtgagttataatgtagaaatttttttttttttttttttttagaaaatcagttacttcattttcttaatattctgaattcaagttatcagatctctatacctaggtcatactcatgaagcaaaaatgctgcacaccactgaaaataataacgttatagatgtctatcaagattcatgaaaaccagccaggcgcagtggctcgcacctgtaatccca

SEQ ID NO: 35480 - DNA, 382 bp, Homo sapiens
gactactatagggcgaattggagctccaccgcggtggcggccgaggtacaactgtcccagcatgtcagttacacatactggccctaaatgttcagcataatttaaaagggaaagaaaaaagttggcttttcagacaaaattttgtgtgaactgaacaacgtcagactatgcttctttgggtccaaataattttaactttacagctctcagatgttctggcagctcattctttgtccatttcacctattatacaagtgtttctgggtccaagccacagagcaaaatagacacaaataaatcaaataataaatgtttcatataaaggagaaaatgctaatggtctgttatctataccagcagtccccaacttttctggcaccag

SEQ ID NO: 35481 - DNA, 396 bp, Homo sapiens
ctactatagggcgaattggagctccaccgcggtggcggccgaggtactggtcgcagagtctactccttcaacagtcccagcttcttcagggcctcccttctgtgttcattggggacaccctttggggagatcttgacactgacacagggggggcgaggaagcttgtcacggctctgtccttggtaggacaggcgcttggagctctgctcctgctccaggtcagccagcttgcctacctggatacctgcaaaatctttccccgtgcccagggaggccgggcggggccgagaattacgtaagacactgggcgagatcttgtccaagaaggagccctttcccagagaagtgctggttttggggctggcatctttctcagttgaaaggtagctgctcagt

SEQ ID NO: 35482 - DNA, 382 bp, Homo sapiens
ggcgaattggagctccccgcggtggcggccgaggtacgcgggctcctacttggataactgtggtaattctagagctaatacatgccgacgggcgctgacccccttcgcgggggggatgcgtgcatttatcagatcaaaaccaacccggtcagcccctctccggccccggccgaggtacagggtgtgacaacatgacctgcatcatcatttgcttcaagccccgaaacacagcagagctccagccagagagtggcaagcgaaaactagaggaggtgctctctactgagggggctgaagaaaatggcaacagcgacaagaagaagaaggccaagcgagactagcagtcatccagacccctgcccacctagactgttttctgagc

SEQ ID NO: 35483 - DNA, 384 bp, Homo sapiens
agggcgaattggagctccaccgcggtggcggccgaggtaccacaaattaatggttaaaatgcatccctcatacgacaatgtaacttcttcctctcactgttgatggcctatcttcctgaaaacattaatctgggggtgagaacttgggagatacacacagttgggttcaccataaatgaggagcctcactgacagtggaagatgcacaggaaaagaaagaagactatgggctgcttccttagaattgtcttcctgcttgctgtgttactgctagagcttcctgtgtgggctccatatggtccctattcttcccaccactcatgaaaacaccaaagagcaggctcagagtgaccacagccaagccccagctctgccagcaggccc

SEQ ID NO: 35484 - DNA, 396 bp, Homo sapiens
gactcactatagggcgaattggagctccacgcggtggcggccgaggtacaagagtgattctggcatgcctataaactttccaactccttctttatattctgtcaagacttcatgatgttctgctagggatgacagcgtaagctgagccatggcaggaaccccgtggatattatgcagcgtgtgatgggtgaggtgtggggcggagccagtcttggtatacagaaggcagcctggaatatccatggtgtggtcccctgttttgcccaggttttttatttttcctaggcgacagccattaactaccttggcaagactcagcttcatcctaagggattcttctaggtcctgccaacaaaccattcgactctttcagtcttcagacccctcaaactcctc

SEQ ID NO: 35485 - DNA, 407 bp, Homo sapiens
gcgtatacgactcactatagggcgaattggagctccaccgcggtggcggccgaggtaccactggtttgcaaatagagaaacctctaagactcttcttactcatttccttgaccaaaataaaactatgagtggaaaatggagtgatgagcagtaagcacactggaaaagtgggatgatcttgaagcaaattgctgataatcacttctgggattcagactgagacttgagcaagcttcaaggttggatgactgaattgaagacttccatgttaaattggttatcttgagaaggatacaagttaatttcagatattgatgatgctcaaatacttccccgctcaactagagtcagacatttttcacaaagtgaagaaactggaaatgaagtttttggtgctttgaatgagg

SEQ ID NO: 35486 - DNA, 372 bp, Homo sapiens
ttggagctcaccgcggtggcggccgaggtactttttttttttttttttttttttttggagtaggtgttgtagtaggagatggcacagtggtgtgtatggtgggtgccactgttgaagttttgtctttatcacacaggaactcatttgtgctcactgtgccattttggacaaaagcttgtacctgcccgggcggccgctcgactgacacccaccctgacaagtgtccatgatgctgggccctgagggaggtgaaggctttgtggtcaagctccgtggcctgccctggtcctgctctgttgaggacgtgcagaacttcctctctgactgcacgattcatgatggggccgcaggtgtccatttcatctacactaa

SEQ ID NO: 35487 - DNA, 376 bp, Homo sapiens
ggcgaattggagctccaccgcggtggcggccgaggtacaacagttgatgatgaagaacacgatgataaggaagaagaggaggaggaagatgatgactgctggcttgaagacttgttgttgtttttgctctttcgaccactccgtgagtcggctgctgatgaactggcattctgtgttaatgttgtcataagtgccgaagatgatgaatagccaactgtttccctggccattgaaaattcttttcccaactgaaagtcattattcttaaatgcttcataactggcttttaaacttgatgttcttcgtccctccttcatctgagctgtagcctgaactgcttgagcagctgccatggtaattgcccctgcaccagtta

SEQ ID NO: 35488 - DNA, 311 bp, Homo sapiens
gactcactatagggcgaattggagctcaccgcggtggcggccgaggtactttttttttttttttttttttttttttctttttttttttttttttttttttttttttttttaagaggaaaacccggtaatgatgtcggggttgagggataggaggagaatgggggataggtgtcttaccctgcgcggtgttaacctggtcaccttctgagggtgaacttgcgcacacacgtcattggaaataacatggaggtccacacactgaagtctctttggcgtcaagaactcctctggttcaatgctgcccccacctg

SEQ ID NO: 35489 - DNA, 400 bp, Homo sapiens
ctactatagggcgaattggagctccaccgcggtggcggccgcccgggcaggtacaatgatgttttcatcagccatggcaggcacataggctcctcctgcggtgcaggagcccatgaccactgcgatatttactggttaggaaggatatcataaaggatacagatgaacagccagatgaaaagatacataaggcgagtctgcaaaggtcctgagggctggagcttctgtccccgcggagtgggaatgcaccaccttcctagcacttggatgagtttgccagcacagatgcccccgcgtacctcggccgctctagaactagtggatcccccgggctgcaggaattcgatatcaagcttatcgataccgtcgacctcgagggggggcccggtacccagctttt

SEQ ID NO: 35490 - DNA, 389 bp, Homo sapiens
ctactatagggcgaattggagctccaccgcggtggcggccgcccgggcaggtacgcggggggagctaaagtggtcgtgattcatgctgtcgcgggaaccccgaaggtggggccccacgtaacaagaagatgacccgaagttgctccgcagtgggctgcagcacccgtgacaccgtgctcagccgggagcgcggcctctccctccaccaatttccaactgataccatacagcgctcaaaatggatcagggctgttaatcgtgtggaccccagaagcaaaaagatttggattccaggaccaggtgctatactgtgttccaaacattttcaagaaagtgactttgagtcatatggcataagaagaaagctgaaaaaaggagctgtgccttct

SEQ ID NO: 35491 - DNA, 400 bp, Homo sapiens
cgtatacgactcactatagggcgaattggagctccaccgcggtggcggccgcccgggcaggtactttttttttttttttttttttttttttttcgcattcaacttaaatgcttttattgacaatgtcttggaacaataagcaaaccccgcgtacccaactctcagccagagatggtggaggccgtcaagaagcacattttaaacatgctgcacttgaagaagagacccgatgtcacccagccggtacctcggccgctctagaactagtggatcccccgggctgcaggaattcgatatcaagcttatcgataccgtcgacctggagggggggcccggtacccagcttttgttccctttagtgagggttaattgcgcgcttggcgtaatcatggtcatagct

SEQ ID NO: 35492 - DNA, 402 bp, Homo sapiens
tatacgactcactatagggcgaattggagctccaccgcggtggcggccgcccgggcaggactccggtcggtgtcagcagcacgtggcattgaacattgcaatgtggagcccaaaccacagaaaatggggtgaaattggccaactttctattaacttatgttggcaattttgccaccaacagtaagctggcccttctaataaaagaaaattgaaaggtttctcactaaacggaattaagtagtggagtcaagagactcccaggcctcagcgtactgcggcgggtaggcctaggattgtgggggcaatgaatgaagcgaacagattttcgttcattttggttctcagggtttgttataattttttatttttatgggctttggtgagggaggtaggtggtagttt

SEQ ID NO: 35493 - DNA, 190 bp, Homo sapiens
actatagggcgaattggagctccaccgcggtggcggccgccatcaaccgccacccttactgcctagtcacacacgtcagggaggctgccctcagtggagttggggttgagaccccagggtgggacttcacagttttgccagcaatctctaccttctgacttctgcctcgcagaagaggtaagggagaggg

SEQ ID NO: 35494 - DNA, 72 bp, Homo sapiens
ctatagggcgaattggagctccaccgcggtggcggccgcccgggcaggtacttttttttttttttttttttt

SEQ ID NO: 35495 - DNA, 364 bp, Homo sapiens
gcgaattggagctccaccgcggtggcggccgaggtacttcttgcccttgtagaatttcctgaggttttctttctgagtctggttaataactgtgagaacacgggcaatggatttccggacgactcggatcttagagagcttggaggccgcaccgcctgtcactttggcgacgcgcagctgggacagctccaccttcaggtcgtccagctgtttcagcagcctcctccttcttcttcccgcgaagatctcgagccttgatcttggccattgctgcacaagccgccaacgccgccgcccgctccgagggaaagagccccgcgtacctgcccgggcggccgctctagaactagttgggatcccccgg

SEQ ID NO: 35496 - DNA, 282 bp, Homo sapiens
ggagctccaccgcggtggcggccgaggtactttatttttttttttttttttttttgggcactacctccccgggtcgggagtgggtaatttgcgcgcctgctgccttccttggatgtggtagccgtttctcaggctccctctccggaatcgaaccctgattccccgtcacccggggttcaccatggttagggcacgggcgaactaccattcgaaaggttgaatagggccagaacgttcgaatgggtcgtcgccgccacggggggcgtgcgatcggcccgaggt

SEQ ID NO: 35497 - DNA, 392 bp, Homo sapiens
gactcactatagaggcgaattggagctccaccgcggtggcggccgaggtacccatctaggtgagccttgagcaaaaggtaatttcactgcccaactctgcaaagagcaccagggagtcgaggttgccagccacactcaccgctggtagggatgcatggaagccgacttgatgttggtttttattccacttggcattttccctggttgacctgcctgagccatttgtacaatttctgccactggtctaggtgtctgaggagcatcttcctggctcagagaccttttgctccaggtgctcatgccgcaaatggcaatctgcgcgcgaactaattcgcggccgctctagaactagtggatcccccgggctgcaggaattcgatatcaagcttatc

SEQ ID NO: 35498 - DNA, 382 bp, Homo sapiens
gactcactatagggcgaattggagctccccgcggtggcggccgcccgggcaggtacttttttttttttttttttttttgcaggttgaatgcagggttttattgagtggtggaggtggttctctgaaggatggatgcacagctggaagcggggatggcacgggaagataatcttcctgctgggtggccaaacctctccgaccaccctcggctgaactcctctcggcgttcaaatgttcctctgctgtctttctctgctgcatcgtttcaccattcatctgcttgtctgggatggtgaagacaactgtttgctcatttgcttggcgctaggtgatagtctcgccgctcagctataggcgatggtctcaccactcggtgataggc

SEQ ID NO: 35499 - DNA, 352 bp, Homo sapiens
actactatagggcgaattggagctccaccgcggtggcggccaggtacacacacctatggtgcccacaggtccagctaggaataaatgcacaaagagctccaccatctgagattaccactcaacttttaaagacaaattcttatttcatccctccaaagataaacatcacatgggaaaaatgttttcacaatcaaattctttaattatgccagttgaaagggatgccttttcttttaaggagaatgcaacatggagaaagttttaaaggcagggcagtgaagagaagggacaagaacgttttcaaccccagctcctttagatgggagaataaagtctggcccattccccacac

SEQ ID NO: 35500 - DNA, 165 bp, Homo sapiens
atcactactatagggcgaattggagctccaccgcggtggcggccgaggtaccactttgtccagatggtttatactaacagtgtaatttatggaggaacatgctggctttgccttctagggagtgctgggagccttcaggtgactgaccctttataaaagaccatg

SEQ ID NO: 35501 - DNA, 401 bp, Homo sapiens
gcgtaatacgactcactatagggcgaattggagctccaccgcggtggcggccgcccgggcaggtacgcgggcagatgcctccggcccacagttccaccaggcagcgggagaggacctgctggccccaccgcacgacaccagcacggatctcacggaggtcatggagcagattcacagcacgtttccatcttgctgcccaaatgttcccagcaggccacaggcaatgtgaagtattcatccggccaaccaatgtttcctgacgtacgcgggggagagagagagagagagttgtcaggaaagctgcaggttactttgagacagtcgtcccaaatgcattagaggaactgtaaaaatctgccacagaaggaacgatgatccatagtcagaaaagttactgcagc

SEQ ID NO: 35502 - DNA, 468 bp, Homo sapiens
atacgactcactatagggcgaattggagctccaccgcggtggcggccgaggtacttctgctccacgaggaaggggatcgccaggcactaccgcatcaagcacaataatgtccgagcccagccagaaggcaagaacaacctcttcaagtgtgccctgtgtgcctacaccaaccccatccgcaaaggtctggcagcccactaccagaagcgccacgacattgatgcgtattacactcactgcttggcagcctccaggaccatcagcgacaagcccaacaaagtgatcatcccatccccgcccaaggacgactcccctcagctgagcgaggaactccggcgggcagtggagaagaaaaagtgctccttgtgctctttccagtcgttcagcaagaagggcatcgtgtcccattacatgaaacgccacccaagggtgttcccaaagaagcagcacgccagcaagttggggggc

SEQ ID NO: 35503 - DNA, 378 bp, Homo sapiens
cactactatagggcgaattggagctccaccgcggtggcggccgcccgggcaggtactgtgtagaattaagcaaacaagtgatgtttcagaagtaacccattactgcttaaaataaagcctacatcaacacttaactcaaacgaggacaattgttatttagtttttatttcataatcataaacttaactgctgcaattccaggctagggcatggggaggggaaacaagggaaaaaacattgggaaaccccaaagggaactgcagcgagagcacaaagattctaggatactgcgagcaaatggggtggaggggtgctcgctatgttgcccaggctggagtgcagtggctattcacaggcgcgatcccactactgaatcag

SEQ ID NO: 35504 - DNA, 342 bp, Homo sapiens
ctatagggcgaattggagctccaccgcggtggcggccgaggtacctgcaggcctcctacacctacctctctctgggcttctatttcgaccgcgatgatgtggctctggaaggcgtgagccacttcttccgcgaactggccgaggagaagcgcgagggctacgagcgtctcctgaagatgcaagaaccaggcgtggcgggccgcttctagaactaagtgggatccccccgggctgcaaggaaattcgatatcaagcttatcgataccgtcgacctcgaggggggggcccgggtacccagcttttgttccctttagtgagggttaatttgcgcgcttgggcgta

SEQ ID NO: 35505 - DNA, 181 bp, Homo sapiens
tggagctccaccgcggtggcggccgtggtggtgaagctgtagcctcgctcagtgaggatcttcatgaggtagtcggtcaggtcccggccagccaggtccagacgcaggatggcgtgggggagggcgtagccctcgtagatgggcaccgtgtgggtgaccccgtcttccagaagtccatgac

SEQ ID NO: 35506 - DNA, 90 bp, Homo sapiens
ctatagggcgaattggagctccaccgcggtggcggccgaggtactttttttttttttttttttttttttgggcacttttttatgttgcca

SEQ ID NO: 35507 - DNA, 359 bp, Homo sapiens
  misc_feature 310: n = A,T,C or G
atagggcgaattggagctccaccgcggtggcggccgaggtactgatcgtcttgttatcactccattaacagatagatgctatatcacgttagctcaggccttgggcatgaacatgggaggtgctcccgcaggacctgctggcactggcaaaacagaaaccacaaaagacatgggaaggtgtttgggaaaattatgtgggtcgtgtttcaattggttcagaatcaaatgggattttcagaaggcctaggaaggattttcaaagcaagaaaagaaagaaagaaacagttcattttttctgatggtgattgtngttgatttaaaatccaggaatttggaaatcttcttaaacgatgaaccct

SEQ ID NO: 35508 - DNA, 363 bp, Homo sapiens
ctatagggcgaattggagctccaccgcggtggcggccgaggtaccaggctgtttgtgatcgtatcagccgctatgtgaaacagcctttacctgatgagtttggcagctcacccttggagccaggggcctgcaatggctccaggaacagctgtgaaggagaagatgaggaagaaatggagcatcaggaagaaggcaaaagagcaggcttttcagaaaaccggaagggcagtgggggaaaagattgagccaggaaatgaccccagtgagaccacccaaaagaagatcaaagggccagccctgcccaaaaaggctttttaccttcagttcttgtggaacttcctatgggaacaggctggacataaa

SEQ ID NO: 35509 - DNA, 85 bp, Homo sapiens
tagggcgaattggagctccaccgcggtggcggccgcccgggcaggtactttttttttttttttttttttttttccccatgttatt

SEQ ID NO: 35510 - DNA, 327 bp, Homo sapiens
ctatagggcgaattggagctccaccgcggtggcggccgaggtacgcgggtgagtgtcccgcggggcccgaagcgtttactttgaaaaaattagagtgttcaaagcaggcccgagccgcctggataccgcagctaggaataatggaataggaccgcggttctattttgttggttttcggaactgagggccatgattaagagggggcgggccgcttctagaaactagtggggatccccccgggctgcaggaattcgatatcaagcttatcgataccgtcgacctcgaggggggggcccggttacccagcttttgttccctttagtgagg

SEQ ID NO: 35511 - DNA, 370 bp, Homo sapiens
agggcgaattggagctccaccgcggtggcggccgaggtacttcgggaaagtgctcatggcctccaccagctacctgccttcccaagtgacagaaatgttcaaccagggcagagccttcgccacggtccgcctgccattctgcggccacaaaaacatctgctcgctagccacaattcagaagatcccgcggttgttgggtggggtgcccgccgaacgggttaccctgccccgggccggccgctctagaactagtggatcccccgggctgcaggaattcgatatcaagcttaatcgataccgtcgacctcgaggggggggcccggggacccagcttttgttccctttagtgagggtttaattgcggcgcttg

SEQ ID NO: 35512 - DNA, 348 bp, Homo sapiens
ggagctccaccgcggtggcggccgaggtacccctccagccggacaacccgggcgaggacgcaccagcggaggacatggccagatactactcggcgctgcgacactacatcaacctcatcaccaggcagagatatggaaaacgatccagcccagagacactgatttcagacctcttggatgagagaaaggcaacagaaaaatggttccccagaaactcggcctttgaagaaccctgcaatgtggtgatgggaaatgagacttgctctctggccttttcctattttcagcccatatttcatccgtgtaaaacgagaattccacccattcctaccaatgcatgcagccact

SEQ ID NO: 35513 - DNA, 88 bp, Homo sapiens
ggcgaattggagctccaccgcggtggcggccgcccgggcaggtaccaactgaagcagcacaatattgctggcattctgtttggagtaa

SEQ ID NO: 35514 - DNA, 195 bp, Homo sapiens
ctatagggcgaattggagctccaccgcggtggcggccgaggtacgcgggtcaattcattttcagagcactttaaagtctgatatttctcgatgtgcactgtgatgcctggaaccttcctctggaagtgctgattttatggactgaggactggtgactggtctgtgatagaagcaaattccaatttccaaaatgta

SEQ ID NO: 35515 - DNA, 71 bp, Homo sapiens
  misc_feature 63, 64: n = A,T,C or G
tatagggcgaattggagctccaccgcggtggcggccgaggtactttttttttttttttttttnnttttttt

SEQ ID NO: 35516 - DNA, 319 bp, Homo sapiens
ctatagggcgaattggagctccaccgcggtggcggccgcccgggcaggtactggggtccgcgtcggagcagcaactgagggcggcctcgtccgtgaggccgccggacgggggctgcggttctgccatggctgcactgcagtatcacagacgacgggacccaaggaacggaggagtcacccacccccgcgtacgcgggcccgggcgacacagcaggactcccgtttcctatgaaaaaaatattttagaggccaagagactggacgcaggggctcacacttggaatcccagcactttgggaggcctaggcggttggatcac

SEQ ID NO: 35517 - DNA, 165 bp, Homo sapiens
ctatagggcgaattggagctccaccgcggtggcggccgaggtaccgcaagggaaagatgaaaaattatagccaagcataatatagcaagggactatacccctatgaccttgctgtgcataatggaattaacctagtgaaataactttgcaaggtagtagccaaag

SEQ ID NO: 35518 - DNA, 95 bp, Homo sapiens
ctatagggcgaattggagctccaccgcggtggcggccgcccgggcaggtaccgagacaccgaagggtgctccaggcacacgtcgcagccagacag

SEQ ID NO: 35519 - DNA, 199 bp, Homo sapiens
ctatagggcgaattggagctccaccgcggtggcggccgcccgggcaggtacgcggggaaaaaggagagacatggaaagggagacagccaggtggcacctgcagcggctgccctctggggccacttggtagtgtccccagcctacctctccacaaggggattttgctgatgggtttcttagaggccttaggcaagccctg

SEQ ID NO: 35520 - DNA, 207 bp, Homo sapiens
tcactactatagggcgaatcggagctccaccgcggtggcggccgaggtacgcggggtcctctggccgccgcgcgggagagaggccgagatggcagatgagattgccaaggctcaggtcgctcggcctggtggcgacacgatctttgggaagatcatccgcaaggaaataccagccaaaatcattttttgagggatgacccgggtgcc

SEQ ID NO: 35521 - DNA, 78 bp, Homo sapiens
cactactatagggcgaattggagctccaccgcggtggcggccgcccgggcaggtactttttttttttttttttttttt

SEQ ID NO: 35522 - DNA, 341 bp, Homo sapiens
ctcactatagggcgaattggagctccaccgcggtggcggccgaggtacgcgggctcctacttggataactgtggtaattctagagctaatacatgccgacgggcgctgacccccttcgcgggggggatgcgtgcatttatcagatcaaaaccaacccggtcagcccctctccgggccccggccggctctagaactaggtggaatcccccggggctggcaggaaaatttcgatattcaaagctttatgcgataccgtcgacctcgagggggggcccggtacccagcttttgtttccctttagtgagggtttaattgcggcgcttggcgtaatcatgggtcat

SEQ ID NO: 35523 - DNA, 326 bp, Homo sapiens
tcactactatagggcgaattggagctccaccgcggtggcggccgcccgggcaggtacgcggggcccaaactcaccacctggccgtggacacctgtgtcagcatgtgggacctggttctctccatcgccttgtctgtggggtgcactggaatagccaggtctggctgggtcggcacaacctgttttgagccctgaaggaccacaggcccagaggggccccctggtcagccccaagttttcccacaaccccgctctacaatatgaaccttctgaagcatcaaagccttagaccagatggaagacttccagccatggacctcatgctgc

SEQ ID NO: 35524 - DNA, 173 bp, Homo sapiens
tatagggcgaattggagctccaccgcggtggcggccgaggtaccttgctgactcagctacatacataaggcctcaagccttgctgccagttcttaaaggaactgtgttctcttttcacttttcctggcttatggggcagtagagggtttccgacctcaaatgccaataccagg

SEQ ID NO: 35525 - DNA, 194 bp, Homo sapiens
actactatagggcgaattggagctccaccgcggtggcggccgaggtacttttttttttttttttttttttttcgtcactacctccctgggtcgggagtgggtaatttgcgcgcctgctgccttccttggatgtggtagccgtttctcaggctccctctccggaatcgaaccctgatttccccgttcacccgggg

SEQ ID NO: 35526 - DNA, 182 bp, Homo sapiens
ctatagggcgaattggagctccaccgcggtggcggccgtggtggtgaagctgtagccgcgctcggtgaggatcttcatgaggtagtcagtcaggtcccggccagccaggtccagacgcaggatggcatgggggagggcatacccctcgtagatgggcacagtgtgggtgaccccgttcaccg

SEQ ID NO: 35527 - DNA, 167 bp, Homo sapiens
ggcgaattggagctccaccgcggtggcggccgcccgggcaggtacaagcaagcagctacttccatgatacagtgggaagataaaaagggctcattgcaggtccaggccgtgtacctggtaaatgccaggcttggccctgccccgccacccccactggggaaaaaaaa

SEQ ID NO: 35528 - DNA, 196 bp, Homo sapiens
ggcgaattggagctccaccgcggtggcggccgaggtactaatactcctgttaaaattcaacagctttattgtgaaagaatccagagatctcacactgaaaaaatactaacacagctcatatataaattacttatctataagaacaattatagaaggaatctaaatggggcaatttttaacaataccaggcaaaata

SEQ ID NO: 35529 - DNA, 178 bp, Homo sapiens
  misc_feature 170, 171: n = A,T,C or G
agggcgaattggagctccaccgcggtggcggccgcccgggcaggtacatccctggccttttgcatccagttctgcatgaggctctcccaggactcatggggtatgtcgtaaacccaggcttggtgcctcctctagcatgctgaagcaggctcctccttgcggtcacgtcnnggcggga

SEQ ID NO: 35530 - DNA, 260 bp, Homo sapiens
tatagggcgaattggagctccaccgcggtggcggccgaccttgatccggggagtcgggatggcccgagtaaactccatcacattcatcccaagaagatggcagagcttctgcgcaactgtattttctggcatggaagcttgatcagtatttctctcctttttgaaagaaatattttccaaactggtagccactggaaggatacttactttaagccattggacagaaatctttttcatgggagaagcccattatgtgcatt

SEQ ID NO: 35531 - DNA, 372 bp, Homo sapiens
ttcgcatcgactcactatagggcgaattggagctccaccgcggtggcggccgaggtacagattattcagttccattgtaatttcccaaataattttagattataattttcagaaaggatttttaacatctgctaggctaattccatcatattagtatatgaaattatcttttctccagttatttattaatctttctaaatatttttaaaaatacaggtatatttttcacaaacaaaaattttatttttcccccacaacaaagaattatcccacttctctagtaatttccatcgtgcaagaatgtaggaatatagactaataaggcctaaataggaatctaaaaagggcaagtttaccctaaaaccccttctt

SEQ ID NO: 35532 - DNA, 181 bp, Homo sapiens
tatagggcgaattggagctccaccgcggtggcggccgaggtacttcttgcccttgtagaatttcctgaggttttctttctgagtctggttaataactgtgagaacacgggcaatggatttccggacgactcggatcttagagagcttggaggccgcaccgcctgtcactttggcgacgcgc

SEQ ID NO: 35533 - DNA, 90 bp, Homo sapiens
ctatagggcgaattggagctccaccgcggtggcggccgcccgggcaggtacttttttttttttttttttttttggacatgggagtctcac

SEQ ID NO: 35534 - DNA, 478 bp, Homo sapiens
actactatagggcgaattggagctccaccgcggtggcggccgaggtacttagggtaagcattaacaatattattcaaaatgttatatagagttcaactgtatacaatagagcatttattaaagtgtgtccaaagcgcttataaataaagcatcttcgagacaggcggctcacttgaggttaggaggaaagcagactggccaacatggtgaaaccccgtctctactgaaaatacaaaaaaattagccaggcgtcatggcgcacctgtagtcccagctactggggaggctgagacacgagaaccgcctgaacccgggaggtggaggttgcagtgagccaagattgcaccactgcactccagcctgggtgacagagtgggactctgtctcaaaaaaaaaaaactaaaaaaaaaagtccctgcccgggcggccgctctagaactagtggatcccccgggctgcaggaattcgatatcaagct

SEQ ID NO: 35535 - DNA, 464 bp, Homo sapiens
atacgactactatagggcgaattggagctccaccgcggtggcggccggacattggtgaagaagaggtggaggaggttgcctggggtctgggagttgatctgctctttgctcccgcgtacctatttcggtttttgttcttaggaagcttggccactctacatgggaagtcactagcttcatgtcggatatcctggtaaatggccgcccagctcccggacttgtcgatctgctcgaactccttttccatctccatgacgggccagggcggctgctgcgcctccttctcggcccactgcgccgtctgccgctctaggccgcgtcgcgctcttagccccgaggcccgctgcaatccccgtacctcggccgctctagaactagtggatcccccgggctgcaggaattcgatatcaagcttatcgataccgtcgacctcgagggggggcccggtacccagcttttgttcc

SEQ ID NO: 35536 - DNA, 468 bp, Homo sapiens
cgtatacgactactatagggcgaattggagctccaccgcggtggcggccgaggtacgcgggggccgccgccgccagattctggaggcgaagaacgcaaagctgagaacatggacgttaatatcgccccactccgcgcctgggacgatttcttcccgggttccgatcgctttgcccggccgctctagaactagtggatcccccgggctgcaggaattcgatatcaagcttatcgataccgtcgacctcgagggggggcccggtacccagcttttgttccctttagtgagggttaattgcgcgcttggcgtaatcatggtcatagctgtttcctgtgtgaaattgttatccgctcacaattccacacaacatacgagccgggagcataaagtgtaaagcctggggtgcctaatgagtgagctaactcacattaattgcgttgcgctcactgcccgctttccagtcgggaa

SEQ ID NO: 35537 - DNA, 468 bp, Homo sapiens
  misc_feature 429, 432: n = A,T,C or G
actactatagggcgaattggagctccaccgcggtggcggccgcccgggcaggtaccctcacatcaatcagtcactgaatgtgtggcattctagaaagggacatgaccttgagcaagggggctgtctacagctgaggcaatccttgaaggggctgacagatgaagattgtctgcagagagccttccctgcagctggagcaaaaagtccttcattgaccgtgaatctggacagctcatctggtgcccagcacaaatatattttactttagagtaaaattctgtgggggaagatggacaatatacaagttcaagaaaaaaaaagagatgacaaaattttgactgtaaagaacagcatgttcatgtattttttaaaattgatgatgttgaatagtaaataaatacagtatttaaatcctttggatcaatccanaanaaaaaaaaaaaaaaaaaaaggtacctcggccgctct

SEQ ID NO: 35538 - DNA, 364 bp, Homo sapiens
tatagggcgaattggagctccaccgcggtggcggccgaggtacaggcatggtagcctcatgtaaattagacatggagagagctggtggttttacttctttcttttcatctggtaaaagggccctaacaggctcagtctcattagagtaggtgaggtggtcaccaacacgaaggtgagaagctggatctgccaaagaaggctggtggctaccctgtggacggtcttcatcagagtcctcttcctcaattgacggaataagggaaggtgttgacaagatttgcttgataatactgtatcgggcataaaagcgggtctatgaggttcttgacttgcttagttacccggtcattgcttttcttgaaca

SEQ ID NO: 35539 - DNA, 395 bp, Homo sapiens
cactactatagggcgaattggagctccaccgcggtggcggccgcccgggcaggtacgcgggggggctggggcacgtcaccgccgaatggcagcctccagaaagccaccgcgagtaagggtgaatcaccaggattttcaactgagaaatttaagaataattgaacctaacgaggtgacacactcaggagacacaggtgtggaaacagacggcagaatgcctccaaaggtgacttcagagctgcttcggcagctgagacaagccatgaggaactctgagtatgtgaccgaaccgatccaggcctacatcatcccatcgggagatgctcatcagagtgagtatattgctccatgtgactggcggcgggcttttgtctctggattcgatggctctacgg

SEQ ID NO: 35540 - DNA, 393 bp, Homo sapiens
ctactatagggcgaattggagctccaccgcggtggcggccgaggtacagtagtgcactcttggctcactgtagcctcgacctccggggctcaagtgatcctcctgccttagccccacaagtagtgggactataggcacacaccaccatgcccatctaagtttttgtattttatgtagagacaaggtttcaccatgttgcccaggctgatcttgacctcctgagctcaagtgatctgcccacctcggactcccaaaatgctgggattataggcgtaaaccaccatgcctggccttaaatcaactttagagtcaacatctcttatcactggagcttctggagaaactccatcacgtggtgctctctttcctgatgtgttgtgcccaaatagcttg

SEQ ID NO: 35541 - DNA, 328 bp, Homo sapiens
ggcgaattggagctccaccgcggtggcggccgaggtacatcacagaactcacacgggagagagaccctatggctgtgatgagtgtgagaaagcttacttctatatgtcttgccttgttaaacataagagaatacactcaagggagaaacggggggattcagtgaaggtggaaaatccttccacagcaagtcacagcttaagtcctagtgaacatgtgcaggggaaaagccctgttaatatggtaactgtggcaatggtggcagggtcagtgtgagtttgccccacattcctgcatttcatgataaaacagtttgcctgttttgattca

SEQ ID NO: 35542 - DNA, 112 bp, Homo sapiens
actatactatagggcgaattggagctccaccgcggtggcggccgcccgggcaggtactgtgctgttgggcttagaaggctgcagacggtctccaggtggcatggctgtagga

SEQ ID NO: 35543 - DNA, 386 bp, Homo sapiens
ctatagggcgaattggagctccaccgcggtggcggccgcccgggcaggtacacagattggtatacacatatatttccttgctctgtctgctgagagggcctagatgcagcaaacagtgattatatgtagcacctagatcctggtttctaataaccattctccaatagaagcaaccagggctcttggagaagtggtcagttctaggactggagtaggaaatatataaattgagctttgaacatattatagtgccaaaaagtaaagtgctttaaaaaaccccacaatgaagggggcatgtcagagggacacaggagccagctgaagagctcccagtggcccaagctggaaggaactatttgaacaacaaaataaaatactaacaagtt

SEQ ID NO: 35544 - DNA, 172 bp, Homo sapiens
ggcgaattggagctccaccgcggtggcggccgcccgggcaggtacaaaaaaaacaaagctctctttccttctctggtgatggtttggtaggattcttttgtctctggaagcagtgggactgaagttctcttcgtcctgtgcacacacagacacccccacacagttgggatca

SEQ ID NO: 35545 - DNA, 428 bp, Homo sapiens
cactactatagggcgaattggagctccaccgcggtggcggccgcccgggcaggtacgcggggctttcagcgcctgcaggttccgggaggtcagctcccagccgaggacgtcggatgtcatcgtccttgctgctttgccaccccattcccgtcaataaagtggtttgaacccaaaaaaaaaaaaaaaagtacctcggccgctctagaactagtggatcccccgggctgcaggaattcgatatcaagcttatcgataccgtcgacctcgagggggggcccggtacccagcttttgttccctttagtgagggttaattgcgcgcttggcgtaatcatggtcatagctgtttcctgtgtgaaattgttatccgctcacaattccacacaacatacgagccgggagcataaagtgtaaagcctggggtgccta

SEQ ID NO: 35546 - DNA, 343 bp, Homo sapiens
ctactatagggcgaattggagctccaccgcggtggcggccgaccggccaggtgctatttttttgttttttactttttgagagaagatacttgtgttccaggttttgattcagtccactataagtctagacggtcttcttaaagcaccaacattacttgagtctttggataaaattgagaaaaagagtctacaaagtatttgtggactctacaggaggcaggtaggctgacaactggcagtaaagacaaagatgtcaggcctgcggtcccggcactcaagatggaccctgagattgatgctttttgataaaggcttggaaagtgatggaagagagtaattggaa

SEQ ID NO: 35547 - DNA, 415 bp, Homo sapiens
gcgaattggagctccaccgcggtggcggccgcccgggcaggtacgcgggtaaaaatgaaagcaccagctggtaaagttttcaaataaagacataaataaggtttgatatgactcagtgtggtatgttccctctcttcctaggaaactgaaaaacagagtagcagctcagactgccagagatcgaaagaaggctcgaatgagtgagctggaacagcaagtggtagacttagaagaagagaaccaaaaacttttgctagaaaatcagcttttacgagagaaaactcatggccttgtagttgagaaccaggagttaagacagcgcttggggatggatgccctggttgctgaagaggaggcggaagccaaggggaatgaagtgaggccagtggccgggtctgctgagtccgcagcactc

SEQ ID NO: 35548 - DNA, 457 bp, Homo sapiens
tacactactatagggcgaattggagctccaccgcggtggcggccgaggtactcagcctggtcgggtggcagctcgcggcgcagctcgtccatggtaatgtagttcttgtccccagccaggatcttgaaggaagccatgacttggtctgctgtatctgtgtcggctgtctcgcgggacatgaagtcaaatgaaggcctggaatgtcactcccgcgtacctgcccgggcggccgctctagaactagtggatcccccgggctgcaggaattcgatatcaagcttatcgataccgtcgacctcgagggggggcccggtacccagcttttgttccctttagtgagggttaattgcgcgcttggcgtaatcatggtcatagctgtttcctgtgtgaaattgttatccgctcacaattccacacaacatacgagccgggagcataaagtgtaaagcctggggtg

SEQ ID NO: 35549 - DNA, 336 bp, Homo sapiens
ctatagggcgaattggagctccaccgcggtggcggccgaggtacatgtaaaaaatgtgttagataatgggaggcaggacagagagagagccaggtgagtggggagtcacgctgaggcaggacacagaggcaatcagactagcatgtggcgtttcctatggagggcaagatggtcagaacggagaagctgcggtcacagcccgggcggccgctctagaactagtggatcccccgggctgcaggaattcgatatcaagcttatcgataccgtctacctcgagggggggcccggtacccaacttttgttccctttagtgaggtgtaattgcgcgcttgg

SEQ ID NO: 35550 - DNA, 268 bp, Homo sapiens
gcgcgtaatacgactcactatagggcgaattggagctccaccgcggtggcggccgcccgggcaggtacgcgggtcccctgaggaattcaaccacagacattctcaaggaaacacaagagaaattctatggcctaccatatgttccaaatactgcctggcagctgcgattcaagccacctcgtggggtataggtgctagatattaactcttaccctcatgttcctagagcgggtcgcactccaatggtttatggaatggagttgttttt

SEQ ID NO: 35551 - DNA, 316 bp, Homo sapiens
acgactactatagggcgaattggagctccaccgcggtggcggccgaggtaccaacagccccttccctcccaagttaggtgagcccttgggccagtgtatgggcagaaaagcagatttgtgtccttcagaagggaaatgtaaaaaggtgaaagctctagttgaagggcagtgagaggggctggaagtgggagaaaaggtctcttctggccggtggtctgggtgcagcaagggcactctgagaaggcagaatggaaacgcagggctggaggggcatgggtacctgcccgggcggccgctctagaactagtggatcccc

SEQ ID NO: 35552 - DNA, 409 bp, Homo sapiens
acgactcactatagggcgaattggagctccaccgcggtggcggccgaggtacttttttttttttttttttttttttggcgttctacagtctcaatcgtgtatagactaatgagaaaaaatgaaaatgagtttcattagacagaccacttttgttggactcagtcttgagctgatcaaatgaggcagctgaactgagactgaatcttccctgtgattagctcaactcttgaagtagccaggcacaaattagctggatgtagtggtgcgagcctgtagtgccagctacccaggaggctgagaggcaggaggattgcttccgctgaggagttcggggctgcagtccccgcgtaccacaaaccatagtaacttacacagggggaaaagttactgaaataaaaatgttttatat

SEQ ID NO: 35553 - DNA, 183 bp, Homo sapiens
ctcactatatggcgaattggagctccaccgcggtggcggccgcccgggcaggtacgcggggagacaaaggtggctttgctttgctgaagttactgatataaagatcagcgcctgaaacagattctccgggatattaccggagacggattgttttattattaggcctttccttaggtggacatt

SEQ ID NO: 35554 - DNA, 408 bp, Homo sapiens
ctactatagggcgaattggagctccaccgcggtggcggccgcccgggcaggtacatattttttaaaactggttagcgatagctacatgacccaattatattttctatatttatttgattatcagccagtaaactcatagtgaagcagctgcgcactcccccaacaattgagaattgaacaaatttccagagagaagtgaaaaatatcaaaaattaaaatcctaaacttgaagacaagttgagagaccatttagtctggccacctgtatccaagattcatttaaaaccaagcagcggccaggcacgatggctcacgcctgtaatcccagcactttgggaggccgaggcgggcggatcacgaggccaggagatcaagaccatcctggctaacacagcgaagccctgtttc

SEQ ID NO: 35555 - DNA, 426 bp, Homo sapiens
actactatagggcgaattggagctccaccgcggtggcggccgaggtactgcagacatctcttctccgttgtcgggtgccgtctctgctccttgtggttattgctcagccctggcatccccaggggaatggcagcagtgaggtagatgggaggacatttctggtcagggaactggcatcccattcagcatctcaggactcacaggccaacatgtgttccatggctgggaattgcctaccacccacatcagcttctgtttacctttttggcatcaaataatgaacagtgtttggaaatctttctacaggcaattacctccccaagagaagccttccttattttggagtaaggtcctaagatagctggatgaatcaggaaaaccatgtcccctctaggtattattaatataagcaggaagggatctact

SEQ ID NO: 35556 - DNA, 427 bp, Homo sapiens
actactatagggcgaattggagctccaccgcggtggcggccgaggtactttagttctcctttcctcatcagggctaaaactgctattgttgctcaagcctgaatcgctgtgaatatagtgaagagtggagtccatattcctcacactccagagtccagataatgtcactggccctccgcaacatggcctcaagtcccgatcttctgctcagaatactgtgttgcttgctgcagtgaaatggtccgatcagaaacaaagcacctctcaacagcatcgctgattaaaggcacagaatcttcttgatttattttacaatttggtagctcatttatatccagttcatcttgcaaatcacttctcttttctatactgatggtctcttcatgtacatccaggctggaagcacgtagtgcagcggacagcactt

SEQ ID NO: 35557 - DNA, 231 bp, Homo sapiens
tatatggcgaattggagctccaccgcggtggcggccgcccgggcaggactcgggggttgaaaaccttgctcattttttaatgcgaaggctaagtgtcaccccctttctctgcctctggcttggccttgctaagggccaaggaaagaaagacattttttagggggccagccagtcccaaatgcccaaatgaaagaccaggttctttgcccttgattgtattgaaaatttgac

SEQ ID NO: 35558 - DNA, 425 bp, Homo sapiens
actactatagggcgaattggagctccaccgcggtggcggccgcccgggcaggtaccagctactcactacctgggaggctgtggtgggagcatcttttgagcctggaaggtcgaggctacagtgagttgtgactgtatcactacactccagcctgggaaacagactgtctcaaaaaaaaaaaaaattaaaccaacaattggctgccttctgaccttcacatcctgtataggaatggaaatggtggctaaagtcagcactgaaggtcccacaagctctccctgcctcccctctatctactgcatgatccttcaactgaggccagcccaagtgcagagtagcttgcaaaacccaagggaccccgcgtaccttggccgctctagaactagtggatcccccgggctgcaggaattcgatatcaagcttat

SEQ ID NO: 35559 - DNA, 164 bp, Homo sapiens
gtatacgactcactatagggcgagatagcagctccaccgggcggccgccgcccgggcaggtacagggaaggcctttcgggcagggcacatggttcactgccccatgaccgtgataccttgaagcacaccattacaggacaagtgggtcccccaataaatcaccc

SEQ ID NO: 35560 - DNA, 426 bp, Homo sapiens
gcgaattggagctccaccgcggtggcggccgcccgggcaggtacgcggggaggcccttcgacggagaacaacaagaaaggcgcttccggtgtctgttgccaggcgcgggcccagtgggccgtaggggcgacattgttgccgtcgtctttccccccccagtcccggggatggagatgtcgggactcagcttttcagagatggagggctgccgtaacctacttggcctactggacaacgacgagatcatggccctatgcgacaccgtcaccaaccgcctggtgcagcctcaggaccgccaagatgctgttcatgcaatattagcatacagtcaaagtgcagaagaacttctgaggcgtagaaaagtccaccgagaagttatatttaagtacctcggccgctctagaactagtggatcccccgggctgc

SEQ ID NO: 35561 - DNA, 161 bp, Homo sapiens
cgtatacactcactatagggcgaattggagctccaccgcggtgggcggccgcccgggcaggtacttactacaaagcttccaaaggaaaattgcctattaaatggatggctccagagtcaatcaaattttcgacgtttaacctaagctagtgacctatggat

SEQ ID NO: 35562 - DNA, 277 bp, Homo sapiens
gcgcgtatacactcactatagggcgaattggagctccaccgcggtggcggccgcccgggcaggtaccctggtgttcttctgattggcactgactcccacacccccaatggtggcggccttgggggcatctgcattggagttgggggtgccgatgctgtggatgtcatggctgggatcccctgggagttgaagtgccccaaaggtgattggcgtgaagctgacgggctctcttttcggttgggtcctccaccccaaagattgtgatcctgaaggtggc

SEQ ID NO: 35563 - DNA, 172 bp, Homo sapiens
ctcactatagggcgaattggagctccaccgcggtggcggccgaggtacgcgggggcctgcgcggctgtcggttgatggggaggtcaggtctgggaaactaggccctggggttttccctgagcaggagcggtgcccgagggcctcaggcgttaagtccaggaccctgaaatgg

SEQ ID NO: 35564 - DNA, 417 bp, Homo sapiens
gcgaattggagctccaccgcggtggcggccgaggtacctgcctgctggacccctccacctggaggccagcccatgtctcaggcccagccctagcctcttctcctcaaattctaagtgttttctctttaggtttccctggctttgtgaatggatcatgtgtctctaggtataaacctgacatcatctttccacccggcttacctccaccagatctccccagttctgtctccatcttctacctgcagctgctctgttctcatggtcactgctgcatcactgagtctggacccttgttatcattttcaaactggcctccacgccctgctccctcctccacctccccatcctcttgtctcccctcccctctgaatccagcccagcggggcttctcctgcctccatcacatcacagaagtcc

SEQ ID NO: 35565 - DNA, 401 bp, Homo sapiens
ggagctccaccgcggtggcggccgaggtactcctccatggcgctggcgtctggccgcgcagtcaggccacgcccccagcgtagacgcacaccggcgtcggagctttccgcctattaccgggcagcgattgggtcgctataccgcatgtcacgccaaggacgcactctcattggccaatcgagtttctgccatttgttcattgcctcctgagcgtattccagttactttcaggctcggggagtgaaggcctcgttgagagaaggtctcattcggtgttttgggaagagagtcgtgtgggcccaggtatcgtatcggcgacacgagagagacgggcggtgtgacagccttccactacctgcacgagtgtattggtctgtctgctatcagctatgccgttgccc

SEQ ID NO: 35566 - DNA, 431 bp, Homo sapiens
atacgactcactatagggcgaattggagctccaccgcggtggcggccgcccgggcaggtacgttgaccatctttgcagcagggctgttttgtctatatgatgaaaacgagaaacagcgcccgacacctggcccttcgcagctctcgcctttcgcagctctcgcctaacaggaaagggaagaaagagccccgcgtacttttttttttttttttttttttgcaaatgacttagatttaatcatcggaagcaaactaaatggaaaccttacaatagagaagaattacatgtcagtgtcttttggaaaactgagctgggacagaaagggactgggggctgccccccaacctgatcccttctgaacaaagacgtccacagtgttcctggcactctggctcaggaaaaggggagactctgctgattctgtgcattgt

SEQ ID NO: 35567 - DNA, 157 bp, Homo sapiens
atacactcactataggcgaattggaaccttccaccgcggtggcggccgcccgggcaggtactttttttttttttttttttttttttttgagggggaatgctggaaattgtaatgggtatggagacatatcatataagtaatgctagggtgagtggta

SEQ ID NO: 35568 - DNA, 229 bp, Homo sapiens
atacgactcactatagggcgaattggagcttcaccggtgggggcggccgaggtccaaatttttagtttgaaaaaatgaaaaagttctggagctggatgatggtgttggtagcacaacattatgaaggcacttaataccactgaactatatagacagttaaaatgacacaatttggtgttattattttaccaccataaaatgtttttgaataaaaaaagctaaaacaggc

SEQ ID NO: 35569 - DNA, 156 bp, Homo sapiens
atacactcactatgggcgattggacctccccgcggtgggcggccgaggtacgcggggagacggaacttcagccgctgcctctgttctcagcgtcagtgccgccactgcccccgccagagcccaccggccagcatgtcctctacttcacttcaaccg

SEQ ID NO: 35570 - DNA, 150 bp, Homo sapiens
ctcactatagggcgaattggagctccaccgcggtggcggccgacgtactttgtactttttttttttttttttttttaaagacaaggtcttgctctgttgtccaggcctggacaacacagcatgtgcagtggtgtgaacatggctcactgc

SEQ ID NO: 35571 - DNA, 248 bp, Homo sapiens
tcactatagggcgaattggagctccaccgcggtggcggccgttatatgtggatttttaactatgcagtgtcagcaccccaacactactcaagggtcaactgtaaagtatttttttaatccaagaatgaacaatgttttcaaagacataatgctatttaacacttaaacatacttatagtgcaaacaataacttttaatatgccaatagggaaaccataaataatttcatggtgcactttgctttttat

SEQ ID NO: 35572 - DNA, 421 bp, Homo sapiens
atacgactcactatagggcgaattggagctccaccgcggtggcggccgaggtacagtagtgcactcttggctcactgtagcctcgacctccggggctcaagtgatcctcctgccttagccccacaagtagtgggactataggcacacagcaccgtgcccatctaagtttttgtattttatgtagagacaaggtttcaccatgttgcccaggctgatcttgagctcctgagctcaagtgatctgcccaccttggactcccaaaatgctgggattataggcgtaaaccaccatgcctggccttaaatcaactttagagtcaacatctcttatcactggagcttctggagaaactccatcacgtggtgctctctttcctgatgtgttgtgcccaaatagcttgttctcatcagatgacttattt

SEQ ID NO: 35573 - DNA, 413 bp, Homo sapiens
tacgactcactatagggcgaattggagctccaccgcggtggcggccgaggtacagcctttccgtttagtgaggttctactaaagggaatgccaactttgtggttgacatgggtgatccttgggtttcgtcacgcatgaaattaacaaataaaaaatgttcaaggccaggtgtggtggctgatgcctgtaatcccaatgctttggagtctgaggtggaaggattgcttgaggccacaaatttgagaccagcctgggcgaaagagcgcaaccctgtctctaccaaaaaaaaacaacaacaaaaaacttagctgagtgtggtggtacctgcccgggcggccgctctagaactagtggatcccccgggctgcaggaattcgatatcaagcttatcgataccgtcgacctcgaggggg

SEQ ID NO: 35574 - DNA, 418 bp, Homo sapiens
ctatcactactatagggcgaattggagctccaccgcggtggcggccgcccgggcaggtacgcggggagagctctcggactttcggaagctctcggtgtgggtgcgacccgagagaaggagcggggctggtggggctgctgcagccgtcacaggaaataagtaatcatggtgctcaacagtttggataagatgattcaactccagaaaaacactgccaacatcaggaatatttgtgttttggctcatgttgaccatggaaaaactactctggctgactgtcttatatctagcaatggaatcatctccagccgcctagcaggcaagttaaggtacctcggccgctctagaactagtggatcccccgggctgcaggaattcgatatcaagcttatcgataccgtcgacctcgagggggggc

SEQ ID NO: 35575 - DNA, 233 bp, Homo sapiens
tatagggcgaattggagctccaccgcggtggcggccggaccttagaaagtcacacatctgcgcgcctgtgcggtccctgcttctgcggatgctgaggcacgtaaaaaaatttgaagaagggaattcgagcggtcgcccgggcaggacgcgggatttttggtttggtttttctctggttttgggtgtgatgtaagaagagtttttttgtttagattgtattaacatcaattttt

SEQ ID NO: 35576 - DNA, 337 bp, Homo sapiens
tggagctccaccgcggtggcggccgcccgggcaggtacaccacccagtggcttcattctggcttagccgcagaggcaagaaagggaccccacttgctcccatgcccacctcaagaaaaaacataaaacaattttttttaaaaaagaaaagaaatctacctcagttgacaggattccacctttagggtttcttcaacttttaagtcttacctgttgagtgtaacttttgtagcatcttgcttttccaagcaagctagtgaggcatgacagagcagaagtctgtaaatgtccctgtgatggacctctttctagcatgttgcagttttattttttaataa

SEQ ID NO: 35577 - DNA, 418 bp, Homo sapiens
tacgactcactatagggcgaattggagctccaccgcggtggcggccgcccgggcaggtacgcgggggagaacatcatgaaatccaacattgacaagaagttctctgcgcactacgacgcggtggaggcagagctcaagtccagcaccgtgggtctcgtgaccctgaatgacatgaaggccaagcaggaggctctggtgaaggagcgggagaagcagctggccaagaaggagcagtccaaggagctgcagatgaagctggagaagcttcgagagaaggagcgtaagaaggaagccaagcggaagatctccagcctgtccttcaccctggaggaggaagaagagggaggcgaggaggaagaggaggcggccatgtatgaggaggagatggaaagggaaagagatcaccacgaagaagaga

SEQ ID NO: 35578 - DNA, 413 bp, Homo sapiens
tacgactcactatagggcgaattggagctccaccgcggtggcggccgtcacggtctgcgcgatcatccagctcaccacgatgtgcgtgttcttggggtcggggagcatgcccttggccgtatcgtactttttttttttttttttggtataacagctctttatttctgtgagttctactaggaaatcatcaaatctgagggttgtctggaggacttcaatacacctccccccatagtgaatcagcttccagggggtccagtccctctccttacttcatccccatcccatgccaaaggaagaccctccctccttggctcacagccttctctaggcttcccagtgcctccaggacagagtgggttatgttttcagctccatccttgctgtgagtgtctggtgcgttgggcctccag

SEQ ID NO: 35579 - DNA, 221 bp, Homo sapiens
aattggagctccaccgcggtggcggccgaggtacacgtagagatcattaatacttttaaaagttctacattaattgacttggaatccttagaaatggagtggtgacatgtcagtatgagaacaggcaaaaggtaaatttttttttttttacaaccttaagttaatctccaataataaaaatttgctgatcatgaattatactccagttgttgggtcttata

SEQ ID NO: 35580 - DNA, 284 bp, Homo sapiens
cgactcactatagggcgaattggagctccaccgcggtggcggccgaggtacgcggggagggagctggagaaagaaggagggggagagactgccagagaggaagagaaaagaaaggaagaaacattagaaagaaaaaggagggaaaacggtataaagagagatcaattacccacccttaaatagctagattggggggggaggggggtggtgtaaggtccagggttgctgcgaacagaaatcatcttatacaggtgtatacgcagcgtgtctcttaaatgagtgta

SEQ ID NO: 35581 - DNA, 404 bp, Homo sapiens
actactatagggcgaattggagctccaccgcggtggcggccgcccgggcaggtacgggggagctggccggggctcacggtgtttgacccgtcggtcgtgcgtgagaggaaagggaaggaggaggtcccgaatagcggtcgccgaaatgttccggtgtggaggcctggcggccggtgcttttgaagtagaagctggtgcccttggtgcggaccgtgtgcgtccgaagcccgaggcagaggaaccggctcccaggcaacttgttccagcgatggcatgttcctctagaactccagatgacaagacaaatggctagctctggtgcatcagggggcaaaatcgataattctgtgttagtccttattgtgggcttatcaacagtaggagctggtgcctatgcctacaag

SEQ ID NO: 35582 - DNA, 400 bp, Homo sapiens
tatagggcgaattggagctccaccgcggtggcggccgcccgggcaggtacttgcttctgccacctccgctgagtaacctgtaggcataggtgtcagatgggcagggagtccagtggtcacatttttgccttttggggactggagctttgaggacaggcctctccccgatgctgccgatgctataggcagcactggacaggggtgcatctggaatgagctctgcgagcaggtacatgctgcacgcacacaaaagacactgagaatatttttaagaagccacacatcacagaatttgatagtcaacttcatgcaatgagttccttttatatttcatcaaaaggtttacttgcccctttacttgttccaaatttccaagattaactcttaaatttgaaaaagt

SEQ ID NO: 35583 - DNA, 407 bp, Homo sapiens
cgactcactatagggcgaattggagctccaccgcggtggcggccgaggtactttttttttttttttttttttttttttggcttacttaacacatattttatttattggaaaaggcattgacacttagctcagattcttaaccttgccatccatatctaagtaagctattttatttttttattttattttgggtggagtcttgctctgtcgcccaggctgcaacctttgcctgtcaggttcaagcgattttcgtgcctcagccttccaagtagctaggatcataggcatgcaccaccacacacaggtaattgtgattttatttttttatttttagtagagacgggctttgaccacgttgactaagctagtcttgaactcgtgaccttaggtgatccacctgccttagg

SEQ ID NO: 35584 - DNA, 401 bp, Homo sapiens
  misc_feature 187: n = A,T,C or G
gactactatagggcgaattggagctccaccgcggtggcggccgaggtacgcgggatagagtttgcttctgagtgtctgctttgtttagtagaggtgggcaggaggagctgaggggctggggctggggtgttgaagatggctttgcatgcccagcgatgcgcctccctgtgggatgtcaataccctgngaaccgggagtggcccttggctcactgtgttctgcatgggttggatctgaattaattgacctttcttctaaatcccaaccgaacttcttccaacctacaaactggctgtaaccccaaatccaagccattaactacacctgacagtagcaattggctgattaatcactggccccttgaagacagcagagtgtccctttgcaatgaggaggagatc

SEQ ID NO: 35585 - DNA, 408 bp, Homo sapiens
actactatagggcgaattggagctccaccgcggtggcggccgcggccactgtaaccaagaaagtggctaagagcccaaagaaggccaaggttgcgaagcccaagaaagctgccaaaagtgctgctaaggctgtgaagcccaaggccgctaagcccaaggttgtcaagcctaagaaggcggcgcccaagaagaaataggcgaacgcctacttctaaaacccaaaaggctcttttcagagccaccactgatctcaataaaagagctggataatttcttacaaaaaaaaaaaaaaaaaaaaagtacctcggccgctctagaactagtggatcccccgggctgcaggaattcgatatcaagcttatcgataccgtcgacctcgagggggggcccggtacccagcttttgttc

SEQ ID NO: 35586 - DNA, 307 bp, Homo sapiens
gcgaattggagctccaccgcggtggcggccgaggtacgcgggggatccgtcctgatgacacagttcgaactcttatcttcatccacgtccgaggacagcaccatctcttcaactggccaattacatgatccaataaattcccctttgaggctttgtggttaacgttaggttgggctgcgttacttctggggccttcgtgtccgaggccagcacaccaagaccactggccggcgaggccgcaccgtgggtgtgttcaacaagaaataagtctgtaggccttgtatgctaataaatagtttatatacca

SEQ ID NO: 35587 - DNA, 412 bp, Homo sapiens
gactcactatagggcgaattggagctccaccgcggtggcggccgaggtacagcagaactgcatgatcagctgtatggtagccttgaaaaccaacaggccacaatcacagtgaaaacctcaggttggcagccactggaggatacaaaatgagtttggatctccttcaatgccccattcccagagaactgtcattatttgacctgctggtagttccctaaaggacgtgcaaggatgtttttatttgactggacacttgaagcttgccctgtatgaacagcccccatcttcccatgcttgtcaaaaatcagaggcaactaacactgcggcttcctgagagtctcactctgtcacccaggctggagagcaattgcacaaacacttggctcactgcagcctcaacttcttgtcctca

SEQ ID NO: 35588 - DNA, 420 bp, Homo sapiens
cctatcactactatagggcgaattggagctccaccgcggtggcggccgaggtactcagtggcttgagctccagggtcactttctgcccagaggctgactgatagtgcccatcactgcaagggcctagatgggctgggcgcaagcttcccagcatgctctgcagctttttggtcttcacctttcccttactctcaaggaggctggttaatctatccaggaattccagaagttgttgctctcgttgccggggctctggccaggcagggtccagggctgcagcccgagagaagccctccagggcctccccataactctcttcatatttatgcaacgtcgccctgttcagatgaaggtcaggattgctagacgcttttctgtcaactttctctgcttgggcataggcactgagggcttgctggg

SEQ ID NO: 35589 - DNA, 402 bp, Homo sapiens
tatagggcgaattggagctccaccgcggtggcggccgaggtacgcggggagctttgctcactcagctaatgggatggcaaaggtggtggtgctttcatcttcaggcagaagcctctgcccatccgctctagaactagtggatcccccgggctgcaggaattcgatatcaagcttatcgataccgtcgacctcgagggggggcccggtacccagcttttgttccctttagtgagggttaattgcgcgcttggcgtaatcatggtcatagctgtttcctgtgtgaaattgttatccgctcacaattccacacaacatacgagccgggagcataaagtgtaaagcctggggtgcctaatgagtgagctaactcacattaattgcgttgcgctcactgcccgcttt

SEQ ID NO: 35590 - DNA, 415 bp, Homo sapiens
actactatagggcgaattggagctccaccgcggtggcggccgaggtactcccctagcgcaaagtggcacgtcgccagctggatgagcgccctctgatgctccagggtcccctgccctgtgatctgtggctgagaaatggatccctggagagctgctaagtgatgcgggctggctatcgcctttttatattgaccctgatagatgatcatatcagtgaggaagattcttaaccaaagccaagtatccgtcttccaggccaagcaaatccttgtaaattctttgtcaaggaattctagggaatagagcaactcccagctctccctggccaatttaaagctttctaacacttcagtggagttagcaagttcggctttattgactacaatgtgacgatttcttcctttcgccgaacagt

SEQ ID NO: 35591 - DNA, 408 bp, Homo sapiens
actactatagggcgaattggagctccaccgcggtggcggccgcccgggcaggtacgcggggagagcgaccaaacgtcccgcgccttccaggccgcactccagagccaaaagagctccatggcggcggcggccaagcccaacaacctttccctggtggtgcacggaccgggggacttgcgcctggagaactatcctatccctgaaccaggcccaaatgaggtcttgctgaggatgcattctgttggaatctgtggctcagatgtccactactgggagtatggttcgaattgggaattttattgtgaaaaaaagcccatggtgctgggacaatgaaggctttcgggaaaacagtcgaaaaaagtggggaatcaatcggttaaaggcactctaaaaccaaggtgattcgtg

SEQ ID NO: 35592 - DNA, 394 bp, Homo sapiens
actactatagggcgaattggagctccaccgcggtggcggccggcaccttggccgcgttcagagtgccgatgagctcccccagactctgcttccgcccgttcatcttccagtttcccccaacgaagaacttcctggagggcgccatggcgctggagccgaggcgctgaaggtcagtgtctgcccccgcgtacctcggccgctctagaactagtggatcccccgggctgcaggaattcgatatcaagcttatcgataccgtcgacctcgagggggggcccggtacccagcttttgttccctttagtgagggttaattgcgcgcttggcgtaatcatggtcatagctgtttcctgtgtgaaattgttatccgctcacaattccacacaacatacgag

SEQ ID NO: 35593 - DNA, 174 bp, Homo sapiens
actactatagggcgaattggagctccaccgcggtggcggccgaggtacttcttgtggtgcagcagcagaaccaagccgccccctagcagcatgagccctggggcacccagggccactgccatgatgtccaggactagtggggacaagccgtccactggagggaagcccacaccc

SEQ ID NO: 35594 - DNA, 392 bp, Homo sapiens
tactatagggcgaattggagctccaccgcggtggcggccgaggtacaccaaggcgaccacagcagctgcaacctcagcaatgaagatgaggaggaggatgaagaagaacgtcacgagggcacacttgctctcagtcttagcaccatagcagcccaggaaaccaagagcaaagaccacaacgccggctgcgatgaggaagtagcccacgttgacaaactgcatggcactggacgacagtggcccgaagatcttcagaaaggatgccccatcgattgacacccagatgcccactgccaacagggctgcaccacacagaaagatgagcaaattgaagaggatcatcatggtcttaatgaagctgaagcactgcatggtggctcctgttcagggct

SEQ ID NO: 35595 - DNA, 358 bp, Homo sapiens
ggcgggcgggtccaccatacatggattggagtgcattggtcccagtaataagtgttgtgccagctcggggtcagtgaaggccagagacagcagattgggcctgacccccaccaaatcatcaagctcttacatggtatctatgtagtctccctgaatggtttggcgttggctcttcacatacctttggtcaatttcctcttgagctttagatatttctgccatcatttcactctgtgagggcaatgtctttagacctttaaatacctgagtggcccagcgtccttggagctctgaaatgggcataatggctcctaagggctgaatcaagcctatgattgcaagacttggcctttccagg

SEQ ID NO: 35596 - DNA, 360 bp, Homo sapiens
gcggccgacgtgcgctgtcatcatgaaggcggcctccggggaagccaagcccaccgttcataaaggcggggctggaactcaaactctaactaagctcagttggggcagccaagaagcccaagaaggcggctggccgcgcaactccgaataatagcgcttaagaaaccaccgaagaaagcgaagaagccggccgctctagaactagtggatcccccgggctgcaggaattctatatcaagcttatcgataccgtcgacctccagggggggcccggtacccagcttttgttccctttagtgagggttaatcgcgcgcttggcgtaatcatggtcatagctgattcctgtgtgaaattgttat

SEQ ID NO: 35597 - DNA, 299 bp, Homo sapiens
attggagctccaccgcggtggcggccgcccgggcaggtacatggttcgaagccactatgtaacagaaacactctctgaagaagaggctgggttccctttagcttacacagtgaccatccacaaagacttcggcacttttgagaggctcttcaaggcgatttatatgccccaaaatgtctactgtgtgcacctggatcacaaggcgacggatgcctttaaaggtgcagtgaaacagttactcagctgcttcccaaatgcttttctggcttccaagaaggagttcggatcgtctatggggg

SEQ ID NO: 35598 - DNA, 620 bp, Homo sapiens
gactcactatacgactcactatagggcgaattggagctccaccgcggtggcggccgaggtacgcgggcaatgacatgtgtgctagagcttactctgagaaggtgacagagttcatgttgtgtgctgggctctggacaggtggtaaagacacttgtggggtgagtcatccctactcccaacatctggaggggaaagcataattcacccattcctgtgttgagcacatgcttactgggcacctgctacgtgaccagcattgccgtagaccctgggaagcagcagtgaacagtcaggagctgtggatggtgctggacagaaaaatgacagggcctggctcagggtgattctgggggtccacttgtctgtaatggtgtgcttcaaggtatcacatcatggggccctgagccatgtgccctgccttgaaaagcctgctgtgtacctgcccggtcggacgctctagaactagtggatcccccgggctgcaggaattcgatatcaagcttatcgataccgtcgacctcgagggggggcccggtacccacctttagttccctttaatgagggttaattgcgcccttggcgtaatcatggtcatagctgttaactgtgtgaaattgtta

SEQ ID NO: 35599 - DNA, 402 bp, Homo sapiens
gctccaccgcggtggcggccgcccgggcaggtacgcgggggagactagaattcctggaggctaatccactgtgctattgatctgatgttcagagtgtagtggtcctcctggctccatgctgatttccaaggactgagaatgcacatatggatcgaacaaatctagaaattcaagcttcttctatttgctaaacaagaatacagttgcatatcaacctaaattgatataaagtataaactgggaaaagtttctacccaaagattttgtgaaacacctggcattctacctacaacagcatattatggcatcccttaacccctaaaagacctttgtcctcagcaaatgtgaccgtcttcttggatcctcagcaatgcaagggttcagagtgccagcatctctaca

SEQ ID NO: 35600 - DNA, 469 bp, Homo sapiens
ctactatagggcgaattggagctccaccgcggtggcggccgaggtacagagacagaggaaggggggctccaaagccaagagagggaaccccacctgccacagataccagctaggtatatatacagaggctggaggaggcagtgtctgatttgcacaggctcaggggattggtttgactaggcatgtcattcacgtagcccgcaggaaaagctggctctcccaccctagccttttaatatgcaaatgcagggcaccatgatcttctacacaggtggggatacttcggggtgtccatgtatccaggaatgtggggaaagggcaagaagtccacaggaatcgccatgtttgggtggacccactttctaatggctggcatttggatatcgggtaactggcctggctttaagagctggagctttacaagaaacttttccagacgtgctttaaaaaacaaaaacttcctaaggac

SEQ ID NO: 35601 - DNA, 476 bp, Homo sapiens
tacactactatagggcgaattggagctccaccgcggtggcggccgaggtactcctccatttatccgccatgataagtgccagccgagctgcagcagcccgtctcgtgggcgccgcagcctcccggggccctacggccgctctagaactagtggatcccccgggctgcaggaattcgatatcaagcttatcgataccgtcgacctcgagggggggcccggtacccagcttttgttccctttagtgagggttaattgcgcgcttggcgtaatcatggtcatagctgtttcctgtgtgaaattgttatccgctcacaattccacacaacatacgagccgggagcataaagtgtaaagcctggggtgcctaatgagtgagctaactcacattaattgcgttgcgctcactgcccgctttccagtcgggaaacctgtcgtgccagctgcattaatgaatcggccaacgcgcggggagaggg

SEQ ID NO: 35602 - DNA, 438 bp, Homo sapiens
agggcgaattggagctccaccgcggtggcggccgaggtacaccaaggtggtgcattaccggaagtggatcaaggacaccatcgtggccaacccctgagcacccctatcaactccctattgtactgttcaaaaaggaatgccccacaagtgttaccatggcaaaactggaagagtctacaatgttacccagcatgctgttggcattgttgtaaacaaacaagttaagggcaagattcttgccaagagaattaatgtgcgtattgagcacattaagcactctaagagccgagatagcttcctgaaacgtgtgaaggaaaatgatcagaaaaaaaaaaaaaaaaaaaaaaaaaaaaggtacctgcccgggcggccgctctagaactagtggatcccccgggctgcaagaattcgatatcaagcttatcgataccgtcgacc

SEQ ID NO: 35603 - DNA, 504 bp, Homo sapiens
gactactatagggcgaattggagctccaccgcggtggcggccgaggtacgcgggggctcctcagcggatgtggcagccccgagccatggctctcgccgtccgagtcgtttattgtggcgcttgaggctacaagtccaagtatcttcagctcaagaagaagttagaagatgagttccccggccgctctagaactagtggatccccccgggctgcaggaattcgatatcaagcttatcgataccgtcgacctcgagggggggcccggtacccagcttttgttccctttagtgagggttaattgcgcgcttggcgtaatcatggtcatagctgtttcctgtgtgaaattgttatccgctcacaattccacacaacatacgagccgggagcataaagtgtaaagcctggggtgcctaatgagtgagctaactcacattaattgcgttgcgctcactgcccgctttccagtcgggaaacctgtcgtgccaactgcattaatgaatcggc

SEQ ID NO: 35604 - DNA, 480 bp, Homo sapiens
ctatacgactactatagggcgaattggagctccaccgcggtggcggccgcccgggcaggtacctaccagaacctcgacatggtggtgtcatctgccattggatgccagctgggcagagacccccacgggctccgagtcgtggtggtcaccgccgagaaaattgttcacatccacattctggctgtgtagccactccacagatgggtggtctcttgggatcagaatgcccctccactcatgagactcttcattttgtccactttgacaggaaaagtgggaatgtatgcagagctctcaaaagaaacaaaaaaggccaaaacggtgccttcagccacatcctctgaattggccctgacttggactaaatgcactaatgcaaaatcccttgacaaaagcgcataggttatttcaaaccagcattgtttttatgtaacctggtttaccgcatcttctcagcagcttctgaccactgctcaattt

SEQ ID NO: 35605 - DNA, 517 bp, Homo sapiens
ctcactatacgactactataagccgaattggagctccaccgcggtggcggccgatgtacgcgggcctcccagatggctgctgctgccccttcagtccaggcctgtgatggttaattttataggcttaactgggctaagggtatccagatagctggtattatttctgggcgtgtctgtgagagtgtttctggaaaagaatagcattttaatcaatggactgagtaaagaaggttgctcttaggccaggcgtggtggctcacatctgtgatcccagcactttgggaggttgaggcaggtggatcacttgaggtcaggagttggagactagcctggccaatatggcgaaaccccatctctactaaaaatacagaaattagcagggcatggtggtgcatgcctgtaatcccagctacttcgggggctgatgcaggagaatctcttgaacctgtgagggcaaggttgcagtgagccaatatcgcgccactgcacttcaacctaggtgacagagcgagacttc

SEQ ID NO: 35606 - DNA, 438 bp, Homo sapiens
actactatagggcgaattggagctccaccgcggtggcggccgcccgggcaggtactttttttttttttttttttttgacaattgctttattcagaggatcccccaaggatgcaacggatcgctgctgtgtcactcatgactgttgctacaaacgtttggagaaacgtggatgtggcaccaaatttctgagctacaagtttagcaactcggggagcagaatcacctgtgcaaaacaggactcctgcaaaagtcaactgtgtgagtgtgataaggctgctgccacctgttttgctagaaacaagacgacctacaataaaaagtacctcggccgctctagaactagtggatcccccgggctgcaggaattcgatatcaagcttatggataccgtcgacctcgagggggggcccggtacccagcttttgttccctttagtga

SEQ ID NO: 35607 - DNA, 285 bp, Homo sapiens
ctactatagggcgaattggagctccaccgcggtggcggccgcccgggcaggacctgccctgccctctgctatgaaggtctctgccttgtggatcatgggactccccttggaggatctgtgcaaaggggggctgggacacaaaggataatgtcctatttgggagggcatgaagcaaaggaactggacagggattggtgggcttgtgaaactgatgtttatcttggatacccacgaagaggctgggtctattcacatgaagatcgaaaagggaccctgcttccaata

SEQ ID NO: 35608 - DNA, 258 bp, Homo sapiens
actatagggcgaattggagctccaccgcggtggcggccgacgtacatggtggccaatcaaacaggccacacccttgttgcaagtcccgcgagaggttcagagaactctcccgttttacttctgcctcaggcctcaaccaccacaggaagtggaactctatacctccacctctcctggctgggtggagcctctaaactcaagattctgccttgagctggggctctcccctcaagttgacagggtccagagcaaaaccta

SEQ ID NO: 35609 - DNA, 463 bp, Homo sapiens
tacgactactatagggcgaattggagctccaccgcggtggcggccgcccgggcaggtacagtagtgcactcttggttcactgtagcctcgacctccggggctcaagtgatcctcctgccttagccccacaagtagtgggactataggcacacagcaccatgcccatctaagtttttgtattttatgtagagacaaggtttcaccatgttgcccaggctgatcttgagctcctgagctcaagtgatctgcccaccttggactcccaaaatgctgggattataggcgtaaaccaccatgcctggccttaaatcaactttagagtcaacatctcttatcactggagcttctggagaaactccatcacgtggtgctctctttcctgatgtgttgtgcccaaatagcttggtctcatcagatgacttatttgctatgatatatatacttcaagagctgctatatgtat

SEQ ID NO: 35610 - DNA, 346 bp, Homo sapiens
tacgactcactatagggcgaattggagctccaccgcggtggcggccgaggtactttgtttttttttttttttttttttttggacttctaaaaaataatggctatactaattcatgtttccatgaactgtgtgcaagagttcccttttttctacatctttgccaacatttgttatttattatgattattcttttttttgagatggagtcttgctctggtgtccagactatagtgcacttggcgcattcttggctcactacaaccgtctgacttccgggttcaagcaatttttctgcctaagcctcccgagttgctgggattacaggttgtccaccactgcacccagg

SEQ ID NO: 35611 - DNA, 448 bp, Homo sapiens
tatagggcgaattggagctccaccgcggtggcggccgcccgggcaggtactccagggtgccccccaactcctgcagccgctcctctgtgccaggccctggaaggaactttcgctccacctcaatcaagccctgggccatgctacctgcaattggctgagcaaacgtttgctgagttcccaaggatgcaaagcctggtgctcagctcctggggcgtcaactcagtacttgcggtcagtggcgttgctgatctgggggaaatacgcgtcgaccaccaagaagaaggccgaggccaggaaggccagcaccccgatggcactgccatagcggcaggcatcctcgttgcggttgaacacgcagtacctcggccgctctagaactagtggatcccccgggctgcaggaattcgatatcaagcttatcgattccgtccacctcgagggggggccc

SEQ ID NO: 35612 - DNA, 428 bp, Homo sapiens
attggagctccaccgcggtggcggccgaggacaaatcctggtgcaactacattcactctaattatctttcttgctacctctgtagcaagagcacgtgaaaatccaactaatcctcctttactggcactgtaaacggactggccagagttgccttttaagccaacaatgcttcctacattaacaatagaccctccctgttgttgaatcatagtcctcatggcagctttacaggtcagcatggaacccaagaggttagtatgaagctgagataccatatcttcagtttttgttcttactaaaagaccatccctgttaataccagctgcatttaccaagaaatttactcgacctaaatgtttctccatctcttcaaatgtattttgaacatcatgttctttagcaacattacagctaaatgccaaatgatc

SEQ ID NO: 35613 - DNA, 444 bp, Homo sapiens
actactatagggcgaattggagctccaccgcggtggcggccgaggtacttttttttttttttttttttttttgcaaatgggccctttatttctgaactgccaccactgcacggataaggccacttgggttgcaggcacactgtggagtgtcaggggacagagaggagaggggctgcacaccaaaactgccctgtcctcacggagaggaaaagcggccgaagtacggggggcctgtggatgctgcgcctctccgaacgcaacatgaaggtgctccttgccgccgccctcatcgcggggtccgtcttcttcctgctgctgccgggaccttctgcggccgttctagaactagtggatcccccgggctgcaggaattccatatcaagcttatcgataccggcgacctcgagggggggcccggtacccagcttttgatccctttagtga

SEQ ID NO: 35614 - DNA, 455 bp, Homo sapiens
gactactatagggcgaattggagctccaccgcggtggcggccgaggtacatttcttcaatcacaaaatttttcaccaatctatttatgtctagtatcagaaagttaagcaaggagattgcaaaccaacacaacacctttagtctggattttcccggagccccatttgtgttagtgtcctcgggctactgtaacaagttctcaataatgtggtagcttcaaacaacaggaatggaatctctcatagttcagaagtccagatcagtttcactgggctaagatcttggagtcatcagttctggctccttctgaagctctagggagcagtctgatttagctcttccagcttctggtggcttctctctcccgggatgtggacacatcactcagttcttggcaacctggttgcattcttaatttggtcctgtaattcttcattgctgtattaactttctga

SEQ ID NO: 35615 - DNA, 349 bp, Homo sapiens
atagggcgaattggagctccaccgcggtggcggccgcccgggcaggtacacttttcaccccacttcctctgccatcttggtcctgctgtcctgaggagctacctgtgcaccctgcctccggctctcctgagcagagagatcctgatggctgactcagaagcactcccctcccttgctggggacccagtggctgtggaagccttgctccgggccgtgtttggggttgttggggatgaggccattcagaaaggaaccagtgtctcccagaaggtctgtgagtggaaggagcctgaggagctcaagcagctgctggatatggagctgcggacccctggctagatacataagc

SEQ ID NO: 35616 - DNA, 457 bp, Homo sapiens
actactatagggcgaattggagctccaccgcggtggcggccgcccgggcaggtacttgctgaggcaactgcaacgcgcagcatggctgtttcaaatattagatatggagcagcagttacaaaggaagtaggaatggacctaaaaaacatgggtgctaaaaatgtgtgcttgatgacagacaagaacctctccaagctccctcctgtgcaagtagctatggattccctagtgaagaatggcatcccctttacggtttatgataatgtgagagtggaaccaacggattcaagcttcatggaagctattgagtttgcccaaaagggagcttttgatgcctatgttgctgtcggtggtggctctaccatggacacctgtaaggctgctaatctgtatgcatccagccctcattctgatttcctagattatgtcagtgcccccattggcaagggaaagcctg

SEQ ID NO: 35617 - DNA, 437 bp, Homo sapiens
ctactatagggcgaattggagctccaccgcggtggcggccgcccgggcaggtacgcggggggagtccttgcagggtggcctgggtgactgctcaccagcccggccctccccagggttctgggccagagcctccctggccgttggagcgggagctgtgggtggaacacttctgaattgggagattgcctcggacctccagacgccgaacatctcagcacatcccgctctgggctttaaacgtgacccctcgcctcgactcgccctgccctgtgaaaatgttggtgcttcttgctttcatcatcgccttccacatcacctctgcagccttgctgttcattgccaccgtcgacaatgcctggtgggtaggagatgagttttttgcagatgtctggagaatatgtacctcggccgctctagaactagtggatcccccgggc

SEQ ID NO: 35618 - DNA, 455 bp, Homo sapiens
ctactatagggcgaattggagctccaccgcggtggcggccgcctccaggaacgccgaccactccactttaggtatcatacgcgccacgaagttggggttgaattccacagggcagatacggacctcggtggcctggaggcgcagggggaagccacgggaccccaccccccgcacatgcgagctcagcagattgtgggtaagcagtttcatgtcgccgcacaaactcccccgcgtacctcggccggggcagaagttgagaccacccagcagaggagctaggccagtccatctgcatttgtcacccaagaactcttaccatgaagaccctcctactgttggcagtgatcatgatctttggcctactgcaggcccatgggaatttggtgaatttccacagaatgatcaagttgacgacaggaaaggaagccgcactcagttatggcttctatggctgc

SEQ ID NO: 35619 - DNA, 449 bp, Homo sapiens
tatagggcgaattggagctccaccgcggtggcggccgaggtacgcgggggcagttccttggagagcttggagccgcgcgccggagggaataggaaagcttggttacaacccgggacacccggagcttcaggatggttcgtaccttactagttacccagcaagtcactaacatacagaaacattcatcatgagaagcaagaaacactacccatcccttctgcattttagcaacttgttactcctaagcaacagtgctcacatcactgaggtctgtgaacaaagttcacattttacatccttaaagagcatttgttgttatctgaacctctgctctgctcttcccaaagcataaactagtgtttttatgaataataaaatcttcgtacctgcccgggcggccgctctagaactagtggatcccccgggctgcaggaattcgatatcaagct

SEQ ID NO: 35620 - DNA, 429 bp, Homo sapiens
ggcgggcgcccgggcaggtacgcgggggagaaccccaataataacccgatccaccccaacctgcggtccaccgtctactgcaacgctatcgcccactgcggtgaggaggagtgggacttcacctgggagcagttccgaaatgccacactggtcaatgaggctgacaagctccgggcaagacttggcctgaagcaaaagagttgtggatcctgaacaggtacctcggccgctctagaactattggatcccccgggctgcacgaattcgatatcaagcttatcgataccgtctaccctcagggggggcccggtacccagcttttgttccctttagtgagggttaattgcgcgcttggcgtaatcatggtcatagctgtttcctgtgtgaaattgttatccgctcacaattccacacaacatacgagccggg

SEQ ID NO: 35621 - DNA, 378 bp, Homo sapiens
ggcgggcgggcgcgcgggggggttccggttgtctggagcccagcggcggatgtgagagtccgtagggagcagcttccaggatcctgagatccggatcagccggggtcggagcggctgctcaagagttactgatctatgaaatggcagagaatggaaaaaattgggaccagagacctgttaccattgaacaaggaacatcataatggaaatctcacagacccctcttcagtgaatgaaaagaagaggcgggagcgggaagaaaggcagactattgtcctgtggagacagccggtcattaccgtgcagtatatttctctggaaatcctggtaatcttgaaggaatggacctcaaaattatggcattgtcaaagcattgtg

SEQ ID NO: 35622 - DNA, 444 bp, Homo sapiens
cactactatagggcgaattggagctccaccgcggtggcggccgcccgggcaggtacaaggttaatattattttgatgaattctgtattcattcaactgctaaatcacaggatacaagacctgggttgaactttttcttaaatagtttacatgggcagtccctggtttgctgggcagtttcctgtctcatcaaatccctggcaagctgggagggagggaggagatgctgagcagcctctatggtccttcttgaaccaagctgctccctgctggatatgacaatggctcagaagcagactagcaattctcaaaggacagggagaaaaatcaccacagttgctggcagaaaacagccagcgtacctgggccgctctagaactagcggatcccccgggctgcatgaattcgatatcaagcttatcgataccgtcgacctcgagggggg

SEQ ID NO: 35623 - DNA, 455 bp, Homo sapiens
actactatagggcgaattggagctccaccgcggtggcggccgcccgggcaggtacgcggggcctttccgggctgtctgacacgatgcaagtgtcagcttgtgttggccggttgcctttctttcgcaagaggggaaaatatcctcacagactttctgtgttctcagagacgatcttcttccctagaaagaagtcgcttacggttggcgtttccctcaggcagcgccgtgggcagcccacaggcccttgtaaggcgcgcgccgcggtcccgcctctttcctttcggccgctctagaactagtggatcccccgggctgcaggaattcgatatcaagcttatcgataccgtcgacctcgagggggggcccggtacccagcttttgttccctttagtgagggttaattgcgcgcttggcgtaatcatggtcatagctgtttcctgtgtgaaattgttatc

SEQ ID NO: 35624 - DNA, 461 bp, Homo sapiens
cactacttagggcgaattggagctccaccgcggtggcggccgcccgggcaggtactgctcgcctccgttcttttgatgtaagcgccctgcgagctttatttgaatgttcctgttcctcttccctttgtgccttccgcttctttccctttttggaaggtgctctgtcatctacatcttcttccagtgtttttctttgttcttcaggttttgcacatgatcttttcactcagggcccttggatattctgactgctgagaactttttggcttcggctttgtctagaaacttctgatatttggcaatcttctcatccagtgctttaataacggctttggtgtcgtttcccacattttcctcctcaggctccgaggaagactcttccgcatcatctctttggtgctcctgttcctcctcctcttcatcataaaagctctgaaactcttcctcaagatctgacacct

SEQ ID NO: 35625 - DNA, 383 bp, Homo sapiens
actacttagggcaattgagctccccgcggtggcggccgaggtacttggttcttttttttttttttttttgctgctccagtcaatgaaagggacactttattgaggctccagggccacggggcctgggcaggaggctgcccttcaaggaaagaaccaccttatttgaccttcttcttgggacgcacgttgttggtgtgaccacactttttcttgcgacagttgaccactcgagggtgaaggcgagcatagcacttgcggcagatcatcttgtcgcaggtgtatttttgggcaagctggcggaaagaaggctcaataatgccacctcgcaggcgcaacaccatgtgcagggtggactctttctggatgttgtagtcagagagagg

SEQ ID NO: 35626 - DNA, 461 bp, Homo sapiens
actactatagggcgaattggagctccaccgcggtggcggccgaggtacgcgggggatcacctgaggttgggagtttgagaccagcctgaccaacgtggagaaaccatgtctctgctaaaaatacaaaattacctgggtgtggtggctcatgcctgtggtcccagctacttgggaggctgaggcaggagaatcacttgaacccgggaggcggaggttgcggtgagctgagatcgtgccattgcactccagcctgggcaacaagaacgaaactccatcacataaaaaaaaaaaaaaaaaaaggtccgcgggggaggcgaacaatggcggagctgggcgaagccgatgaagcggagttgcagcgcctggtggccgccgagcagcagaaggcgcagtttactgcacaggtgcatcacttcatggagttatgttgggataaatgtgtggagaagccagggaatcgc

SEQ ID NO: 35627 - DNA, 426 bp, Homo sapiens
ggcggccgggcaggtactcgctgtggcagctgcaacgcgcagcatggctgtttcaaatattatatatggagcagcacttacaaaggaagttggaacggacctaaactacatgcttgctaaagaagggggcttgagctctatagataggctggggagcacttaattttttccaatttaaaaaggggattgtttcctggggctttaacccccctgacctttgataaggatgggacaaagccatctgggcagtcaggggcaaggactgttggaggagagttagcccaagtataggctctgcccagatgccatcacatccctgattctgcggatgcttcgaagcaccttccctgagaagggaagaggggaatctttggactaggttcttggctccagacctggaatccacaaaagccaaaccagctcatt

SEQ ID NO: 35628 - DNA, 461 bp, Homo sapiens
tacactactatagggcgaattggagctccaccgcggtggcggccgcccgggcaggtactggcttctttaacagcgatgaacgttcttttccctcctgggttgttcatccacgacagtctctccctgtgctccttcatcacctttccctctctctttgatggctacagagtggtagggcctggtgcttagtcgatgaaggaatgggaacccatttacagtgctggttgaaaattcccgccagagcgctggaaacctggcgctcagatcttctctggtgatgaagaggcgaggaatcaagtgactgatctggaagaaatatctcgcagcactgcagctaacatcacagaacttaagtgtgttttgtgtgtgtgcccacacgtagacaaatgtgtacctcggccgctctagaactagtggatcccccgggctgcaggaattcgatatcaagcttatcgataccc

SEQ ID NO: 35629 - DNA, 409 bp, Homo sapiens
actatagggcgattgagctccccgcggtggcggccgaggtactgacttctttttcttttcttcttgcctgcttcgttcagccttgacaactcccttttctgctgcatcaggctttcctttagctcgatatgcagcaatatccttttggtatttttccttcagcttggcagccttcttttcataaggctgcttgtcatctgcagcagggttatttccacatatgttccaggtgtttcgtaacatcaccaatggacaggccaggaggctctcctttgatttttgggcgatactcacagcacaataggaagaaggccgaaggaggcctcttgggtgcattgggatccttgaacttcttttttggctcccctttgggagggatataggccttcattactctttcataacgggc

SEQ ID NO: 35630 - DNA, 453 bp, Homo sapiens
ctactatagggcgaattggagctccaccgcggtggcggccgcccgggcaggtacttttttgattcttcttttttccctggctctcatcatcctgcccagcttcagtccattccagagtcgaccagaagctgggtctgaggattaccagcctcacggagtgacttccagaaatatcctgacccacaaggacgtaacaaaaaattctggagaccccaagtggtgaagtccagactgagggagccacctggagccaaggatgcaaatggctcaacaaggacactgcttgagaagatgggagggaagccaagacccagtgggcgcatccggtccgtgctgcatgcagatgagatgtgagctggaacagaccttcctggcccacttcctgatcacaaggaatcctgggcttccttatggctttgcttcccactgggattcctacttaggtgtctgccc

SEQ ID NO: 35631 - DNA, 194 bp, Homo sapiens
actactatagggcgaattggagctccaccgcggtggcggccgaggtacagtgccatttcttagaaatcactcctcacgggaacacacacttatgagtgacgtgtagagattttagttagttagttagttagttagttattatgtgcgcggggaggtggggggacggagtttggctcttgctgcccaggctacag

SEQ ID NO: 35632 - DNA, 448 bp, Homo sapiens
cgactactatagggcgaattggagctccaccgcggtggcggccgaggtactcctaggcctctctgggagtggccttctgcgtttttaaattttatttattttaaatttttctttttcttttttttttaagacagagtcttgctctgtcacccagctggagtgcaggcgcgatcttgctactgcacctccgctctaggtcaggtgattttttgctcagcctcctgagtagctgggattataggcgcctgccattacgccaggctaattttttgtatttttagtagagacggggtttcaccatgttggccaggtggtcttgaactcctggccttaagtgatctgcctgccttggcctcccaaagtgctgggattacaggcatgagccaccacgcccagccttctttatttttaagatggggtctcgctctactgtccaggctgcagctgg

SEQ ID NO: 35633 - DNA, 461 bp, Homo sapiens
tacgactcactatagggcgaattggagctccaccgcggtggcggccgcccgggcaggtactttttttttttttttttttttttttttggtttgctaattgctttattcaaaagttgagaccacccagcagaggagctaggccagtccatctgcatttgtcacccaagaactcttaccatgaagaccctcctactgttggcagggatcatgaactttgggcctactgcaggcccatgggaatttggtgaatttccacagaatgatcaagttgaccacaggaaaggaagccgcactcagttatggcttctacggctgccactgtggcgtgggtggcagaggatcccccaaggatgcaacggatcgctgctgtgtcactcatgactgttgctacaaacgtctggagaaacgtggaatgtggcaccaaatttctgagcttcaagtttagcaactcggggagcaaa

SEQ ID NO: 35634 - DNA, 461 bp, Homo sapiens
tacgactactatagggcgaattggagctccaccgcggtggcggccgcccgggcaggtacaatatttaagacacaaattcattaggtatgggctcaggacagcttgctcttatttaatacttgcgtgcttgtggttttgcacaatggatgggtattagagtttgccttggatacttggcattgattagactgttctgaaatttggttatgcttaagccaaaaaattctgtttattgttcttcaacaagaatagatgtagccactttaaaaatagttacattgttttccagattaagtaaatatttcagttaggagaatacatatttttatttttattttcagtttttgagatggagtctcactctgtcacccaggctggagtgccgtggtgtaatcttagctcactgcaacctctgcctcccaggttcaagtgattctcctgcctcagcctcccgagtagct

SEQ ID NO: 35635 - DNA, 465 bp, Homo sapiens
tacgactcactatagggcgaattggagctccaccgcggtggcggccgaggtactttttttttttttttttcccggggagtcggcctcggggctctgctctcctacctcagtctgccctaccctggaatggggaaaatgcggacatgccactcagtccggccgctctagaactagtggatcccccgggctgcaggaattcgatatcaagcttaatcgatacccgcgacctcgagggggggcccggtacccagcttttgttccctttagtgagggttaattgcgcgcttggcgtaatcatggtcatagctgtttcctgtgtgaaattgttatccgctcacaattccacacaacatacgagccgggagcataaagtgtaaagcctggggtgcctaatgagtgagctaactcacattaattgcgttgcgctcactgcccgctttccagtcgggaaacctgtcgtgccag

SEQ ID NO: 35636 - DNA, 452 bp, Homo sapiens
  misc_feature 322: n = A,T,C or G
gactactatagggcgaattggagctccaccgcggtggcggccgggcgcggtggctcatgcctgtaatcctaacactttgggaggccaaggcgggcagatcacaaggtcaggagattgagaccatcctggctaacacggtgaaaccccgtctctactaaaaatacaaaaaaaattagccgggcgtgatggcgggcgcctgtagtccagctactcgggaggctgaggcaagagaatggcgtgaacccgggaggcggagcttgcagtgagccgagattgcgccactgcactcccgcctgggccacagagcgagactccgtctcanaaaaaaaaaaaaaaaaaaaaaagtacctcggccgcccgggcaggtacttttttttttttttttttaaagtaactggtctgtaagtgcatatctctagaacgtccccgcagatgaatgagggccagtggcc

SEQ ID NO: 35637 - DNA, 453 bp, Homo sapiens
tatagggcgaattggagctccaccgcggtggcggccgcccgggcaggtacgcggggcgcttgcgcgggttgagggcggtggctcaggctcctggaaaggaccgtccacccctccgcgctggcggtgtggacgcggaactcagcggagaaacgcgattgagagcagtgtgtggattacactatcactggaaagaattcctaatttgagaaaaaaggaaaaagactggaagatgcaaaccttggttcctgttagtggaaacactgtaaggtcccagaaatggaaaagaaaatgaaataaatcagcagttatgaggcagagcctaagagaactatggcaacatcaggtgactgtcccagaagtgaatcgcagggagaagagcctgctgagtgcagtgaggcgggtctcctgcaggagggagtacctcggccgctctagaactagtggatcccccgg

SEQ ID NO: 35638 - DNA, 453 bp, Homo sapiens
tacgactcactatagggcgaattggagctccaccgcggtggcggccgaggtacttctgcctcagcatctcggagaatgtagttctgctcatctggaaaacagaacagcacatactctgaaaagtgtggacacgtgaagtgtggcaagtgtgacccacaaaattctcgcccatattcagcgtatggaccagtttgctgactgctgggccgggaccacccacatcatgacagaaatgcagggatctgttcaccaacggccagaaatacaaaatcaatccctgagtcaaccagcagatagaaaggctgctttttaggtgaaaggagaaaaagaatgtctataatttggaaaaacaaaaaatgatgaataaaaaaaaaaaaaaggttcgcgggtaactgggtttttaaaatagctgaatgtaatatttcatcaatataacctttcccccattctttg

SEQ ID NO: 35639 - DNA, 319 bp, Homo sapiens
actttggttatggcgctccccgcggtggcggccgaggtactttgtttttttttttttttttttgcttcgggtgaatcactttaatgctgttaacggcaagtctgtaaaaggttcaggacaaagttcttttttctttcttttttaattataaaactaacagctgttagaatctttttttctttttttccttttttctttttccccaccttccaaaatacttctggggagatgcatttttaattttaaaatatataattattgcacaaaccaaccaaagaggttatattaaactaaaggaaatatattacaatagagaaaa

SEQ ID NO: 35640 - DNA, 455 bp, Homo sapiens
tacactactatagggcgaattggagctccaccgcggtggcggccgcccgggcaggtacttttttttttttttttttttttttggattttttaatagagatagggtttcaccaggttggccaggctggtgtcacaactcttgacctcaagtgatctaccacccttggcctcccaaagagctgggattataggcgtgagccaatgggccccggcccacataaaaattttttattagctactacagcttaaagtagctgctatgggagtgtggcctttttgattaaatactagctgatcaaccctagaatataaattcttgttttataacatttagatttaaataacaataagaatgtaagctccatgaaggcaagaatgcctttttattttgttcactgctgtgtctaaaataatgcctggctcaaatatttggtgaatgagtaaatatgctgactt

SEQ ID NO: 35641 - DNA, 446 bp, Homo sapiens
tgccagtgttactttaattggactgccttcgtaattcattgcctctgcttcaacaatgtgcaactcatcctttgcaccagcccctaaactgaccgttcttaaagataactggtgctcattttcatcattatccaccttaaagtgataatctttgtcggcctttagttcacaaccgaaaagatagttctgggggcctcagggggctcattgtccatgtccatcgaatcttccatcgggtgggcggccccccctttaggtagaaaaaaaaggcgcccgtgatataaaaaaacgctgctccaagagaacaaaccgcgcaggacggaatcacaccagggaaaggacgcaggctccccgcgtacctgcccgggcggccgctctagaactagtggatcccccgggctgcaggaattcgatatcaagcttatcgataccgtcgacctcgaggg

SEQ ID NO: 35642 - DNA, 434 bp, Homo sapiens
acgcgggggaatccagaagggaaacttgcactggataattaaaaactgctggggagaaaactggggaaacaaaggagtcatcctcatggctcgaaatattttcaacgcctgtggcattgccaacctggccagcttccccaagatgagactccagccagccaaatccatcctgctctaccaattcttccacgatggcgcagtgtaacgatgcacttcggaagggagttggtgtgctatttttgaagcagatgtggtgatactgagattgactgttcagattccccatttgtttgtgcttaaaatgatccttcctactttgcttctctccacccatgacctttttcactgtggccatcaggactttccctgacaggtgcgtacctaccctaatgggcgttctccaactagcggatcccccgggctgcaagaattcg

SEQ ID NO: 35643 - DNA, 151 bp, Homo sapiens
  misc_feature 92, 109: n = A,T,C or G
ccgggcagggacgcggggaaggccagcttgaagcccagccggtgggaagcggaggcccgcaacgcccaacagagagagcctcgaaacggganccggccgcatttcgagncacagcgggcacagaccccggcagagggacagcgccaggccc

SEQ ID NO: 35644 - DNA, 216 bp, Homo sapiens
actatatggcgaattggagctccaccgcggtggcggccgaggtacactgtgtctctatgtgaatatggacagttagcatttaccaacatgtatctgtctactttctcttgtttaaaaaaaaaaaaaagaaaaaaaaaaaactgtacgcgggggaggggctctgccttctgcagtggcgctgtttgggcccctggcggattgtaagctgctggtttt

SEQ ID NO: 35645 - DNA, 228 bp, Homo sapiens
tacggcgaattggagctccaccgcggtggcggccgcccgggcaggtactttttttttttttttttttggtaatcattgttatcgtttattaaacaacagggccacattcaaacgctttccaattctctctaaataacagcctaacgctgacgtttttgttggcctgtatctcataattatttttatttagaggaatttggtaattggcggggttggggtgggaggtgg

SEQ ID NO: 35646 - DNA, 471 bp, Homo sapiens
cactacttagggcgaattggagctccaccgcggtggcggccgcccgggcaggacgcgggggcctcgacggcatccccttcacagtggatgctacgagccagatccactgcattgaggactttcacaggaagtttgccccaagatgctcagtgtgcggtggggccataatgcctgagccaggtcaggaggagactgtgagaattggtggctctggatcgaagtttttacattggctgttacaagtgcgaggagtgtgggctgctgctctcctctgagggcgagtgtcagggctgctacccgctggatgggcacatcttgtgcaaggcctgcagcgcctggcgcatccaggagctctcagccaccgtcaccactgactgctgagtcttcctagaagtacctcggccgctctagaactagtggatcccccgggctgcaggaattcgatatcaagcttatcgattaccgtcgacc

SEQ ID NO: 35647 - DNA, 569 bp, Homo sapiens
ctatagggcgaattggagctccaccgcggtggcggccgaggtactatttaatatatttctccatgaactttttgtgaaattcagatcgcagtgtgtcatttacaaatcttttgtctttcttctggtcatctacaccttttgcacagttcttgaagacaacgtcatcatcccaccttctttaactttgaagttggcctgaggctgggatggggaaaaggagaaggtgatttgagccaactttcaaagcagtattcaagcagagacctaccctctcatacaaagataaaatacagacagactactcaggatgcccctgaagaggttcgtaaccgtgacttcaggagagagttggaagaaagagagagagctgctgcaagagagaaaaatagggatcgtccaacccgagaacatacaacctcctcttcagtgtcaaaaaagccacggttagaccagattcctgccgccaaccttgatgcagatgaccctctaacagatgaggaagatgaagattttgaagaagaaagtgatgatgatgatactgcagctcttcttgcagaactggaaaaaat

SEQ ID NO: 35648 - DNA, 311 bp, Homo sapiens
ttggagctccaccgcggtggcggccgcccgggcaggtacattcccctctgcgttgaatgatagcgtgtgcgtgttccaccactgtgccctgttcaaagttagctgggtggctgtgccctgctcaaagtcacttgggtgaggggcgcccgtgggagccaaaaatcccatcttacacccaccccctgcacactgtggagttgggctgtgacatgctggagaaaggtgtctttgtctaattattctgcctaaaggcatgccttttgttaattagtaaaaggaagccttatttgtgctctgcaaagtgggggtgc

SEQ ID NO: 35649 - DNA, 464 bp, Homo sapiens
ctactatagggcgaattggagctccaccgcggtggcggccgcccgggcaggtacctctctgcattatcccgccagacactgtattttatgcattcatgtctaggatacagtgtgaaaattaaaaagtttagagggcagatgcaattgtggcaagtgacctgccaataaagcaggtgcagctatagaagctggcataggtatatccttaatggtgctttctccctgggcttgtctttttgttgtttttttccccctatattcagagctccttgagaagtgataaacacctccagctttctaacatcctccccacaccatctcaccatatccatctcccagcatccatctgcattcagctaagggcgggaaactgacccagtgcctgtgttgcagaccatttctgaggtctccaccatccaaggaggcacagccgtcattactgtcctccatgccttcagcagccc

SEQ ID NO: 35650 - DNA, 173 bp, Homo sapiens
attggagctccaccgcggtggcggccgcccgggcaggtacgcgggggagactgtcccaagggtgctgaagaatccagtggcaggggttctggctgctttccatctgaatgtgggatgggaggggtgttcatgatcatttggatatagcaatctacttctgagaaatggaacac

SEQ ID NO: 35651 - DNA, 476 bp, Homo sapiens
  misc_feature 210: n = A,T,C or G
tacgactactatagggcgaattggagctccaccgcggtggcggccggagtggcaaagcaggcaaacacgtcgtcggtgcaggagaagtgggtgaggtgcgggaggatcacggactgaccccggcactggccccacatgtacctcggccgaggtacgcgggtcacacatgacgggtttggcttcatgctggcgtttggggacatggcctgngtgcccttcacctacagcctgcaggcccagttcctgctgcaccacccgcagcccctggggttgcccatggcctctgtcatctgcctcatcaatgctattggttactacatcttccgtggggcgaattcccagaaaaacactttccgaaagaatccttctgaccccagagtggctgtgcttgagaccatctctacagccacagggcggaaactgctggtgtctgggtggtggggtatggtccgccatcccaactatcttggagacct

SEQ ID NO: 35652 - DNA, 413 bp, Homo sapiens
actactatagggcgaattggagctccaccgcggtggcggccgaggtacgcgggggccgccttcgccgctggctccgtctgttggggggcgaacacgccgcggtcctcgtcgtgatggctctgagagattcctctgcgaatctgtttttagctatcaagtggcatccacgcttaaacaggtgaaacatgatcagcaagttgctcggatgggaaaaactagctggtttggtagaagaagctggaggctgacgagtggcggtttaagcccatcgagcagctgctgggattcaccccctattcaggttgatactgcctggatggtcacctctggtgcgcagcaagtgcaaagccagtgggggactttctcacagtttacatagccatccagagatccacagctacgtcactgaattg

SEQ ID NO: 35653 - DNA, 458 bp, Homo sapiens
actactatagggcgaattggagctccaccgcggtggcggccgaggtacttttttttttttttttttttttttttatggcaaaaatatttattattgaacaactgagtgtttcattcacttcacattttacacatacttaacacaagcagaaggggaagtttcagtgtcagaagcaggggtcgttctccttaactgaaagactattaggaggagagcctttggtgattagcaatccaaatttgatattttttaaaacaccattaaaaataaaggttgcctataaaatatggaaacacataatattttctgaaaatctttttggaagaatgtctttttatcttcattggtactatcttagacattttgagggttatttaacacagcattccatctgcttaacatttaaatttagacacactgattatctgttctactctcctgaatagttaagtaccttg

SEQ ID NO: 35654 - DNA, 351 bp, Homo sapiens
actactatagggcgaattggagctccaccgcggtggcggccgcccgggccggtactcgggcatcttcaataccagcaagaagctattcagaagaatgttgaacagtcatcggatctacaggaccagttgaatcatctgttgaaatagaatgacatgtaagagtgctgtaggactcctttgcctaatgctgaggagtaaataccttacacagctggtcctctgggtttggttttttattttcttctccaaaagttaagttagaaaagttctgtgttagggccgggcgcggtagctcacgcctgtaatcccagtactttgggaggccgaggcgggtggatcacgaagttagga

SEQ ID NO: 35655 - DNA, 474 bp, Homo sapiens
actactatagggcgaattggagctccaccgcggtggcggccgcccgggcaggtacgcggggaccaagattaaacgggcatctcagaagaagcacgtgaacccggtgcaggccctcagcgagttcaaagctatggacagcatctaagtctgcccaggccggccgctctagaactagtggatcccccgggctgcaggaattcgatatcaagccttatcgataccgtcgacctcgagggggggcccggtacccagcttttgttccctttagtgagggttaattgcgcgcttggcgtaatcatggtcatagctgtttcctgtgtgaaattgttatccgctcacaattccacacaacatacgagccgggagcataaagtgtaaagcctggggtgcctaatgagtgagctaactcacattaattgcgttgcgctcactgcccgctttccagtcgggaaacctgtcgtgccagctgcatta

SEQ ID NO: 35656 - DNA, 337 bp, Homo sapiens
  misc_feature 232, 247, 303: n = A,T,C or G
tggagctccaccgcggtggcggccgcccgggcaggtacctgattctttgaacatattattgaactccaaaatgaattcgacctccattcaggcttcctgaaatctctgaagttgctgaaatttgtatataattttccttttccaatgcaagatctgctggtgacgggaatgactgtctggttttattatggtttataaattaataaatgggctatttaattctggaaaaaanaaataaaaaatttanggtccgcggggtcctggaacatttatgttccttttaaagaaacaaaaatcaaactntacagaaagatttgatgtatgtaatacatatagc

SEQ ID NO: 35657 - DNA, 552 bp, Homo sapiens
gactcactatagggcgaattggagctccaccgcggtggcggccgcccgggcaggtacgcgggagatccgtgcactgccttcagctctgggttgaacttacagctggactagaggatgggaaggcatcaaaaggaacccagcccaccaggaactaccagcttaggctctgaccaggaaagacaagtgttcaaggctttggggaaacttaaacccaacacgccatttgccgcgacgtcttcaatgggtttggaaacagaggaacaggagcccagcatcatcgggaagctgaaggtcgctggcatgctggcagtaggcaaagaagtcaacctggtcctactgctcaaaaacctgagcagggatacgaagacagtgacagtgaacatgacagcctggaccatcatctacaacggcacgcttgtacctcggccgctctagaactagtggatcccccgggctgcaggaattcgatatcaagcttatcgataccgtcgacctcgagggggggcccggtacccaacttttgttccctttaatgagggttaattgcgcgct

SEQ ID NO: 35658 - DNA, 509 bp, Homo sapiens
  misc_feature 24, 25, 26, 27, 28, 29, 342, 343, 344, 345: n = A,T,C or G
agggcgaatggagctccccgttgnnnnnnccgcccggcaggtacaatttgataagttttgacatacactcttgaaaaaccattaccacagtttaaacaaacaagcaaaaaaactaaacatgtctatcacctcctacttttttctctataatccgtctcacctgccccaagccccatatacattggtatgctttgttacttagattagtttggattttctaaaactatatgtaaatagaataatacattatgtattatttgttgtctggattctgttagctcagcataattatttggaatttcacgtttttgcatacatcagtagttcattttcatattactnnnntggtgttatattgcatacaaatattacaatttgtttatccattcacttgctgatggatatttgggttggttccagttttagctatttcaaataaaaattatgagaacatttatttacaagtcttcatatggatgtatgccttatttttccttaagtaaatacct

SEQ ID NO: 35659 - DNA, 390 bp, Homo sapiens
gactactatagggcgaattggagctccaccgcggtggcggccgaggtacttttcttttctaaaaaaagtctttggttacggatttggtttttggatttgtgtttgtattatctttcctctctcagaaaaagaaatttcatgctttaaataaaatccagagacacaccctttcactgtgatgcaaaaaaggaaagggttcttgttacttgagaatttgtttctgatttaaacaaacgagacttagtttaataaaagaaagagaaaaacaaaagattcccaggttgttatgtgcttcttctgcaagcagagaggcaaatgttaatgacaattccatataccaaaagacacattttttacttcaaagttttgtccttgtgttaggcagtctga

SEQ ID NO: 35660 - DNA, 531 bp, Homo sapiens
gtaatacgactcactatagggcgaattggagctccaccgcggtggcggccgaggtacgcggtggggtggcctgtgcggcgttggtccggtgcgtcctgttctacagctatggccgggccagctgcagctttccgccgcttgagcgccttgtccggagctgcggccttaggcttcgcttcctacggggcgcacgggcccaattcccagatgcctacgggaaggagctgtttgacaaggccaacaaacaccacttctttacacagcctggccctgttaggggtgccccattgcagaaagccactctgggctgggttattgctagcttccggaacgaccttattctgcaccagctattactaccaggctctgagtggagaccccagcatccagactatggcccctgcgggagggaccctgctactcttgggctggcttgcctcggctctttgagctcccttttgcttaattactgggttttctgggcagttttttttttaaagagtttggagtaaaaagaagattaaaaaggaa

SEQ ID NO: 35661 - DNA, 361 bp, Homo sapiens
  misc_feature 128: n = A,T,C or G
gcgaattggagctccaccgcggtggcggccgcccgggcaggtacattgagctctctctggcatgctccccactctagttagaggggctggggtatggagagaccgtcccagccgggcgctgcagcctnctactcctgggcctccttgcgggtcaacttgtagatctcagtgggtcgtcacatgggtgatagtggtggtgagctggagttcttccccactatggacacccagatcgccattggactggtcttctccatagtttttatgggatggtgcatacaagaacatcagagcaaagacatacagattccacatcccatagatgcctgtgaaaaaggcactgttcacttggactgtgatg

SEQ ID NO: 35662 - DNA, 520 bp, Homo sapiens
  misc_feature 207, 216: n = A,T,C or G
ggagcgcgcgtaatacgactcactatagggcgaattggagctccaccgcggtggcggccgaggtacgtgtccaggggatgtcgccaaagcctttggagctggagcagattttgtcatgctgggaggaatgttttcgggtcatacggagtgtgctggagaagtgattgagaggaacggacggaagctcaagctcttctacggatgagnctctgacanccgccatgaacaagcacgcaggaggagttgctgagtacctttctcggggtgtctgcgtaactgcccagacttgccttggtttggtcagatgacacctcctctgggactggctagccagcgttcatgtctacattattgatctcgtcttccggtgtgtgagtcactcacctgtgagctcctagaggtcagcgactaaatctggttccatggggtccttgggccctcggagccctagcacaaggcccactactcagttggctcttaatcaaatctgtgaaacgaaatataaagttgcttttctact

SEQ ID NO: 35663 - DNA, 431 bp, Homo sapiens
  misc_feature 101: n = A,T,C or G
cgactcactatagggcgaattggagctccaccgcggtggcggccgccccgtccaagactatttgtctttgagctctgttctctcacacgtgtccggcctgngctggctggcctcctacctgccctccttcctccgtgtgcccaagtggattattgccctctacactagcaagttctaaccctcctggctgacacgtacgtctctgcttgtcttcccatttggacttggtggtttgtcctgtctcagtgaaacagcagcctttcttgtttacccataccctagatatgaagagaagccctctgctgtgtgtccgtggtgagttctggggtgcgcctaggtcccttctttgtgccttgggtttccttgtccttctttttactttttgccttaatattgaaaaatgctcttggagctaataaaagtctcatttc

SEQ ID NO: 35664 - DNA, 463 bp, Homo sapiens
tacactactatagggcgaattggagctccaccgcggtggcggccgaggtacgcggggctccctgcctcaggctctcaccctcctctcctgcagctccagctttgtgctctgcctctgaggagaccatggcccagcatctgagtacgcggggacaattatgtgtcttggagttgctcttctcgaggagtatctttcagaaagttaagaaggatacccaggaattgaactcagctccacaccaagcagacgtaatagacatctacagaactctccaccccaaatcaacagaatatacattcttttcagcagcacaccacacctactccaaaactgaccacataggtggaagtaaagttctcctcagcaaatgtaaaagaacagaaattataacaaactgtctctcagaccacagtgcaatcaaactagaactcaggattaagaaactcactcaaaaccatgcaac

SEQ ID NO: 35665 - DNA, 415 bp, Homo sapiens
tacactactatagggcgaattggagctccaccgcggtggcggccgagagctaattccctcttggcttcaaaatccatcctatgcttggagatgctggggctgggattctacaaaccacattctggctttgtgccctgataggctcagcccccagggggagctagaaggaatctgctaggctaaaggaggaagtaggaagtggccccttgctcacttcctgtttgcttcctgttcactttctatcagcttcctgtcccttgccagacaggttgctaaccctagcagtgctttttcttcacccaggcagtggcaactcctcccagaaacatttcaatgcagtttttggttttttcaacactcacaaaagcagcctcatgggggtcccctcagagacaccaacaaaacaatcttccct

SEQ ID NO: 35666 - DNA, 448 bp, Homo sapiens
ttggagctccaccgcggtggcggccgaggtacacctgcaaggctgtcaacagtcttggagaagccacctgcacagcagagctcattgtggaaacgatggaggaaggtgaaggggaaggggaagaggaagaagagtgaaacaaagccagagaaaagcagtttctaagtcatattaaaaggactatttctctaaaactcaaaaaaaaaaaaaaaactcaagatagtaaaagcacctagtgtgatagattatcggttaggtcatttgtgggttgattcttcagaaacagcagttgatacctagcagcgttattgatgggcattaatctatgttagttggcaccttaagatactagtgcagctagatttcatttagggaaatcaccagtaacttgactgaccaattgattttagagagaaagtaaccaaaccaaatatttatctgggcaaag

SEQ ID NO: 35667 - DNA, 445 bp, Homo sapiens
ctactatagggcgaattggagctccaccgcggtggcggccgcccgggcaggtaccatcatccgatgtatagcctttccagcgaactttgtaaagaactttaccctcctcggtcttcatgtccaggatcttctccacctcgaacacatcctctccgtcctcctcactgtcgccaaaggcctccgctcctctcgcggctgcgtcattatcttcgcccactactccaactccttcttcgacttcggccaactcctcagtgctgtcggcagctgacacagggactgcggtcacccttgctccctccgcaacctgctccatcctagcagctccgcaaaccgccgagaaaaacccgctgcgacaaacaccccagcagcccccgcgtacctcggccgctctagaactagtggatcccccgggctggaggaattcgatatcaagcttatcgat

SEQ ID NO: 35668 - DNA, 471 bp, Homo sapiens
ctactatagggcgaattggagctccaccgcggtggcggccgaggtacttttctcgtcctttccccagggtgcacgtaaccctcaagcactaggaccgtgcggaatccaggctgcgatggcaccttcatttaccgcccgcattcagttgttcctcttgcgggagctaggctttctcataggcttagtaggccgagcagctttagtcttagggggcccaaagtttgcctcaaagacccctcggccgctctagaactagtggatcccccgggctgcaggaattcgatatcaagcttatcgataccgtcgacctcgagggggggcccggtacccagcttttgttccctttagtgagggttaattgcgcgcttggcgtaatcatggtcatagctgtttcctgtgtgaaattgttatccgctcacaattccacacaacatacgagccgggagcataaagtgtaaagcctggggtgcc

SEQ ID NO: 35669 - DNA, 221 bp, Homo sapiens
cgactactatagggcgaattggagctccaccgcggtggcggccgcccgggcaggtactgacatcaaggactcaaaagcttattaccacctgcttgagcaggtggctccaaaaggagatgaagaaggtgttcctgctgttgttattgacatgtcaggactgcgggagaaggatgacatccagagggcagaatgcatgctgcagcaggcggagaggctgggct

SEQ ID NO: 35670 - DNA, 440 bp, Homo sapiens
gcgaattggagctccaccgcggtggcggccgcccgggcaggtacgcgggtgataccttccgagtggagtttctggtggtccctgtgggaggcctctcatttttagttaatcacgatttctctcctcttgagatcctctggaccttctccatctacctggagtccgtggctatccttccgcagctgcctatgatcagcaagactggggaggccgagaccatcaccacccactacctgttcttcctgggcctctatcgtgctttgtatcttggcaactggatctggcgcttttactttgagggcttctttgacctcattgctgtggtggccggcgtagtccagaccatcctatactgtgacttcttttacttggacctcggccgttctagaacctgtggatcccccgggctgcaggaattcgatatcaagcttatcgatacc

SEQ ID NO: 35671 - DNA, 230 bp, Homo sapiens
atacactactatagggcgaattggagctccaccgcggtggcggccgaggtacagattagtgtgcacagagatctctgtagaaagagtagctgccctttctcagggcagatgatgctttgagaacatactttggccattacccccagctttgaggaaaatgggctttggatgattattttatgttttagggacccccaacctcaggcaattcctaccttttcacctgaccc

SEQ ID NO: 35672 - DNA, 463 bp, Homo sapiens
ctactatagggcgaattggagctccaccgcggtggcggccgcccgggcaggtacttttttttttttttttttttttgagacggagtttcgccctttcacccaggctggagtgcagtggggcgatctcggctcactgcaaccttcaccctccagtttcaagcgattctcttgcctcagcctcccaagtagctgggattacaggcacccaccaccaagcccagctaatttctgcatttttagtagagatggggtttcgccatgttggccaggctggtcttgaacttctgacctcaggtgatccacccgccttaacctcccaaagtgctgggattacaggggaaaaggcaccgcgcccagcctgcacagcactattttgaggacttacttagttttgaaacatgaatttttctttcatctcactcacctttacctaataaatcatttaaaaatgcaaataacacct

SEQ ID NO: 35673 - DNA, 451 bp, Homo sapiens
ctatagggcgaattggagctccaccgcggtggcggccgaggtacgcggggacacaggcccaggtgtgtaggccacagcagccgcagtcctgaaaggctgcaacacccagacctccaggagaggccaggcccaggatgcctcgcctgttcttgttccacctgctagaattctgtttactactgaaccaattttccagagcagtcgcggccaaatggaaggacgatgttattaaattatgcggccgctctagaactagtggatcccccgggctgcaggaattcgatatcaagcttatcgataccgtcgacctcgagggggggcccggtacccagcttttgttccctttagtgagggttaattgcgcgcttggcgtaatcatggtcatagctgtttcctgtgtgaaattgttatccgctcacaattccacacaacatacgagccgggagcatag

SEQ ID NO: 35674 - DNA, 523 bp, Homo sapiens
gggcgaattggagctccaccgcggtggcggccgaggtgctttactcgaaaaaagcggagtaagagaaactaacgttgacttagcttgagccattcagaatggacagtttcttttttccattatgtaaagaatccagattatatcgcaataaccggaataaacttttacaactggaatatacaaaaacattttgaaatgttttttcatctactgatgttttatataaacaggattttttaggaataatttatacacagaaagtcattttatgtaacaaattggacatgttattacctttttttttcttacttaaaaaaatttttttttaacaagaaaactcagaaaatgcattatttgcggtgcatccattccataccgccttctggttcgattttttgtatcccagacaaagggatacccagaggtagacaaactctggcaaacctcttacctcaacctcactggcttagaaagcagacaggtgttttcaccgggcgtctattccaccggtggatgtgtgtgc

SEQ ID NO: 35675 - DNA, 348 bp, Homo sapiens
ataggcgaatgggagctccaccgtggtggcggccgaccgggcaggtacctgatttttcatgagccttacagacacacagagacacatacacattgatcttaaaattattctcagtcactgatatgcaaaggaccacactgtctctgcttacaggagtatttagaaatgtttcacattttactgaagacatagagatgatgctgctgcttaggtgccttttagcaagctatgcaaacaatcctgataaaacaagatacatagagagttaatctggcttctgagaatttaccaagtgaacagagtacgcgggggatgatcgtggactacaaggcgttcataccgggtggg

SEQ ID NO: 35676 - DNA, 622 bp, Homo sapiens
atacgactcactatagggcgaattggagctccaccgcggtggcggccgcccgggcaggtacggccagggctattggttgaatgagtaggctgatggtttcgataataactagtatggggataaggggtgtaggcgtgccttgtggtaagcccgcgtaccatcttttccagagagagaaagtggaggtccagctgccagagctctaccacaaaataggtgttggcgcaatggcatggtctccacttgcctgtggaatcatctcaggaaaatacggaaacggggtgcctgaaagttccagggcttcactgaagtgctaccagtggttgaaagaaagaattgtaagtgaagaagggagaaaacagcaaaacaagctaaaagacctttccccaattgcggagcgtctgggatgcacactacctcagctagctgttgcgtggtgcctgagaaatgaaggtgtgagttctgtgctcctgggatcatccactcctgaacaactcattgaaaaccttggtgccattcaggttctcccaaagatgacatcacatgtggtaaatgagattgataacatactgcgcaacaagccctacaggaagaaggactttagatcataaggcaatgcatg

SEQ ID NO: 35677 - DNA, 602 bp, Homo sapiens
tacgactcactatagggcgaattggagctccaccgcggtggcggccgcccgggcaggtacgcggggacacagggctcttgctcttgcagaatccacaggtctttcttgaggaaatctgtagacagaactttgtgctgcgtttttatctacggaaggaacagacgagtgtcgctcctagaaatctagcactggagaaacgaggaaaattcttccagcgatggtctgccactcagagctgaggaagcttttctactcagcagatgctgtgtgttttgatgttgacagcacggtcatcagagaagaaggaatcgatgagctagccaaaatctgtggcgttgatgacgcggcgtcagaaatggagctggtgaatatgcaggttttgatgagacgcagccaacagctgaatctggtggaaaaggaaaagtgattaaacttttaaaggaaaaatttcattttaagaaaataatcatgattggagatggtgccacagatatggaagcctgtcctcctgctgatgcttacattggatttggaggaaatgtgatcaggcaacaagtcaaggattacgcccaatggtatatcactgattttgcagagctgct

SEQ ID NO: 35678 - DNA, 524 bp, Homo sapiens
tacgactcactatagggcgaattggagctccaccgcggtggcggccgaggtacgcggggagagaccagagctgccaccgctgctgcttccaggagtgtgcaggtggcagctgccgctgagcccgcggcggaggatggcagggcttgttccagaaggcttgagggtccccgagtgcaccgccctaccaccaatttctggtttttcctgtgggagcccaaggagcaagggcagaatgaggaacatgatgtttcttaccgacagttactcatgacgtctccatccaggactgaggggggcatgcttctccatctaggactgggggcatacttctccatccagtattgggggtcttactcctacatacaggacttgtgggtcatgctgcttcatccaagacctgaggggtgttcttttctgcgcttccttggatggcagtctttcccttcatgtttatagtgacttaccattaaatcactgcgccgcttgttcctgctcaaaggcttcggttgcaggacaggatttgg

SEQ ID NO: 35679 - DNA, 606 bp, Homo sapiens
ctatacggcgaattggagcttcaccgcggtggcggccgcccggcaggtactgagtataaaacaatataaaacaatatgagaaggtctctctcttccctcaagagtgtatgactttgctgcccaggatgatcttgaactcctggcctcaagctattaatttcttcccaactcagcctcccaaagtgtgggattacaggcatgaaccacagcgcccagcttaacaggatttttcagagagaaaaagttttttaattttaatgaaatccaccaatttatctattttttcttttacggcatgtgcttttggtgtaatgtctaaaaactatacctacgcctaggttgtaaagatagtctgttttcagttttatagctttccattttacatttagatatatgatccattttgagttaagtttgtattacatgtaaggttggggttcctttgttttggtctttgacaaatggaagtccacaacatttattgaaactcttcttcctccattggttttaagataaatccgttggccatacttctgaatgtctatttatggattccctatcttattttattgatgtgtatttttgtctctcctccatggatacatg

SEQ ID NO: 35680 - DNA, 425 bp, Homo sapiens
aattggagctccaccgcggtggcggccgcccgggcaggacaccatcccttccattggactggctttgttggaagaaaagctcagatatagcaatgagaaataccaaaagtttaaggcagtggaagaaagcctgcgtaaagagctggtggatatgctaggtgatgatggtgtgttcttatatccctcacatcccacagtggcacctaagcatcatgtccctctaacacggcccttcaactttgcttacacaggtgtcttcagtgccctgggtttgcctgtgacccaatgcccactgggactgaatgccaaaggactccctttaggcatccaggttgtggctggaccctttaatgatcatctgaccctggctgtggcccagtaccttggccgctctagaactagtggatcccccgggctgcaggaat

SEQ ID NO: 35681 - DNA, 451 bp, Homo sapiens
ctatagggcgaattggagctccaccgcggtggcggccggcatgctgcagacccgtcagggcgatgtacgcggggctcttcctttctccgccatcgtggtgtgttcttgactccgctgctcgccatgtcttctcacaagactttcaggattaagcgattcctggccaagaaacaaaagcaaaatcgtcccattccccagtggattcggatgaaaactggaaataaaatcaggtacctgcccgggcggccgctctagaactagtggatcccccgggctgcaggaattcgatatcaagcttatcgataccgtcgacctcgagggggggcccggtacccagcttttgttccctttagtgagggttaattgcgcgcttggcgtaatcatggtcatagctgtttcctgtgtgaaattgttatccgctcacaattccacacaacatacgagccgggag

SEQ ID NO: 35682 - DNA, 521 bp, Homo sapiens
actatagggcgaattggagctccaccgcggtggcggccgcccggcaggtactacttctccaaactcatagaatttatggacactttcttcttcatcctgcgcaagaacaaccaccagatcacggtcctgcacgtctaccaccatgcctcgatgctgaacatctggtggtttgtgatgaactgggtccctgcggccactcttattttggtgccacacttaatagcttcatccacgtcctcatgtacctcggccgctctagaactagtggatcccccgggctgcaggaattcgatatcaagcttatcgataccgtcgacctcgagggggggcccggtacccagcttttgttccctttagtgagggttaattgcgcgcttggcgtaatcatggtcatagctgtttcctgtgtgaaattgttatccgctcacaattccacacaacatacgagccgggagcataaagtgtaaagcctggggtgcctaatgagtgagctaactcacattaattgcgttgcgctcact

SEQ ID NO: 35683 - DNA, 718 bp, Homo sapiens
  misc_feature 554, 625: n = A,T,C or G
cgcgcgtaatacgactcactatagggcgaattggagctccaccgcggtggcggccgcccgggcaggtactcagaattgaccaattcaggaggtgtaaaaataaacagtgttctcttctctaccccaaagccactactgaccaaggtctcttcagtgcactcgctccctctctggctaaggcatgcattagccactacacaagtcattagtgaaagtggtcttttatgtcctcccagcagacagacatcaaggatgagttaaccaggagactactcctgtgactgtggagctctggaaggcttggtgggagtgaatttgcccacaccttacaattgtggcaggatccagaagagcctgtctttttatatccattccttgatgtcattggcctctcccaccgatttcattacggtgccacgcagtcatggatctgggtagtccggaaaacaaaaggagggaagacagcctggtaatgaataagatccttaccacagttttctcatgggaaatacataataaaccctttcatctttttttttcctttaagaattaanactgggaaatagaaacatgaactgaaaagtcttgcaatgacaagaggtttcatggtcttaaaaagatactntatgtggttgaagatgaaatcattcctaaattaacccttttttaaaaaaaaacaatgtatattatggtcctgtgtgttgaaattaaaaaaaaa

SEQ ID NO: 35684 - DNA, 446 bp, Homo sapiens
cgactactatagggcgaattggagctccaccgcggtggcggccgcccgggcaggtacttttttttttttttttttttttttttgggacaagatcttgctgtcacccaggatggagtgcagtggcatgatcatggctcactgcagccttgacctcccaggctcccaccttagcctcccaagtagctgggaccacaggcacgtgccaccatgcccagctaatttttattttggtagagacaaggtttcaccatgttgcctaggtaggtttcaaactcctggactcaagtgatcctcctgcctcggccttccacagtgttgggattacaggaataagccactgtgcccggccctttttctcttctgtaacagagtttattactgcctagctagcaggttatttggccctcacatgtgttgaggcaaactctatactatattcttactct

SEQ ID NO: 35685 - DNA, 429 bp, Homo sapiens
gagctccaccgcggtggcggccgaggtacgcgggggtaaccacctgggaaaacttcacagaaaatgagagtttcagatactgagaatagaaccactaagaagcagaaaagagaagatattctcgtgggggagaacaacggctgggaggggaggaagcatggccaaggcaaagaggtgggcattaataagaactgcttcttgctgccgccatatgaagaaggacgtgttcgcttccccttcctccatgattgtaagtttcctgagacctcgccagccatgctgaactgaatacaacatgtttaagaccacagaacatctgcataggctgtaaatttcgttgaatgatggatgcaaagatggaagacagatggatagaggaaaagacagaatcagatactggatgagttagtacctgcccgggcggccgct

SEQ ID NO: 35686 - DNA, 452 bp, Homo sapiens
atacactactatagggcgaattggagctccaccgcggtggcggccgcccgggcaggtacgcggggggctgaggcaggagaatcgcttaaacttgggaggcagaggttgcaataagccgagattgctccactgctctccagcctgggcaacacgagcgaaactccatctcaaaaaaaaagaagaagaaaagaaaaatggcaacccaggtatgcaactagaaaaatccagactatggaaaaaccctgcaggataaaagatcaatttcttcagcaaataaattgtctatggtgtgtgtgtgtgtgtttgaagtggggagttagaggcgtgagtgagcataagccaacatattcattattattattattattgttaaacttttaagttcaggggtacctcggccgctctagaactagtggatcccccgggctgcaggaattcgatatcaagcttat

SEQ ID NO: 35687 - DNA, 464 bp, Homo sapiens
actcctatagggcgaattggagctccaccgcggtggcggccgaggtactcgcccagctccttatagagggtctccatgttagaatgcatcatccgcagcttgttatactgttcctgtgcatccttcacaaagctggtcattttttcaacaaacttgtctttttcatctgtggcagctgggaaattctgaacatcacgttccacatcagaaatttgtttcttcatctgatctaggttcttttgcaagttttcagcagaaactcggctggctttctccacatgggcaagctcgtctggaaaacttgaagacatcgggatagtcattctcccccgcgtcctgcccgggcgggccgttctagaactagtggatcccccgggctgcaggaaattcgatatcaagcttatcgataccgtcgacctcaagggggggcccggtacccagcttttgttccctttagtgagggt

SEQ ID NO: 35688 - DNA, 446 bp, Homo sapiens
actcctatagggcgaattggagctccaccgcggtggcggccgcccgggcaggtacgcgggtggttgggggaattggaggcttctaggagaggagctggaggccacggttcaggaagtcctggggagactgaagagccaccagtttttccagtccacatgggacactgttgccttcattgttttcctcaccttcatgggcaccgtgctgctcctgctgctgctggtcgtcgcccactgctgctgctgcagctcccccgggccccgcagggaaagccccaggaaggaaagacccaagggagtggataacttggccctggaaccctgaccctgtgtctcctgcccggtggcagtaacaaagccttctgtctgcccagaaaaaaaaaaaaaaaaaaaaaaaaggttccttggccgctctagaactagtggatcccccgggctgcaggaat

SEQ ID NO: 35689 - DNA, 423 bp, Homo sapiens
actactatagggcgaattggagctccaccgcggtggcggccgcccgggcaggtaccaggccgcccattgtgtccttgcccaggaccccgagaaccaggcgctggcgaggttttactgctacactgagaggaccattgcgaagcggctcgtcttgcggcgggaatccttcggtgaaaaggactctttgtcgaggctggtctttccttcttgtcccgggcctcacctgcacccagcgcccgaaacccttcaagggacaacgctggaccgtaccttggccgctctagaacttaggggttcccccggctggcgggattccatatcaagcttattgataccggcgacctcgagggggggcccggtacccagcttttgtgccctttagtgagggttaattgcgcgcttggcgtaatcatgggcatagct

SEQ ID NO: 35690 - DNA, 447 bp, Homo sapiens
tacactactatagggcgaattggagctccaccgcggtggcggccgcccgggcaggtacgcgggggggaatgtaagggccacttcagcaacagaaaggagtggtggagcggcttctcatcagaaaaacagaactttcagtgcctgacttgagatgtaaacttgatgggaaaaattattttagttttggaaagatcctcttcagaaataccactatcttcctgaagtttgatggagaaccttgtgacctgtctttgaatataacctggtatctgaaaagcgctgattgttacaatgaaatctataacttcaaggcagaagaagtagagttgtatttggaaaaacttaaggaaaaaagaggcttgtctgggaaatatcaaacatcatcaaaattgttccagaactgcagtgaactctttaaaacacagacctttttctggagattttatg

SEQ ID NO: 35691 - DNA, 478 bp, Homo sapiens
tacactactatagggcgaattggagctccaccgcggtggcggccgaggtactcagagtgaggattttctgcaacctgcgtttgtccctccagcatctgctctggctccatggcggaccctgcaagtcacagtccccggataccagtccgcgcccaagccgttcgttcttaagagccctgcactgcgccaccagctcccagcacaaacagctccggccgctctagaactagtggatcccccgggctgcaggaattcgatatcaagcttatcgataccgtcgacctcgagggggggcccggtacccagcttttgttccctttagtgagggttaattgcgcgcttggcgtaatcatggtcatagctgtttcctgtgtgaaattgttatccgctcacaattccacacaacatacgagccgggagcataaagtgtaaagcctggggtgcctaatgagtgagctaactcacattaattgcgttg

SEQ ID NO: 35692 - DNA, 455 bp, Homo sapiens
tacgactcactatagggcgaattggagctccaccgcggtggcggccgaggtacgagggcatccctgggtggccgagcccatcaggcccaccccaggctctagtgaggagtgcggtggctgtccaggacatctgaggacatcgctgtggggcaggcattgtgggatgtgtgtagctcagtggaggtggggaggaacggggagagcaggtgctggcagggaatgaaagccctacagtgtaagagctggatgaaacttcagagctcatctagtcaaagtccctcattttacagatggggaaactgaggcactgagtggggaacatgactccccctcggagacaaagccagggctggaagctgtgtcttcagagcctcaaccctatgctttttttctcctagagtatgctgccttccaaaatcaaatattgagcccaagaagacatgtccttcataccc

SEQ ID NO: 35693 - DNA, 289 bp, Homo sapiens
acgactcactatagggcgatattggagctccaccgcggtggcggccgaggtacaaagatgaatgcaacacggtgcccgccctgttgagcacatagttcagctgccggccccgcggcggcagcgcgctgcagcccaggctgatgtagacaggcagcttctcctgggtcagcgacagccggtacttttttttttttttttttttcggcctaaaagcggtagaaatttaataaatagatatgaattgattgattcattaatagtataaaaagaaaatttgggggtggttttt

SEQ ID NO: 35694 - DNA, 445 bp, Homo sapiens
acgactactatagggcgaattggagctccaccgcggtggcggccgaggtacacgctgcccaagggcgttcgtaacgggaatgccgaagcgtgggaaaaagggagcggtggcggaagacggggatgagctcaggacagagccagaggccaagaagagtaagacggccgctctagaactagtggatcccccgggctgcaggaattcgatatcaagcttatcgataccgtcgacctcgagggggggcccggtacccagcttttgttccctttagtgagggttaattgcgcgcttggcgtaatcatggtcatagctgtttcctgtgtgaaattgttatccgctcacaattccacacaacatacgagccgggagcataaagtgtaaagcctggggtgcctaatgagtgagctaactcacattaattgcgttgcgctcactgcccgctttc

SEQ ID NO: 35695 - DNA, 303 bp, Homo sapiens
ctatagggcgaattggagctccaccgcggtggcggccgcccgggcaggtacgcggggggttctgccctgcctgaggaggaggacacagcacaagggcacattgcccatggctgggaacatgacccagcctgaaagatacaggggatcatgttaaaaatagcagtattatttttcgtctcaatggtattgtaactaagttatttactcctcctgctcctcacccctgtagggaaaccttggagaggagagtggcaggtgggctgcctgctgtgttaagaggacttaatttgtgatgtaaggcac

SEQ ID NO: 35696 - DNA, 436 bp, Homo sapiens
  misc_feature 32: n = A,T,C or G
agctccaccgcggtggcggccgaggtactttnttttttttttttttttttttttttttttttttttttttttttttttttttttttttttttttttttttttttttttttttttttttttaaaaaacccaaaacttttttggggggcctaatggggcccttttaaaaaaaaccggggtgccccacccccccccctttggggttaggggggggcccctccccggaaccccccccggaatcggggggaaccaattttgggggcccctattcccccagtccggggggtttttttttttttaccctgggccccccaatttttctttttttggcccgggggggggggcccccttttccccagggtgcctttttgagggggggggggctttaaacccaaagggggggcccaagggggggtttttttgggcaccttttcaaaa

SEQ ID NO: 35697 - DNA, 638 bp, Homo sapiens
cgactactatagggcgactccgagctgcggcggccgaggacgcgggcactcctctctctcttcctctctcacacgttctccaacccaaggaggccagacagagggacgtggtcactctctgaaaagttcaacttgagagacaaaatgcagtggacctccctcctgctgtgcagggcttttcctctcccaggcccagtatgaagatgaccctcattggtggttccactacctccgcagccagcagtccacctactacgatccctatgacccttacccgtatgagacctacgagccttacccctatggggtggatgaagggccagcctacacctacggctctccatcccctccagatccccgcaaggactgttggaggagagttagcccaagtataggctctgcccagatgccatcacatccctgatactgtgtatgctttgaagcaccttccctgagaagggaagaggggatctttggactaggttcttggctccagacctggaatccacaaaagccaaaccagctcatttcaacaaaggagctccgatgtgaggggcaaggctgccccctgccccagggctcttcagaaagcatctgcatgtgaacaccatcatgcctttataaaggatccttattac

SEQ ID NO: 35698 - DNA, 509 bp, Homo sapiens
  misc_feature 481: n = A,T,C or G
cgactcactatagggcgaattggagctccaccgcggtggcggccgcccgggcaggtactaagcttgacagcttcctaataattaaaaactcttctgatgctatcagtggttatgttcaaaaatgtcaatttttaaatattatagaataaaatgtgccaacattttagaagatttgcataactcagtgaaccaatacttttcaaatgaccaaaacataatgttacaaaatcatgcatggataaaaggtgcattgaaaatgcaaatgaggccaggtgtggtggctcatgcctctaatcccagcattttgggaggcagaggctggaggatcacttgaggccaggcatttgagaccagcctggccaacatagcaagatcctatctctaaaaataataagagtaagagaattagccaggcatggtggcatgcgcgtgaagtcttagctacttgggaggctacggtgggaggatggcttgagcttangagtttgaggttacaggaagctatgatt

SEQ ID NO: 35699 - DNA, 454 bp, Homo sapiens
  misc_feature 37, 43: n = A,T,C or G
gcgtggcgccgagtactttttttttttttttttgcancactcnggaaggccagaacagacagggtttcaccatgttggccaggctggtctcgaactcctgacctcaactgatccacccaccttggcctcccaaagtgctggatacaggtgtaccacccacccatccaatataggacatatcttagagatataagttcattctgcttggtccagtgaagcaatgtaatctatcctaccagtaagtagagactacctacacagtactgaaagatctagccatttcaagaggtcaagggacaattctgtaaataaattgcatctaagtagttccttactactcacaacatgctctaatagtgtgaagaaattaattcttatcccaaagaatatacttttcctagtaatgataggcttcatataattggaatctaagaatgctttaacaattctacca

SEQ ID NO: 35700 - DNA, 516 bp, Homo sapiens
agctccaccgcggtggcggccgtcgctcccctgctcctccttggtggctctctcagaggactccagagttgtatccccaggccgtcttgtttgttctgcactcctgctccccttaaatagctcctccctctccccgcgtacctgcccgggcggccgctctagaactagtgatcccccgggctgcaggaattcgatatcaagcttatcgataccgtcgacctcgagggggggcccggtacccagcttttgttccctttagtgagggttaattgcgcgcttggcgtaatcatggtcatagctgtttcctgtgtgaaattgttatccgctcacaattccacacaacatacgagccgggagcataaagtgtaaagcctggggtgcctaatgagtgagctaactcacattaattgcgttgcgctcactgcccgctttccagtcgggaaacctgtcgtgccaactgcattaatgaatcggccaacgcgcggggagaggcggtttgcgtattgggcgctcttc

SEQ ID NO: 35701 - DNA, 569 bp, Homo sapiens
  misc_feature 398: n = A,T,C or G
atacgactactatagggcgaattggagctccaccgcggtggcggccgcccgggcaggtaccggagccccagccctggccctgagggagaaggaagtcagggccggggctgccccaatcctgtctcctgtgcgcaggtgaacggattcaacacccttggggaaaacattgctgacaacggaggggtgcggaagcctataggcctacctcaagtggatggcagagggtggcaaggaccagcagctgcccggcctggatctcacccatgagcagctcttcttcatcaactatgcccaggtgtggtgcgggtcctaccggcccgagttcgccatccaatccatcaagacagacgtccacagtcccctgaagtacctcggccgctctagaactagtggatccnccgggctgcaggaattcgatatcaagcttatcgataccgtcgacctcgagggggggcccggtacccagcttttgttccctttagtgagggttaattgcgcgcctggcgtaatcatggtcatagctgtttcctgtgtgaaattgttatccggtcacaattccacacaacata

SEQ ID NO: 35702 - DNA, 471 bp, Homo sapiens
  misc_feature 42: n = A,T,C or G
ggcgaattggagctccaccgcggtggcggccgaggtactttnttttttttttttttttgagatggagttttgctcttgtcaccaggctgaagtgcagtggcgtgatcttggctcactgcaacctctgcctcctgagtagctggaattacaggtgcccgccaccatacccagctgtttttgatttttagtagagacagggtttcaccatgttggccaggctggtctcgaactcctgaccactgatccacccacctcggcctcccaaagtgctgggattacaggcatgagccaatgtgcctggccattcctgtgattttttagaatttttcacttttcatataaagttgcattttatcatgaggaaaatgttttggctgaaaaacatatgcccaaaaaaaaaaaatcagttttcactatttttccagcttgcctagggaaacgtcctcccctgagcaaagtgggatgtgcatg

SEQ ID NO: 35703 - DNA, 521 bp, Homo sapiens
  misc_feature 352: n = A,T,C or G
ccgggtggcggccgcccggcaggtacccccagctacctcccatgtttccaggtatcattggctcttaactcccacaagcctgccttttggctacccatcccaacaatatcaagagggaatgactaagtatcagctagaaacttagccatgtctcaacattcctgattatctgaaaagctgtcgatgcccttttacaggtttatggtgacagacccgtatcatcttaaagtatgttcatagttaaggcttgacttaagaaaataagagaaccagacataatggaaagacctcttcaataatgttgtcatgcctctcagtgaacgtgctcacagtcacacttggtttggctccncaaacccacaatagaaaaggaaaaatgagtattttgtttttcatctgttttgtatttaaaggcattgggttacttcctcctgccctcttttcttccctgaacaagagtttacaactcctcatggcttcttaataagtgaagtaggtgaaaagcctgagaagctcacagc

SEQ ID NO: 35704 - DNA, 635 bp, Homo sapiens
gtatacgactcactatagggcgaattggagctccaccgcggtggcggccgcccgggcaggtacccagacaggatcatgaacacgtttagtgtggtgccttcgcccaaagtgtcagacacagtggtggagccctacaacgccaccctctcagtccaccagctcgtagaaaacacagacgagacctactgcattgataacgaagctctctacgacatttgcttcagaaccctaaagctgaccacgcccacctatggtgacctgaaccacctggtgtctgctaccatgagtggggtcaccacctgcctgcgcttcccaggccagctcaatgctgacctgcggaagctggctgtgaacatggtcccgtttccccggctgcacttcttcatgcccggctttgccccactgaccagccggggcagccagcagtacgcggggtagaagacattgctatttgagctttaaaatgtagtaatttctgaattaccaacaagaccttatttaaatgctgagagctgcattatgatgaagcattagtctagctggatgatttccagatggatttttaaacattaataaatgtttcacatttatttgatcaataaatgcatatatatgcttttaaaaattaaagagta

SEQ ID NO: 35705 - DNA, 686 bp, Homo sapiens
gactactatgggcgaattggagctccaccgcggtggcggccgaggtacttggcacacacaggatggtgttttaaagagtgggctgcaccccccacacgccatttacatcagcttcataaacacttttcttcctccctgtaacttaaccttttttcccttttatgaagttgagaggctttatgaaataagttgcattgcacatccgtgcagaaatctttctgactttgaaatttttaggacgtcagctgtcagatacgaaaggtagatatcaggtaagaatctggacttaggaaatagtcacaaaactgtcataggttgtaattttatcaacattcgcttctagtaaaattaaagtcaattaagaaatagaacttgggtcaaaattctgttacaaagcttcataatttgtcccgaagcatatggtggagcattctgagaaatttgctttttgtgtgtttgacattcctaatttgggagtccttcagctgaattactattcttttagaagttgagacagcaggtaagcaaaggacctagttcatgtaaacatggacatcatgatggctatttaaaaaatatttgttctacaccttctcccctgaggcttggggagtgtgttcagccgctgcagtttctctgctcatggaggtcttgtttggatctgtgctggcggctgagcatttagt

SEQ ID NO: 35706 - DNA, 461 bp, Homo sapiens
tacactactatagggcgaattggagctccaccgcggtggcggccgaggtacattatactacttaaagcaaccactaaaaaaattaatacaaaaatacaaagaaatatatttaaaaaacactacaaatatatcaaatggaattctaaaaaatgttaaagacaaaaaaaaaaaaaacccaaacaaaccaagaaagaagcaacaggaaacacaaaaaactaatcataaaatagcagacatagcactaacataattattgtaaactttaaatggtctaaatacaccaataaaagacagaaatatgcaaactggggccagacacagtgacacatacctgtaatcccagcactttgggaggctgagactacaggcacgcgccaccgcgcccggccccgcgtacctgcccgggcggccgctctagaactagtggatcccccgggctgcaggaattcgatatcaagctt

SEQ ID NO: 35707 - DNA, 447 bp, Homo sapiens
ctactatagggcgaattggagctccaccgcggtggcggccgaggtacttcactgctctaagtaggtgccccactttgataaagtgctgtcccagtctgtgctgtcccagtctggaagggtcgctacccatgaacgtagcagccatcctgctattgggtaagtcatctgcatgatgactgtagcctgttctgccatgctcttatgagtctgaagggcagcatatgcagttactaactgcttcccagtccagggggtcattatccatgaacatacccatcctgctattactaactgcttctctatcaataaagacaagctcagctccatagttggggccaaaagcctactggcatactcaagcactccgtgcactgctataggccctaactgaaactatctgtggtcacatgcacatctagcctaaatgggcacctctgatcaactacc

SEQ ID NO: 35708 - DNA, 446 bp, Homo sapiens
tatagggcgaattggagctccaccgcggtggcggccgcccgggcaggtacaaacaaatccagaatatgaagactgcaataaatatctaactttttaatgcccagacactgacaaacatccacaagcatcaagactatccaggaaaacatgacctcaccaaacaacctaaataagtcaccagatcccaattctggagcaacggagatatgtgacctttcagacataattcaaaatagctatgttgaggacactcaaagaaattcaagataacatagagaaggaatatagaattttctcagagaaactcaacaaatatattgaaataattaaaaagaatcaagcagaaatcttggaattgaaaaatgcaattgacatactgaagaagacatcagagattttaaataacagaattgatcaagcagaattaaaaattactaagcttgaaa

SEQ ID NO: 35709 - DNA, 443 bp, Homo sapiens
ggcgaattggagctccaccgcggtggcggccgaggtacttttttttttttttttttttttttttttcacacttggaagtcacagcacagcccacacttaaggaacagagagtcaggctccccttgctccttaatggcagagtagctacataaattatttggaatgctacatggcaaatttatctctttctccccttttttgtttatctatcactaattatatatcagtatggactcatggatatttattttatatttcgggttacaacttgttagtattttattttgttgttcaaatagattccttccagctttgggccactgggagccttttcagctggctccctgggtaccctctgacatgccccccttaattgggggcgttttttaaagcaactttactttttggccctataatatggttcaaagcttcaatttatatat

SEQ ID NO: 35710 - DNA, 442 bp, Homo sapiens
actactatagggcgaattggagctccaccgcggtggcggccgcccgggcaggacgcgggggggggaagctgagggctgagaccaagggctaaagctgggagactgaaaaaatgcagaccgccggggcattattcatttctccagctctgatccgctgttgtaccattattttatgttgtgccagtgaatccggttgccagaaataagtctgaatgttttcatgcatctttttcttaaatgcaagagcttctactgactcttaacaagcatgcttacccaaattttgttgcatgcttttaagtagcattagctatgcacacttgacatttttaaatatccctttcctagtgtacctcggccgctctagaactagtggatcccccgggctgcaggaattcgatatcaagcttatcgataccgtcgacctcgagggggggcccgg

SEQ ID NO: 35711 - DNA, 437 bp, Homo sapiens
agggcaattggagctccccgcggtggcggccgaggtacattaataagacacctcagaagtgaatcaaacctagtttttactaaaatgatgggataaaggtagtgtctatgctgaagagcagcttcacttgtttccccacagaaaaaggcccaaaatttttggaggataatttaaaaactaagccaataaggccaggcatggtggctcatgcctgtaatcccagcactttgggaggccaaggcgggcagatcacctgaggtcaggagttcgagaccagcctggttaacatggcgaaatcccgtctctaataaaaatataaaaattagccgggcatggtggcatgcacctgtaatcccagctactcaggaagctgaggcaggagaatcatttgaactcgggaggtggaggctgcagtgagccaagatcacaccattgca

SEQ ID NO: 35712 - DNA, 441 bp, Homo sapiens
agggcgaattggagctccaccgcggtggcggccgcccgggcaggtacactggaggctggagcctgcggatggcatggctctgcggctcaccttgctgcagttggtggtggtgacagagactgcagcttgactgtagtgaatttggaaattatctgtctggaagctctgagtttatcttgggacctcaagaagagaggatcacccaactcacagcaatcaaactccaaatggtgctataaactgaaccacacatggacacgtcagtcttccgaggacctttagatcaaccccaggaggagccctagctgctgttccccattcgacgcccctttccagcaggaagtagccagaagacatcgtcgcccaaacctctaacagcagttagtgcggcatctccacaggggggaatgtttgaggagttattgataaattattttaggc

SEQ ID NO: 35713 - DNA, 411 bp, Homo sapiens
ggggacacaggcccaggtgtgtaggccacagcagccgcagtcctgaaaggctgcaacacccagacctccaggagagaccaggcccaggatgcctcgcctgttcttgttccacctgctagaattctgtttactactgaaccaattttccagagcagtcgcggccaaatggaaggacgatgttattaaattatgcggccgctctagaactagtggatcccccgggctgcaggaattcgatatcaagcttatcgataccgtcgacctcgagggggggcccggtacccagcttttgttccctttagtgagggttaattgcgcgcttggcgtaatcatggtcatagctgtttcctgtgtgaaattgttatccgctcacaattccacacaacatacgagccgggagcataaagtgta

SEQ ID NO: 35714 - DNA, 191 bp, Homo sapiens
tagggcgaattggagctccaccgcggtggcggccgcccgggcaggtactttttttttttttttttttttttttttggagcttattagaacatttatttttttctgaatgacaggccgggagtgggagtagctgaacagggcatgttagtggtgtgagtgctggcttaaacgaaggagctggaatgggggtt

SEQ ID NO: 35715 - DNA, 240 bp, Homo sapiens
actactatagggcgaattggagctccaccgcggtggcggccgacctgccaggtacacataacccattcataatgtagtatagacaccaaaatgctaagagtgatacaatacattactgatgtgtggattaattcaagttcacgcatctacttgtggtacagcacatctgtcaaaaggtgattatgagtcaatcataaaacgggtttgattgttcccacattatacctatataatggacac

SEQ ID NO: 35716 - DNA, 443 bp, Homo sapiens
taactataggcgaattggagctccaccgcggtggcgggcgcccgggcaggtaccccggaaactattttggattaaggtcaattaggactaacatctaatacgtgtattttggtttcctcacctctaggcacagaccccacaggctcctcggacactgggtccatcacctcctgccccatcatccactccaacaccaacagcccctattgccactctgaaccagcctccaccacttcttcgtccaacactgcctgctgccccggctcttcaccggcagcctcctccactccagcagcaggctcggttcatccagccccggccaactttaaatcagcctccaccacctcttattcgccctgctaattccatgccaccccgtctaaacccaagaccggtgttgtccacggttgggtggtcaacagccaccatcacttattggaatt

SEQ ID NO: 35717 - DNA, 557 bp, Homo sapiens
  misc_feature 63: n = A,T,C or G
gcgtatacgactcactatagggcgaattggagctccaccgcggtggcggccgaggtacgcggngatgctgcattgtgtcgggagttgctgacagccatggcgccgcaggtctggcgtcgacggaccctggagcggtgtctgacggaagtcggcaaagccacgggtcggcccgagtgcttcctcacgattcagagggattggcatcaaagttcacttctttaacaaaagtgctttatgactttaataaaatattagagaatggtaggatccatggaagccccttgcaaaaacttgtgatagaaaattttgatgatgagcagatttggcaacaactggaattgcaaaatgaaccaattttacaatactttcagaatgcagttagtgaaacaattaatgatgaagatatcagtcttctcccagagagtgaagaacaggaacgtgaagaggatggttcagagatagaggctgatgacaaggaggacctagaagatttagaggaggaggaagtgtccgacatgggtaatgatgatcctgaaatgggtgagagagctgaaaac

SEQ ID NO: 35718 - DNA, 435 bp, Homo sapiens
acggcgaattggtgctccaccgcggtggcggggccgcccgggcaggtactttttttttttttttttttttcccgttccctagcacgctctctttctagttctctctctttttctctttcccgatcccgttcacgttccctctctctctcccgctccctgtctcgttctcgttcccgatctctctctctagccctttcatctctcctatcatccactctgtctactcttcgttcctctcttctttcatcacgctcaagctcgtcattccttccctgatgtcgaattggtgagcttggtctttgatctctctctctgttgtcacgacgggtctcgctctccatgtcttctctcaaaggaagaatcccttgcttgatctctgttggctctttcaggatatctatctctttcaggatagctacttcgagtttcccagct

SEQ ID NO: 35719 - DNA, 558 bp, Homo sapiens
gactactatagggcgaattggagctccaccgcggtggcggccgcccggcaggtacttttttttttttttttttttttagagatagggtcttctctgtcacccaggctggagtgtggtggcacgatctcagctcactgcaaccactgcctcccgggttcaggcgattctcctgcctcagcctcccagtagctggggttacaggcgcccaccaccacgcttggctaatttttgtgtttttagcagagacgggggtttcaccatgttggccaggctggtcttgaactcttgacctgaagtgatccgcccgcctcggcctcccaaagtgctgggatgacgcgtgagccaccatgcccgacgtgaagacaggaatttatacccatggagtgcaagaagggaccttgtaatttttaacacgtgacacttagtggcagatgagacctaatgaagccaggcccaccttccacaccaaattataaattcccctggagcagagattaaatgttttattcaccaacatgcccagatccctcgcaatgcctacgcttgacaaacacctgt

SEQ ID NO: 35720 - DNA, 438 bp, Homo sapiens
actatagggcgaattggagctccaccgcggtggcgggcggccgggccggtaccccgggaaacctaaggattccagggcccccaaggtcctccgggatccggggatttttttaagggggccagcatcccatacaacgggcaaagctatccaggttccggctaacacattttctaagtcgccagtgctgcttacagtttgaatacatgaaaatcctgtttctgagatgtttgcgcacgtgcttattaggaaatgagtctgtatggaaatctcaccacagataatggttaacgaaccgggtcgacatcacaaaggagggtggagactctttttactaacttgaatgagacaaaagcagtggtgtcagtttataatcctgatgcatttcagtaataatgtagaaaaacattattttaaaaaagttccaacacacagccatga

SEQ ID NO: 35721 - DNA, 506 bp, Homo sapiens
  misc_feature 194, 195, 207, 208, 222, 223, 305: n = A,T,C or G
acgactactatagggcgaattgagctccacgcggtggcggccgaggtactggggtgagatgatctgaagggtgtttccaatgagaatgacacaaataccaaggactggagaagcccttggaacaattgataaagcttcccacatttttttttttttgagatggagtctcactctgtcacccaggctgaaggcannatcgcatgatcnntcggctcactgcannacctctgcctcctgggaatcaaggggaattctcctgcctcagccctcctgagtaagctgggattaccaggctcccaccacancctggctaatttagtatttttagtagagacagggtttcaccatgttggtcaggctggtctcgaactcctgacctcaggtgatccacctgcttccgccttccaaagtgctgggattacaggcatgagccactgcgcctggtcaatttcccacattttcttaagattatgtttgggccacagaagctcaacccaaagctatct

SEQ ID NO: 35722 - DNA, 522 bp, Homo sapiens
cgactactatagggcgaatgggagctccaccgcggtggcggccgcccggcaggtactgattccaattgatgggatacatgcccttaatacagaaagtttccattatttattcaaatatcaaaattaagattattgagaagtttattgctttatggctgggcaagatgctactagcacattttaggtaatatattctttattaaaaactatgaggtcattctgtttaaaactttcaagataattcacggaaaacagatatatctattcaaattaaacattaaagggccaggctactagctatagacatttatatgtgaagcagctcttttttttttttttttctgagaccgagtctcactctgtcgcccagggtggagtgcagtggcccaatctcagctcactgcaacctccgcctcctgggttcaggcaattctcctgcctgagccccccaagtagctgggattacaggcgcgtgacaccacacccggctaatttttttgtatttttaggtaagatggggtt

SEQ ID NO: 35723 - DNA, 391 bp, Homo sapiens
agggcgaattggagctccaccgcggtggcggccgcccgggcaggtaccatgttattttagatgaaagccattacaaagagttgctcacacatcatgttagtcctcctcctgctagcccaagttctgaatgctcacttattcgtatgggatttcctcagcacaccattgcttctttatctgaccaggatgcaaaaccctctttcagcatggcgcatttggatggcaatactgagccagggcttacattagggggctatttctgcccacagtgtcgggcaaagtacgcgggaatgttcaagctttagaaagatcagagcaatttttctctttcagtccaaactaagactctctgtatttaaatctctctggggcaagagggctagatttccta

SEQ ID NO: 35724 - DNA, 340 bp, Homo sapiens
accgcggtggcggccgcccgggcaggacgcgttggaggataaatcatttattaaataggtctgcttatcaggaggggcgtgaaggctcccaaaaggaaatgctggcacctgggcccagaagccagggcctctaactcctggggttgatttcttcagtgaagttgcaccctacaaagggaatatggccattttttactcaactgaaggctgatatcaggcgattagacagccatgcattctgcgtttgtctggaatggattgtagagagatggacttatatgaggactaccagtccccgtttgattttgatgcacgagcgaacaaaagctatctctacttg

SEQ ID NO: 35725 - DNA, 536 bp, Homo sapiens
actatagggcgaatgggagctccaccgcggtggcggccgcccgtgcaggtacagagagcagaggctcctgttctgtcctcgccacccacgagggtgacactgcttgtaaatggtggctgtgctctcccagcaagaaaaaagcacaactaaatccacactgcacacagacgcagacagaaagccttcagggctctgttttctgctccctgccttgccaggtccacaagcagagaggagtgtcaggcacatggccccgctgtcaggctccccagtgagctgcgggctcagcaggagctgcccactgacacacaggggacacccactcctgccaccttgggagcggttgccagacagagccgcactgggtgctggtgtcatccagggaccccacacacttgcttaaatgtgatcctgcttccctctgcacagctgcatcctctcctcctgcaggactgtctggaaacttggctctcagtttgctctcccttctctcctctgcctgccccaagcccctctttctaaaaaagtgatgccat

SEQ ID NO: 35726 - DNA, 508 bp, Homo sapiens
  misc_feature 18, 59: n = A,T,C or G
ctcactatagggcgaatnggagctccaccgcggtggcggccgcccgacaggtacgcggnggcctttgcaatctccacgttgcgatggatccttggacccacttttgttaactcttaaactttgtgtctttgtctttatttcttttctcattccctcgtctccaccgggaaggggagagcctgcggtgtgtatcaggcagggtcccctacatctttggcacccaacacggtctccttgaacccaggtgaagttacacctgagcgtggtcgttgtgaagaacggtctgtccaggaactcccgagaacgtgtggtcggccttgcggtaagcttgtgcactcggagcattccagggacaccatgggacaatccaaaagtaaacattctgcatatttacattttattaagctcctcttaaagagggcaggaattaaggctagcacagaaaatttgattactctgtttccaacagtagagcaatatcgtccttggtttcctgaacatggtacct

SEQ ID NO: 35727 - DNA, 122 bp, Homo sapiens
  misc_feature 6, 15, 25, 60, 61, 62: n = A,T,C or G
cgcggnggcggccgnccgggcaggnacgcttggaaggggcagaaaaagcccaaaaccaannnacccagcagagccagcccccactcaaggagaggcaaagaaaggagacacagcggagacac

SEQ ID NO: 35728 - DNA, 473 bp, Homo sapiens
  misc_feature 335: n = A,T,C or G
tggagctccaccgcggtggcggccgcccgtgcaggtacttttttttttttttttttttttggaaacggagtctggctctgccgcctaggctggagtgcaggggcacgatctcagctcactgcaatctctgccgcccgggttcaagcgattctctgcctcacctcccagagtggggattacaggtgtgtgccacaacgcctggctaatttttgtatttttagtagacacgaggtttcagcatcttggccaggctggtcttgaattcctgacctcgtgatccacccatctcggcctcccaaagtgcagaaccagattcttaactgccacagactctngtattatgtaatttatatacagaacacaaagcacttgatttgcttaactgatgtacctcggccgctctagaactagtggatcccccgggctgcaggaattcgatatcaagcttatcgataccgtcgacctcgaggggg

SEQ ID NO: 35729 - DNA, 253 bp, Homo sapiens
ggtactgtttgtcctgcatccggcagtggcggtgtgccaaacagtttgaaaacccaatcattaagtcttgtccagaatgccgtgtgatatcagagtttgtaattccaagtgtgtattgggtggaagatcagaataaaagacgagttgattgaagctttcaaacaggggatggggaaaaaagcctgtaaatactttgagcaaggcaaggggacctgcccatttggaagcatatgtctttatcgacatgcttacc

SEQ ID NO: 35730 - DNA, 389 bp, Homo sapiens
ggcgaattggagctccaccgcggtggcggccgaggtacgcgggggcctgagccaaggccacgtgatgatgacagacggcactctggctttcctggagctgtctctatggtattcttcccagcccacccgtccctttggtagcggcagtcacgtgacagactccggggtgggtgctaccaaatacagccatgaagaaaaaggtgctgttgatgggtaaaagtgggtctggtaagaccagcatgaggtctattatctttgcaaattatattgccagagacacacgtcgccttggcgcaacaattgatgtagaacattctcatgttcgatttctgggaaacctggtattgaacctgtgggattgtggtgggcaagacaccttcatggaaaat

SEQ ID NO: 35731 - DNA, 413 bp, Homo sapiens
actactatagggcgaattggagctccaccgcggtggcggccgaggtacatagtggccgtggcagcctccgtgtctgtcttccatgtcactccactttatagctctgaggtttccagtccaggatgcatttggcatagagccaggaacaccgggaatcctgttgagtgtcacccagaaatgttcgtggggctgaggtgtccttggaccaggagagtaagtcaagtgcgagctggtcttggaggacgaagttagcaaagtcccttgtgagagccacgtaggccgtgccaaagtaaatcaccatgtcatgaggaggaggagtttttaattttgttgttttaatcacgtaggaatttttgtggtttaacagttcttggtggacgtatttagtccgtccaacagcgtggtcaggaggc

SEQ ID NO: 35732 - DNA, 167 bp, Homo sapiens
ggcgaattggagctcaccgcggtggcggccgcccgggcaggtacgcgggaaccccagctttccctcccccttctttcgatcagagatcggcggagaccctcgaagtgcgcaaacttgacactcaccctgaccggactggggttttaaggggtgtggcaggaggtttt

SEQ ID NO: 35733 - DNA, 391 bp, Homo sapiens
actactatgggcaattggagctccccgcggtggcggccgtgagcagtgagagagctgacgggcagagcagactgcatgacagcaaagggcagaccaaactcctgcagctgctgaccaccaaatctgatcagatggagccctcgcccttagccagctctttgtcggatacaaacaaaaactccacagggtagcttggcctgggtctgggtttacacatggaaccttcgctcaaggagaagcataaaattttgcacagacttttgcaggacagcagttcccctgtggacttggccaagttaacagcagaagccacaggcaaagacttgagccaggagtccagcagcacagctcctggatcagaagtgacttttaaacaagaagccggtgagcc

SEQ ID NO: 35734 - DNA, 439 bp, Homo sapiens
tagggcgaattggagctccaccgcggtggcggccgaggtacttttttttttttttttttgttagggaatggtaattttctgatgatatctgtgttcagaagggactgaaatttatacatttacctctttgaactcagaaagtatcagaggactgcaacataaaaccggcccatacaagagggccccgggctacgaagacaaggggtcttgcccaacgctcgcctacctcccagctttgccgggaacgccgtcccactcaggggttcaatgcagaaacaccctcctaagggaaaacgggacgccactccctacccaggagacgcccccacagggctggagcttctattcgaagcccatttctaaggacaccacacgcaggcctcagccaacctaagaggcaggatgatgccctccgtcctgagagaccactgaacacggc

SEQ ID NO: 35735 - DNA, 294 bp, Homo sapiens
ggcgaattggagctcaccgcggtggcggccgcccgggcaggtacgcgggatttaaagacctgacagcttgagaaggtcactactgcatttataggaccttctggtggttctgctgttacgtttgaagtctgacaatccttgagaatctttgcatgcagaggaggtaagaggtattggattttcacagaggaagaacacagcttcagaatgaatggccagcgcttactgagctgttcagtggagggctcatgggtgggacatggaaaagaaggcagcctaggccctgtggagccc

SEQ ID NO: 35736 - DNA, 279 bp, Homo sapiens
gaattggagctccaccgcggtggcggccgaggtacaaagaaaaattcctctgtcttgagatactgttaatctgtaaccctagccccaaccctgtgctcagaagcgtgtgctgtgttggctcaaggtttaatggatttagggctgtgcaggacgtgctttgataaaatgtgtttgtaggcagtatgcttggtaaaaagtaatcaccatttctccagtcttcaagtacgcgggggcctttgcaatgccatgttttgtgcatgttgctctaacttcccggag

SEQ ID NO: 35737 - DNA, 477 bp, Homo sapiens
tatagggcgaattggagctccaccgcggtggcggccgaggtacgcgggggcccttgctcactagaaggagccccctgaccccttcttccaaaaatactttttgtctttgtcttcgtttctgcattcatcccccttcgttcactcccataacaaccaacagcgacaactggcacctaggacagggacgtgagtgaaggactgctggagcatagaaactgacactgacaagaagaacgagaatgagaaaccctgcgacgagtctgctgacagctaatataagtctgcaaaatcagctggaccaccaaacggcaattgagagctgcacaacctgcaattacctttattcaattaatgcaaaaacaaaaatggggagatgctacaggccgaaagaatgaaggtcgtgaccaactcagtataccactgaaggctatatgagcaaacagaaaactgttctcatgaaagcaggatgttggaaaa

SEQ ID NO: 35738 - DNA, 477 bp, Homo sapiens
actactatagggcgaattggagctccaccgcggtggcggccgaggtacactgttaaccaagtaaaaatggtatgctgaaatagttaactagggcatatttgaagaattttgtttacttttaaaagaggaaaaatcacttccaatcttcccttccacacattcctaacaagcctgcactatacctgcttaaaactgaaaatataaacaattacatgggccccacttcattacagaatgcattttcctgtacttgaaaactggaacagcttgggaatgccatggggtttgataatctgccagggacatgaagaggctcagcttcctggaccatgactttggctcagctgatcctgacatgggagaacaaccacatttttctttgtgtgtgcttctagcagctgttcgggaggaccttgacccaatagtgttcccatgctgtttcttgtgaaatgctctcggctatgtagcagcttttga

SEQ ID NO: 35739 - DNA, 472 bp, Homo sapiens
gactactatagggcgaattggagctccaccgcggtggcggccgaggtacaataatattatctttatgagcagcatggaaatttcattcctgatctggaagaataaaaggaaagaaaatgtcaggtgaaagagtaagtagcctccaacttaagcagacagaataattttctttaaaatgaaaagaacattttaagctgtctttccccctaaaagatcagatctagaaagggctggaaatgaactgtgcccaggaatctgggggtgctctccagtaaggcgaactgaggctcatttgcagccaagacttggaactcgggatgagacctaatgggctattgctgccatctggctgccaaaaagtccctaatagatggattttccaggctgacccaactgtggggcgggggggggtcctctggcttctgtgtcctctgaagcgtttgctggcctcaccctttttgaactgaccccc

SEQ ID NO: 35740 - DNA, 315 bp, Homo sapiens
atagggcgaattggagctccaccgcggtggcggccgcccgggcaggtacttttttttttttttcttttttttttggaaccgcggttgtttaaaagcctgagggaacctggaggggggctcccactctctaccttctttcctccgagtttgtgactccgagatggacaaagtgtgtgctgtttttggaggcttccgaggcattggcagagctgtggcccagttaatggcccggaaaggctaccgactggcggtcattgccagaaacctggaaggggccaaagccgccgccggtgaccttggcggagatcatttggc

SEQ ID NO: 35741 - DNA, 407 bp, Homo sapiens
ctcactatagggcgaattggagctccaccgcggtggcggccgaggtacgcgggcaatatcctgccgggcagcaagccatacagcccaggcctctcccgcccataccaaggccagcatccttcagaaaaagcatccccgaggaggaagacgaatcgttaaacatctgaaagggtcaggccagcatcttagaaaagcattcccgaggaggaagacgaatcgttaaacatcttaggtcagctctagcctctcggaatttgtcttcttcagtggaaaccccgagaagactgatcagttcttcagttctaaaacaatggcccagggtttggtgacgttcgccgacgtagccatagacttttctcaggaggagtgggcctgtctgaactctgctcagagggacctgtacacct

SEQ ID NO: 35742 - DNA, 426 bp, Homo sapiens
ctactatagggcgaattggagctccaccgcggtggcggccgcccgggcaggtaccttccccgagatggtggataaacttatcttgctggacacgccgctctttctcctggaatcagatgaaatggagaacttgctgacctacaagcggagagccatagagcacgtgctgcaggtagaggcctcccaggagcccttgcacgtgttcagcctgaagcagctgctgcagaggttactgaagagcaatagccacttgagtgaggagtgcggggagcttctcctgcaaagaggaaccacgaaggtggccacaggtctggttccgaacagagaccagaggctcgcctgggcagagaacagcattgacttcatcagcagggagctgtgtgcgcattccatcaagaagctgcaggcccatgtcctgttgatcaa

SEQ ID NO: 35743 - DNA, 473 bp, Homo sapiens
acgactactatagggcgaattggagctccaccgcggtggcggccgcccgggcaggtacaaatggacaatatatatggtatgtgaccattgtgtaaaaaactgtaatagataactccagagggatagaaaacttgatggtgactgcctttagggagtggcagtgggcatggacctgggaaggcagatgtagttgtcatggtacaagatcgcggtgctggtgctgctgaacgagatgagccgcacaggcgagggcgccgtcagcctcatggagcggcggaggctcaaccagctgctcctgcccctgctgcagggcccagatattacactgtcaaaactttacaagttaattgaagagtcttgtccacagctggcaaattcagtgcagatcagaatcaaactgatggctgaaggcgagttgaaggatatggaacagttttttgatgacctttcaaattctttctctggaactgaac

SEQ ID NO: 35744 - DNA, 460 bp, Homo sapiens
tatagggcgaattggagctccaccgcggtggcggccgaggtacacaggaaagggccctgacaagaggatgggactgcagttgtggctgccagagtcttgctttgtcgcccaggttggagtgcagtggcacgatctcggctcagtgcaacctccgcctcctgagttcaagtgattctcctgcctcagccttcctagtagctgggattacaggacaaggagagggacaaattccttcttggcatccttatggccctgtgacctgctaatgaatgctgactctgagttgctactagaatttggtttccttgtggcttcccaggaattggtctcactctgctcactctgtctcccaagctggagtgcagtggtacctgcccgggcggccgctctagaactagtggatcccccgggctgcaggaattcgatatcaagcttatcgataccgtcgacctcgaggggg

SEQ ID NO: 35745 - DNA, 468 bp, Homo sapiens
tacgactcactatagggcgaattggagctccaccgcggtggcggccgaggtacgcggggaaaattcagcaaaacataggtgtgattgcagcatttacagttgcagtccttgctgcgggtatctcctttcattacttcagtgattagggtgaggcacaaagagtttcttgatcatccagagaacattgacagacaattatgaataataaagatgttaacaatccatctgtatttaaaacactagcagccagatctgctgccatgatgcctatttggtgtgtttctgattaaaatgaaatcacaagctgccttgtttagcctgctttacattgtaggtggcccgcatttccagaaataacgttatgcatctagatggaagctgcatgtaacaaatcattattatctatttttaaaagcttcaaaatgatgggatatgatcatagattttagtcttactaatctgaatcac

SEQ ID NO: 35746 - DNA, 471 bp, Homo sapiens
tacgactactatagggcgaattggagctccaccgcggtggcggccgaggtacacgtcccagaaagaaatacgctataacacccaccagcctgagggctgcattgctgtggaagcaggaatggatacccttatcatgcatctctgcgaagaaactgccccagagaatcagaagttcatcttgcaggaggatggatctttatttcacgaacagtccaagaaatgtgtccaggctgcgaggaaggagtcgagtgacagtttcgttccactcttacgagactgcaccaactcggatcatcagaaatggttcttcaaagagcgcatgttatgaagcctcgtgtatcaaggagcccatcgaaggagactgtggagccaggactctgcccaacaaagacttagctaagcagtgaccagaacccaccaaaaactaggctgcattgctttgaagaggcaatcattttgccatttgtgaaa

SEQ ID NO: 35747 - DNA, 446 bp, Homo sapiens
acgactactatagggcgaattggagctccaccgcggtggcggccgaggtacctctgagtgtcgatccagctgccttgtgaccaggacacttagaagaagcatggaccctgcaagaggatgggctcaaggacagcttgcctgactgcagccataagggtgaagcctcttcaggtagagaaggactccaggtcatttggccaatttaatgccgacagaagaggccaccatctgaatgtaatttatctcctctttcatctcctttcattcccctcctcctttttttttttttttgggacagagtctcactctgttgcccaggctggagtgcagtggcgtgatcttggctcactgcaagctctgcctcccgggttcacgccattctcctgcctcagcctcctgagtagctgggactacaggcacccgccaccacgcccagctaatttttt

SEQ ID NO: 35748 - DNA, 455 bp, Homo sapiens
gactactatagggcgaattggagctccaccgcggtggcggccgcccgggcaggtacctaaaccagtctgcgtgaactgcaccatgttagagaacagcaggaacaaaataggctacaaggtcacaataagaagccctggatggtagcatcaaagacgaaacatttaaaaaaccacagaatgaaatcccccaagatggcagctgctcattgtcaagattatttacccgcgtaccttcagtcctggccaagctttgaggctctgtcactgagcaatggtaactgcacctgggcagctcctccctgtgcccccagcctcagcccaacttcttacccgaaagcatcactgccttggcccctccctcccggctgcccccatcacctctactgtctcctccctgggctaagcaggggagaagcgggctgggggtagccgggatgttagccaagtccactgtc

SEQ ID NO: 35749 - DNA, 164 bp, Homo sapiens
tggagcttcaccgcggtggcggccgaggtacgcggggcttttctttctttttcgtccttttccccggttgctgcttgctgtgagtgtctctagggtgatacgtgggtgagaaaggtcctggtccgcgccagatcccagcgcgcctcgtcgccatgccttggaaa

SEQ ID NO: 35750 - DNA, 186 bp, Homo sapiens
acgactcactatatactatagggcgaattggagctccaccgcggtggcggccgaggtacgcggggtcagccgccgcgccgccgggctgctccttcttcctcctcgggcgcccgcggcgatgttcaaccgcgccgtgagccggctgatcaggaagcggccgctctagaactagtggatcccccgggc

SEQ ID NO: 35751 - DNA, 446 bp, Homo sapiens
tactatagggcgaattggagctccaccgcggtggcggccgggcgtggtagctcacgcctgtaatcccagcactttgggaggccgaggcgggcggatcacaagggcaggagatcgagaccatcctggttaacacggtgaaaccccgactctactaaaactacaaaaaaattagctgggcgtggtggcgggcgcctgtagtcccagctactcatgaggctgaggcaggagaaaagtgtgaacccaggaggcggagcttgcagtgagccgagatcacaccactgcactccatccagcctgggtgacagggtgagactctgtctcaaaaaaaaaaaagtacctcggccgaggtacgcgggatccgcagagttggagaagctgtcaatctggttatacctttccagggaaaaccaagaccagaattaacttggaagaaggatggtgcagaa

SEQ ID NO: 35752 - DNA, 310 bp, Homo sapiens
gggcaattggagctccccgcggtggcggccgaggtacgcggggctctctctttcactgcaaggcggcggcaggagaggttgtggtgctagtttctctaagccatccagtgccatcctcgtcgctgcagcgacacacgctctcgccgccgtcatgactgaacagatgacccttcgtggcaccctcaagggccccaacggctgggtaacccagatcgttactaccccgcagttcccggacatgaaccttatcgcttctcgagataagaccatcattatgtggaaactgaccagggatgagaccaactatgga

SEQ ID NO: 35753 - DNA, 171 bp, Homo sapiens
attgagctcaccgcggtggcggccgtgcgtttgtggccgtccggcctccctgacatgcagccctctggaccccgaggttggaccctactgtgacacacctaccatgcgtacactcttcaacctactctggcttgccctggcctgcagccctgttcacactaccctgtcaaa

SEQ ID NO: 35754 - DNA, 215 bp, Homo sapiens
gggcgaattggagctccaccgcggtggcggccgaggtactcacatcacaatgtcattttgataggagcgttttgttatttttacaaggcagaatggggtgtaacagttgaattaaacttagcaatcacgtgctcagagcttttgcctgtcagttgtgtgtgtcccttattagcccttccctcacagttcttgctgaaggaggttgccttgttttg

SEQ ID NO: 35755 - DNA, 440 bp, Homo sapiens
agggcgaattggagctccaccgcggtggcggccgaggtacacaatgaagatctggccacggagcactgcatagttccaaaggggcacgtgggcattcctcctatgggcattcagcagaccgtccacagaccagtagtggtttgcatccatgaatgttagctgaaaggccaacaacccatacagataggagtggttgttccatgatgtcttgtccaggagaaacacataccagtatggcagcaggaataacacacagcttatccggtagcacaggcccagcatcatgcccagtgcccctgggatttgtagggagaggattaagaggtcaagagatcaccacaggcccagtttccatccagtcaagtggcagtgggcgtagggcatccagcaaggggaagcggcacccgcgtacctgcccgggcggccgctctagaactagg

SEQ ID NO: 35756 - DNA, 220 bp, Homo sapiens
tgagctccaccgcggtggcggccgcccgggcaggtacaagaaacatggcaccagcatctgcttcttccccggctgcttccactcatggtggaaggtgaaggggagccggatgtgcatagatcatatggcaagagaggaagcaagatagcgagggagaaggtgccatgctctttttaaataaccggcttttgagggaactaattagattgagaactccttg

SEQ ID NO: 35757 - DNA, 430 bp, Homo sapiens
tagggcgaattggagctccaccgcggtggcggccgcccgggcaggtacaactgatggttcccccattcacaccagtgtccagttccaagccagctacctgcccaaaccaggagctcggctctaccagttccgatatgtgaaccgccagggccaggtgtgtgggcagagcccccctttccagttccgagagccaaggcccatggatgaacaggtgaccctggaggaggctgatgggggctctgacatcctgctggttgtccccaaggcaactgtgttacagaaccagctcgatgagagccagcaagaacggaatggcctgatgcagctgaagctacagctggagggacaggtgacagagctgaggagccgagtgcaggagctcgagagggctctggcaactggcaggcaggagcacacggagctgatggaa

SEQ ID NO: 35758 - DNA, 431 bp, Homo sapiens
tagggcgaattggagctccaccgcggtggcggccgaggtacgggggagttaccagctttggctgctcgcgcctccccaactcgggtaaagctcctcggcctcggcgtgctgcgcctccgcggctgccctgcgccagaattcggttccctcaaaattataaaagcaggaaagctcaagacaaagaaatccaacaaggctagtgatttcagtgatatggagaattggccaacaccaagtgaattagtgaacactggatttcagagcgtcctcagccaaggaaataaaaagccacaaaatagaaaagaaaaagaagagaaggttgaaaagagaagtaacagtgacagcaaagaaaaccgggaaacaaaattaaatggtcctggtgaaaacgtcagtgaggatgaggctcagtcaagtaatcaacgtaagagagc

SEQ ID NO: 35759 - DNA, 343 bp, Homo sapiens
tagggcgagtggagctccaccgcggtggcggccgcccgggcaggtacgcgggtgaggggacccctgcctgtttcccccatactgagttctagggaggtgctcaccccagactcttaggaagggtctagagaaatgagaggagcccaagccaggggccagctgccagaaagggttacctccacgcttctctcttccaaattggaaatgaagacaggttttcaaaggcacaggctccccctgccagcttataggatcttccttggtgtgcaatgggccagatacgggttggcagcttgcacccagttctgctttatctgaacttattttcctggggagaggtgcc

SEQ ID NO: 35760 - DNA, 433 bp, Homo sapiens
agggcgaattggagctccaccgcggtggcggccgcccggcctggtatcgcggggttcaatcctgaagacacacgccaggcatttcagggcaggcacagcttaccacacccgctctgcgatatgagcctcctgaagaatcgattcctcaggccaggtgatgactccagccacgacctcatgctgctccgcctgtcagagcctgccgagctcacggatgctgcgaaggtcatggacctgcccacccaggagccagcactggggaccacctgctacgcctcatgctggggcagcattgaaccagaggagttcttgaccccaaagaaacttcagtgagtggacctccatgttatttgcaatgacgtgtgtgcgcaagttcaccctcataaggtgaccaagttcatgctgtgtgctggacgctggacagggggcaaaa

SEQ ID NO: 35761 - DNA, 445 bp, Homo sapiens
tatagggcgaattggagctccaccgcggtggcggccgcccgggcaggtaccggggcagacagcccggcgaaccgcgcaatgcgcttcttctgcctgcagcagagaaaaggaaagaaaactccgcaggggctccgttggcttctccacgagtgacgaccatgttttcccagatagaagaccggagccctgctcctttgcgatccgccgagggctgcagagagcatcctcatccatttgggcacccctgcccaggaagagcccggccatccctttccggactggatccttaagaggtgaattttcttccgtggattccgatttgctccgtctgaccagcctaggcaatccagcatcgcgtggtacctcggccgctctagaactagtggatcccccgggctgcaggaattcgatatcaagcttatcgataccgtcgacctcgaggggg

SEQ ID NO: 35762 - DNA, 331 bp, Homo sapiens
aatacgactactatagggcgaattggagctccaccgcggtggcggccgcccgggcaggtacaaatacagcttcaaggggccgcacctggtgcagagcgacgggaccgtgcccttctgggcccacgcggggagtaaacatatggtgaatccaagagaataagagaattatttgctcaaagtcacacagctgaactgagactaggaacaagtctcttgattcctagtgatgctattccaagttcagatcaaattcgagtagcaccatctttaaaaagccaaagaggctcagtgtggacaaagacaaaagcggtctttgagaactggaaagttg

SEQ ID NO: 35763 - DNA, 454 bp, Homo sapiens
cgactactatagggcgaattggagctccaccgcggtggcggccgaggtacgcggggcagtcaccgtgggtggtgtggcagctggaattgggggcctcgagctggctgccatgattgtgtccatgtatctgtacaaacgagtcctggccttgtctgtggagacggattacaccttcccacttgctgaaaaggtcaaggccttcttggctgatccatctgcctttgtggctgctgcccctgtggctgctgccaccacagctgctcctgctgctgctgcagccccagctaaggttgaagccaaggaagagtcggaggagtcggacgaggatatgggaatttggtctctttgactaatcaccaaaaagcaaccaacttagccagttttatttgcaaaacaaggaaataaaggcttacttcttcaaaaaaaaaaaaaaaaaaaaaaaaggttcctgcct

SEQ ID NO: 35764 - DNA, 442 bp, Homo sapiens; identical to SEQ ID NO: 33835

SEQ ID NO: 35765 - DNA, 283 bp, Homo sapiens
atacgactactatagggcgaattggagctccaccgcggtggcggccgcccgggcaggtacaagaatgtagaggaaccttggcggtcaacattccaccacccccgactgaccgagtatggtatggtttccgaaagccaccacatgtggagctgaaagctcggccaaaacttggagagagagaagtgactttagttcatgtgacagactggatagagaagaaactggagcaagagtttcagctgttctttaatatcttcctacagaaagtttttgtcatgccaaa

SEQ ID NO: 35766 - DNA, 328 bp, Homo sapiens
tacactactatagggcgaattggagctccaccgcggtggcggccgcccgggctggtacgcggggggcgcggagcagcgacggctgcgataatagcgaggcagcagtgcagctttcagagggtccgggctcagaggggctatgattcggagggttctgccgcacggcatgggccggggcctcttgacccggaagccatgcacgcacagaggaggcttttctctggactgggatggaaaggtgtctgagattaagaagaagatcaagtcgatcctgcctggaaggccctgtgatctactgcaagacaccaaccacctgcctcccgagcac

SEQ ID NO: 35767 - DNA, 397 bp, Homo sapiens
actactatagggcgaattggagctccaccgcggtggcggccgaggtacttctttttttttttttttttttttttttttcccgtctccccaaagctttatctgtcttgactttttaaaaaagtttgggggcagattctgaattggctaaaagacatgcatttttaaaactagcaactcttatttctttcctttaaaaatacatagcattaaatcccaaatcctatttaaagacctgacagcttgagaaggtcactactgcatttataggaccttctgggggttctgctgttacgtttgaagtctgacaatccttgagaatctttgcatgcaaaggaggtaagaggtattggattttcacagaggaagaacacaccgcaaaatgaagggccaggcttac

SEQ ID NO: 35768 - DNA, 463 bp, Homo sapiens
actactatagggcgaattggagctccaccgcggtggcggccgaggtactgcactggacactgctcatccctgggtgtcaggcaggtggctgcaccctaggccaggcgcagaggcctggcaggcaggcttggcatggttggccggggcgggacgtacttcggaaatttcaattcctgctgatcttgataaaactataacagaactagccgactggctggtattaatcgaccagatgctgaagtccaacattgtcactgttggggatgtagaagagatcaataagaccgtttcccgaatgaaaattacaaaggctgacttagaacagcgccatcctcagctggattatgtttttacattggcacagaatttgaaaaataaagcttccagttcagatatgagaacagcaattacagaaaaattggaaagggtcaagaaccagtgggatggcacccagcatggcgtt

SEQ ID NO: 35769 - DNA, 469 bp, Homo sapiens
ctactatagggcgaattggagctccaccgcggtggcggccgcccgggcaggtactccagccagggcaagagagcgagaccctgtctcaataaataaataaataaataaataaataaataaataaataaataaaaaaaaacaaagttgattaagaaaggaagtataggccaggcacagtggctcacacctgtaatcccttgcattttggaaggctgaggcaggaggatcactttaggcctggtgtgttcaagaccagcctggtcaacatagtgagacactgtctctaccaaaaaaaggaaggaagggacacatatcaaactgaaacaaaattagaaatgtaattatgttctaagtgcctccaagttcaaaacttattggaatgttgagagtgtggttacgaaatacgttaggaggacaaaaggaatgggtaagtctttaatgccgatatcttcagaaaacctaagcaaac

SEQ ID NO: 35770 - DNA, 427 bp, Homo sapiens
ctactatagggcgaattggagctccaccgcggtggcggccgcccgggcaggtacagtcccattgtaagtgttgtttctaattatagatgtaaaatgaaatttcatttgtaattggaaaaaatccaataaaaaggatattcatttagaaaatagctaagatctttaataaaaatttgatatgaaaagcacaatgtgcagaagttatggaaaacctatagaggattacaacaggtaaacgttaaagagaatacattgctgacttatagtgatgtggctaagaagtacgccttgcaagaggagtctgcagaaggagagcccacctttcacctccagtttgcattcaatctccactgtcccaaggtcattgactgctttgcagcagtaagtgcctccatcataggggctgggcttgcgaatttccagggta

SEQ ID NO: 35771 - DNA, 436 bp, Homo sapiens
acgactactatagggcgaattggagctccaccgcggtggcggccgcccgggcaggtactgatgtaaggggcgtcgcacctccttcccctctcgtcctccgaggtcagtttagcaacagcggctgggaaaggtgctgagagcagagttcggtctctccggaaaccctgactccattctcggtgatgggggtgggggaaagagggtgaaaatgttggagacgtcaggtagttttttaaataactcggaaagtaaagacgagggtacctcggccgttctagaactagcggatcccccggtctgcatgaattcgatatcaagcttatcgataccgtcgacctcgagggggggcccggtacccagctgttgttccctttagtgagggttaattgcgcgcttggctgaatcatggtcatagctgcttcctgtgtagaaattg

SEQ ID NO: 35772 - DNA, 342 bp, Homo sapiens
tacactactatagggcgaattggagctccaccgcggtggcggccgcccgggcaggtacgcggggggccgatcgcacgccccccgtggcggcgacgacccattcgaacgtctgccctatcaactttcgatggtagtcgccgtgcctaccatggtgaccacgggtgacggggaatcagggttcgattccggagaggggagcctgaaaaacggttaccaattccaaggaaggcagcaggcccccaatttaccaattcccgacccggggaggtagtgacgaaaaaaaaaaaaaaaaaaaaaaaaaaggagtccctcggccgctctagaactagtggatcccccggg

SEQ ID NO: 35773 - DNA, 457 bp, Homo sapiens
gactactatagggcgaattggagctccaccgcggtggcggccgaggtacttcaggccctgtaggatctcaggggcgatatagtcaggggtgccgcagaaggtgctggcccggctctccccgaatatgttctctttgcacatcccaaagtcggcaatcttgatgtggccatcccggtccaacagcacattgtccaggttggaggcccctgtaaatgatgcccttgctgtgtagaaactgcagtccacacattatctcagcggcataaaacgtggcacggtagagttcaaagcggcctttgtcctggatgtggtacgcggggtattatatctgggaaatttgctaagactaaagattttcggtacctgcccgggcggccgctctagaactagtggatcccccgggctgcaggaattccatatcaagcttatcgataccgtcgacctcgagggggggccc

SEQ ID NO: 35774 - DNA, 337 bp, Homo sapiens
  misc_feature 135: n = A,T,C or G
tagggcgaattggagctccaccgcggtggcggccgcccgggcaggtacctctgggtcatattgcagaaccctgcccttctttgttgactgaggaaagctcgctccctgcccaggtttttcattgttgatcgaaanaacaccaggtggtgaatagagcccctctaagtgctcagataatcattattaataggtctgcttatcaagaggggcgtgaaggctcccaaaaggaaatgctggcacctgggcccagaagccagggcctctaactcctggggttgatttcttcagtgaagttgcaccctacaaagggaatatggccaaagcggcactcaactga

SEQ ID NO: 35775 - DNA, 439 bp, Homo sapiens
agggcgaattggagctccaccgcggtggcggccgaggtacttttttttttttgtttttttttttttcgaaagcaaataaatttaatctttcattttcaattaatctttaatatttcagaagtatatcaacattgcctaacatgctattttacacacaatagatatataatcaatgtttattgacttaaaaaatcttgggtttagccagataaatttgtaatattttatgaactagttaaccctgagtcatgaatttacctttttttttttttttctggagacggagtcttgttctgtcgcccaggctggagtgcaatggcgcaatctcggctcactgcaacctccatttcccaggctcaagtgattctcctgcctcagcctcccgagtagctaggattacaggtgcctgccaccatgcccagctaatttttggattttt

SEQ ID NO: 35776 - DNA, 356 bp, Homo sapiens
  misc_feature 184, 194, 208, 221, 222: n = A,T,C or G
atagggcgaattggagctccaccgcggtggcggccgcccgggctggtacgcggggagagcaatcagggagacggctccccggccagacttggctgatgttttcttgtttctgtttcagccttcaggataattccttcagcagcaccactgtaacagagtgtgacgaagatccagtctctctacntgaagaccanactgattgctccangtctccagatggnnacctttttgagaattaccccgactcaagggctctggtttaagagcacgcgccgccctcttgggagccgcagtagcagaatgtagaggcgaccgtgctggtggacagcgtattgcgacccagcatgggcaacttc

SEQ ID NO: 35777 - DNA, 445 bp, Homo sapiens
atacgactactatagggcgaattggagctccaccgcggtggcggccgaggtacagacccctaggcgtcctgacaggtggatttcgacaaggtcattgtgccctgccaaggcacagcgtagatctggaaagagcagaatgctttccttttcagatgtggctggtcatggaaggggcagttgtccaagttgggctgggtcttggtactcaaagctttttcaagttcctcaaaagcagctctttcggacttttctttctgttcccgtaattcctctccctgggtagtcatctgtttgatgcgactaccgagttgagcaatttcttcttctttcatttccagggtttcatgcatctgacgttttgtctctgcgattaccattcccttatcttgttcaagctgttcaattaagttctttgcatcacgcaactgagtgattagtttagtct

SEQ ID NO: 35778 - DNA, 459 bp, Homo sapiens
tacgactcactatagggcgaattggagctccaccgcggtggcggccgcccgggcaggtaccagccagcaacaccaaccaaatgctactctctttaaagtccattttccttcttcttttttttttttttggagacagcatctcaccatgtcctggctggtctcgaactcctgacctcaggtgatccgccggcctcaccctcccaaagtgctgggattacaggcatgacccaccatgccagacttcccattttactttctgcaagctgtttccctagcagctccctctaggggagaggtgaaatcttgcaagttgtagcaagagcacacaggaaacccctaactttcctataccccacccgcctcttcccctttctgtcccgggatacctggcggcaagagacttcttggctattgtccatgctcccagaatcaagcataaatgccagacacggcgattga

SEQ ID NO: 35779 - DNA, 461 bp, Homo sapiens
ctatacactactatagggcgaattggagctccaccgcggtggcggccgacgtactgagttcaaaaactgattacttaaaactgccacacgcaaagatgaaaaccaaagtggtccacaaaacattctcctttccttctgaaggttttacgatgcatggttatcatgaaccattctttgactactaaacttaaatggccaattgaaacaaacagttctgagaccgttctgacaccactgataaagagtggggtggcaggtattacggataatattcatttagccttctgatctttatgggcagactaggtgaccttgccagctccagcagccttcttgtccactgctttgatgacacccaccgcaactgtctgtcttatatgaccaacagctaaacgacccatacgtggatagtctgagaaactctgaacacacatgggcttgtcaggaaccatatttaacaa

SEQ ID NO: 35780 - DNA, 463 bp, Homo sapiens
actacattactatagggcgaattggagctccaccgcggtggcggccgaggtacaaaaaggaccttgaactcttaaattggaccagcaaactgctgcagcgcaactctcatgcagatttacatttgactgttggagcaatgaaagtaaacgtgtatctcttgttcatttttatagaacttttgcatactatattggatttacctgcggtgtgactagctttaaatgtttgtgtttatacagataagaaatgctatttctttctggttcctgcagccattgaaaaacctttttccttgcaaattataatgtttttgatagatttttatcaactgtgggaaaccaaacacaaagctgataacctttcttaaaaacgacccagtcacagtaaagaagacacaagacggccgctctagaactagtggatcccccgggctgcaggaattcgatatcaagcttatcgata

SEQ ID NO: 35781 - DNA, 461 bp, Homo sapiens
atacgactcactatagggcgaattggagctccaccgcggtggcggccgaggtaccactcgattgtcaacgtcaaggagtcgcaggtcgcctggttctaggaataatgggggaagtatgtaggagttgaagattagtccgccgtagtcggtgtacgcggggaattttatctggaagaaatgatcctccctctcatggtagctagtgcccagagtggggaacgggaatgtcatatagtggtgcttacagatgatgatgtggttgattgggatgaagaatatccaccacagatgggagaagaatattcacaaattatttatagcacaaaattatatagatttttcaagtatattgaaaacagagatgtggccaagtcagttttgaaggagaggggtcttaagaagattagattgggaatagaaggttatcctacctacaaagaaaaagtaaagaaaaggcctgg

SEQ ID NO: 35782 - DNA, 277 bp, Homo sapiens
cgactcactatagggcgaattggagctccaccgcggtggcggccgaggtactacacatttaattactatagctttgtaataagttttatttatttatttttttttttttgagatggagtctcgctctgtcgcccaggttggagtgcagtggtgccatctcagctcactgcaacctctgcctcccagattcaaacaattctcttgccaaggccccccgagtagctgggattacaggtgcctgcccccatgcccaagttaatttttttttttatttttt

SEQ ID NO: 35783 - DNA, 334 bp, Homo sapiens
ctactatagggcgaattggagctccaccgcggtggcggccgaagcgcccgtccaccgcgtacagtctgagaaatgccagtggcctgacagcagcatacattgcacaaacccagggtttccaagagtgtgcccagtttctcttgaaccttcagaattgtcatctgaaccatttctataacaatggcatcttaaatgggggtcatcagaatgtatttttctaatcatattagtgtgggaacaaatcgaaagagatgcttggaagactcacaagactttggagtaaagaaagctagaactgaaggtgagaccgctttgcgggtgggaagagcacact

SEQ ID NO: 35784 - DNA, 417 bp, Homo sapiens
tacgactcactatagggcgaattggagctccaccgcggtggcggccgacgtactacgtgctccgcatcgaagatggaaatgggcgacgggcgtttattggaattggcttatgggaccgaggtgatgcctttgacttcaatgttgcatggcaggaccattccaagtgtgcgaaacagcactgtgaaatggcgaaacatgcccagatcccataccagggccttaaactggacctgcgctgtaaggagggccagaccatcaagctcaacatcaacatgaagaacaaggaaggagcagctgggaatccccgagtccggcctgccagcacaggagggctgagcctgcttccccctcccccaggggggaaaacctccaccctgatccctccccctggggagcatttggctgaggggggatccc

SEQ ID NO: 35785 - DNA, 364 bp, Homo sapiens
gcgaattggagctccaccgcggtggcggccgaggtacagctcaaaaggcagttattgaggagtttgtccagacacttctggtgctcttgctttacttcctctgaggccatggagtctcccacctcaaaatcagagctaatcctcttcttgaggaagcgtaagtatagctcactgcgggcattcatcagggtgacctcagtcaggatggggtccagttctcttggttcgattttttctgttgtagaatttctccatcaggttgttctgaacatgccggaactgctggtggtagtccctttgcttgaagaacttgtctaccaccttctccacctgtctgtcacattccacctgcagatatttgaat

SEQ ID NO: 35786 - DNA, 440 bp, Homo sapiens
ggagctccaccgcggtggcggccgcccggccaggtacgcggggggcattgaggaagccttcaccagcaaggctgacctgtcagggatcacaggggccaggaacctagcagtctcccaggtggtccataaggctgtgcttgatgtatttgaggagggcacagaagcatctgctgccaccagcagtcaaaaacaccctccttttctgcattagtggagacaaggaccattgtgcgtttcaacaggcccttcctgatgatcattgtccctacagacacccagaacatcttcttcatgagcaaagtcaccaatcccaagcaagcctagagcttgccatcaagcattggggctctcagtaaggaacttggaatgcaagctggatgcctgggtctctgggcacaacctggcccctgtgcaccgagtggccatggcatgtgtggccc

SEQ ID NO: 35787 - DNA, 458 bp, Homo sapiens
  misc_feature 208: n = A,T,C or G
cgactactatagggcgaattggagctccaccgcggtggcggccgaggtacatgggactacaggcacgcgcctgtaatcccagctactcaagaggctgaggcacgagaatcacttgaacccaggagacggaagttgcagtgagctgagatcacaccactgcactccagcctggtgacagagcaagactccggctcttaaaaaaaaaaantataattaaatggagggagagagaataaacagaaaagaatgtggctgggaattgtgaatcagaagattataccccccaatttttttcaatccccttttctcaaataataaattagttaaatcagtttctgagttatgccactggctgatgaagagttgagaggtctctttgcagaatgatctttttgtttcgttttgtttcttcttctgcatttaaaaattaaaagattggtttgaggatgtgatgaaat

SEQ ID NO: 35788 - DNA, 458 bp, Homo sapiens
tacgactcactatagggcgaattggagctccaccgcggtggcggccgcccgggcaggtacaccagctttcccatcacccctgcaaccataggagtggtcttggcttcctagttatgttcctatcagggttgcctcactatcttctgggcttctctgctctttcgtcaccagtggaattctttatattaaatttcctctgttttaaagacttcgagtgggttatattttccttgctggaccgagttcaaatgaaaagtctgagttgtagggaaaacatcttttttattattattatttttatttatttatttagagacaggttcttgttctgttgcctgggctagagtgcagtggtgcaatcctaattcactgtggcctcaaattcctgggctcaagtgatcctcctgccccacccttgagttgataggactacaggcacacaccaccatacctggata

SEQ ID NO: 35789 - DNA, 359 bp, Homo sapiens
cactactatagggcgaattggagctccaccgcggtggcggccgaggtaccaggtgaacaaggtttaccagaaagcgtttgatacaagaaaataagagctcaggatgagggaaaagagaaagattgagagaatttgtgccctcaaccatttcctcagactctaagaaagaacacgctctctccatgcaggtctgaagctcaactctcttattgcctcacttcatgtatacctcactttgcacaatctaattatgactgtaaagaaggtggggacacatgtatttggagatcacattttaaacacatgaggaaaagttgcgatttgaacttttgattgatttttggggggaggcaagaatt

SEQ ID NO: 35790 - DNA, 402 bp, Homo sapiens
atacgactcactatagggcgaattggagctccaccgcggtggcggccgaggtacctcaaagccggaaaggtcagccccccgctgcaagttcttagattcctggaggatctgcagagtcaacattaggagtatccatccattcaccaaggccatcaggaatgtgctgaatgtgctgtaaagaagagttgtcaattgtgcacagaagataagaaatatatgatgaatagataattgaaaagagatcctccagaaagagcagaaggaagtttcttcaatgttctggcactaagatatggtgaacagacagatggaggccacaacattcaagctttattaaacttgccacagataccagtaacagcaattcaaagatgtgaatgggattaattcagggctgttgct

SEQ ID NO: 35791 - DNA, 411 bp, Homo sapiens
  misc_feature 44, 45: n = A,T,C or G
gcgtatacgactcactatagggcgaattggagctccaccgcggnntggcggccgaggtacacaagtatatgagttttgtttaaagcactactgaagccaagataaactctggcttagcatgcccctgacggatcagtctagtaatcttatcagaaccaagattacctaaaacattaaccaaaggaaaagctccctcaccccaacctatggctgcccacatttttcagattgaatcatttcaattgtattttaaggttcattgactcttttccacctccaagctgctcctgaacacagattattattttttaattttgaaaactttctcacttctagaatttccacttgagcctgttattattgtagtttcttcttctctgctgtgatttcctatccatttattttaagggt

SEQ ID NO: 35792 - DNA, 389 bp, Homo sapiens
gactcactatagggcgaattggagctccaccgcggtggcggccgcccgggcaggtacgcgggggctggtcggtgggcgcatgcgcagcgcgcgctctacggcgctgaaccggggcgagcagagagctgtcagatactatagccatatgaagttgaacatggcagaagaagaggactatatgtctgattccttcattaatgtccaagaagatatcagaccaggattgccaatgctaaggcaaatccgagaagcccgtcgaaaagaagaaaagcaacaggaagccaatttgaaaaacaggcagaagagtttaaaagaaaaaaaaaaaaagtacctcggccgctctagaactagtggatcccccgggctgcaggaattcgatatcaagctta

SEQ ID NO: 35793 - DNA, 275 bp, Homo sapiens
ctactatagggcgaattggagctccaccgcggtggcggccgcagtacgactaccaggatccatgagcttaaacaggccaaaatgagcacagtcatggataccgtaggccggaggcttcgggactccctgggccgaactgtggacctggggctgacaggcaaccatggagttgtgcaccccagtcttgcggacagtgccaacaagtttgaggagaacacctactgcttagaccggaccgtagagacactgctgctccgctgtggcaagaccatcat

SEQ ID NO: 35794 - DNA, 483 bp, Homo sapiens
actactatagggcgaattggagctccaccgcggtggcggccgaggtacgcggggaggcgaagaacgcaaagctgagaacatggacgttaatatcgccccactccgcgcctgggacgatttcttcccgggttccgatcgctttgcccggccgctctagaactagtggatcccccgggctgcaggaattcgatatcaagcttatcgatacccgtcgacctcgagggggggcccggtacccagcttttgttccctttagtgagggttaattgcgcgcttggcgtaatcatggtcatagctgtttcctgtgtgaaattgttatccgctcacaattccacacaacatacgagccgggagcataaagtgtaaagcctggggtgcctaatgagtgagctaactcacattaattgcgttgcgctcactgcccgctttccagtcgggaaacctgtcgtgccagctgcattaatgaatcggccaacgcgcggg

SEQ ID NO: 35795 - DNA, 446 bp, Homo sapiens
ggcgaggtactttgggaggccgagacgggcggatcacgaggtcaggagatcgagaccatcctggctaacacggtgaaaccctgtctctactaaaaaaaaataaaaaataaaaaataaaaacatttctgggcatggcggcggaggcctgcagtcccagctactccggaggcctgaggcaggagaatcgcttgaattcgggaggcggaagttgcggtgagccgagattgcgccactgcactccagcctgggcggcagagccagactctgtctcaaaaaaaaaaaagaaaagaaaaaagaaaaagccactccaggctcaactgatcaggatttgcactgcaacagcatgcccagggcacagtcatgtttgagaaatacggaggacctctgaagtgcttgattctgtgaactcacactgctgtaagcagacttgtttctagataggggat

SEQ ID NO: 35796 - DNA, 470 bp, Homo sapiens
atacgactactatagggcgaattggagctccaccgcggtggcggccgcccgggcaggtacgggggagggtagagtgagaagcaccagcaggcagtaacagccaacccttagccattgctaagggcagagaactggtggagcctttctcttactcccaggacttcagcacctaagacagctccaaaacaaaccagaacagtcagctccggggaagcacgactgggcgagaggcacagaaatggacaccagaaataaggcccagctccttgtgctcctgactcttctcagtgtgctcttctcacagacttcggcatggcctctttacagggcaccttctgctctcaggttgggtgacagaataccctttgagggagcaaatgaacctgatcaagtttcattaaaagaagacattgacatgttgcaaaatgcattagctgaaaatgacacaccctattatgatgtatccagaa

SEQ ID NO: 35797 - DNA, 473 bp, Homo sapiens
ctactatagggcgaattggagctccaccgcggtggcggccgcccgggcaggtactttaatagttaagagaaaataagtttgcagatttttaataatctgtttgtaaaaggctatctctaagcctagtatgtgggtaattttacaggtgtgttttttgataactttaatataaaataaactcattttatttgtgccaaaaaaaaaaaaaaaaaaagtacagcaatgagcaaatccaacctcagatctgaagtgtcttccagtctggccctgacccagccattctctgcccttccttctccctttagggtagcccaaatcccattgccacacaacatctcaacttaccatccctttcctctatccccatcccctctgtctgcgtcacagaaagtctgtgtgttctgaagagttcagccttcctctaaccaaacctacactttctttaccaccgtgattctcagagccagcaagaa

SEQ ID NO: 35798 - DNA, 480 bp, Homo sapiens
  misc_feature 312, 313, 314: n = A,T,C or G
actactatagggcgaattggagctccccgcggtggcggccgaggtacacgggggtgagcggaggagggtgctgcttatgcgagagcaggttttgggagctcactaaagcaggtccctgattctggtcttgaatagcggaggaggaaaagaagatgatgggggaaaagaaaagaagccatttatgcatccctccctaattcagtatccgagcatgagggagtgtcaagctagtggggaagaagagagggtttagttttgaatgaagttgggagtttttattattgcactgaactaaataggcattttattaannnaaaaaaaaaaaaaaaaaaaaaaaaggtccctgcccgggcggccgctcgaagctcgatggtatacaggcattcagagctcttggggtaagggtttgggaagtcagggctggtgatcaccccagtcctttgagtgaagaggttgtcactgcactccacttggcaggtc

SEQ ID NO: 35799 - DNA, 394 bp, Homo sapiens
atagggcgaattggagctccaccgcggtggcggccgaggtacgcgggggaataagggaccccatcgggggccaacccttgagcacccctatcaactccctattgtagtaaacttggaaccttggaaatgaccaggccaagactcaagcctccccagttctactgacctttgtccttaggtgtgaggtccagggttgctaggaaaagaaatcagcagacacaggtgttgaccagagtgtttcttaaatggtgtaattttgtcctctctgtgtcctggggaatactggccatgcctggagacattatcacttaatttctctgaggacacagataggatggggtgtctgtgttatttgggggatacagagatgaaagaggggtggggatccacactg

SEQ ID NO: 35800 - DNA, 486 bp, Homo sapiens
tactatagggcgaattggagctccaccgcggtggcggccgaggtacttttttttttttttttttttttttttggaagctgggatatcttacagaggaaggaaaaattaaccttttttactttctttctcactttttaaatcagccaaagtcaagcccgtttgccaacctgcatgtccatgcctgtaagcccttctcttggccaaggaagaaaggaagaaagaaaaaagaaacccaggggcctgtatcccctgattaaacacagcacagcactccaggcagacatgcccgggggcggctcctttgcaccattgacctcaggccagacacctcagcgccaacaatgggacctcggccttccggctaggtttgccccaggctgggcaggaaaccagctcggccgctctagaactagtggatcccccgggctgcaggaattcgatatcaagcttatcgataccgtcgacctcgagggggggcccggtacc

SEQ ID NO: 35801 - DNA, 467 bp, Homo sapiens
acgactcactatagggcgaattggagctccaccgcgggggcgggccgccgagccaaacttaaatggctgatgaagcctgtgacccccttacccactggaaacaaaccaaaagttactgaaatgcctaatagtgattctatacctgaagatgcataattgcattgtgattcagctgcagtttcacatgagccaacaccagcttgaccccagaggggaggggcatgaaaatgcagctgtgcagggtgcaggggctgccgccattgggccccctgtgcagcctcaggatgccaacgccctggagccccctctcaatggagacgtgactgaggatacacttgctgaatgtattgattccgtcagccttgaggcagaacccatatccgaaatacccctgcgagaacagaattatctggctgtggattcccctccaagtggaggaggatgggcaggctggggatcctggggca

SEQ ID NO: 35802 - DNA, 297 bp, Homo sapiens
taggcgaattggagctccaccgcggtggcggccggtggtggcctggccggccccggctctacccccgcttactttttttttttttttttttttaattcaaagccagttttactgcaaagtttgccttaggccctatacttggagttttacaagttacgtccctacatttgcataatacaacgaatttagcttaaatttggaaacagggtaaagttttgttccagaattgttgcaagaggaacactgggcgcaacttaatgatcttttcttttagattcttcctcatctttgaaacct

SEQ ID NO: 35803 - DNA, 480 bp, Homo sapiens
ctactatagggcgaattggagctccaccgcggtggcggccgggccgagaggtggttacattcgttgaaggacaccagctgcggaatttgcggctttggcagattgaaatcatggcaggtccagaaagtgatgcgcaataccagttcactggtattaaaaaatatttcaactcttataccctcacaggtagaatgaactgtgtacgcgggtttaagaagcggacggagctgttcattgccgccgagggcattcacacgggccagtttgtgtattgcggcaagaaggcccagctcaacattggcaatgtgctccctgtgggcaccatgcctgagggtacctcggccgctctagaactagtggatcccccgggctgcaggaattcgatatcaagcttatcgataccgtcgacctcgagggggggcccggtacccagcttttgttccctttagtgagggttaattgcgcgcttggcgtaatcat

SEQ ID NO: 35804 - DNA, 478 bp, Homo sapiens
tactatagggcgaattggagctccaccgcggtggcggccgaggtacgcggggagctgtccgaagggggccaaccctaaggcaaccatgggcggacctgggcaaacccaataaagcggatttgcagcgcctggtggccgccgagcagcaaaaggcgcagtttactgcacaggtgcatcacttcatggagttatgttgggataaatgtgtggagaagccagggaatcgcctagactctcgcactgaaaattgtctctccagctgtgtagaccgcttcattgacaccactcttgccatcaccagtcggtttgcccagattgtacctcctcctgctcctcaagagtgtggtctattttgccatcatcacctgctgtctgcttagaagaacggctttctgctgcaatggagagaaatcataacagacggtggcacaaggaggccatcttttcctcatcggttattgtccctagaagcgtcttc

SEQ ID NO: 35805 - DNA, 459 bp, Homo sapiens
tacactactatagggcgaattggagctccaccgcggtggcggccgaggtactgtaaataggtcaaggctcattttaaaaaatatgttgaaggccggtgtgggggctcatccctgtattccaaccactttgggaggctgaggtggttgggtcacctgaggtcaggagttccagaggagcctggctaacatggcaacagaatgagactgtctcaaaaaaacaaaaaaatcagtgttcatgtgaaaacctgtgcgtcaatgcttatatcaactttatttgtaaaaaataaaaataaaaaactggaaactgaacaacaaagtggaccatacctatagtacctgcccgggcggccgctctagaactagtggatcccccgggctgcaggaattcgatatcaagcttatcgataccgtcgacctcgagggggggcccggtacccaacttttgttccctttagtgag

SEQ ID NO: 35806 - DNA, 461 bp, Homo sapiens
gcgaattggagctccaccgcggtggcggccgcccgggcaggtactagaagacacaccaagacctcctctgctggaaatgtccaggcatgttatactctttgtatgaattctggaaaaagtagtatatggtgccaaaaacttagaagatgcattttcctttggacatgaaatatgaatgcttttcttggttatttcaattcacagtaaatccttctgaagctgtaacctctgggatgccatctaggccaattccttgacaagtcaggctgccatacaaagatggtttccctgggggatgacagctcagccaggcctccccttcatccttcctgagggcttgcgcccagtcgctctgaatcctcaaaggcgccgccatctcgaccccgcctccaccagcccccccgcgtacctcggccgctctagaactagtggatcccccgggctgcaggaattcgatatca

SEQ ID NO: 35807 - DNA, 472 bp, Homo sapiens
  misc_feature 424: n = A,T,C or G
agggcgaattggagctccaccgaggtggcggccgggcgttgccgccgaggttctggagactgaggcgggagggtcacttgagcccaggaattgtgagattaacctgggcatatagggagatcctgtctctatttaaaaaaagaagctatgtttacactacactatagtctatttaaagtgtgaaatggcgttatgtcctttaatttaaaactcttgatgctggctgggttcggtggctcatgcctgtaatcccatcactttgggaggccaagacaggttgattacttgaattcaggagttcaagaccagcctggacaacatggcaaaacacgtctttaaaaaaagaaaagaaaaaagaaaaacagaaagaaaaagaagaaaaactacttgctgcccttacttgaagctcaattatttaaaacanagaaaaaaatgcacagatcaaaaaaaaaaaggtacctgcccgggcggg

SEQ ID NO: 35808 - DNA, 431 bp, Homo sapiens
actatagggcgaattggagctccaccgcggtggcggccgaggtacgcggggaagcccaataaacctctcattctagctaaccgcgtcggggagcggcgccgggagaagggcgaggcgacttgcatcacggagatgtcggtgatgatggcttgctggaagcagaatgaattccgcgacgatgcgtgcagaaaagagatccagggcttcctcgattgtgcccgcgagggcttaggaagcccgaaagatgagatcaatacaggaaaccctgggagagtctgggagtttacttccaaataaattgaataagttgttacagaggtttcctaacaaaccttacctcaactgaaaatggacaagtattttcaatgactgaaatatagcttctgacaactatgcacaggcgttttagagacattggcattgccatgccc

SEQ ID NO: 35809 - DNA, 464 bp, Homo sapiens
acgactcactatagggcgaattggagctccaccgcggtggcggccgaggtacgcggggctgttcttgtgacagcgagtaagttctcacaaggtctgatagttttataagggacttttctcccttttgctcaatacttctccttgctgctgccatgtgaagaaggatgtgtttgcttctccttctgccatgattgtgacattcccagaacctggaggccaggctatgacacagagtcaatcaataaccagggagatctgcgatatagcccagtcggtggggccttgctgccatctgccatatgacccttccagtcccaggcttctgaagagacccggtacgtgcggtgcagttttcaactgacctttcgacgcagaacttgagccatgaaggtaacaggcatctttcttctcagtgccttggccctgttgagtctatctggtaacactggagctgactccctggg

SEQ ID NO: 35810 - DNA, 445 bp, Homo sapiens
tacactactatagggcgaattggagctccaccgcggtggcggccgcccgggcaggtactttttttttttttttttttttttttgctggggtcagagttttaatcctgggaaaaagaatctggccgctgggccatgccctgggactagcccgctggtccctggtgtgtccgaatcagtgctccagtgcccgcctcttctccagcttcttctgtagctctgccgtcatgtctgccagccctgggggttcaggaccaggagctgcagctggctcagggatccccagtccatgcccaccgccctgacagccacccaggaccagctacagatttgcagggccccgtgcaacaggacagtgtgctcgaaggcattaagaatttcaagacagagacagcagaaccttaaaagacagggcgcttcggagtgtggggacttgtgtgactgtacc

SEQ ID NO: 35811 - DNA, 450 bp, Homo sapiens
tatagggcgaattggagctccaccgcggtggcggccgaggtacacaggccgggcacagtggttcacacctgtaatcccaacactttgggaggctgaggcgggtggatcacaaggtcaggagatcgagaccatcctggccaacatggtgaaactctgtctctactaaaaaatacagaaaattagccagtcatggtggcacgttcctctagtcccagctactcgggaggttgaggcagaagaattacttcaacatgggatgtggaggttgcagtgagccgagatcgcgccactgcactccagcctggtgacagagcgagaccccatctcaaaaaaaaaagttgtatgtgacagctaaccatagtaaaaaaaaaagaaagaaaaaagagagagaaagttgggacaacactaaatcattagtaatttgagcacatttcctccaaggcatatgct

SEQ ID NO: 35812 - DNA, 463 bp, Homo sapiens
tacactactatagggcgaattggagctccaccgcggtggcggccgcccgggcaggtactcctgcttggtgatccacatctgctggaaggtggacagcgaggccaggatggagccgccgatccacaccgagtatttgcgctccggcggggcgatgatcttgatcttcatggtgctgggtgccagcgcggtgatctctttctgcatgcggtcagcgatcccagggtacttttttttttttttttttttttttttatttaaaatgttctttttttatttgtcgtttaaaaacaaacttggaagaagcaaaatccaaaacttaccctttgcctctcgcaacataaatatgtacctcggccgctctagaactagtggatcccccgggctgcaggaattcgatatcaagcttatcgataccgtcgacctcgagggggggcccggtacccagcttttgttccctttaggg

SEQ ID NO: 35813 - DNA, 455 bp, Homo sapiens
tacgactactatagggcgaattggagctccaccgcggggggcggccgggtggcccagggaggaccccttacagcaaccacagcgtcgggaatccgaaagggaaaagaggtgcgcaggcgccacacacggcctttacccccgcgtacctcggccgctctagaactagtggatcccccgggctgcaggaattcgatatcaagcttatcgataccgtcgacctcgagggggggcccggtacccagcttttgttccctttagtgagggttaattgcgcgcttggcgtaatcatggtcatagctgtttcctgtgtgaaattgttatccgctcacaattccacacaacatacgagccgggagcataaagtgtaaagcctggggtgcctaatgagtgagctaactcacattaattgcgttgcgctcactgcccgctttccagtcgggaaacctgtcgtgcca

SEQ ID NO: 35814 - DNA, 463 bp, Homo sapiens
acactactatagggcgaattggagctccaccgcggtggcggccgcccgggcaggacgcgggtgccatttggagggtaggggatctgcttcccactgtgactgggctatgggattctgactaccttgcttacagattcatggtttgataaatttgttgtattcaaaaacttgaaatgcaggacgccattaagtgtctgtttatatttttggaatatttgtattacttacaattaattaataaaagtgggaaaaaaaaaaaaaaaaaaaaaaggttcctcggccgcccgggcaggtacgcggggggaatgtcttacgcaagctgacagtggatgtgcaattcttaaagaatgggcagattgcattcacaggaactacttttattggctatgtaggattatggactggccagagcccacacaagtttacagtttctggtgatgaacgagataaaggctggtggtgg

SEQ ID NO: 35815 - DNA, 407 bp, Homo sapiens
tacgactcactatagggcgaattggagctccaccgcggtggcggccgaggtactttttttttttttttttttttgggtggttatttttcttttctgtgtccttccccaacagcagttggaattttcttttgaacacaaagtaaattaatgtttatactgttttttcacctgagtcatgtaaaaggtgactcctttcattttaaaaagttatatttaatttttgggggccttaattaaaatttaacatttaaccatgtgttttttttgtaaacagtctacatgtcaacaaatggataagggttaacaaaggcaaatactgacttcatttgtgttttaaacacgattatatgaatttttcttttttaattaaaaaaatgacataaaaccattcatataggtcctcttct

SEQ ID NO: 35816 - DNA, 461 bp, Homo sapiens
  misc_feature 373: n = A,T,C or G
ctactatagggcgaattggagctccaccgcggtggcggccgcccgggcaggacgtctacagtgagccttgtggtaagcttgggcgctcggaagaagccagggttaatggggcaaactaaaagtaaagtctctcattccacctgatgagaaacacccagaggtgtggaggggcaggccaccccttcagggtagggtcccctccatgcagaccatagagcacaggtgtgccccaaagaggagcagagagaaggagggagagggcccacgagagacttggaaatgaatggcaggattttaggcgctggacttgggttcggggcacctggcctttccttgtgtatttctcctactgtctgcctaactatttaatacnggggaaaaaaaaaaaaaaaggtacctcggccgctctagaactagtggatcccccgggctgcaggaattcgatatcaagcttatcgata

SEQ ID NO: 35817 - DNA, 358 bp, Homo sapiens
ggggcggccgcccggccaggacccttgcctgtgctggggtccacccctgccagtggcaccatgacctcgccaatgacatcatcccgagagaagcggtcaaagctgaggacaaggaagtgcagcaccaggtcctgcagctggctgtaggggatgccatagaaggtgaaggtctcgtcaaacacagggtccagggtcttccgcagcactctggtcttcacccgatgccgtttgtcaggaaggatggtcattttgatgtaggggtcagatccctgggtctggtcatccatcactggcagcccgtgggcctcctggattgtcaccaccagggcttttttcgggaagttatagtccactgaga

SEQ ID NO: 35818 - DNA, 448 bp, Homo sapiens
cactatagggcgaattggagctccaccgcggtggccggccgaggacttggccggtcaaaaaggggcattagggcagaaaaataaaataaaagtcatctaggtgggaagggaagaagtataactaaatagagatgggagaacgatatggtggttttgtgcatagtaatccaagggaaaactatagaaaatccaaaggcatgatttattaataaataaattcagcaaagttacaggatacaggattaaatatgcagaaattggttatctttcaatatagtatcaatgaataaatcaaaaatgatgttaagaaaacaatttaattttcaacaatggtcaagcttggtggcttgtgcctggaatcccaacactttgggagtctgaagcagaaagactgctagaggccaggagacccgcctgggaaacagtgagatcccatctttaccaaaac

SEQ ID NO: 35819 - DNA, 451 bp, Homo sapiens
acactactatagggcgaattggagctccaccgcggtggcggccgcccgggcaggtactttctttttttttttttgtttttttacaaaaagatggggtttctccatgttggcaagggtggccttgaactcccaacctaaggggatccgcccgccttatcctcccaaagtgctgggattacaggcgtgagccaccatgcctggcttaaggagatacataattaggggatccttaaaagaaatggaacagtttgtaagaaggataaatcttcatactttttgctaggagggaaaactattagggctacatactctataattctagaaccatttccttcagaaggctcctgggtgaccttttcaaataaaattgttaaaaatgcagcaaacgatagcagggtcattggtttggggtggaaaaaataagcccatctctggttgtcttccacatcag

SEQ ID NO: 35820 - DNA, 640 bp, Homo sapiens
  misc_feature 214, 215: n = A,T,C or G
gactactatagggcgaattggagctccaccgcggtggcggccgaggtacaatatgctgcagcataatttgtcaggccaaccttcacaccatattttggcagttcgtgtgcatacgctgcgcagactatcatatccccctctatacgggcataagcaatctgacaaatgatatctctgtttgtcacacgaactatcatcctgtcccgcgtacttnnttttttttttttttttttttacgaatgaggcaatttattaacccagcatggtttgttctaatgcttcttgttggcagctgccacctgtccggcgattctgtccagatctctttgtccctgaggtgtcagtttgcggccgctctagaactagtggatcccccgggctgcaggaattcgatatcaagcttatcgataccgtcgacctcgagggggggcccggtacccagcttttgttccctttagtgagggttaattgcgcgcttggcgtaatcatggtcatagctgtttcctgtgtgaaattgttatccgctcacaattccacacaacatacgagccgggagcataaagtgtaaagcctggggtgcctaatgagtgagctaactcacattaattgcgttgcgctcactgcccgctttccagtcggg

SEQ ID NO: 35821 - DNA, 453 bp, Homo sapiens
actatagggcgaattggagctccaccgcggtggcggccgttgctgagctggtgtggaacgtctgtgatcagattcattgggcttttgccagctctttttagattgtcctcttgagacctgtttacagaggaatggccagaggccacaggcactgcctcctgagaccatccacctgatgcgaagaaagctagaaaagcccaaccctgagaaaaatgcttgggaacacaacagcctcacaattccgagtccagcatgtgcttcggaggccagcctggaagtgactgatttattgctcactgctttggaaaatccagtaaaatatgctgaggacaatatggaacaaaaggacacagacagaattatttgttcaactaacattcttcataaaactgatcagacactccgaagggatgtatctcaaacaatgaaggaagcaaaagatgaacaagtgct

SEQ ID NO: 35822 - DNA, 693 bp, Homo sapiens
cgactcactataaggcgaattggagctccaccgcggtggcggccgaggtacttctcctcttaaagaattggccattttcatttatcatgtaaattatccacttttatgcataacatactttccggcacgccggagccgcaaaagcctcgaccgctacgactcctctgtcgtctactgccccgcgtacgcgggggtagtggcttcgtcttcggtttttctcttccttcgctaacgcctcccggctctcgtcagcctcccgccggccgctctagaactagtggatcccccgggctgcaggaattcgatatcaagcttatcgataccgtcgacctcgagggggggcccggtacccagcttttgttccctttagtgagggttaattgcgcgcttggcgtaatcatggtcatagctgtttcctgtgtgaaattgttatccgctcacaattccacacaacatacgagccgggagcataaagtgtaaagcctggggtgcctaatgagtgagctaactcacattaattgcgttgcgctcactgcccgctttccagtcgggaaacctgtcgtgccagctgcattaatgaatcggccaacgcgcggggagaggcggtttgcgtattgagcgctcttccgcttccttgctcactgactcgctgcgcctcgtcgttcggctgccgcgagcggtattagctcactc

SEQ ID NO: 35823 - DNA, 503 bp, Homo sapiens
acgactcactatagggcgaattggagctccaccgcggtggcggccgaggtacttttttttttttttttttttttttccattttttttttttttttttttttttttttttttttttttttttttttttttttttttttttttttgggcaacaaaaagctttttttccttttggcccagggtttgttgggatattaaaaaaacctcccttttggcgggggggaggggtttaggcaaaacccctttttttttgcggggggcccttaaaaagtcgtggggctaaaaaggcttttatccgcccttgaaagggaccctttcaaaaaaatttttccccagcccagctttggggccccccaccctgggggggttggtcagggggcccccccttttttggaaaagctcccctcccccatttgggaagggggtttcccgaaagtcccaaaaatgggggtcctggcgggcaaaccccggggcttaaaaatccaaaggggccgggttcaattttt

SEQ ID NO: 35824 - DNA, 141 bp, Homo sapiens
gcggtggcggccgaggtacacgtagcgccgtcaatctcagctcactgcaagctttgcctcctagattcaagcagttctcctgcctcagcctcctgagtagctgggattacaggcgcctgccaccattcccagctaattttt

SEQ ID NO: 35825 - DNA, 349 bp, Homo sapiens
ctactatagggcgaattggagctccaccgcggtggcggccgaggtacgttgtttagctgaaagggtcttcttagattttctgtgagcaccaatttgttcttcaagatacttctgctgcatttgaagcagctgttgggtctcctggagccactcttcatactgcttacgctgtgaatcattgacaaagcctggaccaaaatttggaggattcccgcgtacatggtgccaaccgcctcggggcaaactcgctcttggacctggttgtctttggtcgggcatgtgccctgagcatcgaagagtcatgcaggcctggagataaagtccctccaattaaaccaaacgctgggga

SEQ ID NO: 35826 - DNA, 401 bp, Homo sapiens
gtatacgactcactatagggcgaattggagctccacgcggtggcggccgcccgggcaggtacgcggggtggatcctgcaggaagcccaggggccttagacagcagatggtggggtgtgtgtgaggggtggtatgcgtgctgctctgagtttagggctgagtgtgcaagctaggagcagaggacaggtccaagcctggcttctcaccagtccgtctgaggtggaaaagaatccagcactctccccagcactattccgaccgtggtctcccatcccttggatgccatctcctattaggagggggagaaagaaacgcgtgccttataccaaggtgcaattaacagaacttgaacggtaatacccccacaataattcattactaaggacaaacggaggctgatat

SEQ ID NO: 35827 - DNA, 410 bp, Homo sapiens
tacactactatagggcgaattggagctccaccgcggtggcggccgacaagagactctcggggtccccgcggtcggaagccaccatgcccaagaacggatggctgctgattacacccgcttgcccgccgaatccttccccgcgtacctcggccgctctagaactagtggatcccccgggctgcaggaattcgatatcaagcttatcgataccggcgacctcgagggggggcccggtacccagcttttgttccctttagtgagggttaattgcgcgcttggcgtaatcatggtcatagctgtttcctgtgtgaaattgttatccgctcacaattccacacaacatacgagccgggagcataaagtgtaaagcctggggtgcctaatgagtgagctaactcacattaattgcg

SEQ ID NO: 35828 - DNA, 298 bp, Homo sapiens
actactatagggcgaattggagctccaccgcggtggcggccgcccgggcaggtaccctcatcagaaaaagagcccgcgcattctcctgccgatgccttgtcggtcgtagaggacattgaacttgttcacaaactggttcatggtgttgcacgttttggtgatggtgccgaggtaggccatgagccccacgtcgttgcattgatcataaaaatctgtcttgaacttgtctgtgctgagcaccgggagacagtgacacagagcataggccttcccgcaggattctcatgatttaaagggg

SEQ ID NO: 35829 - DNA, 163 bp, Homo sapiens
ctactatagggcgaattggagctccaccgcggtggcggccgaggtacttgagcaaaataacttaaaaaaaatcttaagaggaggaggacaatgatattttctaaaaacatatttgaggctgggcatggtggctcacgccagtaattccagctctttgggaggc

SEQ ID NO: 35830 - DNA, 405 bp, Homo sapiens
ctactatagggcgaattggagctccaccgcggtggcggccgaggtacctatgactctggcatcagattcctggcaccccagtcccactagctgtggtcccaagaatgaacctgcattttaacaagattcaaaaccattgcagaggccaggcgaggtggctcacacctgtaatcccagcagtttgggaggccgaggtgggtggatcacctgaggtcaggagttcaagaccaacctggccaacatggcgaagtcctgtctctactaaaaatacaaaaattagccgagtgtagtggcaggcgcctgtaatcctagctactcgggaggctgaggcaggagaattgcttgaatccgggaggcataagttgcagtgagctgattgtgccactgcacttcagcctgggtgac

SEQ ID NO: 35831 - DNA, 409 bp, Homo sapiens
tactatagggcgaattggagctccaccgcggtggcggccgcccgggcaggtacgatcttggctcactgcaacctctccctcccgggttcaagtgattctcgtgcctcagcctcttgagtagctgggattacaggcgcgtgccactgcgtccggctaatttttgtatttttagtagagatggggttttaccatgttggccaggctgatctcaaactcctgacctcatgtggtccacccaccttggcctcccaaagtgctgggattacaggcgtgagccaccgcgctcagcctacaagcaattttttaaaaactgacacctattactgataaaattctctgtttaaaatcctatttactattttaaagataagtattagttttttttaaatacaatcccgcgtactttttt

SEQ ID NO: 35832 - DNA, 239 bp, Homo sapiens
actactatagggcgaattggagctccaccgcggtggcggccgaggtacgcgggattgagggtgcttaaaaatgctgaagaaactttaaaacatgattcttcttataattttatgtgattcttatagcacaatcatttttgaaaaaggaaaactaggctgggcgtggtggctcacgcctgtaatcccagccccttttgggaggcctaacgtgggtgggatcaccctgaggtccaggaagt

SEQ ID NO: 35833 - DNA, 396 bp, Homo sapiens
actactatagggcgaattggagctccaccgcggtggcggccgaggtacgcggggtttgagtcactggtgcgccaggatccccgctttgaaatctgtgtggaagtcattctggggcttgtctgctttcggctaaagggttccaacaaagtgaatgaagctcttctgcaaagaataaacagtgccaaaaaaatccacttggttccatgtcacctcagggacaagtttgtcctgcgctttgccatctgttctcgcacggtggaatctgcccatgtgcagcgggcctgggaacacatcaaagagctggcggccgctctagaactagtggatcccccgggctggaggaattcgatataaagcttatcgataccgtccacctcgagggggggccccgtaccc

SEQ ID NO: 35834 - DNA, 400 bp, Homo sapiens
ctatagggcgaattggagctccaccgcggtggcggccgcccgggcaggtacgcgggtcctgcaggaagccgcgtgactcccgcctcctccctgtgctctctggctctggactgtgactgcgcctggattctgccattgcgacacatttttgtgcctttcagcccctggtgtctgcagtgggggatttaaggcacccgctttcacttctttcttgtttggagttttttgttggaaccgccggcgttggctccgaatacttagcgacgccactggcggcaccttctcctgcgcccagtgatgtttccacggtgcctgtaccttggccgctctagaactagtggatcccccgggctgcaggaattcgatatcaagcttatcgataccgtcgacctcgaggggg

SEQ ID NO: 35835 - DNA, 197 bp, Homo sapiens
actactatagggcgaattggagctccaccgcggtggcggccgcccgggcaggtacgcggggactcacaagcttggaccgcatcctagccgccgactcacacaaggcaggtgggtgaggaaatccagagttgccatggagaaaattccagtgtcagcattcttgctccttgtggccctctcctacactctggccagag

SEQ ID NO: 35836 - DNA, 403 bp, Homo sapiens
ctatagggcgaattggagctccaccgcggtggcggccgaggtacacatggtaggctaaaaattaaaactgcttttccacaaaactgataaattactagattcttggttctttcatgatatcataacattaaatcattaaaaatataaggcaatttaatgtaaactactagcatttacaaaacagttaagttataaaaaactgtatttacaagcaaatgcaccaaataccagtgaacatgaaacaggagtgaagtttgctggagaacattaaaaattacttttcagtgggtttcacttcacatttcatgctgcactgggctctgacacgttcagcaccatgaagcaaacactttggcaactagaaatgttaccttctgtttgactttttttctaaaatgaaaaa

SEQ ID NO: 35837 - DNA, 311 bp, Homo sapiens
actactatagggcgaattggagctccaccgcggtggcggccgcccgggcaggtacccacagctggtattacaggctacaggagtttcaaggtagggaaggatggctgtgcatgggcccagccctgtggagggtggtggtcttcagccactccaaggccaccagatctgccactgaagtaggaccttgcttccaatggtgacaagccctacagcagatctacaggcagaccttaacagatacagggcaaattttctcttcttcgtaatttcctaggttttaaggttgggttgaccgtttttaccaaaacttc

SEQ ID NO: 35838 - DNA, 393 bp, Homo sapiens
ctcactatagggcgaattggagctctccgcggtggcggccgcccgggcaggtacacagggaaagataatagggaagagatgagggggggagttctccatgactaaagaagaaaaatatatgtaatttatgggtagaaaggaggaattctgcaaaattttgcaagtgaaatgaaaaacagtactcgaagtattcactatagggaagctcctcactaatggcctcttctaccagcagcgatgtctcatatgtccagcagcgggcaacatttcggacagtataaccaccaccacccagcacgagtagagggatattgaagctcttgacatattcaacgcattccccatgccctcggatgctgaggttaaagcagcccaatcgatcacagcccagag

SEQ ID NO: 35839 - DNA, 355 bp, Homo sapiens; identical to SEQ ID NO: 23517

SEQ ID NO: 35840 - DNA, 517 bp, Homo sapiens
cgccgaggcagccgaggtacgcggaggagtgacctgtggctgtggagagcgacccgcggccttgtgtttcatagtttaccacctaagatgactttagtgactagatcggagatcatagatgaaaaaggaccagtgatgtctaagactcatgatcatcaattggaatcaagtctcagtcctgtggaagtgtttgctaaaacatctgcctccctggagatgaatcaaggcgtttcagaggaaagaattcaccttggctctagccctaaaaaagggggaaattgtgatctcacccaccaggaaagacttcagtcgaagtcccttcatttgtctcctcaagaacaatctgccagttatcaagacaggaggcaatcctggcggcgagcaagtatgaaagaaacgaaccggcggaagtcgctgcatcccattcaccagggcatcacagagctcagccggtctatcagtgtcgatttagcagaaagcaaacggcttggctgtctcctgctttccagttttcagt

SEQ ID NO: 35841 - DNA, 584 bp, Homo sapiens
cgcgcgtaatacgactcactatagggcgaattggagctccaccgcggtggcggccgcccgggcaggtacgcgggggctgtctgggctcggggcgcggcggcagtcagctctatgttcgcggtcttaacctctcctctggccgagtccttgcaagaagtgaattacccgaccctgcaaaacacttactattttggagtttaaagtatgtcatcatggcaaagtttcggagaaggacttgcatcattttggcactttttattctatttattttctctctgatgatgggtttaaaaatgctgagaccaaatacagctacttttggagctccttttggacttgaccttcttccagaacttcatcaacgaactattcatttggggaaaaattttgatttccaaaagagtgacagaatcaacagtgaaacaaataccaagaatttaaaaagtgttgaaatcactatgaaaccttccaaagcctctgaacttaacttggatgaactaccacctctgaacaattatctacatgtattttattacagttggtatggaaatccacaatttgatggtaaatatatacattggaat

SEQ ID NO: 35842 - DNA, 448 bp, Homo sapiens
attggagctccaccgcggtggcggccgcccgggcaggtaccatgttgacaaaaatgccagatcaaatggatttgagaaataagcccaattcaaggctggctcagccctccacggggcctcccagggaaaggaattcctttatgttcttggaagcccttttctagaaaagccattccattcatacctttgtagagcagtgggctgggtgtggagggcagcgcggagggtatctgcaagagcctgtattttccgcctcccttgcccccactccttttatccttttaaaagtcctatcagccctgccttcgtcccttccgccctaagccctaagagtgggggaggtttaatacggccaatggatcttgtataaagtctacgtaagttttaatttaccagagctataagatggttaaagtagactaatggggactgctacagataaaatgag

SEQ ID NO: 35843 - DNA, 168 bp, Homo sapiens
tccaccgcggtggcggccgaggtacatattgtatctgtgtaacattttgtatattccaggggtagggccgccccctgtatcatacctagcagaggttggagctggcacatggagaggaggttctaataattatttggggcatgggaagacttatttaattgattgcat

SEQ ID NO: 35844 - DNA, 693 bp, Homo sapiens
  misc_feature 632: n = A,T,C or G
ctatagggcgaattggagctccaccgcggtggcggccgcccgggcaggtacgcggggattgtggcagctggaggtctctgcatcgcttatccgtttattagccggaccaagattgcacagctaaagtctggcagagactccacggtatgactgtcctcactgggcctgtccacagtgcgagcgactcctgaggggaacagcgcggagttcaggagtccaagcacaaagcggtcttttacattccaacctgttgcctgccagccctttctggattactgatagaaaatcatgcaaaacctcccaacctttctaaggacaagactactgtggattcaagtgctttaatgactatttatgcgttgactgtgagaatagggagcagtgccatgggacatttctaggtgtagagaaagaagaaactgcaatggaaaaatttgtatgatttccatttatttcagaaagtttgtatgtaacaattacccgagagtcatttctacttgcaaaaggattcgtaacaaagcgagtataattttcttgtcattgtatcatgcttgttaaattttaatgcagcatcttcaaaacttgtcctgatggtgtcttattgtgtcagcaccaaatatttgtgcattatntggggacgttccttgtcacaggaagaatcttcttccgttgccttattgttttttttttttt

SEQ ID NO: 35845 - DNA, 455 bp, Homo sapiens
agggcgaattggagctccaccgcggtggcggccgcccgggcaggactgtgaggaaggaaggaccactccacaagatctgtattttgaacaatgatgcctgttagggaatgtgcagtagcaaaaatcaaaatttggagtggggccaagtgatctattctatttacttgtgctgaccgaattttttcttcaattaatttaatttctttagttgcctctggagttaacgttctttcactatttaattccgagtcccctcttaagaaagagaacaaatttgacatggcataagtaggaatgcctagagttggccaaatccaattaatatctccaaatccaattagtatctcctagcaacttttgaaactcatttaatgcttttaatgtgtcttttctcatttctattttttgtggtttaattttcctttcctctacctgcattcccaagtaacggaaag

SEQ ID NO: 35846 - DNA, 400 bp, Homo sapiens
atagggcgaattgggccctctagatgcatgctcgagcggccgccagtgtgatggatatctgcagaattcgccctttcgagcggccgcccgggcaggtacttaattaagtgaaggtaacctcccagagttagccagcctttcagagttgaagtcacagcttagggattcaaaatgagcttctaaaaacactaatttagttattagagaactccgggttccactttcaggatccaccttggttggccagtggaaaaacacaagtattcttcattcaacaagtaccttggccgcgaccacgctaagggcgaattccagcacactggcggccgttactaagtggatccgagctcggtaccaagcttggccgtaatcatggtcattagctgtttcctgtggtgaa

SEQ ID NO: 35847 - DNA, 426 bp, Homo sapiens
ctatagggcgaattgggccctctagatgcatgctcgagcggccgccagtgtgatggatatctgcagaattcgcccttagcgtggtcgcggccgaggtacccagttaagttttgatggtttaaattccactaaagaacatattcttctaataactagcatttattacatgaaatttaagagtttaagttccatcaaactagcccttgtgtaagattattatttcttctctataacttcaaaatagatatttcattcaaactgttcaggtgagaaaacataatggatttttttttttttcctctggagctgcctgttcagtgagatggaggaggtgggcacatttaaggtcagttcactaacctatggttcagagttctgatcatatggaagtttggaaaagagagcttataacaggtttgtatgctg

SEQ ID NO: 35848 - DNA, 375 bp, Homo sapiens
atacgactcctatagggcgaattgggccctctagatgcatgctcgagcggccgccagtgtgatggatatctgcagaattcgccctttcgagcggccgcccgggcaggtaccattcttatctcagaatgctgtaaaccatcagtagaagcagtttagatttggactgcatggtaaaatgaaaagtaataaccctccaaccacaacctagtcagggtattaataattatatgtagcaagaaaacaaagaagaaaataatattgaaaaaatggagattccccaaccagtttcatatttgaaggatctgagttgtatttttattaaggaaattttttttctgaatactgtcttccaaaatgttaacattaaaatctgaa

SEQ ID NO: 35849 - DNA, 438 bp, Homo sapiens
tacgactcactatagggcgaattgggccctctagatgcatgctcgagcggccgccagtgtgatggatatctgcagaattcgcccttagcgtggtcgcggccgaggtactctacggtgtcaataattatttcagtctctgctgcaattagtgctaattacaatacctgagctatgaaaataaaagatttcattatagcaaagttcacaaatatcgttttagttcagttatccacattgttcgtctaaaataatacattttctttacatataactgtcttagacttgtaattgaggatatttgatgaaacagatctgtatctgaaacagcactatgatgctaaacatttgcataaggaatgaaaaaagttagcaacctagttttttcaatattcagatatttgagattacacagaaaactacatccagatgaatgactga

SEQ ID NO: 35850 - DNA, 425 bp, Homo sapiens
gactactatagggcgaattgggccctctagatgcatgctcgagcggccgccagtgtgatggatatctgcagaattcgcccttagcgtggtcgcggccgaggtacacatataccgtatttagctcagtttggtattttatagaggtatatttggtattagagtttaaattgtctcaaggagcttttagaccttgatttttttcatgtcataaaatgagctacgagaccctttaactgagtagtaatgaaggtagccagttttatataaatagcatttattattttatgatcattttatttagtttgttatgtgcagatgttttccccactagaatttaagtggtatgaatggagggatcttgtttgtcttgcacagcattgaattcccactaactcttaattaatacttactggttcaatgaatga

SEQ ID NO: 35851 - DNA, 329 bp, Homo sapiens
tagggcgaattgggccctctagatgcatgctcgagcggccgccagtgtgatggatatctgcagaattcgcccttagcgtggtcccggccgacgtacgcggggagagagaaggttaagagcaacaagatgggaggcagctgcatggaacctgtcccactgaggaagtaaaacaggaatccaaaataatacgtttgctgggaattataaagaatttcattgagaaagtgaaaaagaaaaatctatgcaaaggaagtgattctgttgtttaatgccattacctgtcattctgtctcttaccatggctggcttggctagtggcaccacgaaca

SEQ ID NO: 35852 - DNA, 522 bp, Homo sapiens
ccctctagatgcatgctcgagcggccgccagtgtgatggatatctgcagaattcgcccttagcgtggtcgcggccgaggtacaggttatctaaaatttacaacagtcctcttttcttaaaaaaaatgcagatatgattaggattgtatttaacacaaaagctttgtaattcctgctttaaatctacttggctataaaaattttaagggaattttatcgtgaaagcagcccaaatctattcaaaggagcaagcctttcaagccagtgacccccaatgcctttttttctttgccattcaatagtgcaaatcacccatctgttacaaacaggaacctgaaaaagcaacaacatcctggcagtgactagccttaaaaaccattcccaactctacctccagacctgacactgtattcaagtgaatgtgcctgaggtgtgatcaccacaaggaaacagaactgtgtcctgtctatgcctatacttggccatgcttgttagagcaaacatcctgaagtgaccactgtgc

SEQ ID NO: 35853 - DNA, 436 bp, Homo sapiens
tatagggcgaattgggccctctagatgcatgctcgagcggccgccagtgtgatggatatctgcagaattcgccctttcgagcggccgcccgggcaggtaccattcttatctcagaatgctgtaaaccatcagtagaagcagtttagatttggactgcatggtaaaatgaaaagttataaccccttcacccacaacctagtcagggtattaataattatatgtagcaagaaaacaaagaagaaaataatattgaaaaaatggagattcccccaaccagtttcaatatttaaaggatctgagttggatttttattaaggaaattttttttctgaatactgtcttccaaaatgttaacattaaaacctgaatcagaggactctgaatggaaaagaagtttgatcactgacacctagggctctgaagcgtgtgtggccac

SEQ ID NO: 35854 - DNA, 353 bp, Homo sapiens
acgactactatagggcgaattgggccctctagtgcatgctcgagcggccgccagtgtgatggatatctgcagaattcgccctttcgagcggccgcccgggcaggtacttcattcccaagggctatgcagttatactgaagagcaatgctgatcatcacttctccactttacaggatattctcttgaccccaaagtgaatctgcttaacttggcacaagggagcggacatggtcattgtgggctgccccaggagagacatattagtggccacaagattcaatgcctctatgaaatggaaggctaatacaaaaaaaggtgggatccttgggagcaaagacactggccaagaaata

SEQ ID NO: 35855 - DNA, 442 bp, Homo sapiens
tacactactatagggcgaattgggccctctagatgcatgctcgagcggccgccagtgtgatggatatctgcagaattcgccctttcgagcggccgcccgggcaggtactcttaaaaatctgttaagagagtggatctcattttaagggttcttaccacaataaaattaaatttttgaaataaatcagtcatatttgagtgaaatgaaacctttccgagtagtttcagacaattgataatacctagtttacagttcctgtagtcattttggagggtgaggacttgatgtgtttagtaaagttgagaaataaatacatgaaagaatgtgtggggaagagaaagtgtggggaagagaaattgtcttagaggaccattcttagtggcactggggaaatcttggcacccagaagaatttaactgcgctcactgcaaaaattcaatgg

SEQ ID NO: 35856 - DNA, 494 bp, Homo sapiens
ggcgaattgggccctctagatgcatgctcgagcggccgccagtgtgatggatatctgcagaattcgcccttaggtggtgcggccgaggtaccattcttatctcagaatgctgtaaaccatcagtagaagcagtttagatttggactgcatggtaaaatgaaaagtaataaccctccagccacaacctagtcagggtattaataattatatgtagcaagaaaacaaagaagaaaataatatcgaaaaaatggagattccccaaccagtttcatatttgaaggatctgagttgtatttttattaaggaaattttttttctgaatactgtcttccaaaatgttaacattaaaatctgaatcagaggactctgaatggaaaagaagtttgatcactgacacctagggctctgaagcgtgtgtggccacatggaaaagtcgaaggatgcgctgtcgaatctcctttgtcttcactccatagacaattgggttgagcaca

SEQ ID NO: 35857 - DNA, 431 bp, Homo sapiens
  misc_feature 281, 282: n = A,T,C or G
ctactatagggcgaattgggccctctagatgcatgctcgagcggccgccagtgtgatggatatctgcagaattcgcccttagcgtggtcgcggccgaggtacgatcttggctcactgcaacctctccctcccgggttcaagtgattctcgtgcctcagcctcttgagtagctgggattacaggcgcgtgccactgcgtccggctaatttttgtatttttagtagagatggggtttcaccatgttggccaggctgatctcaaactcctgacctcatgtggtnnacccaccttggcctcccaaagtgctgggattacaggcgtgagccaccacgctcagcctacaagcaattttttaaaaactgacacctattactgataaaattctctgtttaaaatcctatttactattttaaagataaagtattagtttt

SEQ ID NO: 35858 - DNA, 210 bp, Homo sapiens
atacgactcactatagggcgaattgggccctctagagcatgctcgagccggcggccaggggaagggtatttggagaaattcgcccttaccgtggtcgcggccgaggtacccaggtcaagtgattttgaagactcagcacatctcatgcaaccagtccacaataagcctgttaaacaaggacctaggtataaactacatcagatccagggt

SEQ ID NO: 35859 - DNA, 427 bp, Homo sapiens
acgactcactatagggcgaattgggccctctagatgcatgctcgagcggccgccagtgtgatggatatctgcagaattcgccctttcgagcggccgcccgggcaggtactcctcgcagtgctccttgtcttcagcccaggcatacccttctcttaaggaccagtccacccccatcttcaaggccttctccaagtatttggcattcattgggatgacaccttttgaccccaccccaacaggaatgtggtcaaacatagcttgggcaagttgctccttcacaggctggacatcactttcatctaaattggttcttagcaagcggacaccacagttgatgtcaaacccgacaccacctggggatactactgctttaggggcattcatatcaaaggctgccatgttcccaatagcaaacccatatcctgaa

SEQ ID NO: 35860 - DNA, 421 bp, Homo sapiens
tactatagggcgaattgggccctctagatgcatgctcgagcggccgccagtgtgatggatatctgcagaattcgccctttcgagcggccgcccgggcaggtacccttgattatttccttgtgttgactctgagatgctgaccccaagctggctgccataggagttgattcccatcatgccactgtgcgctggggagctagagagggctggaagctggctgggattcctggggacgctgtagagagcttcagcaatgtctgcggctcgcttcaaaatgatgtcctggttattgtgtggtgtgccataaagagcttccactagatctgcagctcttttcaacagcatctccttagctagtctctcaggatctccaggatgcctagggatgaccttctgcagtctctggaagccatagtctatg

SEQ ID NO: 35861 - DNA, 384 bp, Homo sapiens
tacgactcactatagggcgaattgggccctctagatgcatgctcgagcggccgccagtgtgatggatatctgcagaattcgcccttagcgtggtcgcggccgaggtaccattcttatctcagaatgctgtaaaccatcagtagaagcagtttagatttggactgcatggtaaaatgaaaagtaataaccctccaaccacaacctagtcagggtattaataattatatgtagcaagaaaacaaagaagaaaataatattgaaaaaatggagattccccaaccagtttcatatttgaaggatctgagttgtatttttattaaggaaatcttttttctgaatactgtcttccaaaatgttaacattaaaatctgaatcagaggactc

SEQ ID NO: 35862 - DNA, 269 bp, Homo sapiens
cgactcatatagggcgaattgggccctctagatgcatgctcgagcggccgccagtgtgatggatatctgcagaattcgccctttggccgcccgggcaggtacgatcttggctcactgcaacctctccctcccgggttcaagtgattctcgtgcctcagccacttgagtagctgggattacaggcgcgtgccactgcgtccggctaatttttgtatttttagtaagagatggggttttcaccatgattggccaggcctgaatctcaaact

SEQ ID NO: 35863 - DNA, 333 bp, Homo sapiens
cctatagggcgaattgggccctctagatgcatgctcgagcggccgccagtgtgatggatatctgcagaattcgccctttcgagcggccgcccgggcaggtacctcttattccagagaagtggggagcagagaggaagatggagtggaaaggggcgaggcaaggccctcctgaaatacctcaacccaaatcttcaagaaatccccaagtcctcacagtgctttttgtggatttttgtggaaaccggtaaaaggggctgatttgctgaccccagtgggtagaaaacagagactgtcaagagaacagaatagaaggcagaaaggggatggggaagt

SEQ ID NO: 35864 - DNA, 396 bp, Homo sapiens
ctatagggcgaattgggccctctagatgcatgctcgagcggccgccagtgtgatggatatctgcagaattcgcccttagcgtggtcgcggccgaggtacacttatggtcctagttactcaggagacttaggcaggaggattgcttgatcctaggaattcgaggctgcagtgagctatgattgcacctctgcacccaagcctgggcgacacagcgagaccctctctcttaaaaaaaaaaatagcagagctcaccaaagtgatgttcacctttttatgacattcctttttcttagcttaagaaaagaaagctgctagatgagagtcttagttttcctgcataagacctcctttatgaatagaataaaagactgtcaaagtaggctgggcttgggccca

SEQ ID NO: 35865 - DNA, 502 bp, Homo sapiens
tctatgcatgctcgagcggccgccagtgtgatggatatctgcagaattcgcccttagcgtggtcgcggccgaggtacagagaggggctcgctgcgctgggtagaggaagcaggaagtttgctgaactcagacggaagaaaaaggattccttggagaatcccagcaggtttctgattggacatgggtccatgtccttgcgaagtctcctcctcctgaacctgccctgctctgagactggcttttgaccaccagcatgctgcagacgtgatgccgtgtgacttctgagcgggtcataagaagccttgcagtgtggcctgtgtcttcacgaatgcttgcatgaggaaaaccactgtcatgtaagaagtatggctaccctgagactgtcatggtgtgaggactcctaaatgagtcacatgtggatggccacctattcaggcctcaattcttccacccattgcgactgtggcccacgcatgtgggggaagaggccattcttcacgcc

SEQ ID NO: 35866 - DNA, 409 bp, Homo sapiens
agggcgaattgggccctctagatgcatgctcgagcggccgccagtgtgatggatatctgcagaattcgccctttcgagcggccgcccgggcaggtacagaggaggagggcgccaaagctgagagaggcaacccctcaaatattaaaaaggaagaaatggcgtgataggctagcacattttatggaaagccatgttttaattaaatgttttccctacaaatgttctctgtatcaaggaacctggcacatagggaatgcatgaaacctgatttataatcagattcagtctacttaagtaataacctatatctagatgatagattgtcaactgtgctactttagccatcatcacatacccagcgtttctatccttagtgacacagctgggccagaggcaaggcctgcattca

SEQ ID NO: 35867 - DNA, 542 bp, Homo sapiens
ccctctagatgcatgctcgagcggccgccagtgtgatggatatctgcagaattcgcccttgcggccgcccgggcagctacagaatttccttttatattattcctctaccctccacctgtaaatgaatgttagtgcagtaattgtttgaaataatgcctcatccagtgttaggtcagtagctccacagtctacacagtccagaattctttctctaattgtcccaaagggggacattgtggaggcagggttagggggaaccacttcaagtggttagggacagataaataataggcagtatagcacatgaaagaaaacacacacttggaagccaggagacttgtgtcctagtcaaaactctggcattatgtgaccttggacaggtcatctaactactctgaaatttatcatcagtcaaataagattttattctgttttgttttgtttgagatggggatttgctcttgttgtccaggccgaactgcaatgttgtggtctcggctgactgcaacctccacctcccagattcaagcgattctcctgtc

SEQ ID NO: 35868 - DNA, 422 bp, Homo sapiens
tacactactatagggcgaattgggccctctagatgcatgctcgagcggccgccagtgtgatggatatctgcagaattcgccctttccagcggccgcccgggcaggcactaaatgttaggcttcttgaacccagcatgtttttttctctcttcttatcagcagaacacacgttgctctctttacttggaacgccgcctctgacagatggtcacctcaccatcactcattcatccttcaagtcttcgatacaattgcttccaagaaaacttacctgattatttgagcttgagatagcactctctggaaagccctagaatttttatagcttgcggtaattgcttactgaaatctccagtgggctggaaaattagggaaggtattttcatgtgtctattgtttaattttttcattaccacagctag

SEQ ID NO: 35869 - DNA, 335 bp, Homo sapiens
tacgactcactatagggcgaattgggccctctagatgcatgctcgagcggccgccagtgtgatggatatctgcagaattcgccctttcgagcggccgcccgggcaggtacagaggcttaggggaagtgagacataagcttgtaggaataataaacgttctacaataaacgttttggctatcttaagccattgtatgggggggattaggaagtaggagggattgtcctacaacaggcccttatacttcaacagcccaaatattttggtttattcctttttatccataaagtctttattcttcaagtttgggtattatagattaccattgttagcct

SEQ ID NO: 35870 - DNA, 144 bp, Homo sapiens
tacgactactatagggcgaattgggccctctagatgcatgctcgagcggccgccagtgtgatggatatctgcagaattcgcccttagcggggcgcgggccaagtacaaggctaagcattttaactttatactggaaaaaaaatc

SEQ ID NO: 35871 - DNA, 431 bp, Homo sapiens
tatagggcgaattgggccctctagatgcatgctcgagcggccgccagtgtgatggatatctgcagaattcgcccttagcgtggtcgcggccgaggtacaatataaaccataattgtgatttaccttaagtaggtataactcttatgggatatacagtatagtttttgtgaatctttacatgatagcattatctttttataattttttttcctaagataaacaaatgcatagttttcttctatgggtgatagaaacagctttttgaagtaatgaaaacctcaaaagatcatgttgattcttaatttttgccttttgcataagcctctttataacatgtatctttaaaacaattaagtccttaggaatgtgtaaccagaactatgttagtattgcttataaaactttagttaggttcaatatatacatatata

SEQ ID NO: 35872 - DNA, 380 bp, Homo sapiens
gtatacgactcactatagggcgaattgggccctctagatgcatgctcgagcggccgccagtgtgatggatatctgcagaattcgcccttagcgtggtcgcggccgaggtacctgtatgaggcccctggcaacttcacacgacctaactgaactctctcaagccatcctttcaaaaggaatgaaaattgaggtctcttgttttatgctgaagactctacgatgcctgcagagtcaggaactctggaatcttaggtgtcctccttacatatccatctccatcacccttggctgaacatgctgagaaagaatgacccggcatgcatgcagagaagagtcactactttctgtgttcaaacatgttcgggccctgtgtacctgcc

SEQ ID NO: 35873 - DNA, 439 bp, Homo sapiens
gactactatagggcgaattgggccctctagatgcatgctcgagcggccgccagtgtgatggatatctgcagaattcgcccttagcgtggtcgcggccgaggtacttttttttttttttttttttttttttttttaataatcacagtaagttcattcgtatttgtcaaaactaggaacgctcaagaagttctgtaggtgagtagattaaacagccggcagtaaattcatagaataatattcagtaattataaacaagagctatcaaaccataaaaatacataaatgaattttaaatgcatattgttaagtgaaagaaacaagtctgaaaaagctacataatatgttatttatttgatattctggagaagtccaaacacacaaagtgattctgtattcgcgagaaatttaaggagatgatgaaaatgggtaaaaaatagat

SEQ ID NO: 35874 - DNA, 410 bp, Homo sapiens
agggcgaattgggccctctagatgcatgctcgaggcggccgccagtgtgatggatatctgcagaattcgcccttagcgtggtcgcggccgaggtactctacggtgtcaataattatttcagtctctgctgcaattagtgctaattacaatacctgagctataaaaataaaagatttcattatagcaaagtcacaatatcgttttagttcagttatccacattgttcatctaaaataatacattttctttacatataactgtcttagacttgtaattgaggatatttgatgaaacagatctgtatctgaaacagcactatgatgctaaacgtttgcataaggaatgaaaaaagttagcaacctagttttttcaatattcagatatttgagattacacagaaaactacatcc

SEQ ID NO: 35875 - DNA, 394 bp, Homo sapiens
tacgactcacttaggtgcgattgggccctctagatgcatgctcgagcggccgccagtgtgatggatatctgcagaattcgcccttagcgtggtcgcggccgaggtaccattcttatctcagaatgctgtaaaccatcagtagaagcagtttagatttggactgcatggtaaaatgaaaagtaataaccctccaaccacaacctagtcagggtattaataattatatatagcaagaaaacaaagaagaaaataatattgaaaaaatggagattccccaaccagtttcatatttgaaggatctgagttgtatttttattaaggaaattttttttctgaatactgtcttccaaaatgttaacattaaaatctgaatcagaggactctgaatggaaaa

SEQ ID NO: 35876 - DNA, 423 bp, Homo sapiens
tatagggcgaattgggccctctagatgcatgctcgagcggccgccagtgtgatggatatctgcagaattcgcccttagcgtggtcgcggccgaggtacagaagacgctgcatccctcggaggaggaggtgaaccagctgcaccagcgttatatcaaagagctgtgcaacctcttcgaggcccacaaacttaagttcaacatccctgctgaccagcacttggagttctgctgagtccaaagggcagggccaacattagggagcccagcaggaggtgctgtgctgagaagacttcctggaggtgtttgttgaacatatctgcagagccttcccagactcctgcaaatccaacccatatcaggctgtaagtcagagcaggcaatgcagaagaggagaccagaccaaggggtcagctggggctagga

SEQ ID NO: 35877 - DNA, 385 bp, Homo sapiens
gtatacgactcactatagggcgaattgggccctctagatgcatgctcgagcggccgccagtgtgatggatatctgcagaattcgccctttcgagcggccgcccgggcaggtacggggggagagtgttttgagaaagaagtggtgggacgtcactgtctgtggaaaatttcaaggaaaactgaaggatcattgagatgaacagtgtggcagaattgagaactcttgatgtttcagtgagctttaatggaggaaaatctgtcatttcaggatcattaattgtcacagccacagaatgttctaacgggatcgcagccatcattgttattttggtgttactgctactcctgaggatcggtttgatgtggcggttttggcccctttgctg

SEQ ID NO: 35878 - DNA, 435 bp, Homo sapiens
gactactatagggcgaattgggccctctagatgcatgctcgagcggccgccagtgtgatggatatctgcagaattcgcccttagcgtggtcgcggccgaggtactccagcctgggcgacagaccttgccttttcaaaaaaaaaagaaagaaagaaagaaaagaaaagtatttggacacatttctcccaatatgtccaaattttccaaagcaattatatcaagggtattggctccttggttaagaactgggctttattttcacacactccctgaaatgacacagccagagatcaggtaggacccagagagaacaaagttacaaaccctgtgtccaaacagcatcctaaaatgaaatactcctggatggaacccttggaaaactcagtgttgaccatattcccagttacccataaaaacttatcaagttgtggttta

SEQ ID NO: 35879 - DNA, 374 bp, Homo sapiens
atacgactcactatagggcgaattgggccctctagatgcatgctcgagcggccgccagtgtgatggatatctgcagaattcgccctttcgagcggccgcccgggcaggtacaaccagaaccaacaattgtatttctctatagttattttaaaatagtaatcaatgctatgtatttgatgtatatgtttctaaattagaaatttcttttggctttgtgtttttttaatgtgcgttaaatatgtaaactgaacctgttcctaaaatgcattaaacttgaatgctgcgtctatccaatgccaaaatgctcagaagaaaagtgaataattcagtcattcatctggatgtagttttctgtgtaatctcaaatatctgaa

SEQ ID NO: 35880 - DNA, 390 bp, Homo sapiens
cgaattgggccctctagatgcatgctcgagcggccgccagtgtgatggatatctgcagaattcgcccttagcgtggtcgcggccgaggtactttctattttttttttttttttttgagatggagtcttgctcagtcgcccaggctggagtgctaacctctcctttcatgtggagatggacagggatggcaggagcactgagtgctcttgacaacaccattgaagatgatgctgacgatcagctaccctgtggagaaggcaggccaggctgggtgagaggggagctccttggaagtcagggggtctgtaaggacagcaaggatctctttgtcccaacctccagcagcctttatgggtgcttctgtgttggccttgtttctgggatggccat

SEQ ID NO: 35881 - DNA, 423 bp, Homo sapiens
  misc_feature 387, 388: n = A,T,C or G
actactatagggcgaattgggccctctagatgcatgctcgagcggccgccagtgtgatggatatctgcagaattcgccctttgagcggccgcccgggcaggtactcttaaaaatctgttaagagagtggatctcattttaagggttcttaccacaataaaattaaatttttgaaataaatcagtcatatttgagtgaaatgaaacctttccgagtagtttcagacaattgataatacctagtttacagttcctgtagtcattttggagggtgaggacttgatgtgtttagtaaagttgagaaataaatacatgaaagaatgtgtggggaagagaaagtgtgggggaagagaaattgtctcagaggaccattcttagtggcactgggnngaaatcttggcacccagaagaattcaactgcgctc

SEQ ID NO: 35882 - DNA, 152 bp, Homo sapiens
  misc_feature 62, 64: n = A,T,C or G
tacgactcactatagggcgaattgggccctctagatgcatgctcgagcggccgccagttgtngnattgggatatctgcagaattcgcccttagcgtgggtcgcggccgaggtacaaagtccaggccccggcacggtggctcacacctataaa

SEQ ID NO: 35883 - DNA, 425 bp, Homo sapiens
gactactatagggcgaattgggccctctagatgcatgctcgagcggccgccagtgtgatggatatctgcagaattcgcccttagcgtggtcgcggccgaggtacacctttcaaaggactttgtgcccgtggtatatcatgatcttacctgttgtttgactatgaaaaagaaatttgatgctgatccagttgaattatttgaaattccagtaaaagaattaacatttgaccaactccagttgttaaagctcactcatgtgactgcactgaaatctaaggatcggaaagaatctgtggttcaggaggaaaattccttttcagaaaatcagccatttccttctcttaagatggttttagagtctttgccagaagatgtagggtttaacattgaaataaaatggatctgccagcaaagggatggaatgt

SEQ ID NO: 35884 - DNA, 391 bp, Homo sapiens
atacgactcactatagggcgaattgggccctctagatgcatgctcgagcggccgccagtgtgatggatatctgcagaattcgccctttcgagcggccgcccgggcaggtaccccctaaaatttacaaaaatttaaaaaatttcatttgtgcttactgtctttactgaaatgttaaatatttactcatgagttgattactctgtgcacgtgagattgtcttttgtagttataaagaagggatgcttagaagtagtatcagtgttctttcttattcctatccctcccaaatctcacaccagaaaatgctggaattttttggaaggaaatagagaagagtggaattaggtttagggatggtagtcctaggaggaggggagtaatggaagttata

SEQ ID NO: 35885 - DNA, 78 bp, Homo sapiens
gcgattgggccctctagatgcatgctcgagcggccgccagtgtgatggatatctgcagaattcgccctttcgagcggc

SEQ ID NO: 35886 - DNA, 418 bp, Homo sapiens
ctatagggcgaattgggccctctagatgcatgctcgagcggccgccagtgtgatggatatctgcagaattcgcccttagcgtggtcgcggccgaggtacccgaaaagaaaggaagctttagtaatgaaaggattgctgccaaaatcctgtttcccccttgcagatcttacagaaaacagccacagaatcccaaggcatcagcaccaagagagcctgtagaaactatctggtctaagctcctgaagcccagagataagaatgacttaacccaagctgcacagcctcttaacagtccactgttaaccccagaaacagatgcatttgaatctgaaaggagacaggaatcctaatcctactgctcagggacttgctgatttactttgctgtccattagcctttctgtgacatgattttctac

SEQ ID NO: 35887 - DNA, 453 bp, Homo sapiens
  misc_feature 440: n = A,T,C or G
tacactactatagggcgaattgggccctctagatgcatgctcgagcggccgccagtgtgatggatatctgcagaattcgccctttcgagcggccgcccgggcaggtactaagttaaaataaggtcttgggcaaattaaactctgggttttagtttccttatcaggtaaaatgatgctagtaggagctaaagattactttgaaggttctgtgggaattaaggtaacatgcttaatataataagggttcagtaaatgttacctattgtttgctgttaatcagataagcagaatacattctatgtgacctacctttctttataggtgaaatgtgggaacgttaggaatttctttaccacaaagtccctcttcatatgccagtcactaagttgtaggaatttaaaggtgtttttgggataattgtctatactgagaaggttcangattctaaaaagt

SEQ ID NO: 35888 - DNA, 395 bp, Homo sapiens
acgactcactatagggcgaattgggccctctagatgcatgctcgagcggccgccagtgtgatggatatctgcagaattcgcccttagcgtggtcgcggccgaggtactttcatcagacccctgttttgtgatatatattacctgctttcatatttgtattttagaactcactcttcattccctattccactacccaacttcataccaaaaatcctgccaagtatttcagaaaacttggttattaacttggattaattacagtagacatacataggagatgtgtctatagaatgccaaaatatttaattgtgtcagaaatttagtcattcatccaaatattttgtccatatgatgccaaacatacttaatgaattatgttagctgacaaaattctt

SEQ ID NO: 35889 - DNA, 565 bp, Homo sapiens
ccctctagatgcatgctcgagcggccgccagtgtgatggatatctgcagaattcgcccttagcgtggtcgcggccgaggtacccgaaaagaaaggaagtctttagtaatgaaaggattgctgccaaaatcctgtttcccccttgcagatcttacagaaaacagccacagaatcccaaggcatcagcaccaagagagcctgtagaaactatctggtctaagctcctgaagcccagagataagaatgacttaacccaagctgcacagcctcttaacagtccactgttaaccccagaaacagatgcatttgaatctgaaaggagacaggaatcctaatcctactgctcagggacttgctgatttactttgctgtctattagcctttctgtgacatgattttctaccaagcaaagtcttttattcaagtctcccagagatttcctatttaagcgtttgctatttggccacttaaaaaagacagaagagaagtaaacagaagcatataccacacaactcagtccagtcagtagttgactctcaagatggcggatgtcactgggatggctg

SEQ ID NO: 35890 - DNA, 424 bp, Homo sapiens
actactatagggcgaattgggccctctagatgcatgctcgagcggccgccagtgtgatggatatctgcagaattcgccctttcgagcggccgcccgggcaggtacttacatgattgaggttgactatatgaggtattgttagtctgttagtctttcaaattgacttttaaaaatacatatctttatgattttcatcataaagactggcaatattataactaaaaatcttactataatgaaagaaatcatacataaaaatgtagcctgccttacatataagctaatgtagaaaagtttagacttataaaaaggcagatagtatatatatatttatatacatgtatgtatatggtatattatacatttggtggcagaaaaagaagatactgcattttcacattgaaaagaatactttgatttttgc

SEQ ID NO: 35891 - DNA, 342 bp, Homo sapiens
gtaatacgactcatatagggcgaattgggccctctagatgcatgctcgagcggccgccagtgtgatggatatctgcagaattcgccctttcgagcggccgcccgggcaggtacaaagaaaaatttgaacgttgcggcttaaaattcagttaagagaattaaaaagcaagtcataaatgccacatttttcctcaataaaaagttttgactactgtgtttatctgttgtcttgagtaacttattcatgaagctctcctattcttccccaagaccatttcgaagaaagaaaatacaggttggtcttgctttgtaagcaagaaaaaaaaaaatattgtatattttt

SEQ ID NO: 35892 - DNA, 425 bp, Homo sapiens
cgactcctatagggcgaattgggccctctagatgcatgctcgagcggccgccagtgtgatggatatcttcagaattcgcctcttcgagcggccgcccgggcaggtactaggagggtattgatgtttgaggtccaaactgaaaacccatcacctccttcccactgctatagcagcgttagccctggggttcattatctagccagttcacaccttctaaagtggggctctgaaaatgtcttacttccctcacagacaaagcaattctcaagcctcctgagatcacccaccaaccagagcaactgctgtcacttggaggtgcagctgaattcttctaattgtgacacaaactcttgaaactgtaaatgctgaaagattaaatgaggttataacactcagaaggttttataagtaaaagtaggtcaaat

SEQ ID NO: 35893 - DNA, 423 bp, Homo sapiens
ctactatagggcgaattgggccctctagatgcatgctcgagcggccgccagtgtgatggatatctgcagaattcgccctttcgagcggccgcccgggcaggtacaaatatgcttcataacaaattacaaacacttgaaatatactgggattgtgtttattctctgtttagttagatagctgtattgaagtctctgtaaatgaaaaatttacccctatccctcaacatgtaggttgagaacagaaatattaatgggtgtgatttattaattcctgagggctattagcccatcaatagactacttcaaataaccattagtctcaatagtattgattaattccccaaatacatttaaagcaatagtatatgaagtgcccttaagtgagcctcacgtttactcattctacagataagaaaccaaggt

SEQ ID NO: 35894 - DNA, 372 bp, Homo sapiens
acgactcactatagggcgaattgggccctctagatgcatgctcgagcggccgccagtgtgatggatatctgcagaattcgccctttgagcggccgcccgggcaggtacaacaaaccaataatgataaaaaatacttctctttttctccctgtttccctttttcccttggccacagccaaatgctaattgctgctttaattacagagatgtgtaaatgtattcagattacaaactctacaggaatacatcaacattttaactcttttgcgtttttactgtttaactgttttaaatgcaagttattttagggtgacactccttccagttctggccagatcatgagtttcaagatcaagagtaaaaagttattag

SEQ ID NO: 35895 - DNA, 590 bp, Homo sapiens
tgtatacgactcactatagggcgaattgggccctctagatgcatgctcgagcggccgccagtgtgatggatatctgcagaattcgccctttcgagcggccgcccgggcaggtacagtatacaagtttttccaagaaatcctaaccctgggggctcaggcgaatgaggagggtcaaatgctgagggtgggagaaagcagatctagacagcattctggaattgttgctttgccattatttgcccagaaaacatttatggcaaggaagcctgaaaacatggcaatggttgtaagatgggttgcgatacaactggtgatgtgagaagtgaaaatgaaactgactcctttagggaggacattggtttatagtaaacaggtttgcctcatcagaaatgaatatggatattgctacacaataaaaagaggaaaaacaccaacaacagtaacaatggtaatcacaataatgataatgactctgtaggtatagaacctccagttttttgtgttctgaaggttatttcagagtttcttgcaagagagaaaacaaatcagaaaaaaaggggaagagagaagatgggaaaataatttatgta

SEQ ID NO: 35896 - DNA, 429 bp, Homo sapiens
gactactatagggcgaattgggccctctagatgcatgctcgagcggccgccagtgtgatggatatctgcagaattcgcccttagcgtggtcgcggccgaggtacttgaaacttgaaagcgtctcttaataacacagcacagcaattaacagctcgcaaacttttgttttatacacaccgtgtcacgacttccagaaaccttccggattggagtccagtccttgcgtttgtttggtcgttcgtcctctttccaggcaggagagtgtcacctccgcgttttctcccttgtgtagtcggaatccatctattgcagggtgccggtggagtctgcagtgtgttctttcctgagcagattactttctccctttagactgctgcggcttgcagactaaaacaacccgttgatttgcttgacttccaggtctaaaat

SEQ ID NO: 35897 - DNA, 558 bp, Homo sapiens
gtaatacgactcactatagggcgaattgggccctctagatgcatgctcgagcggccgccagtgtgatggatatctgcagaattcgccctttcgagcggccgcccgggcaggtacaagatgagacagaattagaggatgaaaatcaagaaggcatgactgtgcacagttctgttcacagcaataacctcaactctatgccaactgctgaaaagggtaaagacacattaaaatcagcttatgatgatacagaaaatgacctaaaaggagcagctattcatatctcaaaagggatgctccacgaagaaaagcctggagagcagattttggaaggtggctcagagagtgaatctgcacagaaagctgcagggaatcaaatgaatgacagaaagattcaacaggaatccctgggtagtgtaccactcatgggagatgaccaccctaacgcatccagagacagtgtggagggagacgctttggtaaatggggccaaactgcacacgctttcagtggagcatcaacgtgaggaattgaaagaggaataagttcttaaaactcaaa

SEQ ID NO: 35898 - DNA, 363 bp, Homo sapiens
tggtcgcggtcgacgtactcaaaaactcacccagcctcaacttgaaaatgattcatatgccaaggaaaaaccattcaaatccattccgaaatttcctgtcaactttttaagttcaagaacagactctattaaaaatacttccctaattgaatcagctgctgcattctcttcccaaccatcacgaaaatgcttgctggagaaaattgatgttataacaggggaggaaacagaacataatgtgttaaagataaactgcaagcttttcatattcaacaaaacaacacaatcctggattgaaaggggcagaggaacgttgagactgaatgacacagcaagcactgactgtggaacattacagtcaag

SEQ ID NO: 35899 - DNA, 439 bp, Homo sapiens
acgactactatagggcgaattgggccctctagatgcatgctcgagcggccgccagtgtgatggatatctgcagaattcgccctttcgagcggccgcccgggcaggtactcatttaattagggttgcagaggagatggaaaaacaagctgtttgattatgaaggcaacacttctgtcagtagaattgctttggattgtaaatatgtttacttcagaggaaatcagtcagagtggatggctcagcaaaacccatcacaactgcggaaaaaggaagtgactggctagaggtaaggaaatagattttctctaagttaactggcctacgtgtgaatcgaaccctgcaccctggcctcattagcaccaacactgtgaagaacagctgtggcagagaaagtgccacggccccaccccatcaccagattcagtagaaaggcccttgg

SEQ ID NO: 35900 - DNA, 324 bp, Homo sapiens
agggcgaattgggccctctagatgcatgctcgagcggccgccagtgtgatggatatctgcagaattcgcccttagcgtggtcgcggccgaggtactaaaattccttggttcactgattcgaagaagaacatcagcaagaacatcagctcggatgggcccttagagagcaacaatagatttgaaataagggacaagccaggaggttgccggggggcgggtagggggatagttgcaaaaatgttctgaactttaaaataacggtcccttgcaaacagaagttttttctccaaagtgtctctcctccagatctcccatctaccattt

SEQ ID NO: 35901 - DNA, 394 bp, Homo sapiens
gcgaattgggccctctagatgcatgctcgagcggccgccagtgtgatggatatctgcagaattcgcccttagcgtggtcgcggccgaggtactcaatggtggcatatttatagtattatcccccaaatttttcctatctacaaaagtttttaaaatctttgaagccacattatttgaagacttaacaggaacaagagatggcgtaaaaggctgtagattatcttggaaaatccatttcactggagcagcttgagaatgctgaccacctttcaattgtgtctctgtagcaacattctttggaatttgtgtggtatttaagtattactggctttgctatttctgtaacaggtttttgggtaaaatgtttttgaaaagttcttggtaactacatttt

SEQ ID NO: 35902 - DNA, 368 bp, Homo sapiens
atacgactcactatagggcgaattgggccctctagatgcatgctcgagcggccgccagtgtgatggatatctgcagaattcgccctttcgagcggccgcccgggcaggtactggaacatttgtagctgaaggaaaatctccaaaaaagatttcaaagagactaaagtaggaatgggtgctggagaatgagcaagaagggtgagagtcccacgggtgaagggagaaagcagcagagaatgaatataagcccggagaatgaacataaatgtgaggggaagaggccagaggccaacactggaaggacagtgagggccaagaaaggaactactaatgtttctgagacctgcagggaaccatggtattaagct

SEQ ID NO: 35903 - DNA, 644 bp, Homo sapiens
acgactactatagggcgaattgggccctctagatgcatgctcgagcggccgccagtgtgatggatatctgcagaattcgcccttagcgtggtcgcggccgaggtacagtgaaaagagccaaggctgtgtgaccccctcatcacttagccaggcgtatggtcctggtttctgaggctgcagaaagcatcttagcaatttgtgtttggatggtccatgcctgactattctaggctggaggttcctaaagagtaacaagaggaagagaaacaagaatctctgacacttgttgagaatagagcacagtcccatttgtttgaaaagagacaccaggtagccatgtttatgtgccagaaatgcattccacctcaaggaggacttaatttatggacccgtgtgtgccaggctgagctgggcaagatctttctcaggacaaactctgccatgcagctaaaagcctggaaactaaaggatttcatgtagtaaactatcttccaacccctgtaggcatcagaccacaggatgaggtttcagaaggtcataaggcagaatagttaagcctacagggcttacagtctgacagacctgggttcagttcttgggtcttcatcactagttttgtgacttcgggaagatgactccccgag

SEQ ID NO: 35904 - DNA, 365 bp, Homo sapiens
ctatagggcgaattgggccctctagatgcatgctcgagcggccgccagtgtgatggatatctgcagaattcgccctttcgagcggccgcccgggcaggtacaagaagagaggatggagacgagggtaggcttcttttcagaaatacattctggatcagaaagtctatatcagtgggattttctgaatgacccaggttttttttgtttgtttttgtttgtttgtttgtttgttttagaatttctgtgctttggagctagaaggatatataaatgagaaaactgagaacaaaagaagagacaatatatttttggttgcaagggataagaacctaactccaacaagcaaagcaaaggggggttttatt

SEQ ID NO: 35905 - DNA, 561 bp, Homo sapiens
tatagggcgaattgggccctctagatgcatgctcgagcggccgccagtgtgatggatatctgcagaattcgccctttcgagcggccgcccgggcaggtacacagtgaaaaggtatttggctgtgtttctatttacattcactgtccttgataaatactaattggccagtgattgtaagtctcaagaatttttgctgcagagcgtgtggtaaaactcattttaagtggtgtaggagtcatgcagtgtttatcacttaagtgggtaatctgacagctgtattttactgcctgactgcagctttattcttgatcattctcttccttgagtagtgtgttatggtcatgttgtcttagctgcaattaattcccaacctttttttgttttccagtctttgtcttttgcatttatttttctgctcctgcaatgccttactttgctgtctctgcctcgctatttcctatttattctacaaagctcaccttaagtgtcacgttttcagggacatgtttaccaatgtacctcggccgcgaccacgctaagggcgaattccagcacactggc

SEQ ID NO: 35906 - DNA, 421 bp, Homo sapiens
atacgactactatagggcgaattgggccctctagatgcatgctcgagcggccgccagtgtgatggatatctgcagaattcgcccttagcgtggtcgcggccgaggtaccattcctatgatggtagccattcttctctttataaaatatttcctctttgaaaagcgtcctaaaacattaatttcaaatcccctcttggatgcaaagtgtccctaagaccgtccattcaacagtatttatgtgagccaacttactagagccgctacaactaatcatgatagacagtccagaatctccctggactttatactgggccagcctcattgtccctaagatttctctttttatgtctcacggattacttctctttttaattgccccaggcacattccaaatgagaacctggtaaaagtcacattggac

SEQ ID NO: 35907 - DNA, 443 bp, Homo sapiens
  misc_feature 264: n = A,T,C or G
ctcactattgggcgaattgggccctctagatgcatgctcgagcggccgccagtgtgatggatatctgcagaattcgccctttcgagcggccgcccgggcaggtacctgcaatatatttggagtattatgtctttattgttgttaaaaagtttttattgaatgtatgaaaattatcaaattgtattcatcaattattaacatgtcctggggaaggaagggaaactttctaggacagaagtcactttcagatgtcatgtatgtatntgggtgttcaatcatatctaacactgttttgatttttgtgggaaaatattccaggaaacgctaattctctttagactccttgttcttttatgactacaatgaacatatgtctatgtgatagctaaagatatttttgaattgtattgtgtgcttaattatcgggtaagtataaatatttg

SEQ ID NO: 35908 - DNA, 421 bp, Homo sapiens
actactatagggcgaattgggccctctagatgcatgctcgagcggccgccagtgtgatggatatctgcagaattcgccctttcgagcggccgcccgggcaggtacttctatgatatagttgtcaaaatcaactggaggataataaaatattgtgggttctcagcattcttagaatccaaattacaaccatatcagtacgggtttggtccacatgagccaactgaagtcattttcctcaaggttggaatttgtgccaacctaaatacgttgtttctttgatggtgtttattgctattggtattattttgaactaataacaattattttgtctaaataatgctaagacaattctgttaagaattttgtcagctaacataattcattaagtatgtttggcatcatatggacaaaatatttggat

SEQ ID NO: 35909 - DNA, 411 bp, Homo sapiens
  misc_feature 357: n = A,T,C or G
cactactatagggcgaattgggccctctagatgcatgctcgagcggccgccagtgtgatggatatctgcagaattcgccctttcgagcggccgcccgggcaggtactaggttgagaagtttctaatgtgaaaaatcttgttcatctgttcatgcaacagacatttattaggcatctgtagaccatataattgagacagagaaacattttggagaattagaagctcacactatttatggcataggttatataattatgataatttatgatttactttcttgacaaaaacagctacaaccatgtatacctactatttctcctacaaagtaggtgagattttttgattttacattagttnggagggtttttgattttggttttgctttaagataggcattgactatagcttctg

SEQ ID NO: 35910 - DNA, 349 bp, Homo sapiens
gcgaattgggccctctagatgcatgctcgagcggccgccagtgtgatggatatctgcagaattcgccctttcgagcggccgcccgggcaggtacacagtcattgtgatcttagttatcatttctaagtaattaaatttgtatttttacttgcttatattagaaatgcttattaccaatgagaaacagaaaatgccacataagtgaacatttaaatgttacaaaaatttataatatatgtaacgctactaaaatatataatgaacttttcaaacatgtaaatataaatcaggaaaacctgatatgtaataattgggccaaaaatgaaaatcacaaaacacagtagggggg

SEQ ID NO: 35911 - DNA, 575 bp, Homo sapiens
tacgactcactatagggcgaattgggccctctagatgcatgctcgagcggccgccagtgtgatggatatctgcagaattcgcccttagcgtggtcgcggccgaggtaccaaatatgttactacaaagcaactgttcaagtgtgctaaaaacaggtgtcttctcccttttcagagctcccctagtcatttgcaatatattttgcctacttctctaaaaatcaaaataggtcctaataagtaagatacaggtcttcaatcccaacagcaactaagggattttcctgaataaaaaaaaacaaaaacaaaaacaaaaaaaactctgctgccagtttgcagacagagtgccgtgtttcaccccaacctatggaggctaaatcacagtcaaaaacaaactgcgtgactgggaattatagtaagaggagttaaaaacaagggcaggtgcagtggctcacgctcgtaatcccagcactttgggaggccgaggcaggtagatcacctgagttagggtgttggagacagcctggccaacacggaaaaaccccgtctttactaaaaaatcaaaattaatggggtgt

SEQ ID NO: 35912 - DNA, 440 bp, Homo sapiens
tacactactatagggcgaattgggccctctagatgcatgctcgagcggccgccagtgtgatggatatctgcagaattcgccctttcgagcggccgccggggcaggtacactcttcttcttttatttatttatttatttatttttaggccattcttctggtttgccaaattctattaagacagtgatacatttgcttccttatttatgcatgcttagatcatgaacatgatgcccttcttttttttttttctttggtcaagtagggattaatgccataggtttagagagaaggattgttttcagtttttaagagaattttttaaaaatacattttatggttctcttaaggaattaatattcacttctgaaggacttacttgtaatatataatttatcattttagccagcagggaaataaatcatttttaatccccagaaga

SEQ ID NO: 35913 - DNA, 438 bp, Homo sapiens
tatagggcgaattgggccctctagatgcatgctcgagcggccgccagtgtgatggatatctgcagaattcgccctttcgagcggccgcccgggcaggtacataggaatgcatctttgtttgcacgtgtgtgtgttgaggaaacaggaggaatattcatctttttgttgtttggattttggcccagtcccttatgttaaggactgactgattcctctgacagaattcagaccaagtcattaaactttgttgcttatggaaagtaatcttagtatctgttggcctttatttaaaaaaataattttttaaaataagcatgaacaatattcattatcccattataaccttattattaggtgagtcagatcagtctctaagtagtgagtatgaagcaccttaaattcttcctaaaaacaagattaaatttaaatatacaaaca

SEQ ID NO: 35914 - DNA, 583 bp, Homo sapiens
ctatagggcgaattgggccctctagatgcatgctcgagcggccgccagtgtgatggatatctgcagaattcgccctttcgagcggccgcccgggcaggtacccgaaaagaaaggaagctttagtaatgaaaggattgctgccaaaatcctgtttcccccttgcagatcttacagaaaacagccacagaatcccaaggcatcagcaccgagagagcctgtagaaactatctggtctaagctcctgaagcccagagataagaatgacttaacccaagctgcacagcctcttaacagtccactgttaaccccagaaacagatgcatttgaatctgaaaggagacaggaatcctaatcctactgctcagggacttgctgatttactttgctgtctattagcctttctgtgacatgattttctaccaagcaaagtcttttattcaagtctcccagagatttcctatttaagcgtttgctatttggccacttaaaaaagacagaagagaagtaaacagaagcatataccacacaactcagtccagtcagtagttgactctcaagatggcggatgtcactgagatggctg

SEQ ID NO: 35915 - DNA, 586 bp, Homo sapiens
tgcatgctcgagcggccgccagtgtgatggatatctgcagaattcgccctttcgagcggccgcccgggcaggtactctagaaccaaagttaaagtgagtctcaatttctcacctgaataaaacttcatttttccacttttcttatcagtccttaaaaaacgatgagcagtctgccaaaactgatgttcagaaacttctggaattaggacagaaacaaagagaagaaatgaagtctcttcaggaggccctgcaaaatcagcttaaggagacatcagagaaagcagaaaaacaccaggctactattaattttttaaagactgaagttgaaagaaagagcaaaatgatccgagacctccagaatgagaataaaaacttgaaaaacaaactcttgtcaggaaacaagctctgtggcattcacgcagaagagtcaaaaaaaatccaagcccagctgaaggagcttcgttatgggaagaaggatttattatttaaggcgcagcagcttactgatctggaacaaaaattagctgtagccaaaaatgaactggagaaagcagctcttgacagggagtcacagatgaaagcaatg

SEQ ID NO: 35916 - DNA, 426 bp, Homo sapiens
acactacttagggcgaattgggccctttagatgcatgctcgagcggccgccagtgtgatggatatctgcagaattcgcccttagcgtggtcgcggccgaggtacaaccagaaccaacaattgtatttttctatagttattataaaatagtaatcaatgctatgtatttgatgtatatgtgtctaaatgagaaataacttttggctttgagtctttttaatgtgcgttaaatatgtaaactgaacctgttcctaaaatgcattaaacttgaatgctgtgtctatccaatgccaaaatgctcagaagaaaagtgaataattcagtcattcatctggatgtagttttctgagtaatctcaaatatctgaatattgaaaaaactaggttgctaacttttttcattccttatgcaaatgtttagcatcata

SEQ ID NO: 35917 - DNA, 414 bp, Homo sapiens
tatagggcgaattgggccctctagatgcatgctcgagcggccgccagtgtgatggatatctgcagaattcgccctttcgagcggccgcccgggcaggtacgcatcttcccattcgaccttgtcctccaggttcactcacgccaaggaggaggatgactcagatcaggttgaagtccctcgagaccaagagaatgatgtcggggataagcagtcggctgtgaagatgaagatgtttgggaagctcacccgagacacgtttgagtggcaccctgacaagcttctatgtaagagatttaatgtccctgacccttatccagattcaactttagttggcttaccaagagtgaagcgtgacaagtaccgtgcctgaattaattattaatatttaaaatacttcattccttaactctccct

SEQ ID NO: 35918 - DNA, 431 bp, Homo sapiens
tatagggcgaattgggccctctagatgcatgctcgagcggccgccagtgtgatggatatctgcagaattcgccctttcgagcggccgcccgggcaggtaccattcttatctcagaatgctgtaaaccatcagtagaagcagtttagatttggactgcatggtaaaatgaaaagtaataaccctccaaccacaacctagtcagggtattaataattatatgtagcaagaaaacaaagaagaaaataatattgaaaaaatggagattccccaaccagtttcatatttgaaggatctgagttgtatttttattaaggaaattttttttctgaatactgtcttccaaaatgttaacattaaaatctgaatcagaggactctgaatggaaaagaagtttgatcactgacacctagggctctgaagcgtgtgtggcc

SEQ ID NO: 35919 - DNA, 403 bp, Homo sapiens
agggcgaattgggccctctagatgcatgctcgagcggccgccagtgtgatggatatctgcagaattcgccctttcgagggccgcccgggcaggtacaaccagaaccaacaattgtatttctctatagttattttaaaatagtaatcaatgctatgtatttgatgtatatgtttctaaattagaaatttcttttggctttgtgtttttttaatgtgcgttaaatatgtaaactgaacctgttcctaaaatgcattaaacttgaatgctgtgtctatccaatgccaaaatgctcagaagaaaagtgaataattcagtcattcatctggatgtagttttctgtgtaatctcaaatatctgaatattgaaaaaactaggttgctaacttttttcattccttatgcaa

SEQ ID NO: 35920 - DNA, 379 bp, Homo sapiens
gcagtgtgatggatatctgcagaattcgccctttcgagcggccgcccgggcaggtacagtgaaaagagccaaggctgtgtgaccccctcatcacttagccaggcgtatggtcctggtttctgaggctgccagaaagcatcttagcaatttgtgtttggatggtccatgcctgactattctaggctggaggttcctaaagagtaacaagaggaagagaaacaagaatctctgacacttgttgagaatagagcacagtcccatttgtttgaaaagagacaccaggcagccatgtttatgtgccagaaatgcattccacctcaaggaggacttaatttatggacccgtgtgtgccaggctgagctgggcaagatctttctca

SEQ ID NO: 35921 - DNA, 502 bp, Homo sapiens
ccctctagatgcatgctcgagcggccgccagtgtgatggatatctgcagaattcgccctttcgagcggccgcccgggcaggtacagtgaaaagagccaaggctgtgtgaccccctcatcacttagccaggcgtatggtcctggtttctgaggctgccagaaagcatcttagcaatttgtgtttggatggtccatgcttgactattctaggctggaggttcctaaagagtaacaagaggaagagaaacaagaatctctgacacttgttgagaatagagcacagtcccatttgtttgaaaagagacaccaggcagccatgtttatgtgccagaaatgcattccacctcaaggaggacttaatttatggacccgtgtgtgccaggctgagctgggcaagatctttctcaggacaaactctgccatgcagctaaaagcctggaaactaaaggatttcatgtagtaaactatcttccaacccctgtagacatcagaccacaggatga

SEQ ID NO: 35922 - DNA, 460 bp, Homo sapiens
atacgactactatagggcgaattgggccctctagatgcatgctcgagcggccgccagtgtgatggatatctgcagaattcgccctttcgagcggccgcccgggcaggtacctatatcttcagtgtggaggtgaaggcagtattaacaatatcctatagttgactgaagagttggttacagcaaagctctccattgcccttaaattttctctctccttaatacagtaggatcaattttaagtgcattttatgtgtgcattttaaaactcttttttaaaaacagaatagaaatggttttcagagtgatgctgatattggttgatgatgccaaggcaccaatggagagcatattttttaaattgaatatgtttttattttcttgtttgttgatttttaaagtgaatccaaatgtgaagaggaaaaaaatcaaattctgccaatttgaaaagaacaaaaccagc

SEQ ID NO: 35923 - DNA, 246 bp, Homo sapiens
agggcgaattgggccctctagatgcatgctcgagcggccgccagtgtgatggatatctgcagaattcgcccttaacgtggtcgcggccgaggtaccattcttatctcagaatgctgtaaaccatcagtagaagcagtttagatttggactgcatggtaaaatgaaaagtaataaccctccaaccacaacctagtcagggtattaataattatatgtagcaagaaaacaaagaagaaaataatattg

SEQ ID NO: 35924 - DNA, 459 bp, Homo sapiens
gcgaattgttccctctagatgcatgctcgagcggccgccagtgtgatggatatctgcagaattcgcccttagcgtggtcgctttcgaggtacctctttcagtttcccaattagttatttgttttagattaaacaatagtgtaatgcatcaattccttgggtaatttaccgattggaattcctagtgtcatccttgagacacaagcaaaaaactcaacaatattatccacgtgaaatgggacctctaaactgtcctgttttgttacagcctctaatgagctaaaatagtataagaatcttgaagattaagaatttctgtagtgctctacttgcctgaaatttggggtgctaagcattaaaaaaatgcaattttagtgtgttatacttgcggacattaaacactatgtgtaaaggttgagaatttctaccataaaatacatagatcctctggatgtaaatc

SEQ ID NO: 35925 - DNA, 429 bp, Homo sapiens
tacactactatagggcgaattgggccctctagatgcatgctcgagcggccgccagtgtgatggatatctgcagaattcgcccttagcgtggtcccggcccaggtacaagagggtgcactaacaaaggtctgatttaagtgcttttattcaacccagtgaagggaaaatgacagtaatacatctaagccatgcataaaggattcaggcttccttgaaaaggattcacgtggcataaaatggtttgtttcttcacagcaatttacatttattaaaatagataataggcataatcattgtcaaaatagagcttctaccctgtataatatcttagtacattccccgcgtacataaaatatatttaactattgataatgtggggtgggtaatactggctgggaaataatgttagaagcttttcacttaaaaaaa

SEQ ID NO: 35926 - DNA, 421 bp, Homo sapiens
tacactactatagggcgaattggcccttagatgctgctcaaccggccgccagtggtgatggatatctgcagaattcgccctttcgagcggccgcccgggcaggtacagaaagttcagccagtcttcagagaagtaaaagtgatgtctattgtgcattgaagtaaatattacaaacattccagtttcgcaatacaatacttgagctttcgaacacctcagacactagaatgtgtaatgcgagtcaaaaaagctgacatacaaaacaattcccatttggctcagggttcctaaatgtcacaatatcttgggtaaaatatactttttgatttcctgatgatgtccttctaatcccttctgactttgattcctaacagccaggcactgttgacatgaatcattaacttccaaacccctttaaaat

SEQ ID NO: 35927 - DNA, 334 bp, Homo sapiens
tacgactactatagggcgaattgggccctctagatgcatgctcgagcggccgccagtgtgatggatatctgcagaattcgcccttttagcggccgcccgggcaggtacgttcttggagacacagcaatgcagaagatggccaagtcccatgttttcttaagtgggatgggtggtcttggtttggaaattgcaaagaatcttgttcttgcagggattaaggcagttacaattcatgatacagaaaaatgccaagcatgggatctaggaaccaacttcttttctcagtgaagatgatgttgttaataaagagaaacagggctggaagctgtacctc

SEQ ID NO: 35928 - DNA, 408 bp, Homo sapiens
agggcgaattgggccctctagatgcatgctcgagcggccgccagtgtgatggatatctgcagaattcgccctttcgagcggccgcccgggcaggtacctggcactacagacatgcacaagcatgcatggctaattttaaaaaaatttttgtagaaatggagtcatgaactcctgggctcaagtgatcctcccacctcaacttcccagagtgttgagtgagattacagttatgagccaccatccctggccaataaaggtgtttttaatacctataagaatattgcctgcaaggatgtttgataggtttcttgatatttcattctctcttgaaatgtttgcttcgtcaattttttatttttcataaaagctttactcaagaattaggatgaccactatgttatctagtag

SEQ ID NO: 35929 - DNA, 586 bp, Homo sapiens
tacgactcactatagggcgaattgggccctctagatgcatgctcgagcggccgccagtgtgatggatatctgcagaattcgccctttcgagcggccgcccgggcaggtactgccctccttatttcagcgctgtcattctgatcactctaggaccggttgagactttttcgtgatacagtttcctacctttttaggcaaccatctgtaagacaaggtagaatgctaccataaccatgattaacatttgcaaacactctgccacagtgcagccactttctttgcctccagctgaagaaattgaggtgcacagaggttaaatttgatgctcaaagcaatacaactagaaaatataggaggctgggctgcctgattgattcccagcttagagattgaaagtcacatgcgaagcgctttagcagatagagaagggggagtcatactccagcgtgcattttagtttgtgcttttctgtccttgaattaagaagtgtgacgtgtgcctccaacagcatagcatgctacagaaatggatttcttttcctggggttgataatctgctggccaaatctttatctctgtagtatccc

SEQ ID NO: 35930 - DNA, 407 bp, Homo sapiens
aatacgactcatatagggcgaattgggccctctagatgcatgctcgagcggccgccagtgtgatggatatctgcagaattcgcccttagcgtggtcgcggccgaggtactagatatccaaatgaacctgggagaattacatgttagatagcatttgagttaaaccagaccaatttatatgggacaatttactagttgacaacaaaatatttctgactgtgggtattcaattcaatgaggttattgcttaaggatcataattggtctggaatctttgagaatgtgtaggctactttataaagttacataaaattgtgaaaaagttgcatgctttagaaacagtatttccatcaagcttgtggtttaaaaagactatgaagacaatagcaaatggatgtttttaacacc

SEQ ID NO: 35931 - DNA, 397 bp, Homo sapiens
tacgactactatagggcgaattgggccctctagatgcatgctcgagcggccgccagtgtgatggatatctgcagaattcgcccttagcgtggtcgcggccgaggtacgcgggggagccgaggaaaactgagcgtgggcctcagaaagaagttaaggcacccgcgagccgggcaactgccctccttccgcgccggcggagcgattaaagtgaagaaacaatggccagcaatcacaaatcttcagcagctcgccctgtttcaagaggtggagttgggttaacaggaaggcctccttctgggatacgacccctatcaggaaatattcgagtggcaactgcaatgccacctgggacagcaagaccaggttctcggggttgtcccatagggactggtggagt

SEQ ID NO: 35932 - DNA, 304 bp, Homo sapiens
ctagatgcatgctcgagcggccgccagtgtgatggatatctgcagaattcgccctttcgagcggccgcccgggcaggtactcagctggtggaagtcaaccctttaagcccactcccatgcataagagtaactttcactcttttccctattttaagactatttcaatagtaaatgctatttgtcacaaggaagttagatggaaaggaatgaatcaccattcaggacaaatgtataaccactgtgatgtgactgacaccaaagcagattatggctgtgtgttctgagttgtcttcctgtaaaaaag

SEQ ID NO: 35933 - DNA, 252 bp, Homo sapiens
gctcagcggccgcagtgtgatggatatctgcagaattcgcccttagcgtggcgcggccgaggtacactatcctgtggtttctaaattctgcttctttattaagaagcgattaactgtaaggtagaggaactaccatgttatacttctctgcaaatctcagaaacaagcacccaaatgtagatcaccctgctgaagctcaaatcacaggactccttgagtatagatgccttagaatgctacagggctgctacc

SEQ ID NO: 35934 - DNA, 413 bp, Homo sapiens
ctactatagggcgaattgggccctctagatgcatgctcgagcggccgccagtgtgatggatatctgcagaattcgccctttcgagcggccgcccgggcaggtacccgaaaagaaaggaagctttagtaatgaaaggattgctgccaaaatcctgtttcccccttgcagatcttacagaaaacagccacagaatcccaaggcatcagcaccaagagagcctgtagaaactatctggtctaagctcctgaagcccagagataagaatgacttaacccaagctgcacagcctcttaacagtccactgttaaccccagaaacagatgcatttgaatctgaaaggagacaggaatcctaatcctactgctcagggacttgctgatttactttgctgtctattagcctttctgtgacat

SEQ ID NO: 35935 - DNA, 432 bp, Homo sapiens
actactatagggcgaattgggcccttagatgcatgctcgagcggccgccagtgtgatggatatctgcagaattcgcccttagcgtggtcgcggccgaggtaccttacaatgttagtaactgtcttttattaagtaagaaaaagttaaaatggcatgtaacttaagaaggtgggaaaataataaaggaaaaaattaagaacaaaacgaaaagaatcatgaaatagtaaaacagtaaaattaagatataaatctcagagttggttatttgaaaagatcaatgaaacagagtaattctggaaaaaccaatgagaacaaaaagggaaagcacacgcaacatgggaatgaggaagcagaatactacaactccaggccaacaaatctgaaaatagaacagaatcactatttaggaaaattcacttaattaaaaaaaat

SEQ ID NO: 35936 - DNA, 425 bp, Homo sapiens
actactatagggcgaattgggccctctaagattccattcctcaaccggccgccagtgtgatggatatctgcagaattcgccctttcgagcggccgcccgggcaggtacgcgggacacattactcagttgtgagggggaaggtagactctttccagacctttgataaaggggctgctcaaaaaagccacgaccttgggcctctgctaaaaccatggctttaagtaaggagggagcagatatataaaaaaccttatccctctttctaatctcttatgtcctgtgagtgtcacccattgagtaaacccaagtggaagtcagtaggaaagtagctgggatgatgccagtctttacagggtcttctctgtcacccaggctggaagtgaaatggtgttgatctcggctcactgcaacctctgcctcctggg

SEQ ID NO: 35937 - DNA, 432 bp, Homo sapiens
agggcgaattgggccctctagatgcatgctcgagcggccgccagtgtgatggatatctgcagaattcgccctttcgagcggccgcccgggcaggtacttgaacatacctagctattatctctctttcatagattaaaaaaaacaaggttcagagaatccaagtgaatggctcaagatcatccaattagtaagtagtagctgaaagaatgacaaataagtcttaaccataaaccagtgagaaagaactttaggagcaatatgatcaaatagtatggaagaatacgcagagagagttatttgcttttcttcagaaaagggtggggaagagagtcagggaagtctttgtgaaggagaggaaatgtaatctactaggtggccagtcaatccataaacaattggagttgactaatgtggaaaaatatttttcttttt

SEQ ID NO: 35938 - DNA, 617 bp, Homo sapiens
atacgactactatagggcgaattgggccctctagatgcatgctcgagcggccgccagtgtgatggatatctgcagaattcgccctttcgagcggccgcccgggcaggtacgagaactggagcaagaggtgcaaagacttaaaaaggaacaggccaaaaataaggaggactcaaacatagagaaaattcagcaggagctggaaaaactaagcgtgcatttgatttcagtgctcatggccgaagacacgtagccctaagaatagcctatatgggctggggataccagggctttgctagtcaggaaaacacaaataataccattgaagagaaactgtttgaagctctaaccaagactcgactagtagaaagcagacagacatccaactatcaccgatgtgggagaacagataaaggagttagtgcctttggacaggtgatctcacttgaccttcgctctcagtttccaaggggcaaggattccgaggactttaatgtaaaagaggaggctaatgctgctgctgaagagatccgttatacccacattctcaatcggtatggctgtagaatttcctctaatcttatatgactgtaagtttgaaaatgtcaagtggatctatg

SEQ ID NO: 35939 - DNA, 483 bp, Homo sapiens
  misc_feature 432: n = A,T,C or G
ccctctagatgcatgctcgagcggccgccagtgtgatggatatctgcagaattcgccctttcgagcggccgcccgggcaggtactgccttatcattttattggtgttgtgttactagagatttgacttgaagtccttaaggcagcatactttgcagataaataatctgagagaatctggtaggtcaacagatctgctgtctgtgagctaacactaaagaaatagaagaagaggaaatctttgaaaaatcgagaaaagatacctttgatcccaaaagtcttggtttgaaggaactttttatccattagatcatctaattctggaagaataaccaaagtgcagcatccttgtattcttcctctaagaggctcatcctcataggggatgtaaattgagccaagttttctaagtgtctaaatgttaagtgctccanggctcagtccttggactctctagtctcttctttggtgaagtgtccatttgt

SEQ ID NO: 35940 - DNA, 452 bp, Homo sapiens
tacgactactatagggcgaattgggccctctagatgcatgctcgagcggccgccagtgtgatggatatctgcagaattcgccctttcgagcggccgcccgggcaggtaccagaagagcccagtgcccagaaaccaatatcagttctatacagatacaaggtgatgctgattatttcatcaaccatcttggagttcccatcgtgcagtttgcttacgaggacatcaaaacattagagggtccaagttttctctccgaggcccgtttttctacacgagcaacaaaaattgaagaaatggatccctctttcaaccttcatgaaaccattactaagctctcaggagaagcgattttgcgaattgccaacgaacctgttctgccctttaatgcacttgatatagctttagaagttcaaaacaaccttaaaggtgatcaacccaacactcatcaactg

SEQ ID NO: 35941 - DNA, 436 bp, Homo sapiens
tacgactcactatagggcgaattgggccctctagatgcatgctcgagcggccgccagtgtgatggatatctgcagaattcgccctttcgagccgccgcccgggcaggtacatgtgtaattcatgggtagtatgatgtatgtgttataacagcatactggagaatgagaagctcacaatagtggtttcttttggggaatgggcttagggagatgggcatgtaagggaacttcatctggagataatgatttattttcttaagaaaaagtagatagaagaagaatgttagaatatcttaaaaaaataggaatcccattctgtattattggataacattagcacacccaatgaaatcaattccttagttttatccaatgcccagtttatcctcatctttctccagttatccataaaatatcctttaaagctgtttttccc

SEQ ID NO: 35942 - DNA, 319 bp, Homo sapiens
agggcgaattgggccctctagatgcatgctcgagcggccgccagtgtgatggatatctgcagaattcgccctttcgagcggccgcccgggcaggtacttggatcagtagaataaatatttattgaatcaatcagtcagccaattaatatgatgttagtgatagacctgcctccttttatggaagaggtaacagatccagagaattcaagtaatttatttgtagactgaaaaatatattaaagtctttgctgcaatcatatgtaacaaaaagaaccaaaacaaacactttttagtggcacctgtggatttacaaagggtt

SEQ ID NO: 35943 - DNA, 506 bp, Homo sapiens
  misc_feature 335: n = A,T,C or G
ctctagatgcatgctcgagcggccgccagtgtgatggatatctgcagaattcgcccttagcgtggtcgcggccgaggtacttttgataataactcactctgtgcgatattcctgaataagtccatctcaaaagtttgggattttcctcctcttaactttcttaatatttggacatgcagttgtcgccaaacttgggtattcatggaatttctagtaaatgaaatacctatactttgatactgaagactgccaaatacataggaattttctttcttaaaaaacagtaatgaagactatatctcctttcccagcactgaatgttttactagcactgngtgctcaccatgcaactgaagaaaatgtggaaactcaaaaggtcaggacagacttccaagcacttgcaactgatgttactgtcttcaattttaataattacacatatttgtatatttcagagaagtttttaatatttctctgtccactttttataagctttaaaatgattt

SEQ ID NO: 35944 - DNA, 464 bp, Homo sapiens
tatagggcgaattgggccctctagatgcatgctcgagcggccgccagtgtgatggatatctgcagaattcgccctttcgagcggccgcccgggcaggtacattatgtagctatgcacccatctaaagaagttaggaaaatgacatcaagtagagcatcaaaagaaagaaggaaaggataacttaaaacagaaatgaatgaaataaaaccagaatagaagagacgatctacaaatccaaaagttggtttgttgaaaatactagtagagctgacatacttgtggtgagactgatggaaatagtgcagttacaactaaccaatatcataattggaaaggaaatcactataggtgctgtaaaaattaaaaagataatagaatattatgaacaattttctgccaatattattgaaagtttagataaaatggaaaattcatttaaaaatataatttgacagtattatgtt

SEQ ID NO: 35945 - DNA, 437 bp, Homo sapiens
  misc_feature 362: n = A,T,C or G
actactatagggcgaattgggccctctagatgcatgctcgagcggccgccagtgtgatggatatctgcagaattcgccctttcgagcggccgcccgggcaggtactagacttattcaaatcccttagtcccaagcctgaattgattccaagggcaaggatgtctccatttgtgagaaaaaaaagagcaagagaaacgaaaccaagaagtgcttgacatcctgagcaattcccggatgctgctttgccagagagtaggatgccaaatatttcgagaaagcctttctggacttgaaaaggaaaaatgagagccagtcttgtcgtgtcatttgacttttaaatcatctcctggaggaaggttatnatgggagaatcttcagcatgagatgattctttataagggctaaattaaagcaaggggattttccctagcccaata

SEQ ID NO: 35946 - DNA, 518 bp, Homo sapiens
actatagggcgaattgggccctctagatgcatgctcgagcggccgccagtgtgatggatatctgcagaattcgcccttagcgtggtcgcggccgaggtactgaaaatttaacaggtgcttttatgtggcaatattacctcacccactttcaaaagatgtcagcaagctaggtcaaggatcaggtgccacgttatagacttgaagaacttggctgattttttcccaggatttatccatcagcagtcctattagcagcagaaaattagaaatcctgaattttaacaaagtccctaaagagtcaaagaacactgggtgatcacaatcaaccaaagctaccacttgtccagagcatttttctaaagagaaacagctaacacaaaaaacttaactcctccttcaggaaagatttcctcttcgccggtagtctctcctgttcgtcctcctgcatcgaggcggccagcgggagcccgtccgccactcgggcgatcattgttagcaacaccatcttcacaaactac

SEQ ID NO: 35947 - DNA, 504 bp, Homo sapiens
gcatgctcgagcggccgtcagtgtgatggatatctgcagaattcgcccttagcgtggtcgcggccgaggtacaaactgatggtaaaacagatagcaccccaaaatatttccacatgcacaaacaaccttgaaacgtgtgttcgcatatttacaagcaggtatttttccaatgccactcacagccaattagtgggtcattaaattaactcagtgactcccaaccaacatatatttcccataaatagaatgaaattgaaaaggtggactagaatagaaaatatcagagtgcctgacatatgtaggtatatcttgtttcatgaaaagtttgttttagaaatataaatgttgttatagatacatgtgaacatgtaaaatggatttcttattgtaggttaaagtccaaaaagtttaaaagcttcttgtagaaaagatcaggaagacaacatcagtagttaagagcaaaggccgggcatggtggctcatgcctataatcccagtacgcgg

SEQ ID NO: 35948 - DNA, 473 bp, Homo sapiens
actactatagggcgaattgggccctctagatgcatgctcgagcggccgccagtgtgatggatatctgcagaattcgccctttcgagcggccgcccgggcaggtacattttaatttacatgttgtgtagaacatagatgagaactccgggaaaacttgggaatggcaaccaaccaaaatcatttttaatcatttattagaaatttctcaatattgtgtctttttcttttgaaactctaaacacttcagaaaaaaacactatcagtgtagttcatgttagtataattatagatttacatatatttgaatagttaatttgctttgttttacacgtagcccactgcctcattataggtaaaaggcatttataactgctcaggggattacgagaactcaactgaaactgaatttttgtaacaagaatgttaatagtggcaaagtcctctgtcagtaaactctttaagcttggtgccgc

SEQ ID NO: 35949 - DNA, 177 bp, Homo sapiens
gactactatagggcgaattgggccctctagatgcatgctcgagcggccgccagtgtgatggatatctgcagaattcgcccttagcgtggtcgcggccgaggtactttttttttttttttttttttttgttttttttttttttttttttttttttttttttttttttttatttatttt

SEQ ID NO: 35950 - DNA, 396 bp, Homo sapiens
ttgggccctctagatgcatgctcgagcggccgccagtgtgatggatatctgcagaattcgccctttcgagcggccgcccgggcaggtacagtgaaaagagccaaggctgtgtgaccccctcatcacttagccaggcgtatggtcctggtttctgaggctgccagaaagcatcttagcaatttgtgtttggatggtccatgcctgactattctaggctggaggttcctaaagagtaacaagaggaagagaaacaagaatctctgacacttgttgagaatagagcacagtcccatttgtttgaaaagagacaccaggcagccatgtttatgtgccagaaatgcattccacctcaaggaggacttaatttatggacccgtgtgtgccaggctgagctgg

SEQ ID NO: 35951 - DNA, 422 bp, Homo sapiens
acgactactatagggcgaattgggccctctagatgcatgctcgagcggccgccagtgtgatggatatctgcagaattcgccctttcgagcggccgcccgggcaggtacccgaaaagaaagggagctttagtaatgaaaggattgctgccaaaatcctgtttcccccttgcagatcttacagaaaacagccacagaatcccaaggcatcagcaccaagagagcctgtagaaactatctggtctaagctcctgaagcccagagataggaatgacttaacccaagctgcacagcctcttaacagtccactgttaaccccagaaacagatgcatttgaatctgaaaggagacaggaatcctaatcctactgctcagggacttgctgatttactttgctgtctattagcctttctgtgacatgattt

SEQ ID NO: 35952 - DNA, 503 bp, Homo sapiens
  misc_feature 355: n = A,T,C or G
ccctctagatgcatgctcgagcggccgccagtgtgatggatatctgcagaattcgccctttcgagcggccgcccgggcaggtactcacgttgcctcgtgtcaccaaaattggtgtggctgctgtggtgcggggggctgcactgatggcaccccttcctgtcttcatcaagcagctgcccttctgccgctccaatatcctttcccattcctactgcctacaccaagatgtcatgaagctggcctgtgatgatatccgggtcaatgtcgtctatggccttatcgtcatcatctccgccattggcctggactcacttctcatctccttctcatatctgcttattcttaagactgtgtngggcttgacacgtgaagcccaggccaaggcatttggcacttgcgtctctcatgtgtgtgctgtgttcatattctaggtacctcggccgcgaccacgctaagggcgaattccagcacactggcggccgttactagtggatccgagctcg

SEQ ID NO: 35953 - DNA, 440 bp, Homo sapiens
tatagggcgaattgggccctctagatgcatgctcgagcggccgccagtgtgatggatatctgcagaattcgcccttagcgtggtcgcggccgaggtactttttctcctgagcccagacttgataatcactttctcaatctctgcttgttaaatggcttctaaaaattcttgggtaaatatgggtatggttgcataaagaaaaatcccttaaaggataagccaaaatttttcagtgatagtgcataaaagccttgttatctttaaggcttgtcttttggtgcatagagccaaataaattgccaaggcaaaaacaaaaagaaagaaaatctagtctctgatttagtgcccaaaagtttttaatgctttgggtcctccagttgctctaagaattttttgtggctttgaagctttttatcaggttttaattttatccttatatt

SEQ ID NO: 35954 - DNA, 435 bp, Homo sapiens
  misc_feature 411: n = A,T,C or G
tatagggcgaattgggccctctagatgcatgctcgagcggccgccagtgtgatggatatctgcagaattcgccctttcgagcggccgcccgggcaggacagtgaaaagagccaaggctgtgtgaccccctcatcacttagccaggcgtatggtcctggtttctgaggctgccagaaagcatcttagcaatttgtgtttggatggtccatgcctgactattctaggctggaggttcctaaagagtaacaagaggaagagaaacaagaatctctgacacttgttgagaatagagcacagtcccatttgtttgaaaagagacaccaggtagccatgtttatgtgccagaaatgcattccacctcaaggaggacttaatttatggacccgtgtgtgccaggctgagctgggcaangatctttctcaggacaaactctgc

SEQ ID NO: 35955 - DNA, 300 bp, Homo sapiens
cgactcactatagggcgaattgggccctctagatgcatgctcgagcggccgccagtgtgatggatatctgcagaattcgcccttagcgtggtcgcggccgaggtacactcacacacacacacacacacagggctcttaacaactggtcctgagtagctctttgtaaattctttattgccggagtgaaccctaagtggctcacaagagtgccctatttctttcaattaactacaaggacaaacacatctcaaagttgagataagtgaccagtatgattttgcccaaatttctaaagcgcac

SEQ ID NO: 35956 - DNA, 612 bp, Homo sapiens
cgactcactatagggcgaattgggccctctagatgcatgctcgagcggccgccagtgtgatggatatctgcagaattcgccctttcgagcggccgcccgggcaggtacctcttattccagagaagtggggagcagagaggaagatggagtggaaaggggcgaggcaaggccctcctgaaatacctcaacccaaatcttcaagaaatccccaagtcctcacagtgctttttgtggatttttgtggaaaccggtaaaaggggctgatttgctgaccccagtgggtagaaaacagagactgtcaagagaacagaagaggaggcagaaaggggatggggaagtggggttcgccatgttcacgagctcctggagccacagggccccccaggaacaacagagctgagactgggtggccttgtttctggcccaattccctgggaccaccaccctggaaggacaacttgagccctactcaaggacccaccacaacatctcagcattgtcggtccttaaatgccaaggtctgtgctcaccatttccatccttaagattctcacagggaagaacccacacaacagctttgtccctgcgactctgggtgagtttctgacactg

SEQ ID NO: 35957 - DNA, 436 bp, Homo sapiens
gactcactatagggcgaattgggccctctagatgcatgctcgagcggccgccagtgtgatggatatctgcagaattcgcccttagcgtggtcgcggccgaggtacctgaaggaacgaagaagaggaatttctcaaggtgagaagcagttctccatggacactgatgacagcacaggcaaagtttcctatgactagggatcactgtccacacagagtctggcttcccaggtatccagcaggtagacaaaacagctaactccactgccactcctttctccacatccgttcctatttctcagccatctcagtgacatccgccatcttgagagtcaactactgactggactgagttgtgtggtatatgcttctgtttacttctcttctgtcttttttaagtggccaaatagcaaacgcttaaataggaaatctctgggag

SEQ ID NO: 35958 - DNA, 463 bp, Homo sapiens
actactatagggcgaattgggccctctagatgcatgctcgagcggccgccagtgtgatggatatctgcagaattcgccctttcgagcggccgcccgggcaggtacccgaaaagaaaggaagctttagtaatgaaaggattgctgccaaaatcctgtttcccccttgcagatcttacagaaaacagccacagaatcccaaggcatcagcaccaagagagcctgtagaaactatctggtctaagctcctgaagcccagagataagaatgacttaacccaagctgcacagcctcttaacagtccactgttaaccccagaaacagatgcatttgaatctgaaaggagacaggaatcctaatcctactgctcagggacttgctgatttactttgctgtctattagcctttctgtgacatgattttctaccaagcaaagtcttttattcaagtctcccagagatttcct

SEQ ID NO: 35959 - DNA, 657 bp, Homo sapiens
tacgactcatatagggcgaattgggccctctagatgcatgctcgagcggccgccagtgtgatggatatctgcagaattcgccctttcgagcggccgcccgggcaggtaccactttaaattccccagttaagctttttggaccacacaggtagcctaagcttggactgaaagcccatagaaggccatttgtggttataaatcatcagggaaaatattctatagtttccatgtgccactaaggttgagacaaatgagttccttgctgcgcccttctatggagtgtttatttcttgttcacctttacactgagggtgtccagctttatgagggaacctactagatttctcatttcctgttgcccatactttgtgtaatcactaaaatagaaggttatggtctgctgaatttggcaaaaattctggggaaaagctggctttggcagttacttcctaggattccagcttttgcttcattttgaagagccgtaggttccttactttcgtgcctgctcagcaatatgtttaaaagtattttttataaatatatttacccagtatcttggttgcttctgctgaaaggacttttcagaattatctaatccagcatactgccaaaaacagagccctgaattagtttcaaatacgcacaccaacgcac

SEQ ID NO: 35960 - DNA, 257 bp, Homo sapiens
acgactcactatagggcgaattgggccctctagatgcatgctcgagcggccgccagtgtgatggatatctgcagaattcgcccttagcgtggtcgcggccgaggtacttttttttttttttttttttttgagctgcggggcatgatggggattgctgcatattatcagttggatgttcttgcccttgacagtagcttattgctctgggggccggaatggattcattacacttcttaaaaaagaggagagagaaataa

SEQ ID NO: 35961 - DNA, 235 bp, Homo sapiens
cgactcatatagggcgaattgggccctctagatgcatgctcgagcggccgccagtgtgatggatatctgcagaattcgccctttcgagcggccgcccgggcaggtaccaatcagaaggacgtgttgcttcagaaattcaatgaaaaagatttggaagtaatacagcagaactgctatttaatggctgcagaggatcttgagctcaggagtgaaggcttaataacagaatagtgct

SEQ ID NO: 35962 - DNA, 476 bp, Homo sapiens
gactcactatagggcgaattgggccctctagatgcatgctcgagcggccgccagtgtgatggatatctgcagaattcgccctttcgagcggccgcccgggcaggtactttttttttttttttttttttttttcttttttttttttttttttttggggcacaaatatcgttttagttcagttatccacattgttcatctaaaataatacattttctttacatataactgtcttagacttgtaattgaggatatttgatgaaacagatctgtatctgaaacagcactatgatgctaaacatttgcataaggaatgaaaaaagttagcaccctagttttttcaatattcagatttttgagattacacagaaagctacatccagatgaatgactgactttttccttttttttcgagacattttggctttggatagacacagcattcaagtttaatgcattttaggaacaggttcagttta

SEQ ID NO: 35963 - DNA, 304 bp, Homo sapiens
  misc_feature 256: n = A,T,C or G
acgactcactatagggcgaattgggccctctagatgcatgctcgagcggccgccagtgtgatggatatctgcagaattcgcccttagcgtggtcgcggccgaggtacccattgcccgaatagtgaacactctacccagtcgtttttcatccctcactttcctaccaccctccaacatttttggagcctccagtgtctcttattccactctgtatacccatcgtttagctcccatttccaaatgagaacatgcaggnttctgactttctgtctctgagtcatttcacttacgataagggcttcta

SEQ ID NO: 35964 - DNA, 313 bp, Homo sapiens
ggcgaattgggccctctagatgcatgctcgagcggccgccagtgtgatggatatctgcagaattcgccctttcgagcggccgcccgggcaggtacaaccagaaccaacaattgtatttctctatagttattttaaaatagtaatcaatgctatgtgtttgatgtatatgtttctaaattagaaatttcttttggctttgtgtttttttaatgtgcgttaaatatgtaaactgaacctgttcctaaaatgcattaaacttgaatgctgtgtctatccaatgccaaaatgctcagaagaaaagtgaataattcag

SEQ ID NO: 35965 - DNA, 393 bp, Homo sapiens
  misc_feature 359: n = A,T,C or G
ctactatagggcgaattgggccctctagatgcatgctcgagcggccgccagtgtgatggatatctgcagaattcgcccttagcgtggtcgcggccgaggtaccatcgctttttaggaaacagagagccctcctctggtcaggaaactgagatccaacaggtgaacagtaattgcttaaccctgcaggagatggaagatttgtgtaaactgcattgtctcactgtggtttttctactccatctgcctctttctcaaagagcttgtgctagagtcatcacttcccattgggctgaggacatgaagcctttattacaaatgaaaaagtggtgtgaatatttcatcttaagaaatatacatancttttgaattttggaatctgaatttaattcacct

SEQ ID NO: 35966 - DNA, 206 bp, Homo sapiens
  misc_feature 66, 96, 97, 100, 107: n = A,T,C or G
ctcacttagggcgaattgggccctctagatgcatgctcgagcggccgccagtgtgatggatatctncaaagggcgccgtttcgagcggccaccccnncangtacttntatgtatctggaaatgggaaaagaattgtgctcataacaccttctggatgcatatttctttgggaatatttgggattaaagaatatcttatcttctaaa

SEQ ID NO: 35967 - DNA, 390 bp, Homo sapiens
gggccctctagatgcatgctcgagcggccgccagtgtgatggatatctgcagaattcgcccttagcgtggtcgcggccgaggtacaaccagaaccaacaattgtatttctctatagttattttaaaatagtaatcaatgccatgtatttgatgtatatgtttctaaattagaaatttcttttggctttgtgtttttttaatgtgcgttaaatatgtaaactgaacctgttcctaaaatgcattaaacttgaatgctgtgtctatccaatgccaaaatgctcagaagaaaagtgaataattcagtcattcatctggatgtagtttttctgtgtaatctcaaatatctgaatattgaaaaaactaggttgctaacttttttcattccttatg

SEQ ID NO: 35968 - DNA, 379 bp, Homo sapiens
cgactactatagggcgattgggccctctagagcatgctcgagcggccgccagtgtgatggatatctgcagaattcgcccttagcgtggtcgcggccgaggtactttttttttttttttttttttttccgtccccccaaacaaagatttgtctggactgactaaaaaaaaaagggggcggactcttaatggattggataacatacatgcttaaaacaaactacccacatttatttccttccttaaaacatacctttaattcccaactcctatttaaagaccgacctgcttgataaggaaggtaacgcctgcattggaccgactggtgggtgggctggcacgtacgaaggaagactatccttgctaatcaatccttgcata

SEQ ID NO: 35969 - DNA, 584 bp, Homo sapiens
gactactatagggcgaattgtgccctctagatgcatgctcgagcggccgccagtgtgatggatatctgcagaattcgcccttagcgtggtcgcggccgaggtactcttttcaaggctttacttccaatcttccccttaagtgctagtgtccagaggaaaaattatttcttctctgtagaagtcattttgaagacagtatttttctgagatccaatgtggttgggagttctgaagaggaagttatagttttaagctagattatctcattttattatattctgtgtttattttcctttgccgtgcttaggcctttggcaaatgttctctagatgtacctgcccgggcggccgctcgaaagggcgaattccagcacactggcggccgttactagtggatccgagctcggtaccaagcttggcgtaatcatggtcatagctgtttcctgtgtgaaattgttatccgctcacaattccacacaacatacgagccggaagcataaagtgtaaagcctggggtgcctaatgagtgagctaactcacattaattgcgttgcgctcactgcccgctttccagtcgggaaacct

SEQ ID NO: 35970 - DNA, 433 bp, Homo sapiens
ctactatagggcgaattgggccctctagatgcatgctcgagcggccgccagtgtgatggatatctgcagaattcgccctttcgagcggccgcccgggcaggtacaaccagaaccaacaattgtatttctctatagttattttaaaatagtaatcaatgctatgtatttgatgtatatgtttctaaattagaaatttcctttgggctttgtgtttttttttatgtgcgttaaatatgtaaactgaacctgttcctaaaatgcattaaacttgaatgctgtgtctatccaatgccaaaatgctcagaagaaaagtgaataattcagtcattcatctggatgtagttttctgtgtaatctcaaatatctgaatattgaaaaaactaggttgctaacttttttcattccttatgcaaatgtttagcatcatagtgct

SEQ ID NO: 35971 - DNA, 405 bp, Homo sapiens
agggcgaattgggccctctagatgcatgctcgagcggccgccagtgtgatggatatctgcagaattcgccctttcgagcggccgcccgggcaggtacttactaccaaataaagattttacctatagattgaaactaaattgtaaatgtcccaaatacttttcccgatgaaattcaaacaaaattagacttttatacacacaaagcaaaacaaaacacaacctatatataatttcaagattaagaaaaacaaaacaaataaaagcattctctcaagaccttgcttcagttgtgtaaaataattaaatgtgctattccaagttgattttagtttttaaatacagaatttgataaaagataagtaaaagaaggccttgggttcagggtggcagatatttagtgcaccc

SEQ ID NO: 35972 - DNA, 589 bp, Homo sapiens
atacgactcactatagggcgaattgggccctctagatgcatgctcgagcggccgccagtgtgatggatatctgcagaatggcccttagcgtggtcgcggccgaggtacagaaaatgcggtgataacataggcaaaccatctacttcccagtcttctttctagatttattcctttccagagcatggatgccatattgaaatacaaatgccaatcatcagcatggtgaaggggagagagcgggtaaacgctgccaatctttttgctggtaacacttctccacactaaggcaggagctatacagtggcttctgagggttcaagaagaaccagatgttgagggccaaagttgctagggtgacaggtggaatattgttgatcccaacatggaagatttgagaaaggagtagaataagtccagtatttatccctcttgatctccgttgcatggccagatatcagggaaacagctcagcaatgggaaaacgtacctgcccgggcggccgctcgaaagggcgaattccagcacactggcggccgttactagtggatccgagctcggtaccaagcttggcgtaatcatggtcatagct

SEQ ID NO: 35973 - DNA, 340 bp, Homo sapiens
cactatagggcgaattgggccctctagatgcatgctcgagcggccgccagtgtgatggatatctgcagaattcgccctttcgagcggccgcccgggcaggtacctagtaacattcatcctcttgattcctggtgaacacggttaaattcatgcacatttgttcttgtagtttcttaaaaattagaatccaaatttattttgtttagccaagcaaaattggaaaatttccattttattatgacttaatgtaaatttttttgctcttgcttattaagtaataccgaacctggtaaattctgtaaatttttaaaaattttagtattcttttacaattcaaatt

SEQ ID NO: 35974 - DNA, 421 bp, Homo sapiens
acgactcactataggcgaattgggccctctagatgcatgctcgagcggccgccagtgtgatggatatctgcagaattcgcccttagcgtggtcgcggccgaggtactggggatgaagcagcaaattctgccctgctgtgggatgctgccagtggctcgttgctccaggacctacagaccgatcagcctgtgttggacatctgcccatttgaggtgaaccgtaacagctacttggctaccttaacagagaagatggtccacatctataagtgggagtgactgtggtctcgaaaccttgaaggcatgctgctggtaagatgttgtttgctagcgcctagcagccccaagcaagatccctgtttattgtctgcagtctagaacattgggaatcatggttttgtttgcattaggtatgattctag

SEQ ID NO: 35975 - DNA, 470 bp, Homo sapiens
actactatagggcgaattgggccctctagatgcatgctcgagcggccgccagtgtgatggatatctgcagaattcgccctttcgagcggccgcccgggcaggtacccgaaaaggaaggaagctttagtaatgaaaggattgctgccgaaatcctgtttcccccttgcagatcttacagaaaacagccacagaatcccaaggcatcagcaccaagggagcctgtagaaactatctggtctaagctcctgaagcccagagataagaatgacttaacccaagctgcacagcctcttaacagtccactgttaaccccagaaacagatgcatttgaatctgaaaggagacaggaatcctaatcctactgctcagggacttgctgatttactttgctgtctattagcctttctgtgacatgattttctaccaagcaaagtcttttattcaagtctcccagagatttcctatttaag

SEQ ID NO: 35976 - DNA, 417 bp, Homo sapiens
cgactcactatagggcgaattgggccctctagatgcatgctcgagcggccgccagtgtgatggatatctgcagaattcgccctttcgagcggccgcccgggcaggtaccctaccactgttggaccagtggagagcagtggattgagatctcgctaccgttcttcacctaccgtctacaactcacctactgacaaagaagactacatgaccgacctacgaactttggatacttttctcggaagtgaagaggagaaacagcatagggttaagctggggagcccagattctacctctccttccagcagtcctactttctggaactatagtcgttctatgggggattatgcacaaactttaaagaagtttcagtatcagcttgcctgaaagactaaggccccatgtgctaacaaagatgac

SEQ ID NO: 35977 - DNA, 380 bp, Homo sapiens
  misc_feature 320, 335, 363: n = A,T,C or G
tgctgctcaagcggccgccagtgtgatggatatctgcagaattcgccctttcgagcggccgcccgggcaggtaccggaaggaacgaagaagagggatttctcaaggtgagaagcagttctccatggacactgatggcagcacaggcaaagtttcctatgactagggatcactgtccacacagagtctggcttcccaggtatccagcaggtagacaaaacagctaactccactgccactcctttctccacatccgttcctatttctcagccatctcagtgacatccgccatcttgagagtcaactactgactggactgagnttgtgtggtatatgncttctgtttacttctcttctgtcttttnttaagtggccaaatagc

SEQ ID NO: 35978 - DNA, 441 bp, Homo sapiens
tacgactactatagggcgaattgggccctctagatgcatgctcgagcggccgccagtgtgatggatatctgcagaattcgcccttagcgtggtcgcggccgaggtacccacaatggaaagatggtcttcctgcattgtgaaggttgttctcatcaaccaagcctgcaatgactagacattctaaagagaagagtgatggcaatggaaagaggacacatccacttgccaggtcacttctatcagttgatgacatgccatatgttatggctaggtcagctttccacaagtatgcacatgcaaaatagaacttgggaaaaaaatctttgatttggccctctaccaagtggatcagtgtgtcagagttcagttgagcaaaggtcagagtttaagttgaatctccagtcactcttttgaagatatttggtgatgccaaatttaatt

SEQ ID NO: 35979 - DNA, 378 bp, Homo sapiens
ataatttgccatgtcttctaataagagtgaaaaagtgaaaatgaatctgtatgcaacattatttttatttcttaatatattttgggaaacttaattgcaactgtgtggttcagggatttagtgcaagaagaagaacagttgatggaaaaaaaaccttataacaaaaaaaggaggttcctgcccggcggccgctcgaaagggcgaattccaagcacactggcggccgttactagtggatccgagctcggtaccaagcttggcgtaaatcatggtcatagctgtttcctgtgtgaaattgttatccggtcacaattccacacaacatacgagccggaagcattaagtgtaaagcctggggtgcctaatgagtgagctaac

SEQ ID NO: 35980 - DNA, 421 bp, Homo sapiens
gaatacgactactatagggcgaattgggccctctagatgcatgctcgagcggccgccagtgtgatggatatctgcagaattcgcccttagcgtggtcgcgggcgaggtacctaaatttcctctaaccactctcagaaactgaaacaatgtctttgctcttaaaagagaagagacttcagatgtaatcaagaaaacattgtgtaacttgcctctaagctcttcagagccaattttactatggcaggatattccttcctgataaggtgattaatgaagtttttggtgctcacttttctctcatagtctataagctcagtataccaaaaaaaaaaaaaaattagataaaataaaacaaaacccccaataggtcttgaaaataatataaatattttgtggagtcccagtcacataatactccact

SEQ ID NO: 35981 - DNA, 363 bp, Homo sapiens
  misc_feature 182: n = A,T,C or G
acgactactataggcgaattgggccctctagatgcatgctcgagcggccgccagtgtgatggatatctgcagaattcgcccttagcgtggtcgcggccgaggtacggtttgactgctggggtgtaggggaatgccgagttttgggtggtggagttgcaggaggtgatggcctgtgcctttgncttggaggacttgctgaaggagataacctacgagttttccgaggggggctggatgtcctcttgggaggcttctttggtggtgaccgtgaacgagatgaagaggatgatgagctactcccagacaaggatgctgacgaacgtcttcttcgtcttactggagatctactccttctatgccttg

SEQ ID NO: 35982 - DNA, 439 bp, Homo sapiens
gactactatagggcgaattgggccctctagatgcatgctcgagcggccgccagtgtgatggatatctgcagaattcgcccttagcgtggtcgtggccgaggtacctacttgaaggacttcataagcaaattacgatttaatttacaagaacactatgtcacacgtatacacacaggttttttatatttgttgtcttttccgtgattatctcttacagtgttgtatatttaatatattcattttattttaattttatgtaggttcctcattccttcatatgtgtattacatttccctggaactatcacgtattttatatacttagcaatggaaagctcctggtttcagttgtctgtgcagcaggcagggggaggagaagaaaatgggtcacactcctgaccctgcctgcatagccacaggttcccaaaagcagaggtccc

SEQ ID NO: 35983 - DNA, 428 bp, Homo sapiens
ctactatagggcgaattgggccctctagatgcatgctcgagcggccgccagtgtgatggatatctgcagaattcgccctttcgagcggccgcccgggcaggtacttttcgctcagctgttttcatcactgtgttcagaggtttgtctttttttttcccctaaaaggtgctgagatgttatgagtgctttatgtgggggtactgggataagttttgaaatgtcactgtgttataaactgcatgattatcgattttggaaattttgttttttttaaatgattaatttaaataaaatggagaattttgatccataagaaaagcaggactgaaatctccagggatgggagcctttgggttcactttgttcagtgttgtttctttgtagacttcctactttcttgtaaaatgttttggactaaatatttcaca

SEQ ID NO: 35984 - DNA, 372 bp, Homo sapiens
ggccgccagggtgatggatatctgcagaattcgcccttagcgtggtcgcggccgaggtaccattcttatctcagaatgctgtaaaccatcagtagaagcagtttagatttggactgcatggtaaaatgaaaagtaataaccctccaaccacaacctagtcagggtattaataattatatgtagcaagaaaacaaagaagaaaataatattgaaaaaatggagattccccaaccagtttcatatttgaaggatctgagttgtatttttattaaggaaattttttttctgaatactgctcttccaaaatgtttaacattaaaaatctgaattcagaggacttctgaattggaaaaagaagttttgatcacttga

SEQ ID NO: 35985 - DNA, 414 bp, Homo sapiens
actactatagggcgaattgggccctctagatgcatgctcgagcggccgccagtgtgatggatatctgcagaattcgccctttcgagcggccgcccgggcaggtaccaggagggtattgatgtttgaggtccaaactgaaaacccatcacctccttcccactgctatagcagcgttagcccctgggttcattatctagccaggtcacaccctttaaaaggggggctctgaaaatgtcttacctccctcacaggcaaagcaattttaaagcctcctgagatcacccaccaaccaaagcaactgctgtcacttggaggtgcagctgaattcttctaattgtgacacaaactcttgaaactgtaaatgctgaaagattaaatgaggttataacactcagaaggttttacaagtaaaag

SEQ ID NO: 35986 - DNA, 415 bp, Homo sapiens
ctactatagggcgaattgggccctctagatgcatgctcgagcggccgccagtgtgatggatatctgcagaattcgcccttagcgtggtcgcggccgaggtacagtgaaaagagccaaggctgtgtgaccccctcatcacttagccaggcgtatggtcctggtttctgaggctgccagaaagcatcttaacaatttgtgtttggatggtccatgcctgactattctaggctggaggttcctaaagagtaacaagaggaagagaaacaagaatctctgacacttgttgagaatagagcgcagtcccatttgtttgaaaagagacaccaggcagccatgtttatgtgccagaaatgcattccacctcaaggaggacttaatttatggacccgtgtgtgccaggctgagctgggcaaga

SEQ ID NO: 35987 - DNA, 414 bp, Homo sapiens
cgactactatagggcgaattgggccctctagatgcatgctcgagcggccgccagtgtgatggatatctgcagaattcgcccttctatcggaatagggcgaattccagcacactggcggccgttactagtggatccgagctcggtaccaagcttggcgtaatcatggtcatagctgtttcccgggtgaaattgttatccgctcacaattccacacaacatacgagccggaagcataaagtgtaaagcctggggtgcctaatgagtgagctaactcacattaattgcgttgcgctcactgcccgctttccagtcgggaaacctgtcgtgccagctgcattaatgaatcggccaacgcgcggggagaggccgtttgcgtattgggcgctcttccgcttgctcgctcactgactcgct

SEQ ID NO: 35988 - DNA, 320 bp, Homo sapiens
ctcactatgggcgaattgggccctctagatgcatgctcgagcggccgccagtgtgatggatatctgcagaattcgccctttcgagcggccgcccgggcaggtactcgggacatcaatgcagagtccctctgtgaatttacaacacccaacacccatgagttcagtccttaagaaggaaaattgagcaagtatttaattggatggacattgcataaaagaggtccaatatccaggctaactctagaaattttattcttcaaacttagtatgggcctctttttcttactgtcagaggaaccaattcttttagtggcacctgg

SEQ ID NO: 35989 - DNA, 420 bp, Homo sapiens
cgactcacttagggcgaattgggccctctagatgcatgctcgagcggccgccagtgtgatggatatctgcagaattcgccctttcgagcggccgcccgggcaggtacactctagcattgtaactttttccccctgagaagtgattttaagatctatcagtctcaatttaaatgatctgttaatcagccagagttttagtttcataatatcgttccattgcctgacaaagatatacacactgaagtgcctttagcagacctgggaccgtcaagaatcttgttaccctgattattgcaagatgacatatttcttaagccatttataatcccatattcgggttgaatctgaatttacaaataaaagggttaaattgaggcagtttcaagcagcatttaggaaaatgaagtggcttcaaatttt

SEQ ID NO: 35990 - DNA, 438 bp, Homo sapiens
acgactactatagggcgaattgggccctctagatgcatgctcgagcggccgccagtgtgatggatatctgcagaattcgccctttcgagcggccgcccgggcaggtacctctctttcttgttggaaatgttgaagtattgaaatacttcttttctgtagaaggtggttctcccttctacccaggaataattttgtggcaagtcattgagtcagcagttattttgaccctaactgaaagagataaagttcctaagaatttattatatatgtttcttgccactgagtgagcaagaaaaatacacacccatcagtgctgactggttggtaatttctgaaacacaatgccacatctcttcatgaataacacagtaacagaattacagagattttggaagagatcaatctctagatggatgagttagtctataaacaaatagc

SEQ ID NO: 35991 - DNA, 365 bp, Homo sapiens
gactcactatagggcgaattgggccctctagatgcatgctcgagcggccgccagtgtgatggatatctgcagaattcgccctttcgagcggccgcccgggcaggtacataaccgtgtaatctgtaagatagtatgacatttctgcctttctgcaaaattactgaatcaaagtttgaagtagtgcgttctttaatggattttatttataaaatcatctttactgtaatcccagcactttgggaggccagggtgggtggatcacctgaggtcaggagttcaggaccagcctggccaacatggtgaagcctgtctctactaaaaatataaaaattagccagatgtggtgggtgggtgccctgtaatcc

SEQ ID NO: 35992 - DNA, 467 bp, Homo sapiens
tactatagggcgaattgggccctctagatgcatgctcgagcggccgccagtgtgatggatatctgcagaattcgccctttcgagcggccgcccgggcaggtacaaggacactaagacagtgtagcctgctgacttgagaatgttctgtaaggactggaaacactagaatcttgaaaaacgcctggctagaggtgagggtaagctgttaattacactgattacagtttgtgcctctcagactgagaactcttttcttcttgctgggggcattgctatctctaggatgtttgccctgaagtcctgatagtctctttggggttttaataaatggctgaaaaaattgttgtggggtttcaacaggcgttcataggcacccttgcttggcaatataacatggcttttgatgtttgggtgttggaagggatctttgaagtgctgagagggactcagtctttttccaaaatctc

SEQ ID NO: 35993 - DNA, 525 bp, Homo sapiens
  misc_feature 331: n = A,T,C or G
ccctctagatgcatgctcgagcggccgccagtgtgatggatatctgcagaattcgccctttcgagcggccgcccgggcaggtgctgttaaccttccgggaaatgcaggtcttcagtggattcctgttagagacataaaaatgtagagagaagactttcagttaaaagcctcctcccttcagcaaagtatattctgattccattatcgtgttaggctcctatatagttataagtaatcccatgcggttttagaattcttaaatattcacacacatagtcatctgaaaatgaataaatccatgaatgactaaacaaaatttattcctatatcnatttcaatatccttaaattatgcttacatccttaaatcggttgcctcattctgaaagcacatagtctgtaactcgtaaaaaacacctgtcggccgggcacggtggctcacgcctgtaatcccagcactttgggaggccgaggtgggcgtatcacctaaggtcgggagtttgagaccagcctgaccaccatggag

SEQ ID NO: 35994 - DNA, 281 bp, Homo sapiens
  misc_feature 173: n = A,T,C or G
ctataggcgaattgggccctctagatgcatgctcgagcggccgccagtgtgatggatatctgcagaattcgcccttagcgtggtcgcggccgaggtactttttttttttttttttttttttttttttttttttttttttttttttttttttttttaaaaaattatccttattnttgtttgaaaaaaaatggtaaatggggcttttggggattgtaaagagaccaaatcccatattctagggcgaattctccgacttttccttgggttaaacctttaccggg

SEQ ID NO: 35995 - DNA, 440 bp, Homo sapiens
actatagggcgaattgggccctctagatgcatgctcgagcggccgccagtgtgatggatatctgcagaattcgccctttcgagcggccgcccgggcaggtacttctatgatatagttgtcaaaatcaactggaggataataaaatattgtgggttctcagcattcttagaatccaaattacaaccatatcagtaggggtttgatccacatgagccaactgaagtcattttcctcaaggttggaatttgtgccaacctaaatacgttgtttctttgatggtgtttattgctattggtattattttgaactaataacaattattttgtctaaataatgctaagacaattctgttaagaattttgtcagctaacataattcattaagtatgtttggcatcatatggacaaaatatttggatgaatgactaaatttctgacaca

SEQ ID NO: 35996 - DNA, 444 bp, Homo sapiens
cactactatagggcgaattgggccctctagatgcatgctcgagcggccgccagtgtgatggatatctgcagaattcgccctttcgagcggccgcccgggcaggtacgatcttggctcactgcaacctctccctcccgggttcaagtgattctcgtgcctcagcctcttgggtagctgggattacaggcgcgtgccactgcgttccggctaattttggtatttttagtagagatggggtttcaccatgttggccaggctgatctcaaactcctgacctcatgtggtccacccaccttggcctcccaaagtgctgggattacaggcgtgagccaccgcgctcagcctacaagcaattttttaaaaactgacacctattactgataaaattctctgtttaaaatcctatttactattttaaagataagtattagttttttttttaaa

SEQ ID NO: 35997 - DNA, 346 bp, Homo sapiens
tacactactatagggcgaattgggccctctagatgcatgctcgagcggccgccagtgtgatggatatctgcagaattcgcccttagcgtggtcgcggccgaggtacgcggggattctcaatcctacccatgatgcagacagattgcctcatttcagctcaataaaacatcaccaaattcccttaggcagaaaaagggtggggagtgccctttcttgaaggaatcccttaagtgcacgtctcccgttttcttttcacatcaatgcagagtccctctgtgaatttacaacacccaacacccatgagttcagtccttaagaaggaaaattgagccaagtattttaattg

SEQ ID NO: 35998 - DNA, 378 bp, Homo sapiens
tacgactcatatagggcgaattgggccctctagatgcatgctcgagcggccgccagtgtgatggatatctgcagaattcgcccttagcgtggtcgcggccgaggtacaagaactatgcagagtcatgtttgatgctttggaacagaaatggaagcaaacagaacaggctgatcttataaatgagctatatcaaggcaagctgaaggactacgtgagatgtctggaatgtggttatgagggctggcgaatcgacacatatcttgatattccattggtcatccgaccttatgggtccagccaagcatttgctagtgtggaagaagcattgcatgcatttattcagccagagattctggatggcccaaatcagtatttttg

SEQ ID NO: 35999 - DNA, 286 bp, Homo sapiens
gggcgaattgggccctctagatgcatgctcgagcggccgccagtgtgatggatatctgcagaattcgcccttagcgtggtcgcggccgaggtacaaaaattagctgggcatagtggcacatgcctgtagtcccagctactcgggaggctgatgaacaagaatcacttgaacctgggaggaggagggtgcagttaagttgaaatcgtgcaactgcactccagcctgagcgacagagcaagactgtttcaaaaaaatataaaagatacaaataattcaaaaggaaaac

SEQ ID NO: 36000 - DNA, 388 bp, Homo sapiens
ctatagggcgaattgggccctctagatgcatgctcgagcggccgccagtgtgatggatatctgcagaattcgcccttagcgtggtcgcggccgaggtaccaacaatgatttggcttttatattactgtaagatgttataatgttaatgtggatgtagtgcttttactttacagattgattggaataagattattgcatatgaatttacccacaggactctgaatcatgttacccactcccctcacaatgttgtccactttagtgagttgcattgatctatccgtacctgcccgggcggccgctcgaaagggcgaattccagcacactggcggccgttactagtggatccgagctcggtaccaaacttggcgtaatcatggtcatagct

SEQ ID NO: 36001 - DNA, 448 bp, Homo sapiens
gactactatagggcgaattgggccctctagatgcatgctcgagcggccgccagtgtgatggatatctgcagaattcgccctttcgagcggccgcccgggcaggtaccattcttatctcagaatgctgtaaaccatcagtagaagcagtttagatttggactgcatggtaaatgaaaagtaataaccctccaaccacaacctagtcagggtattaataattatatgtagcaagaaaacaaagaagaaaataatattgaaaaaatggagattccccaaccagtttcatatttgaaggatctgagttgtatttttattaaggaaattttttttctgaatactgtcttccaaaatgttaacattaaaatctgaatcagaggactctgaatggaaaagaagtttgatcactgacacctagggctctgaagcgtgtgtggccacatggaaaagt

SEQ ID NO: 36002 - DNA, 327 bp, Homo sapiens
ctgactatagggcgaattgggccctctagatgcatgctcgagcggccgccagtgtgatggatatctgcagaattcgccctttcgagcggccgcccgggcaggtacccagcagggaaatcactttgggaagtagattggctgtttgagccacacaaccttagatcacattcactgtcagagagactgtctacaaacctggaggaaaacattaagatagttcctcttctcctagcagcatgtgaaataaataaataaataaataaaaggttagaaatattttctttgaatcacaattaaacatatgacttattctagtttggagaaaca

SEQ ID NO: 36003 - DNA, 437 bp, Homo sapiens
ctactatagggcgaattggtccctctagatgcatgctcgagcggccgccagtgtgatggatatctgcagaattcgcccttagcgtggtcgcggccgaggtactttgatcttggacttgcagcctccagaactgtgaggcttgtccattttaatgagaagcttatgcggcatggaactgagttcacccccaaccaacagctggtgaggaatggagctcttcgttcaatgactcataatgagctttgagacaaccaaagccccctagctaacctgtgcctggattcctggcccacaaagacagtgagagagggacccaactcagcccatgaagccactgaaatacaggaaagagcatcttcattgaagccactggagcatgggaaagagcaccaccagctccctgctcgctagctgtgaacctcaggatggaatagaag

SEQ ID NO: 36004 - DNA, 370 bp, Homo sapiens
agtgtgatggatatctgcagaattcgcccttagcgtggtcgcggccgaggtactctacggtgtcaataattatttcagtctctgctgcaattagtgctaattacaatacctgagctataaaaataaaagatttcattatagcaaagttcacaaatatcgttttagttcagttatccacattgttcatctaaaataatacattttctttacatataactgtcttagacttgtaattgaggatatttgatgaaacagatctgtatctgaaacagcactatgatgctaaacatctgcataaggaatgaaaaaagttagcaacctagttttttcaatattcagatatttgagattacacagaaaactacatcca

SEQ ID NO: 36005 - DNA, 665 bp, Homo sapiens
tacgactcactatagggcgaattgggccctctagatgcatgctcgagcggccgccagtgtgatggatatctgcagaattcgcccttagcgtggtcgcggccgaggtacctaagatagagctgttagaatttagatagacattagatagacagtgaaaatattttagtctacagttgaaactgtaacaatattggtattgttctcaactacccctggtctagttaagggctttcaagtatgtgtttggaccaagtattttcatgtccaccatctagatagtccttggtctatttcccaccccatgtgctttctggtgggatgatcacatctgcacctctagtccccaagctgtccctgagctctgtgtcctcactgtctccacatggagtgtccccttccacctcaaacttgacaagggttgtgtctccacaccaccctgctcctcctggattccagcccagtctgtccttccttttctgttggttgccctggttcagagccctgggacctctcatgttcctctcccagagtctcttccagccttactctacccgccagaccacttcttggtcagcatacattgtgcatttccccaggtttgtgcctttcctatattggctcctccacctaaaaggcccaatctgttaagtttctgctcaatccca

SEQ ID NO: 36006 - DNA, 569 bp, Homo sapiens
  misc_feature 365, 506: n = A,T,C or G
ctactatagggcgaattgggccctctagatgcatgctcgagcggccgccagtgtgatggatatctgcagaattcgccctttgcggccgcccgggcaggtacccgaaaagaaaggaagctttagtaatgaaaggattgctgccaaaatcctgtttcccccttgcagatcttacagaaaacagccacagaatcccaaggcatcagcaccaagagagcctgtagaaactatctggtctaagctcctgaagcccagagataagaatgacttaacccaagctgcacagcctcttaacagtccactgttaaccccagaaacagatgcatctgaatctgaaaggagacaggaatcctaatcctactgctcanggacttgctgatttactttgctgtctattagcctttctgtgacatgattttctaccaagcaaagtcttttattcaagtctcccagagatttcctatttaagcgtttgctatttggccacttaaaaaagacagaagagaagntaacagaagcatataccacacaactcagtccagtcagtagttgactctcaagatggcggatgt

SEQ ID NO: 36007 - DNA, 347 bp, Homo sapiens
tatacgactcactatagggcgaattgggccctctagatgcatgctcgagcggccgccagtgtgatggatatctgcagaattcgcccttagcgtggtcgcggccgaggtacccgaaaagaaaggaagctttagtaatgaaaggattgctgccaaaatcctgtttccccctcgcagatcttacagaaaacagccacagaatcccaaggcatcagcaccaagagagcctgtagaaactatctggtctaagctcctgaagcccagagataagaatgacttaacccaagctgcacagcctcttaacagtccactgttaaccccagaaacagatgcatttgaatctgaaggga

SEQ ID NO: 36008 - DNA, 160 bp, Homo sapiens
ggcgaattgggaacctctagatgcatgctcgagcggccgccagtgtgatggatatctgcagaattcgccctttcgagcggccgcccgggcaggtacctgaaggaacgaagaaaagggattgcttaaggggagaagcaattttgcatggacactgatgaca

SEQ ID NO: 36009 - DNA, 369 bp, Homo sapiens
actactatagggcgaattgggccctctagatgcatgctcgagcggccgccagtgtgatggatatctgcagaattcgcccttagcgtggtcgcggccgaggtacgcggggattctcaatcctacccatgatgcagacagattgcctcatttcagctcaataaaacatcaccaaattcccttaggcagaaaaagggtggggagtgccctttcttgaaggaatcccttaagtgcacgtctcccgttttcttttcacatcaatgcagagtccctctgtgaatttacaacacccaacacccatgagttcagtccttaagaaggagaattgagcaagtatttaattggttggacattgcataaaagaggttccat

SEQ ID NO: 36010 - DNA, 269 bp, Homo sapiens
  misc_feature 153, 228, 230, 232, 245: n = A,T,C or G
atacgactcctatagggcgaattgggccctctagatgcatgctcgagcggccgccagtgtgatggatatctgcagaattcgccctttcgagcggccgcccgggcaagtacctgttgtatccttttaagtgtttgttgtggtaatccttcaaanagaccggggactgatggaaactcccttgctattaaactttttttcttggaggttaaaaaaaaaaaaaaaaaaaanananaaaaagggccctntttttttttttttttttttttttt

SEQ ID NO: 36011 - DNA, 254 bp, Homo sapiens
tataggcgaattgggccctctagatgcatgctcgagcggccgccagtgtgatggatatctgcagaattcgcccttagcgtggtcgcggccgaggtacttgtagatgtttatgtgctttttgtatcctaacttttagaatctaaataaaatcagaggtaatgtattttggcagcttgtttaagtgagaatcttaatgatcataaaggaaataaatctagatgtagaaagtaccttgcccgggcggaccgctaaag

SEQ ID NO: 36012 - DNA, 422 bp, Homo sapiens
actcacttagggcgaattgggccctctagatgcatgctcgagcggccgccagtgtgatggatatctgcagaattcgcccttagcgtggtcgcggccgaggtacagtgaaaagagccaaggctgtgtgaccccctcatcgcttagccaggcgtatggtcctggtttctgaggctgccagaaagcatcttagcaatttgtgtttggatggtccatgcctgactattctaggctggaggttcctaaagagtaacaagaggaagagaaacgagaatctctgacacttgttgagaatagagcacagtcccattttgtttgaaaagagacaccaggcagccatgtttatgtgccagaaatgcattccacctcaaggaggacttaatttatggacccgagtgtgccaggctgagctgggcaagatcttt

SEQ ID NO: 36013 - DNA, 359 bp, Homo sapiens
tacgactcatatagggcgaattgggccctctagatgcatgctcgagcggccgccagtgtgatggatatctgcagaattcgccctttcgagcggccgcccgggcaggtacagtgaaaagagccaaggctgtgtgaccccctcatcacttagccaggcgtatggtcctggtttctgaggctgccagaaagcatcttagcaatttgtgtttggatggtccatgcctgactattctaggctggaggttcctaaagagtaacaagaggaagagaaacaagaatctctgacacttgttgagaatagagcgcagtcccatttgtttgaaaagagacaccaggcagccatgtttatgtgccagaaat

SEQ ID NO: 36014 - DNA, 255 bp, Homo sapiens
agccttataatgtagaactatttaactctcttttgtctcatctttaatacctcttttcattgagaaactttagacaactccgggttgaaactgagtaaaaatcaactaaatttaaaaataaaagtttaatttcagagtggcaagtgtctcatttttaagaaatgaatacttgtaagtgaacttcaggaaacatatatttttataaaaaaacacctgaatgaaattatctactattaaaaacattatcgatgcaat

SEQ ID NO: 36015 - DNA, 305 bp, Homo sapiens
  misc_feature 260: n = A,T,C or G
ctactatagggcgaattgggccctctagatgcatgctcgagcggccgccagtgtgatggatatctgcagaattcgccctttcgagcggccgcccgggcaggtaccaccttgatgacttctgtattcaccactaaaaactgaaatagaacatactatatacagcttcaagtttgtcactttttaataaaacttttcccacaaatgattataattacttgccctttgaagctattggatagatctgaaagtgaggtagggtnggggatggtcattagatcagttatagttatttgttcaggcttcga

SEQ ID NO: 36016 - DNA, 627 bp, Homo sapiens
  misc_feature 584: n = A,T,C or G
gactcacttagggcgaattgggccctctagatgcatgctcgagcggccgccagtgtgatggatatctgcagaattcgccctttcgagcggccgcccgggcaggtactccagcctgggcaacacagcgagactctgtctaaaaaaaaaaaaagtgcttcaaaagcaaccgtataacagagacatactgaacataggatttctgccattcttgtctgcctataaggatagacaaactatctcagataagtaactgagatatttattcaacggtattctcatccagcataaaatacttttttcaatgtagtaacaaacttaccatcttttactttaagtgttctgttatttttgatttgcaatcagagcaatagtaaattgagtgagaaagttctgagttttacagaaactagaaggtgtaggaattttcttaagaaatcctgttctcatagcaaaccatcccgtttcttgatgaaggagttcagataagtatatgaagtttggagtgtttattacgactctcagaccttttgaaatttacccatcacaaataccttctgtttttatgtgtgcagttaatatagatntaaatatatacttgccttctgaattttattatagatatacaga

SEQ ID NO: 36017 - DNA, 379 bp, Homo sapiens
tacgactcactatagggcgaattgggccctctagatgcatgctcgagcggccgccagtgtgatggatatctgcagaattcgccctttcgagcggccgcccgggcaggtgcgcggggttgaagagtgtgtataggaaaggtctagaaataaataggcttgtgcatacctaggcattcatgctctttcttcctcttcagagatcatcagaaaagaggtgggaatacacaagcaggtgcatgtaagcccaaaagctagaaagccttatatttaaccaaaggttgatgtgttcattccagttattcacttacagatgaaactaaaacaaataaaggcaagctattatcagtttggtagttcattattttagaacaaatttctc

SEQ ID NO: 36018 - DNA, 174 bp, Homo sapiens
tacgactactatagggcgaattgggccctctagatgcatgctcgagcggccgccagtgtgatggatatctgcagaattcgcccttagcgtggtcgcggccgaagtacccttggtggccaattgatttgatggtaagggaggaatcgttgacctcgtctgttatgtaaaggatgc

SEQ ID NO: 36019 - DNA, 354 bp, Homo sapiens
tacgactcatatagggcgaattgggccctctagatgcatgctcgagcggccgccagtgtgatggatatctgcagaattcgcccttagcgtggtcgcggccgaggtactctacggtgtcaataattatttcagtctctgctgcaattagtgctaattacaatacctgagctataaaaataaaagatttcattatagcaaagttcacaaatatcgttttagttcagttatccacattgttcatctaaaataatacattttctttgcatataactgtcttagacttgtaattgaggatatttgatgaaacagatctgtatctgaaacagcactatgatgctaaacatttgcataagg

SEQ ID NO: 36020 - DNA, 356 bp, Homo sapiens
agggcgaattgggccctctagatgcatgctcgagcggccgccagtgtgatggatatctgcagaattcgccctttcgagcggccgcccgggcaggtactctaaaatcctttccagctgctattgaacataccatacagtgggcaagagataagtttgaaagtcccttttcccacaaaccttcattgtttaacaaattttggcaaacctattcatctgcagaaggagtcttacagaagatacagagtggacacagtttagaaggctgttttcaagttataaagttacttagcagaagacctagaaattggtcccagtgtgtagaatttagcaagattaaagtttgaaaaaatatttta

SEQ ID NO: 36021 - DNA, 340 bp, Homo sapiens
actactatagggcgaattgggccctctagatgcatgctcgagcggccgccagtgtgatggatatctgcagaattcgcccttagcgtggtcgcggccgaggtacctaatctttctggcctgaagtttatgtagaggttgttccgctatcgtctagtatttaatgtggcagagattggacactacaggaaaaaaattctggatatttacatgctttgtattgagacagaaaactaatcacggtgaattgaggattgagtttccatttcttactgaaatggggtaaacattgccagtttgcatccttgcttttatctctcaatttctgcaaagtttaaactat

SEQ ID NO: 36022 - DNA, 384 bp, Homo sapiens
actatagggcgaattgggccctctagatgcatgctcgagcggccgccagtgtgatggatatctgcagaattcgccctttcgagcggccgcccgggcaggtacttctatgatatagttgtcaaaatcaactggaggataataaaatattgtgggttctcagcattcttagaatccaaattacaaccatatcagtaagggtttggtccacatgagccaactgaagtcattttcctcaaggttggaatttgtgccaacctaaatatgttgtttctttgatggtgtttattgctattggtattattttggactaataacaattattttgtctaaataatgctaagacaattctgttaagaattttgtcagctaacataattcattaag

SEQ ID NO: 36023 - DNA, 416 bp, Homo sapiens
gggcgaattgggccctctagatgcatgctcgagcggccgccagtgtgatggatatctgcagaattcgccctttcgagcggccgcccgggcaggtacagatctactggcaactttgggtgccttttgctcccttttatataaaagtagaaaatcccaatgatctgatgtagtatagctgagcatgcccattctcattcccaatatccacactgtgtttctaacatatgtgtgtgccccacccacctctgggacctttttgctcgactttttctcttggcttccacttcagtcagggagaatagggataggaaaagaaagaaataaggtcctggaaaagccagttccttgggactccctaattccttgaaattctacttgtctccatctttccaaataggaagggtccctgagccctt

SEQ ID NO: 36024 - DNA, 383 bp, Homo sapiens
tacgactcactatagggcgaattgggccctctagatgcatgctcgagcggccgccagtgtgatggatatctgcagaattcgccctttcgagcggccgcccggcaggtactacaagatggaagtataaaattattggacaagtgaaatcgtatcagtagttcctgactgacagcttctggagccacactagagcagtgattctcagtctaacattaggttatcatgatgacgtatgagtaaattcttaatggttaaatgtgagacagttcacatttattcccatagaaatgtcattctcatttgaattcagagatacttctttgctggaagtatgaattatagctttacaccaaggagtgacacgtagactaatctggcaagcc

SEQ ID NO: 36025 - DNA, 337 bp, Homo sapiens
agggcgaattgggccctctagatgcctgcctcaaccggccgccagtgtgatggatatctgcagaattcgcccttagcgtggtcgcggccgaggtacaatcacttttccatggtcaccctcttttctgctttatactaattgccctgttgaggtgtttccatgtcaaatgcagctcttgtcggaactgaaaatggcagtgccaagggagctgtgcaagtataatcaaagccggaagatttcctccatccacccgcaaccccaaggcttaagcactcccttaggaaccaaagctgactctttgggaaagttttcacagcgcttattaggtttacaaccc

SEQ ID NO: 36026 - DNA, 421 bp, Homo sapiens
attgggccctctagatgcatgctcgagcggccgccagtgtgatggatatctgcagaattcgcccttagtgtggtcgcggccgaggtacattatacaataaggcaagaaactaaaaacccatacaaatattggcaaagaagcagcaaattactttgtttatagattacagtattacacatttagaaaatataagagacttcggcagaaaacaatgtagtttacctcaggaaaacactaatattttaccagatggcatagaacagaaactgaaaaaagtgagagaaagaccatatttcttgataaaaatatttagtatcacaaaaatattaatgcttccacaattgtctaaaaaactcctccaatacaaatcacaattgcaatacttagttgggggaattggggaactgaaaaattagttttt

SEQ ID NO: 36027 - DNA, 579 bp, Homo sapiens
gactcactatagggcgaattgcgccctctagatgcatgctcgagcggccgccagtgtgatggatatctgcagaattcgcccttagcgtggtcgcggccgaggtactttaagaaaattttaatgtcataaataggcaacaaatattaaagcagagaaataagattaaaattagtgaaaggttaggtaaagagaacctaacagcagcagcagaaacagaaaacactacagatacgctacatccagatgtggcaagaaattgaacatatgaaacaaagactgtctctgacactaaaagcacaatggtgtcataaacaggaggggaaaaagactagagattgtggtgagttcaagagatttgatataaattgttacatatgttacccaattatctttatgaaatattgttttacatgaatattctgtatttttctccaagatgttataaatcactaaataagcaattcgagatataattacaagtagaatacaatatgaaataatactcctactctgcatttagacaagcaatatagattaaaggaatctttgttttggaaataaatgccagcaaatgaaaac

SEQ ID NO: 36028 - DNA, 81 bp, Homo sapiens
  misc_feature 63: n = A,T,C or G
cggccgccagtgtgatggattctgcagattcgcccttagcgtgatcgcggccgaggtactttntttttttttttttttttg

SEQ ID NO: 36029 - DNA, 410 bp, Homo sapiens
atacgactcatatagggcgaattgggccctctagatgcatgctcgagcggccgccagtgtgatggatatctgcagaattcgccctttcgagcggccgcccgggcaggtacaaggacactaagacagtgtagcctgctgacttgagaatgttctgtaaggactggaaacactagaatcttgaagaaacgcctggctagaggtgagggtaagctgttaattacactgattacagtttgtgcctctcagactgagaactcttttcttcttgctgggggcattgctatctctaggatgtttgccctgaagtcctgatagtctctttggggttttaataaatggctgaaaaaattgttgtggggtttcaacaggcgttcataggcacccttgcttggcaatataacatggctttt

SEQ ID NO: 36030 - DNA, 403 bp, Homo sapiens
cactactatagggcgaattgggccctctagatgcatgctcgagcggccgccagtgtgatggatatctgcagaattcgccctttcgagcggccgcccgggcaggtacctatctcacttagatttgtggactaggaaagcaagattcagagatcatgtgacttgcatgtggcctagagataaaattcaaatctggttccgtagactccagggacatattcaccatgccatgggtggtggctattaaaccttgataaatttgtgtttatggttaacaaatgtgaaagctattaaacattgctggtttgaattttttacagtgcagaaatgtaaaatgaaaaaggatatttttctttgacagggttaccgagaagtcatgataattttcgtttgttcttacagattt

SEQ ID NO: 36031 - DNA, 298 bp, Homo sapiens
atagggcgaattgggccctctagatgcatgctcgagcggccgccagtggtgatggatatctgcagaattcgccctttcgagcggccgcccgggcaggtacatgaaaagatcctcaacatcattagtcaccaaaaaaatgcagatcaaataccacaatgacatatcacttcacacccactagaatagctataataaaaaaataagtaacaagtatggaagaggatgtggaaaaactggaaccctcatgcactactggtaaggaatggtaaaaattctgcaagccatttttcaaaaaaac

SEQ ID NO: 36032 - DNA, 383 bp, Homo sapiens
actactatagggcgaattgggccctctagatgcatgctcgagcggccgccagtgtgatggatatctgcagaattcgccctttcgagcggccgcccgggcaggtacgcggggagaaaaagggtggggagtgccctttcttgaaggaatcccttaagtgcacgtctcccgttttcttttcacatcaatgcagagtccctctgtgaatttacaacacccaacacccatgagttcagtccttaagaaggaaaattgagcaagtatttaattggttggacattgcataaaagaggtccatatccaggctaactctagaaattttattctcaaacttagtttggcctctttttcttctgtcagaaggaccatttcttagttggcactgg

SEQ ID NO: 36033 - DNA, 369 bp, Homo sapiens
tacgactcatatagggcgaattgggccctctagatgcatgctcgagcggccgccagtgtgatggatatctgcagaattcgccctttcgagcggccgcccgggcaggtacatacgctctcagttgggatagcagttcatttccattaggcagacgtataaactaaggaatgttagtctgcagtattcattttaaaaatattgacatgcctttcccctcccctccatgaagtcagtgccagagtgagccagattgggaggttggggttttgtttggttggcttggttttcattaagggaaaaaacttgcattggacaatcaaattcccctgagtttcataatctcatcaatattttaagataggcgagcac

SEQ ID NO: 36034 - DNA, 434 bp, Homo sapiens
tatagggcgaattgggccctctagatgcatgctcgagcggccgccagtgtgatggatatctgcagaattcgccctttcgagcggccgcccgggcaggtacctctctttcttgttggaaatgttgaagtattgaaatacttcttttctgtagaaggtggttctcccttctacccaggaataattttgtggcaagtcattgagtcagcagttattttgaccctaactgaaagagataaagttcctaagaatttattatatatgtttcttgccactgagtgagcaagaaaaatacatacccatcagtgctgactggttggtaatttctgaaacacaatgccacagctcttcatgaataacacagtaacagaattacagagaatttggaagagatcaatctctagatggatgagttagtctataaacaaatagctact

SEQ ID NO: 36035 - DNA, 431 bp, Homo sapiens
agggcgaattgggccctctagatgcatgctcgagcggccgccagtgtgatggatatctgcagaattcgccctttcgagcggccgcccgggcaggtacactctagcattgtaactttttccccctgagaagtaattttaagatctatcagtctcaatttaaatgatctgttaatcagccagagttttagtttcataatatcgttccattgcctgacagagatatacacactgaagtgcctttagcagacctgggaccgtcaagaatcttgttaccctgattattgcaagatgacatatttcttaagccatttataatctcatattcgggttgaatctgaatttacaaataaaagggttaaattgaggcagtttcaagcagcatttaggaaaatgaagtggcttcaaattttagtgtttctggttacattatt

SEQ ID NO: 36036 - DNA, 411 bp, Homo sapiens
agggcgaattgggccctctagatgcatgctcgagcggccgccagtgtgatggatatctgcagaattcgccctttcgagcggccgcccgggcaggtacccggggcccttaggcagaaaaagggtggggagtgccctttcttgaaggaatcccttaagtgcacgtctcccgttttcttttcacatcaatgcagagtccctctgtgaatttacaacacccaacacccatgagttcagtccttaagaaggaaaattgggcaagtatttaattggttggacattgcataaaagaggtccatatccaggctaactctagaaattttattctcaaacttagttggcctctttttcttctgtcagaggaccattcttagtggcactggggaaatcttggcacccagaagaattcaactg

SEQ ID NO: 36037 - DNA, 387 bp, Homo sapiens
atacgactcactatagggcgaattgggccctctagatgcatgctcgagcggccgccagtgtgatggatatctgcagaattcgcccttagcgtggtcgcggccgaggtactctacggtgtcaataattatttcagtctctgctgcaattagtgctaattacaatacctgagctataaaaataaaagatttcattatagcaaagttcacaaatatcgttttagttcagttatccacattgttcatctaaaataatacattttctttacatataactgtcttagacttgtaattgaggatatttgatgaaacagatctgtatctgaaacagcactatgatgctaaacatttgcataaggaatgaaaaaagttagcaacctagttttttca

SEQ ID NO: 36038 - DNA, 391 bp, Homo sapiens
atacgactcactatagggcgaattgggccctctagatgcatgctcgagcggccgccagtgtgatggatatctgcagaattcgcccttagcgtggtcgcggccgaggtaccaggactctcacacataagaatgttcagggaatattatttgtaaaaactccaaataaatataaccctaatatccaattagtagaattaatagcagtatattcaaagaatggactgtcatatagccatcaaatggacaaaatatagtaaaatgcaacaatgtgcacaaaaatacacagatatatatgcataaagtttgacagcatacaaaactaatttacattatttagtgatgcatgcataagtggcagttatttttaaaagcaaggaagtaattacaaaac

SEQ ID NO: 36039 - DNA, 475 bp, Homo sapiens
cgactactatagggcgaattgggccctctagatgcatgctcgagcggccgccagtgtgatggatatctgcagaattcgccctttcgagcggccgcccgggcaggtaccctcattgtagccatgggaaaattgatgttcagtggggatcagtgaattaaatggggtcatacaagtataaaaattaaaaaaaaagacttcatgcccaatctcatatgatgtggaagaactgttagagagaccaacagggtagtgggttagagatttccagagtcttacattttctagaggaggtatttaatttcttctcactcatccagtgttgtatttaggaatttcctggcaacagaactcatggctttaatcccactagctattgcttattgtcctggtccaattgccaattacctgtgtcttggaagaagtgatttctaggttcaccattatggaagattcttattcagaaagtctgcatagg

SEQ ID NO: 36040 - DNA, 452 bp, Homo sapiens
agggcgaattgggccctctagatgcctgcctcagccggccgccagtgtgatggatatctgcagaattcgcccttagcgtggtcgcggccgaggtactttttttttttcttttttcttttttttttttttttgagatgagtctcgctctgttgcccaaattggagtgcagtgcacaatctcggctcactgcaacatccgcctcccgagttcaagcaattctcctgcctcagcctcctaagtagctaggattacaggtgcccgccactatgcctagctagtatttctagttttagtagagatgggggtttcaccatgttgtgccaggcctgtaatctcgaactccttaaccttcaaagtgattcccacccaccttcagccctcccaaaagtgcctgggtatttaaaaagttattgaggccacttgtgttcccagccagccagtttttttttttt

SEQ ID NO: 36041 - DNA, 457 bp, Homo sapiens
actgaaacaaatttgtgttaaagttcttaccacatatatctggctgatgtttaggctgttcatctctaattttattttcactgagaagcttttgatacttttcttcttcggtgaaatgcggaactgtgcttttaaatccacatatttgcatattagagctagttatatcactcagtctagaggagtgaatcttctgggattctatattctgtgtttcagaaacagaacgtacctgcccgggcggccgctcgaaagggcgaattccagcacactggcggccgttactagtggatccgagctcggtaccaagcttggcgtaatcatggtcatagctgtttcctgtgtgaaattgttatccgctcacaattccacacaacatacgagccggaagcataaagtgtaaagcctggggtgcctaatgagtgagctaactcacattaattgcgttgcgctcact

SEQ ID NO: 36042 - DNA, 439 bp, Homo sapiens
actatagggcgaattgggccctctagatgcatgctcgagcggccgccagtgtgatggatatctgcagaattcgcccttagcgtggtcgcggccgaggtactccagcctgggcaacaagggtgaaactctgtctcaaaaaaaaaaaaaacagtgtaaataaaggcacctatccttacggggcttgtgggagggttgagggaaggactacagtctccttttatcttgtgtttatctttagttttagcaaacattctataaggtatgatttgtatcatattcagccgcatgaaaaacacaaatttgcatttcgattttgttcacaaaatttgggacacaagtcgtttatcacttttaacatcctgaagttgaactggtgcagcagtagtatccgttatgcttgtcagcccttataatccttcctaagcaataaaatacccat

SEQ ID NO: 36043 - DNA, 523 bp, Homo sapiens
tatacgactcactatagggcgaattgggccctctagatgcatgctcgagcggccgccagtgtgatggatatctgcagaattcgcccttagcgtggtcgcggccgaggtacacacagtcctttatttataaattccttaacagagaaaaacacctttgtaaggctcaacttacctattccagcaagcacactttttctgtcattttttctttcttttcaaatttgatattgtcattattttaaaatagtaagttttctttaatagtcttttgggacctaacataccctttctcatacaattcctaatgctctgtttatggcagataatctgtaatgttatgaagacctatcaaaaagttttaaaagtatttctgtcttcaaaggtagtaagacaggattaaatttttattagaatagacaaatcagtgaatggtatgcatgtatctagtggttactagaactcaggatcacacaatataatagcatcacgatctgtgtatatttttgatcaagatgataataat

SEQ ID NO: 36044 - DNA, 593 bp, Homo sapiens
gcgaattgtgccctctagatgcatgctcgagcggccgccagtgtgatggatatctgcagaattcgccctttcgagcggccgcccgggcaggtacttactttgttatagttggtgctattactgaatcaatcaagtagatgaaaaattagaagcatacggtgttcagggagggataattctttttttttgagtaggaattttgctcttgttgcccaggctggagtgcaatggcgctatctcagcttactgcaacctctgcctcctgggttcaagcgattcacctgcctcagcctcccgagtagctgggattacaggcatgtgccactacgcctggctaattttgtatttttagtaaagacaaggtttctccatgttggtcaggccggtcttgaactcccaacctcaggtgattcacctgcctcggcctcccaaaatgctgggattacaggcgtgagccactgcgcctggcctgaatttttattctataattctgttatagaataaaaaaggggggaggtatagtgtgttgcaaagttttatgacaatttttgtagctagaagtattcgaaattaaaggaaaaagaaaaacacag

SEQ ID NO: 36045 - DNA, 350 bp, Homo sapiens
  misc_feature 332: n = A,T,C or G
ctactatagggcgaattgggccctctagatgcatgctcgagcggccgccagtgtgatggatatctgcagaattcgccctttcgagcggccgcccgggcgggtacatgggactacaggcacgccccaccatgcccagctcatttttgtatttttagtagagacagggtttcaccatgttggccaggatgatcttgatctcttgacctcatgatccgcccctcttggcctcccaaagtgctgggatcacaggcgtgagccaccacacctggccctgtatttattctctttaaagagagagaaaactatgagaggccaaaattatttaattaaantctttacgcttagcacaa

SEQ ID NO: 36046 - DNA, 459 bp, Homo sapiens
ggccctctagatgcttgctcgagcggccgccagtgtgatggatatctgcagaattcgccctttcgagcggccgcccgggcaggtactttttttttttttttttttttttttcttttttttttttttttttttttttttttttttttttttttttttttttttttttttttttttttttttttttggggttctaaaaaaaagtttttttggaaaaagaacccttttaaaaaagggttgggaataaaactttaaccttggaaaaaaaagggggttttaaaaagccttgaaaaaaattaagggaaggggttttttttttcgcccccattaaagggaatctggggaaaaaaaaattttcccggttttatttggggccaccttccctcttttaccctaaacggaaaccatttttttatttttaagggaaaaaaaaggggtcaaaaaatttttggggttgggggg

SEQ ID NO: 36047 - DNA, 399 bp, Homo sapiens
gtaatacgactcatatagggcgaattgggccctctagatgcatgctcgagcggccgccagtgtgatggatatctgcagaattcgcccttagcgtggtcgcggccgaggtactatgatctgttgctaagaaatcttataaataaaagttatttaatgtttgatcattatctctggtgtgactaaaacaagtatgataaatcaggaacaagaatccccaaaggtcaagctaaataaacattaaaatattctatagttatttgcaaatgatggcattatattatatttgatttttgatatggaagtatcctctgaccaggtgtggcagttcacgccgcctgtaatcccagcactttgggaggccgaagcgggaggattgctcaagcccagggggtcaaggct

SEQ ID NO: 36048 - DNA, 388 bp, Homo sapiens
gactactatagggcgaattgggccctctagatgcatgctcgagcggccgccagtgtgatggatatctgcagaattcgcccttagcgtggtcgcggccgaggtacaagatttcttagggcgaatccaattccatcaatacctggggaaacacaaaaacctggtgcagctggaaggctgctgcactgaaaagctgccactctatatggtgttggaggatgtggcccagggggacctgctcggctttctctggacctgtcggcgggatgtgatgactatggatggtcttctctataatctcacagaaaaacaagtatatcacatcggaaagcaggtccttttggcgctggaattcctgcaggagaagcatttgttccatggggatgtggca

SEQ ID NO: 36049 - DNA, 610 bp, Homo sapiens
ccctctagatgcatgctcgagcggccgccagtgtgatggatatctgcagaattcgccctttcgagcggccgcccgggcaggtacagaggccctgaggcagatttgagaaagggcaaagaagtcactgtagctgtggttgaggtggaaagaaggagagtggtagaaaatggagttagagaggtaatgggggtgggaagaatgtgaggggcctcacaggccttatggactttggatatttctctgagagaaatggggaacctctgaagtgttttgatcgcaggagatgtattagtcatctgttacagggtaataaatacagccaaccaaaatgtagtgggttaaaagaacactaagtacctcggccgcgaccacgctaagggcgaattccagcacactggcggccgttactagtggatccgagctcggtaccaagcttggcgtaatcatggtcatagctgtttcctgtgtgaaattgttatccgctcacaattccacacaacatacgagccggaagcataaagtgtaaagcctggggtgcctaatgagtgagctaactcacattaattgcgttgcgctcactgcccgcttttcagtcgggaaacctgtcgtg

SEQ ID NO: 36050 - DNA, 427 bp, Homo sapiens
ctactatagggcgaattgggccctctagatgcatgctcgagcggccgccagtgtgatggatatctgcagaattcgccctttcgagcggccgcccgggcaggtacaaccagaaccaacaattgtatttctctatagttattttaaaatagtaatcaatgctatgtatttgatgtatatgtttctaaattagaaatttcttttggctttgtgttttttttatgtgcgttaaatatgtaaactgaacctgttcctaaaatgcattaaacttgaatgctgtgtctatccaatgccagaatgctcagaagaaaagtgaataattcagtcattcatctggatgtagttttctgtgtaatctcaaatatctgaatattgaaaaaactaggttgctaacttttttcattccttatgcaaatgtttagcatcatag

SEQ ID NO: 36051 - DNA, 437 bp, Homo sapiens
aattgggctctctagatgcatgctcgagcggccgccagtgtgttggatatctgcagtattcgcccttagttaggtcgcggccgaggtacaacattggggagcattttcaagctacagcttcgtggccaacaaagattatctatctgtatatctctcttttggctgccagacccaaatactattttgcatggacgctagctgatgccattaataatgctgcaggctttggtttcagagggtatgacgaaaatggagcagctcgctgggacttaatttccaatttgagaattcaacaaatagagatgtcaacaagtttcaagatgtttcttgataattggaatattcagacagctctttggctcaaaagggtgtgttatgaacgaacctcctttagtccaactttccagacgttcattctctctgccatttggcacggg

SEQ ID NO: 36052 - DNA, 468 bp, Homo sapiens
gggccctctagatgcatgctcgagcggccgccagtgtgatggatatctgcagaattcgcccttagcgtggtcgcggccgaggtacaaataatagttgaattatgttaacgggttagaagtagatggatttcttgcctgtaatttccaaggagttacttttttataatgtaggcattccatttagttttgttaaataaaaaataatgagactaacaaagttaatgagaatatttagaagggaaaaaaaaggtactatgtattaagacacccatgaatactgttttatatttacattctaagccttcgataggcctgaagttaaattaagattccccaaatctgcctatcagcaattcattttctgtgtatgttgactcctcacctaaatttcacctgctcactaactgctatcaagccttttctttcatagaagtggctgatatcacatattttaccttacaattaaac

SEQ ID NO: 36053 - DNA, 405 bp, Homo sapiens
gcggccgccagtgtgttgtatatctgcagattttgccctttcgatcggccgcccgggcaggtactttgtgtttgaaagtgatgcataaatggcctcttttcctattttagcgatcaagtgctagacagagatcaaagaagccatccaattgtctgtgccccagtgtgaagtagatgatgcagtgattcaaggaggtgatgggtggagcttttgaggagcccctactgtgtccaccaggattgaagccaagagagaaagtgaactgggcccaggctgcagtagaagctttttatccatcttctattccatcctgaggtccacagctagcgagcagggagctggtggtgctctttcccatgctccagtggcttcaatgaagatgctctttcctgtatttcagtggct

SEQ ID NO: 36054 - DNA, 454 bp, Homo sapiens
actactatagggcgaattgggccctctagatgcatgctcgagcggccgccagtgtgatggatatctgcagaattcgcccttagcgtggtcgcggccgaggtacgcggggaaaaaagaagggcacatgagcaaacatgatggcccctttatgagaggtaatttactgaaatgcacagcgattacctgctcacccagccctgatgtaattaaaaatggcaggctaggggctctgtttcccccggctctggcagagaaacctgggtttcgacttgtgaagcttgaggttggatgtgggaattggcttggagtcataggcgatgagagggacattaggatattatgaagcccgtgaactcaactcctgagaaggacacagcagagcgagagaaaagatggaataaaaaggcctacctcattgggctcgtgtgggtgaggagaactgaagagtctgaga

SEQ ID NO: 36055 - DNA, 466 bp, Homo sapiens
tatagggcgaattgggccctctagatgcatgctcgagcggccgccagtgtgatggatatctgcagaattcgcccttagcgtggtcgcggccgaggtacccgagagacccggcggtggggaagtcacttcctcccgaagacgctgtttcctagcaaccgccctccgcctctgttattagcccctcctcctcgctcggtccaggaccggctctgcgggcgccgccaggcccagaccaagctactatcagaagttgaattctaataattagctattttataaaggtaacgagaaaaaatacactatgtctgatgaagtttttagcaccactttggcatatacaaagagtccaaaagttaccaaaagaactactttccaagatgagctaataagagcaattacagctcgctcagccagacaaaggagttctgaatactcagatgactttgacagtgatgagattgtttct

SEQ ID NO: 36056 - DNA, 91 bp, Homo sapiens
actatagggcgaattgggccctctagatgcatgctcgagcggccgccagtgtgatggatatctgcagaattcgccctttcgagcggccgcc

SEQ ID NO: 36057 - DNA, 382 bp, Homo sapiens
gactactatagggcgaattgggccctctagatgcatgctcgagcggccgccagtgtgatggatatctgcagaattcgcccttagcgtggtcgcggccgaggtacatgtggccctggacaacctgcaagcagctcaggtggccctgggcgacccatcagtggttcagttagttctgcaagacccttgggcagctctcgtggccctggccggcctgtgagcagtccacatgaacttcgacgaccagtgagtggcttgggccccccggggcggtctgtcagtggccctgggagatccataagtggctcaattccagccggacgggctttcattaattcagtcccaggaagaccagtgagcaacttgggacctgggcaaacagtta

SEQ ID NO: 36058 - DNA, 266 bp, Homo sapiens
actactatagggcgaattgggccctctagatgcatgctcgagcggccgccagtgtgatggatatctgcagaattcgcccttagcgtggtcgcggccgaggtacttttaaaatattaagtttacaaagaatcattctaatgagtcatgtattagcacaaatatacaggttgagtgagtatcccctactcaaaatgcttacgaccagaaatgttttggattgctggggtttggggggatattttagaacatgtgcattatatttactt

SEQ ID NO: 36059 - DNA, 446 bp, Homo sapiens
tatagggcgaattgggccctctagatgcatgctcgagcggccgccagtgtgatggatatctgcagaattcgcccttagcgtggtcgcggccgaggtacttatatatgtaaatgctatctctgagttgttataagataaattttaattttaaaaaacttgattattctatttcattattagaacaattcttgatttgttaagttatccagatgtgttacttactcttgatataagaatatttaaaaggctcatttaaaacaattttttaaataacctgagttttctctacagttttcatcaagcacatgagtgcagagtttgcagactgagcaagtttgtaggaatgaagattgtagtttctcacctgttaatttcattctgtagtatgcaccacaagcaggaacaagttaaagcagaattcctatgaattcaaaattaggatacat

SEQ ID NO: 36060 - DNA, 64 bp, Homo sapiens
atagggcgaattgggccctctagatgcatgctcgagcggccgccagtgtgatggatatctgcag

SEQ ID NO: 36061 - DNA, 411 bp, Homo sapiens
tatagggcgaattgggccctctagatgcatgctcgagcggccgccagtgtgatggatatctgcagaattcgcccttagcgtggtcgcggccgaggtacgcggggagacagagatggagacggaaagacaaggacaagaagatggaatctgagctaatggcggagacatggaaccagtagagaagagacccactgtcttcagagagtgctgaccaggaagaggagaagccttggggactggatcaggtgtctgtccctaggtccccattcctgactcttctcctgccaccctgatctgggtgtagcatcatattacatgctgtgattgccattccagccccatactgtgggaggctggggagtgtgagaagctttcccaaccctggcaggtacatacacaatcactcaactg

SEQ ID NO: 36062 - DNA, 436 bp, Homo sapiens
atagggcgaattgggccctctagatgcatgctcgagcggccgccagtgtgatggatatctgcagaattcgccctttcgagcgccgcccgggcaggtactcctcatgatcgtctacacaacattctgtgacacgttctctaacccaaatattgacctggataaattcagccttgttctcatactgttcataatattttctatccagctgagttttatgcttttaactttcatcttttcaacaaggaataattcgggtttcacaccagcagacacagtggctatcattttctgttctacacacaaatcccttacattgggaattccgatgctgaagatcgtgtttgcaggccatgagcatctctctttaatatctgtacgcgggctgattaatatatttaatatattgaatgaaaaatagacatgtagttggaaaaaa

SEQ ID NO: 36063 - DNA, 445 bp, Homo sapiens
agggcgaattgggccctctagatgcatgctcgagcggccgccagtgtgatggatatctgcagaattcgccctttcgagcggccgcccgggcaggtacctttccaactcaacagacatcatcgagagctggatgacggtgcaaaacctgtggatttatttagaagctgtctttgtgggaggagacattgccaagcagcttgcccaagggaagccaagcggtttttctaacatagataaatcttgggtgaagatcatgactcgggcacatgaagtgcccagtgtagtccagtgctgtgttggagatgagaccctggggcagctgttaccacacttgctggaccagttggaaatatgccagaaatcccttactggtttagttcactggctctttgatagctctcggtatccttgagacaaaaggatacaggggagactagatagcatt

SEQ ID NO: 36064 - DNA, 402 bp, Homo sapiens
tagggcgaatagggccctatagatgcactcgctagatgcagtgctcgagcggccgccagtgtgatggatatctgcagaattcgccctttcgagcggccgcccgggcaggtactgaagagtaaatggtgcaatttggatgtgcaagtcagtaaattgataattggcactcttgaatgcaaaatagaaactagattctcaactatactgaagcttccattatccagaatgtcactgcatatacttggtgaattataaagtcaaacaagaaattcttctaactttgtcctttcttgtcaaaaatcctctcattaatatgctttcaatgtgcaaagtaaacaaacgttgcattgattgcgtttttcaagggtctaaatattcagtattaacttagtcctgaatatt

SEQ ID NO: 36065 - DNA, 138 bp, Homo sapiens
cgactcactatagggcgaattgggccctctagatgcatgctcgagcgggccggccagggtgatggatatctgcagaattcgccctttcgagcggccgcccgggcaggtacaccaaggtggtgcattaccggaagtgga

SEQ ID NO: 36066 - DNA, 86 bp, Homo sapiens
tacgactactatagggcgaattgggccctctagatgcatgctcgagcggccgccagtgtgatggatatctgcagaattcgcccttt

SEQ ID NO: 36067 - DNA, 466 bp, Homo sapiens
ggcgaattgggccctctagatgcatgctcgagcggccgccagtgtgatggatatctgcagaattcgcccttagcgtggtcgcggccgaggtacctggggtctcagggttgctctgggcctgatcatccactcagatctgtaaggaggatttgcaggatccatttaaaaagatcctcccttacttccacaagcatggcctttggctcttaaatacctgtgctggggttttgtaattatagaaacaacaggagccaaaactcattaatgttgagctacaaaccagacggaagcttatttctcaaaacagggctcacgcctagaaaaatctagttttctgaaatcgctagccagcaacagcactgagatggccatcccagaaacaaggccaacacagaagcacccataaaggctgctggaggttgggacaaagagatccttgctgaccttacagaccccctgacttcca

SEQ ID NO: 36068 - DNA, 383 bp, Homo sapiens
tatagggcgaattgtgccctctagatgcatgctcgagcggccgccagtgtgatggatatctgcagaattcgccctttcgagcggccgcccgggcaggtactttttagtgatgtggcagaaatccctgttgattctaagttttagagtgtcttttcccctatttctgacctacaactataaactactctctattaggagaactagaccactttcttcattcttttctaaactgctgcagattgccgtgaactctatcaatagtctcttttccgcaggcaaagtggcattttctaaacatgtttgcttactgccaggctggtttgaaatctatgatttactgcagtaggtatggtgcttaaaacaactgtccgagggtcttttaa

SEQ ID NO: 36069 - DNA, 445 bp, Homo sapiens
tacgactactatagggcgaattgggccctctagatgcatgctcgagcggccgccagtgtgatggatatctgcagaattcgcccttagcgtggtcgcggccgaggtacctatcgtgggaagttgacagctgatatcaactgggcagtgaatggaatctcaaaaggaatcattaagcagtttcttggctatgttcccatcgtggtgaaatccaagctttgcaacttacgtaaccttcccccacaagccctcattgagcaccatgaggaggcagaggaaatggggggctagtttataatcaatggcattgaaaaagtcatccgaatgttgattatgcctcggagaaattttcccattgcaatgataagaccaaaatggaaaaccagagggcctggttatactcagtacggagtttcaatgcactgtgtgagggaagaacattccgctg

SEQ ID NO: 36070 - DNA, 437 bp, Homo sapiens
atacgactactatagggcgaattgggccctctagatgcatgctcgagcggccgccagtgtgatggatatctgcagaattcgccctttcgagcggccgcccgggcaggtacagtgaaaagagccaaggctgtgtgaccccctcatcacttagccaggcgtatggtcctggtttctgaggctgccagaaagcatcttagcaatttgtgtttggatggtccatgcctgactattctaggctggaggttcctaaagagtaacaagaggaagagaaacaagaatctctgacacttgttgagaatagagcacagtcccatttgtttgaaaagagacaccaggcagccatgtttatgtgccagaaatgcattccacctcaaggaggacttaatttatggacccgtgtgtgccaggctgagctgggcaagatctttctcaggaca

SEQ ID NO: 36071 - DNA, 476 bp, Homo sapiens
tatagggcgaattgggcccttagatgcatgctcgagcggccgccagtgtgatggatatctgcagaattcgcccttagcgtggtcgcggccgaggtacttttaagttatataaagatttttagcttcataacaccttttgtgggacaatttaatgtgggacagcttttgtgggacaattaatttaataaaatttaattccttatccaacttttaaatgtatgacatttcaaatttcaaatttagtaaggcctacgacatgccacacttgcttttccttcaggttatttacttggcattatttcccttgcaacttggctatacgagcaaatccatactaaagttgctaatatgctttcttaaaagcttagtcaactctaaaacatgcattggcgacacacataattcccttgatgagttatagactacaaacactgagtgcacttctgtgcacaacactgtaggttaaaggaaaaaag

SEQ ID NO: 36072 - DNA, 81 bp, Homo sapiens
actatagggcgaattgggccctctagatgcatgctcgagcggccgccagtgtgatggatatctgcagaattcgccctttcg

SEQ ID NO: 36073 - DNA, 467 bp, Homo sapiens
agggcgaattgggccctctagatgcatgctcgagcggccgccagtgtgatggatatctgcagaattcgccctttcgagcggccgcccgggcaggtacaaatatttttgtttattaaaaaattagattgttttgttttattattgaatagtaagaattgtttatatattctggatacactctttttcagatatgtgtgttgtgactattcttagtctttagcttgccttttcattttcttaattatgtctttcaaagaacaagtttttcattttgacgaagcctagtttatcaattttttttatggttggtgctttttgtgtgttccaagaaatctttgcctactcatttaattacctgtgtgcccttgtcaaaatcatttaattttgactactcacttaattaccttgcctactcatttaattacctgtgtgcccttgtcaaaatttactgtttatctgtgaatctg

SEQ ID NO: 36074 - DNA, 453 bp, Homo sapiens
cactactatagggcgaattgggccctctagatgcatgctcgagcggccgccagtgtgatggatatctgcagaattcgccctttcgagcggccgcccgggcaggtacatttgttgggggcgtgacattaacatataaccacttagagtggacatgcagttagagaaaagtcaatgagctggaaccaagctgggaattccaacatgcagaagttaaacacaagaggaggggccagcaaaggaaacagaaacagagcttccagcaggtggggggcatttggaagaaaacgatgccatagaagccaagatgaaatagacatcaaggagaaggaagtagtcaattgttttgaatgctatgaagaaagataagaataggtaaatagtccttatatttgataacagaggtcactagtgatcttgatgaggggtttcaatagaatggtgggattatatacc

SEQ ID NO: 36075 - DNA, 432 bp, Homo sapiens
gggcgaattgggccctctagatgcatgctcgagcggccgccagtgtgatggatatctgcagaattcgcccttagcgtggtcgcggccgaggtacgcggggagacagagatggagacggaaagacaaggacaagaagatggaatctgagctaatggcggagacatggaaccagtagagaagagacccactgtcttcagagagtgctgaccaggaagaggagaagccttggggactggatcaggtgtctgtccctaggtccccattcctgactcttctcctgccaccctgatctgggtgtagcatcatattagatgctgtgattgccatccagtcccagactgtgggaggcttgggagtgtgaggaagcttttcccaaccctggcaggtacatacacaatcacttaactggaacaatcaaaaccatctatgagt

SEQ ID NO: 36076 - DNA, 418 bp, Homo sapiens
agggcgaattgggccctctagatgcatgctcgagcggccgccagtgtgatggatatctgcagaattcgcccttagcgtggtcgcggccgaggtacaaccagaaccaacaattgtatttctctatagttattttaaaatagtaatcaatgctatgtatttgatgtatatgtttctaaattagaaatttcttttgggctttgggttttttttatgtgcgttaaatatgtaaactgaacctgttcctaaaacgcattaaacttgaatgctgtgtctatccaatgccaaaatgctcagaagaaaagtgaataattcagtcattcatctggatgtagttttctgtgtaatctcaaaatatctgaatattgaaaaaactaggttgctaacttttttcattccttatgcaaatgtttagcatcat

SEQ ID NO: 36077 - DNA, 484 bp, Homo sapiens
actatagggcgaattgggccctctagatgcatgctcgagcggccgccagtgtgatggatatctgcagaattcgccctttcgagcggccgcccgggcaggtacctgaaataaacttgaaactaaaacgatcatttgtggaggaaaatacaggattttccaaaacagtttcagagctacctttgcagatgggtaggcttttcacccacccacagaaagaagagtcaacggggctgagacaggacagggatgggtttcaggagcacaattaaaagtttttcgtatcttaaagaaaatatctatgttcagagagaaaattgagaagataagttactgcccagttcctctggtctttgacacttagaccacataagaatgttccatggtagaagggttgggacagagaatcttaggaatcctaagagagaatcaatactgctcccctaccccaggtttttcttgttttctttacaatagtatccttatt

SEQ ID NO: 36078 - DNA, 492 bp, Homo sapiens
actactatagggcgaattgggccctctagatgcatgctcgagcggccgccagtgtgatggatatctgcagaattcgcccttagcgtgggcgcggccgacgtactaaacatatccattcacccctagtttatgtgccaaccttattttatattacattcccaaattatatatagctctgtttctaagctctattctgctctattggactattgtctggtcttatgctaatcctaccttattttaatgtctgtgactttagtcataggacataccttgaagaataggaactcccttactgtttaaacagttcatttggctatatgtggaattttattctttctatataaactttaaggtttgtttatagagttccttaaaaatttgattggaattgtatgaattaatagggagaaagttgatatctttatgatatttgttccatccaagagcatggaatgtctgtattttaaattatcatctatattgtttatt

SEQ ID NO: 36079 - DNA, 482 bp, Homo sapiens
tacactactatagggcgaattgggccctctagatgcatgctcgagcggccgccagtgtgatggatatctgcagaattcgccctttcaagcggccgcccgggcaggtacgttgttctttaaccagaaaggttcactgctgactcccccacctctcaaaaaacaaacaaacaaacaaacaccaccaaagctttccgccattcatgcacatgcttattctgaccccaaccccatccctacaaaggggcagcagacagcacaatagtcaaggacaaggtttttatttatttatttatttattatttatttatttattttttaaggagacaggcctcgctatgttgcccaggctggcctccaactttgggctcaagtgatccttctgcctcagccccccgagtcgctgtgcctaggagcacgcaccaccacacctggcttaagtagaaggttctgaaatctgccagaggctgagcaacagaaagctt

SEQ ID NO: 36080 - DNA, 454 bp, Homo sapiens
ctactatagggcgaattgggccctctagatgcatgctcgagcggccgccagtgtgatggatatctgcagaattcgcccttagcgtggtcgcggccgaggtacagtgaaaagagccaaggctgtgtgaccccctcatcacttagccaggcgtatggtcctggtttctgaggctgccagaaagcatcttagcaatttgtgtttgggtggtccatgcctgactattctaggctggaggttcctaaagagtaacaagaggaagagaaacaagaatctctgacacttgttgagaatagagcacagtcccatttgtttgaaaagagacaccaggcagccatgtttatgtgccagaaatgcattccacctcaaggaggacttaatttatggacccgtgtgtgccaggctgagctgggcaagatctttctcaggacaaactctgccatgcagctaaaagcct

SEQ ID NO: 36081 - DNA, 446 bp, Homo sapiens
gcgaattgggccctctagatgcatgctcgagcggccgacagtgtgatggatatctgcagaattcgccctttcgagcggccgcccgggcaggtacaacaaaccaataatgataaaaaatacttctctttttctccctgtttccctttttcccttggccacagccaaatgctaattgctgctttaattacagagatgtgtaaatgtattcagattacaaactctacaggaatacatcaacattttaactcttttgcgtttttactgtttaactgttttaaatgcaagttattttagggtgacactccttccagttctggccagatcatgagtttcaagatcaagagtaaaaagttattagaaataaacagttttataaagggaggcagcccttttccctcaagaacaactttgttgagagttactacttgacagcaagcacagaaatg

SEQ ID NO: 36082 - DNA, 400 bp, Homo sapiens
gaattgggctttctagatgcatgctcgagcggccgccagtgtgatggatatctgcataattcgccctttctatcggccgcccgggcaggtaccattcttatctcagaatgctgtaaaccatcagtagaagcagtttagatttggactgcatggtaaaatgaaaagtaataaccctccaaccacaacctagtcagggtattaataattatatgtagcaagaaaacaaagaagaaaataatattgaaaaaatggagattccccaaccagtttcatatttgaaggatctgagttgtatttttattaaggaaattttttttctgaatactgtcttccaaaatgttaacattaaaatctgaatcagaggactctgaatggaaaagaagtttgatcactgacacct

SEQ ID NO: 36083 - DNA, 460 bp, Homo sapiens
agggcgaattgggccctctagatgcatgctcgagcggccgccagtgtgatggatatctgcagaattcgcccttagcgtggtcgcggccgaggtaccaacaacgcacttacccactgttttaatctaggttattcttgaaagcagagcctgagacaaaggtagacacattctatttatgagtctaacacccaggagcaggaatgagagataggggagtgaactggggaaaggggaaactaagtccgagcaaaaccagatactgctcttatcaagtggtccacccctattaatggctacataatgcagaactttctcaggattcttcttaaactttatcccagaactgtctgcctcagggagaaaggagaagtatttctccatcagcagccacctcctgcgtgtgagggctgctcctttggggcattagcccactgcctacaccaccccaaccctttgggct

SEQ ID NO: 36084 - DNA, 463 bp, Homo sapiens
agggcgaattgggccctctagatgcatgctcgagcggccgccagtgtgatggatatctgcagaattcgcccttagcgtggtcgcggccgaggtactataggatacaaccagcgaaacagaattgatactctcatgtatctactagcatatccacaaaaacccatggttaagacaaaaaccattgaattgatagaatttgagaaacttgccagctgaacagaatgcaacagttgctgtgatgagctatagtggctatgatattgaagatgctcttgttttaaacaaggcctctttagacagaggctttgggcgttgccttgtatataaaaatgctaaatgtacctgcccgggcggccgctcgaaagggcgaattccagcacactggcggccgttactagtggatccgagctcggtaccaagcttggcgtaatcatggtcatagctgtttcctgtgtgaaattgt

SEQ ID NO: 36085 - DNA, 421 bp, Homo sapiens
gcatgctcgagcggccgccagtgtgatggatatctgcagaattcgccctttcgagcggccgcccgggcaggtaccaggagggtattgatgtttgaggtccaaactgaaaacccatcacctccttcccactgctatagcagcgttagccctggggttcattatctagccagttcacaccttctaaagtggggctctgaaaatgtcctacttccctcacagacaaagcaattctcaagcctcctgagatcacccaccaaccagagcaactgctgtcacttggaggtgcagctgaattcttctaattgtgacacaaactcttgaaactgtaaatgctgaaagattaaatgaggttataacacttagaaggatttacaagttaaagtaagtcaaatcaataggtctttatttcatatcctgaatg

SEQ ID NO: 36086 - DNA, 333 bp, Homo sapiens
atagggcgaattgggccctctagatgcatgctcgagcggccgccagtgtgatggatatctgcagaattcgcccttagcgtggtcgcggccgaggtactctacggtgtcaataattatttcagtctctgctgcaattagtgctaattacaatacctgggctataaaaataaaagatttcattatagcaaagttcacatatatcgttttagttcactttatccacatttgttcatttaaaattatacaattgtctttacatataactgttcttagacttgaaatttgaggatattatgatgaaacaaaatctgtattctgaaacaagctctatgt

SEQ ID NO: 36087 - DNA, 478 bp, Homo sapiens
ctactatagggcgaattgggccctctagatgcatgctcgagcggccgccagtgtgatggatatctgcagaattcgccctttcgagcggccgcccgggcaggtactctacggtgtcaataattatttcagtctctgctgcaattagtgctaattacaatacctgagctataaaaataaaagatttcattatagcaaagttcacaaatatcgttttagttcagttatccacattgttcatctaaaataatacattttctttacatataactgtcttagacttgtaattgaggatatttgatgaaacagatctgtatctgaaacagcactatgatgctaaacatttgcataaggaatgaaaaaagttagcaacctagttttttcaatattcagatatttgagattacacagaaaactacatccagatgaatgactgaattattcacttttcttctgagcattttggcattggatagacaca

SEQ ID NO: 36088 - DNA, 365 bp, Homo sapiens
acgactactatagggcgaattgggccctctagatgcatgctcgagcggccgccagtgtgatggatatctgcagaattcgcccttagcgtggtcgcggccgaggtactgggaattccctttggggggtattttgctaagggaaactggttaaatttttggtaaactaaatttttttcttaaaataaagactttttcacattgactggcacagattacttagcaaaagatagcaaaaccggtggttgaagaataattcattttaaatcgaatgtattttagtgtgaatttaaaaatttcaatacatcaaatctataaatctcccttatattccttatgatgaggctaaaataaaaagtcttaataaa

SEQ ID NO: 36089 - DNA, 460 bp, Homo sapiens
agggcgaattgggccctctagatgcatgctcgagcggccgccagtgtgatggatatctgcagaattcgcccttagcgtggtcgcggccgaggtacttgataccatgcctagtgcatagttggtgcccaattaatacatgattggattatagcataatcactgatcactacatttaaagcagtccaatagtggaacaggctgcctcacaaatagtgagctcttgtttcctctacacagattctactatgggccaggatctcagccaagcagtggagccataggctggacagacacaagccgagattttggaaaaagactgagtccctctcagcacttgaaagatccctttcaacacccaaacatcaaaagccatggtatattgccaagcaagggtgcctatgaacgcctgttgaaaccccacaacaattttttcagccatttattaaaaccccaaagagac

SEQ ID NO: 36090 - DNA, 430 bp, Homo sapiens
gctcgagcggccgccagtgtgatggatatctgcagaattcgccctttcttgcggcctgtccgggcaggtacttcatatcaggacgaacccaacaatttgtctgcccaaacatggtctcaggtctgagagtagcagccaccaagaaaatatttttacctttcaggccacttaatttagatgggtatggctcaagcaccttcaatttgagtaaagtatattcctgaggtccaacaccctctccagtttgtctatcatgatccatgcaaggctgtccatctttcggagagtaaattgtgtaccgcttcccaaatttaattttgtttctttctcttaatgttaaaaattgccatctgacaaatgaatcatagtaaggattaacatcagtggtgatgaaggaacgacgccagtctaccttcaaacccattctttt

SEQ ID NO: 36091 - DNA, 311 bp, Homo sapiens
agggcgaattgggccctctagatgcatgctcgagcggccgccagtgtgatggatatctgcagaattcgcccttagcgtggtcgcggccgaggtacctggggtctcagggttgctctgggcctgatcatccactcagatctgtaaggaggatttgcaggatccatttagaaagatcctcccttacttccacaagcatggcctttggctcttaaatacctgtgctggggttttgtaattatagaaacaacaggaaccaaaactcattaatgttgagctacaaaccagagggaaggcttctttctcaaaacagg

SEQ ID NO: 36092 - DNA, 435 bp, Homo sapiens
atacactactatagggcgaattgggccctctagatgcatgctcgagcggccgccagtgtgatggatatctgcagaattcgcccttagcgtggtcgcggccgaggtaccaggagggtattgatgtttgaggtccaaactgaaaacccatcacctccttcccactgctatagcagcgttagccctggggttcattatctagccagttcacaccttctaaagtggggctctgaaaatgtcttacttccctcacagacaaagcaattctcaagcctcctgagatcacccaccaaccagagcaactgctgccacttggaggtgcagctgaattcttctaattgtgacacaaactcttgaaactgtaaatgctgaaagattaaatgaggttataacactcagaaggttttacaagtaaaagtaagtcaaatcaataagtct

SEQ ID NO: 36093 - DNA, 475 bp, Homo sapiens
tagggcgaattgggccctctagatgcatgctcgagcggccgccagtgtgatggatatctgcagaattcgcccttagcgtggtcgcggccgaggtaccttggcccagatcaaaaattggcagtgatcaggacttgggtatagaattgctgaatgttctacatcgagtaattttaaccagagaatcaccttccattcagttggcttcacttgaaagtggtaaggcagattatctgtgctgctcaagaacatgtgaaggaaaaaagacgaagtgcagaagttgatgatggggctgctgaaaaggaaactctgccagagtttggagagggaaaggacaccggaggacttgtgcctggaaagtctttggtctttgcaacactggaattgtgtgtatgcattctagttagacaactcccagaattaaaccctaaattgacaggtagcccaggagtaaaagctacgaagccacagatactat

SEQ ID NO: 36094 - DNA, 467 bp, Homo sapiens
atacgacttctatagggcgaattgggccctctagatgcatgctcgagcggccgccagtgtgatggatatctgcagaattcgccctttcgagcggttcgcccgggcaggtacactgagtctgcagaccatccagaaggatcctgctgcccccatgtgcctttgttcttggtatgtcagtgccattatactccaaattctccatttgatggagagaatctgtcccttggaatacgagatttatatgcacagtttgcaaataaagcatcatagcctttattttctgtatcaaaatcaccctgatccataatatgagtctttgctttgggatacatgttgtcattttgatgaacattcctgtccccttcatggtatttgataaattccttatcttcattgacaccattcgaatctgaaaagctcacaggctgaccatcaggataacttccaagaacatgatataaattgct

SEQ ID NO: 36095 - DNA, 181 bp, Homo sapiens
tattctactcactatagggcgaattggagctccaccgcggtggcggccgaggtacgcggggaaagagggtccatctctttgccagcgatgttcattttgcagcatagtttgagagcaatctttttcaagtaaattgaatatgaatgcctggccccatcatacattaatgaattaggggttg

SEQ ID NO: 36096 - DNA, 445 bp, Homo sapiens
ttgggccctctagatgcatgctcgagcggccgccagtgtgatggatatctgcagaattcgccctttcgagcggccgcccgggcaggtacagtgccaggttcttttctgatgtaaaacaaaataggagaaaataaaaacccagcctggcaaaatagcttatctccaccaatcagcagaaaatggtaaaatagagacgcacgtggcactaactagacaggaaatcagaggtgggaagcaaaatgccagcctttattctgctctctaagatggctctggaaggtcatgttcattgtcactgaaaatgcctgcagggagcgatatgaaaagtcattgtctcttcttttttttcctcctgctatttttagctcttgctaggaagatcaattttagttaactgcagagaagggtttttaaaatggtgcttgagtttcaagttgcatgtgtc

SEQ ID NO: 36097 - DNA, 77 bp, Homo sapiens
tactatagggcgaattgggccctctagatgcatgctcgagcggccgccagtgtgatggatatctgcaaaattcgccc

SEQ ID NO: 36098 - DNA, 469 bp, Homo sapiens
agggcgaattgggccctctagatgcatgctcgagccggccgccagtgtgatggatatctgcagaattcgccctttcgagcggccgcccgggcaggtaccatcaaatcaagtttctctaaaaattatgaaattggcatattttatattttgctagagaatggtgtgaacaaggctgataatcaattagttctttttcctttttgattagtatatatttttcacatgatattaaagctaccattagctgattttattctcaatgtgcctcaattctaagaaccactgcattatttatgaacaagaatgtgcaataccaagaaccagccaataatttgaatcttatataaactaaagattcagaaattccaagagattatttaacaaatatcatttgaacatatgagctaattaacagagaaaattctttaaaatgtgaatttatcacattcataatttaactttcaagatt

SEQ ID NO: 36099 - DNA, 549 bp, Homo sapiens
agatgcatgctcgagcggccgccagtgtgatggatatctgcagaattcgcccttagcgtggtcgcggccgaggtacccgaaaagaaaggaagctttagtaatgaaaggattgctgccaaaatcctgtttcccccttgcagatcttacagaaaacagccacagaatcccaaggcatcagcaccaagagagcctgtagaaactatctggtctaagctcctgaagcccagagataagaatgacttaacccaagctgcacagcctcttaacagtccactgttaaccccagaaacagatgcatttgaatctgaaaggagacaggaatcctaatcctactgctcagggacttgctgatttactttgctgtctattagcctttctgtgacatgattttctaccaagcaaagtcttttattcaagtctcccagagatttcctatttaagcgtttgctatttggccacttaaaaaagacagaagagaagtaaacagaagcatataccacacaactcagtccagtcagtagttgactctcaaaatggcggatgtcactg

SEQ ID NO: 36100 - DNA, 454 bp, Homo sapiens
tacgactactatagggcgaattgggccctctagatgcatgctcgagcggccgccagtgtgatggatatctgcagaattcgccctttcgagcggccgcccgggcaggtactctccagataacatatgcagggttttatatatgtttattagattaatcttactgactgtattacacaaatttatatacttataacattttgtctgcttaatctaccaaatactgagaaatgtaaactaaatttcctactttggcagtggatctgttaagtttgtattttttgtttgtttgttttggggctttttttatagttctgtcaattttactttataaattcatagtttaggtaactagaagcaaataagtttcgaattgttatctcttctcactgagctaagcttttatcagcatgtaatgatgatctctttttttaacgaatagtgtctatgttaaggt

SEQ ID NO: 36101 - DNA, 456 bp, Homo sapiens
gcgaattgggccctctagatgcatgctcgagcggccgccagtgtgatggatatctgcagaattcgccctttcgagcggccgcccgggcaggtactcctcatgatcatctacacaacattctgtgacacgttctctaacccaaatattgacctggataaattcagccttgttctcatactgttcataatattttctatccagctgagttttatgcttttaactttcatcttttcaacaaggaataattcgggtttcacaccagcagacacagtggctatcattttctgttctacacacaaatcccttacattgggaattccgatgctgaggatcgtgtttgcaggccatgagcatctctctttaatatctgtacctcggccgcgaccacgctaagggcgaattccagcacactggcggccgttactagtggatccgagctcggtaccaagcttggcg

SEQ ID NO: 36102 - DNA, 173 bp, Homo sapiens
ggccctctgatgcccgctcgagcggccgccagtgtgatggatatctgcagaattcgccctttcgagcggccgcccgggcaggtacttttttttttttttttttttttttttttttattttttttttttttttttttttttttttttttttttttttttttttttttttttttt

SEQ ID NO: 36103 - DNA, 460 bp, Homo sapiens
attgggccctctagatgcatgctcgagcggccgccagtgtgatggatatctgcagaattcgcccttagcgtggtcgcggccgaggtaccagaatctctaacagtgtggtcctgtgtagccacattgctacacttacagagatgctttggggcctttttggattaagacagttctaaaagaccaggcctcacctatgatctgtgtataaagaattagcatcgcactgtagatctgcaagagaaggccgcctcctgcagtgctctctcttggtgaatgctaactctgctcgagggccttttggggaaaggacagtgtaaaacccttagagaggtaagtttcccacccttccaacctctctccacctgcagcttgcttggtgctgtcaggatctggatttggggggagtctctctgtagtggaactagtgacagaagctgttctttagaattttcaggatggc

SEQ ID NO: 36104 - DNA, 443 bp, Homo sapiens
ttgggccctcagagtcagctccagcggccgccagtgtgatggttatctgcagaatttgccctcagcgtggtttgcggaccaggtacagtgaaaagagccaaggctgtgtgaccccctcatcacttagccaggcgtatggtcctggtttctgaggctgccagaaagcatcttagcaatttgtgtttggatgggccatgcctgactattctaggctggaggttcctaaagagtaacaagaggaagagaaacaagaatctctgacacttgttgagaatagagcacagtcccatttgtttgaaaagagacaccaggcagccatgtttatgtgccagaaatgcattccacctcaaggaggacttaatttatggacccgtgtgtgccaggctgagctgggcaagatctttctcaggacaaactctgccatgcagctaaaagcctggaaa

SEQ ID NO: 36105 - DNA, 445 bp, Homo sapiens
attgggccctctagatgcatgctcgagcggccgccagtgtgatggatatctgcagaattcgccctgtcgagcggccgcccgggcaggtacaaccagaaccaacaattgtatttctctatagttattttaaaatagtaatcaatgctatgtatttgatgtatatgtttctaaattagaaatttcttttggctttgtgtttttttaatgtgcgttaaatatgtaaactgaacctgttcctaaaatgcattaaacttgaatgctgtgtctatccaatgccaaaatgctcagaagaaaagtgaataattcagtcattcatctggatgtagttttctgtgtaatctcaaatatctgaatattgaaaaaactaggttgctaacttttttcattccttatgcaaatgtttagcatcatagtgctgtttcagatacagatctgtttcatcaaa

SEQ ID NO: 36106 - DNA, 440 bp, Homo sapiens
atagggcgaattggagctccaccgcggtggcggcgagcggtatcagctcactcaaaggcggtaatacggttatccacagaatcaggggataacgcaggaaagaacatgtgagcaaaaggccagcaaaaggccaggaaccgtaaaaaggccgcgttgctggcgtttttccataggctccgccctccttgacaagcattacaaaaatcgacgctcaagtcagaggtggctgaaacccgacaggactataaagataccaggcgtttccccctggaagctccctcgtgcgctctcctgttccgaccctgccgcttaccggatacctgtccgcctttctccctttgggaagcgtggcgctttctcatagctcacgctgtaggtatctcagttcggtgtaggtcgttcgctccaagcttggcctgtgtgcacgaaccccccgttca

SEQ ID NO: 36107 - DNA, 69 bp, Homo sapiens
gactactatagggcgaattgggccctctagatgcatgctcgagcggccgccagtgtgatggatatctgc

SEQ ID NO: 36108 - DNA, 454 bp, Homo sapiens
gcaaattgggccctctagatgcatgctcgagcggccgccagtgtgatggatatctgcagaattcgcccttagcgtggtcgcggccgaggtactgggattataggcatgagccaccatgcccggcctttgctcttaactactgatgttgtcttcctgatcttttctacaagaagcttttaaactttttggactttaacctacaataagaaatccattttacatgttcacatgtatctataacaacatttatatttctaaaacaaacttttcatgaaacaagatatacctacatatgtcaggcactctgatattttctattctagtccaccttttccatttcattctatttatgggaaatatatgttggttgggagtcactgagttaatttaatgacccactaataggctgtgagtggcattggaaaaatacctgcttgtaagaattgcgaacaca

SEQ ID NO: 36109 - DNA, 558 bp, Homo sapiens
tatagggcgaattgggccctctagatgcatgctcgagcggccgccagtgtgatggatatctgcagaattcgcccttagcgtggtcgcggccgaggtactcgtgataaagaatcaatagcaattcaaaggttccttttgttaggctgtatcccaaagagtagggaaagatctttacttcatgtcagtgggtgataccactattaaaggtaacttgtgtttttaaaacaaaatacttttatcacccagaattacaatttcttaaaaatattgttatgctgaatccctcaaacaaaaatggtttatcaatttctttggacataggtagcagggaagaaaaaccactttaggtaaaaaaatttaaatatacttatggagataaataacccaagatgaggatttcttgaaatataggaaatttattaattgaattaatcttgaaagttaaattatgaatgtgataaattcacattttaaagaattttctctgttaattagctcatatgttcaaatgatatttgttaaataatctcttggaatttctgaatctttagtttatat

SEQ ID NO: 36110 - DNA, 374 bp, Homo sapiens
gcgaattgggccctctagatgcatgctcgagcggccgccagtgtgatggatatctgcagaattcgccctttcgagcggccgcccgggcaggtactgtaacacgggagagctgtcaaggaagttccatttcagggcaagcacaggaaaacactcctctccgtggatcaaagaagtcagcccaaggaacaaatctctccacactttggctgggtgggctgatttacctgcgaaagtaatttctgtgtgtccctgcttagaatccagggttttgtgaatgagaactatcattcaatctcaccaggcagaaactattcctcaagggctgtatgacgtctgtaagaaggcagttcaaaacaccgcaaggcagtgagaaa

SEQ ID NO: 36111 - DNA, 472 bp, Homo sapiens
ctactatagggcgaattgggccctctagatgcatgctcgagcggccgccagtgtgatggatatctgcagaattcgcccttagcgtggtcgcggccgaggtacccgaaaagaaaggaagctttagtaatgaaaggattgctgccaaaatcctgtttcccccttgcagatcttacagaaaacagccacagaatcccaaggcatcagcaccaagagagcctgtagaaactatctggtctaagctcctgaagcccagagataagaatgacttaacccaagctgcacagcctcttaacagtccactgttaaccccagaaacagatgcatttgaatctgaaaggagacaggaatcctaatcctactgctcagggacttgctgatttactttgctgtctattagcctttctgtgacatgattttctaccaagcaaagtcttttattcaagtctcccagagatttcctatttaagcgttt

SEQ ID NO: 36112 - DNA, 470 bp, Homo sapiens
ctactatagggcgaattggagctccaccgcggtggcggccgaggtacctcagttggaaatgcagaaatcacccgttttctgtgttgctcacgctgggagctgtagactggagctgttcctattcggccatcttggaaccggcacacaccaattttttagaacagaaacaggatcacaatctacatattgtcttaacacatattttaatcatagataacagtatatctattcaacacaaaaagttaattctgaaaatctgcatcttcatcttacataaaacatttaaacttcccagaacaattgggaatattaatgtttcatttattcatttattattaatattaatcagggtcctattaggagacagaaaccagataatttgaaagtttaatatgaacaaattattaactataacaagagataggctagaaagaaagagaattttaaggaatgtaggaaaagcagatatt

SEQ ID NO: 36113 - DNA, 447 bp, Homo sapiens
tgtcactacttagggcgaattgggccctctagatgcatgctcgagcggccgccagtgtgatggatatctgcagaattcgccctttcgagcggccgcccgggcaggtacatcttgaggcctctcagcaggagacaaaggattccaaaaagagatgtggaggtgctgagggcacctctatctctttgttgtttagtctgtcattgaatcaatctacttatcatcttgggtctttgagtattgtatgaaagatccttcgtgcacaccacacacagtcatgattttgttaaagtagccttcttcaaatgcttttctaagggctagtcaccaactttatttctgtgtttctgtacaagaaacattttcagttcttcattgagtttgattatggaaatccattaaaagactctatgaaaattttactcatgtcttttggaaatgcaacatttt

SEQ ID NO: 36114 - DNA, 478 bp, Homo sapiens
actactatagggcgaattggagctccaccgcggtggcggccgcccgggcaggtacaagccaatgccagcgtcagagctgcttttgtgcatgcccttggagatctatttcagagtatcagtgtgctaattagtgcacttattatctactttaagccagagtataaaatagccgacccaatctgcacattcatcttttccatcctggtcttggccagcaccatcactatcttaaaggacgctctagaactagtggatcccccgggctgcaggaattcgatatcaagcttatcgataccgtcgacctcgagggggggcccggtacccagcttttgttccctttagtgagggttaattgcgcgcttggcgtaatcatggtcatagctgtttcctgtgtgaaattgttatccgctcacaattccacacaacatacgagccgggagcataaagtgtaaagcctggggtgcctaatgagtgagct

SEQ ID NO: 36115 - DNA, 76 bp, Homo sapiens
tacgactactatagggcgaattgggccctctagatgcatgctcgagcggccgccagtgtgatggatatctgcagaa

SEQ ID NO: 36116 - DNA, 508 bp, Homo sapiens
  misc_feature 169, 369: n = A,T,C or G
ccctctagatgcatgctcgagcggccgccagtgtgatggatatctgcagaattcgcccttagcgtggtcgcggccgatgtacttcatttaagagtcctggcttccagaaatcctttttttcatgtcttatcttctaattatgctttgtagtccagctaaattacatctncttgacattttggaatgttcccatctttacacctgtcttcaaattgtttattccacatggaatattcttttccccttatctccaattagagtatatggagtttggggaagaatcatgtcgttcactgtggcacgagggacagagtgagaaggtggacaggagccagataattggagagactttttacataatgctaattntaggagtttgcaattaacactgtggatttgatgaaaacagtggaggttttaatcagggggatgaatgataggattagaattctattttatataatataatccagatacatcatgataaattaaaagatcaaagctgaaa

SEQ ID NO: 36117 - DNA, 448 bp, Homo sapiens
actactatagggcgaattgggccctctagatgcatgctcgagcggccgccagtgtgatggatatctgcagaattcgcccttagcgtggtcgcggccgaggtactcttaaaaatctgttaagagagtggatctcattttaagggttcttaccacaataaaattaaatttttgaaataaatcagtcatatttgagtgaaatgaaacctttccgagtagtttcagacaattgataatacctagtttacagttcctgtagtcattttggagggtgaggacttgatgtgtttagtaaagttgagaaataaatacatgaaagaatgtgtggggaagagaaagtgtggggaagagaaattgtctcagaggaccattcttagtggcactggggaaatcttggcacccagaagaattcaactgcgctcactgcaaaaatacaatggcctacattgga

SEQ ID NO: 36118 - DNA, 414 bp, Homo sapiens
gcgaattgggccctctagatgcatgctcgagcggccgccagtgtgatggatatctgcagaattcgcccttagcgtggtcgcggccgaggtacttttcgctcagctgttttcatcactgtgttcagaggtttgtcttttttttttcccctaaaaggtgctgagatgttatgagtgctttatgtgtggttactggataaagttttgaaatgtcactgtgttataaactgcatgatttatcgattttggaaattttgttttttttaaatgattaatttaaataaaatggagaattttgatccataagaaaagcaggactgaaatctccagggatgggagcctttgggttcaccttgttcagtgatgtttttttgtagacttcctactttcttgtaaaaatgtttttggactaaatat

SEQ ID NO: 36119 - DNA, 476 bp, Homo sapiens
tttacgactactatagggcgaattggagctccaccgcggtggccggccgcccgggcaggtacttaactagggttagccgaggtcaggagggtggatgccttattatgggattagtgcccttctaagagggacagtagagggcttgttcatgctctctctctccatgcacaagaaagagcacacagtgagaaggaaagaggccctcacccagaacctgaccatgctggcaccgttgattgcagacttccagtcctccagtgattgtgagtaagataaatactctgtggtttaagtcaccaagttctgtggtgtgttttatggcatgcacaagggtaactccaggatgatgcttttttcaccaactgggttggttccaggccttttcatgggaaagctgttcagccttcctcaagcctttgcaaaaaaatgctttggctgggtcacttctctttttggtccttttcagtatgcctttt

SEQ ID NO: 36120 - DNA, 65 bp, Homo sapiens
agggcgaattgggccctctagatgcatgctcgagcggccgccagtgtgatggatatctgcagaat

SEQ ID NO: 36121 - DNA, 589 bp, Homo sapiens
atagggcgaattgtgccctctagatgcatgctcgagcggccgccagtgtgatggatatctgcagaattcgccctttcgagctttcgcccgggcaggtactttgcattctgattctttgatatttgaacttggccatctgtgggtgctactctcgtaagactaaaaggcacctactaaatacgaacaaggataaccagttctaccaaaaacattaccaaccaaacctcccctgttcttttttcagactttccttttgctttcaacctcttaaactgtaaaggagagatttaatgtttccctattattctgctttgactcacatactaaaatgaccacatggcactccattgaatcttttcagttgttcacgaattaaaataatgcccatgttttacagtttttcgagtagtctcagcaatggatctgtagtttcaggacctgtttttaaaagatcaagatacttttatgtgtttcagaagtagctgttttttcattttttgtgggtttgtttttttgtgtttgtttggttggttggtttttgggttttttgctttttaaaggtcacaatgttgtgagcctggtgtaaatg

SEQ ID NO: 36122 - DNA, 447 bp, Homo sapiens
gtcactactatagggcgaattgggccctctagatgcatgctcgagcggccgccagtgtgatggatatctgcagaattcgccctttcgagcgccgcccgggcaggtactgcggtctttagagatcatttagagcttgcacacatctgtgtcttcttgtgggaaacctctaggtattctgtctgatcagcactgtgaggaagttggtgggaaaagggcccctgttaagaacaaacaatgggcagaaggaagcacattgcaataaatttccccagagagagttcctttacattccattcaccaaaaacctctctggaactgtcaggttcagaatatcaaccaagaccatatcatttagaattcattggcatgtagaggtgactcgattcctaaaagaagcctctctcccatgaaccacgatgtacagggaggaatttgaagtagatagaa

SEQ ID NO: 36123 - DNA, 372 bp, Homo sapiens
actatagggcgaattggagctccaccgcggtggcggccgaggtgcgcggggagaatcaagtgagaagtgcttttagaaacatccatgcaggtatgaaggagctctaacatgccaggcgagtggacaaggcttggggaaggttgacgatacctagagacatgtcatcctttgggtcagagcctgcctaatctcatggggaactgatgggtggaataggcactctaggctccccctggcatgggcagggtcgcagagaattcacaaatttgtgtgtgttcacggaggggaggccaagcttctgactgctgaagttagggtcagaatggagaggcaagcatgtgtgtgagggactctgagatgggaggctgacaa

SEQ ID NO: 36124 - DNA, 72 bp, Homo sapiens
gactactatagggcgaattgggccctctagatgcatgctcgagcggccgccagtgtgatggatatctgcaga

SEQ ID NO: 36125 - DNA, 113 bp, Homo sapiens
actactatagggcgaattgggccctctagatgcatgctcgagcggccgccagtgtgatggatatctgcagaattcgcccttagcgtggtcgcggccgaagtaccaaggatttt

SEQ ID NO: 36126 - DNA, 479 bp, Homo sapiens
ctactatagggcgaattgggccctctagatgcatgctcgagcggccgccagtgtgatggatatctgcagaattcgcccttagcgtggtcgcggcccgggtactcgggaatctttcgttgacttgtcctcaatgaccacactcgagagtcccttcaccctagagaaaagcatccacgttgggcaccagatggagtggcctgcgccttcacagctgtgggcatttctcctcaggtggaacgagagacttgagaaaagaaagacaacagagacaaagtatagagaaagaaaagtgggcccaggggaccggcgctcagcatatggaggacccgcgccgccccgcgtacctgcccgggcggccgctcgaaagggcgaattccagcacactggcggccgttactagtggatccgagcttggtaccaagcttggcgtaatcatggtcatagctgtttcctgggtgaaattgttatccgctcacaat

SEQ ID NO: 36127 - DNA, 455 bp, Homo sapiens
cactatagggcgaattgggccctctagatgcatgctcgagcggccgccagtgtgatggatatctgcagaattcgcccttagcgtggttgcggccgaggtacactctagcattgtaactttttccccctgagaagtaattttaagatctatcagtctcaatttaaatgatctgttaatcagccagagttttagtttcataatatcgttccattgcctgacaaagatatacacactgaagtgcctttagcagacctgggaccgtcaagaatcttgttaccctgattattgcaagatgacatatttcttaagccatttataatctcatattcgggttgaatctgaatttacaaataaaagggttaaattgaggcagtttcaagcagcatttaggaaaatgaagtggcttcaaattttagtgtttctggttacattattttgtttgaattatacaatta

SEQ ID NO: 36128 - DNA, 463 bp, Homo sapiens
gcgaattgggccctctagatgcatgctcgagcggccgccagtgtgatggatatctgcagaattcgcccttagcgtggtcgcggccgaggtacctgaaggaacgaagaagagggatttctcaaggtgagaagcagttctccatggacactgatgacagcacaggcaaagtttcctatgactagggatcactgtccacacagagtctggcttcccaggtatccagcaggtagacaaaacagctaactccactgccactcctttctccacatccgttcctatttctcagccatctcagtgacatccgccatcttgagagtcaactactgactggactgagttgtgtggtatatgcttctgtttacttctcttctgtcttttttaagtggccaaatagcaaacgcttaaataggaaatctctgggagacttgaataaaagactttgcttggtagaaaatcatgtcac

SEQ ID NO: 36129 - DNA, 565 bp, Homo sapiens
cgactcactatagggcgaatcgtgccctctagatgcatgctcgagcggccgccagtgtgatggatatctgcagaattcgccctttcgagcggccgcccgggcaggtacaatatttacagcctggaggattcttgaagtaatgacagactcgtctgctgcaagtgactggttggcttcagtagagtcattgcttcctattactgctgtgatccctgcgcctgcctttcttctgctggctcacctccttgttgaagacaaaggacaaaatcttcaccaaatactcaaggtcactacagaattagcccaagcagattcctcccaggtgccaaatctgattccagttttgatgttcaaattgggaagaccactggaacctatattatataatgatatattgtatactttacctaagcttggtgttcacaaggtgtgtataggacaaattctacgaataatacaactacttggaaccacaccacgactaagagctgtcactttgcgcttgctgacatctttgtgggaaaagcaagaccgagtctatcctgaactgcagcgtttcatggct

SEQ ID NO: 36130 - DNA, 497 bp, Homo sapiens
actactatagggcgaattgggccctctagatgcatgctcgagcggccgccagtgtgatggatatctgcagaattcgccctttcgagcggccgcccgggcaggtacagatgcattcagttgtcattcattcgtgttaagccaagatcctggatcttctatcattaatgttaagaggaaacatgaattacaactatattgtatgactgccatattttattgaaactaaggtcaatgttgaaccatatcttgatttcagaatttaaaatgtgttaccttagaaataatgaaatatagtgtaacagttggtttctaaatgtggttttatttcaggggccattatttaacctgtgtgtatgctatgatggagttcttttgtgatttctttacttctaaatttaaatagtaattatgtttaaaaacaaatgtttttgtctttagttgcaaagcagcatatatctcatttccttcaaccttgcctcctcatacacaaatatatt

SEQ ID NO: 36131 - DNA, 659 bp, Homo sapiens
acgactcactatagggcgaattgggccctctagatgcatgctcgagcggccgccagtgtgatggatatctgcagaattcgccctttcgagcggccgcccgggcaggtacagtgaaaagagccaaggctgtgtgaccccctcatcacttagccaggcgtatggtcctggtttctgaggctgccagaaagcatttagcaatttgtgtttggatggtccatgcctgactattttaggctggaggttcctaaagagtaacaagaggaagagaaacaagaatctctgacacttgttgagaatagagcacagtcccatttgtttgaaaagagacaccaggcagccatgtttatgtgccagaaatgcattccacctcaaggagggcttaatttatggacccgtgtgtgccaggctgagctgggcaagatctttctcaggacaaactctgccatgcagctaaaagcctggaaactaaaggatttcatgtagtaaactatcttccaacccctgtaggcatcagaccacaggatgaggtttcagaaggtcataaggcagaatagttaagcctacagggcttacagtctgacagacctgggttcagttcttgggtcttcatcactagttttgtgactttcggaagatgactcccggagcctcagtgagcc

SEQ ID NO: 36132 - DNA, 204 bp, Homo sapiens
tcactatagggcgaattgggccctctagatgcatgctcgagcggccgccagtgtgatggatatctgcagaattcgcccttagcgtggtcgcggccgaggtacgaaaaaatcaggccactaagcccactgttaatatagacgcagaccaattgttaggaacaggtccaaattggagcaccattaaccaacaatcaagtgatgcat

SEQ ID NO: 36133 - DNA, 452 bp, Homo sapiens
gcgaattgggccctctagatgcatgctcgagcggccgccagtgtgatggatatctgcagaattcgccctttgcggccgcccgggcaggtacgcggggccttacctcctgttcatgcaactttgcttgttttgcttctactaaaatggttctaggtgctgtgtggacaggtgatacaaaagcctgactcacacgggtgacattaattcattccattttcatttctctttgagtgatcctgacaagcagagggtctcaggtggatattactgtgtctttgagacctctctaatccttatctatctctcattttaatacagagagtttcatacgcagaccttaagtagacatagtatccagctaaaagggtctcactctgtcacccaggctggagtgcagtggcgcagtcatggctccctgtaacctcaacctctcagactccagcaatcctcct

SEQ ID NO: 36134 - DNA, 479 bp, Homo sapiens
agggcaattgggccctctagatgcatgctcgagcggccgccagtgtgatggatatctgcagaattcgccctttcgagcggccgccccggcagggacgtggccctaatggggaaatcccaaaaacttgaccaggtgaaaggtggccccccgaggcccagcccgtctttatgttgttcactttctttgtgagctgttgagaagaaaaaaagtcttcaccttttcatccagtttccaactctagcaagcacagctcttgggcagaaaatattggcaaagaatatccacatgggcaaaccaaggcaaaacggacagaagccagtctttgcaggcttcccactactctgtaacaatttccttccggccatggcccattggccattgcccctacacccaccattctcatatctgaactgaatgcttctggcccaggttgtggcccatcaggccttctagagagatagtttagacagacagtattc

SEQ ID NO: 36135 - DNA, 322 bp, Homo sapiens
tatagggcgaattgggccctctagatgcatgctcgagcggccgccagtgtgatggatatctgcagaattcgccctttcgagcggccgcccgggcaggtacagtgaaaagagccaaggctgtgtgaccccctcatcacttagccaggcgtatggtcctggtttctgaggctgccagaaagcatcttagcaatttgtgtttggatggtccatgcctgactattctaggctggaggttcctaaagagtaacaagaggaagagaaacaagaatctctgacacttgttgagaatagagcacagtcccatttgtttgaaaagagacac

SEQ ID NO: 36136 - DNA, 313 bp, Homo sapiens
ctatagggcgaattgggccctctagatgcatgctcgagcggccgccagtgtgatggatatctgcagaattcgcccttagcgtggtcgcggccgaggtaccccactgcagccaggaccagaatgctatcactctcatgaatgaaatcattcagagcatagctgcatcgggggcatgaccagcacttatccctctccctgaccgcattccctggacctgtcctgctcaacccacttgatcgaggttaatgcaaggccatcttttctcctgaagacagtcactctcctttgggcacatttaaaattaaagcaccta

SEQ ID NO: 36137 - DNA, 417 bp, Homo sapiens
ctactatagggcgaattgggccctctagatgcatgctcgagcggccgccagtgtgatggatatctgcagaattcgcccttagcgtggtcgcggccgaggtacatgggactacaggcacgccccaccatgcccagctcatttttgtatttttagtagagacagggtttcaccatgttggccaggatgatcttgatctcttgacctcatgatccgcccctcttggcctcccaaagtgctgggatcacaagcgtgagccaccacacctggccctctatttattctctttaaagagagagaaaactatgaaagggccaaattatttaattaaatctttaccttaacacaagggaaaaaatggaatttgcctaatataggttgatgaagcatacacaattgaacagaaaacaattcacattt

SEQ ID NO: 36138 - DNA, 521 bp, Homo sapiens
  misc_feature 333, 336: n = A,T,C or G
ctctagatgcaatcgcgagcggccgccgtgtgatggatatctgcagaattcgcccttagcgtggtcgcggccgaggtactctactgtgtcaataattatttcagtctctgctgcaattagtgcttaattacaatacctgagctataaaaataaaagatttcattatagcaaagtcacaaatatcgttttagttcagttatccacattgttcatctaaaataatacattttctttacatataactgtcttagacttgtaattgaggatatttgatgaaacagatctgtatctgaaacagcactatgatgctaaacatttgcataaggaatgaanaangttagcaacctagttttttcaatattcagatatttgagaatacacagaaaaactacatccagatgaatgactgaattattcacttttcttctgagcattttggcatgggatagacacagcattcaagtttaatgcattttaggaacaggttcagtctacatatttaacgcacattaaaaaaccac

SEQ ID NO: 36139 - DNA, 444 bp, Homo sapiens
acgactactatagggcgaattgggccctctagatgcatgctcgagcggccgccagtgtgatggatatctgcagaattcgcccttagcgtggtcgcggccgaggtaccccactgcagccaggaccagaatgctatcactctcaggaatgaaatcattcagagcatagctgcatcgggggcatgaccagcactatcctctccctgaccgcattccctgacctggctgcacaacccacttgatcgaggttaatgcaagccatctttctcctgaagacagtcactccctttgggcacatttaaattaaagcacctatcagaatacaagtccagaggccctggcccatccgtcacagtgtatagaacggtctctttctacagagtaagagtgaccctatcctggtgcctttaaatctaaaaactattcagttcctttggtgggcaatct

SEQ ID NO: 36140 - DNA, 455 bp, Homo sapiens
agggcgaattgggccctctagatgcatgctcgagcggccgccagtgtgatggatatctgcagaattcgccctttcgagcggccgcccgggcaggtacaaagccagtgagggaaaaactctatgagcaactcttaaagtgaaaaatctcatcaatacacaactgagtatactgccattgatcaactgctcttaaaatacttagataaaaatcaccgctgtaggaaaaagcaaaacaaaataatgattgaagcgtgttttgctctgggatgcttacatttgacgattcctgtcatacgctgtgtaagttcatacctagtgctcaatcgtatttcattaccagactgctgtataattagagggaaaaagaaaattcatttgaacaaaccactttcacagataaaccacaggattccacacttggctctgtttaactcacacttcactgaacactcata

SEQ ID NO: 36141 - DNA, 435 bp, Homo sapiens
gcgaattgggccctctagatgcatgctcgagcggccgccagtgtgatggatatctgcagaattcgccctttcgagcggccgcccgggcaggtacagtgaaaagagccaaggctgtgtgaccccctcatcacttagccaggcgtatggtcctggtttctgaggctgccagaaagcatcttaccaatttgtgtttggatggtccatgcctgactattctaggctggaggttcctaaagagtaacaagaggaagagaaacaagaatctctgacacttgttgagaatagagcacagtcccatttgtttgaaaagagacaccaggcagccatgtttatgtgccagaaatgcattccacctcaaggaggacttaatttatggacccgtgtgtgctaggctgagctgggcaagatctttctcaggacaaactctgccatgca

SEQ ID NO: 36142 - DNA, 466 bp, Homo sapiens
tatagggcgaattgggccctctagatgcatgctcgagcggccgccagtgtgatggatatctgcagaattcgcccttagcggggtcgcggccgaggtaccccagtggactctatcaacaggcattgagcaataggcacacggtaaacggcagctgttgttattggtttgcaaggccttttattaattttaccataaaccacaagatggaaaagacaactaatacagacacagttaagttccagaagacttctggacttcaaatgatggactaaaaccagcataaatttacataaaaagaaacgaaatacctacatattttcataactcaatgagcctaatgcatgatagaagggacttgtttttatggcaattaatatgaggaagagcagggagttttttgctgagaacaagatcagtgtgagtcagtgggatggccttgttacttaaagaaaacataggctgcatt

SEQ ID NO: 36143 - DNA, 439 bp, Homo sapiens
acactactatagggcgaattgggccctctagatgcatgctcgagcggccgccagtgtgatggatatctgcagaattcgcccttagcgtggtcgcggccgaggtacctaaacaggccaaatgttgcctttggggttcctgtttcaacagcatggtgtgaagcgctgcatcaaccttctctgcctcatcctgcaaggtggcaaattcctcaagaatatgaccaagcttatctctctgtcgagccctgttatgtccatggatctgaataagactacagaatggccgaacacagtgagtaacaaaggagtcgatacagtccttagcctggtgattattatataggtagcacttgggggaaagcaccggaggactgacaaaagaccgaagtgcatctttcaccatgtcttgcatgagatgagttccaaagacctttttgttatc

SEQ ID NO: 36144 - DNA, 432 bp, Homo sapiens
attgggccctctagatgcatgctcgagcggccgccagtgtgatggatatctgcagaattcgcccttagcgtggtttcggccgaggtaccagctggagactggccttacccgccaccccgaggagaagcctgtgaggaaggacaagcgggatgagttggtggaagccattgaatcagccttggagaccctgaacaatcctgcagagaacagccccaatcaccgtccttacacggcctctgatttcatagaagggatctaccgaacagaaagggacaaagggacattgtatgagctcaccttcaaggggaccacaaacacgaattcaaacggctcatcttatttcgaccattcggccccatcatgaaagtgaaaaatgaaaagctcaacatggccaacacgcttatcaatgttatcgtgcctctaacaaaaagg

SEQ ID NO: 36145 - DNA, 576 bp, Homo sapiens
gctcagcggccgcagtgtgatggatatctgcagaattcgcccttagcgtggtcgcggccgaggtacagtgaaaagagccaaggctgtgtgaccccctcatcacttagccaggcgtatggtcctggtttctgaggctgccagaaagcatcttagcaatttgtgtttggatggtccatgcctgactattctaggctggaggttcctaaagagtaacaagaggaagagaaacaagaatctctgacacttgttgagaatagagcacagtcccatttgtttgaaaagagacaccaggtagccatgtttatgtgccagaaatgcattccacctcaaggaggacttaatttatggacccgtgtgtgccaggctgagctgggcaagatctttctcaggacaaactctgccatgcggctaaaagcctggaaactaaaggatttcatgtagtaaactatcttccaacccctgtaagcatcagaccacaggatgaggtttcagaaggtcataaggcaaaataggtaagcctacagggcttacagtctgacagacctgggttcaatttttgggtctttatcactagtt

SEQ ID NO: 36146 - DNA, 416 bp, Homo sapiens
gggcgaattgggccctctagatgcatgctcgagcggccgccagtgtgatggatatctgcagaattcgcccttagcgtggtcgcggccgaggtactttaattagttaatagaaaccactgtaaatgagttatctatctccagaacattctcagagaatttacacgaactaaaacaggaatgaagtgctctcagagacttttttttcagggaaatgtatttagtagtttgagtagttgatctgcaaaaactttaactttaattaactacatagatgaatattttttattttgaaatttgagaatgtcctaagaggatgtctacaggatatgaaactactgggtgcaggaaaattttttaaatgttagcaaattgtggcaagaggaaaacaaacagtggagaaaactgtggtagagaaa

SEQ ID NO: 36147 - DNA, 477 bp, Homo sapiens
gcgaattgggccctctagatgcatgctcgagcggtcgaccgtgtgatggatagatggatatttgcagaattcgccctttcgagcggccgcccgggcaggtaccctagtcctatcttagtggtgtcaggtgcaaagtcactcattctgagaaattttacttctgtagccattcagattaaattttttaaaatagggagttgaactcagcttgaaattgaaggcttcctataatctgatcctaatgcatcttctctgagctttgcttctggcaattcacattatattatctatatgagtaagccaaacttgtctattcattattccaggaataagtgatatactcgtgtacctcaattaattttaatgcaaacctctctcccttctacttacggaaattataatgggtttttagggttcataattctatttccattaggcttcagagtctgataatgcttcacagagatacacctttac

SEQ ID NO: 36148 - DNA, 324 bp, Homo sapiens
attgggccctctagatgcatgctcgagcggccgccagtgtgatggatatctgcagaattcgcccttagcgtggtcgcggccgaggtacttgtagtcttttaataaccatagaaagcactaaaagtaattttaaaagcctggaaagttaaatgaaaactgatattatatacaattaatttaaaattatagttttactctgtttatttacaaatttgctagataaaacataatctcagaaaaaaagtgtttctttttgttgcttctgcactatagtaaatatctagatatctataacaggcatataatatagtttatatataggga

SEQ ID NO: 36149 - DNA, 446 bp, Homo sapiens
ctatagggcgaattgggccctctagatgcatgctcgagcggccgccagtgtgatggatatctgcagaattcgcccttagcgtggtcgcggccgaggtactggaagagtttttgaagattgaatattgatacttaaattatttctgaagctcttcaataaagttttctaattataaaaactccacataatttggttcaagccaagaaacaaagtcattttactctaagatttattctctaaatatagtaatgagatctgtaaagtctgtgttttgctaattaaaagagtaaatctgcgtattttctgcagactgctttctttgaatctgtttctaaaccacaacttgataagtttttatgggtaactgggaatatggtcaacactgagttttccaagggttccatccaggagtatttcattttaggatgctgtttggacacagggtt

SEQ ID NO: 36150 - DNA, 163 bp, Homo sapiens
gtgatggatatctgcataattcgcccttaccgtggtcacggccgaggtacatgggactacaggcacgccccaccatgcccagctcatttttgtatttttagtagagacagggtttcaccatgttggccaggatgatcttgatctcttgaccccatgatccgcc

SEQ ID NO: 36151 - DNA, 267 bp, Homo sapiens
tgtgatggttatctgcagaatatgctccttagcgtgttcgcggccgaggtacaaggacactaagacagtgtagcctgctgacttgagaatgttctgtaaggactggaaacactagaatcttgaagaaacgcctggctagaggtgagggtaagctgttaattacactgattacagtttgtgcctctcagactgagaactcttttcttcttgctgggggcattgctatctctaggatgttagccctgaagtcctgatagtctctttggg

SEQ ID NO: 36152 - DNA, 561 bp, Homo sapiens
  misc_feature 197: n = A,T,C or G
atactactcactatagggcgaattgtgccctctagatgcatgctcgagcggccgccagtgtgatggatatctgcagaattcgccctttcgagcggccgcccgggcaggtacccgaaaagaaaggaagctttagtaatgaaaggattgctgccaaaatcctgtttcccccttgcagatcttacagaaaacagcacagnaatcccaaggcatcagcaccaagagagcctgtagaaactatctggtctaagctcctgaagcccagagataagaatgacttagcccaagctgcacagcctcttaacagtccactgttaaccccagaaacagatgcatttgaatctgaaaggagacaggaatcctaatcctactgctcagggacttgctgatttactttgctgtctattggcctttctgtgacatgattttctaccaagcaaagtcttttattcaagtctcccagagatttcctatttaagcgtttgctatttggccacttaaaaaagacagaagagaagtaaacagaagcatataccacacaacccaatccagtcagtagttgac

SEQ ID NO: 36153 - DNA, 389 bp, Homo sapiens
ctcactatagggcgaattgggccctctagatgcatgctcgagcggccgccagtgtgatggatatctgcagaattcgccctttcgagcggccgcccgggcaggtacagagaggggctcgctgcgctgggtagaggaagcagaaagtttgctgaactcagacggaagaaaaaggattcctctggagaatcccagcaaggtttctgattggacaatgggtccatgtccttgtgaagtactcctcctcctgaacctgccctgctctgtgacttgcttttgaccaccagcatgctgcagaagtgatgccagtgtgaacttctgagccgggtcataaggaagccttgcggtgcggcctgggttcttcaggaaatgcttgtttgaggaaaaccact

SEQ ID NO: 36154 - DNA, 186 bp, Homo sapiens
cgaattgggccctctagatgcatgctcgagcggccgccagtgtgatggatatctgcagaattcgccctttcgagcggccgcccgggcaggtacaccaccatacctggctaatttttatttttcatagaaacaatctccttatgttgcccaggcttaaaactttttaagaagtttctcctctttttc

SEQ ID NO: 36155 - DNA, 426 bp, Homo sapiens
ctactatagggcgaattgggccctctagatgcatgctcgagcggccgccagtgtgatggatatctgcagaattcgcccttagcgtggtcgcggccgaggtactgttttgataggcagctggctggtgtagaaaaaccagttagccatagaactgacatcacgcagagagccccgactccctgattagcccaccccaactcaaaatctgactccagggatgttttgttgaaaatgttatttctctaaaacagtatttcttttcctctcctgggggactaggagggcaggagacaatgaggagcaggcctgggcccctggttccaacatcaagagtgacagggtggtctcagggatgtcctgtgagggcagcctgagccactaaacaggtccagtagagatggtattttatctttaaaaaatctgtat

SEQ ID NO: 36156 - DNA, 458 bp, Homo sapiens
actactatagggcgaattgggccctctagatgcatgctccagccgcccgccagggtgatggatatctgcagaattcgccctttcgagcggccgcccgggcaggtactaaaaacgtgaaatttcctcatcactgaaaacacgctcatctgaaatctctgtaaaaaaggatttggctgttgaaacttgttatcaatgcctcttctcgtagccaccatgacaataaatttggctaaacatttaaatttaccctcagttttggttttcctttaaaaaaatatgtaaacaaatgaacaggaaatctctgcttgtaagaaaaatctgaatataacaggggaaggtcagcagacggtcaccggggaaagcatccaggcatcttgtcgcctcgctgggctggccggggctcagtcactatctgactcctccttgtacctcggccgcgaccacgctaagggcgaatt

SEQ ID NO: 36157 - DNA, 505 bp, Homo sapiens
  misc_feature 346: n = A,T,C or G
atacgactcactatagggcgaattgggccctctagatgcatgctcgagcggccgccagtgtgatggatatctgcagaattcgcccttagcgtggtcgcggccgaggtactttgaacgatagcaacccttctttgtgtaactctgaagctgaaaatattgagccttcagttatgaagatttcttcaaatagctttatgaatgtgcatttggaatcaaaaccagttatatgtgatagtagaaatttgacagatcactcaaaatttgcatgtgaagaatataagcagagcatcggtagcactagttcagcttctgttaatcattttgatgatttatatcaacctattgngagttcaggtattgcttcatctcttcagagtcttccaccaggaataaaggtggacagtctaactctcttgaaatgcggagagaacacatctccagttctggatgcagtgctaaagagtaaaaaaagttcagagtttttaaagcatgcagggaaagaaac

SEQ ID NO: 36158 - DNA, 477 bp, Homo sapiens
gcgaattgggccctctagatgcatgctcgagcggccgccagtgtgatggatatctgcagaattcgccctttcgagcggccgcccgggcaggtactacgagatgcactgggactcaacgtgaccttatcaagtgagcaggcttggtgcatttgacacttcatgatatcagccaaagtggaactaaaaacagctcctggaagaggactatgacatcatcaggttgggagtctccagggacagcggaccctttggaaaaggactagaaagtgtgaaatctattagtcttcgatatgaaatcctctgtctccgtaaaagcatttcatatttacaagacacaggcctactcctagggcagcaaaaagtggcaacaggcaagcagagggaaaagagatcatgaggcatttcagagtgcactggcttttcatatatttctcaatgccgtatgtttggttttattttggccaaagcataacaatc

SEQ ID NO: 36159 - DNA, 523 bp, Homo sapiens
atagggcgaattgtgccctctagatgcatgctcgagcggccgccagtgtgatggatatctgcagaattcgccctttcgagcggccgcccgggcaggtacgttcccttcccatatgtcataaaccaatgtattttaaagaaagcaaaagctaagtatttgaaaacgttatctttcttctaacacttgctgtgaaaagggagtaaattcaggcaagctagttgaaaacattctttaaaatggccagtaaaagcaaaactctttgtgctatacggaacactcgggagtattacaaaaccagggagggagtaaaagaatggccatttctctataaccaaattgaagacagtaaagtagaaaatgtaatttccattgtgcaccaaatactcagaacacaaattaaagcaaaaacaaaatggatgtgcacaccaaaacaaaggtttttctgtagcatttatatgaagagcatgtgtaaaacattctcaatctgcccctctgaatggattatgaaagatcagtatgtacc

SEQ ID NO: 36160 - DNA, 448 bp, Homo sapiens
ctactatagggcgaattgggccctctagatgcatgctcgagcggccgccagtgtgatggatatctgcagaattcgccctttcgagcggccgcccgggcaggtacacataccccatctttgggcaagccctaaactattacaggttcccatacaactccttccccagtaggtaaatttagaacttatgaataaggaaaataagtctctagcttctgcttttactgaaggaagccaaacatagccgctaatactattcactccttatttcaaagagtgaattgaaaaagaaaataagttatttactccattgctatactctgaacttctataaatgggtgctagaaaatcttaatacattagtatttagccatactttgtatttatttaatatgaactgaacacatcttgcaagcattctccctctctagctcactttggcatttggagt

SEQ ID NO: 36161 - DNA, 470 bp, Homo sapiens
tagggcgaattgggccctctagatgcatgctcgagcggccgccagtgtgatggatatctgcagaattcgcccttagcgtggtcgcggccgaggtacccacagcattggctgttcttcataggagactcagagaagacttcataggagactcattattgtttactggacatcaggtgctatattgtatagcattcacattccacaggtgaggaaacaggctcagaggaataagtggcatgccaagatcactgagtatatcagtagcagaattaggattcagactttgttaggcctaactccaaagccctggcttttttttttttttttgagatggaatcttactctgtcaccgggctggagtgcagtggcatgatctcaactcactgcaatctctgcctcctgggttcaagagattcccctgccttagcctcctgagtagctgggactaccggcatgcaccaccacgccca

SEQ ID NO: 36162 - DNA, 486 bp, Homo sapiens
acactactatagggcgaattgggccctctagatgcatgctcgagcggccgccagtgtgatggatatctgcagaattcgcccttagcgtggtcgcggccgaggtaccctctatctctacttcacctcaatgtctttcaccctccaattttaaggtgaaaatatctaggcttctgccctctgcaactgatttctattgagggcctatggaggtaaaatgacaataatcattgaatctagaaagaaaaagcatcaagcacaatttacacgaacaatagtttcagttgacatttaactgaatgcttctaacttatttaatcttattagataggcagtgttttaatcaatttacagatggagaaaccagggatggtgcaacttgcaagtggcagagccctgtttatctccaaagttcctgttcctctgagatgaagttatagattaacctaagtttgtcctttcttgatgtaaccaactaatatctttgag

SEQ ID NO: 36163 - DNA, 456 bp, Homo sapiens
tatagggcgaattgggccctctagatgcatgcttcagccggccgccagggtgatggatatctgcagaattcgcccttagcgtggtcgcggccgaggtacaaggacactaagacagtgtagcctgctgacttgagaatgttctgtaaggactggaaacactagaatcttgaagaaacgcctggctagaggtgagggtaagctgttaattacactgattacagtttgtgcctctcagactgagaactcttttcttcttgctgggggcattgctatctctaggatgtttgccctgaagtcctgatagtctctttggggttttaataaatggccgaaaaaattgttgtggggtttcaacaggcgttcataggcacccttgcttggcaatataacatggcttttgatgtttgggtgttggaagggatctttggagtgctgagagggactcagtctttttcc

SEQ ID NO: 36164 - DNA, 458 bp, Homo sapiens
ctactatagggcgaattgggccctctagatgcatgctcgagcggccgccagtgtgatggatatctgcagaattcgccctttcgagcggccgcccgggcaggtaccctaataaagtaatcaatagaagcctggattgttgttggaaaaagtaaggtaggaccaagaaacggaaaccaccaaattgccaagcaaagcagtatgataacactaaaggatataacacaagtctgcccttctgcattcatttagtgtcagttataatttcttccaaaggagaccttgaattttttaattatgttctcaaattacaacatttgaaatggtaactctagttgaatactccttcttctagggcgttgtatcttctaagaaatgtcccccattccagctctgtacgcgggggaacaaaatgaaaatggtcccatcttcagtgaagatacatctaaactgtatgcttt

SEQ ID NO: 36165 - DNA, 163 bp, Homo sapiens
gcgaattgggccctttctagccggctcccagtgtgatggatatctgcagaattcgccctttcgagcggccgcccgggcaggtacgcggggacagccatgaacagcacactgaggaggacacaaaagaagtagacagaatctctgcctctgcttaggagtatgc

SEQ ID NO: 36166 - DNA, 363 bp, Homo sapiens
aatagggcgaattggacccttgatcgagcggccgccagtgtgatggatatctgcagaattcgccctttcgagcggccgcccgggcaggtacgatcttggctcactgcaacctctccctcccgggttcaagtgattctcgtgcctcagcctcttgagtagctgggattacaggcgcgtgccactgcgtccggctaatttttgtatttttagtagagatggggtttcaccatgttggccaggctgatctcaaacttcctgacctcatgtggttccaccccaccttgtgccttcccaaaagtgctggggattacaggcgttgagcccaaccggcgctcaagcctaacaagccaattttttttaaaa

SEQ ID NO: 36167 - DNA, 114 bp, Homo sapiens
tatagggcgaattgggccctctagatgcatgctcgagcggccgccagtgtgatggatatctgcagaattcgccctttcgagcggccgtccgggcaggtacgtctactgtaaaac

SEQ ID NO: 36168 - DNA, 57 bp, Homo sapiens
cactactatagggcgaattgggccctctagatgcatgctcgagcggccgccagtgtg

SEQ ID NO: 36169 - DNA, 466 bp, Homo sapiens
  misc_feature 158: n = A,T,C or G
agggcgaattgggccctctagatgcatgctcgagcggccgccagtgtgatggatatctgcagaattcgcccttagcgtggtcgcggccgaggtaccactcccctcactttccaaagagaagtaattcccagctaggaccttcccttgctgggaggggngcccaggtgtggcctctctgtgaccttggaccctggcttcggcatatgccagcctggcctttccccagggtagggagctggcaccctgggcattccccggccagcatccagccttcttgggcagggcctttccacaccattcctcccaaatcctcactggcccaccctggaacaaatgcaggcggaagctcgcatccccacctctgctgtttctgctgggtccccaaagagctttctttagggaaaaagaaagcaggccagtgcctgcttcttttagaccccccagtggggcatggggtgggccttgg

SEQ ID NO: 36170 - DNA, 474 bp, Homo sapiens
gcggccgccagtgtgatggatatctgcagaattcgcccttagcgtggtcgcggccgaggtacactgacttatgtgaaatacaatataatattttaccagtttaatgaatgatcagttggaagtgggagcccctttgcaaatcacttaaattagaagtgatttgcaacgcttaggttaaggagaagagcgggctgtgtcattaatgcaggaacttagggtatccagcggggtccagtcaggagacagaaaccacacatgattcaatcagagaaagtctgatgtgaagaattcttagttggggattgggttataagaagtaatgatatgtgaattatatctcaataaagctgttatctttaaaaaaataaataaaaaagaaataaagaggaccctgaagaatataggagccaggaacagtggctcacgcccataatcccagcactttgggaggctgagacaggaggattgtttgag

SEQ ID NO: 36171 - DNA, 678 bp, Homo sapiens
agatgcatgctcaagcggccgcagtgtgatggatatctgcagaattcgcccttagcgtggtcgcggccgaggtaccacagtttgcttaaccattcactttttgaaggacatctggattgtttccagttactgactactataattaaaactactacacatatttttgggtaaccttttgggtgggcataagttccgtttctgtgggataaatgcccaggtctccaggttccttatttggcctctgttgactctcaagttgtagcagggagtctgtctccaactgctagggttgggacttccaactccacacgaggtgtctgctggtaactcactgactgcgatggatatgagtgccttgtcatggctccctaaatggcctctactaataataccaccacaactaccaacactactaaagtcatgtggactctgctaacagtaaggtggactccttaccacccagtgagaatgaaactaccaattccttactcagctttcccagacgttaccctggaaggaagggtgagtgccttgccacagtcaggcatgagtggaaagcttggcttccccacttggcttttgccatgggtggggtagagccacagtttttttgttattgttgttgtggctggctggagtaaagctgttattgtctaaaagttttctgtcttactagtc

SEQ ID NO: 36172 - DNA, 444 bp, Homo sapiens
ggcgaattgggccctctagatgcatgctcgagcggccgccagtgtgatggatatctgcagaattcgccctttcgagcggccgcccgggcaggtactgccctccttatttcagcgctgtcattctgatcactctaggaccggttgagactttttcgtgaacagtttcctacctttttaggcaaccatctgtaagacaaggtagaatgctaccataaccatgattaacatttgcaaacactctgccacagtgcagccgctttctttgtctccagctgaagaaattgaggtgcacagaggttaaatttgatgctcaaagcaatacaactagaaaatataggaggctgggctgcctgattgattcccagcttagagattgaaagtcacatgcgaagcgctttagcagatagagaagggggagtcatactccagcgtgcattttagttt

SEQ ID NO: 36173 - DNA, 389 bp, Homo sapiens
atacactactatagggcgaattgggccctctagatgcatgctcgagcggccgccagtgtgatggatatctgcagaattcgccctttcgagcggccgcccgggcaggtaccttccaggatactactcccttatctacaagcaatccaaatgactaagggataatttccaaacacttctgcttgttaacccctcctctccagtgctgaaaaactcaagacaagtaaaagacacatttttaattaacatttggaagatggcttttgttagttaatagcaattgttaactctcaaaataaacaggaaatagtgccacttagcaagttggatgttccaaacccaaaagtaatgggccttaagaaatccaagtactcagtgcagcaaagaaagac

SEQ ID NO: 36174 - DNA, 437 bp, Homo sapiens
tacgactactatagggcgaattgggccctctagatgcatgctcgagcggccgccagtgtgatggatatctgcagaattcgcccttagcgtggtcgcggccgaggtacttgataccatgcctagtgcatagttggtgcccaattaatacatgattggattatagcataatcactgatcactacatttaaagcagtccaatagtggaacaggctgcctcacaaatagtgagctctcgtttcctctacacagattctactatgggccaggatctcagccaagcagtggagccagaggctggacagacacaagcagagattttggaaaaagactgagtccctctcagcacttcaaagatcccttccaacacccaaacatcaaaagccatgttatattgccaagcaagggtgcctatgaacgcctgttgaaaccccacaaca

SEQ ID NO: 36175 - DNA, 458 bp, Homo sapiens
tacactactatagggcgaattgggccctctagatgcatgctcgagcggccgccagtgtgatggatatctgcagaattcgcccttagcgtggtcgcggccgaggtaccaggagggtattgatgtttgaggtccaaactgaaaacccatcacctccttcccactgctatagcagcgttggccctggggttcattatctagccagttcacaccttcttaaaggggggctctgaaaatgtcttacttccctcacagacaaagcaattctcaagcctcctgagatcacccaccaaccagagcaactgctgtcacttggaggtgcagctgaattcttctaattgtgacacaaactcttgaaactgtaaatgctgaaagattaaatgaggttataacactcagaaggttttacaagtaaaagtaagtcaaatcaataggtctttatttcatatctgtaatggttt

SEQ ID NO: 36176 - DNA, 148 bp, Homo sapiens
tatagggcgaattgggccctctagatgcatgctcgagcggccgccagtgtgatggatatctgcagaattcgccctttcgagcggccgtccgggcaggtacgcgggattattgaagtgacagaaatgttgcataatgccagtttactca

SEQ ID NO: 36177 - DNA, 381 bp, Homo sapiens
ctactatagggcgaattgggccctctagatgcatgctcgagcggccgccagtgtgatggatatctgcagaattcgcccttagcgtggtcgcggctgaggtactatgttttcaataatgtgcaaatatttaaacaacttaaatataaaatattcacttatatttttaatggatgtggtatctcaatccatttgtgtcactccagatcacaacataatttcttaagtaagatgcatattgagtcatgtaagtaacacataaaaagttataaaataaattgtgatcacacttgggctaaatatagaatacactaaatatctgatgggcatccacacattatagaaattagacattcaaccctatatagtaatttaaaaactacc

SEQ ID NO: 36178 - DNA, 630 bp, Homo sapiens
  misc_feature 621, 622: n = A,T,C or G
gcgaattgggccctctagatgcatgctcgagcggccgccagtgtgatggatatctgcagaattcgcccttagcgtggtcgcggccgaggtacatgtaaatatacatcatcccaagttaaatttgataggccttcctgacagtagccatatagataaatagaagttttcgttggtttagtggcaaaactgaattcttaatgtaggtatacaagttaaatatgatggttagaaatgaagttttctgaaagtagttcgttgtatgctccctaaaagaattagctttatatttatcttaagaatatctctaaacctatgcaaaaatatggcaaatagtcttctttccattagtctagttcaacaaaatctgactcagagacagtaaagaaagggcaagtagaagatctaatgccaactaagaagataattatttctgaaatatttagttgaagataactttctttcttaagacattactgtggttatgatgcacaagtcaaagaacatgtggcatttccaaagagtattaaatgcatgttacttttttataaaaataagataaatgagattaatgggcttggaactgcaatcttggtaaataaagttactgtatgtctttcaaannaaaaaaaa

SEQ ID NO: 36179 - DNA, 466 bp, Homo sapiens
attgggccctctagatgcatgctcgagcggccgccagtgtgatggatatctgcagaattcgcccttagcgtggtcgcggccgaggtacttgcaaagtaatacagaaacgtgactttcggcagccacccaagatgatgcctattttcagtgttgatgtattcaggcagggaaaaggtttacttggtggaaactcctgttagaatttcattcggggtggaaagaatcttctcgagctctctgtaagtgaggatctaagaataaaaggctcagcctagtcatttttttctgtgccctactgtatgagttgggcagaattgagtgccacctaagccgggcttctgtgtgccaaaatgctggtgggtgaaattagtgaaattctttctattcattcctttgcccttctcccaagaaaacccatggggaaacaaattacaggggatgaattcctttagaactttccctactt

SEQ ID NO: 36180 - DNA, 429 bp, Homo sapiens
attgggctttctagatgcatgctcgagcggccgccagtgtgttggatatctgcagaattcgcccttattttggtcgcggccgaggtaccattcttatctcagaatgctgtaaaccatcagtagaagcagtttagatttggactgcatggtaaaatgaaaagtaataaccctccaaccacaacctagtcagggtattaataattatatgtagcaagaaaacaaagaagaaaataatattgaaaaaatggagattccccaaccagtttcatatttgaaggatctgagttgtatttttattaaggaaattttttttctgaatactgtcttccaaaatgttaacattaaaatctgaatcagaggactctgaatggaaaagaagtttgatcactgacacctagggctctgaagcgtgtgtggccacatggaaaa

SEQ ID NO: 36181 - DNA, 384 bp, Homo sapiens
ggcgaattgggccctctagatgcatgctcgagcggccgccggggtgatggatatcttgcagaattcgccctttcgagccggccgcccggccaggtactgaggctgtatacagccacagcctcttcccatccctccagccttatctgtcatcaccatcaacccctcccatgcacctaaacaaaatctaacttgtaattccttgaacatgttaggcatacattattccttctgcctgagaagctcttccttgtctcttaaatctagaatggtgtaaagttttgaataagttgacttatcttacttcatgcaaagaagggacacatatgagaattcattatcacatgagacagccaaatactaaaagtgtaaatttgattataagag

SEQ ID NO: 36182 - DNA, 383 bp, Homo sapiens
cgactactatagggcgaattggagctccaccgcggtggcggccgaggtacatatcatttccatcttccaatgggctgctgccgatcctactagcttatgacttagtgcttcccacaggacctagttaagatgagcagttctggatacagcatcactgggtctcaaagttccgtgtctaccagggcccagtagcacagcagaggctgtttttcaaaaagcatatgatcctctcctgtggttagaaccaccttccttcagggccccagggacctgcactgggattctttcattgggccttgtcatctattccacactgcatcttctttccccctacctccaatacataagatctgccacatcacataattcaagctgctaatttc

SEQ ID NO: 36183 - DNA, 415 bp, Homo sapiens
gcgaattggagctccaccgcggtggcggccgtgaacatattttttgggttgctggagttcatctataagtcatttttgaggaataagatttatgttaagactatcaaacacagtgttgcctacaatagcaaaaatgtgaaaataacaacaacaacaaaacagcagaggaattgttatgtattttgtagtctatctatatgatgcctatttttaggctttaaaaagtcttcaaaatctttaatgactgatttatctagttaaatgcttaatccttagcaggctcttattctttaattaaacgtgcctttgagtagatgtgaataaaataaaaacaagtttcgaaaaaaaaaaactaaaaaaaattaaatgtaccttgtacgttctagaactattggatcccccgggctgtaggaat

SEQ ID NO: 36184 - DNA, 428 bp, Homo sapiens
tggcggccgaggtaccattggtaataggaaaatgcaaacctaggtgtcttttaacggaaaaatgagaattagagtttaggagatttcagatcactgaagttttaaaaataatgtggaatagttggtaagaacaacttattttatgaaagctgacatcaaagtctcactggaacattgtagaggagaggttttctaggcatgtggaaatgcagtaagaggcatgggtaaaagcaccttttagtttttaaggaattaggttaaagaattagctgcatgcttgagtgtttattttggttatttctgatatgcagttctgaacctcaggaataatttgttatctaactaaaatagtaagttttaaaaataaagctcatttatattttcttctagaataataactgcttattacaggaaatttgcaaaatgca

SEQ ID NO: 36185 - DNA, 410 bp, Homo sapiens
gcgaattggagctccaccgcggtggcggccgaggtacatagaatatgaacacagcacacacatgagagacgcaagtgccaaatgccttggcctgggcttcacgtgtcaagcccaacacagtcttaagaataagcagatatgagaaggagatgagaagtgagtccaggccaatggcggagatgatgacgataaggccatagacgacattgacccggatatcatcacaggccagcttcatgacatcttggtgtaggcagtaggaatgggaaaggatattggagcggcagaagggcagctgcttgatgaagacaggaaggggtgccatcagtgcagccccccgcaccacagcagccacaccaattttggtgacacgaggcaacgtaagtacctgcccgggcggccgctctaga

SEQ ID NO: 36186 - DNA, 327 bp, Homo sapiens
agctcaccgcggtggcggccgaggtaccctgaggcctgccagttcctgccttaatgcatatgtagtcgtaattgagttctgacacggccttgggtgtttctgtcctaaatagctgacattgcatcttcaagactgtgtgagtaatcctgatatttttttttaagctcagtaaattaattacatgccctgggagggagtgattgtaagtagaaaatactgaactagcagatgattcgtttttaaggtgctatactatgtgtatcaagttcaagacgatgaatcttaaagcttctaagaactggcagggttattccagctttgtgcccc

SEQ ID NO: 36187 - DNA, 428 bp, Homo sapiens
ggcggccgaggtactttctttatttacttgtatttatttcctctagttcttgaacccgcgcatcacttttttggttttcctcattccaccacagcatttaggtgaccgttaccatttatgtttcattaagcttcactaggaatgtaaggataatattagagcatttgcagaaaattgttatctccttttgtaggggattcgagacatatttgtagctacttcacggctgtagagttagtgggtgatcgggtattctgcattgttccttatccctttgtcagtgacagacacattgacataagagattcctacaggattataaggagagataaattattaaccatttttttacttgatccaactactccatgtcccatcaactagtggtaactgatgttgataggattttttttaagtccagtaactat

SEQ ID NO: 36188 - DNA, 418 bp, Homo sapiens
ggccgaggtacataaaggttaccgaggacagttttggtggaatgatgttggcagacgcttcattggcatgggttcgagagagaaatgaaagaggattgaagacagtgagtatagacagctcaggaagtttagctgtgtaagtgaacacagagatgagtggtcactagaaggagaggtgagccaagagggaatgatgggagaagttataatatgttgatggtcaagatagaatgactgattaaaggggaattgctggggctctgttcctgagtaggcaagagcaggtgagatagaagacataggtggagggattggccctaaatacatgcgtggacagatcctccttatgaaaaaaagaaggcaaagtgtatgaactcacacagtagtaggagagtatataggtggtacctgcccgggc

SEQ ID NO: 36189 - DNA, 460 bp, Homo sapiens
tagggcgaattggagctccaccgcggtggcggccgcccgggcaggtaccagctttatataccacttattagaggttgccaagtgtgatatctaggccttaatctagaaattaagctaatgaggccctatttacacaatagactcctctatccccctttgtcacttcagatttaagaattgtcttgttctataaatcagatctcttgtgtgttttctgttcccgtgacccgaagcagctgttttcagactttagcaagcatcagagtcacctggagaggttggtgtatcacagattgtgggtcccaccctcagagtttcggaatcagtaggtctggggcgcaccctgagaaatctgcatttcttagaagttttaggtgatgctgatactgctgattggggttccacactttgagaagcactagtctaaaggactgtatggcttgttgtagtgaaatgaaag

SEQ ID NO: 36190 - DNA, 416 bp, Homo sapiens; identical to SEQ ID NO: 30867
  misc_feature 322: n = A,T,C or G

SEQ ID NO: 36191 - DNA, 461 bp, Homo sapiens
agggcgaattggagctccaccgcggtggcgggcgaggtacctaccttggcctggggtaaccaaaatgggggtggctgctgtggtgcggggggctgcactgatggcaccccttcctgtcttcatcaagcagctgcccttctgccgctccaatatcctttcccattcctactgcctacaccaagatgtcatgaagctggcctgtgatgatatccgggtcaatgtcgtctatggccttatcgtcatcatctccgccattggcctggactcacttctcatctccttctcatatctgcttattcttaagactgtgttgggcttgacacgtgaagcccaggccaaggcatttggcacttgcgtctctcatgtgtgtgctgtgttcatattctatgtacctgcccgggcggccgctctagaactagtggatcccccgggctgcaggaattcgatatcaagcttatcga

SEQ ID NO: 36192 - DNA, 393 bp, Homo sapiens
tactatagggcgaattggagctccaccgcggtggcggccgcccgggcaggtacgcggggactggcgtccggtgtgcaggtggccacatggatcctggcagccggtggcggaacctgcccagcgggcctagcctaaagcacttgactgacccctcttatggaatcccgcgggaacagcaaaaggcagcgttgcaggagctgacgcgggcgcacgtggagtccttcaactacgctgtgcacgagggtctcggcctcgcggtgcaggctatacctccctttgaatttgctttcaaagatgagcgtatctcttttactattctggatgctgttatcagtccacctacagttccaaaagggaccatctgcaaagaggccaatgtttatccagcagaat

SEQ ID NO: 36193 - DNA, 154 bp, Homo sapiens
gggcgaattggagctccaccgcggtggcggccgaggtacatcgcatcagctctgtcttcattaatctttggctcttattccatttctttggttaaatactggtatcattgaggctgggtgttctgacattaaagccatcagtaactgtagcaca

SEQ ID NO: 36194 - DNA, 267 bp, Homo sapiens
ttggagctccaccgcggtggcggccgcccgggcaggtacttaaagcattattccgtatttcagcacagaatgactttggtgaaactgtagctgttagcgagtaattgcgttacaggcagacccagtcttaaattaacaaatctgggttcccttaactatcaggtttatgttggttttatttgcttctatctggatcccttctctttgcctgggacgctctagaactagtggatcccccgggctgcatgaattcgatatcaggcttat

SEQ ID NO: 36195 - DNA, 439 bp, Homo sapiens
cactactatagggcgaattggagctccaccgcggtggcggccgtcctgggcctcggactaacaagcggctttaattgctgggcaggtcatgtggaaggtgctcctcccttcaacccagtaaattcaatctctctgagactttgttaggtgtaaaaatgttaatcagaaataattataacaacaatagtttatttacagtacctcggccgctctagaactagtggatcccccgggctgcaggaattcgatatcaagcttatcgataccgtcgacctcgagggggggcccggtacccagcttttgttccctttagtgagggttaattgcgcgcttggcgtaatcatggtcatagctgtttcctgtgtgaaattgttatccgctcacaattccacacaacatacgagccgggagcataaagtgtaaagcctggggtgcctaa

SEQ ID NO: 36196 - DNA, 352 bp, Homo sapiens
gtggcctcgggtaaccaaaattggtgtggctgctgtggtgcggggggctgcactgatggcaccccttcctgtcttcatcaagcagctgcccttctgccgctccaatatcctttcccattcctactgcctacaccaagatgtcatgaagctggcctgtgatgatatccgggtcaatgtcgtctatggccttatcgtcatcatctccgccattggcctggactcacttctcatctccttctcatatctgcttattcttaagactgtgttgggcttgacacgtgaagcccaggccaaggcatttggcacttgcgtctctcatgtgtgtgctgagttcatattctatgtacctcgg

SEQ ID NO: 36197 - DNA, 444 bp, Homo sapiens
atacactattatagggcgaattggagctccaccgcggtggcggccgaggtacaaaataaaactcattgctattgatagtttgactgtaaaggaagacaaaataacacaagaaagagaggtcagatagattggtagtatggatatttgtattaagaaagatgcagagggatagaggtgaggagaaccaagcggaaatgctgaaataatataggaagtcggaaattaatagaagtagcagataatcaatatttgtagtgagttaaagtatatcctttccttcttacatgttagctaacaacggcttaagaaaaattggtgcttagcatgaaattggaaatttggaattgctaaattctttcttaaggtctgctgtgcttgatttatttaatggtctacgctctttgcagtgtgacatcacagttcattagcaaagtggttatttgg

SEQ ID NO: 36198 - DNA, 404 bp, Homo sapiens
  misc_feature 47: n = A,T,C or G
ggcggccgaggtaccattcttatctcagaattctagcaaccatctgnagaagcagtttagatttggactgcatggtaaaatgaaaagtaataaccctccaaccacaacctagtcagggtattaataattatatgtagcaagaaaacaaagaagaaaataatattgaaaaaatggagattccccaaccagtttcatatttgaaggatctgagttgtatttttattaaggaaattttttttctgaatactgtcttccaaaatgttaacattaaaatctgaatcagaggactctgaatggaaaagaagtttgatcactgacacctagggctctgaagcgtgtgtggccacatggaaaagtcgaaggatgcgctgtcgaatctccttttgtcttcactccatagacaa

SEQ ID NO: 36199 - DNA, 151 bp, Homo sapiens
gaatcggagctccaccgcggtggcgtgcttcttttgaccacacaattagaattcatggtttaaaatctgggaaaaccctgaaggaatttcgtggccattcctcctttgctaacgaagcaacatttacacaagatggacattacattattag

SEQ ID NO: 36200 - DNA, 449 bp, Homo sapiens
tacacttctataaggcgaattggagcttcaccgcgatggccgccgaggtactcttggctttgctgattgcttccctgatgctgcttttgtcctccttcatcctgttttccacaggctttttctgttgattctctaccttgctatcccaaacacatgtgtcaccaaccttagattcagggataggatcctccacttttggccacttagatgctgcatttccaacattttcatattcttcagttggttcctcatcctcagtgctcgtcttcaaatgtgacatggctgtggcggcgccgcggaaacccggccgctctagaactagtggatcccccgggctgcaggaattcgatatcaagcttatcgataccgtcgacctcgagggggggcccggtacccagcttttgttccctttagtgagggttaattgcgcgcttggcgtaatcatggtc

SEQ ID NO: 36201 - DNA, 228 bp, Homo sapiens
atatggcgaattggagctccaccgcggtggcggccaggaaccgtaaaaaggccgcgttgctggcgtttttccataggctccgcccccctgacgagcatcacaaaaatcgacgctcaagtcagaggtggcgaaacccgacaggactataaagataccaggcgtttccccctggaagcctccctcggtgcgctcctccttgtttccgacccctgtccgcttaatccggat

SEQ ID NO: 36202 - DNA, 391 bp, Homo sapiens
tagggcgaattggagctccccgcggtggcggccgaggtacctttggtttgtgagtttgatagggaaaattaagacacctctgaggaaaatacagaaagtggttttatttaaaaccactcctggttgacaattgaacaaaaagattgtatttaaaatggaaactgcaatctttgtattgtttttctactaagtaaaaaggtcagacttggatatggtacctgcccgggcggccgctctagaactagtggatcccccgggctgcaggaattcgatatcaagcttatcgataccgtcgacctcgagggggggcccggtacccagcttttgttccctttagtgagggttaattgcgcgcttggcgtaatcatggtcatagctgtttcctgtgtga

SEQ ID NO: 36203 - DNA, 683 bp, Homo sapiens
ctactatagggcgaattggagctccaccgcggtggcggccgcccgggcaggtaccacttggcacaatgcgagctacaggagactttgtgactgtgaaagatggagagattttttttttgggacgaaaagacagtcagatcaaacgtcatggcaaacgtcttaacattgaacttgtgcaacaggttgctgaagagcttcagcaagtggagtcttgtgcagttacatggtataatcaggaaaaattaattctcttcatggtgtctaaagatgcttcagtaaaagaatacatctttaaagaactgcagaaatatcttccaagtcatgcagtcccggatgagcttgtattgatcgattctctaccatttacatcccacggcaaaattgatgtttctgagttaaacaagatatatttaaactacataaacttgaagtctgagaataagctcagtgggaaagaggacctttgggaaaaattacagtatttgtggaagtctactctgaatctcccagaagatcttttgagggttcctgatgagtcactcttcttaaatagtgggggagattccttaaagtccatccggctcctcagtgagattgaaaaacttgttggtacctcggccgctctagaactagtggatcccccgggctgcaggaattcgatatcaagcttatcgataccgtcg

SEQ ID NO: 36204 - DNA, 431 bp, Homo sapiens
ctactatagggcgaattggagctccaccgcggtggcggccgcccgggcaggtacctgcagaatctcctcattcccagcagcctctcctcatggctccaggtttcaatcacttctcttgctgatctgttattcacaaccgcacagttccttgacctccccatttccacaccaaaccccatccttctggagaactcaaatcaggggagccttccagggacacaaagtgagaggactccccttcttgctgctagggttgcagcagaagacaatgtggtctcgctaacccaggtggaaataatatgttttcctagttttaaaacagcatctgtacctcggccgctctagaactagtggatcccccgggctgcaggaattcgatatcaagcttatcgataccgtcgacctcgagggggggcccggtacccagcttt

SEQ ID NO: 36205 - DNA, 658 bp, Homo sapiens
gcgtaatacgactactatagggcgaattggagctccaccgcggtggcggccgtctctgtcgataactgccgggctgtccaatctttcccctgatagaaaggcgcctgggggtcagcctgaagaagctctggagggaagaggcggctgtttgattcagagcctcctcgctgggctggaattaacctggctctttctctaatgaaactgactccaagggtccctgtgtgctagagattcaatggcccttaggagaagcaatgatgagaggtaatattaaagcagtgtacctcggccgctctagaactagtggatcccccgggctgcaggaattcgatatcaagcttatcgataccgtcgacctcgagggggggcccggtacccagcttttgttccctttagtgagggttaattgcgcgcttggcgtaatcatggtcatagctgtttcctgtgtgaaattgttatccgctcacaattccacacaacatacgagccgggagcataaagtgtaaagcctggggtgcctaatgagtgagctaactcacattaattgcgttgcgctcactgcccgctttccagtcgggaaacctgtcgtgccagctgcattaatgaatcggccaacgcgcggggagaggcggtttgcgtattgggcgctcttccg

SEQ ID NO: 36206 - DNA, 166 bp, Homo sapiens
tcactataggtcgaattgtagctccaccgctgtggcggcggtaatacggttatccacagaatcaggggataacgcaggaaagaacatgtgagcaaaaggccagcaaaaggccaggaaccgtaaaaaggccgcgttgctggcgtttttccataggactccgcccccc

SEQ ID NO: 36207 - DNA, 230 bp, Homo sapiens
tagggcgaattggagcttcccccgcgggggcggccgaggtactaaagtcaaaagaggaaagccatgaacagtcagcagaacagggcaagagttctagccaagagctgggattgaaggatcaagaggacagtgatggtcacttaagtgtgaatttggagtatgcaccaacttgaaggttcctgcccgggcgggccgcttctagaactagtggaatcccccggggctgcagg

SEQ ID NO: 36208 - DNA, 390 bp, Homo sapiens
attggagctccaccgcggtggcggccgaggtaccaactaatatatttcttttttttttctttttcttacctattaacccactaaaatttctaatctaaaagcaatattcaagttacattttattacagaaattggaaagcaatttgcctgggaagcaaaatgttgatatgattcacgtgattttaacattaaatctaacttgtaacaaacaacggattatttatagataaataaattgagactattatttgcatagcacagaaagtcaaacatgacccacacatttatgcacatataattaatttcaataaaatgtttatatttatttcgaataaataaaaaaacataagaaatcattaaaggtacctgcccgggcggccgggtttaaaa

SEQ ID NO: 36209 - DNA, 240 bp, Homo sapiens
attttttttagaaagacgtgcgacgcgctatactactcactatagggcgaattggagctccaccgcggtggcagcaaaaggccagcaaaaggccaggaaccgtaaaaaggccgcgttgctggcgtttttccataggctccgcccccctgacgagcatcacaaaaatcgacgctcaagtcagaggtggcgaaactccgacaggactataaaagataccaggtcgtattccccctggaaagc

SEQ ID NO: 36210 - DNA, 439 bp, Homo sapiens
tacactactatagggcgaattggagctccaccgcggtggcggccgcccgggcaggtacgcgggacagtcacagttaacatcctcattctcaatcctacccatgatgcagacagattacctcatttcagctcaataagacatcaccaaattcccttaggcagaaaaagggtggggagtgccctttcttgaaggaatcccttaagtgcacgtctcccgttttcttttcacatcaatgcagagtccctctgtgaatttacaacacccaacacccatgagttcagtccttaagaaggaaaattgagcaagtatttaattggttggacattgcataaaagaggtccatatccaggctaactctagaaattttattctcaaacttagttggcctctttttcttctgtcagaggaccattcttagtggcactggggaaatcttggc

SEQ ID NO: 36211 - DNA, 403 bp, Homo sapiens
ctcactatagggcgaattggagctccaccgcggtggcggccgcccgggcaggtacatagaatatgaacacagcacacacatgagagacgcaagtgccaaatgccttggcctgggcttcacgtgtcaagcccaacacagtcttaagaataagcagatatgagaaggagatgagaagtgagtccaggccaatggcggagatgatgacgataaggccatagacgacattgacccggatatcatcacaggccagcttcatgacatcttggtgtaggcagtaggaatgggaaaggatattggagcggtagaagggcagctgcttgatgaagacaggaaggggtgccatcagtgcagccccccgcaccacagcagccacaccaattttggtgacacgaggcaacgtaag

SEQ ID NO: 36212 - DNA, 362 bp, Homo sapiens
actactatagggcgaattggagctccaccgcggtggcggccgaggtactaaatgctgtgtaagtagacgttaatctggctggaaccatgggaagcactttgcagtgttcagaagagaggctccatttgtggttattatgtagaactgggccagagccagtccattgcctgtttttttaaataaggttttactgagcacagccacactcatttgtttatgcagtacctgcccgggcggccgctctagaactagtggatcccccgggctgcaggaattcgatatcaagcttatcgataccgtcgacctcgagggggggcccggtacccagcttttgttccctttagtgagggttaattgcgcgc

SEQ ID NO: 36213 - DNA, 203 bp, Homo sapiens
gggcaaatggaagctccaccgcggtggcaacatacgagccgggagcataaagtgtaaagcctggggtgcctaatgagtgagctaactcacattaattgcgttgcgctcactgcccgctttccagtcgggaaacctgtcgtgccagctgcattaatgtaatcggccaacgctgcggggagaggcggtttgacgtatttgggacg

SEQ ID NO: 36214 - DNA, 438 bp, Homo sapiens
cgtaatacgactactatagggcgaattggagctccaccgcggtggcggccgaggtacaaattgttccttgaaatgactcagagacattttctgaattggcttccatcagccaggcatttcttcagaactggaaaaatgctttaaatttggctttgtcatgattattaaaacactctgtacctgcccgggcggccgctctagaactagtggatcccccgggctgcaggaattcgatatcaagcttatcgataccgtcgacctcgagggggggcccggtacccagcttttgttccctttagtgagggttaattgcgcgcttggcgtaatcatggtcatagctgtttcctgtgtgaaattgttatccgctcacaattccacacaacatacgagccgggagcataaagtgtaaagcctggggtgcctaatgagtgagctaac

SEQ ID NO: 36215 - DNA, 434 bp, Homo sapiens
ctactatagggcgaattggagctccaccgcggtggcggccagggtgcggtagacgctggcggccgagcccgtcgccaggccgaactgcgccaccagctgttcgcctggctctagaactagtggatcccccgggctgcaggaattcgatatcaagcttatcgataccgtcgacctcgagggggggcccggtacccagcttttgttccctttagtgagggttaattgcgcgcttggcgtaatcatggtcatagctgtttcctgtgtgaaattgttatccgctcacaattccacacaacatacgagccgggagcataaagtgtaaagcctggggtgcctaatgagtgagctaactcacattaattgcgttgcgctcactgcccgctttccagtcgggaaacctgtcgtgccagctgcattaatgaatcggccaacgc

SEQ ID NO: 36216 - DNA, 388 bp, Homo sapiens
ctactatagggcgaattggagctccaccgcggtggcgccgggagcataaagtgtaaagcctggggtgcctaatgagtgagctaactcacattaattgcgttgcgctcactgcccgctttccagtcgggaaacctgtcgtgccagctgcattaatgaatcggccaacgcgcggggagaggcggtttgcgtattgggcgctcttccgcttcctcgctcactgactcgctgcgctcggtcgttcggctgcggcgagcggtatcagctcactcaaaggcggtaatacggttatccacagaatcaggggataacgcaggaaagaacatgtgagcaaaaggccagcaaaaggccaggaaccgtaaaaaggccgcgttgctggcgtttttccata

SEQ ID NO: 36217 - DNA, 303 bp, Homo sapiens
agggcgaattggagctccaccgcggtggcggccgcccgggcaggtacatctagagaacatttgccaaaggcctaagcacggcaaaggaaaataaacacagaatataataaaatgagataatctagcttaaaactataacttcctcttcagaactcccaaccacattggatctcagaaaaatactgtcttcaaaatgacttctacagagaagaaataatttttcctctggacactagcacttaaggggaagattggaagtaaagccttgaaaagagtacctcggccgctctagaactagtggat

SEQ ID NO: 36218 - DNA, 543 bp, Homo sapiens
  misc_feature 16: n = A,T,C or G
tatactactactatanggcgaattggagctccaccgcggtggcggccgcccgggcaggtacctgaaggaacgaagaagagggatttctcaaggtgagaagcagttctccatggacactgatgacagcacaggcaaagtttcctatgactagggatcactgtccacacagagtctggcttcccaggtatccagcaggtagacaaaacagctaactccactgccactcctttctccacatccgttcctatttctcagccatctcagtgacatccgccatcttgagagtcaactactgactggactgagttgtgtggtatatgcttctgtttacttctcttctgtcttttttaagtggccaaatagcaaacgcttaaataggaaatctctgggagacttgaataaaagactttgcttggtagaaaatcatgtcacagaaaggctaatagacagcaaagtaaatcagcaagtccctgagcagtaggattaggattcctgtctcctttcagattcaaatgcatctgtttctggggttaacagtggact

SEQ ID NO: 36219 - DNA, 410 bp, Homo sapiens
cactactatagggcgaattggagctccaccgcggtggcggccggtgattgctttccaaggccaccgagggtatctgagactcccaggccctggttggtcctgcctcttctccttcatagtgtcccagtgttgtcaggagggcgctggtggtagcttggaccttgtgtgccaacgcttcctcaggtctgggcctaacagcctccactgcctgggctcactcagggagcgcctcattatttgggcagccatggattctatcccagccccatcatcagttcggggacacaacctgactgaagatgccagacatcctgagagttggcagaacacaggaggctattctgaaggagatgcagtatcacagccacagatggcactagaggaggtgtcagcgtcagatccactggcaa

SEQ ID NO: 36220 - DNA, 308 bp, Homo sapiens
cgacgcgtaagacgtgttttgcgacccggcaccaccgtggtttttcacccccgctggagcgctccagccgtacctacaagcgcgtgtatgatgaggtgtacggcgaccaggacctgcttgagcaggccaacgagcgcctcggggagtttgcctacggaaagcggcataaggacatgttggcgttgccgctggacgagggcaacccaacaccatagcctaaagcccgtgacactgcatcaggtgctgctccacgcttgcaccgtacgaagaaaagcgctggcctaaagacgcgagttctggttgacttg

SEQ ID NO: 36221 - DNA, 393 bp, Homo sapiens
actactatagggcgaattggagctccaccgcggtggcggccgcccgggcaggtaccaatcccagggatgaagaatgtgaaagaattgtggcaggaataaaccagttgatgacactagatattgcctcagcatttgtggcccccgtggatctgcaagcctatcccatgtattgcacagtagtggcatatccaacggatctaagtacctcggccgctctagaactagtggatcccccgggctgcaggaattcgatatcaagcttatcgataccgtcgacctcgagggggggcccggtacccagcttttgttccctttagtgagggttaattgcgcgcttggcgtaatcatggtcatagctgtttcctgtgtgaaattgttatccgctcacaattc

SEQ ID NO: 36222 - DNA, 371 bp, Homo sapiens
tatagggcgaattggagctccaccgcggtggcggccgcccgggcaggtactcctcatgatcatctacacaacattctgtgacacgttctctaacccaaatattgacctggataaattcagccttgttctcatactgttcataatattttctatccagctgagttttatgcttttaactttcatcttttcaacaaggaataattcgggtttcacaccagcagacacagtggctatcactttctgttctacacacaaatcccttacattgggaattccgatgctgaagattcgtgtttgcaggccatgagcatctctctttaatatctgtacctcggccgctctagaactagttgggatcccccggggctgcc

SEQ ID NO: 36223 - DNA, 299 bp, Homo sapiens
actcactatagggcgaattggagctccaccgcggtggcggccgctctagaactagtggatcccccgggctgcaggaattcgatatcaagcttatcgataccgtcgacctcgagggggggcccggtacccagcttttgttccctttagtgagggttaattgcgcgcttggcgtaatcatggtcatagctgtttcctgggtgaaattggtaatccgctcacaattccacacaacatacgaggccgggagcataaagttgtaaagccctggggttgcctaattgagttgagcttaaactcac

SEQ ID NO: 36224 - DNA, 334 bp, Homo sapiens
ggtggcggccgaggtacatttagagaacatttgtcaaaggcctaagtacggcaaaggaaaataaacacagaatataataaaatgagataatctagcttaaaactataacttcctcttcagaactcccaaccacattggatctcagaaaaatactgtcttcaaaatgacttctacagagaagaaataatttttcctctggacactagcacttaaggggaagattggaagtaaagccttgaaaagagtacctgcccgggcggccgctcgaagttccagcccagcttggccagcacgtttgtggtgcgcacgtccatcgggttggctttggtacgcg

SEQ ID NO: 36225 - DNA, 212 bp, Homo sapiens
actcactatagggtgaattggagctccaccgcggtggcggccgcccgggcaggtacatgggactacaggcacgccccaccatgcccagctcatttttgtatttttagtagagacagggtttcaccatgttggccaggatgatcttgatctcttgacctcattgatccgccacctcttggccatcccaaagtggccgggtatcacaggtcgtg

SEQ ID NO: 36226 - DNA, 390 bp, Homo sapiens
actactatagggcgaattggagctccaccgcggtggcgggcggcccggccaggtccatagcacctcccctttttctctcttcctctatctccagtcatgtaagacatgcctgctatgccctctctcaccactcctattcaacatagtgttggaagttctggccagggcaattaggcaggagaaggaaagaaagggtattcaattaggaaaagaggaagtcaaattgtccctgtttgcagatgacatgattgtatatctagaaaaccccattgtctcagcccaaaatctccttaagctgataagcaacttcggcaaagtctcaggatacaaaatcaatgtacctcggccgctctagaactagtggatcccccgggctgcaggaattcgata

SEQ ID NO: 36227 - DNA, 457 bp, Homo sapiens
tatagggcgatttggagctacaccccggtggcggccgaggtaccctagcctaatccatattgggcactcaaatttttactgaatgactaaatgaaaagatggatgaacatctctataaactatggaaagaaaatgctgataaagcatttgccagaaattacttcactagtgccacacacggacagaattgaggacatttagacttttttgtttgtttgagatggagtctcattctgtcgctcaggctggagtgcagtggtgctatctcagctcactgcaacctctgcctgggcaagactctgtcccaaaaaataaaaaaataaataaaattaaaaagtctggaaagtaaagggaagaatgaatacaatttagttaagaatactgccaggattaaacaaacaaaaaatcaatcttggattggttcatctttatttctagaaataatactatatacctt

SEQ ID NO: 36228 - DNA, 452 bp, Homo sapiens
ctcctatagggcatttggagctccaccgcggtggcggccgaggtacattttcattgtatgtatctaccacggcctatttattcatccattagttgaagaacatttggatggtggaagagaatatctttgtcttattctgaattaaggggcattcagtctttcagcatggagtaggatgttagctgtagggtttttgtagacgccctttacagagttgaggaagttctcttttattcttagtttgctgaaagtttttaccatgaatacatgttctagtttgccaaatgctttttctgcttcaattaatatgatcatgtgtttctttcttcttcatactgatagtttgacagttccattgattcatttttgatgaacgaaccttacattcttgggataaattgcccttgccatggtgtattgttccttttaatgtattgttggatttgaatttg

SEQ ID NO: 36229 - DNA, 453 bp, Homo sapiens
gcgaattggagctccaccgcggtggcggccgaggtacccctcttggatcttcattaatgagaagacattcataaccagactgaagatggcaaactaattgttgaaggaatgctggacattttctggggagtaaaacgacctatacagctaaaaatacaagatgagaagccattctcttcttttactagtatgaagtcatcagacgtcttctccagcaaaggaatgacacgctggggggaatttgacgatctctatcgtattagtgagctggacaggacccagattcctatgtctgaaaaaaggaattcccaggaagcaacaccctgaagccacatgcaaaggatgaaccagactccccagtgctctatagaaccatgagtgaagcagctctggtgagaaaaaggatgaagcctctgatgatggacagaaaagaaagacagaaaaatagagcct

SEQ ID NO: 36230 - DNA, 436 bp, Homo sapiens
tatagggcgaattggagctccaccgcggtggcggccgaggtaccaggagggtattgatgtttgaggtccaaactgaaaacccatcacctccttcccactgctatagcagcgttagccctggggttcattatctagccagttcacaccttctaaagtggggctctgaaaatgtcttacttccctcacagacaaagcaattctcaagcctcctgagatcacccaccaaccagagcaactgctgtcacttggaggtgcagctgaattcttctaattgtgacacaaactcttgaaactgtaaatgctgaaagattaaatgaggttataacactcagaaggttttacaagtaaaagtaagtcaaatcaataggtctttatttcatatctgtaatgggttagctctgcgggaagtgttagcagctatatgaattaggaagaa

SEQ ID NO: 36231 - DNA, 421 bp, Homo sapiens
  misc_feature 260, 268, 280, 281, 298, 299, 351, 352, 378, 379, 380, 398: n = A,T,C or G
cgactactatagggcgaattggagctccaccgcggtggcggccgctctagaactagtggatcccccgggctgcaggaattcgatatcaagcttatcgataccgtcgacctcgagggggggcccggtacccagcttttgttccctttagtgagggttaattgcgcgcttggcgtaatcatggtcatagctgtttcctgtgtgaaattgttatccgctcacaattccacacaacatacgagccgggagcataaagtgtaaangcctgggngtgcctaatganngtgtagctaactcacannttaattgcgtttgcgcctcacttgcccgctttttccagtcgggaaaaacctnngtcgtgccagctttgcatttaatgannnatcgtgccaacgcgcggnggagaaggcggttttgccgtatt

SEQ ID NO: 36232 - DNA, 353 bp, Homo sapiens
gcgcgttatacgactcactatagggcgaattggagctccaccgcggtggcggccgagggtgccgcttgaggaaaacgtgagtttgtgaaggtgagcagtctgggtcggtagcgaaagcggagaccttagctgaccccgcagctgtctttctctttgttaacctcaacacatcgcgcccccttccgggaacacttgctcttctctccttggcttaactagtcccggtttttcattctttatccgtgacctttagggaaccgtgggggggaagtctggtttccgtcctgctgctttccttcaactacaagatggcttgtcataaggacgcatgcaatgccattccttaaagacag

SEQ ID NO: 36233 - DNA, 183 bp, Homo sapiens
tccaccgcggtggcggccgaggtacttttgataataactcactctgtgcgatattcctgaataagtccatctcaaaagtttgggattttcctcctcttaactttcttaatatttggacatgcaagttgtcgccaaactaagggtatttcatggaattttctagtataatagaaataacctata

SEQ ID NO: 36234 - DNA, 438 bp, Homo sapiens
cgactactatagggcgaattggagctccaccgcggtggcggccgaggtactttgggaggccgaggcaggcagatcacaaggtcaagagattgagaccatcctggccaacacggtgaaacctcctctctactaaaaatacaaaaattagctgggcgtggtggtgcatgcctgtagtcccagctactcaggaggctaaggcaggggaatcacttgaacccaggaggcagagattgcagtgagctgagatcatgccactgcactccagcccggtgacagagtaagattccatctcaaaaaaaaaaaaaaagccagggctttggagttaggcctaacaaagtctgaatcctaattctgctactgatatactcagtgatcttggcatgccacttattcctctgagcctgtttcctcacctgtggaatgtgaatgctatacaac

SEQ ID NO: 36235 - DNA, 279 bp, Homo sapiens
ccaccatcttggcaccatttttggcaattccttttggctctagaacgtgtggatcccccgggctgcaggaattcgatatcaagcttatcgataccgtcgacctcgagggggggcccggtacccagcttttgttccctttagtgagggttaattgcgccgctggcgtaatcatggtcatagctgttttctgtgtgaaatagttatccgctcacaattccacacaacatacgaagccgggagcataaaggtgtaaatgccttggggtggcctaaatgagtt

SEQ ID NO: 36236 - DNA, 371 bp, Homo sapiens
cgtaatacgactcactatagggcgaattggagctccaccgcggtggcggtatcagctcactcaaaggcggtaatacggttatccacaagaatcaggggataacgcaggaaagaacatgtgaacaaaaggccagcaaaaggccaggaaccgtaaaaaggccgcgttgctggcgtttttccataggctccgcccccctgacgagcatcacaaaaatcgacgctcaagtcagaggtggcgaaacccgacaggactataaagataccaggcgtttccccctggaagctccctcgtgcgctctcctgttccgaccctgccgcttaccggatacctgtccgcctttctcccttcgggaagcgtggcgctttctcata

SEQ ID NO: 36237 - DNA, 380 bp, Homo sapiens
cactactatagggcgaattggagctccaccgcggtggcggccgaggtaccaatctaaaaacaggcacaaactgcttagcctatgacccttaactataaaaaaacaaatttataagttaaatacagaaaagttaccgctctagaactagtggatcccccgggctgcaggaattcgatatcaagcttatcgataccgtcgacctcgagggggggcccggtacccagcttttgttccctttagtgagggttaattgcgcgcttggcgtaatcatggtcatagctgtttcctgtgtgaaattgttatccgctcacaattccacacaacatacgagccgggagcataaaagtgtaaagcctgggggtgcctaatgaggtgagctt

SEQ ID NO: 36238 - DNA, 479 bp, Homo sapiens
actactatagggcgaattggagctccaccgcggtggcggccgggcatctctaccacggatctatgcgctaccattagtgcttcctgtgtgtgtgcatatataaaggggctggaaatgtgcagaaacatgatactactcacacattatatagacatcttgctgcctctagtgatgatgattatcttcatttgctcatatgtgccgcctaccatggagaaggcaccagcccccatcttttgtcacccctgccattgagatgtcgggcgcctgtctttgctgcactgagtaccttgcccctgtgtgaaattgttatccgctcacaattccacacaacatacgagccgggagcattaagtgtaaagcctggggtgcctaatgagtgagctaactcacattaattgcgttgcgctcactgcccgctttccagtcgggaaacctgtcgtgccagctgcattaatgaatcggccaacgcgcgggga

SEQ ID NO: 36239 - DNA, 436 bp, Homo sapiens
atacactactatagggcgaattggagctccaccgcggtggcggccgcccgggcaggtacagatggggttttaccatgttgctcaggctggtctcaaactcctggagtcaagggttctatttgcctcagcctctcaaagtgctgggattacaggtgtgagccacggctcctggctccttgctccagaatcagttttttaatggaagatagctcatactttgtttttgtttttaaagagactgggcaacatagcaaaaccttgtcactataaaaaatacaaaaattagccaggcgtggtggtgcacgcctgtggtctcagctgctcagtcggctgaggtgggaagatggcttcaagccgggagatggaggcttcagtgacctgtgacctgtgatcacaccacttaattcctcaaagcatttgtgtcccagttccctcc

SEQ ID NO: 36240 - DNA, 444 bp, Homo sapiens
ggcggccgaggtactgctactaacggaacccaggctctgagttgtctcaagtttcctcttttcctgtttttctcaggtagagtttctctcctttagctcattctgtcctgagagaaacaccactcccggatgttgacccatctatagcaggaattctccaagtgtggcccctccccggccaggcacggatctgggaggaagccgctctataactagtggatcccccgggctgcacgaattcgatatcaagcttatcgataccgtcgacctcgagggggggcccggtacccagcttttgttccctttcgtgagggctaattgcgcgcttggcgtaatcatggtcgtagctgtttactgtgtgaaatcgctatccggtcacaattccacacaacatacgagccgggagcataaagtgtaaagcctgccgtgcctcatgagtgagct

SEQ ID NO: 36241 - DNA, 422 bp, Homo sapiens
gactactatagggcgaattggagctccaccgcggtggcggccgaggtaccctgaggcctgccagttcctgccttaatgcatatgtagtcgtaattgagttctgacacggccttgggtgtttctgtcctaaatagctgacattgcatcttcaagactagtgtgagtaatcctgatatttttttttaagctcagtaaattaattacatgccctgggagggagtgattgtaagtagaaaatactgaactagcagatgattcgtttttaaggtgctatactatgtgtatcaagttcaagacgatgaatcttaaagcttctaagaactggcagggttattccagctttgtgcccccgcgtacctgcccgggcggccgctctagaactagtggatcccccgggctgcaggaattcgatatcaagctta

SEQ ID NO: 36242 - DNA, 457 bp, Homo sapiens
ctatacggcgaattggatctccaccgcggtggcggccgcccgggcaggtacagtgaaaagagccaaggctgtgtgaccccctcatcacttagccaggcgtatggtcctggtttctgaggctgccagaaagcatcttagcaatttgtgtttggatggtccatgcctgactattctaggctggaggttcctaaagagtaacaagaggaagagaaacaagaatctctgacacttgttgagaatagagcacagtcccatttgtttgaaaagagacaccaggcagccatgtttatgtgccagaaatgcattccacctcaaggaggacttaatttatggacccgtgtgtgccaggctgagctgggcaagatctttctcaggacaaactctgccatgcagctaaaagtctggaaactaaaggatttcatgtagtaaactatcttccaacccctgtaggcatcag

SEQ ID NO: 36243 - DNA, 443 bp, Homo sapiens
cgactactatagggcgaattggagctccaccgcggtggcggccgaggtacctatgatttaaatactctccttttaaatactttgtaaaaactgcttttccgagccccttttatgctctgcagttgccatatccactaggtggtattgcaaataagtaaagcatcctggccatgacgctgctagtgagaatccctgaccaaagttactctcctcacctcactgcaaacctccaggaagcggaaactactacccctccacagacagagctcccctgccactccatgaggcgctgctgccggcatcagttaccgaagccctcacccacacccagcctgcaatggtccactctatattccacaatacaggaaaaagcccaaggagtcagatcagttacgcccctgggatgcagaaagaaccagtgattcttcagatatgacagcagg

SEQ ID NO: 36244 - DNA, 393 bp, Homo sapiens
ctactatagggcgaattggagctccaccgcggtggcggcgctctagaactagtggatcccccgggctgcaggaattcgatatcaagcttatcgataccgtcgacctcgagggggggcccggtacccagcttttgttccctttagtgagggttaattgcgcgcttggcgtaatcatggtcatagctgtttcctgtgtgaaattgttatccgctcacaattccacacaacatacgagccgggagcataaagtgtaaagcctggggtgcctaatgagtgagctaactcacattaattgcgttgcgctcactgcccgctttccagtcgggaaacctgtcgtgccagctgcattaatgaatcggccaacgcgcggggagaggcggtttgcgtattggg

SEQ ID NO: 36245 - DNA, 389 bp, Homo sapiens
gcgtatacgactcactatagggcgaattggagctccaccgcggtggcggccgaggtacagtgtatgagaacatgttttcttaacacatacccactctgcctattcagtccttcctttttgatctttgtgaatttgatgggcaaaacatctgtgccacagtgttatttcaattttgagcagtcttaatggaggagttgttttggggaaccaaggtatagaacatgtgaaagaaactatctgaagagactgagcaatgtcttcaaaggcctgtagccctgcagctgcccctagtatctgcccgggcggccgctctagaactagtggatcccccgggctgcaggaattcgatatcaagcttatcgataccgtcgacctcgagggggggcccg

SEQ ID NO: 36246 - DNA, 478 bp, Homo sapiens; identical to SEQ ID NO: 30781

SEQ ID NO: 36247 - DNA, 442 bp, Homo sapiens
cgactcctatagggcgtattggagctccaccgcggtggcggccgatcttgtgattatttactatgtcctagattacaattcatggcccttgccaccacctccccaccgtgtacctcggccgctctagaactagtggatcccccgggctgcaggaattcgatatcaagcttatcgataccgtcgacctcgagggggggcccggtacccagcttttgttccctttagtgagggttaattgcgcgcttggcgtaatcatggtcatagctgtttcctgtgtgaaattgttatccgctcacaattccacacaacatacgagccgggagcataaagtgtaaagcctggggtgcctaatgagtgagctaactcacattaattgcgttgcgctcactgcccgctttccagtcgggaaacctgtcgtgccagctgcattaatgaatcggcc

SEQ ID NO: 36248 - DNA, 374 bp, Homo sapiens
actatacggcgaattggatctccaccgcggtggcggccgcccgggcaggtacagccaggtgtggtggcccgcatctgtaatttcagctactcaggagtctgaggtgagagaatcactcaaggccagaagtttgagcccagactggcaacatagcaagaccatgtctctttgccgtgggccgctcctttcgaggcttcggctacggcctgacgtttctgccactgctgtcgatgctgatgtggaacctctactccccgcgtacctcggccgctctagaactagtggatcccccgggctgcaggaattcgatatcaagcttattcgataccgtctacctcgagggggggcccccgtacccaagcttttgtttccct

SEQ ID NO: 36249 - DNA, 267 bp, Homo sapiens
gcggccgaggtccaaatttgggaactaattattaaaaatgagtgtggctggatatatggagaatgttgggcccagaaggaaccgtagagatcagatattacaacagctttgttttgagggttagaaatatgaaatgatttgggtttgaaccgccagttttaaggcgcagggcccgaaatcctgaccctctgccccgtggttattctccttcccagcttgggctgcctcatgtcattcacaggtattccattttgttttgttgccatg

SEQ ID NO: 36250 - DNA, 269 bp, Homo sapiens
gcgatttggagctccaccgcggtggcggccgcccgggcaggtactctacggtgtcaataattatttcattctctgctgcaattagtgctaattacaatacctgagctataaaaataaaagatttcattatagcaaagttcacaaatatcgttttagttcagttatccacattgttcatttaaaagtaatacatttttctttacatataacctgtcttagacttgtaatttgaggatatcttgatgaaacaggatctgtatcttgaaaca

SEQ ID NO: 36251 - DNA, 247 bp, Homo sapiens
ggagctccaccgcggtggagcggccgcccgggcaggtacgcggggaaatggaaaaacagcaaagggaacaagttgaaaaaaaacatgaaagatgcaaaagacaaattggaaagtgaaatggaagatgcctatcatgaacattaggcaaatcttttgcgccaagatctgatgagacgacaggaagaattaagacgcatggaagaacttcacaatcaaggaaatgcacgaaacgttaaaagaaatgcaa

SEQ ID NO: 36252 - DNA, 473 bp, Homo sapiens
ctatagggcgaattggagctccaccgcggtggccaggtactagctcctgtcctgctgtctcaggacctttcagttcaagcatcctcctaacctgagtctctgtgtctcttacctcaaattctctctctcaaaaaaaaaaaggtgggggggattggctgggccagaatttggcccaaagccaccactggtctgtggtgaccaggagcaataccatattgatttcccaggccccaccctttcagcaagaggctggaatttggggggagggtcgtgatgtttcctactaactggccattagctggatcatcatttccaaaggaatctaatacaataatgtccacaaaaagcagtgaaggatacagagaccacaaaatagatccacaacatgggacagagtggcattggcctcccaacagtttcacaggaaccccttggatgctgcagagcatgggtctctggggactggaggagct

SEQ ID NO: 36253 - DNA, 197 bp, Homo sapiens
acgactcactatagggcgaattggagctccaccgcggtggcgtccctggcgtcattccataggctccgcccccctgacgagcatcacaaaaatcgacgctcaagtcagaggtggcgaaacccgacaggactataaagataccaggcgtttccccctggaagctccctagtgcgcttctcctgtttccgacccctgcc

SEQ ID NO: 36254 - DNA, 400 bp, Homo sapiens
actactatagggcgaattggagctccaccgcggtggcggccgaggtacttttgataataactcactctgtgcgatattcctgaataagtccatctcaaaagtttgggattttcctcctcttaactttcttaatatttggacatgcagttgtcgccaaacttgggtattcatggaatttctagtaaatgaaatacctatactttgatactgaagactgccaaatacataggaattttctttcttaaaaaacagtaatgaagactatatctcctttcccagcactgaatgttttactagcactgggtgctcaccatgcaactgaagaaaatgtggaaactcaaaaggtcaggacagacttccaagcacttgcaactgatgttactgtcttcaattttaatac

SEQ ID NO: 36255 - DNA, 413 bp, Homo sapiens
cgcgtatacgactcatatagggcgaattggagctccacgcggtggcggccgcccgggcaggtacttcagaaggatggaagctgaattcagaagggaggaatgagaaggaaaagttgctaagaaatcgataaacacatagataaatctaaattaagcatagccattaaaaatcagtaacaacaatgatatgaggatgattaactgagatgactgaaagcaaggtgaagctaaaatataaaaaagtatgtaggatgagctggagggtgcatttacttgcatttctagcattggataggaggagattagagatgctgattggcattaaactcgagttaacactgcagacaaccagggatagtcgtatgtaacttctgagccagtagaacagaagtaacactgaagaaagttcagtg

SEQ ID NO: 36256 - DNA, 432 bp, Homo sapiens
gcggtggcggccgggactatgcacttcccatgctcctagggttatgaatagcttcaaacatgattggcagacataacaacttcaaatactcggactggggcataggactccagagtaggaaaaagacaaaagatttggcagcctgacacaggcaacctacccctctctctccagcctctttatgaaactgtttgtttgccagtcctgccctaaggcagaagatgaattgaagatgctgtgcatgtttcctaagtccttgagcaatcatgggggtgacaattgccacaagggatatgaggccagtgccaccaggctctagaactagtggatcccccgggctgcaggaattcgatatcaagcttatcgataccgtcgacctcgagggggggcccggtgcccagcttttgttccctttagtgagggttaattgcg

SEQ ID NO: 36257 - DNA, 453 bp, Homo sapiens
cgaattggttctccaccgcggtggcggccgcccgggcaggtacttgtcttaaaagagaatccatatcccattgctgaagtggagcagttggaccgacttgaggagtttcccaacacctgcaaaatgagggaggagctaggagaactatcagagcagttttacaaatatgcagtacctcggccgctctagaactagtggatcccccgggctgcaggaattcgatatcaagcttatcgataccgtcgacctcgagggggggcccggtacccagcttttgttccctttagtgagggttaattgcgcgcttggcgtaatcatggtcatagctgtttcctgtgtgaaattgttatccgctcacaattccacacaacatacgagccgggagcataaagtgtaaagcctggggtgcctaatgagtgagctaactcacattaattgcgttgcgctcactgc

SEQ ID NO: 36258 - DNA, 405 bp, Homo sapiens
ctactatagggcgaattggagctccaccgcggtggcggccgcccgggcaggtacatttacctacgttaatgaaagttgacacactgttctgagagttttcacagcatatggaccctgtttttcctatttaattttcttatcaaccctttaattaggcaaagatattattagtacctcggccgctctagaactagtggatcccccgggctgcaggaattcgatatcaagcttatcgataccgtcgacctcgagggggggcccggtacccagcttttgttccctttagtgagggttaattgcgcgcttggcgtaatcatggtcatagctgtttcctgtgtgaaattgttatccgctcacaattccacacaacatacgagcccggtgagccataaagtggtaaaagcc

SEQ ID NO: 36259 - DNA, 435 bp, Homo sapiens
tatagggcgaattggagctccaccgcggtggcggccgatttgcagagcctcaggggcctgagctaatggagttgctgccattttgaccattgccaaccatgataccagagggaaatgaaatgtgggtccaggggcactgttcaatccactgtagcatgggaagccctgataaaaagagacacaggacaaaattaaagttgtgaaaattatatacgtacctcggccgctctagaactagtggatcccccgggctgcaggaattcgatatcaagcttatcgataccgtcgacctcgagggggggcccggtacccagcttttgttccctttagtgagggttaattgcgcgcttggcgtaatcatggtcatagctgtttcctgtgtgaaattgttatccgctcacaattccacacaacatacgagccgggagcataaag

SEQ ID NO: 36260 - DNA, 413 bp, Homo sapiens
cgcgtatacgactcactatagggcgaattggagctccaccgcggtggcggccgaggtacttactaccaaataaagattttacctatagattgaaactaaattgtaaatgtcccaaatacttttcccgatgaaattcaaacaaaattagacttttatacacacaaagcaaaacaaaacacaacctatatataatttcaagattaagaaaaacaaaacaaataaaagcattctctcaagaccttgcttcagttgtgtaaaataattaaatgtgctattccaagttgattttagtttttaaatacagaatttgataaaagataagtaaaagaaggccttgggttcagggtggcagatatttagtgcaccctttatctagttcaggaaacacttgaaagatttatcaagtttcctta

SEQ ID NO: 36261 - DNA, 394 bp, Homo sapiens
tggaacctccaccgcggtggcggccgcccgggcaggtacttaaagcattattccgtatttcagcacagaatgactttggtgaaactgtagctgttagcgagtaattgcgttacaggcagacccagtcttaaattaacaaatctgggttcccttaactatcaggtttatgttggttttatttgcttctatctggatcccttctctttgcctgggacgctctagaactagtggatcccccgggctgcaggaattcgatatcaagcttatcgataccgtcgacctcgagggggggcccggtacccagcttttgttccctttagtgagggttaattgcgcgcttggcgtaatcatggtcatagctgtttcctgtgtgaaattgttatccgctcacaat

SEQ ID NO: 36262 - DNA, 442 bp, Homo sapiens
gtatacgactactatagggcgaattggagctccaccgcggtggcggccgaggtacacttttcatactaagaactagatcaatgtctttaattccttaaatgtcattagctcaagtttgaacagaaacatattacattactttttttttaaccaaaaggcttcattcatttaataaaacaagaacttacattttatttccttgaacggacagagaaatacctttcatttatcaagtgtgtaaataatgcccatgtgacagaaacatgcataataatctcataagagaatatccagagataaaagacaagttgaaactcagggacattttacccaagcaattaatttccagatggagttgccttgatcagtcatgtaaccactgggtaagagttctaaactatcagaaagagttctaaactatcagaatcaaaacagacaatac

SEQ ID NO: 36263 - DNA, 456 bp, Homo sapiens
tacgactactatagggcgaattggagctccaccgcggtggcggccgaggtacatccaaaatcatttcagcgtataaccacattctcctagactttgtctctcttctactccaagaagcccagttaccctttctcctctcttttatccccaaggatacagaacatcaaccacatcagccatcttgtgccctgcgtgctgagaggagcttttcttccatgaagatcccttgatgcagagccctgtaaagactgcatcatcccagctactttcctgctgacttccacttgggtttactcaatgggtgacactcacaggacataagagattagaaagagggataaggtttttttatatatctgctccctccctacttaaagccatggttttagcagaggcccaaggtcgtggcttttttgagcagcccctttatcaaaggtctggaaagagtctaccttc

SEQ ID NO: 36264 - DNA, 403 bp, Homo sapiens
tatagggcgaattggagctccaccgcggtggcggccgaggtacactctagcattgtaactttttccccctgagaagtaattttaagatctatcagtctcaatttaaatgatctgttaatcagccagagttttagtttcataatatcgttccattgcctgacaaagatatacacactgaagtgcctttagcagacctgggaccgtcaagaatcttgttaccctgattattgcaagatgacatatttcttaagccatttataatctcatattcgggttgaatctgaatttacaaataaaagggttaaattgaggcagtttcaagcagcatttaggaaaatgaagtggcttcaaattttagtgtttctggttacattattttgtttgaattatacaattacataat

SEQ ID NO: 36265 - DNA, 442 bp, Homo sapiens
tactatagggcgaattggagctccaccgcggtggcggccgaggtactagtgtgatctcacttatgctgtggttgcaattttcatttagatgttagtaacctctaaatttgtgtttccagctcagacccccttcaaaacttcagacttctacagccagctgcctaataaatattttgctttgaagatctcataggcatcttaattttaaaatatataaattctaatttggttattggttctggaatttgattctctatccatatttctccaatctgtaattagtatcaacagaaacttgagaatttccccagacttatcttattaatcattaaattatttcattactttctatattcctgtggttactaagtctattaactattgcatcagaaatattcaaatgtagcccctaatttgtaatcttaacttgccttatggtaga

SEQ ID NO: 36266 - DNA, 247 bp, Homo sapiens
ggagctccaccgcggtggcgccagcaaaaggccaggaaccgtaaaaaggccgcgttgctggcgtttttccataggctccgcccccctgacgagcatcacaaaaatcgacgctcaagtcagaggtggcgaaacccgacaggactataaagataccaggccgtttccccctggaagctccctcgtgcgctctcctgttccgaccctgccgcttacacggatacctgttcacgccttttctccccttcgg

SEQ ID NO: 36267 - DNA, 267 bp, Homo sapiens
acgactcactataggttgaatgggagctccaccgcggtggcggccgaggtacagaaaatatgtatccttcaaaaattttgggatccttccctctgggaaatgggtaacctgagtccattccccactaaacaggaccataaacggcagcatgagtcagataccaccaccaatatttattacccaaagcaatctgaaagaatcgggcacaaggtcatggctattcccaggtttacaacgaaaatcatgaaccttcttcaaacatcaccc

SEQ ID NO: 36268 - DNA, 420 bp, Homo sapiens
ctcctatagggcgaattggagctccaccgcggtggccaggtactagctcctgtcctgctgtctcaggacctttcagttcaagcatcctcctaacctgagtctctgtgtctcttacctcaaattctctctctcaaaaaaaaaaaggtgggggggattggctgggccagaatttggcccaaagccaccactggtctgtggtgaccaggagcaataccatatgatttcccaggccccaccctttcagcaagaggctggaatttggggggagggtcgtgatgtttcctactaactggccattagctggatcatcatttccaaaggaatctaatacaataatgtccccaaaaagcagtgaaggatacacagaccacaaaatagatccacaacatgggacagagtgtcattggcctcccaacagtt

SEQ ID NO: 36269 - DNA, 492 bp, Homo sapiens
tatagggcgaattggagctccaccgcggtggcgcgtggtcgcggccgaggtaccattcttatctcagaatgctgtattccatcagtagaagcagtttagatttggactgcatgataaaatgaaaagtaataaccctccaaccacaacctagtcagggtattaataattatatgtagcaagaaaacaaagaagaaaataatattgaaaaaatggagattccccaaccagtttcatatttgaaggatctgagttgtatttttattaaggaaatttttttctgaatactgtcttctaaaatgttaacattaaaatctgaatcagaggactctgaatggaaaagaagtttgatcactgacacctagggctctgaagcatgtgtggccacatggaaaagtcgaaggatgcgctgtcgaatctcctttgtcttcactccatagacaattgggttgagcacaggaggaaccagcagatagatattggccaagatgacgg

SEQ ID NO: 36270 - DNA, 442 bp, Homo sapiens
ggaaaaggccggcgcgcagccgctggccgttggtgaccagcgagtcgtcgcccagccttgcgatgcggcccgagaccgcccagcgccacaggtcggcattcggcagcccggtgagctcgctctggacgaagggctggcggcggtccaactggatgccggtcaccgggcgccagcccaggccgggcacgcggttgtggatgtagtcggccgctctagaactagtggatcccccgggctgcaggaattcgatatcaagcttatcgataccgtcgacctcgagggggggcccggtacccagcttttgttccctttagtgagggttaattgcgcgcttggcgtaatcatggtcatagctgtttcctgtgtgaaattgttatccgctcacaattccacacaacatacgagccgggagcataaagtgtaaagcctggggtgcctaatg

SEQ ID NO: 36271 - DNA, 173 bp, Homo sapiens
tcactatagggcgaattggagctccaccgcggtggcgtgcctaatgagtgagctaactcacattaattgcgttgcgctcactgcccgctttccagtcgggaaacctgtcgtgccagctgcattaatgaatcggccaacgcgcggggagaggcggtttgcgtattgggcgctct

SEQ ID NO: 36272 - DNA, 404 bp, Homo sapiens
gactactatagggcgaattggagctccaccgcggtggcggccgcccgggcaggtacttcagaaggatggaagctgaattcagaagggaggaatgagaaggaaaagttgctaagaaatcgataaacacatagataaatctaaattaagcatagccattaaaaatcagtaacaacaatgatatgaggatgattaactgagatgactgaaagcaaggtgaagctaaaatataaaaaagtatgtaggatgagctggagggtgcatttacttgcatttctagcattggataggaggagattagagatgctgattggcattaaactcgagttaacactgcagacaaccagggatagtcgtatgtaacttctgagccagtagaacagaagtaacactgaagaaagttcagt

SEQ ID NO: 36273 - DNA, 425 bp, Homo sapiens
ggcggccgaggtactaatattatctttgcctaattaaagggttgatatgaaaattaaataggaaaaacagggtccatatgctgtgaaaactctcagaacagtgtgtcaactttcattaacgtaggtaaatgtacgcggggctttctggtctcggccgctctagaactagtggatcccccgggctgcaggaattcgatatcaagcttatcgataccgtcgacctcgagggggggcccggtacccagcttttgttccctttagtgagggttaattgcgcgcttggcgtaatcatggtcatagctgtttcctgtgtgaaattgttatccgctcacaattccacacaacatacgagccgggagcataaagtgtaaagcctggggtgcctaatgagtgagctaactcacattaattgcgttgcgctcact

SEQ ID NO: 36274 - DNA, 479 bp, Homo sapiens
tagggcgaattggatctccaccgcggtggcggccgcccgggcaggtaccaaagtttgttaaaacacccagagagaagacgatgcttgagtaaatgtcttgctttcttgaaccctcaatcaacacatttaagccatttggtatatggagaactgccatagtgccagacaattgaataattctgctggattctgttggaacactgtcttgtcttcaagagaagactgaagatttctgaagtcatgaatcacctttattgcttgtcctctcgaaaattatacattcttcccctctgacttaaccaaatagaatgttgtcacgtgacttttttcctacatttcacaaataaatgttgcaaatcacagacagttctctagaaagtgaaagacatgtattttgcaataatacagtgatttttgtctctattattcaggatgattgatgtagatgtaatcagtctgtctcttagatattggtaaaa

SEQ ID NO: 36275 - DNA, 393 bp, Homo sapiens
gactactatagggcgaattggagctccaccgcggtggcggccgcccgggcaggtacactctgggtctccaggcagcagccgtcgccgcatccccggcagcggctccaggcaaagtgacaggaaaagacgatttctctctgattcacaatcctgaaaatgtgatctcccttaaaaagaggacagtgctgatgtgagtctgacgaagtggacatcacctgcagtcagtccagagctgcccagtcttgaatataatcatggccaaaccttatgaatttaactggcagaaggaagttccctcctttttgcaagaaggaacagtttttgacagatacgaggaggaatcctttgtgtttgaacccaactgcctcttcaaagtggatgagtttggcttct

SEQ ID NO: 36276 - DNA, 446 bp, Homo sapiens
actactatagggcgaattggagctccaccgcggtggctgcccagcagcccatcactgtgtctttcacccctagggctcacagtgacattttctggccccatcagggtgtgctgcacacctgtgtggagtctttgccaggtgagctctccccatcccatccctgccttcatcaataaaaggctgagtcagggaaagggagtacctcggccgctctagaactagtggatcccccgggctgcaggaattcgatatcaagcttatcgataccgtcgacctcgagggggggcccggtacccagcttttgttccctttagtgagggttaattgcgcgcttggcgtaatcatggtcatagctgtttcctgtgtgaaattgttatccgctcacaattccacacaacatacgagccgggagcataaagtgtaaagcctggggtgcctaatgagtg

SEQ ID NO: 36277 - DNA, 389 bp, Homo sapiens
gcgtatacgactactatagggcgaattggagctccaccgcggtggcggccgaggtactctacggtgtcaataattatttcagtctctgctgcaattagtgctaattacaatacctgagctataaaaataaaagatttcattatagcaaagttcacaaatatcgttttagttcagttatccacattgttcatctaaaataatacattttctttacatataactgtcttagacttgtaattgaggatatttgatgaaacagatctgtatctgaaacagcactatgatgctaaacatttgcataaggaatgaaaaaagttagcaacctagttttttcaatattcagatatttgagattacacagaaaactacatccagatgaatgactgaat

SEQ ID NO: 36278 - DNA, 441 bp, Homo sapiens
tactatagggcgaattggagctccaccgcggtggcggccgaggtactttagtgtattgttcccttgctccacccttctatccccttatctaaatggagttactgttgcttcgtgtttttttaacccttccaattccagtccttgctttcctgagtttaaaatttatcctgggaaagaaatatattaaaataattgtggcaaacaattatactttgcttttaagaatgaattttttttgtaatatattaattctgatatcctttaagttaagtaaatgcacagccagtttatacatcttcattgctcattttgttgttttaagatacattgtaaagaatattttatttcctaaaaattttatttcctgcatatcttctctaagattctctggctagcaaacattgttatatatgcatagtttacaccttattagaagtaaaa

SEQ ID NO: 36279 - DNA, 412 bp, Homo sapiens
cggtggcggccgaggtacatagaatatgaacacagcacacacatgagagacgcaagtgccaaatgtcttggcctgggcttcacgtgtcaagcccaacacagtcttaagaataagcagatatgagaaggagatgagaagtgagtccaggctcaatgggcggagatgatgacgataaggccatagacgacattgacccggatatcatcacaggccagcttcatgacatcttggtgtaggcagtaggaatgggaaaggatattggagcggcagaagggcagctgcttgatgaagacaggaaggggtgccatcagtgcagccccccgcaccacagcagccacaccaattttggtgacacgaggcaacgtaagtcctgcccgggcggtcgctctagaactagtggatcccccgggct

SEQ ID NO: 36280 - DNA, 239 bp, Homo sapiens
tatagggcgaattggagctccaccgcggtggcggccgaggtacacttttcatactaagaactagatcaatgtctttaattccttaaatgtcattagctcaagtttgaacagaaacatattacattactttttttttaaccaaaaggcttcattcatttaataaaacaagaacttacattttatttccttgaacggacagagaaatacctttcatttatcaagtgtgtaaataatgccca

SEQ ID NO: 36281 - DNA, 451 bp, Homo sapiens
actactatagggcgaattggagctccaccgcggtggcggccgaggtacaattttatcattcagctctatgaatctgcttaactatttcccaattagaggaagttgcagacacaggttacggcatagggcaaaaaggttgctgcctaattgaaaaaagatgctgtccagggacctataaatagctctttaaaaacctccacctttgctatcattttcattcaatttatgacttttaaaactgcagttccaaaactgggtgccagagtgccttggggcactaccatgaattccccgcgtcctgcccgggcggccgctctagaactagtggatcccccgggctgcaggaattcgatatcaagcttatcgataccgtcgacctcgagggggggcccggtacccagcttttgttccctttagtgagggttaattgcgcgcttggcgtaatcatggt

SEQ ID NO: 36282 - DNA, 464 bp, Homo sapiens
atacactactatagggcgaattggagctccaccgcggtggcggccgcccgggccggtaccattcttatctgataatgctgtaaaccatcagtagaagcagtttagatatggactgcatggtaaaatgaaaagtaataaccctccaaccacaacctagtcagggtattaataattatatgtagcaagaaaacaaagaagaaaatattattgaaaaaaatggagattgcgcaaccagtttcatatttgaaggatctgagttggatgtttattaacgaaattgtttttctgaatactgtctttcaaaatgtgaacattaaaatctgaatcagaggactctgaatggaaaagaagtttgatcactgacacctagggctctgaagcgtgtgtggccacatggaaaagtcgaaggatgcgctgccgaatgtcctttgtcttcactccatagacaattgggttgagcacag

SEQ ID NO: 36283 - DNA, 450 bp, Homo sapiens
tatagggcgaattgttagctccaccgcggtggcggccgaggtacttggcagcttcgggcctctgcatgtgctttttcctttaggtctcactttggagactgccctccaccccaaccccactgcattatgaggggccactttttttcacagttctggtgaccctgtagtttcttgtttctgatcattaccaactgcctgtgagctctttgcagacctgagtggtctcacttgtacctgcccgggcggccgctctagaactagtggatcccccgggctgcaggaattcgatatcaagcttatcgataccgtcgacctcgagggggggcccggtacccagcttttgttccctttagtgagggttaattgcgcgcttggcgtaatcatggtcatagctgtttcctgtgtgaaattgttatccgctcacaattccacacaacatacgagccggga

SEQ ID NO: 36284 - DNA, 434 bp, Homo sapiens
cgactcactatagggcgaattggagctccaccgcggtggcggccgaggtacatagaatatgaacacagcacacacatgagagacgcaagtgccaaatgccttggcctgggcttcacgtgtcaagcccaacacagtcttaagaataagcagatatgagaaggagatgagaagtgagtccaggccaatggcggagatgatgacgatatggccatagacgacattgacccggatatcatcacaggccagcttcatgacatcttggtgtaggcagtaggaatgggaaaggatattggagcggcagaagggcagctgcttgatgaagacaggaaggggtgccatcagtgcagccccccgcaccacagcagccacaccaattttggtgacacgaggcaacgtaagtacctgcccgggcggccgctctagaactagtggat

SEQ ID NO: 36285 - DNA, 379 bp, Homo sapiens
gactcactatagggcgaattggagctccaccgcggtggcggccgaggtactaaagtcaaaagaggaaagccatgaacagtcagcagaacagggcaagagttctagccaagagctgggattgaaggatcaagaggacagtgatggtcacttaagtgtgaatttggagtatgccccaactgaaagtacctgcccgggcggccggtttaaaactagtggatcccccgggctgcaggaattcaatatcaagcttatcgataccgtcgacctcgagggggggcccggtacccagcttttgttccctttagtgagggtttaattgcgcgcttggcgtaatcatgggtcataggctgtttcctgtgtgaaattgttatccgctcac

SEQ ID NO: 36286 - DNA, 432 bp, Homo sapiens
ctcactatagggcgaattgttagctccaccgcggtggcggtgcctaatgagtgagctaactcacattaattgcgttgcgctcactgcccgctttccagtcgggaaacctgtcgtgccagctgcattaatgaatcggccaacgcgcggggagaggcggtttgcgtattgggcgctcttccgcttcctcgctcactgactcgctgcgctcggtcgttcggctgcggcgagcggtatcagctcactcaaaggcggtaatacggttatccacagaatcaggggataacgcaggaaagaacatgtgagcaaaaggccagcaaaaggccaggaaccgtaaaaaggccgcgttgctggcgtttttccataggcctcgcccccctgacgagcatcacaaaaatcgacgctcaagtcagaggtggcgaaacccgacaggac

SEQ ID NO: 36287 - DNA, 127 bp, Homo sapiens
tccaccgcggtggcgctgcattaatgaatcggccaattcgcggggagagtcggtttgcgtattgggcgctcttccgcttcctcgctcactgactcgctgcgctcgagacgttcggctgcggcgagcg

SEQ ID NO: 36288 - DNA, 478 bp, Homo sapiens
tacgactactatagggcgaattggagctccaccgcggtggccaggtactagctcctgtcctgctgtctcaggacctttcagttcaagcatcctcctaacctgagtctctgtgtctcttacctcaaattctctctctcaaaaaaaaaaaggtgggggggattggctgggccagaatttggcccaaagccaccactggtctgtggtgaccaggagcaataccatatgatttcccaggccccaccctttcagcaagaggctggaatttggggggagggtcgtgatgtttcctactaactggccattagctggatcatcatttccaaaggaatctaatacaataatgtccacaaaaagcagtgaaggatacagagaccacaaaatagatccacaacatgggacagagtgtcattggcctcccaacagtttcacaggaaccccttggatgctgcagagcatgggtctctggggactggaggag

SEQ ID NO: 36289 - DNA, 426 bp, Homo sapiens
ggccgcccgggcaggtacgcgggcaagagatcatttgccaaactgtattctctagctttcttgcaagatgaaaggagactaccattaatgagccactagactatttagcaaatgcttctgatttccccgattatgcagctgcttttggaaattgcactgatgaaaacatcccactcaagatgcactacctccctgttatttatggcattatcttcctcgtgggatttccaggcaatgcagtagtgatatccacttacattttcaaaatgagaccttggaagagcagcaccatcattatgctgaacctggcctgcacagatctgctgtatctgaccagcctccccttcctgattcactactatgccagtggcgaaaactggatctttggagatttcatgtgtaagtttatccgcttcagcttccatt

SEQ ID NO: 36290 - DNA, 361 bp, Homo sapiens
tacgactcactatagggcgaattggagctccaccgcggtggcggcggtttgcgtattgggcgctcttccgcttcctcgctcactgactcgctgcgctcggtcgttcggctgcggcgagcggtatcagctcactcaaaggcggtaatacggttatccacagaatcaggggataacgcaggaaagaacatgtgagcaaaaggccagcaaaaggccaggaaaccgtaaaaaggccgcgttgctggacgtttttccatagtgctccgtccccccttgacgagcatcacaaaaattcgacgcttcaagttcagaggtgtgcgaaaacccgacagtgactattaaagaataccagggcgttttcccc

SEQ ID NO: 36291 - DNA, 360 bp, Homo sapiens
gtggcggccgaggtacttgagttttcctgagccaccttttctaaattagtgtcatttgtaatatcaataacacattttggtgtgggtggtctggatacaaacttctcctttggtagcaattccatggtatgtgttttatccatattgcattcctgaggaagtaaatcattagaattatgatcagaaactgtggactgttctgacgaatgaataatcatatcttcttgaagctgaatgtcaacagacttccgcttctctgcttcttcatgttttttatcttcctgtatttgatcccagggaggctggctattttttaaggtctcttctcctgccttctcattattatggaggttttccttc

SEQ ID NO: 36292 - DNA, 237 bp, Homo sapiens
gtatactactactatagggcgaattggagctccaccgcggtggcggccgaggtactccgttgctgggtttggacaatgatcatgggattagtcccaagtttgtagcttggaacggtagcatttttgcctgcgtgatccttgtcagctattcacagaaggaaatcttccgaaactccgtctttcatttcagccggtgaggctgttatccttctctgtcaattagcattcatgtggttt

SEQ ID NO: 36293 - DNA, 533 bp, Homo sapiens
ctatacggcgaattggagcttaccgcggtggcggccgaggtacataaaggtcaccgaggacagttctggtggaatgatgagggcagaagtttcattggcatgggttcgagagagaaatgaaagaggattgaagacagtgagtatagacagctcaggaagtttagctgtgtaagtgaacacaagatgagtggtcactagaaggagaggtgagccaagagggaatgatgggagaagttataatatgttgatggtcaagatagaatgactgattaaaggggaattgctggggctctgttcctgagtaggcaagagcaggtgagatagaagacataggtggagggattggccctaaatacatgcgtggacagatcctccttatgaaaaaaagaaggcaaagtgtatgaactcacacagtagtaggagagtatatagggtggtacctgcccgggcggccggctctagaactagtggatcccccgggctgcaggaattcgatatcaagcttatcgataccgtcgacctcgagggggggc

SEQ ID NO: 36294 - DNA, 407 bp, Homo sapiens
  misc_feature 288, 303, 336: n = A,T,C or G
cgactactatagggcgaattggagctccaccgcggtgggctctagaactagtggatcccccgggctgcaggaattcgatatcaagcttatcgataccgtcgacctcgagggggggcccggtacccagcttttgttccctttagtgagggttaattgcgcgcttggcgtaatcatggtcatagctgtttcctgtgtgaaattgttatccgctcacaattccacacaacatacgagccgggagcataaagtgtaaagcctggggtgcctaatgagtgagctaactcacanttaattgcgttgcgnctcacttgcccgctttccagtcgggaaacctgntcgtgccagcttgcattaatgaaatcggccaacgcgcggggagagggcggtttgcgttttgggcgctcttt

SEQ ID NO: 36295 - DNA, 285 bp, Homo sapiens
cgactcactatagggcgaattggagctccaccgcggtggcgggccgacctggggcctcggactaacaagcggatttaattgctgggcaggtcatgtggaaggtgctcctcccttcaacccagtaaattcaatctctctgagactttgttaggtgtaaaaatgttaatcagaaataattataacaacaatagtttattttacagtaccttcggccgctctagaaactagtggaatccccccgggctggcaggaatttcgaatatacaagccttaatcgataccgta

SEQ ID NO: 36296 - DNA, 436 bp, Homo sapiens
cgactactatagggcgaattggagctccaccgcggtggcggccgacgtcctgggtcatcgatgagcctcgccctgtgcctgaacgcggctagggagggacggacctttgaaggacaagggcccagaacttatacgcacctccgccgctttataactaaaggaacccccgggctgggggaatggatatcaagcttatcgataccgtcgacctcgagggggggcccggtacccagcttttgttccctttagtgagggttaattgcgcgcttggcgtaatcatggtcatagctgtttcctgtgtgaaattgttatccgctcacaattccacacaacatacgagccgggagcataaagtgtaaagcctggggtgcctaatgagtgagctaactcacattaattgcgttgcgctcactgcccgcttttcagtcgggaaacc

SEQ ID NO: 36297 - DNA, 434 bp, Homo sapiens
tacactactatagggcgaattggagctccaccgcggtggcggccgaggtacttcttggatcttacataggcctgaaagtttagttgcactactttaggaatctctttttatgcatttgttcaattaaaaggcaacaaagacaaatccttaagaaaataccagtatttttcctacatataaaatcaagggtccttgtctgacgatggattttactagttacgagaatcttcctatatttctagttgaatccctgtcatttcctgtaatagacttatattttaccagcagcccttatgcgatttctttgtgaaaaatatttctctgtatagaggaaagtttatcatttggaatgttaaatgcaattatattgacatatggtgataatgggacaaagcatacgggttaaaggttgcaggaaccatggcttggcaatt

SEQ ID NO: 36298 - DNA, 450 bp, Homo sapiens
acgactactatagggcgaattggagctccaccgcggtggcggccgaggtacagacaataagagagagaacctcaatgaggtagtatcggccttaacagcacaacaaatgcgttttgaacctgataacaaaaacactcaacgtaaagacccctattatggagcagactggggaatagggtggtggacagctgtagtgataatgttgatagtaggtataataacaccagtgttttatttgttgtattatgaaattttagctaaggtggatgttagtcatcattcaacagtggactcttcacatttacattcaaaaatcacacccccatcacagcagagagaaatggaaaatggaattgtgccaactaaaggaatacatttcagccaacaagatgatcataaactgtatagtcaagattctcagtcacctgctgctcaacaggaaacatagca

SEQ ID NO: 36299 - DNA, 430 bp, Homo sapiens
actatagggcgaattggagctccaccgcggtggcggccgaggtacgtaactgtaagaggactgaaagttccagactgtataaagccatcttaccgctctatgatggctcttcaggaggaaaaaggtaaaccagtgcattgtgaacgtcaccatgagtcaagctcagtagacacagaacctggattagaagagtcaaaggaagtaataaagtggaaacgactccctgggcaggcttgccgtatcccaaacaaacacctcttctcactaaatgcaggagaacgaggatgtttttgtcttgatttctcccacaatggaagaatattagcagcagcttgtgccagccgggatggatatccaattattttatatgaaattccttctggacgtttcatgagagaattgtgtggccacctcaatatcatttatgatc

SEQ ID NO: 36300 - DNA, 438 bp, Homo sapiens
ctatagggcgaattggagctccaccgcggtggccgagcggccgcccgggcaggtacataaaaacaatcacatacaattaatgctggattgttcccacaattttttgatcaagtaattatgaattaaaactctcagttttctaaaaacaatcacaaagacaattctgttaagatgaagacattataattgaaaaacaatctataattgtatgtgtagatatatttgttgaatttatgaccttcatagtctaaaatttaggaaagtaatgtttttgaattgatcagcacagctaattaactaaattcacatacttaaaatttgaaattctagcaaagatgtatataaaaaacaattagacaatgtccagctgaattttagaattatccaaagtattgctaagaatttgtagatgggccctcatcccgcgtacctcggccg

SEQ ID NO: 36301 - DNA, 439 bp, Homo sapiens
actactatagggcgaattggagctccaccgcggtggcggccgcccgggcaggtaccaaatcttcagaatcttgacttaagaaagtcagaattggaaacagagctgttacaatggcaatgacgagctgctcagctcctgaaacaaattttctttgtcctacagcaacggatctgcaaattaattttctttctttgctggaatctgttaccttgcatccactcatgggcagtcacctagaggcttccccaccaccggcccagacacatctccttcattcttatgttgttttagaaatgtgcacggatgctttctttttaataaaaaaaaatataaacttagtctataacagatatgcacttgtaatgaaagttttattaaatggaaatataagtgagagaaaaaaaaaaaaaaaaaaaaaaggagtacctcggccgcgacc

SEQ ID NO: 36302 - DNA, 154 bp, Homo sapiens
ctatagggcgaattggagctccaccgcggcggcggccgggtacccccaagattattcaatcattgcttatgactgtggcaaacaattttgttaccgacaagaactctggagaagtcatgacagtcggaatcaatgctataaaggagataacagc

SEQ ID NO: 36303 - DNA, 652 bp, Homo sapiens
gactactatagggcgaattggagctccaccgcggtggcggccgcccgggcaggtactcttttcaaggctttacttccaatcttccccttaagtgctagtgtccagaggaaaaattatttcttctctgtagaagtcattttgaagacagtatttttctgagatccaatgtggttgggagttctgaagaggaagttatagttttaagctagattatctcattttattatattctgtgtttattttcctttgccgtgcttaggcctttggcaaatgttctctagatgtacctcggccgctctagaactagtggatcccccgggctgcaggaattcgatatcaagcttatcgataccgtcgacctcgagggggggcccggtacccagcttttgttccctttagtgagggttaattgcgcgcttggcgtaatcatggtcatagctgtttcctgtgtgaaattgttatccgctcacaattccacacaacatacgagccgggagcataaagtgtaaagcctggggtgcctaatgagtgagctaactcacattaattgcgttgcgctcactggccgctttccagtcgggaaacctgtcgggccagctgcattaatgaatcggccaacgcgcgggtgagaggcggtttgcgtattgggcgc

SEQ ID NO: 36304 - DNA, 418 bp, Homo sapiens
gactactatagggcgaattggagctccaccgcggtggcggccgatggtgaagcgcagcgtgtcgtccttgtcggtcgtggcctcgtacatcgcctgggcgatgcgcagggccgcggcaaaggcatccttgcgggcggcgcgcggcgtggtgccggcatgcgcctcctcgcccacgatctcgacgatatagcggcggctgccctgaatggcggtgacgacaccgatcgtcttccgctcgttttccaatcgcggaccctgctcgatatgggcctcgacatagccgtcgagcgggaaaccgggcttgccgtcgcgcatcggcgccggagcgaccttcaaggtctcggccagggcgtccttcagcgcgacgcccttccagtccttcacgaggagcatctcttcgagcttggtgtgcccggca

SEQ ID NO: 36305 - DNA, 420 bp, Homo sapiens
gcgtaatacgactcactatagggcgaattggagctccaccgcggtggcggccgtcggatcggccgcccgcgtctcgcccaggacggcgacgatgccggggcaacgcagcccttcttccatggcccagaagaggtcctcgtcgcgccgcgccgtgaccatcagcaggcgggccggatcgaaccaggtcgaaagcgcaggggcatagggcagggcatcgaaaacgcccgtagggcggcggcaccacaggatcgttccgccggcccgctgggcgaagcgaccgatcacgtgcccggcaaaacccagggcggcgccgtcatgcgcggcgacacggccgctctagaactagtggatcccccgggctgcaggaattcgatatcaagcttatcgataccgtcgacctcgagggggggcccggtaccc

SEQ ID NO: 36306 - DNA, 360 bp, Homo sapiens
ctatagggcgattggagctcaccgcggtggcggccgaggtacttacgttgcctcgtgtcaccaaaattggtgtggctgctgtggtgcggggggctgcactgatggcaccccttcctgtcttcatcaagcagctgcccttctgccgctccaatatcctttcccattcctactgcctacaccaagatgtcatgaagctggcctgtgatgatatccgggtcaatgtcgtctatggccttatcgtcatcatctccgccattggcctggactcacttctcatctccttctcatatctgcttattcttaagactgtgttgggcttgacacgtgcagcccaggccaaggcatttggcacttgcgtct

SEQ ID NO: 36307 - DNA, 472 bp, Homo sapiens
acgactcactatagggcgaattggagctccaccgcggtggcggccgcccgggcaggtaccgatgaatcggaatttgtctaatgaggagttaacaaaatcaaagccatctgctccacccaatgaaaaaggaaccagcgatttacttgcttgggaccccctatttggaccatctcttgattcatcttcttcatcttcactaacttcatcatcatcagccaggcccacaactcctctttctgtaggcaccattgtcccacctacgaggcctgcttccagaccaaagcttacttcaggcaaactcagtgggattaatgaaatacccaggccattcagcccacctgtaacttccaacaccagcccaccttctgctgcaccattagcccgggcagaaagttcttcttctatctcatcatctgcttcattgagtgctgccaatactccaacagtaggtgtgtcacggggtcccagccct

SEQ ID NO: 36308 - DNA, 434 bp, Homo sapiens
ctactatagggcgaattggagctccaccgcggtggcggccgcccgggcaggtaccagtcaatgtgatgagttgagaaagtgaaataagattacaaatatgggaataaaattatcaacctacccagaactattacccaactgaaaaaggcgaaagaaattaacaacagcaaaacctttagaataattcagtaactggctagttacaaaatcaataaccaatcgccaagttaaactattatacaactacacactactctcttatgcagaggtaagaatgaggtagattgatgtgtacctcggccgctctagaactagtggatcccccgggctgcaggaattcgatatcaagcttatcgataccgtcgacctcgagggggggcccggtacccagcttttgttccctttagtgagggttaaatgcgcgcttggcgtaa

SEQ ID NO: 36309 - DNA, 443 bp, Homo sapiens
atacgactactatagggcgaattggagctccaccgcggtggcggccggcttgccgatcgtgctgatcaggttgccgaagaagccgccttgcggggtcaactggccttgttgctgttgcatctgctgcatctgctgcaattgctggagctgctgcagctcttgcagttgttgcgggtccagttgcgcgccgaggccgcccgacggatcggccgctctagaactagtggatcccccgggctgcaggaattcgatatcaagcttatcgataccgtcgacctcgagggggggcccggtacccagcttttgttccctttagtgagggttaattgcgcgcttggcgtaatcatggtcatagctgtttcctgtgtgaaattgttatccgctcacaattccacacaacatacgatccgggagcataaagtgtaaagcctggggtgcctaat

SEQ ID NO: 36310 - DNA, 457 bp, Homo sapiens
tatagggcgaatcggagctccaccgcggcggcgtgccggctttcttctatagttgtaagatggctgcctcataagataatatctcaagacagaaaggaagggtcattccctttcatgcattgctcttttgatttgcaaaaacatccctgagaagctccccagccagcatactctcgtgctccattgtctagaactggcttacttgcccaccagcaaaccagtcactggaaaatgggaatgggattgccatgatgggtttagaccaatagtggttcagctcttgggctggacctgccttttccgagcactttgctgcctgcctgatacctgagtaaaatcagggctctctcaggaagaaagatgggggaaatggctcttggtcaaataaccagttcttttatctttataataaccagtttttttagatgaattaaccgagttccagaataactgggtg

SEQ ID NO: 36311 - DNA, 411 bp, Homo sapiens
atacgactactatagggcgaattggagctccaccgcggtggcggccgaggtacaccttatcatcctcataatcaataaatacacctttatccattgtccagatttcccaaacaacacctttaatggttggtgaaaaatctggaatctcataggtagcgtcattgactggacagtaaacaaatccatcacttttttcatcaatgaaaactaatctggtcccatttgggtcgggaaaaatctttttcacactgacaggatgtcgataatcattaacgaattgccagtcttcaatgtagaaatactgaacgacaccagtatctgtacctgcccgggcggccgctctagaactagtggatcccccgggctgcaggaattcgatatcaagcttatcgataccgtcgacctcgaggg

SEQ ID NO: 36312 - DNA, 422 bp, Homo sapiens
acgactactatagggcgaattggagctccaccgcggtggcggccgtccggccctggcgatgcgccaggcggcctgacgccgacgattcgtgtcttcgtttgacgccgggctggtcccggcgtttttttatggcgtgaccggatcgaccggctcatagccggccgcgcggcggctcgagcgcgccagggtccaggcgaagccgatgccggccgctctagaactagtggatcccccgggctgcaggaattcgatatcaagcttatcgataccgtcgacctcgagggggggcccggtacccagcttttgttccctttagtgagggttaattgcgcgcttggcgtaatcatggtcatagctgtttcctgtgtgaaattgttatccgctcacaattccacacaacatacgagccgggagcataaagt

SEQ ID NO: 36313 - DNA, 411 bp, Homo sapiens
actactatagggcgaattggagctccaccgcggtggcggccgaggtacatccaatacccgaaagcacaagattagaagtctccaatgattcttgtttagcttcttccccagttacctcattattgtaagaacagatgaaattctggtcttcttgggtgtctggatcacactctcttgcaaaagtttttttctgttcattttgtcctgcccgggcggccgctctagaactagtggatcccccgggctgcaggaattcgatatcaagcttatcgataccgtcgacctcgagggggggcccggtacccagcttttgttccctttagtgagggttaattgcgcgcttggcgtaatcatggtcatagactgtttcctgtgtgaaattgttatccgctcacaattccacacaacata

SEQ ID NO: 36314 - DNA, 376 bp, Homo sapiens
actactatagggcgaattggagctccaccgcggtggcggccgaggtacatcaccctgctgagggacatccaggacaaggtcaccacactctacaaaggcagtcaactacatgacacattccgcttctgcctggtcaccaacttgacgatggactccgtgttggtcactgtcaaggcattgttctcctccaatttggaccccagcctggtggagcaagtctttctagataagaccctgaatgcctcattccattggctgggctccatctaccaattggtggacatccatgtgacagaaatggagtcatcagtttatcaaccaacaagcagcttcagcacccagcacttctacctgaatttcaccatcaccaacctac

SEQ ID NO: 36315 - DNA, 406 bp, Homo sapiens
gtaatacgactcactatagggcgaattggagctccaccgcggtggccggccgcccgggcaggtacttatgtatttcacgccctttaatttcaaaggccccaaccctacaaggtatagatcaactttgcctattttttagtgtggaaactgaggtttagagaggcctataaaatttgtctacagttccatagccataagcgtctgattgataaagcaaacccaagttctttgtagaagagctgttatactgcctttagtgtgtaactacttcatgaactcagagtccattatgattgtgtaaggtatgacagtttggcatttctaccaagaaatgaaggcttgaatggggcagaatgacagcacttggtggttaggaagagaagaaagttttggataatgggataat

SEQ ID NO: 36316 - DNA, 443 bp, Homo sapiens
ctactatagggcgaattggagctccaccgcggtggcggccgcccgggcaggtacatagaatatgaacacagcacacacatgagagacgcaagtgccaaatgccttggcctgggcttcacgtgtcaagcccaacacagtcttaagaataagcagatatgagaaggagatgagaagtgagtccaggccaatggcggagatgatgacgataaggccatagacgacattgacccggatatcatcacaggccagcttcatgacatcttggtgtaggcagtaggaatgggaaaggatattggagcggcagaagggcagctgcttgatgaagacaggaaggggtgccatcagtgcagccccccgcaccacagcagccacaccaattttggtgacacgaggcaacgtaagtacctcggccgctctagaactagtggatcccccgggctgca

SEQ ID NO: 36317 - DNA, 588 bp, Homo sapiens
  misc_feature 528: n = A,T,C or G
gtaatacgactcactatagggcgaattggagctccaccgcggtggaaaggagaacgtcacaaggcatggtaaggttgaactgcttggccgggaggtaggtcagaggcaggtgggagaatagggcctgagtctcctattttctacctatttgtacctcggccgctctagaactagtggatcccccggctgcaggaattcgatatcaagcttatcgataccgtcgacctcgagggggggcccggtacccagcttttgttccctttagtgagggttaattgcgcgcttggcgtaatcatggtcatagctgtttcctgtgtgaaattgttatccgctcacaattccacacaacatacgagccgggagcataaagtgtaaagcctggggtgcctaatgagtgagctaactcacattaattgcgttgcgctcactgcccgctttccagtcgggaaacctgtcgtgccagctgcattaatgaatcggccaacgcgcggggagaggcggtttgcgtattgggcgctcttccgcttnctcgctcactgactcgctgcgctcggtcgttcggctgccgcgagcggtatcagctcactc

SEQ ID NO: 36318 - DNA, 368 bp, Homo sapiens
ctactatagggcgaattggagctccaccgcggtggcggccgaggtactttttttttttttttttttttttttttgggcccatcattctcttactcaattctcttgccttctttcctaaggggaggttttaccaaggacaacatatttcccacacactctacttattcccaatgacagggcagttgcccctggatgaggctccctgaaggctttattaaaagcttgggaatttctgatctgaacaattacaacctgatggtgttttacgaccagaagagaggataaaccatagtccattccatgatatttcaatcttgcatctctcctctagctgttcttatgctccttcttgataacaggatggcatt

SEQ ID NO: 36319 - DNA, 413 bp, Homo sapiens
gcgaattggagctccaccgcggtggcggccgtcggctcccagctactcacagagaacgtttctgtttctgacagcagagtaagagaagaggtgagaagagagacagcccattctcttttggcctaattcctaaggaatcatgcctctgccttcgggccattctcaagtcttgttcaaggataaaatgatttattgatggccgtaattaaaaagcaatgccaacggaagcagcgtcagcatttttcatttgtacctcggccgctctagaactagtggatcccccgggctgcaggaattcgatatcaagcttatcgataccgtcgacctcgagggggggcccggtacccagcttttgttccctttagtgagggttaattgcgcgcttggcgtaatcatggtcatagctgtttcct

SEQ ID NO: 36320 - DNA, 442 bp, Homo sapiens
gcgaattggagctccaccgcggtggcggccgcccgggcaggtacatagaatatgaacacagcacacacatgagagacgcaagtgccaaatgccttggcctgggcttcacgtgtcaagcccaacacagtcttaagaataagcagatatgagaaggagatgagaagtgagtccaggccaatggcggagatgatgacgataaggccatagacgacattgacccggatatcatcacaggccagcttcatgacatcttggtgtaggcagtaggaatgggaaaggatattggagcggcagaagggcagctgcttgatgaagacaggaaggggtgccatcagtgcagccccccgcaccacagcagccacaccaattttggtgacacgaggcaacgtaagtacctcggccgctctagaactagtggatcccccgggctgcaggaattcga

SEQ ID NO: 36321 - DNA, 389 bp, Homo sapiens
atacgactcactatagggcgaattggagctccaccgcggtggcggccgaggtactcagaacgtctttccccagctctgagattttcttaaaaatcctttgaggttgctccttgcatgtctatggtttcatttctttctacatccagtccactttaattcttcatgaatttatcctgatgtgtgagataagaatcccactttcatttttttttaaggccgacagaattatctctaaaactagaacaaattcattttaaatccacatggggaaaatggcaagctaaagaaaacaggaacattctgggggaaaaaaaggagtaaagggacccatccagatgtcgaggactcggcccacccgcgtacctgcccgggcggccgctctagaacta

SEQ ID NO: 36322 - DNA, 593 bp, Homo sapiens
gcgcgtaatacgactcactatagggcgaattggagctccaccgcggtggcggccgaggtacatgcccacgccagccacaccgaccaactggagggcagccgagcaggcacggacacagctgtccagaccagggccaaccaacctgcaaacctgccacgtgaaaggagtgtcaggagaggagaaaggcacagctcccctgcagctgcacccctctgggtgcagttacggggctggctgatgagacagacaatgggtgtggcatgtgggtagtaaactgtctcatggtgtaaaaatgcttgtcacatttcatgtgaacagaatcaactaaaaagttctgccacaaatgtcataggaagaatgacaaaaaagaggttcagtgatccgcgtgcctataatcccgaggcatctacgtcactgagataagaaagggcagccggcatatcttccctcccacccctcatgtatctcttcccatcttgatttaaaacaaaaccagtgttagaggagactggagttttcagattgttggctttctttttgctgccatttctattcctcaccaagaaaagaataataaagctaatactgaaact

SEQ ID NO: 36323 - DNA, 533 bp, Homo sapiens
gcggccgaggtacctgaggtagctggagacaatatactgtcagggaaacgggaatctgaaacgcgtctgaactggttagatttgaaggcagtaaagtggctgccagcattgaaggatgagacactggcagtccacagtatctggtggtaaagagatacttaaattatcccctgtgcttgtgggaaataaagtgcccatagaaggaaggctgtgtcaggctacatgtctactgtcgagggcaagtatggcaaaaatgagaagcacattgactatggagtatgtctggctgtattcaactgtgttcaaaatcttaaagtcagaaaatgaaacactcaggacttttcattctcagcttatgacgtagtcagtggaccaggtaacatctgtggctttaaggctatcttattcgagcggtcgcccgggcaggacaaccctgaaaaagaggaggctggacacttgtatagacttatgcaaagcttatgctttgaaaaaatatgtggaaattggcacctccatgtagagtcaccacatga

SEQ ID NO: 36324 - DNA, 394 bp, Homo sapiens
agggcgaattggagctccaccgcggtggcggccgaggtacttacgttgcctcgtgtcaccaaaattggtgtggctgctgtggtgcggggggctgcactgatggcaccccttcctgtcttcatcaagcagctgcccttctgccgctccaatatcctttcccattcctactgcctacaccaagatgtcatgaagctggcctgtgatgatatccgggtcaatgtcgtctatggccttatcgtcatcatctccgccattggtctggactcacttctcatctccttctcatatctgcttattcttaagactgtgttgggcttgacacgtgaagcccaagccaaggcatttggcacttgcgtctctcatgtgtgtgctgtgttcatattctatgtacctg

SEQ ID NO: 36325 - DNA, 706 bp, Homo sapiens
  misc_feature 574: n = A,T,C or G
ccctctagatgcatgctcgagcggccgccagtgtgatggatatctgcagaattcgcccttagcgtggtcgcggccgaggtacacagaaagggaggtgtcaacaaaagaagataagcccatacagtgcacacctcagaaagccaagccaatgcgggcagctgctgacctggggagggagaagatcctcaggccaccagtagaaaaatggaagagacaggatgacaaagacttaagagaaaaacgttgttttatttgtggaagagaagggcacattaaaaaggaatgcccacagtttaaaggctcttcaggtagcctttccagtaaatatatgactcagggaaaagcctcagcgaagaggacccagcaggaatcatgagggaaggaaaatgcagcactctaaatggccactcaggcgttcctattcactcggaaaattaggttcatttcacaggacacagcagtgtagatcaggcttcaacttaacatttaagggaaatgtcagattttttttttaatttaatgaaattgttaatgaggaaaaatttttaatatagtcttatctaccacacatccncatagatttaaggattttaatagaaagacatgatgtacgtatttaagccacgttaaaagaaaaaatataactatggaccggtattcagtgaatacagtttcatggttttaattctttcaaagcacattaaaa

SEQ ID NO: 36326 - DNA, 544 bp, Homo sapiens
gactcactatagggcgaattggagctccccgcggtggcggccgaggtacatagaatatggacacagcacacacatgagagacgcaagtgccaaatgccttggcctgggcttcacgtgtcaagcccaacacagtcttaagaataagcagatatgagaaggagatgagaagtgagtccaggccaatggcggagatgatgacgataaggccatagacgacattgacccggatatcatcacaggccagcttcatgacatcttggtgtaggcagtaggaatgggaaaggatattggagcggcagaagggcagctgcttgatgaagacaggaaggggtgccatcagtgcagccccccgcaccacagcagccacaccaattttggtgacacgaggcaacgtaagtacctgcccgggcggccgctctagaactagtggatcccccgggctgcaggaattcgatatcaagcttatcgataccgtcgacctcgagggggggcccggtacccagcttttgttccctttagtgagggttaattgcgcgcttggcgt

SEQ ID NO: 36327 - DNA, 557 bp, Homo sapiens
ctgcaccgcggtggcggcacacgaaccgcaaagacaagatagggctacttaatgcaccacaagcattactgtcttcaaagtctccttcttcaagcagaaactgctggcctttaaaatgttctttttcataggcaacccacactccaccaatgacacgcagctgatccaatcctgtgaaaatatccattatttttcaaaaaattaggaacagaatctatatgttcactaaactctttagcctgtccatggaagtgaggtttttcataaataataacctttaagttcatgggcatttccactttcagtccacccatttgaagtggatgtaatgatttcatttctgctgtagaaatctcaaagagcccatggtcttcctccagaactgtagcttgtcccttaaaattaatatctgggtaggcaagccaaactcctgacttcacagtgaaggacacagatttggagatattcagttcttccaaattggggactgctctctgtatgtaaacaggacaacaggctgggtcagattgtgggaaaagctctatttctggaatgct

SEQ ID NO: 36328 - DNA, 560 bp, Homo sapiens
gactactatgggcgaattggagctccaccgcggtggcggccgcccgggcaggtacacaggccgggcacagtggttcacacctgtaatcccaacactttgggaggctgaggcgggtggatcacaaggtcaggagatcgagaccatcctggccaacatggtgaaactctgtctctactaaaaaatacagaaaattagccagtcatggtggcacgttcctctagtcccagctactcgggaggctgaggcagaagaattacttcaacatgggatgtggaggttgcagtgagccgagatcgcgccactgcactccagcctggtgacagagcgagaccccatctcaaaaaaaaaaaaaagttgtatgtgacagctaaccataataaaaaaaaaagaaagaaaaaagagagagaaagtagggacaacactaaatcattagtaatttgagcacatttcctccaaggcatatgctatttttcaacttggtttcaatcatgtatctttattgtttttcttaatggtataagcatgtttggttttattgtaggctttaaatcatgtaatac

SEQ ID NO: 36329 - DNA, 469 bp, Homo sapiens
ctatgggcgaattggagctccaccgcggtggcggccaacgcgcggggagaggcggtttgcgtattgggcgctcttccgcttcctcgctcactgactcgctgcgctcggtcgttcggctgcggcgagcggtatcagctcactcaaaggcggtaatacggttatccacagaatcaggggataacgcaggaaagaacatgtgagcaaaaggccagcaaaaggccaggaaccgtaaaaaggccgcgttgctggcgtttttccataggctccgcccccctgacaagcatcacaaaaatcgacgctcaagtcaaaggtggcgaaacccgacaggactataaagataccaagcgtttccccctgaaagctccctcatgcgctctcctgttccaaccctgccacttaccagatacctgtccacctttctcccttcaaaaaacatgacactgtctcataactcacactataagtatct

SEQ ID NO: 36330 - DNA, 385 bp, Homo sapiens
gggcgaattggagctccaccgcggtggcggccgcaccgtctggatccccaagggagcgcaatggcgcacgctggacttcgaccgcaagcgccagggcgcctatggcgcgctgcagtggaagaaggacaataccctcaagagccacctgacctggttccgctccaaatacgatatgcgctgggacgagaacgcgctgttctcggccgctctagaactagtggatcccccgggctgcaggaattcgatatcaagcttatcgataccgtcgacctcgagggggggcccggtacccagcttttgttccctttagtgagggttaattgcgcgcttggcgtaatcatggtcatagctgtttcctgtgtgaaattgttatccgctcacaatt

SEQ ID NO: 36331 - DNA, 443 bp, Homo sapiens
tacactactatagggcgaattggagctccaccgcggtggcggccgagtgtgaggcatttaagggtagtctgccagaacctctctgccttgggcagcccagaaggaccttgaagcacaagttcaccctgggacagaatataaccaagtgatagccactgacccaagtacctcggccgctctagaactagtggatcccccgggctgcaggaattcgatatcaagcttatcgataccgtcgacctcgagggggggcccggtacccagcttttgttccctttagtgagggttaattgcgcgcttggcgtaatcatggtcatagctgtttcctgtgtgaaattgttatccgctcacaattccacacaacatacgagccgggagcataaagtgtaaagcctggggtgcctaatgagtgagctaactcacattaattgcgttgcgctcac

SEQ ID NO: 36332 - DNA, 590 bp, Homo sapiens
  misc_feature 36: n = A,T,C or G
tactatagggcgaattggagctccaccgcggtggcnggccgcccgggcaggtacatactcccttaactattgccaagatccctatgaggcagcttcaattaatccccacaagtttccctattccagaacccctggcctgctcatgatcacagactctgccgccagaaaagaagacctgtttctcccagcctgggcagcatggcaataccccgtctctacaaaaaaatacaaaaattagccaggtgtggtggcacatgcctgtagtcccagctacttgggagactgaggtgggagaatcacttgagccccaggaggtggaggttgcagtgagtcaagatcgcaccactacactccagcctgggcaacagagtgagaccctatctcaggagggaaaaaaaaaaaaaaaaaagtacctcggccgctctagaactagtggatcccccgggctgcaggaattcgatatcaagcttatcgataccgtcgacctcgagggggggcccggtacccagcttttgttccctttagtgagggttaattgcgcgcttggcgtaatcatggtcatagctggttcctgtgtgaaattgttatcc

SEQ ID NO: 36333 - DNA, 436 bp, Homo sapiens
tatacactactatagggcgaattggagctccaccgcggtggcggccgaggtaccattcttatctcagaatgctgtaaaccatcagtagaagcagtttagatttggactgcatggtaaaatgaaaagtaataaccctccaaccacaacctagtcagggtattaataattatatgtagcaagaaaacaaagaagaaaataatattgaaaaaatggagattccccaaccagtttcatatttgaaggatctgagttgtatttttattaaggaaattttttttctgaatactgtcttccaaaatgttaacattaaaatctgaatcagaggactctgaatggaaaagaagtttgatcactgacacctagggctctgaagcgtgtgtggccacatggaaaagtcgaaggatgcgctgtcgaatctcctttgtcttcactccat

SEQ ID NO: 36334 - DNA, 602 bp, Homo sapiens
tacgactcactatagggcgaattggagctccaccgcggtggcggccgaggtacccgaaaagaaaggaagctttagtaatgaaaggattgctgccaaaatcctgtttcccccttgcagatcttacagaaaacagccacagaatcccaaggcatcagcaccaagagagcctgtagaaactatctggtctaagctcctgaagcccagagataagaatgacttaacccaagctgcacagcctcttaacagtccactgttaaccccagaaacagatgcatttgaatctgaaaggagacaggaatcctaatcctactgctcagggacttgctgatttactttgctgtctattagcctttctgtgacatgattttctaccaagcaaagtcttttattcaagtctcccagagatttcctatttaagcgtttgctatttggccacttaaaaaagacagaagagaagtaaacagaagcatataccacacaactcagtccagtcagtagttgactctcaagatggcggatgtcactgagatggctgagaaataggaacggatgtggagaaaggagtggcagtggagttagctgttttgtctacctgctggata

SEQ ID NO: 36335 - DNA, 405 bp, Homo sapiens
attggagctccaccgcggtggcggccgcccgggccggtgcctttgtgtctagttataagccttttgatcccaggtcctgccatgaccttcagcatgggggccaggtcttcagcatagcgtcacataggaccagtgcacacaaacaactcctgggctctcacatgcaagggaaactgacctttgttgggaaccacacctggagaaggcttgtgtccaaatataccatcgaagaaagcaggcattcgaatgctaccaccaatatcagagcccacaccaataactgagcaggcatctaccagtgtgcagccctcaccaccagaactcccacctacaatatgctgtaaatcatatgggttgtttgatcggccatagatcttgtgactggattcataccacatacacaac

SEQ ID NO: 36336 - DNA, 394 bp, Homo sapiens
tacgactcctatagggcgaattggagctccaccgcggtggcggccgtctctgtcgataactgccgggctgtccaatctttcccctgatagaaaggcgcctgggggtcagcctgaagaagctctggagggaagaggcggctgtttgattcagagcctcctcgctgggctggaattaacctggctctttctctaatgaaactgactccaagggtccctgtgtgctagagattcaatggcccttaggagaagcaatgatgagaggtaatattaaagcagtgtacctcggccgctctagaactagtggatcccccgggctgcaggaattcgatatcaagcttatcgataccgtcgacctcgagggggggcccggtacccagcttttgttccctttagt

SEQ ID NO: 36337 - DNA, 613 bp, Homo sapiens
agctccaccgcggcggcggccgaggtaccggaaagacaagatagggctacttaatgcaccacaagcattactgtcttcaaagtctccttcttcaagcagaaactgctggcctttaaaatgttctttttcataggcaacccacactccaccaatgacacgaattgatcaattctgtgaaaatctccattatttttcaaaaaattaggaacagaatctatatgttcactaaactctttagcctgtccatggaagtgaggtttttcataaataataacctttaagttcatgggcatttccactttcagtccacccatttgaagtggatgtaatgatttcatttctgctgtagaaatctcaaagagcccatggtcttcctccaaaactgtagcttgtcccttaaaattaatatctgggtaggcaagccaaactcctgacttcacagtgaaggacacagatttggagatattcagttcttccaaattggggactgctctctgtatgtagacaggacaacaagctgggtcagattgtgggaaaagctctatttctggaatgctgcagtcctttaagacacgtttgagagaacccaatataaagtttctttgtggatgcc

SEQ ID NO: 36338 - DNA, 591 bp, Homo sapiens
  misc_feature 394, 396: n = A,T,C or G
ctcactatacggcgaatagcgccctctagatgcatgctcgagcggccgccagtgtgatggatatctgcagaattcgccctttcgagcggccgcccgggcaggtacaaccagaaccaacaattgtatttctctatagttattttaaaatagtaatcaatgctatgtatttgatgtatatgtttctaaattagaaatttcttttggctttgtgttttttttatgtgcgttaaatatgtaaactgaacctgttcctaaaatgcattaaacttgaatgctgtgtctatccaatgccaaaatgctcagaagaaaagtgaataattcagtcattcatctggatgtagttttctgtgtaatctcaaatatctgaatattgaaaaaactaggttgctaactntnttcattccttatgcgaatgtttagcatcatagtgctgtttcagatacagatctgtttcatcaaatatcctcaattacaagtctaagacagttatatgtaaagaaaatgtattattttagatgaacaatgtggataactgaactaaaacgatatttgtgaactctgctataatgaaatcttttatttttatagctc

SEQ ID NO: 36339 - DNA, 404 bp, Homo sapiens
ttggagctcaccgcggtggcggccgaggtactggtcacagcctgaagaccactgagagaaactttttcatgaatggtaaaatacatcacaaattaattctatattttgaaaagtgctacttcttatttgccataatgaatattatcattgatcttagttaaaatgtaaaaacacaatttaaaggaagcaaagaatgtgccaggcattttcatgtctattcatacattcattaataaacagaagcatgcataactatgatatagcaaaacaaagaaataattggtttaatgccacatgttgacctaaaatatttccgtaataaactatgacggtgaatcaccaatgaatctaccttgtcccagacccacagtgctgggctaacttatcacagttacttgctcaga

SEQ ID NO: 36340 - DNA, 440 bp, Homo sapiens
gtaatacgactcactatagggcgaattggagctccaccgcggtggcggccgaggtacttcttggatcttacataggcctgaaagtttagttgcactattttaggaatctctttttatgcatttgttcaattaaaaggcaacaaagacaaatccttaagaaaataccagtatttttcctacatatgaaatcaagggtccttgtctgacgatggattttactagttacgagaatcttcctatatttctagttgaatccctgtcatttcctgtaatagacttatattttaccagcagcccttatgcgatttctttgtgaaaaatatttctctgtatagaggaaagtttatcatttggaatgttaaatgcaattatattgacatatagtgataatgggacaaagcatacgggttaaaggttgcaggaaccatggcttggcaatt

SEQ ID NO: 36341 - DNA, 424 bp, Homo sapiens
ctcactatagggcgaattggagctccaccgcggtggcggccgaggtactgtatttttaaattaaggagttttagttataatgaaattgatttgtagtctgctttgccgtaaacttgtttttctttaaattgttcttacagtgatatcttactatttttaactgtctggggtttctgatatggggatttcagcccctggttaatcagtcttgtccctacaagtccctgatgcagtatgtttatttgtgatgtttaaagaacatttcttggctgggcgctgcggcttgcgcctgtaatctcagcactttgggaggctgaggtgggtggatcacctgaggttgggagttctagaccagcctgacaaaacatagtgaaaccccgtctctactaaaaatacaaaaattagctgggcgtggtggtgggtg

SEQ ID NO: 36342 - DNA, 424 bp, Homo sapiens
ctactatagggcgaattggagctccaccgcggtggcggccgcccgggcaggtacgcgggatctctgggagacttgaataaaagactttgcttggtagaaaatcatgtcacagaaaggctaatagacagcaaagtaaatcagcaagtccctgagcagtaggattaggattcctgtctcctttcaaattcaaatgcatttgtttctggggttaacagtggactgttaagaggctgtgcagcttgggttaagtcattcttatctctgggcttcaggagcttagaccagatagtttctacaggctctcttggtgctgatgccttgggattctgtggctgttttctgtaagatctgcaagggggaaacaggattttggcagcaatcctttcattactaaagcttcctttcttttcgggtacctcggccg

SEQ ID NO: 36343 - DNA, 227 bp, Homo sapiens
gcgaattggagctccaccgcggtggcggccacagaatcaggggataacgcaggaaagaacatgtgagcaaaaggccagcaaaaggccaggaaccgtaaaaaggccgagttgctggcgtttttccataggctccgcccccctgacgagcatcacaaaaatcgacgctcaaagtcagaagtggtcgaaaacccgacaggcactataaaggataccagcgcgtttccccc

SEQ ID NO: 36344 - DNA, 490 bp, Homo sapiens
  misc_feature 15, 192, 196, 224, 260, 369: n = A,T,C or G
tacgactcactatanggcgaattggagctccaccgcggtggcggccgagtactttttctttttttctttttttttgagatgtagtgtcgctctgtcatccaatctggaacgcagtggtgccatcttggctcactgcaacctccgcctcacaggttcaagcaattctcctgcctcactacttggaaggctgangcangagaatggtgtgaaccctgaaggctgancttgcagtgaaccaaaatcataccactgcactccancctagacaatacagtaaaattccatctcaaaaaaataaaaataaataaaaatctacctactactaatatatattataaaacctttatatatttctctaaaaaaaaccantataaaactaacctttaaaacctaatatccaactttatttccaacacctttcccaacctaataaacttagtaaaaacactactatccttacaccttaaataaacaactttaatatctctat

SEQ ID NO: 36345 - DNA, 651 bp, Homo sapiens
gtaatacgactcactatagggcgaattggagctccaccgcggtggcggccgaggtacattttaaaatgcgatttttccggagaatattgctctgtgctggatttttatttcttttacttaacagccaattttgaagttaattattttatttaaatactagaaaaagtagttaatgttgccaaatttaggagaaaaatctgtcaattaacatttagattatctgaagttatatttcttttcctagtgatagaggcactttttttaaactgtgaaaaggatgttgtagttgtgttcagccctttccaatttgatttattaaaggtttcctttcataatccaggaggggaagggtggaattactccagtatcacatctctctaataagaaaatttcagctgatttaggaatcttctccgcataaaagtaaaattttcttaaaaaatatcatcacttgttcttttagtgttttcctgttcccattgtgccaggcacacttgtttggctttggaaacttcgtggaatagtgaaaaaatgggtgttgtttcagattctaatgctgctacatgttaactttgtgactttggataagtgactttatccctgacctttattttctttgcttttaaaatggggaaaaggacttttagctta

SEQ ID NO: 36346 - DNA, 627 bp, Homo sapiens
ctatagggcgaattgtgccctctagatgcatgctcgagcggccgccagtgtgatggatatctgcagaattcgccctttcgagcggccgcccgggcaggtactccttccggatgtgcaaagcatactgatgaaacagagtatctgaaaagctgtccccaggaatcacgaaggctcagtcactgctgctataccattaaagaaacaaaaaacaaaagctgccctaaacatatgcagcgcgatcaatgcctcctgttgccccatatgttttacaatcatttgaaagaaatgtgcgaaaggcgcctaagctgtttttctttaaaaaaaaaaaaaaaaaagtgtattgctagtattgtctgagaacaagagagaaacagccaaatggtcacaacattcagattaacagctatccagtggggacaaagacaaggttaatgtgagatttgacatcgttacctagccaagttgggggtttaattccttactgtccccactagaaactatggcttagatctgtcccggggagctggtcttcttggataaggcaactcagccaggacacagtgggattgaacctactgctggttggttcttgcagagaaccctcaccctgaacaggagctgggtcaa

SEQ ID NO: 36347 - DNA, 363 bp, Homo sapiens
acgactcacttagggcgaattggagctccacgaggtggcggtcgcccgggcaggtacaaagactattgtatagactatccgggttagtttgcaagggaagccaatgatgagtaatttgaaagaaattcacctggtgagcaatgaggaccttactgttgctgcctttaaagctgattaagaatttattcctagggaagagtgagctggtacaagaaaccaccccttctttcaatgcaatggacgtgaacaacctgaccctacagattgtccagggccacattgaatggtaggcggaagatgtaattgataattttgtaaacccacatgatattacagtatggacctgtagcaaattcaatttat

SEQ ID NO: 36348 - DNA, 434 bp, Homo sapiens
tacgactcactatagggcgaattggagctccaccgcggtggcggccggaatcgctgcaccagaccaggcccccagggcccagctactcgaagaacagccaatggattggaacgtcctaggacagatgccacggctttgacccaggctgggggtgcacggatctcactggggttagttggtcggaggggaaagccccatgggtccaccaggatgaggtgtttaactctatcagggtacctcggccgctctagaactagtggatcccccgggctgcaggaattcgatatcaagcttatcgataccgtcgacctcgagggggggcccggtacccagcttttgttccctttagtgagggttaattgcgcgcttggcgtaatcatggtcatagctgtttcctgtgtgaaattgttatccgctcacaattccacacaaca

SEQ ID NO: 36349 - DNA, 642 bp, Homo sapiens
  misc_feature 383: n = A,T,C or G
ggcgaattgggccctctagatgcatgctcgagcggccgccagtgtgatggatatctgcagaattcgccctttcgagcggccgcccgggcaggtacaaccagaaccagcaattgtatttctctatagttattttaaaatagtaatcaatgctatgtatttgatgtatatgttctaaattagaaatttcttttggctttgtgttttttttatgtgcgttaaatatgtaaactgaacctgttcctaaaatgcattaaacttaaatgctgtgtctatccaatgccaaaatgctcagaagaaaagtgaataattcagtcattcatctggatgtagttttctgtgtaatctcaaatatctgaatattgaaaaaactaggttgctaactnttttcattccttatgcaaatgtttagcatcatagtgctgtttcagatacagatctgtttcatcaaatatcctcaattacaagtctaagacagttatatgtaaagaaaatgtattattttagatgaacaatgtggataactgaactaaaacgatatttgtgaactttgctataatgaaatcttttatttttatagctcaagtattgtaattagcactaattgcagcagagactgaaataattattgacaccgtagagtac

SEQ ID NO: 36350 - DNA, 270 bp, Homo sapiens
ctactatagggcgaattggagctccaccgcggtggcggccgaggtacctgaggtagctggagacaatagactgtcagggaaacgggaatctgaaacgcgtctgaactggttagatttgaaggcagtaaagtttctgccagcattgaaggatgagacactggcagtccacagtatctggtggtgaaagagatacttaaattatcccctgtgcttgtgggaaataaagtgcccattgaaggaaggctttggcaggctacatgtctactgtcg

SEQ ID NO: 36351 - DNA, 532 bp, Homo sapiens
  misc_feature 349: n = A,T,C or G
tactatagggcgaattggagctccaccgcggtggcggccgcagcttctgctccgaccgctgctccgatcgtggcgccggtggcccaggccgccgaggaagcgccgaaagtcgtgcgcacccgcgccgtgcgccgcgtcgagaccagcccggcagcccccgtgagcgccgtcggcgccgtagcaagacaccgacgccgccgcgctggccgcgatcgacacctcgggctacctgctgccgcaggtgaaggtcccgggccgccgcggccgcaagccgagcgagttcgtgccggagaacgatgaagtcgcggcgctgaacgccgtcgagcgcgccgaactgaaggcggcctcnaaggcgcgcgagcgcaaggccaagggcctcggcatgctgaatgaagccggtttttcggaagccgaactcgaaaagcgcctgcagcagctgaagaacctgatcaatatgggcaaggagcgcggctacctgacccatgccgagatcaacgaccacctgccggaaaacataatcgatccggaagcg

SEQ ID NO: 36352 - DNA, 403 bp, Homo sapiens
gcgtatacgactcactatagggcgaattggagctccaccgcggtggcggccgaggtacttacgttgcctcgtgtcaccaaaattggtgtggctgctgtggtgcggggggctgcactgatggcaccccttcctgtcttcatcaagcagctgccgttctgccgctccaatatcctttcccattcctactgcctacaccaagatgtcatgaagctggcctgtgatgatatccgggtcaatgtcgtctatggccttatcgtcatcatctccgccattggcctggactcacttctcatctccttctcatatctgcttattcctaagactgtgttgggcttgacacgtgaagcccaggccaaggcatttggcacttgcgtctctcatgtgtgtgctgtgttcatattct

SEQ ID NO: 36353 - DNA, 374 bp, Homo sapiens
atacgactactatagggcgaattggagctccaccgcggtggcggccgcccgggcaggtacctatcaaactttacaatgttatttgtgtttccttctatttggtttagcaatttaaaatgtttatcgtgtaggtaattcctgagtgtgtgtttgttactatggcaggtttattttttttagcctgtaagtttgtgtcttaaatattatttagtatgccttagttgagatgatcttttgttgagtttttgcaaaaggcaaattttaggccatgagcggtggctcatgcctgtaatcccagcacgttgggagtccaaggcaggtggatcacatgatgtcaggagtccgagaccaacatattgaaaccctgtctctac

SEQ ID NO: 36354 - DNA, 436 bp, Homo sapiens
gtaatacactactatagggcgaattggagctccaccgcggtggcggccgaggtacatagaatatgaacacagcacacacatgagagacgcaagtgccaaatgccttggcctgggcttcacgtgtcaggcccaacacagtcttaagaataagcagatatgagaaggagatgagaagtgagtccaggccaatggcggagatgatgacgataaggccatagacgacattgacccggatatcatcacaggccagcttcatgacatcttggtgtaggcagtaggaatgggaaaggatattggagcggcagaagggcagctgcttgatgaagacaggaaggggtgccatcagtgcagccccccgcaccacagcagccacaccaattttggtgacacgaggcaacgtaagtacctcggccgctctagaactagtggatccccc

SEQ ID NO: 36355 - DNA, 617 bp, Homo sapiens
  misc_feature 359: n = A,T,C or G
cgcgcgtaatacgactcactatagggcgaattggagctccaccgcggtggcggccgcccgggcaggtacaaccagaaccaacaattgtatttctctatagttattttaaaatagtaatcaatgctatgtatttgatgtatatgtttctaaattagaaatttcttttggctttgtgttttttttatgtgcgtaaatatgtaaactgaacctgttcctaaaatgcattaaacttgaatgctgtgtctatccaatgccaaaatgctcagaagaaaagtgaataattcagtcattcatctggatgtagttttctgtgtaatctcaaatatctgaatattgaaaaaactaggttgctaactttnttcattccttatgcaaatgtttagcatcatagtgctgtttcagatacagatctgtttcatcaaatatcctcaattacaagtctaagacagttatatgtaaagaaaatgtattattttagatgaacaatgtggataactgaactaaaacgatatttgtgaactttgctataatgaaatcttttatttttatagctcaagtattgtaattagcactaattgcagcaaagactgaaataattattgacaccgtagagtacc

SEQ ID NO: 36356 - DNA, 655 bp, Homo sapiens
cgtatacgactcactatagggcgaattggagctccaccgcggtggcggccgaggtacccattgcccgaatagtgaacactctacccagtcgtttttcatccctcactttcctaccaccctccaacattttggagcctccagtgtctcttattccactctgtatacccatcgtttagctcccatttccaaatgagaacatgcagtttctgactttctgtctctgagtcatttcacttacgataagggcttctagttccatccatattgctgcaaaagatgtgatttcattatttttgatggttgcgtatgtattccatggtatatatgcacattttaaaatctaatcatctgttgatggacacataggttcagcccatgatgttgctattgcgaatagtgaacagttgattattagactgaagagagaaaaggccttcctcccccatgacttaacaggaacgaaggacgttgcatttataaaaggatggccatcaccagctactgggtaggctgaggcttttgatcaccataggttgcaattggtgtgttaggtggacgagggcaagaggatatggtaattagaaatatctaagttacacagcacgtagtttttaggaaactggaaatcacacacacataaatctaataaagacat

SEQ ID NO: 36357 - DNA, 637 bp, Homo sapiens
  misc_feature 25, 471: n = A,T,C or G
tacgactcactatagggcgaatggngccctctagatgcatgctcgagcggccgccagtgtgatggatatctgcagaattcgccctttcgagcggccgcccgggcaggtacccgaaaagaaaggaagctttagtaatgaaaggattgctgccaaaatcctgtttcccccttgcagatcttacagaaaacagccacagaatcccaaggcatcagcaccaagagagcctgtagaaactatctggtctaagctcctgaagcccagagataagaatgacttaacccaagctgcacagcctcttaacagtccactgttaaccccagaaacagatgcatttgaatctgaaaggagacaggaatcctaatcctactgctcagggacttgctgatttactttgctgtctattagcctttctgtgacatgattttctaccaagcaaagtcttttattcaagtctcccagagatttcctatntaagcgtttgctatttggccacttaaaaaagacagaagagaagtaaacagaagcatataccacacaactcagtccagtcagtagttgactctcaagatggcggatgtcactgagatggctgagaaataggaacggatgtggggaaaggagtggcaatggagttagc

SEQ ID NO: 36358 - DNA, 432 bp, Homo sapiens
gtaatacgactcactatagggcgaattggagctccaccgcggtggcggccgcccgggcaggtacatctagagaacatttgccaaaggcctaagcacggcaaaggaaaataaacacagaatataataaaatgagataatctagcttaaaactataacttcctcttcagaactcccaaccacattggatctcagaaaaatactgtcttcaaaatgacttctacagagaagaaataatttttcctctggacactagcacttaaggggaagattggaagtaaagccttgaaaagagtaccccggccgctctagaactagtggatcccccgggctgcaggaattcgatatcaagcttatcgataccgtcgacctcgagggggggcccggtacccagcttttgttccctttagtgagggttaattgcgcgcttggcgt

SEQ ID NO: 36359 - DNA, 411 bp, Homo sapiens
tatagggcgaattggagctccaccgcggtggcggccgaggtactcttttcaaggctttacttccaatcttccccttaagtgctagtgtccagaggaaaaattatttcttctctgtagaagtcattttgaagacagtatttttctgagatccaatgtggttgggagttctgaagaggaagttatagttttaagctagattatctcattttattatattctgtgtttattttcctttgccgtgcctaggcctttggcgaatgttctctagatgtacctgcccgggcggccgctctagaactagtggatcccccgggctgcaggaattcgatatcaagcttatcgataccgtcgacctcgaggggggggcccggtacccagctttttgttccctttagtgaggggttaattgcg

SEQ ID NO: 36360 - DNA, 314 bp, Homo sapiens
cgtaatacactactatagggcgaattggagctccaccgcggtggcggccgaggtacactctagcattgtaactttttccccctgagaagtaattttaagatctatcagtctcaatttaaatgatctgttaatcagccagagttttagtttcataatatcgttccattgcctgacaaagatatacccactgaagtgcctttagcagacctgggaccgtcaagaatcttgttaccctgattattgcaagatgacatatttcttaagccatttataatctcatattcgggttgaatctgaatttacaaataaaaggg

SEQ ID NO: 36361 - DNA, 556 bp, Homo sapiens
tactatagggcgaattggagctccaccgcggtggcggccggtggatccccttttagtccaagctggttccatctctgccatgtctctcctttatatctcaccaatagcgatatatttcacgttgttatctttttcctaggataaaaattctgtgttaattttagtttttaatttgagtttaccattaatgaacatcaaagaataatggacttttaaactcgggctgggaatgagtgtgtgtgagtgtacctcggccgctctagaactagtggatcccccgggctgcaggaattcgatatcaagcttatcgataccgtcgacctcgagggggggcccggtacccagcttttgttccctttagtgagggttaattgcgcgcttggcgtaatcatggtcatagctgtttcctgtgtgaaattgttatccgctcacaattccacacaacatacgagccgggagcataaagtgtaaagcctgtggtgcctaatgagtgagctaactcacattaattgcgttgcgctcactgcccgcttttcagtcgggaaacctgtcgtgc

SEQ ID NO: 36362 - DNA, 684 bp, Homo sapiens
atacgactcactatagggcgaattggagctccaccgcggtggcggccgcccgggcaggtactaccttctctgctacaagtcgagcgaggagccccgcatgagccctgacacctgtgccaccattttggaaaaagctggtctcgataactgggctcttggaaaaacaaaagtgttccttaagtattatcacgtggagcagttaaatctaatgcgaaaggaagctattgacaagcttattttgattcaagcttgtgtcagagcattcttgtgttcaagaagataccaaaaaatacaggagaaaaggaaagaaagcgctataataatacagtcagctgcaagaggacaccttgtcaggaaacaaagaaaagaaattgttgacatgaaaaacacagcagtaacaaccattcaaacttctgatcaggaattcgactacaagaaaaactttgaaaatacaaggtgtctgtaaaggagaggagccaaaaatattgagacccccaagacgaccccggaaacccaaaaaaaaaaaaaaaaaaaaaagtacctcggccgctctagaactagtggatcccccgggctgcaggaattcgatatcaagcttatcgataccgtcgacctcgagggggggcccggtacccagcctttgttccctttagtgagggttaattgcgcgcttggcgtaatcat

SEQ ID NO: 36363 - DNA, 426 bp, Homo sapiens
cgactactatagggcgaattggagctccaccgcggtggcggccgaggtacttttttttttttttgtaacatacaagggaaatgactatagattaaggccatagaagaggtgaagcattgttcctcatggatgcatcaaatgggaatgtattcataggtagagatgaaccattggagaaagaaagtttcaaaagaaatttcgaagaaatcagtgaaagtaatggaccaagttccatagattagaataaaaaattacatagtatttataatccaatagaaagacatttttatttaagagataagaagggagtaaaagtggactggtgaagatatgttggacaggggtaaaaaccaatggagaaatatgtgaataatatttttttgaacttcttttgtgagtgatgctttgtacctgcccgggcggccg

SEQ ID NO: 36364 - DNA, 442 bp, Homo sapiens
ctatagggcgaattggagctccaccgcggtggcggccgaggtacatggtctcaaaactagttagtgtttgagcaagaatctgaacccaggtcagtcacacatgatagccataccattgacaatagcatggagaatactgatgacactataaggtctagttcagcagattaagacagccacaagctatagcttataatagtgcaatgaaagaggagcatcattgtaatccgagtgggcagaaaaattagttgagagaatatagcttatttcacaagagagaaaatgaaagtatatatggattggagaggatgggtcggaaagattctagagtgaaggctgcacaaaagagaagcttgggggaaatttagtgcctccttctaaggatattcattagtccccctcttgtcttgaatataaacacttaagatttttttcaatgtaa

SEQ ID NO: 36365 - DNA, 149 bp, Homo sapiens
actatagggcgaattggagctccaccgcggtggcggccgaggtacatagaatatgaacacagcacacacatgagagacgcaagtgccaaatgccttggcctgggcttcacgtgtcaagcccaacacagtcttaagaataagcagatatg

SEQ ID NO: 36366 - DNA, 429 bp, Homo sapiens
cactactatagggcgaattggagctccaccgcggtggcggccgaggtacagtggcacgatctcggctcactgcaagctccgcctcccgggttcacgccattctcctgcctcagcctcccaagtagctgggactacaggcgcccgccactacgcccggctaattttttgtatttttagtagagacggggtttcaccgttttagccgggatggtctcgatctcctgacctcgtgatccgcccgcctcggcctcccaaagtgctgggattacaggcgtgagcaattactgtgtttcttatccatgtagtgtgcatgcagtgacggcatcctaatacgggtcctccttctagcatagatatggggatcagcacaaacaaagcaaacagtagcattcttacagccagcatggacagtaaaggcatttagggggt

SEQ ID NO: 36367 - DNA, 565 bp, Homo sapiens
  misc_feature 380: n = A,T,C or G
gcgcgtaatacgactcactatagggcgaattggagctccaccgcggtggcggccgaagtaccactgctccctggctaatttttgtattttttgtaaagagagggttttgccatgttgcccaggctggtcttgaaatcctggactcaagtgctccgcccgccttggtgtcacagtgctggcattacaagcactttgtaatcttgaaaatggctctcatgagccaccctgctaggccaaaactggaagtatttaatggaactttgaaagggtaaaaagaaacaaagagcttctgccacagaagacaatccagctgatcctacagaaagtgacagaacacccgcgtacctgcccgggcggccgctctagaactagtggatccnccgggctgcaggaattcgatatcaagcttatcgataccgtcgacctcgagggggggcccggtacccagcttttgttccctttagtgagggttaattgcgcgcttggcgtaatcatggtcatagctgtttcctgtgtgaaattgttatccgctcacaattccacacaacatacgagccgggagcat

SEQ ID NO: 36368 - DNA, 356 bp, Homo sapiens
tacgactcactatagggcgaattggagctccaccgcggtggcggccgaggtaccaggctatatatggtattaaaattttttaaatttccaattgtttattactagtatataaaaatacaattaatttttgaatattaatcaaaacaaaaagcaaaactgctacactcacttattaattctagtaactttttgtaagaccgttgagtattctacatagacaatcatgttgtctgtgaacaaaaacagtttgtttcctttcctatctgggtgctttttgtttctgtttctaggcttattgcactggctagaacctccagtacctgcccgggcggccggtctagaactagtggatcccc

SEQ ID NO: 36369 - DNA, 427 bp, Homo sapiens
tatagggcgaattggagctccaccgcggtggcggccgaggtacatagaatatgaacacagcacacacatgagagacgcaagtgccaaatgccttggcctgggcttcacgtgtcaagcccaacacagtcttaagaataagcagatatgagaaggagatgagaagtgagtccaggccaatggcggagatgatgacgataaggccatagacgacattgacccggatatcatcacaggccagcttcatgacatcttggtgtaggcagtaggaatgggaaaggatattggagcggcagaagggcagctgcttgatgaagacaggaaggggtgccatcagtgcagccccccgcaccacagcagccacaccaattttggtgacacgaggcaacgtaagtacctgccccgggggccgttctagaactagtggatc

SEQ ID NO: 36370 - DNA, 286 bp, Homo sapiens
gcgtatacactactatagggcgaattggagctccaccgcggtggcggccgcccgggcaggtaccacaaggtgtctttttacacagctcatttgaatacaggtgttctgagaaggggtttctattttaaaattaccatatcaaaataaatgtgccttatttttttataagtcttgttaaatcagtgtccatattactgtttggggaagggggaatgttgtggggtctgggagagggtgggtacctcggccgctctagaactagtggatcccccgggctgcaggaatt

SEQ ID NO: 36371 - DNA, 197 bp, Homo sapiens
cactactatagggcgaattggagctccaccgcggtggcggccgaggtacatgtagagaacatttgccaaaggcctaagcacggcaaaggaaaataaacacagaatataataaaatgagataatctagcttaaaactataacttcctcttcagaactcccaaccacattggatctcagaaaaatactggtcttcaaaa

SEQ ID NO: 36372 - DNA, 444 bp, Homo sapiens
acgactactatagggcgaattggagctccaccgcggtggcggccgcccgggcaggtaccatggaaacccactctttcattgaaaggaaattaggttgaacctccaggagcccgtcagagtctgaggagaggctggcttcatgtctagatacgacgacagcaaggctgcttagagctaacagcgcattgcctttcactaccggactctcctttgcagctgccttggtgatctcatcagtcagcatgtctctaacccagagccaggctgtgctttttttgtacctcggccgctctagaactagtggatcccccgggctgcaggaattcgatatcaagcttatcgataccgtcgacctcgagggggggcccggtacccagcttttgttccctttagtgagggttaattgcgcgcttggcgtaatcatggtcatagctgtttcctgtg

SEQ ID NO: 36373 - DNA, 549 bp, Homo sapiens
atagggcgaattggagctccaccgcggtggcggccgaggtacccccaggacccgcaaatagtaaatagtgagaagcaaaggctgaggaagcttccgcagagcagggagggcagaggtccacgccggactactatagagctcgtcagaatgaaactggccagttggctttacccaatgccaagcccaaggcattgagtcccaaagaaacactgggagaattggtcactggtgactttttggaaaaggtggccaagagacagaagaggaagaaggcatgcacaccagtgcccggacaccccacgcaccaacctgcccctccgcccacaaaccagcgtgtgaggtggagacctagaggaggagtgccagaatggggatgccaacaagaagttactcaaacggttactgactgtgcaagttactgcccacattccacagtcaatgccccccacccataaaaataatgtaagatggtcataagtacctgcccgggcggccgctctagaactagtggatcccccgggctgcaggaattcgatatcaagcttatcg

SEQ ID NO: 36374 - DNA, 432 bp, Homo sapiens
ctactatagggcgaattggagctccaccgcggtggcggccgaggtacttcttgagagtgctttgttgtttaaactgcttattttttagcttgttttcaagtttgactttactagtttttattaacttgcgaaagcttgggatctgttttttatttcttctcgccttcatccttaggccttaaatgaatgccggccagacaagttcaccagaagcagggttactacagaaatcccggggaatgacacacgtgccgaagtccctacactaccagagccggaaacggccttcagtccctcccaatcctccgccgccggaagtccccgcgtacctgcccgggcggccgctctagaactagtggatcccccgggctgcaggaattcgatatcaagcttatcgataccgtcgacctcgagggggggcccggtacccag

SEQ ID NO: 36375 - DNA, 176 bp, Homo sapiens
actatagggcgaattggagctccaccgcggtggcggccgaggtactggtctctgtctttacagctgaagcatcagaggatggagtgaccaggctggttccaatgacagttatacggccatggggagtagacatggagtctaattcagtgcttgaggctaagaatgaagtttgtatg

SEQ ID NO: 36376 - DNA, 238 bp, Homo sapiens
  misc_feature 196, 197, 214, 215: n = A,T,C or G
ctcactatagggcgaattggagctccaccgcggtggcggccgcccgggcaggtacctgtctgggcaacactgtcccacaggggcccccatgaccaaactaactctgcttctacccagaaagggtgcagagtagccactagacttttatgtggcaaatgggatggttatgcccagcctgaagccaagaaatgccctnnttctggttgccttgatnnttgtgtttaacagctttccaaat

SEQ ID NO: 36377 - DNA, 163 bp, Homo sapiens
ctactatagggcgaattggagctccaccgtggtggcggccgaggtacctatcaaactttacaatgttatttgtgtttccttctatttggtttagcaatttaaaatgtttatcgtgtaggtaattcctgagtgtgtgtttgttactatggctaggttttatttt

SEQ ID NO: 36378 - DNA, 461 bp, Homo sapiens
cgcgtaatacgactcactatagggcgaattggagctccaccgcggtggcggccgaggtactcatggatatttgaaagagaacgtgacaaaaaaattttaaatattttatcatcgctacaaatgtagataaaattaatttttattttttaaagtattttaaaagtagataaaatacactcattatattttacagaaagagttttagagttctgttttagacatgtaagttcttaatctatttgaagttgactttttaatgtggcttgagataatgacccaattttatcttgtcaatatagaaaaccattttttgtggcctgaagcacagtggctcatgcctgttatcccagcactctggaaggctgaggcaggtggatcacttgagcccaggagttggagaccagcctgggcaacttggtgaaaacccatctctacaaaaaatgcaacaattagccaagtgt

SEQ ID NO: 36379 - DNA, 400 bp, Homo sapiens
cactactatagggcgaattggagctccaccgcggtggcggccgtgggcgatctgggggccaggtatgcaagaagggtctctgggctcagccattgcctgggattccagtcacaatgacaggtgttttggcaatttgtatttactcttttgtaaataactttgtgtctataaccttggcttgaagtggatctgaaaaccacccaacggtttgggtgaatttttttttaaaccgtgaaatggtatgttctgtacctcggccgctctagaactagtggatcccccgggctgcaggaattcgatatcaagcttatcgataccgtcgacctcgagggggggcccggtacccagcttttgttccctttagtgagggttaattgcgcgcttggcgtaatcatggtca

SEQ ID NO: 36380 - DNA, 546 bp, Homo sapiens
tacgactcactatagggcgaattggagctccaccgcggtggcggccgaggtacagacaggattgacggggggaatccctaaactttttattctaacaagttttatttatttattttcttttttgacatggagtctcgctctgtcgcccaggctggagtgcaatggcgtggcctcggttcactgcaacctcgcctcccgggtttaagcaattctcctgcctcagcctcccaggtagctgggattacaggtgcatgctactgcgcccggctaatttatgtatttttattagagatggggtttcaccatattggccaggctggtctcaaactcctgacctcaagtgatccactcgcctcggcctcccaaagtgctgggattacaggcgtgactcactgtgcccggccagcaaacaagttttagatttaactttatttgaatgcaatagaaaaaaaattaggcattaaattgaaggggctgctgaacttcagataaatgtttcttcattggttcctaaaagggataaataagccagttattctcaaactc

SEQ ID NO: 36381 - DNA, 483 bp, Homo sapiens
gtggcggccgttgtttactctttaagctaaaatattctctctccacagctgcaattagagagccgcatggtgacctacttgaatcaacaaaatttgagacctgtgattataattctcattatgacgatatataatcaaaagctgtaaatgataataattctcaaaccttctgagattattttaaaatccatcttaatacctcggccgctctagaactagtggatcccccgggctgcaggaattcgatatcaagcttatcgataccgtcgacctcgagggggggcccggtacccagcttttgttccctttagtgagggttaattgcgcgcttggcgtaatcatggtcatagctgtttcctgtgtgaaattgttatccgctcacaattccacacaacatacgagccgggagcataaagtgtaaagcctggggtgcctaatgagtgagctaactcacattaattgcgttgcgctcactgcccgctt

SEQ ID NO: 36382 - DNA, 445 bp, Homo sapiens
tacgactactatagggcgaattggagctccaccgcggtggcggccgcccgggcaggtacatgaataaataatgagtgtttcttgtaggtattggtttggagattgttttacggtagtatgaactgttaactggaaaagaaacctgagattgcagtcagccaagattgtgccactgcaccccagcctgggcaacagagactccgtctcaaaaacaaaaaagaaaagaaaccaagaaacctcaggcatgaacctaatttaatctccatgaaagaggtacctcggccgctctagaactagtggatcccccgggctgcaggaattcgatatcaagcttatcgataccgtcgacctcgagggggggcccggtacccagcttttgttccctttagtgagggttaattgcgcgcttggcgtaatcatggtcatagctgtttcctgtgtgaaa

SEQ ID NO: 36383 - DNA, 288 bp, Homo sapiens
atagggcgatttggagctccaccggccggtgggcggccgaggtactttcctgaatgcctctcctaagtaaatggctctagtttctctattggccactgcactgccactaggattcctgcaagggatccgatgggcccagagcaggtagccaaccacttctctgttggatggaatgcaatgctgtttgccagcatgtttgagccagtccttcaagatggattctgagtgactaactggacctaaatttaaatagctcaaagcagccctttgctaactaggtttcatact

SEQ ID NO: 36384 - DNA, 226 bp, Homo sapiens
ggcgaattggagctccaccgcggtggccggccgcccgggcaggtacccagaaaataagaaagggttccaaaatgaagaatcgctccttttgcaaaccttatggtaacaaatataatatttataaaaagtgaattaggtaatatgttaatggagaaataaacatcattatgaaatgctattttaaacaaaaaattagagaaaatattagtttaaaaataagaactta

SEQ ID NO: 36385 - DNA, 451 bp, Homo sapiens
atacgactcactatagggcgaattggagctccaccgcggtggcggccgcccgggcaggtacagaatatttgccttttgattgccacaaagatgaagaatctggcaccaagactccagggccatgctagtgactttccctcctatctcctgaggacacggtgcttccaactctgaggatcaggatactgaaattgactgtgtgagaagagaaagtgggattttctgtgggaaaagactgttttgagcataattttcaagtaataaatatattctaccaggagacacactgccatcatgctgacggtgtatgttgcttttgacattaacattatgatcatcaatattattggggtgttccctagaaaatgaccaattatcacagaattaacgagtcattttcattttagttttttttcacacttccagctaaatccactgagtttactgagtt

SEQ ID NO: 36386 - DNA, 538 bp, Homo sapiens
  misc_feature 16, 89: n = A,T,C or G
actcactatagggtgnattggagctcaccgcggtggcggccgcccgggcaggtaccagttgagccgagtgcctcaatcccaatatcagntctatacagatacaaggtgatgctgattatttcatcaaccatcttggagttcccatcgtgtagtttgcttacgaggacatcaaaacattagagggtccaagttttctctccgaggcccgtttttctacttttgcaacaaaatttgaagaaatggatcgctctttcaaccttcatgaaaccattactaagctctcaggagaagtgattttgcaaattgccaacgaacctgttctgccctttaatgcacttgatatagctttagaagttcaaaacaaccttaaaggtgatcaacccaacactcatcaactgttagccatggcgtcacgcctgcgggagagtgctgaactttttcagtctgatgagatgcgacctgctaatgatcccaaggagagagcacccatccgcatccggatgctgaatgacattctccaagacatggagaaaagctt

SEQ ID NO: 36387 - DNA, 271 bp, Homo sapiens
cgtaatacactcactatagggcgaattggagctccaccgcggtggcggccgcccgggcaggtactttcaagtcacctggttcccatacagctgacttttcccagcactggaaacacgacgcatgcctagacctttagagaatcctaattttgcccacccccaactgtcctgtaacaaagcttggttcacccaaaaatgccagggagtctcaaacccaaggctagttaaaactattgggaaaggtaggccccctttccacagggattgctaa

SEQ ID NO: 36388 - DNA, 544 bp, Homo sapiens; identical to SEQ ID NO: 36326

SEQ ID NO: 36389 - DNA, 375 bp, Homo sapiens
caccggcgtggcggccgacgtacctgaaggaacgaagaagagggatttctcaaggtgagaagcagttctccatggacactgatgacagcacaggcaaagtttcctatgactagggatcactgtccacacagagtctggcttcccaggtatccagcaggtagacaaaacagctaactccactgccactcctttctccacatccgttccgatttctcagccatctcagtgacatccgccatcttgagagtcaactactgactggactgagttgtgtggtatatgcttctgtttacttctcttctgtcttttttaagtggccaaatagcaaacgcttaaataggaaatctctgggagacttgaataaaagactttgct

SEQ ID NO: 36390 - DNA, 457 bp, Homo sapiens
acgccagcgcgcaattaaccctcactaaagggaacaaaagctgggtaccgggccccccctcgaggtcgacggtatcgataagcttgatatcgaattcctgcagcccgggggatccactagttctagagcctttccccgtcaagctctaaatcgggggctccctttagggttccgatttagtgctttacggcacctcgaccccaaaaaacttgattagggtgatggttcacgtagtgggccatcgccctgatagacggttttttcgccctttgacgttggagtccacgttctttaatagtggactcttgttccaaactggaacaacaccttaaccctatctcggtctattcttttgatttataaggggattttgccgatttcggcctatttggttaaaaaatgagctgatttaacaaaaatttaacgcgaaattttaacaaaatattaacgcttacaa

SEQ ID NO: 36391 - DNA, 544 bp, Homo sapiens; identical to SEQ ID NO: 36326

SEQ ID NO: 36392 - DNA, 411 bp, Homo sapiens
tacgactactatagggcgaattggagctccaccgcggtggcggccgaggtacttagcccttggggaacacaggtagttccttttcactgtgtttaatttgggaaaatccagatccacatcattgtagagtctgagggttagaaggaagtcattgtgtctaacataacaacagagcagtttgtgtcactgagctccagtctgtgctggattattgatattgttggtggcggtcaccattcctggaaagggactgtcccaagccacttaccttcccgaggagtctgctggttctccttgaggatagtgcttagataacagactcattaaacatttactgagtgtctgtcagggatcattcacattcacatcatcctcccggcccctccccgtgttgttcatggagggagtacc

SEQ ID NO: 36393 - DNA, 433 bp, Homo sapiens
ctactatagggcgaattggagctcccccgcgggggcggccgaggtacatagaatatgaacacagcacacacatgagagacgcaagtgccaaatgccttggcctgggcttcacgtgtcaagcccaacacagtcttaagaataagcagatatgagaaggagatgagaagtgagtccaggccaatggcggagatgatgacgataaggccatagacgacattgacccggatatcatcacaggccagcttcatgacatcttggtgtaggcagtaggaatgggaaaggatattggagcggcagaagggcagctgcttgatgaagacaggaaggggtgccatcagtgcagccccccgcaccacagcagccacaccaattttggtgacacgaggcaacgtaagtacctgcccgggcggccgctctagaactagtggatccc

SEQ ID NO: 36394 - DNA, 454 bp, Homo sapiens
cactactatagggcgaattggagctccaccgcggtggcggccgaggtacagtgaaaagagccaaggctgtgtgaccccctcatcacttagccaggcgtatggtcctggtttctgaggctgccagaaagcatcttagcaatttgtgtttggatggtccatgcctgactattctaggctggaggttcctaaagagtaacaagaggaagagaaacaagaatctctgacacttgttgagaatagagcacagtcccatttgtttgaaaagagacaccaggcagccatgtttatgtgccagaaatgcattccacctcaaggaggacttaatttatggacccgtgtgtgccaggctgagctgggcaagatctttctcaggacaaactctgccatgcagctaaaagcctggaaactaagctctagaactagtggatcccccgggctgcaggaattcgatatc

SEQ ID NO: 36395 - DNA, 619 bp, Homo sapiens
gcgaattggagctccaccgcggtggcggccgcccgggcaggtacttcagtcttttatcagttaaaatactaacagatagaaaataacaaagaatagactgttttcctgcctattgtaagacaaaatgaaatgtttactgttggaaacactatacctttttttagcctctctcccctatcttcttattttccttgatggactctttctcttatctgagcaaactttttgtttgtttgtttgactcagtctctcagtgaacagtatagcgacccattagctccagcgttggactctgactgtgtcaagagtagaagtttgaagtgcaattcttatccatcatatttctccaattattaactctcctttactgccttttaaatacttcacaaaatggaaaccccttttgaataagaacagccgattttctgggagatggacaaggaaaagctatggagagatgctgggtttcttagtttaacatgtggctgcttgaaagttgctattagatccagagaaactttttgttaagtgtgattagagttcaaagaaaatgtttatttcttagatacttctattgaaagaaacataaggggtctatatctgtatatctataataaaa

SEQ ID NO: 36396 - DNA, 604 bp, Homo sapiens
  misc_feature 61, 157: n = A,T,C or G
gactactatagggcgaattggagctccaccgcggtggcggccgcccgggcaggtacgcggngaatctaagacctgaaactactgccacagccatgcataaaatgaaatgctgctgctttcctctctgttaaagagaatgttcaaggccgaggacacnataaaaaagagcagcattgctggctctgttattagctgtgtgttcttgaaaaagtcacttctccagacatatctcagcatttataacctaagactgaatcactgcattttacccttaatgaggtacctcggccgctctagaactagtggatcccccgggctgcaggaattcgatatcaagcttatcgataccgtcgacctcgagggggggcccggtacccagcttttgttccctttagtgagggttaattgcgcgcttggcgtaatcatggtcatagctgtttcctgtgtgaaattgttatccgctcacaattccacacaacatacgagccgggagcataaagtgtaaagcctggggtgcctaatgagtgagctaactcacattaattgcgttgcgctcactgcccgctttccagtcgggaaacctgtcgtgccagctgcattaatg

SEQ ID NO: 36397 - DNA, 554 bp, Homo sapiens
cgcgcgtaatacgactcactatagggcgaattggagctccaccgcggtggcggccgcccgggcaggtaccattcttatctcagaatgctgtaaaccatcagtagaagcagtttagatttggactgcatggtaaaatgaaaagtaataaccctccaaccacaacctagtcagggtattaataattatatgtacaagaaaacaaagaagaaaataatattgaaaaaatggagattccccaaccagtttcatatttgaaggatctgagttgtatttttattaaggaaattttttttctgaatactgtcttccaaaatgttaacattaaaatctgaatcagaggactctgaatggaaaagaagtttgatcactgacacctagggctctgaagcgtgtgtggccacatggaaaagtcgaaggatgcgctgtcgaatctcctttgtcttcactccatagacaattgggttgagcacaggaggaaccagcagatagatattggccaagatgatgggcagcggagagtcacgccggttgctaaagcgatgcaccatggacaa

SEQ ID NO: 36398 - DNA, 426 bp, Homo sapiens
ctcactatagggcgaattggagctccaccgcggtggccggggagaggcggtttgcgtattgggcgctcttccgcttcctcgctcactgactcgctgcgctcggtcgttcggctgcggcgagcggtatcagctcactcaaaggcggtaatacggttatccacagaatcaggggataacgcaggaaagaacatgtgagcaaaaggccagcaaaaggccaggaaccgtaaaaaggccgcgttgctggcgtttttccataggctccgcccccctgacgagcatcacaaaaatcgacgctcaagtcagaggtggcgaaacccgacaggactataaagataccaggcgtttccccctggaagctccctcgtgcgctctcctgttccgaccctgccgcttaccggatacctgtccgcctttctcccttcggga

SEQ ID NO: 36399 - DNA, 449 bp, Homo sapiens
gactcactatagggcgaattggagctccaccgcggtggcggccgcccgggcaggtacgcggggaatctaagacctgaaactactgccacagccatgcataaaatgaaatgctgctgctttcctctctgttaaagagaatgttcaaggccgaggacacataaaaaagagcagcattgctggctctgttatttagctgtgtgttcttgaaaaagtcacttctccagacatatctcagcatttataacctaagactgaatcactgcattttacccttaatgaggtacctcggccgctctagaactagtggatcccccgggctgcaggaattcgatatcaagcttatcgataccgtcgacctcgagggggggcccggtacccagcttttgttccctttagtgagggttaattgcgcgcttggcgtaatcatggtcatagctgtttcctgtgtg

SEQ ID NO: 36400 - DNA, 565 bp, Homo sapiens
gactactataggggcgaattggagctccaccgcggtggcggccgccatccacatcttgatacttgcaaagtattctaagtataaatgtataaaggatactcagcaaaaatatccttgaggaattacatattacagcaaatcctaacggatattcttcaagcaaaagaaagatgactccagtgtaagcaaggagcaaggtttcccagaacttggtgggctccggcctcatctctcccccgcgtacctcggccgctctagaactagtggatcccccgggctgcaggaattcgatatcaagcttatcgataccgtcgacctcgagggggggcccggtacccagcttttgttccctttagtgagggttaattgcgcgcttggcgtaatcatggtcatagctgtttcctgtgtgaaattgttatccgctcacaattccacacaacatacgagccgggagcataaagtgtaaagcctgcggtgcctaatgagtgagctaactcacattaattgcgttgcgctcactggccggtttccagtcgggaaacctggcgtgccagctgcattaatg

SEQ ID NO: 36401 - DNA, 486 bp, Homo sapiens
tatagggcgaattggagctccaccgcggtggcggccgaggtacttacgttgcctcgtgtcaccaaaattggtgtggctgctgtggtgcggggggctgcactgatggcaccccttcctgtcttcatcaagcagctgcccttctgccgctccaatatcctttcccattcctactgcctacaccaagatgtcatgaagctggcctgtgatgatatccgggtcaatgtcgtctatggccttatcgtcatcatctccgccattggtctggactcacttctcatctccttctcatatctgcttattcttaagactgtgttgggcttgacacgtgaagcccaggccaaggcatttggcacttgcgtctctcatgtgtgtgctgggttcatattctatgtacctgcccgggcggccgctctagaactagtggatcccccgggctgcaggaattcgatatcaagcttatcgataccgtcgaccttgagggggggc

SEQ ID NO: 36402 - DNA, 632 bp, Homo sapiens
gactactatagggcgaattggagctccaccgcggtggcggccgcccgggcaggtacctatgatttaaatactctccttttaaatactttgtaaaaactgcttttccgagccccttttatgctctgcagttgccatatccactaggtggtattgcaaataagtaaagcatcctggccatgacgctctagtgagaatccctgaccaaagttactctcctcacctcactgcaaacctccaggaagcggaaactactacccctccacagacagagctcccctgccactccatgaggcgctgctgccggcatcagttaccgaagccctcacccacacccagcctgcaatggtccactctatattccacaatacaggaaaaagcccaaggagtcagatcagttacgcccctgggatgcagaaagaaccagtgattcttcagatatgacagcaggcaaagttctgccctctccttcccatcttctatcaggaagcgatcccataaaatctcttccagggaaggaaagaggcagctctggcttcttggagagacagagaagcaagagggtgaggaaggagtcaccaagctatccaagcagccagaggcgagaaggtgggagcagggcaagaagaaaatgc

SEQ ID NO: 36403 - DNA, 464 bp, Homo sapiens
gcgcgtaatacgactactatagggcgaattggagctccaccgcggtggcggccgcccgggcaggtaccttccactttcctacccttccattcagaaaagacaagcagggcatgttaattcaaaagacaaaatgattacaatgccagataccgatctaaaatgtattctgcgttggatatggtctacatccatccatttatacttttgccatggccatatatatcactggtcaagtacctcggccgctctagaactagtggatcccccgggctgcaggaattcgatatcaagcttatcgataccgtcgacctcgagggggggcccggtacccagcttttgttccctttagtgagggttaattgcgcgcttggcgtaatcatggtcatagctgtttcctgtgtgaaattgttatccgctcacaattccacacaacatacgagccgggagcataaagtgtaaagcct

SEQ ID NO: 36404 - DNA, 430 bp, Homo sapiens
tacgactactatagggcgaattggagctccaccgcggtggcggccgggggccattgagactgccatggaagacttgaaaggtcacgtagctgagacttctggagagaccattcaaggcttctggctcctgacaaagatagaccactggaacaatgagaaggagagaattctactggtcacagacaagactctcttgatctgcaaatacgacttcatcatgctgagttgtgtgcagctgcagcggattcctctgagcgctgtctatcgcatctgcctgggcaagttcaccttccctgggatgtccctggacaagagacaaggagaaggccctaggatctactggggaagtccggaggagcagtctcttctgtcccgctggaacccatggtccactgaagttccttatgttactttcactgagcatcctatg

SEQ ID NO: 36405 - DNA, 457 bp, Homo sapiens
ctactatagggcgaattggagctccaccgcggtggcggccgcccgggcaggtactggtctctgtctttacagctgaagcatcagaggatggagtgaccaggctggttccaatgacagttatacggccatggggagtagacatggagtctaattcagtgcttgaggctaagaatgaagttgtatgcattgtggaaattgttccaggagatcttgcaactttcaagtttgaagtcatgtctgtgacagtccaggaatctgatgcagctgtggaagaccaggtggaagggtgttctgtagaagttgtgcgcctctctgtggccggggtgctgtccatggtacctcggccgctctagaactagtggatcccccgggctgcaggaattcgatatcaagcttatcgataccgtcgacctcgagggggggcccggtacccagcttttgttccctttagtgaggg

SEQ ID NO: 36406 - DNA, 587 bp, Homo sapiens
tacgactcactatagggcgaattggagctccaccgcggtggcggccgaggtacaatttatatgtattaattataaccaattagaaaatataacaggagaatgagttttatatttcaactaaagctataagatctttctgcatacattaaacaaaatatgtgcacgttgcttggttttgattttcttggttcatttggctggttttagaggaaacttggaaatacagctgagggacatgaaagaaaatattagtgagtggagtgattcaccacattcttaaatggaaaaactagtgttgatttaagaaagatgtcaggccgggcgcggtggctcacgcctgtaatcccagcactttgggaggccgaggcaggcggatcacaagatcaggagttcaagaccagcctggccaacatattgaaaccccgtctctattaaaaataaaaaaattagcttggcttggtggcgggcacctgtaatcccagctactcgggaggctgaagcaggagaatcgcttgaacctgggaggcggagtttgcagtgagccaagaatgcgccattgcactccagcctgggtgacagtgtgagac

SEQ ID NO: 36407 - DNA, 479 bp, Homo sapiens
ctatagggcgaattggagctccaccgcggtggcggccgaggtactttgtaattatatttgggtgatgatttgacaatgtctatactaaatcatgaagctatacgtttcatgaaagcaagaactgtgtctaatttgccactacttgtatcctggcacataatatatattcatttgttgagaaaataaatgaataaataaatttgaattttgtctacttcatataatggatcaggaccttaaaaaaccatcatttaacagtatttatatctcacggactagtgttttgcatttacttccagccacaggatgctacttgattccccaactatggcaggtaattgggtgtaggcttggggcagggaatctgaaatcaatgagatcccaggacactggttattgtagttctttccccttcccctaaactgttggcaaacaaagtcaaacaaacattcctcaggatactccagaaaactcgatgt

SEQ ID NO: 36408 - DNA, 612 bp, Homo sapiens
gcgtaatacgactcactatagggcgaattggagctccaccgcggtggcggccgaggtacttgataccatgcctagtgcatagttggtgcccaattaatacatgattggattatagcataatcactgatcactacatttaaagcagtccaatagtggaacaggctgcctcacaaatagtgagctctcgtttcttacacagattctactatgggccaggatctcagccaagcagtggagccagaggctggacagacacaagcagagattttggaaaaagactgagtccctctcagcacttcaaagatcccttccaacacccaaacatcaaaagccatgttatattgccaagcaagggtgcctatgaacgcctgttgaaaccccacaacaattttttcagccatttattaaaaccccaaagagactatcaggacttcagggcaaacatcctagagatagcaatgcccccagcaagaagaaaagagttctcagtctgagaggcacaaactgtaatcagtgtaattaacagcttaccctcacctctagccaggcgtttcttcaagattctagggtttccagtccttacagaacattctcaagtcagcaggctacact

SEQ ID NO: 36409 - DNA, 528 bp, Homo sapiens
ctcactatagggcgaattggagctccaccgcggtggcggccgcccgggcaggtacctgggaccccaccacctacatcaccactacggatcctaaggatacaagttcagctcaggtctctacaccccactcagtgaggacactcagaaccacagaaaaccatccaaagacagagtccgcaccccagctgcttactctggaagtcctaaaatctcaagttcacccaatctcaccagtccggccacaaaagcatggaccatcacagacacaactgaacactccactcaattacattacacaaatttggcagaaaaatcatctggatttgagacacagtcagctccaggacctgcctctgtagtaatccctacctcccctaccattggaagcagcacattggaactaacttctgatgtcccaggggaacccctggtccttgctcccagtgagcagaccacaatcactctccccatggcaacatggctgagtacctcggccgctctagaactagtggatcccccgggctgcag

SEQ ID NO: 36410 - DNA, 436 bp, Homo sapiens
tacgactactatagggcgaattggagctccaccgcggtggcggccgcccgggcaggtactcttttcaaggctttacttccaatcttccccttaagtgctagtgtccagaggaaaaattatttcttctctgtagaagtcattttgaagacagtatttttctgagatccaatgtggttgggagttctgaagaggaagttatagttttaagctagattatctcattttattatattctgtgtttattttcctttgctgtgcttaggcctttggcaaatgttctctagatgtacctcggccgctctagaactagtggatcccccgggctgcaggaattcgatatcaagcttatcgataccgtcgacctcgagggggggcccggtacccagcttttgttccctttagtgagggttaattgcgcgcttggcgtaatcatggt

SEQ ID NO: 36411 - DNA, 541 bp, Homo sapiens
cgcgcgtaatacgactcactatagggcgaattggagctccaccgcggtggcggccgcccgggcaggtacttgtgaaaggaaaatacatggtgcttgaatatagcagggaggcctgctgaagtcagagagggtgatctttaggaaaggctttcctgaagaagtggcactggtgaaatgatggctgaagcatgaatagaagtttcctaggaaggctgggtgtgtggtgtgtggtgtggtgtgtgtggcgaagtgctgggattacaggagtgagctgccgtgcccagccggcaaagttgattctgaaaccctgtattacctcaataatcgttgaagtgcctattatatgcaatgcaacacagccgggtggctaatgctgtgagcaccggatccatgtgttaaaatcctggctgtcctacctgctagctgtgggaacttgaggaaggcacttggacttatctggtcctcagtttctctatattgtaaaatggaaattaatcataactacttcctgagggtgctggcagcagtaaacaatgataaa

SEQ ID NO: 36412 - DNA, 623 bp, Homo sapiens
  misc_feature 14: n = A,T,C or G
acgactcactatanggcgaattggagctccaccgcggtggcggccgcccggcaggtacttacgttgcctcgtgtcaccaaaattggtgtggctgctgtggtgcggggggctgcactgatggcaccccttcctgtcttcatcaagcagctgcccttctgccgctccaatatcctttcccattcctactgcctacaccaagatgtcatgaagctggcctgtgatgatatccgggtcaatgtcgtctatggccttatcgtcatcatctccgccattggcctggactcacttctcatctccttctcatatctgcttattcttaagactgtgttgggcttgacacgtgaagcccaggccaaggcatttggcacttgcgtctctcatgtgtgtgctgtgttcatattctatgtacctcggccgctctagaactagtggatcccccgggctgcaggaattcgatatcaagcttatcgataccgtcgacctcgagggggggcccggtacccagcttttgttccctttagtgagggttaattgcgcgcttggcgtaatcatggtcatagctgtttcctgtgtgaaattgttatccgctcacaattccacacaacatacgagccgggagcata

SEQ ID NO: 36413 - DNA, 436 bp, Homo sapiens; identical to SEQ ID NO: 36410

SEQ ID NO: 36414 - DNA, 392 bp, Homo sapiens
attggagctccaccgcggtggcggccgaggtacagtgaaaagagccaaggctgtgtgaccccctcatcacttagccaggcgtatggtcctggtttctgaggctgccagaaagcatcttagcaatttgtgtttggatggtccatgcctgactattctaggctggaggttcctaaagagtaacaagaggaagagaaacaagaatctctgacacttgttgagaatagagcacagtcccatttgtttgaaaagagacaccaggcagccatgtttatgtgccagaaatgcattccacctcaaggaggacttaatttatggacccgtgtgtgccaggctgagctgggcaagatctttctcaggacaaactctgccatgcagctaaaagcctggaaact

SEQ ID NO: 36415 - DNA, 553 bp, Homo sapiens
gcgcgtaatacgactcactatagggcgaattggagctccaccgcggtggcggccgaggacgcgggtgaagaggacaggagtagttcttgtctgcaggctaaactgacagatctacaggtcataaaaaatgaaactgatgctcgctggaaagagtttgaaattatttcattgaagttagaaaatcatgtgaatgacataaaaaagccttttgtaattaaggaaagagacacactaaaggaaagagaaagagagcttcagatgactcttaataccagaatggaatctttagagacagcactgcggcttgtgttacctgtagagaaggcatcacttcttctctgtggctcggacctgcctctccataaaatggccatccagggatttcatctcattgatgctgatcgcatctatcaacacctaaggaatatccaagattccatagcaaaacagattgaaatatgtaaccgcttagaagagccaggcaactttgtattaaaggagttacacccatttgatctacacgcaatgcagaatattatactgaaatacaaaa

SEQ ID NO: 36416 - DNA, 557 bp, Homo sapiens
  misc_feature 373: n = A,T,C or G
agctccaccgcggtggcggccgggtcaaatgtaatcaccaaagaaatctgtcacataaaaacactggtggcatttctcaagtgatgcccattactcttgactttactatgtcaatggaacacgcagctaagggcttctacatcttggaatggcagtctcagacttgcccacctcttaaattagacatgaaatagaaacatagaatagatgctactctaaagtcacaatggaaatgcccaacacatttcacaaatacaattatatgtaaacaaaaagagaactctatgtatcaaaatgactttgcaagtttaaatacaatattgatgcatctatggcaattttcacatagcccttgaaaagcaccaggtagctnggtgttattatatgactctatcccctagaaaagaatgaacaggtctgaaaagaccttctagattattcacatgagaaaaagggtaagaaaataatagttaccaataatataacctgtgatgttggagaaacctggaagggcatttatagtctaatatgatattaattactaagttaaacatttt

SEQ ID NO: 36417 - DNA, 245 bp, Homo sapiens
agggcgaattggagctttaccgcggtggcaaccgtaaaaaggccgcgttgctggcgtttttccataggctccgcccccctgacgagcatcacaaaaatcgacgctcaagtcagaggtggcgaaacccgacaggactataaagataccaggccgtttccccctggaagcttccctcgtgcgctctcctgttcccgacccttgccgctttacccggataccttgtaccgccctttcttcccttcggg

SEQ ID NO: 36418 - DNA, 557 bp, Homo sapiens
tacgactcactatagggcgaattggagctccaccgcggtggcggccgaggtaccatgcacaccaactcagagatggaaagaacctaggcattgcaatcagttatgacttgtgtgggcataataatttttgggggaaattaaacactcacaaaagagctgtcgaagacctaagggtcaactttgcaaggcatgcagcctaggttcaacctgcagcttttcccagtggaatctggcccatgcattttctcatagtttttcccccacagatccagaaagaaaccaaagacagcctagtctcagagtgccccatcaaactttcaaatacagaaaaaagaggggagactttcagcattttaacctttccatttaaaatttttttaggcagacagatttttcttatctataagttaatgagaaatgttgaggtctatggaatttaaaaattaacccttatatgtcttcataaaactccagacactattggctgggtacctgcccgggcggccgctctagaactagtggatcccccgggctgcaagaattcgatatcaagctta

SEQ ID NO: 36419 - DNA, 398 bp, Homo sapiens
atacgactactatagggcgaattggagctccaccgcggtggcggccgaggtacgcggggacagattctccgggatattaccggagacggagtgttttattattagcctttcttaggtggacatttccatttgaattaaaagtcctttaggctgggcgtggtgtatggctgtaatctcagcaccttgggaggctgaggcaggaagatcacttgaggccaggcgttggagagcagcctgggcaaggtggcaagaaccttgtctctacaaaaaaaagcgtctgccatcatggatgttctcgcagaagcaaatggcacctttgccttaaaccttttgaaaacgctgggtaaagacaactcgaagaatgtgtttttctcacccatgagcatgtcctgtgccct

SEQ ID NO: 36420 - DNA, 582 bp, Homo sapiens
agggcgaattggagctccaccgcggtggcggccgtcggctcccagctactcacagagaacgtttctgtttctgacagcagagtaagagaagaggtgagaatagagacagcccattctcttttggcctaattcctaaggaatcatgcctctgccttcgggccattctcaagtcttgttcaaggataaaatgatttattgatggccgtaattaaaaagcaatgccaacggaagcagcgtcagcatttttcatttgtacctcggccgctctagaactagtggatcccccgggctgcaggaattcgatatcaagcttatcgataccgtcgacctcgagggggggcccggtacccagcttttgttccctttagtgagggttaattgcgcgcttggcgtaatcatggtcatagctgtttcctgtgtgaaattgttatccgctcacaattccacacaacatacgagccgggagcataaagtgtaaagcctgcggtgcctaatgagtgagctaactcacattaattgcgttgcgctcactgcccgctgtccagtcgggaaacctgtcgtgcccactgcattaatgaatcg

SEQ ID NO: 36421 - DNA, 458 bp, Homo sapiens
tacgactactatagggcgaattggagctccaccgcggtggcggccgaggtacgcgggaggccgaatgctggtcctttccatatgaatgctccctaaactatcccgcatcatgttcatctgatacacaactgtgtataactatggctgcccctgcatgctgtgacatgcatgccaatcttatccacacatagctagcagacatttggcgacgaaactcaccataaagatgcactttttaatagtggttggattacacacatacaatcctcttctaccttaactgttctctgagataaattgaaaggaattgactattccgcatgaccctagacatgggacctgtcccgtgtaaagcctggggtgcctaatgagtgagctaactcacattaattgcgttgcgctcactgcccgctttccagtcgggaaacctgtcgtgccagctgcattaatgaatcggc

SEQ ID NO: 36422 - DNA, 598 bp, Homo sapiens
gactactatagggcgaattggagctccaccgcggtggcggccgcccgggcaggtacacctctttctaagatgaaagagctcaaggtgaaatagcatgtggggaagattgtcttaatcgtcttctcatgattgaatgttcttctcggtgtccaaatggggattattgttccaatagacggtttcagagaaacagcatgcagatgtggaagtcatactcacagaaaagaaaggctggggcttgagagctgccaaagaccttccttcgaacacctttgtcctagaatattgtggagaggtacctcggccgctctagaactagtggatcccccgggctgcaggaattcgatatcaagcttatcgataccgtcgacctcgagggggggcccggtacccagcttttgatccctttagtgagggttaattgcgcgcttggcgtaatcatggtcatagctgtttcctgtgtgaaattgttatccgctcacaattccacacaacatactagccgggagcataaagtgtaaagcctggggtgcctaatgagtgagctaactcacattaattgcgttgcgctcactgcccgctttccagtcgggaaacc

SEQ ID NO: 36423 - DNA, 434 bp, Homo sapiens
cgactcactatagggcgaattggagctccaccgcggtggcggccgaggtaccctgcccagagatttctccaaaaggagctcttgtgaatgcaggcaagctaaagccacacaatgaagctgaaattcattcagcttagcttctcctgagagccttctttttgtgggggtaacattgcccttttgtttcacagcgaggtctgtgctaagacttgctacttagggagtcaaagctaataaaacataccgtctagaaatacagacataactggtagaactatacaagaaaaagaaagggcagaggaagaagaggaatgtgattgtggagaggtatgaagggggattacaaatccctgcttctcagagcgtggtccatggactagcagtgtggacatcactttcaaatctattagaaatgtgaatcttacacgcaaccc

SEQ ID NO: 36424 - DNA, 710 bp, Homo sapiens
gtatacgactactatagggcgaattggagctccaccgcggtggcggccgcccgggcaggtacttcagtcttttatcagttaaaatactaacagatagaaaataacaaagaatagactgttttcctgcctattgtaagacaaaatgaaatgtttactgttggaaacactatacctttttttagcctctctccctatcttcttattttccttgatggactctttctcttatctgagcaaactttttgtttgtttgtttgactcagtctctcagtgaacagtatagcgacccattagctccagcgttggactctgactgtgtcaagagtagaagtttgaagtgcaattcttatccatcatatttctccaattattaactctcctttactgccttttaaatacttcacaaaatggaaaccccttttgaataagaacagccgattttctgggagatggacaaggaaaagctatggagagatgctgggtttcttagtttaacatgtggctgcttgaaagttgctattagatccagagaacttttttgttaagtgtgattagagttcaaagaaaatgtttatttcttagatacttctattgaaagaaacataaggggtctatatctgtatatctataataaaattcagaagggcagtatatatttaaatctatattaactgcacacataaaaacaagaagtatatgtgatgggtaaa

SEQ ID NO: 36425 - DNA, 428 bp, Homo sapiens
tacactactatagggcgaattggagctccaccgcggtggcggccgagaaaaattcttatctctttaatgagttggggtgtgtgtgtgtggtttgtttattgggcccagttttgggtagaatatggactttttgtctaactgtgaaccccttccttgtacctgcccgggcggccgctctagaactagtggatcccccgggctgcaggaattcgatatcaagcttatcgataccgtcgacctcgagggggggcccggtacccagcttttgttccctttagtgagggttaattgcgcgcttggcgtaatcatggtcatagctgtttcctgtgtgaaattgttatccgctcacaattccacacaacatacgagccgggagcataaagtgtaaagcctggggtgcctaatgagtgagctaactcacattaatt

SEQ ID NO: 36426 - DNA, 528 bp, Homo sapiens
  misc_feature 195, 205, 212, 377: n = A,T,C or G
cgactcactatagggcgaattggagctccaccgcggtggcggccgaggtacattttgggattaaaatcaacatgatagtaggaccctataatgtttaattgtaacacattttcacttccatatattcagatatatgttttccattttcaaaggagatttgaggccactaaacattttttaaagcacaaatgcacnagaattgaanaatgatntaacctaattttgagcagataaggcaaaaatgaaggatgagaatgagatcatatggaagaccatagttaaaggatgctatttcaattgcgcaataacaaatcttagctgagaggcctagtagttatggccaaagggagacatatatttaggcataatcttaattntattttattgtttaatttagatgagatccaaatggatgtaggaagtttcacggttgcagtcacgtataatgtgagtttaactcatgcttcataagaaacaggaactaagccgggtgtggtggcttatgcctgtaatcccagcaattttgga

SEQ ID NO: 36427 - DNA, 385 bp, Homo sapiens
cgcgcgtatacgactactatagggcgaattggagctccaccgcggtggcggccgaggtacatttgttgggggcgtgacattaacatataaccacttagagtggacatgcagttagagaaaagtcaatgagctggaaccaagctgggaattccaacatgtagaagttaaacacaagaggaggagccagcaaaggaaacagaaacagagcttccagcaggtggggggcatttggaagaaaacgatgccatagaagccaagatgaaatagacatcaaggagaaggaagtagtcaattgttttgaatgccatgaagaaagataagaataggtgagaaataagaaaggctgctgactttaccatctgaggccacacatctgctgaaatgg

SEQ ID NO: 36428 - DNA, 568 bp, Homo sapiens
tagggcgaatatgagctacaccgcgctggcggccgaggtacttacgttgtttcgtgtcaccaaaattggtgttgctgctgtggatcggggggctgcactgatggcaccccttcctgtcttcatcaagcagctgcccttctgccgctccaatatcctttcccattcctactgcctacaccaagatgtcatgaagctggcctgtgatgatatccgggtcaatgtcgtctatggccttatcgtcatcatctccgccattggcctggactcacttctcatctccttctcatatctgcttattcttaagactgtgttgggcctgacacgtgaagcccaggccaaggcatttggcacttgcgtctctcatgtgtgtgctgtgttcatattctatgtacctgcccgggcggccgctctagaactagtggatcccccgggctgcaggaattcgatatcaagcttatcgataccgtcgacctcgagggggggcccggtacccagcttttgttccctttagtgagggttaattgcgcgcttggcgtaatcatggtcatagctgtttcctgtgtgaaat

SEQ ID NO: 36429 - DNA, 443 bp, Homo sapiens; identical to SEQ ID NO: 36316

SEQ ID NO: 36430 - DNA, 443 bp, Homo sapiens
actactatagggcgaattggagctccaccgcggtggcggccggtctccagcacccacctgtcaccagggtgaacagtgaaccctaggtatccaggttcgaccacgtagatagtgctgttgggtaacctagaagcaccttgcatgcgaatactcctgtggccaaggacgaggctgctctgtcccagctgcagtgcagtgaccatcgacgtgtcctgggccaagacagccaccggccgctctagaactagtggatcccccgggctgcaggaattcgatatcaagcttatcgataccgtcgacctcgagggggggcccggtacccagcttttgttccctttagtgagggttaattgcgcgcttggcgtaatcatggtcatagctgtttcctgtgtgaaattgttatccgctcacaattccacacaacatacgagccgggagcataa

SEQ ID NO: 36431 - DNA, 439 bp, Homo sapiens
agctccaccgcggtggcggccgcccggcaggtactgagattataggcatgagccaccatgcccggcctttgctcttaactactgatgttgtcttcctgatcttttctacaagaagcttttaaactttttggactttaacctacaataagaaatctcattttacatgttcacatgtatctataacaacatttatatttctaaaacaaacttttcatgaaacaagatatacctacatatgtcaggcactctgatattttctattctagtccaccttttcaatttcattctatttatgggaaatatatgttggttgggagtcactgagttaatttaatgacccactaataggctgtgagtggcattggaaaaatacctgcttgtaagatatgcgaacacacgttttaaggttgtttgggcatgtggaaatattttggggtgc

SEQ ID NO: 36432 - DNA, 455 bp, Homo sapiens
actactatagggcgaattggagctccaccgcggtggcggccgaggtacgcgggcacagtgctttaaattaaagcaagtttgcccataggacaaaagagcatttgattcccttttttctgtcacatgtcccttgaggctggacttcaggaatcctggaaaattaatatgagtgcagcatgtgaggggtcagagacaggccagcagggcgtctgcattcctccctgccacaggtctctccccagaggctggtttagtgtagggtattgccaggaaacggactgaggctgctttgctaagagctcctgaaaatgccctgggcctgtcctggcgtttctgaagagccctcatacagggacagccaccatctgggtcaaggaggtctgggttccctgctggtgggctccatcctgcgatggagtgaaccaggcgagaaaggatgacgatgttcttcatgt

SEQ ID NO: 36433 - DNA, 51 bp, Homo sapiens
gcgtatacgactactatagggcgaattggagctccaccgcggtggcggccg

SEQ ID NO: 36434 - DNA, 643 bp, Homo sapiens
  misc_feature 633: n = A,T,C or G
cgtatacgactactatagggcgaattggagctccaccgcggtggcggccgcccgggcaggtacatctagagaacatttgccaaaggcctaagcacggcaaaggaaaataaacacagaatataataaaatgagataatctagcttaaaactataacttcctcttcagaactcccaaccacattggatctcagaaaaatactgtcttcaaaatgacttctacagagaagaaataatttttcctctggacactagcacttaaggggaagattggaagtaaagccttgaaaagagtacctcggccgctctagaactagtggatcccccgggctgcaggaattcgatatcaagcttatcgataccgtcgacctcgagggggggcccggtacccagcttttgttccctttagtgagggttaattgcgcgcttggcgtaatcatggtcatagctgtttcctgtgtgaaattgttatccgctcacaattccacacaacatacgagccgggagcataaagtgtaaagcctggggtgcctaatgagtgagctaactcacattaattgcgttgcgctcactgcccgctttccagtcgggaaacctgtcgtgccagctgcattaatgaatcggccaacgcgcggngagaggcggt

SEQ ID NO: 36435 - DNA, 432 bp, Homo sapiens
agggcgaattggagctccaccgcggtggcggccggagtgatgccatctgcagttttgtgatctgcaatgattcttcccttcgaggtcagcccattatctttaatcctgacttttttgtggagaaactccgacatgagaaacctgagattttcactgagttggtggtcagcaatatcacaaggctcatcgatttacctggaactgagttggctcagctgatgggggaagtggaccttaagttgcctggcggggctggcccagcatcaggattcttccggtctctcatgtctctcaagcgaaaggaaaaaggagtgatatttgggtccccactgacggaggaaggcattgcccagatataccaactgattgagtatctacacaaaaacttgcgagtagagggtttgtttagagtaccttggccgctctagaact

SEQ ID NO: 36436 - DNA, 461 bp, Homo sapiens
cgcgcgtatcggttatacgactcactatagggcgaattggagctccaccgcggtggcggccgagtcttagtttctttatccggaaaggccacttcctcatattcaaggcctctgccaacccagtttttgttttcttctcacagcatgtgagagtctttgtttcacccatacatgttagaattccgtagacaatgtaatcattcaaaaactatttattgaatgcctactgtgtgcctggaacctcggccgctctagaactagtggatcccccgggctgcaggaattcgatatcaagcttatcgataccgtcgacctcgagggggggcccggtacccagcttttgttccctttagtgagggttaattgcgcgcttggcgtaatcatggtcatagcttgttcctgtgtgaaattgttatccgctcacaattccacacaacatacgagccgggagcataaagtgt

SEQ ID NO: 36437 - DNA, 420 bp, Homo sapiens
tatagggcgaattgaagctccaccgcggtggcggccgcccgggcaggtacagatctgcgttaatttttgacagctcatatatacagatttttagaaatgtaatagaaaatgattttgcacatatggtgcaagtcttgctggtgtatgtttaatgtggcaacacgtgccagaactgtttggcaaaacatgtcaaatggagtgcttgagtcagaactctaatgtaaatgtgtctaaacagcagtatgtatcattatgatgtatttttgtaaacatagtgatggctgctttcagtcatgtaagtgctggataaaaataaccacttcagttggagtaatgtaggaaaacgtcacccagcagatgggtagtactctgcaaagttacactgtcagccagtggcactggttcttttatttatgttgg

SEQ ID NO: 36438 - DNA, 419 bp, Homo sapiens
gcgtaatacgactcactatagggcgaattggagctccaccgcggtggcggccgaggtacttgtagtattgtgtaagtttaacgtgcgcattgccaaggttatatttgaatgacgtttttatgtagatgtcgatttattacacgtttcacgaacgctattgtttgtgattgtatgatacactctagctagattattatcttttcttttttttttccttttctttttttttaaaaggtggagtttcgctcttgttacccaagctggagtgcaatggcgtgatctcggctcaccgcaacctccggttcccgggttcaagccattctcgtgcctcaccctcctgagtagttgagattacaggcatgctccaccatgccccggtaatttttcgattagtactagagacgacatttctccatgtt

SEQ ID NO: 36439 - DNA, 601 bp, Homo sapiens
gtatacgactcactatagggcgaattggagctccaccgcggtggcggccgcccgggcaggtacaaaatcctttagccagaaatggcctgaaaacgcagaggaggtaggcacaatgaacagcctggaaatcagagtttcttcctctctctgtgctgtgctggtggcatgacaacttacttgttctcacaggctccttcagtgcctgggggcagtttcctgcctcagggttaaagggctgccttcccctccttactcagcttctgaagccaacagatccacctcctggtccgtttctgaacctgatacctgcagaaggaaattcatcaacaacctctccctgactgtcagggtgacttataatgagcttcttctccttctcccagatggggagattcctgtcctagcccaaagacttttttggctggaaaccaggttgccttaaattgccaggagagccagcctccctggcctggtcccagccctctgtgctcaccttccccctgctggtctgacttacaggctcccattttgtgtcagcttctcctctatcggtgggtgtgggcctaagacttaggaccccttccctggctaattcttatac

SEQ ID NO: 36440 - DNA, 502 bp, Homo sapiens
gactcactatagggcgaataggagctccaccgcggtggcggccgaggtacatagaatatgaacacagcacacacatgagagacgcaagtgccaaatgccttggcctgggcttcacgtgtcaagcccaacacagtcttaagaataagcagatatgagaaggagatgagaagtgagtccaggccaatggcggagatgatgacgataaggccatagacgacattgacccggatatcatcacaggccagcttcatgacatcttggtgtaggcagtaggaatgggaaaggatattggagcggcagaagggcagctgcttgatgaagacaggaaggggtgccatcagtgcagccccccgcaccacagcagccacaccaattttggtgacacgaggcaacgtaagtacctgcccgggcggccgctctagaactagtggatcccccgggctgcaagaattcgatatcaagcttatcgataccgtcgacctcgagggggggcccggtaccc

SEQ ID NO: 36441 - DNA, 422 bp, Homo sapiens
tatggggcgaattggagctccaccgcggtggcggccgaggtaccttccctaattcaccagcccagtatttatttgtatttgtgtttgtttcgctggccggatttgactctctatgggaacatcataaatattatttactccaggattctgaaataagatagatattttatttcatgttctttaaattctccaaagatttatttttattactttcctttcccatttctggacattgatatatttcagaacttttgtgcaggttttcctacctacctacacctcctctcccttctccccttactcctttctttctggaatgtaattctgtctatgaaacatgacagtaagctgaaatgtccctgatgattttcactcctctggattttcactccttttagtgacagaaacttactaattctgat

SEQ ID NO: 36442 - DNA, 438 bp, Homo sapiens
ctactatagggcgaattggagctccaccgcggtggcggccgcccgggcaggtacgcggggagagagaaggttaagagcaacaagatgggaggcagctgcatggaacctgtcccactgaggaagtaaaacagagttttactcttgttgcccaggctggagcgcaatggtgcgatctcggctcaccgcaatctctgcctcctgagttcaagcgaggagcaaccctacctgatgggctggacttctgcctggattggagtttgatcatgcctccatatgggtgtttaccaggcgtatgcattgaacctgagtttgtctcttcaatacaaggaaaatctctgccgcttagtgattttccaagaaacatgagcttctgcctttcaatgaggaagatactcagaagtcatgttcgagcactccggaaaatgtccttggagtttc

SEQ ID NO: 36443 - DNA, 451 bp, Homo sapiens
ctactatagggcgaattggagctccaccgcggtggcggccgcccgggcaggtacaaatcactaataccactggactggcccaggctcctgggttagcctcccaaggcatcagctttggcattaagaataatctggggaccccattgcaaaaattgggagtgtcattttcttttgccaaaaaggctcctgtcaaactcgaatcaatagcatcagttttcaaggaccatgcggaggaagggacctctgaagatggaacaaaacccgatgagaagagttctgaccaaggactgcagaaggtaggagactctgatgggagcagtaatcttgatggtaaaaaagaggatgaagaccctcaggatggagggtcccttgcctcaacattatccaaattaaaaaggatgaaacgagaagaaggagctggggctacagagcctgagtattaccactacat

SEQ ID NO: 36444 - DNA, 90 bp, Homo sapiens
tacgactactatagggcgaattggagctccaccgcggtggcggccgccctgccaggttcgcagggacggcacctatgaagaaaatgatcg

SEQ ID NO: 36445 - DNA, 609 bp, Homo sapiens
tgtatacgactcactatagggcgaattgggccctctagatgcatgctcgagcggccgccagtgtgatggatatctgcagaattcgcccttagcgtggtcgcggccgaggtactttgatatctactatccactctccaaactggatttaattgctattcctgactttgcacctggagccatggaaaattggggcctcattacatatagggagacgtcactgctttttgaccccaagacctcttctgcttccgataaactgtgggtcaccagagtcatagcccatgaactggcgcaccagtggtttggcaacctggtcacaatggaatggtggaatgatatttggcttaaggagggttttgcaaaatacatggaacttatcgctgttaatgctacatatccagagctgcaatttgatgactattttttgaatgtgtgttttgaagtaattacaaaagattcattgaattcatcccgccctatctccaaaccagcggaaaccccgactcaaatacaggaaatgtttgatgaagtttcctataacaagggagcttgtattttgaatatgctcaaggattttctgggtgaggagaaattccagaaaggaataat

SEQ ID NO: 36446 - DNA, 446 bp, Homo sapiens
ctactatagggcgaattgggccctctagatgcatgctcgagcggccgccagtgtgatggatatctgcagaattcgccctttcgagcggccgcccgggcaggtacgcatactaaaactagattttctgaaaatgcaaaatgtatccatactaaattccaagtcttcaagcatcagaggactcagaaaattgagaaaccccatgcatgcattgaatgtgagcaaaccttccttaggaagtctcagctcatttaccatgagaacatttgtatacaagagaatcctggaagtggtcaatgtgagaaattatccagaagtgtcctgttcactaagcatctgaaaactaatacaacagacaaaatctgtatacccaatgaatatagaaaaggctctactgtgaagagtagtctcattacacatcaacaaacccatacagaagagaaatccta

SEQ ID NO: 36447 - DNA, 497 bp, Homo sapiens
  misc_feature 348, 354, 355, 363, 443: n = A,T,C or G
actcactatagggcgaattgtgccctctagatgcatgctcgagcggccgccagtgtgatggatatctgcagaattcgcccttagcgtggtcgcggccgaggtactataggatacaaccagcgaaacagaattgatactctcatgtatctactagcatatccacaaaaacccatggttaagacaaaaaccattgaattgatagaatttgaggaactgccagctggacagaatgcaacagttgctgtgatgagctatagtggctatgatattgaagatgctcttgttttaaacaaggcctctttagacagaggctttgggcgttgccttgtatataaaaatgctaagggnactttnnttttattntttctttttttttacctttttttttttttttttaattattatttatcttatatatttgttattttatatttttttttttnccgaagggctgcgttttttttttgtgggacccaaaaaaatttttttttgggggg

SEQ ID NO: 36448 - DNA, 411 bp, Homo sapiens
agggcgaattgggccctctagatgcatgctcgagcggccgccagtgtgatggatatctgcagaattcgccctttcgagcggccgcccgggcaggtacatgtggacatcaatctgtcccaggacatttttgaaaagactattcactccccattgaattgccttgtctcccttgtcaaagtcacaacaattactgtcctcatttttgtatctggtcacatgttcctagttagtaactataactaccctcttctactacgcattctgtattcccttagctttcagcaagcaactcagttggtcttgattctttatatggggcaatgacccaaactttccttcctgaaggaattgggccattggcagctgtgcccgaattgggtttgttgttagtttttccattaaattaatcac

SEQ ID NO: 36449 - DNA, 258 bp, Homo sapiens
ctcactataggcgaattgggccctctagatgcatgctcgagcggccgccagtgtgatggatatctgcagaattcgcccttagcgtggtcgcggccgaggtatagtaaaaatagaatataaaaaatgctacacatgtgtagggcagtttcattataatttgaccatctttgactgaaacattattattcagcgtatgactatatatacaagaaaacatacacactcactcacacatacacacattctggtttttttttt

SEQ ID NO: 36450 - DNA, 396 bp, Homo sapiens
ctcgagcggccgccagtgtgatggatatctgcagaattcgccctttcgagcggccgcccgggcaggtacatggttcgaagccactatgtaacagaaacactctctgaagaagaggctgggttccctttagcttacacagtgaccatccacaaagacttcggcacttttgagaggcccttcagggcgatttatgtgccccaaaatgtctactgtgtgcacctggatcagaaggcgacggatgcctttaaaggtgcagtgaaacagttactcagctgcttcccaaatgcttttctggcttccaagaaggagtcggttgtctatgggggggatctccaagctccatgctgacctgaactgcctggaagaccttgtggcctctgaagttccctggaagta

SEQ ID NO: 36451 - DNA, 470 bp, Homo sapiens
atagggcgaattgggccctctagatgcatgctcgagcggccgccagtgtgatggatatctgcagaattcgcccttagcgtggtcgcggccgaggtacctgatcaatctgatagactctccaggacacgtggacttttcctcagaagtatcaaccgctgttcgcatttgtgatggatgcatcattgtggtagatgctgtggaaggagtctatccacagacgcaggcagttctgcgacaagcttggcttgaaaacatccgtccggttttagtgattaataagattgatcgcttgatagtggaactgaaattcaccccacaagaggcctattctcacctcaagaatattttagaacagattaatgcgctcacagggactctttttacttctaaagtcctagaagaaagagcagagagggagactgaatcccaagtgaatccaaattctgaacaaggagagcaagtatatgact

SEQ ID NO: 36452 - DNA, 489 bp, Homo sapiens
agggcgaattgggccctctagatgcatgctcgagcggccgccagtgtgatggatatctgcagaattcgccctttcgagcggccgcccgggcaggtacgcggggttttctttaatttttttcatgctcattattttcttcaaactttatttctattctgtaagtttttggcaatttaaattttcccggctaagcacagtggctcatgcttgtaatcccagcacttctggaggcggaggcaggaagattgcttgagcccaggagttcacaatcagcctgggcaacatagtcgctactaaaaattagctaggcatggtggtgtgtgcctgtagtcccagctactcaggaggttgaagcagtaggatcacttgagccctgggggccgaagctgcagtgagccgtgagcatgcctgggacacagagcaagaccctttctcaaaaaaaaattttttttaattaagtgaattttcctaaatagtgattctgttcta

SEQ ID NO: 36453 - DNA, 405 bp, Homo sapiens
tatagggcgaattgggccctctagatgcatgctcgagcggccgccagtgtgatggatatctgcagaattcgcccttagcgtggtcgcggccgaggtacaagatttcttagggcgaatccaattccatcaatacctggggaaacacaaaaacctggtgcagctggaaggctgctgcactgaaaagctgccactctatatggtgttggaggatgtggcccagggggacctgctcggctttctctggacctgtcggcgggatgtgatgactatggatggtcttctctatgatctcacagaaaaacaagtatatcacatcggaaagcagggtccttttggcgctggaattcctgcaggagaagcatttgttccatggggatgtggcagccaggaatattctgatgcaaa

SEQ ID NO: 36454 - DNA, 448 bp, Homo sapiens
attgggcccttagatgcatgctcgagcggccgccagtgtgatggatatctgcagaattcgccctttcgagcggccgcccgggcaggtacgatcttggctcactgcaacctctccctcccgggttcaagtgattctcgtgcctcagcctcttgagtagctgggattacaggcgcgtgccactgcgtccggctaatttttgtatttttagtagagatggggtttcaccatgttggccaggctgatctcaaactcctgacctcatgtggtccacccaccttggcctcccaaagtgctgggattacaggcgtgagccaccacgctcagcctacaagcaattttttaaaaactgacacctattactgataaaattctctgtttaaaatcctatttactattttaaagataagtattagttttttttaaatacaataattctgttattgataaa

SEQ ID NO: 36455 - DNA, 162 bp, Homo sapiens
gctcgagcggccgccagtgtgatggatatctgcagaattcgcccttagcgtggtcgcggtttaggtactgcgtagcgtgtctccgtatgtcatctcagggagcttaaaatgggcctgatttaacattgtttttgtgttatttttgcttgaaacaacgcacac

SEQ ID NO: 36456 - DNA, 448 bp, Homo sapiens
gcgcgtaatactgactcactatagggcgaattggagctccaccgcggtggcggccgaggtactgactgaaaagaactggataaaataccttcttccctggctgtgtattcagcctacacgtattgaggaattcagatgtgaagtagatgtccacatcacagaaaaagagaaggacgttgcttcccttccagaagcgggctccaacatcaagtccctttccccgagaaaattctccattcagctggatgaaggtaaagttcctgaagttggcagctttggaagtgttttcaagtattcctttgacttcatttatttcttctttcccaaagtaaacaacagtgagatggactctcccatcctgctcaatgcacatctccctgaaattctgcatgaactgccggaacttgtccaccctttttgctagaggcacgataacattgataagcgt

SEQ ID NO: 36457 - DNA, 465 bp, Homo sapiens
agggcgaattggagctccaccgcggtggcggccgaggtactcttccctattaactacctttcccctcttcctcagaggaccatccaaatttccaacatcatagattagttttgcgttcttttaaattgcatataaagagacttacacagtgtatatacccccttgtgtgcttcttttttcttatatttgtgcatttcatctatgtaggtaaagttttttcatccttactgttgtatgatattccattgtatgatataccagaatatatttacacattctgccattgatggtcatgtggattgtttccagttttgattagtgttgcattgaacattcttttacattcaggtctgctgtaacaacagataactttcctaaaaattaccacactatgaaaaatggcacaatgaaaaccacaggtgttatttcaaaaatgagggcagggaccaaaacacttaaaacttt

SEQ ID NO: 36458 - DNA, 407 bp, Homo sapiens
  misc_feature 331, 395: n = A,T,C or G
ctatagggcgaattggagctccaccgcggtggctgcattctgtcaatacattcccaaatacagactccttttttggcatgcttttctcctttatcatcaaataaagttccgtgctctaatctttcatagtctgaatccaggagaaatgttttaaagcgattagacacatagtggaaagccaagaactttaagtaatagagattgaattcaaactcagttggatactggttgtgaacctggtgtacctcggccgctctagaactagtggatcccccgggctgcaggaattcgatatcaagcttatcgataccgtcgacctcgagggggggcnccggtacccagcttttgttccctttagtgagggttaattgcgcgcttggcgtaatcatggtaanagctgtttcctg

SEQ ID NO: 36459 - DNA, 195 bp, Homo sapiens
tatagggcgaattggagctccaccgcggtggccgccgaggtactcttatttgtgtttatttttttgactttgggattccctaagtcttcttcagacagattctgcatgttgtaataatttcagatgtaatccccttcagttattaactgaagccctgacctaataatggtcaggtatggggtaggaaaagcacat

SEQ ID NO: 36460 - DNA, 226 bp, Homo sapiens
tacaagttcctaggcaggtcccagcacactcataataagtgtgatacaacagggttttagtcatgatgttccccgaccacgtagtgtgggtgcagtggaggcatccctcccagggttctccttttaacatggataaggggagtagcaagaacaaagtgatgagtagcatgttcatacccagcatggacagaaaaggctttttcctggggggagaaggctaaacaaa

SEQ ID NO: 36461 - DNA, 432 bp, Homo sapiens
tagggcgaattggagctccaccgcggtggcggccgaggtactcatttcccttcctcagccttatcacccagaatccatagtggggggataagtagaccacctccttccggtctacattttgcttacatactcccaggccccactcagacctgtctcccacctccacctcccagtagtgccggcctgaggagatgcactggcttcccaggacgatattatagcggtaaaatctctcaggattgtctggcagtttctggttggtgtctccatagtgcacacgttttctgtcctcagacacgatgagacgggagtaagcagtatctggatccaagcgcacatcagctgcataagtcgctctagaactagtggatcccccgggctgcaggaattcgatatcaagcttatcgataccgtcgacctcgagggggggcc

SEQ ID NO: 36462 - DNA, 459 bp, Homo sapiens
atacgactactatatggcgaattggagctccaccgcggtggcggccgaggtacggtttctcccccgtgtggcttcgcttgtgcgtcttcagcgttgactggttcctgaaggcctgccacactgcctacactcaactcgtttctttacaaggtgaacgctcatgtgcctccgccgggataaatagtcaccaaagactttcccgcaggcggcgcattcgtagcgtctctcttgcgtgtgtatcttcctgtgtgcggtgaggtttgaactcgcgctgaaagctttcccgcagagatcgcacccgtatggtttctctccagtgtgagagttcatgtgagtcttaaggatggactggtttcggaaggtcttcccgcactgccgacattccacgggtttcttgacgatgtgaatcctcatgtgtttcctccgggacacgagatcgccaaaggatttcccgcattc

SEQ ID NO: 36463 - DNA, 399 bp, Homo sapiens
tacgactactatagggcgaattggagctccaccgcggtggcggccgtcagggaataaaggacagtgacttttaattaattaactagtaacaaatgaggtgagtcttattgcttccccagcttgttgctttgagagagtttccaggatgtggtgaagggagggagaacctaggtacctcggccgctctagaactagtggatcccccgggctgcaggaattcgatatcaagcttatcgataccgtcgacctcgagggggggcccggtacccagcttttgttccctttagtgagggttaattgcgcgcttggcgtaatcatggtcatagctgtttcctgtgtgaaattgttatccgctcacaattccacacaacatacgagccgggagcataaagtgtaaag

SEQ ID NO: 36464 - DNA, 362 bp, Homo sapiens
gagctccaccgcggtggcggccgaggtacctacgttctccctcccttcaccacatcctggaaactctctcaaagcagcaagctggggaagcaataagactcacctcatttgttactagttaattaattaaaagtcactgtcctttattccctgacggccgctctagaactagtggatcccccgggctgcaggaattcgatatcaagcttatcgataccgtcgacctcgagggggggcccggtacccagcttttgttccctttactgagggttaattgcgcgcttggcgtaatcatggtcatagctgtttcctgtgtgaaattgttatccgctcacaattccccacaacatacgagccgggag

SEQ ID NO: 36465 - DNA, 424 bp, Homo sapiens
gactactatagggcgaattggagctccaccgcggtggcggccgtcagggaataaaggacagtgacttttaattaattaactagtaacaaatgaggtgagtcttattgcttccccagcttgttgttttgagagagtttccaggatgtggtgaagggagggagaacctaggtacctcggccgctctagaactagtggatcccccgggctgcaggaattcgatatcaagcttatcgataccgtcgacctcgagggggggcccggtacccagcttttgttccctttagtgagggttaattgcgcgcttggcgtaatcatggtcatagctgtttcctgtgtgaaattgttatccgctcacaattccacacaacatacgagccgggagcataaagtgtaaagcctggggtgcctaatgagtgagctaact

SEQ ID NO: 36466 - DNA, 415 bp, Homo sapiens
gcgaattggagctccaccgcggtggcggccgaggtacctaggttctccctcccttcaccacatcctggaaactctctcaaagcaacaagctggggaagcaataagactcacctcatttgttactagttaattaattaaaagtcactgtcctttattccctgacggccgctctagaactagtggatcccccgggctgcaggaattcgatatcaagcttatcgataccgtcgacctcgagggggggcccggtacccagcttttgttccctttagtgagggttaattgcgcgcttggcgtaatcatggtcatagctgtttcctgtgtgaaattgttatccgctcacaattccacacaacatactagccgggagcataaagtgtaaagcctggggtgcctaatgagtgagctaactcac

SEQ ID NO: 36467 - DNA, 580 bp, Homo sapiens
gcgtatacgactactatagggcgaattggagctccaccgcggtggcggccgtcagggaataaaggacagtgacttttaattaattaactagtaacaaatgaggtgagtcttattgcttccccagcttgttgctttgagagagtttccaggatgtggtggagggagggagaacctaggtacctcggccgctctagaactagtggatcccccgggctgcaggaattcgatatcaagcttatcgataccgtcgacctcgagggggggcccggtacccagcttttgttccctttagtgagggttaattgcgcgcttggcgtaatcatggtcatagctgtttcctgtgtgaaattgttatccgctcacaattccacacaacatacgagccgggagcataaagtgtaaagcctgtggtgcctaatgagtgagctaactcacattaattgcgttgcgctcactgcccgctttccagtcgggaaacctgtcgtgccagctgcattaatgaatcggccaacgcgcggggagaggcggtttgcgtattgggcgctctttcgcttcctcgctcactgactcgctgcgctcg

SEQ ID NO: 36468 - DNA, 536 bp, Homo sapiens; identical to SEQ ID NO: 30716
  misc_feature 49: n = A,T,C or G

SEQ ID NO: 36469 - DNA, 434 bp, Homo sapiens
tacgactcactatagggcgaattggagctccaccgcggtggcggccgaggtacaagaaacttccaggactttgactgtcaggaacatgatatagaaacaactcatggtgtggtccacgtcactataagaggcttacccaaaggaaacagaccagttatactaacatatcatgacattggcctcaaccataaatcctgtttcaatgcattctttaactttgaggatatgcaagagatcacccagcactttgctgtctgtcatgtggatgccccaggccagcaggaaggtgcaccctctttcccaacagggtatcagtacctgcccgggcggccgctctagaaactagtggatcccccgggctgcaggaattcgatatcaagcttatcgataccgtcgacctcgagggggggcccggtacccagcttttgttccct

SEQ ID NO: 36470 - DNA, 377 bp, Homo sapiens
tcgagcggccgccagtgtgtaggatatctgcatatttcgccctttttagcggccgcccgggcaggtaccctctcatatatgcaaacaaatgcagactaggcctcaggcagagactaaaggacatctcttggggtgtcctgaaatgatttggacccctgagggcagacacctaagtaggaatcccagtgggaagcaaagccataaggaagcccaggattccttgtgatcaggaagtgggccaggaaggtctgttccagctcacatctcatctgcatgcagcacggaccggatgcgcccactgggtcttggcttccctcccatcttctcaagcagtgtccttgttgagccatttgcatccttggctccaggtggctccc

SEQ ID NO: 36471 - DNA, 367 bp, Homo sapiens
tagggcgaattgggccctctagatgcatgctcgagcggccgccagtgtgatggatatctgcagaattcgcccttagcgtggtcgcggccgaggtacccaaagaacacatttgctttgagaagtggtggtaggaggcagacaaaggcagaaaaaataaagaggtgagatctactcaggagagctcctgtcctttgtggcatgattaattttttttatctctacttgagttgtcttattttttaaggctataaacttagtgaccagctggataataaaagccagctggcagacttaaatgataaactttttgcaaagacctcagtgatcaaacttattttttactatactgattttctgttatttacaa

SEQ ID NO: 36472 - DNA, 467 bp, Homo sapiens
tacgactcactatagggcgaattgggccctctagatgcatgctcgagcggccgccagtgtgatggatatctgcagaattcgccctttcgagcggccgcccgggcaggtacatgcagtaatggggtagatgtgtgtggtgtgtcttcattcctgcaagggtgcttgttagggagtgtttccaggaggaacaagtctgaaaccaatcatgaaataaatggtaggtgtgaactggaaaactaattcaaaagagagatcgtgatatcagtgtggttgatacaccttggcaatatggaaggctctaatttgcccatatttgaaataataattcagctttttgtaatacaaaataacaaaggattgagaatcatggtgtctaatgtataaaagacccaggaaacataaatatatcaactgcataaatgtaaaatgcatgtgacccaagaaggccccaaagtggcagacaacat

SEQ ID NO: 36473 - DNA, 646 bp, Homo sapiens
gactactataggcgaattgggccctctagatgcatgctcgagcggccgccagtgtgatggatatctgcagaattcgccctttcgagcggccgcccgggcaggtacgcgggacacacacacagcacctgcacgcagatgcacacatctctagtcaaatgaggctctcagctttttgatagggctttttgatacgtgtataaccaatactttattctcactgtagtcaaggactcattgcaattcagaaatgagaagctgatccggaactccactacagctcaaagaaattctcgaatgttctcacctattaacagttattaaaatggaagaagctggggatgaaattgtgagcaatgccatctcctacgctctatacaaagccttcagcaccagtgagcaagacaaggataactggaatgggcagctgaagcttctgctggagtggaaccagctggacttagccaatgatgagattttcaccaatgaccgccgatgggagtctgctgaccttcaagaagtcatgtttacggctctcataaaggacagacccaagtttgtccgcctctttctggagaatggcttgaacctacggaagtttctcacccatgatgtcctcactgaactcttctccaaccacttcagcacg

SEQ ID NO: 36474 - DNA, 438 bp, Homo sapiens
tacgactactatagggcgaattgggccctctagatgcatgctcgagcggccgccagtgtgatggatatctgcagaattcgccctttcgagcggccgcccgggcaggtaccacttaatgggcaagtttatgaacttttaactgtcttcatggactggatttcggatcatcatcttagcaaagtgaaacatgaagaatctggaatggatggtaaaaaaccacaactcaaatttgcttcccagagaaatgatattcaggagaagtgtgtaaagcttttgcctctaatgacagagcagctacagtggatgccatttgtgaatatcaaacttcacgagccttttgtaaaatttatatattggtccctaaggcagctagatgctggagcacagcactcgactatgacatcaacattgaggagattgggtgaagacatttttaaa

SEQ ID NO: 36475 - DNA, 320 bp, Homo sapiens
ttgggccctctagatgcatgctcgagcggccgccagtgtgatggatatctgcagaattcgccctttcgagcggccgcccgggctggtacaaatgacggaacattgcctaaaagttactttgcaatgactccataatattagcttgttttttgtctcgccttttctctccaaacaaaaataaaataaaaaaaaagtccaatagttccattgggccactaattcagcatctttgtcgaccttctcaaccttcttcggccccttcaccagatcatgcctcattggggattgtacccccgtcacaacccatcgcaggacgggag

SEQ ID NO: 36476 - DNA, 371 bp, Homo sapiens
cactatagggcgaattgggccctctagatgcatgctcgagcggccgccagtgtgatggatatctgcagaattcgcccttagcgtggtcgcggccgaggtacaccaaggtggtgcattaccggaagtggatcaagggcaccatcgtggccaacccctgagcacccctatcaaccccctattgtagtaaacttggaaccttggaaatgaccaggccaagactcaagcctccccagttctacttgacctttgtccttaagtgtgaggtccaggggttgctaggaaaaagaaattcagcatacacaggttgtataccagagtgttttcttaaaatggtgtaaattttgtcctcttctgtggtccctggggaatac

SEQ ID NO: 36477 - DNA, 417 bp, Homo sapiens
tacgactactatagggcgaattgggccctctagatgcatgctcgagcggccgccagtgtgatggatatctgcagaattcgcccttagcgtggtcgcggccgaggtacgcggggggctcacagggtgtcatggagcacgaggaaaggtgcagggaatcctagagaaagtcttgtgtttaaggagcaagacaggaaggagaaaccagtcagtgagatgggtcaaatgtaagtggagaaaggaacgtccaaggagaagcgggctgtcgctatggtgaatcatgcagagatgaaggcgggacgatggagcagtggccccttgggcttggcagctcttctggcagtgattctgacagtgaggttgacaaaaagtttaagaggaaaaagcaagttgctccagaaaaacctgttaagaaacaaa

SEQ ID NO: 36478 - DNA, 410 bp, Homo sapiens
ctatagggcgaattgggccctctagatgcatgctcgagcggccgccagtgtgatggatatctgcagaattcgcccttagcgtggtcgcggccgaggtactggagtgctgccggttgtcacccagactccagctagagtgttactataaacttcattctcttctattactccttgtcccttttcatgcacataaaatccccccatgctggccatcatgaattttgttatgccgaacaattggacaactgtttgtcctaatttgaattcctgctaatgcattgccataaatgtcatttccttcaataaggcctcgtccatcaccaaagatgtaaactcctccttgatttccattaaatatagaatttccccttattgttgggtcactatttgaggtaatccatacacctgca

SEQ ID NO: 36479 - DNA, 398 bp, Homo sapiens
tatagggcgaattgggccctctagatgcatgctcgagcggccgccagtgtgatggatatctgcagaattcgcccttagcgtggtcgcggccgaggtacaccgactacggcggactaatcttcaactcctacatacttcccccattattcctagaaccaggcgacctgcgactccttgacgttgacaatcgagtagtacacacatgagaactgaaatggcccaaacccagaaagaaagcccaactagatcctcagaagacgcttctagggacaataaccgatgaggaaaagatggcctccttgcgccaccgtctgttatgaatttctctccattgcagcagaaagccgttcttttaagcagacagcaggtgatgatggcaaaatagaccacactcttga

SEQ ID NO: 36480 - DNA, 425 bp, Homo sapiens
ctatagggcgaattgggccctctagatgcatgctcgagcggccgccagtgtgatggatatctgcagaattcgccctttcgagcggccgcccgggcaggtaccttactgagaaattcatcagctttttcctaccaaaggcagacatctaaccgttccgaaccctcaggggagatcaacatagacagcagtggtgaaacagttggatctggagaaagatgtgtcatggcaatgctgagaaggaggatcagggatgagaagaccaacgttaggaagtctgcactgcaggtattagtgagtattttgaaacactgtgatgtcttaggcatgaaggaagacctgtggattctgcaggaccagtgtcgggaccctgcagtgtctgtccggaagcaggccctccagtctcttactgaactccttatggctca

SEQ ID NO: 36481 - DNA, 538 bp, Homo sapiens
gcggccgccagtgtgatggatatctgcagaattcgcccttagcgtggtcgcggccgaggtaccccactgagcattggctgctgctggcttggagctcctgccatctgcacctgctgtaatcctgaggttcctgcaaggatcgtcccagctcctggctggcctgcctggccaggaccactgctgcctgaaggtctccaattagatagtcctttcccaaaggcaacagctgccaccaaggcattagtgtctgtagggttaaaggtctgcttgttcggccggagacctccactctctgattctcgctcctctttgctgattttctccagaaggtttgaacacattttattcaagctctggatctgcttctgggctgcatctgcaccaatgcgggcagcatctgtcgtcagttgcttctcctgttcttccacttcagggtcaggcttggttctcagatggtcagggactacctcatggctgaaaacaggcacccgtccttcagtctgccgcatgagatcttcatctcggtctggagacaaca

SEQ ID NO: 36482 - DNA, 614 bp, Homo sapiens
tgcatgcgcgagcgggtgatggatatctgcagaattcgcccttagcgtggtcgcggccgaggtacctatcttcacgaccgcatccgccagacaccggtcccacttcctgccgagctccgactcagacatgttccccacccgccctcccccgcgtactaaatctctttttccccttctatcttttcttcatctctctcacatttactttatttttcctctttattttctgagtcattgactcctttatttagaagtaaaggatattatgtgccatatttcttctagaatcactggaagaataaatgggcctctcttagtagttatattaagttatgctttctcagttataaggaaggacaaaatgttgaacaattgtcataatcataatctgaaagacttaatttaaatttcatatgctaaactttcaggcggtagctgaagtttgacttaataaatacttatatatttttattattttataacaggtatggtaacacagtaatataacttttgaaaatgtgtgtttgcatatccaaacgaatattgttcttcgaagcatcacttagtgaaattacgccctcattccaaatatgttgtcattgttcagaacattt

SEQ ID NO: 36483 - DNA, 451 bp, Homo sapiens
ctcactatagggcgaattgggccctctagatgcatgctcgagcggccgccagtgtgatggatatctgcagaatccgtatagcggccgcccgggcaggtacatgaggcggatgtcttcatcgtgcaattcatggccttccacaacaatggtcccagtcttctggaactgctccagctcctcactgctcaactgcttgatggacgtcatcactgccttaaaggctcccttcagacgcttccccaggaccatgttgatctggtatctgcccttaagccgaatgccatacttgtttttatctgtagacagtgtaactttttcgaacattgagttcctcaatgatatacttctccaaagacttgatatctttaagagcttctggatcttgatggataaccacaatttctttcaaaggatactttatgggaatagtttttcggtctctgatcactct

SEQ ID NO: 36484 - DNA, 344 bp, Homo sapiens
ggccgccagtgtgatggatatctttagaattcgcccttagcgctttcgcggccgaggtactatctacctcacagagctacgaaaatcaaatgataaggggtatggcactgaccacagcagcatactgctatgaacgtggtaacagatagacaggcacgccccctggagggctgctcccttcactactggcgcattatcgtgcagttcactttggaaaatatttttcttctaaatctatttttagtattgaacagcacactggagtttttgtccagaagtttgactttagaagataagaaataactgagcgtattgcaagcaggagttagaggaagagactcagt

SEQ ID NO: 36485 - DNA, 420 bp, Homo sapiens
actcactatagggcgaattgggccctctagatgcatgctcgagcggccgccagtgtgatggatatctgcagaattcgccctttcgagcggccgcccgggcaggtacctgctttgcatttcatttgctctgtttttcagaactacactttacgacatgagaaaaactggtataagcagaatgttcctacatttagttaatatcagttctaatttaatacataaatgacttgttcaaatacttacttagactccatgtaagggaggagaaaaggggagaaaattagagtgggggaagatgaatcaaatcacatttgtagaccacactacaacaattggaagctacttatcatatttcctaagataaagttttgttggatcctaatatgggaaggatttaaaagagatttaaaaaggtaggac

SEQ ID NO: 36486 - DNA, 413 bp, Homo sapiens
acgactactatagggcgaattgggccctctagatgcatgctcgagcggccgccagtgtgatggatatctgcagaattcgccctttcgagcggccgcccgggcaggtactaaagtgtgtaatacatgttcaacttttcatttgattaaaagaagtattatttaatacattcttagtaaagaaaaatttttggattttttgttctaaaaataaattccaaattctggttttctaaacccaaatgaagaatgaatgacaatattcatttactttttctttcattcccttcatatcatatgtaaaaatttgtcagcaaagtgatatattatggaattgctgtcaggaaacacaggtgaataaaggtaatacacttccttctttgtggaaacttgaattattacagagaaagaaatat

SEQ ID NO: 36487 - DNA, 468 bp, Homo sapiens
atacgactactatagggcgaattgggccctctagatgcatgctcgagcggccgccagtgtgatggatatctgcagaattcgcccttagcgtggtcgcggccgaggtaccattatgtgcccgaattccgaaaagtgtccatagcagctaccatcatctatgcctatgcctggctggttcctcttgcactctggggtttcctcatgtggagaaacagcaaagttatgaacatcgtctcctattcatttctggagattgtgtgtgtctatggatattccctcttcatttatatccccaccgcaatactgtggattatcccccagaaagctgttcgttggattctagtcatgattgccctgggcatctcaggatctctcttggcaatgacattttggccagctgttcgtgaggataaccgacgcgttgcattggccacaattgtgacaattgtgttgctccatatgctgctt

SEQ ID NO: 36488 - DNA, 383 bp, Homo sapiens
tatacgactcatatagggcgaattgggccctctagatgcatgctcgagcggccgccagtgtgatggatatctgcagaattcgcccttagcgtggtcgcggccgaggtacacatatcctgagctatccacagtccccgaactctgcaacattgctttcaggtgatagagacaagatggtccatgcaaatgagctgacacaagtcatgtcgtgtgcaatcaagataggatcccagacatcttcagaatggtttacagtcacaagaaataaagttccaatgaagtggttggcatttggaagcacactgttttaaatatatctccctgagggtatgtttatatattagtgcactggtcaatatctgacactatctgtcattttattg

SEQ ID NO: 36489 - DNA, 336 bp, Homo sapiens
  misc_feature 108, 134, 170, 228: n = A,T,C or G
gcaggctatcaccacggcgacctcctccggaagtagatagtcagtgatcaaactatcatgggcaccattacccactttttcttgcttaaagtgaaccttgactgatgnagtaatctttgggggttccaaagggncatcctccccattttgggcttttaaaagaagaatgntaaaatttcaaccaggaaaccattcattttgtctgccgaagttcaaaggttcctttgnatcaagatctgtggattttttccccctagtttccattcttcacgttgtccttgatgagcttcttagctgcagcttgagtcctgaaagttcagtgggcaaaggcctcgg

SEQ ID NO: 36490 - DNA, 363 bp, Homo sapiens
cgactcactatagggcgaattgggccctctagatgcatgctcgagcggccgccagtgtgatggatatctgcagaattcgcccttagcgtggtcgcggccgaggtacctgaggagaatttcttcaatgttcctgctttcttaactgtctcaggacaacttcatctagaagtgatgtcaggagcttttactcaagtgtttgcctttggtccgaccttccgagctgaaaattctcagagccggaggcacctggcagagttttatatgatagaagcagagatttcttttgttgacagccttcaagatcttatgcaggttatagaggaactgttcaaggctacaaccaatgatggtttctctcaaaat

SEQ ID NO: 36491 - DNA, 444 bp, Homo sapiens
atacgactactatagggcgaattgggccctctagatgcatgctcgagcggccgccagtgtgatggatatctgcagaattcgccctttcgagcggccgcccgggcaggtacagctctccgttgttttatggcctgggaccctgaagagaaaagccacaaattttaaagtagatactaagttgctagttactatccaagaggcaaacttctagatcaataatgaggaagaaacatcatggcaaatcaagtgaaaggtaattaacacaacaagaaacccgttactgatttctgtaacataaaaatctacctttttcattttgtaaactcaccttcccatcccaaatagcagtgaagccttcaaaaatcttgaatttattcatcatcgaacataaccaattctcacaattttgcactatcttaccaataatatctttcctgttgccag

SEQ ID NO: 36492 - DNA, 406 bp, Homo sapiens
gcgaattgggccctctagatgcatgctcgagcggccgccagtgtgatggatatctgcagaattcgcccttagcgtggtcgcggccgaggtaccagccagttactgagcccctgtcacccttgaagtgagttccacctgaccagtcttgagcagccaacaggcttaattaagcccgcctggtttttacatatggctcatgatctaatttaaggaacaagtaactaaaaatgttaagccagtgcaaaataatctgcttacctactcacattggaaaagccctctgagctgaataattttggccattcctgctgtcaacaatactgctgcccaaatgcggcttatgaggctgcttctgccacaaaaccgtcatactcttgtgcgtgccttgttctttgttcattcatct

SEQ ID NO: 36493 - DNA, 396 bp, Homo sapiens
tacgactcactatagggcgaattgcgccctctagatgcatgctcgagcggccgccagtgtgatggatatctgcagaattcgcccttagcgtggtcgcggccgaggtactatctacctcacagagctacgaaaatcaaatgagaaggggtatggcactgaccacagcagcatactgctatgaacgtggttaacagatagacaggcacgccccctggagggctgctcccttcactactggcgcattatcgtgcagttcactttggaaaatatttttcttctaaatctatttttagtattgaacagcacactggagtttttgtccagaagtttgactttagaagataagaaataactgagcgtattgcaagcaggagttagaggaagagactcagtact

SEQ ID NO: 36494 - DNA, 552 bp, Homo sapiens
tatagggcgaattgggccctctagatgcatgctcgagcggccgccagtgtgatggatatctgcagaattcgcccttagcgtggtcgcggccgacgtacgcgggggtccagggttgctaggaaaagaaatcagcagacacaggtgtagaccagagtgtttcttaaatgggtaattttgtcctctctgtgtcctgcggaatactggccatgcctggagacatatcactcaatttctctgaggacacagataggatggggtgtctgtgttatttgtggggtactacagcagtcaaagagatcttcactagagatcagaaagaagcaccactattttcttctatgacgtgtatgtgttggtcatgagcatgctagtatgaataaggcaatgtgttaagcactggcatacaaatgcagctaaaggtgctgaaggaaggcagtggggtggtgcaggcacacagcaaggagctctttcccgtgacacgttagtcatcttctccacagagcagcagaagagctttcttaatgtccccagatgtatcttccttaatcatgg

SEQ ID NO: 36495 - DNA, 152 bp, Homo sapiens
gaattggggccctctagatgcatgctcgagcggccgccagtgtgatggatatctgcagaattcgcccttagcgtggtcgccggccgaggtacaaaaagaacaatataattttcacatgaacccttggctgagtgcctttcctagctccactc

SEQ ID NO: 36496 - DNA, 588 bp, Homo sapiens
gactcactatagggcgaattgggccctctagatgcatgctcgagcggccgccagtgtgatggatatctgcagaattcgccctttcgagcggccgcccgggcaggtaccatggtaattgagatttggtgtaagtgtaaaatatataacagattttgaagacagcacaaaagaacgtaacataattcatttaaataataccgatgacgccaggcacggtgcctcacgcctgtaatcctagcactttgggaggccgaggtgggtggatcacctgaggtcaggagtttgagactagcctggccaacatggcgaaaccccatctctaaccaaaaatacaaaaattagtgggcatggtggcgggtgcctgtaatcccagctactcgggaggctgaggcaggagaatcacttgaacctggaaggtggaggttgcagtgagccgagattgtgccactgcactccaacctgggcaacaaagcgaagcactatctcaaaaaaaaaaaactaaaaaaccgatgacatgttgaaatgctattttggatacattgggttaagtaaaacatgttaaaatgaatttaacctgtttccttttac

SEQ ID NO: 36497 - DNA, 585 bp, Homo sapiens
atacgactcactatagggctaattgtgccctctagatgcatgctcgagcggccgccagtgtgatggatatctgcagaattcgccctttcgagcggccgcccgggcaggtacgcgggacaacacccaacacccatgagttcagtccttaagaaggaaaattgagcacgtatttaattggttggacattgcataaaagaggtccatatccaggctaactctagaaattttattctcaaacttagttggcctctttttcttctgtcagaggaccattcttagtggcactggggaaatcttggcacccagaagaattcaactgcgctcactgcaaaaatacaatggcctacattggatttgtagaggagaaaggagccctgtattgtgagctgtgctatgagaaattctttgcccctgaatgtggtcgatgccaaaggaagatccttgtagaagtcatcaatgcgttgaaacaaactcggcatgttttcttgtttgtgtgtgtagcctgcggaaagcccattcagaacaatgtttttcacttggaagatggtgaaccctactgtgagactgattattatgccctctttg

SEQ ID NO: 36498 - DNA, 325 bp, Homo sapiens
tagggcgaattgggccctctagatgcatgctcgagcggccgccagtgtgatggatatctgcagaattcgccctttcgagcggccgcccgggcaggtacctgaggagaatttcttcaatgttcctgctttcttaactgtctcaggacaacttcatctagaagtgatgtcaggagcttttactcaagtgtttacctttggtccgaccttccgagctgaaaattctcagagccggaggcacctggcagagttttatatgatagaagcagagatttcttttgttgacagccttcaagatcttatgcaggttatagaggaactgtttaag

SEQ ID NO: 36499 - DNA, 413 bp, Homo sapiens
agggcgaattgggccctctagatgcctggcctcagcggccgccagtgtgatggatatctgcagaattcgcccttagcgtggtcgcggccgaggtactttaattagaacaaaagaccgacattaacttcaatgcaacataataattcataataatgattgtatattaatctcttgagcttgtaggaatatagcacatgacatacggcatgatacaggcacctgtgtgatcctttggggacttaggtggtgcatattaattagcccctggaaaataaaatctgcttccttctgagaaaagctacctcagtgcttattggcttaagccatcaaagaaattagatgaaatactgttaggctgggtctgcactcattaaagctttgtctagatgtaagcactgaatcaactgcctctg

SEQ ID NO: 36500 - DNA, 437 bp, Homo sapiens
atagggcgaattgggccctctagatgcatgctcgagcggccgccagtgtgatggatatctgcagaattcgccctttcgagcggccgcccgggcaggtactacatatgcagaatctgatacaatgttaatagactgattaaaatcttgttaacactgcaatgacggcaaccaactctgctctttgagtcaagtgatactgagttttgatgacccattcttttggcccggtgtaagccacttttccattgctggaaccatcagtaaacactgccagagcattttttaaaggcttatgtttggtaactttaggtaaaatccaagtagtcaattttaaaaactggaagatttttgttttggggtaacgattgtcaataattcccacaaaatcggcaagaccaatctgccatgcaccagaattgataaaggcttgtctaacc

SEQ ID NO: 36501 - DNA, 337 bp, Homo sapiens
atacgactactatagggcgaattgggccctctagatgcatgctcgagcggccgccagtgtgatggatatctgcagaattcgccctttcgagcggccgcccgggcaggtacaagaagagaggatggagacgagggtaggcttcttttcagattatacattctggatcagaaagtctatatcagtgggattttctgaatgacccaagttttttttggttgtttttggttgtttgtttgtttgttttagaaatttctgtgcttttggagctagaaggatatataaatgagaaaaactgagaacaaaaagaagagacaatttatttttgggttgcaaggga

SEQ ID NO: 36502 - DNA, 193 bp, Homo sapiens
agggcgaattgggcccttagatgcatgctcgagcggccgccagtgtgatggatatctgcagaattcgccctttcgagcggccgcccgggcaggtacctgtctcatatgtggtaactacgtggggcagcacactcaaggaatgaaggaagtttcagtgaatgacaactttataaagacagtgttgaggcagccc

SEQ ID NO: 36503 - DNA, 428 bp, Homo sapiens
atacgactactatagggcgaattgggccctctagatgcatgctcgagcggccgccagtgtgatggatatctgcagaattcgcccttagcgtggtcgcggccgaggtacctcaaggaggcagagaagcagcaggcataaactttcctaaatcaagtaaacagtgtcaggaattccgagtgctggttataggtataccgaaacgcctgatgacccctatctaatttctagttatctacacttagtcatttacacacagtctcatttggcatccagaacatgtaccttgtgaaggctttccgtgcacatcgggtcaccagtgaaaagttgtgcagagcccaacatgagcttcatttccaagctgccacctatctctgcctcctgcgtagcatccggaaacatgtggccctacatcaggaatttcatggcaa

SEQ ID NO: 36504 - DNA, 182 bp, Homo sapiens
ggcgaattgggccctctagagcatgctcgagcggccgccagtgtgatggatatctgcagaattcgccctttctagcggccgcccgggcaggtacgcgggatcttatgagaaggctgcatgtgtgcctttaggatgcagacattgatcccggctttcactcagtttaattagggactctttaa

SEQ ID NO: 36505 - DNA, 177 bp, Homo sapiens
  misc_feature 160, 170, 171: n = A,T,C or G
tacgactcactatagggcgaattgggccctctagatgcatgctcgagcggccgccagtgtgatggatatctgcagaattcgccctttcgagcggccgcccgggcaggtacgtgtgctcctggtcctcttccatgtcctcccgatgatagtaaagggattngaatgagagnngtggtt

SEQ ID NO: 36506 - DNA, 486 bp, Homo sapiens
taatacgactcactatagggcgaattgggccctctagatgcatgctcgagcggccgccagtgtgatggatatctgcagaattcgcccttagcgtggtcgcggccgacgtactatacagagtgaacagcatgcagggaccatatgccacgcacggaggcggttacggtcctactcagagcactagccatgctccttaaagctccatcttcctagcttcacctgattttgagtctcagagatcttccagggccctcaattacaatgcaaatcccaaaagaaggcttaacctcagctaaagtccctcctcaactgacacctctaatacccaaataaggatgagcaggaaagacagaagggacaaaaagagtggcaggaagaggaggaataaggaaagtggaaaagccaagaagccttcaggtattctaaaattatatacccttttctgcacaggatgttttccaaggaaaaaaaagtttaaaaataaaa

SEQ ID NO: 36507 - DNA, 437 bp, Homo sapiens
atacgactactatagggcgaattgggccctctagatgcatgctcgagcggccgccagtgtgatggatatctgcagaattcgcccttagcgtggtcgcggccgacgtaccatcaaagactgtggagtcattgatggtctgtgtgtcctcacccaaaggggcctgatgtgccaccccgggctctatctgtaccacgatgtacaagagttatattaattatacaacacatatctggacacatacaaggaaggcgggcagtttaaaaaaaaaaagttaatcctgtgatattaatggaatgacattttgaggtcttgagaatgggcacaaaagtgggaaatgaatttcagtatgggcaaagacactgaggatgatgttgattagataattcactccgtaatgatcatgctgtgtgctaataagtataaccctggaaagaact

SEQ ID NO: 36508 - DNA, 334 bp, Homo sapiens
ggcgaattgggcccttagatgcatgctcgagcggccgccagtgtgatggatatctgcagaattcgcccttagcgtggtcgcggccgaggtacacaaaatgttctttttgttacaagagctgagttgcatatactgtagataaatcatattatttttgccaatttcacaaattcctctggcccatcatgtcagtcattattgagtatatgcacacattgctacttatttgattatgtatcttttaaattgattcagtgcatagaaaactatctcttacaaactttaagtgctctgatatgacttcccccccaaattttattatgaacatttttaa

SEQ ID NO: 36509 - DNA, 426 bp, Homo sapiens
tagggcgaattgggccctctagatgcatgctcgagcggccgccagtgtgatggatatctgcagaattcgcccttagcgtggtcgcggccgaggtacgcggggagaaaatgagagtttcagatactgagaatagaaccactaagaagcagaaaagagaagatattctcgtgggggagaacaacggctgggagggggggaagcatggccaaggcaaagaggtgggcattaataagaactgcttcttgctgccgccatatgaagaaggacgtgttcgcttccccttcctccatgattgtaagtttcctgagaccttgccagccatgctgaactgaatacaacatgtttaagaccacagaacatctgcatagggctgtaaattttcgctgaatgatggatgcaaagatggaagacagatggatagaggaa

SEQ ID NO: 36510 - DNA, 477 bp, Homo sapiens
  misc_feature 418: n = A,T,C or G
tactatagggcgaattgggccctctagatgcatgctcgagcggccgccagtgtgatggatatctgcagaattcgccctttcgagcggccgcccgggcaggacgcggggacacacagcacctgcacgcagatgcacacatctctagtcaaatgaggctctcagctttttgataggggctttttgatacgtgtataaccaatactttattctcactgtagtcaaggactcattgcaattcagaaatgagaagctgatccggaactccactacagctcaaagaaattctcgaatgttctcacctattaacagttattaaaatggaagaagctggggatgaaattgtgagcaatgccatctcctacgctctatacaaagccttcagcaccagtgagcaagacaaggataactggaatgggcnagctgaagcttctgctggagtggaaccagctggacttagccaatgatgagattttcacc

SEQ ID NO: 36511 - DNA, 432 bp, Homo sapiens
gcgaattgggccctctagatgcatgctcgagcggccgccagtgtgatggatatctgcagaattcgccctttcgagcggccgcccgggcaggtactacatatgcagaatctgatacaatgttaatagactgattaaaatcttgttaacactgtaatgacggcaaccaactctgctctttgagtcaagtgatactgagttttgatgactcattcttttggcccggtgtaagccacttttccattgctggaaccatcagtaaacactgccagagcattttttaaaggcttatgtttggtaactttaggtaaaatccaagtagtcaattttaaaaactggaagatttttgttttggggtaacgattgtcaataattcccacaaaatcggcaagatcaatctgccatgcaccagaattgataaaggcttgtctaacc

SEQ ID NO: 36512 - DNA, 678 bp, Homo sapiens
tacgactcactatagggcgaattgggccctctagatgcatgctcgagcggccgccagtgtgatggatatctgcagaattcgcccttagcgtggtcgcggccgaggtactacaataatcctcaagatactgaaagtaatgccaagtgaaagaccaagggggtgggtggagggctaatgggctggaagaaatagccacttgattgctagttcatacaagatgtggcagcaactccttttctggctggagatcttggatgtcacatcttagaatcaggtggcaaagcatctgtgaagggcaatgtggcatcccagacagtgggtggtgagatcaggaagaaaaaatggaaatcaacagatggtggatcctacagctgagaactgattcttcaatttgacatggttggcataaacattttaaatggagcttggtaaagatcaggttattttaccattgaccaagctcttggcttctaaaaggtcctaaatttttgtttcctttgctttcacgagtgtttatttgctttccaggaacttcaaggaaaaaggttaagtaatggagggaggaaagagggaggggttggcagatcaaacacaggacttaaaagtcctagatctaaacctttgaatccccagatattttatgttataaaaagatgtcccactttcagaatccagttc

SEQ ID NO: 36513 - DNA, 445 bp, Homo sapiens
actactatagggcgaattgggccctctagatgcatgctcgagcggccgccagtgtgatggatatctgcagaattcgccctttcgagcggccgcccgggcaggtacttggcaacacaggggattgttatacctccagctactgaaaaacacaatcttattcagcatgcaaaagattactggcaaaagcaaccacaactgaaattgaaggaaacgccagagccagttacaaagacagaggacatccacctatttcaacaggaccacctcaagatgaatggggaccacagcacttctggcatgatgtgaagcttaggttttattacaacacatcagaacaaaatgttgtggactaccatggagcagaaatcgtgagccttcgtttgctgtcactagtaaaagaagaatttctttttctcagccccaacctagattcacatggactgaa

SEQ ID NO: 36514 - DNA, 436 bp, Homo sapiens
tacgactactatagggcgaattgggccctctagatgcatgctcgagcggccgccagtgtgatggatatctgcagaattcgccctttcgagcggccgcccgggcaggtacgcgggggctgagccgggagcgctgactggcccggctgggcaggtcttgactcgtctgctgaacaaatcctctgacctcaagccggctgtgaacgtagttcctgagagatagcaaacatgcccaacagtgagcccgcatctctgctggagctgttcaacagcatcgccacacaaggggagctcgtaaggtccctcaaagcgggaaatgcgtcaaaggatgaaattgattctgcagtaaagatgttggtgtcattaaaaatgagctacaaagctgccgcgggggaggattacaaggctgactgtcctccaaggaacccagcacctacca

SEQ ID NO: 36515 - DNA, 427 bp, Homo sapiens
actactatagggcgaattgggccctctagatgcatgctcgagcggccgccagtgtgatggatatctgcagaattcgccctttcgagcggccgcccgggcaggtactttctgatttttctacaaagattgtgtattacttgtataataaaaataagagctttaaattgtgaaattcttctggatttggttttctcattttattatggaatttttcatacctaaataagatgaatagttgggtaattttttttctgctttgtcagttattggtgtttgttaacttcttaaaaaaaattaaaaagaacttgggaagctctgtttttctatgccctggaaacatttaaatatttagaattttttgctctttgaagtttttataacatgtatgaaactgtccaaatctagtagtgcctttttaggaaatatg

SEQ ID NO: 36516 - DNA, 379 bp, Homo sapiens
agggcgaattgggccctctagatgcatgctcgagcggccgccagtgtgatggatatctgcagaattcgccctttcgagcggccgcccgggcatgtacgaaaaaaatcaggctactaagcccactgttaatatagacgcagaccaattgttaggaacaggtccaaattggagcaccattaaccaacaatcagtgatgcagaatgaggctattgaacaagtaagggctatttgcctcagggcctggggaaaaattcaggacccaggaacagctttccctattaattcaattagacaaggctctaaagagccatatcctgactttgtggcaagattacaagatgctgcttaaaagtctattacagatgacaaggcccgaaaa

SEQ ID NO: 36517 - DNA, 431 bp, Homo sapiens
tacactactatagggcgaattgggccctctagatgcatgctcgagcggccgccagtgtgatggatatctgcagaattcgcccttagcgtggtcgcggccgaggtacctccagcaatgagaagcagagagggctaggttgacggtctcaaactggcaccggggagccccgtgactgggttttaagggtgtgtgaatgaagattaaaatcttgtttgatattaacatgggttcagtttttttttttaatgtcactaagccatgctgtagagcccttctggaaggacttaggtgggacaaagagccagagtccacaacttctgtattgttcacagggccctagtgcatcctgggaagtttctctggcaccggaggtgagttttcctaggtaggaaagcgaaggttgcaggaaagaagaaattataaggctatat

SEQ ID NO: 36518 - DNA, 433 bp, Homo sapiens
ctatagggcgaattgggccctctagatgcatgctcgagcggccgccagtgtgatggatatctgcagaattcgccctttcgagcggccgcccgggcaggtacactcagagtcatcttataactggaaactgtcaggtggtcccccaccccagtgagtgtatgaaagagtcaagaaaaagattggaaacaaactattgggtgaataattggttgctctattattattattattattatttgcctttttttaatcaccatttatttgtgtaatctttctccattgattggctgtcattcttataatatctgaactaccccataaaataattctctgacttaaaggcatttagctgttgcttatcgtttttacatcctctattcaactaagacactgtctggagagttattttttccagatggatcgttggcctaaa

SEQ ID NO: 36519 - DNA, 360 bp, Homo sapiens
atgctcgagcggccgccagtgtgatggatatctgcagaattcgccctttcggcggccgcccgggcaggtactttttacaatgaagggatatggcagcatggatactgggtagctggctaggctctaaatacctgatgactcaacgctttgcacaaaccaatcttgctgattattaaaatttgtccctgggcaaaaataaggcaatgcatgctaaggcttcaaatgcaaaggattcactgtagtttgattctttcaagaaatagaaaatcgaccataacctttgcctttattaatccatggtgatacactacacttataacaagatatctaactggtgtttcaatgattttctgaaatgtc

SEQ ID NO: 36520 - DNA, 574 bp, Homo sapiens
gactcactatagggcgaattgcgccctctagatgcatgctcgagcggccgccagtgtgatggatatctgcagaattcgcccttagcgtggtcgcggccgaggtacaattttaagatgattttgagggttgtatttctttatcatttaaaaatatcctaaagtcagtaatttatataaggaaactcattcattattgaaggtattaaaaatagccatcatctgtattaggtagcagttttggaggatcatctttttcttttgctataaagccctattaatgaagaatacttccagtagagttaatagctgtagcttacctagtgtgttaatgaagtgtgtttatttatgtgacttgataccagtagtcataatagagactgaagaggtatgcgttaagcacgcctacttctatgcagtaaacaggctgcagctgcctagattagattcttagaaatgtcatattttgaattgttttatttcttggaggggaagctttgtcccacttcattcatttgtatgccataagaattacatattggttatcattacgtatctaacaagattcagaaacaaa

SEQ ID NO: 36521 - DNA, 188 bp, Homo sapiens
atagggcgaattgggccctctagatgcatgctcgagcggccgccagtgtgatggatatctgcagaattcgcccttagcgtggtcgcggccgaggtactatatgccatggatgtgaatttcccatagaagctggtgacatgttcctggaagctctgggctacacctggcatgacacttgctttgtatgc

SEQ ID NO: 36522 - DNA, 441 bp, Homo sapiens
cgactactataggcgaattgggccctctagatgcatgctcgagcggccgccagtgtgatggatatctgcagaattcgcccttagcgtggtcgcggccgaggtactttttttttttttttttttttttttcgctctttgtaaattctttattgccaggagtgaaccctaaagtggctcacaagagtgccctatttctttcaattaactacaaggacaaacacatctcaaagttgagataagtgaccagtatgatttgccaaaattctaaagcgcactcaccatgaaatggataaaggttacctttggggatttgcactgcatgaattctgtgaaaagcttgttggatattgtgatagagatagagaaatgaagtatattatataagatcctatgaggttccctgcctttgcttcacatcccaagcttacaaacgtgccccat

SEQ ID NO: 36523 - DNA, 430 bp, Homo sapiens
tactattctacggcgaattgggcccttagatgcatgctcgagcggccgccagtgtgatggatatctgcagaattcgccctttcgagcggccgcccgggcaggtacagatctcatcaggtatgagggcagtctctgacgcgaacgtctcttcctcgtggtttttattgtcagtattcacacgaagtttaagtctcctagtgggcacccagacgggattgacgatctcctggtaaaacacaagcataccctcttccccacgttataattgttccaggttcccaggtattggtttgggagtttttccatgacactggcttgccttcgtttagggagaattttttgcctgtataatggcatttagctgcagtcagagtattgtttttaggaacattttaaaagcttaaacaatgctaaatataattgggagtgg

SEQ ID NO: 36524 - DNA, 178 bp, Homo sapiens
cgactcactatagggcgaattgggccctctagatgcatgctcgagcggccgccagtgtgatggatatctgcagaattcgccctttcgagcggccgcccgggcaggtacattgatgggctggagagcagggtggcagcctgttctgcacagaaccaagaattacagaaaaaagtccagg

SEQ ID NO: 36525 - DNA, 420 bp, Homo sapiens
  misc_feature 279: n = A,T,C or G
tactatagggcgaattgggccctctagatgcatgctcgagcggccgccagtgtgatggatatctgcagaattcgccctttcgagcggccgcccgggcaggtactgttacaaacggagagaataaaagggcaaactgaaataatagatcctggaatagcacagacactgacctctgaccacagaccaaaagttagggcctagttgtatttcttagaaatacaaagaaaacaagtttagaatcatagaaaacactgttaacacattagcctgggaggtggnactttttttttttttttttcgagactctagtcttgctctgttgcccaggttgctgtgcagtggcgtgatcttggctcactgcaacctctgcctcctgggttcaagtgattctcctgtctcagcctcctgagtagctgggat

SEQ ID NO: 36526 - DNA, 439 bp, Homo sapiens
gaattgggccctctagatgcatgctcgagcggccgccagtgtgatggatatctgcagaattcgccctttcgagcggccgcccgggcaggtacgattccttagtgtgggagttcctggaactggaggttgttcactttcctcattatccttctttaaaagggagccaaaatctataccagattttaggaactcagtgtaagtccccctctgcaccattttaccatctttcaatatcagaatctgacttgcagctttgaggtacatgctgccaagggtcgggtgccaagagagagcagaatgaagccaggtccccaaggaagtgagggcccaaaatagggagtgtgggtgatgagggtggagttcaaatccagatgtcagagctacaatcgcccccagggtagcggagctcatgggcaagggctgggccaaggggctcctt

SEQ ID NO: 36527 - DNA, 426 bp, Homo sapiens
actactatagggcgaattgggccctctagatgcatgctcgagccggccgccagggtgatggatatctgcaaaattcgccctttcgagcggccgcccgggcaggtaccacaatttataaagaaaccaatgatctcaggagatatttttggtctgtcttccctgaaataagaattgtgttttggaaatctaaagggtgttctgttccaaaatcttaagttattagttatttccacatcaaatagcaaacactacaatacagccagggaaagaggatcttccaaacaaacaaaaaaggtatgttttctagattgctccactactaaatgagaacttttttttttgaggcataattataaatcaagttcttgatcaattttacaaatctttcccagtgacaagctcatatttccaataaaaagtgctctt

SEQ ID NO: 36528 - DNA, 394 bp, Homo sapiens
cttgactgactgctcgatggtccagccacatgatgacgtttcgatgggaatccccttcctggttgactggtaatgggtgaaactgcttatccaaaacaaccagagaacacgtggcatcaaacccaagtcctcgaatttggtttaaatcaatcccttgtacaccctggcacagtccaatctgaactggttcggcactcacctttcatgagatggatgtggtggcttttctcctttttcatcaagactcctcagcagggagcccagaccagcctgcactgtgccttaacagaaggtcttgagattctaagtgggaatcattccagtgactgtcatgtggcatgggtctctgcccaagctcgtaatgagactatagcaaggcggctgtgggacgtca

SEQ ID NO: 36529 - DNA, 363 bp, Homo sapiens
ctatagggcgaattgggccctctagatgcatgctcgagcggccgccagtgtgatggatatctgcagaattcgccctttcgagcggccgcccgggcaggtacaccgactacggcggactaatcttcaactcctacatacttcccccattattcctagaaccaggcgacctgcgactccttgacgttgacaatcgagtagtacgcgggggtcggtagaggcagaaggagaaggtcgggttgtagaagctggggtggccggcagctcgctcatcggtgttcgtgggctttgtcggtccgtgcctcgtctctccctggaaagggagggaggctttcgacgtcgagaggggagccgctgccgcgttag

SEQ ID NO: 36530 - DNA, 414 bp, Homo sapiens
actatagggcgaattgggccctctagatgcatgctcgagcggccgccagtgtgatggatatctgcagaattcgcccttagcgtggtcgcggccgaggtactatcattataccctttccctcaatgccatcttacattttagggataagttttaagccaaactataaggctacctggaatgctgagacaacacacaaattctgctgagtccccgtcacagactacttctgaaggtcaccggtgagggcctaaacaagagtccacttcttgttagtataataactttttatttgacatctacaagattttggcatcctgcagctttttaccaggtttatacaatctcgatttttcaatagtgcaacctgtggaagcaaaaaaaaaaaaaaaggaaaaaagtccttttttttttttt

SEQ ID NO: 36531 - DNA, 440 bp, Homo sapiens
  misc_feature 204: n = A,T,C or G
ctactatagggcgaattgggccctctagatgcatgctcgagcggccgccagtgtgatggatatctgcagaattcgccctttcgagcggccgcccgggcaggtactcttgagtctatttaggtctattacatctttacagtgaaaacaggatacaatattgtgctactgtgggtctcttcctgactgcagattcagtaacatggntgttcgtagcttgaaactgtccacagtgggagtatttacaccatagaaactggctggcaaatgctacaaactagcaattttaattcctggaaaggcaattgtcgagcatttaccagcacacaatgaatgccatattcttttttttattaggaaataaattattggaggcagtataaaattatttaaaaagtatcaaatgcaatcccttatcttcagatggctataatttttggtta

SEQ ID NO: 36532 - DNA, 573 bp, Homo sapiens
  misc_feature 383, 532: n = A,T,C or G
atacgactcactatagggcgaattgggccctctagatgcatgctcgagcggccgccagtgtgatggatatctgcagaattcgccctttcgagcggccgcccggccaggtcctataagtatcatttacagatgaaatggagacctaaaacagagccagcaatttgggtaacagaaatagagctccactgaaaattaggagacctgaatttcttgtcttgacctgcaagctgtgggaaagtctttaactcctctattgctattattaaataccagtaacaacttctcggcttacttcacaaagctcttgtgatgatcaaatgaaataatgtgaaaccggtttataaacctagagtattaatgttattccgtggaaaattacatanacacaaatatctttggaaaggtaatttaaacaaagtttgtggaaaagataaaataacattatgctaagtcctttcatgttttttcattggccttatttatattagtttagaatactttatttcaaaaattaaaagtttaaatacttaanaggtttccaaatatttacagaattgtgtctgaaaaattatg

SEQ ID NO: 36533 - DNA, 132 bp, Homo sapiens
gccagtgtgatggatatttgcacaattcgcccttatcgtggtcgcggccgaggtaccaacaacccctttcctcccaagttaggtgagcccttgtgccaatgtatgggcagaaaagcagatttgtgatccttc

SEQ ID NO: 36534 - DNA, 581 bp, Homo sapiens
gactcactatagggcgaattgggccctctagatgcatgctcgagcggccatctgtgtgatggatatctgcagaattggcccgttgcggccgcccgggcaggtactcaaagtctttgggtaggcaattctgatgaagatgaggagcaagatgacaaaaatgaagagtggtatcgattgcaagaaaaaaaaatggaaaaagacccaagcagattgcttctttgggctgctgaaaagggggggtaaaaaaaaaaattacagagggaagtgtgacagtaggaaaagcactgggttcaagccagaagacctgcctttactgttatggccatcatacctatctcttgattgtgaggaccaaatgagacaatgtacctcggccgcgaccacgctaagggcgaattccaatacactggcggccgttactagtggatccgagctcggtaccaagcttggcgtaatcatggtcatagctgtttcctgtgtgaaattgatatccgctcacaattccacacaacatacgagccggaagcataaagtgtaaagcctggggtgcctaatgagtgagctaactcacattaattgcg

SEQ ID NO: 36535 - DNA, 584 bp, Homo sapiens
ctagatgcatgctcgagcggccgtcagtgtgaaggatatctgcagaattcggcctttcgagcgggcgctcgggcaggtactgaaaaaattacgctactaagcccactgttaatataaactcttacgcttttgactgaacatgtccaaattggagcaccattaaccaacaatcagtgatgcagaatgaggctattgaacaagtaagggctatttgcctcacggcctggggaaaaattcaggacccaggaacagctttccctattaattcaattagacaaggctctaaagagccatatcctgactttgtggcaagattacaagatgctgctcaaaagtctattacagatgacaatgcccgaaaagttattgtagaattaatggcctatgaaaatgcaaatccagaatgtcagtcggccataaagccattaaaaggaaaagttccagcaggagttgatgtaattacagaatatgtgaaggcttgtgatgggattggaagagctatgcataaggcaatgctaatggctcaagcaatgagggggctcactctaagaggacaagttagaacatttgggaaaaaatgttat

SEQ ID NO: 36536 - DNA, 413 bp, Homo sapiens
tatagggcgaattgggccctctagatgcatgctcgagcggccgccagtgtgatggatatctgcagaattcgccctttcgagcggccgcccgggaaggtacctttcattggattgtccatggtgaatcgctttagcaagcggcgtgactctccgctgcccgtcatcttggccaatatctatctgctggttcctcctgtgctcaacccaattgtctatggagtgaagacaaaggagattcgacagcgcatccttcgacttttccatgtggccacacacgcttcagagccctaggtgtcagtgatcaaacttcttttccattcagagtcctctgattcagattttaatgttaacattttggaagacagtattcagaaaaaaaatttccttaataaaaatacaactcagatccttca

SEQ ID NO: 36537 - DNA, 220 bp, Homo sapiens
cgactcactatagggcgaattgggccctctagatgcatgctcgagcggccgccagtgtgatggatatctgcagaattcgccctttcgagcggccgcccgggcaggtactgtgatttccttttgggtgtattttgctaagtgaaacttgttaaattttttgttaactaaatttttttcttaaaattaaaggactttttttacaaatgactggcactagatt

SEQ ID NO: 36538 - DNA, 335 bp, Homo sapiens
  misc_feature 142: n = A,T,C or G
tatacgactcactatagggcgaattgggccctctagatgctgctcgagcggccgccagtgtgatggatatctgcagaattcgccctttcgagcggccgcccgggcaggtactcattaaatcttgtgtgacactcacatcaantgaaaggcttgggctctgaatctaaagcaatagattttggaggggcaacaggatgaaatacaacagggaacattgcaccctggttaactgattatcaacctgaagccagtactttattttcaaaacactcatatgttgcaaaaaacacatagaaaaataaagtttggtggggggtgcttgactaaacttcaag

SEQ ID NO: 36539 - DNA, 489 bp, Homo sapiens
cggagcttacattctagcaggaggacaatattaatgtttataggaaaatgatgagtttatgacaaaggaagtagatagtgttttacaagagcatagagtagggaagctaatccagcacagggaggtcacagagacatccctaaggaagtggagtttaaattgagagaagcaagtgcttaaactgaaggatgtgttgaagaagaagggagagtagaacaatttgggcagagggaaccttatagaccctaaggtgggaaggttcaaagaactgaaagagagctagaacagctggagccgttctccggtgtaaagaggagtcaaagagataagattaaagatgtgaagattaagatcttggtggcattcagggattggcacttctacaagaaatcactgaagggagtaatgtgacattacttttcacttcaggatggccattctaactccagggggtagactggactaggtaagactggaggcaggtagacc

SEQ ID NO: 36540 - DNA, 352 bp, Homo sapiens
agggcgaattgggccctctagatgcatgctcgagcggccgccagtgtgatggatatctgcagaattcgccctttcgagcggccgcccgggcaggtacattattcaggtagctgagggaggggacaggaacctgaatcttcaacagaagcaaacaaactgggatggagggcccagcctcatgaaagggacccaaagggaccccttcctgaaggctgtgtgggtagcttgagcagagctaggcggcttgacggaccaacatcttctccagctggttgaagacaagcttctcataagacaatgcttgcatgttaacagcccccaggcaaccaaacaacacccaagcctgacaaac

SEQ ID NO: 36541 - DNA, 415 bp, Homo sapiens
ctactatagggcgaattgggccctctagatgcatgctcgagcggccgccagtgtgatggatatctgcagaattcgccctttcgagcggccgcccgggcaggtacgcggggagactggttgagccgggtagggaaagcagcctaaagcccgggacaggcacacaggcccaggtgtgtaggccacagcagccgcagtcctgaaaggctgcaacacccagacctccaggagagaccaggcccaggatgcctcgcctgttcttgttccacctgctagaattctgtttactactgaaccaattttccagagcagtcgcggccaaatggaaggacgatgttattaaattatgcggccgcgaattagttcgcgcgcagattgccatttgcggcatgagcacctggagcaaaaggtctctgag

SEQ ID NO: 36542 - DNA, 431 bp, Homo sapiens
tatagggcgaattgggccctctagatgcatgctcgagcggccgccagtgtgatggatatctgcagaattcgcccttagcgtggtcgcggccgaggtactgtggcatggcgcagtgggtgacagatggccacatagcggtcaaaagccatggccagcagcactgtggattccatgccagatgaggagtggatggcaaacatctgtagcagacaagcatcaaactggatggtagtggaattgaaccagaagatggccagcattttgggcatggatgaggtggagatgaggatgtcaatgcctgaaagcatgcaaagaaatatatacatgggctcatgcaggctgtgctcagtccgcacaatgtagatgattgtcaagttacctagcacagcaataaggtagagggagcacaatgggaaggccaaccagaactg

SEQ ID NO: 36543 - DNA, 429 bp, Homo sapiens
  misc_feature 362: n = A,T,C or G
gactactatagggcgaattgggccctctagatgcatgctcgagcggccgccagtgtgatggatatctgcagaattcgccctttcgagcggccgcccgggcaggtacatgggactacaggcacgccccaccatgcccagctcatttttgtatttttagtagagacagggtttcaccatgttggccaggatgatcttgatctcttgacctcatgatccgcccctcttggcctcccaaagtgctgggatcacaggcgtgagccaccacacctggccctctatttattctctttaaagagagagaaaactatgagaggccaaaattatttaattaaatctttaccttagcacaagggaaaaaatgngaatttgcctaatataggttgatgaagcatacacaatggaaacagaaacaatcacattttagtaaaa

SEQ ID NO: 36544 - DNA, 647 bp, Homo sapiens
gactactatagggcgaattgggccctctagatgcatgctcgagcggccgccagtgtgatggatatctgcagaattcgcccttagcgtggtcgcggccgaggtaccggaggtataaacaacataaaactgacttggaaacgattcctcagcagcgccccattgatctgccctgccaagtgactggctgccagtgccgggcttacctttatgtccccttgaatggtagccagcccattcgctgcaggtgcaaacactttgctgatcagcacggtgctgcgcctggctttacatgcaatacatgttccaagtgttcaggattccatagctgcttcacttgtgcttgtggtcagcctgcatatgcccatgacacagtagtggaaactaagcaagaaagattggctcaggaaaaaccagtgggacaggacattccttatgcagccatgggaggattaactggtttcagctcgctggcggaaggctacatgcggttagatgacagtgggattggtaagtgatactatatgaaatgtgagcccattgtattgtttttatgtgtgctaacaatagtgaagccttatatttggtaaacaatttatagtatttttctttcagaaaacattctctcggttgatttttattttttaaaa

SEQ ID NO: 36545 - DNA, 440 bp, Homo sapiens
actatagggcgaattgggccctctagatgcatgctcgagcggccgccagtgtgatggatatctgcagaattcgccctttcgagcggccgcccgggcaggtactgctgcagagccctctccagaccagggatggacacagtcagaccatttaggatatagcctgcattaagggcctctgcttctgctccaggacatttaggtagaaggtggctcggtcccttacttccccgcgtactgactccctcctaccaaggtagatccagacgctgccacctctaaatgtcctactcatcagcatttgaacccaatgatcttccctggtagggctctatttctttaggtgaccaaccagaccctaagcgaggagttgactacattgcactccttccatcctggaagggccagaggttcatcttcacagggataggcacctattccat

SEQ ID NO: 36546 - DNA, 419 bp, Homo sapiens
tatagggcgaattgggccctctagatgcatgctcgagcggccgccagtgtgatggatatctgcagaattcgccctttcgagcggccgcccgggcaggtacgaggtttaagggatatgctgaacagcagtgcaatggacataatgtattatactagtccactttatagagatgaactagttaaaggccttcagcaagagctgaatcgattgtattcccttttctgttctcggaatccagactttgaagaaaaagggggtaaagtctcaatagtatcacattccttgggatgtgtaattacttatgacataatgactggctggaatccagttcggctgtatgaacagttgctgcaaaaggaagaagaattgcctgatgaacgatggatgagctatgaagaacgacatcttcttgatgaact

SEQ ID NO: 36547 - DNA, 70 bp, Homo sapiens
atacgactcactatagggcgaattgggccctctatagcatgctctagcggccgccactgtgatggatatc

SEQ ID NO: 36548 - DNA, 417 bp, Homo sapiens
tacgactactatagggcgaattgggccctctagatgcatgctcgagcggccgccagtgtgatggatatctgcagaattcgccctttcgagcggccgcccgggcaggtacgcgggggaagtggtagcagttcctcctaactcctgccagaaacagctctcctcaacatgagagctgcacccctcctcctggccagggcagcaagccttagccttggcttcttgtttctgctttttttctggctagaccgaagtgtacgcggggctttcctttcagcggagcgcggcggcaagatggcagtgcaaatatccaagaagaggaagtttgtcgctgatggcatcttcaaagctgaactgaatgagtttcttactcgggagctggctgaagatggctactctggagttgaggtgcgagttaca

SEQ ID NO: 36549 - DNA, 440 bp, Homo sapiens
ctactatagggcgaattgggccctctagatgcatgctcgagcggccgccagtgtgatggatatctgcagaattcgccctttcgagcggccgcccgggcaggtacagaatttattatgaaatagcttaatggcaagtggtaatttagaagaattaagttatcagataggagatatattaaaatatttaaaaattggatatattcttgaagcccttttacacaagtaatttctataatttgattgtaatgaaagtataatataccttgttactattatcagattaatttttgaaagtagaattccttaatcaagccaaggttatgctgctttataagaaattaatcaggtagtttaacactagagctcattagccaacctgtatgtagcacaaaataatcatctctgataaatacctataaatatattttattcatactttt

SEQ ID NO: 36550 - DNA, 358 bp, Homo sapiens
  misc_feature 25: n = A,T,C or G
tacgactcactatagggcgaattgngccctctagatgcatgctcgagcggccgccagtgtgatggatatctgcagaattcgcccttagcgtggtcgcggccgaggtactttttttttttttttttttttttaccagtgtgtttaatttacttctaaggttttaatttttttccttcaactaaacaaatgagtccagcttggttaaaaacattttttaaaaagtctttcacaactggcagcaaaagttacagaataatttttctttagatccttgctgagaacctcttacaaaaaactaaaatgttaatattaccctgatactctgggtgcagaatttctgtctggcaattttatatac

SEQ ID NO: 36551 - DNA, 473 bp, Homo sapiens
actctgcagaattcgcccttagcgaggtcgcccccgaggtacgttgaaatattaggggcaggttctcccaatatctggcgcccaacgtggttttctttttcctaagtgcatgtgggaacccgattccctttggtaggtgcggagaaatgttcatcggtccagtccacagaaatgcttgtttggctccccaacgattggtgagttgtctgtgtattctccggggtaactatgggtcacgcagagtctaaacattatgcttatctctgctatattaaattcctgttaaaatgggggagttcgggttcccatggaaaatatggtcaccctattcagggcagtggaagaacactgtccttgatttcctgaaaagggaacgttagatgtggaactatgggatcatgttggtgcaaaattccgagaactggtcccaacaggaaattatgttcctgtcactgattggggtgattgggcct

SEQ ID NO: 36552 - DNA, 402 bp, Homo sapiens
agggcgaattgggccctctagatgcatgctcgagcggccgccagtgtgatggatatctgcagaattcgccctttcgagcggccgcccgggcaggtacctgcattcataccaccagctttcagcttgtagaggtggccgccaagaggaactcgtagttggcagtgccaactacaactactacaccaaccagctggaaactatacaaagagtatgaacaaagttcacaggagaaacaaggctctgcaacatatgaaaatatattctacttcattcataatgagacgcatgaaaattgtaactatatcaataccatttctcacctagtagatgggcaaaaatccaaatgtttgagcacacattctgtgggtgaggctgtggaaacgtaggttcacatacattgct

SEQ ID NO: 36553 - DNA, 472 bp, Homo sapiens
actactatagggcgaattgggccctctagatgcatgctcgagcggccgccagtgtgatggatatctgcagaattcgccctttcgagcggccgcccgggcaggtacgcgggaacactctgtgtgactctacacacacttcaggtggtttgtgcttcaaagtcattgatgcaacttgaaaggaaacagtttaatggtggaaatgaactaccatttataacttctgtttttttattgagaaaatgattcacgaattccaaatcagattgccaggaagaaataggacgtgacggtacaaccagaaccaacaattgtatttctctatagttattttaaaatagtaatcaatgctatgtatttgatgtatatgtttctaaattagaaatttcttttggctttgtgtttttttaatgtgcgttaaatatgtaaactgaaacctgttcctaaaatgcattaaacttgaatgctgtgtcta

SEQ ID NO: 36554 - DNA, 461 bp, Homo sapiens
tactatagggcgaattgggccctctagatgcatgctcgagcggccgccagtgtgatggatatctgcagaattcgccctttcgagcggccgcccgggcaggtactatagattatttgtcttgaagaagagctttgatatgtttcaaaattcgacgttggctttggaaggaaactgtaaatttacagatctttgtccttccccacaaagagccttaacctcacaggttggattatgtggaactcactgctatttttcagttctcctttaagtgactaaggaacatccagatacttccaaaaaaaaaaaagtctaagtttttcactttgtccattgccatttaattatcttctgcatattttaaagcatttcctgtgaacataagtattgcccatccagaaaatttgcgtctacattgattttatgtttaatgaaacctgttcttctcaagttctttatttaat

SEQ ID NO: 36555 - DNA, 429 bp, Homo sapiens
acgactactatagggcgaattgggccctctagatgcatgctcgagcggccgccagtgtgatggatatctgcagaattcgccctttcgagcggccgcccgggcaggtactatacagagcgaacagcatgcagggaccatatgccacgcacggaggcggttacggtcctactcagagcactagccatgctccttaaagctccatcttcctagcttcacttgattttgagtctcagagatcttccagggccctcaattacaatgcaaatcccaaaagaaggcttaacctcagctaaagtccctcctcaactgacacctctaatacccaaataaggatgagcaggaaagacagaagggacaaaaagagtggcaggaagaggaggaataaggaaagtggaagagccaagaagccttcaggtattctaaaattat

SEQ ID NO: 36556 - DNA, 309 bp, Homo sapiens
  misc_feature 303: n = A,T,C or G
ctactatagggttgattgggccctctagatgctgctcgagcggccgccagtgtgatggatatctgcagaattcgccctttcgagcggccgcccgggcaggtaccttgatgttagggtgacttagaaacaattcattagtctttgaattctaaatagctgaagacatgcagctaaaacaataatttttattttaattttttttgtttttgagacggagtcttgctctgtcacccaaaaataaaaataaaaaaactgagatcaaaataaatttagagctaaatcatcagaattaagtagtgactnaataag

SEQ ID NO: 36557 - DNA, 427 bp, Homo sapiens
tacgactcactatacgactcactatagggcgaattgtgccctctagatgcatgctcgagcggccgccagtgtgatggatatctgcagaattcgcccttagcgtggtcgcggccgatgtacatgcaggtcacaggggatatgatggcttagctttggctcaaagacctgacaggggcaatctacctagctctgtttgtaaaatggggatcctaatataacctcttgggataggttgtaagcagtggtggtctggtaaatgttaacaatctagtgtgcagtgtggggagaggaaagtccggattgtaatatttgctgatttctgaggtgtaaatactcccatcactggcaattttaaactccaatgtaacgtcactgagcacagatttgggaaaaggtgcatggcagtacctgcccgggcggccgctcg

SEQ ID NO: 36558 - DNA, 431 bp, Homo sapiens
ctatagggcgaattgggccctctagatgcatgctcgagcggccgccagtgtgatggatatctgcagaattcgcccttagcgtggtcgcggccgaggtactaaggcgaagacagccatcttgggccttacccaggcagctgtgggcgcaccgcccacctacgccccatccgcaacagccacccccgcgtacaggtttttatgtgaacatacattttcattttctgggataaatgctcaaaagggcaactgttgggttgtatggtaaacacatatatttttgtaagaaactaccctactctttttccagagtggctctactttttacatacagccactcatacaattcagacagcaatgtatgattgatccagtttcttcacatcctcaccagcatttggtattactactattttttatcttaaccattcaca

SEQ ID NO: 36559 - DNA, 372 bp, Homo sapiens
tacgactcactatagggcgaattgggccctctagatgcatgctcgagcggccgccagtgtgatggatatctgcagaattcgccctttcgagcggccgcccgggcaggtacctttcattggattgtccatggtgcatcgctttagcaagcggcgtgactctccgctgcccgtcatcttggccaatatctatctgctggttcctcctgtgctcagcccaattgtctatggagtgaagacaaaggagattcgacagcgcatccttcgacttttccatgtggccacacacgcttcagagccctaggtgtcagtgatcaaacttcttttccattcagagtcctctgattcagattttaatgttaacattttggaaga

SEQ ID NO: 36560 - DNA, 454 bp, Homo sapiens
cactactatagggcgaattgggccctctagatgcatgctcgagcggccgccagtgtgatggatatctgcagaattcgccctttcgagcggccgcccgggcaggtacataatctccccttgatgctcttcaacagagacaaggttcttgtctgcagatcagatagatcacagtattaggaaaaaaacataacagcaaatttggaagtacgcggggcttccacaggaggcctacacgccgccgcttgtgctgcagccatgtctctagtgatccctgaaaagttccagcatattttgcgggtacgcggggactggcagattattgcaaaagggcacggggcagagggactatgttgtgagcctgctaaagaagtttgtgtggggactgtgggcagtgaatgcgttgggaacaatatggaaaactgggagctgccttggaatctacagggccgggacc

SEQ ID NO: 36561 - DNA, 426 bp, Homo sapiens
ctatagggcgaattgggccctctagatgcatgctcgagcggccgccagtgtgatggatatctgcagaattcgccctttcgagcggccgcccgggcaggtactgtttgccttatattctatttgtgcttttaaagtgtgtctgttgggaaaacaaaatgtgtaggtggtttgtaagtgaataatttttatttcttcttgtattaaaattttgtttttttctctactttgggagatgtttatttacattgtcagactattcacaaaacagattctaaaatttgtttgctcgtatgctgttcccttcaatgtgatatcagagattactatgaatgttagtttcattccgtgaaacatcacttttcatttaaagacagaatctcttaataagttgaatctagtggaaagaacatagggtattaattctaa

SEQ ID NO: 36562 - DNA, 327 bp, Homo sapiens
gaattgggccctctagagcatgctcgagcggccgccagtgtgatggatatctgcagaattcgccctttcgagcgaccgcccgggcaggtacagtcgagcctgggcggaagagtccggctgatggtgacaggagccgccccgtgtctgccactggctgacttctcaagcagcctgggctgtcagttataaggatacgcagacaatgcactgcgggtgctaaccatcctggagactggaccgagccatgttggggccccatgccggcaatttgataaacttgtgatgtggaagaaatgaatacatggctgccaggcgaggcaagtgtgt

SEQ ID NO: 36563 - DNA, 651 bp, Homo sapiens
acgactactatagggcgaattgggccctctagatgcatgctcgagcggccgccagtgtgatggatatctgcagaattcgcccttagcgtggtcgcggccgaggtacttggatcaaatggctacattaattggtcagggaagattatgaataataacattgtgtggaaatgacccagataaaatcactgttcctttcaacaagcaacaggttagacaagcctttatcaattctggtgcatggcagattggtcttgccgattttgtgggaattattgacaatcgttaccccaaaacaaaaatcttccagtttttaaaattgactacttggattttacctaaagttaccaaacataagcctttaaaaaatgctctggcagtgtttactgatggttccagcaatggaaaagtggcttacaccgggccaaaagaatgagtcatcaaaactcagtatcacttgactcaaagagcagagttggttgccgtcattacagtgttaacaagattttaatcagtctattaacattgtatcaaattctgcatatgtagtacctgcccgggcggccgctcgaaagggcgaattccagcacactggcggccgttactagtggatccgaactcggtaccaagcttggcgtaatcatggtcatagct

SEQ ID NO: 36564 - DNA, 461 bp, Homo sapiens
tacactactatagggcgaattgggccctctagatgcatgctcgagcggccgccagtgtgatggatatctgcagaattcgccctttcgagcggccgcccgggcaggtacgaaaaaatcaggctactaagcccactgttaatatagacgcagaccaattgttaggaacaggtccaaattggagcaccattaaccaacaatcagtgatgcagaatgaggctattgaacaagtaagggctatttgcctcagggcctggggaaaaattcaggacccaggaacagctttccctattaattcaattagacaaggctctaaagagccatatcctgactttgtggcaagattacaagatgctgctcaaaagtctattacagatgacaatgcccgaaaagttattgtagaattaatggcctatgaaaatgcaaatccagaatgtcagtcggccataaagccattaaaaggt

SEQ ID NO: 36565 - DNA, 364 bp, Homo sapiens
  misc_feature 165, 171: n = A,T,C or G
tacgactcactatagggcgaattgggccctctagatgcatgctcgagcggccgccagtgtgatggatatctgcagaattcgccctttcgagcgccgcccgggcaggtacagattcctcttagtcaagtcctgattaaaactccagctaagacattagtaagcctntggttnagtgaagtggcatcagggaagtgcctacattttcatggcctggtagcgttcagtgaaaatgttcattaacagacacaggccattcagtcccgaatcccaagacactgaagaccctgtttgaatcagactcatgggttccttcctagccactctcagggacaggaatgcttctggtgaagaagttttcggtggt

SEQ ID NO: 36566 - DNA, 405 bp, Homo sapiens
gtatacgactcatatagggcgaattgggccctctagatgcatgctcgagcggccgccagtgtgatggatatctgcagaattcgccctttgagcggccgcccgggcaggtacgcggggacatcaatgcagagtccctctgtgaatttacaacacccaacacccatgagttcagtccttaagaaggaaaattgagcaagtatttaattggttggacattgcataaaagaggtccatatccaggctaactctagaaattttattctcaaacttagttggcctctttttcttctgtcagaggaccattcttagtggcactggggaaatcttggcacccagaggaattcaactgcgctcactgcaaaaatacaatggcctacattggatttgtagaggagaaaggagccc

SEQ ID NO: 36567 - DNA, 346 bp, Homo sapiens
gcgaattgggccctctagatgcatgctcgagcggccgccagtgtgatggatatctgcagaattcgccctttcgagcggccgcccgggcaggtactctggcaattcacctttcaattcaaatattctgtagagaacgcttcctctgagaagccactggatgtctgtatggtgcaggaggtttatgtgctgtctgtccaggtttttgttttgggtgttttttttttttttaacatttttgcataaatgggtctttgatacaggtaaccagttttgtaacattattcagaacttcactgtatcttcaagtttttgatatcagcatctctgtggagaaagcgatgtgcta

SEQ ID NO: 36568 - DNA, 203 bp, Homo sapiens
agggcgaattgggccctctagatgcatgctcgagcggccgccagtgtgatggatatctgcagaattcgcccttagcgtggtcgcggccgaggtacatgggactacaggcacgccccaccatgcccagctcatttttgtatttttagtagagacagggtttcaccatgttggccaggatgatcttgatctcttgacctcatgat

SEQ ID NO: 36569 - DNA, 286 bp, Homo sapiens
cgactactataggcgaattgggccctctagtatgcatgctcgagcggccgccagtgtgatggatatctgcagaattcgcccttagcgtggtcgcggccgaggtacagtgaatagacatttggcatagtagatcttaatacttgccacaaagctactgagataatatgataatgatacaagaaataatggaatagacaaataaaacagaaattctccagaaaatgtgtcaaatatgtgtagctattaaaaacacgctggagcatttttaaattgtaaggaaatggtg

SEQ ID NO: 36570 - DNA, 357 bp, Homo sapiens
cgactatatagggcgaattgggccctctagatgcatgctcgagcggccgccagtgtgatggatatctgcagaattcgcccttagcgtggtcgcggccgaggtacatattttggttgaagacaccagactgaagtaaacagctgcgcatccaatttattatagttttgtaagtaacaatatgtaatcaaacttctaggtgaacttgagagtggaaacctcctatatcaattatttagcaccgtttgtgacagttaaccattttcagtggtattgtttaattaataccacttaattatcaaactttatttttttcaccccaggttaaaaatttttaaaatttctaccaaaataaacaat

SEQ ID NO: 36571 - DNA, 441 bp, Homo sapiens
atagggcgaattgggccctctagatgcatgctcgagcggccgccagtgtgatggatatctgcagaattcgcccttagcgtggtcgcggccgaggtacctaacatttctcatccacttcaaaagctgttctgactgccagctggctgatctaagctcctgaggaatgtctcctctcaaaggaatttttccctccaaaggccccctgaagtcctagttggcattggcctggcacatgctttatgttaggcctcccgttgggatggctgtataatcatgaaagacagatcctccgctagcctctgtgggtcaagttttctggaccaccaagttctttgggaaactagtgtttgattttaaaatggcattgtggccccttccttgtttcaagtgactttagaaaaagttaaagcccatttaaaaaaagttagcaagatttttttt

SEQ ID NO: 36572 - DNA, 401 bp, Homo sapiens
atacgactcactatagggcgaattgggccctctagatgcatgctcgagcggccgccagtgtgatggatatctgcagaattcgccctttcgagcggccgcccgggcaggtacacttcggtctagccagaaaaaaagcagaaacaagaagccaaggctaaggcttgctgccctggccaggaggaggggtgcagctctcatgttgaggagagctgtttctggcaggggttaggaggaactgctaccacttcccccgcgtaccaaagagggcataataatcagtctcacagtagggttcaccatcctccaagtgaaaaacattgttccgaatgggctttccacaggctacacacacaaaacgggaaacatgccaagtttgtttcaacgcattgatgacttctcca

SEQ ID NO: 36573 - DNA, 623 bp, Homo sapiens
tacgactcatatagggcgaattgggccctctagatgcatgctcgagcggccgccagtgtgatggatatctgcagaatgcgccctttcgagcggccgcccgggcaggtacatctacctaaaggactattatgtggaataatacatactaatgaagtattacatgatttaaagactacaataaaaccaaacatgcttataacattaagaaaaacaataaagatacatgattgaaaccaagttgaaaaatagcatatgccttggaggaaatgtgctcaaattactaatgatttagtgttgtccctactttctctctcttttttctttctttttttttttattatggttagctgggactagaggaacgtgccaccatgactggctaattttctgtattttttagtagagacagagtttcaccatgttggccaggatggtctcgatctcctgaccttgtgatccacccgcctcagcctcccaaagtgttgggattacaggtgtgaaccactgtgcccggcctgtgtacctcggccgcgaccacgctaagggcgaattccagcacactggcggccgttactagtggatccgagctcggtaccaagcttggcgtaatcatggtcatagct

SEQ ID NO: 36574 - DNA, 391 bp, Homo sapiens
atacgactcactatagggcgaattgggccctctagatgcatgctcgagcggccgccagtgtgatggatatctgcagaattcgccctttcgagcggccgcccgggcaggtacgcggggcttctttcccttcggtgtgccactgaagatcctggtgtcgccatgggccgccgccccgcccgttgttaccggtattgtaagaacaagccgtactttttttttttttttttttttaggtagagaatagtgaccttttgggtaatactttagctgtgaaaatttttcttctaaatttttctactctgaacaggaatgttttaaaacactgttaggcctattgagtgagctatttttctaaaacattttatcctttgaaatacgtatcttattaaca

SEQ ID NO: 36575 - DNA, 345 bp, Homo sapiens
ccctctagatgcatgctcgagcggccgccagtgtgatggatatctgcagaattcgccctttcgagcggccgcccgggcaggtacacctttgactacagctgcagaagtgttcctttagacaaagtgtgacccattttactctggataaggcaaaccggtacattctattgcaaagttacctgctgagctttcattttttgctacctcatttattgattaaatgtttagcacctaagacaaatgtaaagaaagatgcagaaaaatgaatgctggtatcttacttatgtatttaagcacaacacaaaacaaaacccatgtattaacttttttttaggatttttgctt

SEQ ID NO: 36576 - DNA, 354 bp, Homo sapiens
acgactcactatagggcgaattgggccctctagatgcatgctcgagcggccgccagtgtgatggatatctgcagaattcgcccttagcgtggtcgcggccgaggtactactactccctaacccaaaccaggtgattctagtgaagactgtcaataaacggagcatgtgatcaagcagggcccatcagaatccttccctaagatttttataaaaagctggacctattctttttccatttgagtggcaaatatttgaagatatgaggtctaaagctgtgatggcttattctccatccctgtgtgaatgctggtctatagtaagcgaaaaacaaggccattatgcagagggcagcaa

SEQ ID NO: 36577 - DNA, 653 bp, Homo sapiens
acgactactatagggcgaattgggccctctagatgcatgctcgagcggccgccagtgtgatggatatctgcagaattcgccctttcgagcggccgcccgggcaggtacttgagaaaaatggatatttttgtagtaactggttgcagaactctatgtatgcccattaggtttggcgtattaatttttattgttttgttcagttctatatttctgctgattgtctctttgatcaataattgagatgttgaaatctctcaatttaccaaattttcttgtagttctagcactttttacttcatatatagtgactattttcttgttttaaatgtttatattttcttattgaacctttatcattatgtagtgatgcctccatttcaaatgcttcttctctttttgtatcatactaacagagccacaccaacttcctttttgttgacctaatatgctattttttacacttttactttcctactcttaacccctaggctagcctgcttctctacacttttactttcaaacatttcatgtcattctgctttgctgtagcttttggaagcaccatataacagattgtttaaaatccaatctgataatcttggtcttttaatgagaaaatttagttaatttacatttgttattttttgtacctc

SEQ ID NO: 36578 - DNA, 404 bp, Homo sapiens
tacactactatagggcgaattgggccctctagatgcatgctcgagcggccgccagtgtgatggatatctgcagaattcgccctttcgagcggccgcccgggcaggtacaacattggattatttctttgggctgtttccaactcaagattctgttatttcattataagcattttgaggaaggcagttggtataaaggtgcccttagtaataaaagtcagtgtgaagtctaaagaaattccacaatgaatttaaagacaagaattttagggacaaggatacagaaatttgcctagttacttgcacacagcagatggtaaatattttattgactcaatggagtaatgttaaaaataaggtttcccatggactgtgtgaaggccaggcatacttaacatcctttgtga

SEQ ID NO: 36579 - DNA, 406 bp, Homo sapiens
tacgactcctatagggcgaattgggccctctagatgcatgctcgagcggccgccagtgtgatggatatctgcagaattcgccctttcgagcggccgcccgggcaggtacggaagaagaaaatgataattctttagaaaaagatatagcaacgaagatgcgtcttcgggctttatcaaggtatggacttgatacagagcaggtgtggaggaaccacattttagctggaaatgaagatccacagctcaagtcactctggtatactctgcactttatgaagcaatacacagaagatatggatcagaaatctccaggcaacaaaggatcattggtttatgcaggaattaaatcaattgtaaagtcatcgttgggaatggtggaaagcagcagacataattggagtgggtt

SEQ ID NO: 36580 - DNA, 372 bp, Homo sapiens
atacgactcactatagggcgaattgggccctctagatgcatgctcgagcggccgccagtgtgatggatatctgcagaattcgcccttagcgtggtcgcggccgaggtaccatcaaatgagttggtgttaaactgcattctttgaagtcttggggattctgaggagccctcttagggaacatcttggggaagggaaagaaaggggaacttgaggctgggcaggtctgttgtctgtcttcaatcagagcagctttgttttctgttatgtattggttgtccataaaaacaaaacaaaacacagttgcttgaagaaagcataccgctgctaaataaataaagcaatagcaaataacttttgaagatgggccagagc

SEQ ID NO: 36581 - DNA, 422 bp, Homo sapiens
gactactatagggcgaattgggccctctagatgcatgctcgagcggccgccagtgtgatggatatctgcagaattcgccctttcgagcggccgcccgggcaggtacgcggggggtgctcacagctgcccattgcctaaagaagaatagccaggtctggctgggtcggcacaacctgtttgagcctgaagacacaggccagagggtccctgtcagccacagcttcccacacccgctctacaatatgagtcttctgaagcatcaaagccttagaccagatgaagactccagccatgacctcatgctgctccgcctgtcagagcctgccaagatcacagatgttgtgaaggtcctgggcctgcccacccaggagccagcactggggaccacctgctacgcctcaggctggggcagcatcgaacca

SEQ ID NO: 36582 - DNA, 312 bp, Homo sapiens
attgggccctctagatgcatgctcgagcggccgccagtgtgatggatatctgcagaattcgccctttcgagcggccgcccgggcaggtaccccgacgcggtgaagatctgcaatatctgtcacagcctcctcatccagggtcaaagctgcgaaacctgtgggatcgggatgcacttaccctgcgtggccaagtacaagaccacaccggatgtcatctttgtatttggattcagaactcattttggtggtggcaagacaactggctttggcatgatttatgattccctggattatgcaaagaaaaatgaaccc

SEQ ID NO: 36583 - DNA, 625 bp, Homo sapiens
ccctctagatgcatgctcgagcggccgccagtgtgatggatatctgcagaattcgccctttcgagcggccgcccgggcaggtactgaaggctggtgtttcacatccaatattaatgacacctgtccccttttaatcggcgttctcttggtgcctcttttttgttatgcctgtgtcccctgcagcactgtcagtatgttcccagatcacaacatctttttcaatgtcttgaaggttgaaattccctagtttgcttaatgagaatccttcaatccatgatcctagatatacaggcaaaaggggttctttcctctgctgaagaaagaaaatggccatcagggcaaacacataaggtggcagacctccttcttcagggcgatctatactgcaaagctttgcccagtacctcggccgcgaccacgctaagggcgaattccagcacactggcggccgttactagtggatccgagctcggtaccaagcttggcgtaatcatggtcatagctgtttcctgtgtgaaattgttatccgctcacaatttcacacaacatactaacccgaagcataaagtgtaaagcctggggtgcctaatgagtgagctaactcacattaattgcgttgcgctca

SEQ ID NO: 36584 - DNA, 702 bp, Homo sapiens
tacgactcactatagggcgaattgggccctctagatgcatgctcgagcggccgccagtgtgatggatatctgcagaattcgccctttcgagcggccgcccgggcaggtactacatatgcagaatctgatacaatgttaatagactgattaaaatcttgctaacactgtaatgacggcaaccaactctgctcatttgaagtcaagtgaatactgagttttgatgactcattcttttggcccggtgtaagccacttttccattgctggaaccatcagtaaacactgccagagcattttttaaaggcttatgtttggtaactttaggtaaaatccaagtagtcaattttaaaaactggaagatttttgttttggggtaacgattgtcaataattcccacaaaatcggcaagaccaatctgccatgcaccagaattgataaaggcttgtctaacctgttgcttgttgaaaggaacagtgattttatctgggtcatttccacacaatgttattattcataatcttccctgaccaattaatgtagccatttgatccaagtacctcggccgcgaccacgctaagggcgaattccagcacactggcggccgttactagtggatccgagctcggtaccaagcttggcgtaatcatggtcatagctgtttcctgtgtgaaattgttatccgctcacaattccacacaacata

SEQ ID NO: 36585 - DNA, 442 bp, Homo sapiens
agggcgaattgggcccttagatgcatgctcgagcggccgccagtgtgatggatatctgcagaattcgcccttagcgtggtcgcggccgaggtacgcctagccctggttcatgatatggcagaatgcatcgttggggacatagcaccagcagataacatccccaaagaagaaaaacataggcgagaagaggaagctatgaagcagataacccagctcctaccagaggacctcagaaaggagctctatgaactttgggaagagtacaaggctaagcattttaactttatactggaaaaaaaatcaaacaaaggggagggataaaggacttagtcatctttgcactggaaaacaaaatatgtaattaaattcccatagctgcatgtaacattgaattcttccaggttaaaaaaaaaaagttaatcctgtgatattaatggaatga

SEQ ID NO: 36586 - DNA, 429 bp, Homo sapiens
cgactactatagggcgaattgggccctctagatgcatgctcgagcggccgccagtgtgatggatatctgcagaattcgcccttagcgtggtcgcggccgaggtactattgttagtgacgggatctacacgtcaaatagcaaagcatttacccctgtaatgcttttagattcacagaagaatctagatagaaccaaatacatatactgccatggccatgtgattttcaagtattaaaagttcatttgcataaggaatcaacctgagattttcctaaaccacttctctggcactcagtattatagccttcattcaatacaataaaagccaacaacttgacaattattgaaaaaaaattatattttggaagaactcactacataaggtgacagaattccaaaatcaaattacatgaaaatatacatcgcaat

SEQ ID NO: 36587 - DNA, 430 bp, Homo sapiens
agggcgaattgggccctctagatgcatgctcgagcggccgccagtgtgatggatatctgcagaattcgccctttcgagcggccgcccgggcaggtacgcggggctgcagccgagtgacctccataaatactggactgaaaaaacattgtaatactacaagtataatgacatttagaagattactttgggctggtgggacatgctgtgaattaagattacaaatgaatattataaaggggatgatttttaaccaaaggaatatatttttaacttgaatcttttcttgcattgtatttttctaaaagtttggcttcctttcttggtagtcaagagtatgggtaataaggagttatatgtctgctatctgtgttgctcatttaaaaaaagtatacattgaataagggctgtttatcacatgcataaaattaaa

SEQ ID NO: 36588 - DNA, 433 bp, Homo sapiens
ctactatagggcgaattgggccctctagatgcatgctcgagcggccgccagtgtgatggatatctgcagaattcgcccttagcgtggtcgcggccgaggtacatttttagtgatatctgattgggctaacagttccctgaatttagccctgagttattgcttagactacagttgaattgctaagaattctctggcaagcatataggagaaaagtgatttaataatttaattatgaataaaatatagtcatcaaatatgacttttaacctaataggagtctttaaagaaggtaaaaaccaaaacatttatataaccaaaattatagccatctgaagataagggattgcatttgatactttttaaataattttatactgcctccaataatttatttcctaataaaaaaaaagaatatggcattcattgtgtgctg

SEQ ID NO: 36589 - DNA, 129 bp, Homo sapiens
cactactatagggcgaattgggccctctagatgcatgctcgagcggccgccagtgtgatggatatctgcagaattcgcccttagcgtggtcgcggccgaggtaccagtcaaacgtcactcagcatgcag

SEQ ID NO: 36590 - DNA, 320 bp, Homo sapiens
gggccctctagatgcatgctcgagcggccgccagtgtgatggatatctgcagaattcgcccttagcgtggtcgcggccgaggtaccattcctctaaatttactacctaattctttgcctttaattgtccccatgggggtcactggccctttacctcaaggttcggtgggcctggtgttaggcagggcatccacctcatgatactaaaggtatcatagttcatactagtctcattaattctgactcctctgatgagattaaacttatgtaaacttatggagtctgccaaagttcctgtttccattccggccagtgagtcaa

SEQ ID NO: 36591 - DNA, 590 bp, Homo sapiens
ccctctagatgcatgctcgagcggccgccagtgtgatggatatctgcagaattcgcccttagcgtggtcgcggccgaggtactttgcagtgtatgatggacacggtggacctgcagcagctgatttctgtcatacccacatggagaaatgtattatggatttgtcttcctaagggagaagaactttgtgaaactctgttgactcttggcttttctagaaatagataaagccttttcgagtcatgcccgcctgtctgctgatgcaactcttctgacctctgggactactgcaacagtagccctattgcgagatggtattgaactggttgtagccagtgttggggacagccgggctattttgtgtagaaaaggaaaacccatgaagctgaccattgaccatactccagaaagaaaagatgaaaaggaaaggatcaagaaatgtggtggttttgtagcttggaatagtttggggcagcctcacgtaaatggcaggcttgcaatgacaagaagtattggagatttggaccttaagaccagtggtgtcataacagaacctgaaactaagaggattaagttacatcatgctgatga

SEQ ID NO: 36592 - DNA, 606 bp, Homo sapiens
tatagggcgaattgtgccctctagatgcatgctcgagcggccgccagtgtgatggatatctgcagaattcgccctttcgagcggccgcccgggcaggtacatgctgcacgcacacaaaagacactgagaatatttttaagaagccacacatcacagaatttgatagtcaactcatgcaatgagttccttttatatttcatcaaaaggtttacttgcccctttacttgttccaaatttccaagattaactcttaaatttgaaaaagtatctttttaataaaaatcaggtatctctttatatccatgatctatatggacagtgatttggattttttcaatcaaactctccctaagatacacccaggctgtgtttccattttagaaagtccatggcagatagctcaaattaaaaagaagcaatttgtccagaataattggttactgtcatgaatagtagacatttttcggggtgggggagtgagaggctctctaataagggaatcatattagttaagattaccagtaagaaaaaaaatagctgtaaactactccatattcaaagtacctcggccgcgaccacgctaagggcgaattccagcacactggc

SEQ ID NO: 36593 - DNA, 393 bp, Homo sapiens
agggcgaattgggccctctagatgcatgctcgagcgggccgccagtgtgatggatatctgcagaattcgccctttcgagcggccgcccgggcaggtacctttcattggattgtccatggtgcatcgctttagcaagcggcgtgactctccgctgcccgtcatcttggccaatatctatctgctggttcctcctgtgctcaacccaattgtctatggagtgaagacaaaggagattcgacagcgcatccttcgacttttccatgtggccacacacgcttcagagccctaggtgtcagtgatcaaacttcttttccattcagagtcctctgattcagattttaatgttaacattttggaagacagtattcagaaaaaaaatttccttaataaaaa

SEQ ID NO: 36594 - DNA, 473 bp, Homo sapiens
acgactcactatagggcgaattgggccctctagatgcatgctcgagcggccgccagtgtgatggatatctgcagaattcgccctttcgagcggccgcccgggcaggtactttttttttttttttttttttttttgccatgaggcattttatttgtaaatatatgtattacatccctagaaaaagaatcccaggattttccctcctgtgtgttttcgtcttgcttcttcatggcccatgatgccagctgaggttgtcagtacgcgggaggcattgaggcagccagcgcaggggcttctgctgagggggcaggcggagcttgaggaaaccgcagataagtttttttctctttgaaagatagagattaatacaactacttaaaaaatatagtcaataggttactaagatattgcttagcgttgagtttttaacgtaattttaatagcttaagattttaagagaaaatatgaagact

SEQ ID NO: 36595 - DNA, 200 bp, Homo sapiens
ctatagggcgacttgggccctctagatgcatgctcgagcggccgccagtgtgatggatatctgcagaattcgccctttcgagcggccgcccgggcaggtacgcggggtcttcccctttccctaagcagcctgaggtgatctgtgaaaatggttcgctattcacttgacccagagaaccccacgaaatcatgcaaatcaag

SEQ ID NO: 36596 - DNA, 339 bp, Homo sapiens
  misc_feature 325: n = A,T,C or G
agggcgaattgggccctctagatgcatgcctcaggcggccgccagggtgatggatatctgcagaattcgccctttcgagcggccgcccgggcaggtacgcgggggaaccaaactttagttttctacattaatgagaaacactggtaactttgcttcattgaaaaaataattgcttgttctctgtcagatgcacttcgtcttagtaacatggccatggggaagacaaccacaggccagatagtcaatctgctgtccaatgatgtgaacaagtttgatcaggtgacagtgttcttacactttcctgtgggcaaggaccaactgcggngcgatcgcaagtga

SEQ ID NO: 36597 - DNA, 406 bp, Homo sapiens
cgactactatagggcgaattgggccctctagatgcatgctcgagcggccgccagtgtgatggatatctgcagaattcgcccttagcgtggtcgcggccgaggtacctaacaaacccacaggtcctaaactaccaaacctgcattaaaaatttcggttggggcgacctcggagcagaacccaacctccgagcagtacgcgggggaggaggagttgagagaacggagcggacgccatggcgaccaacatcgagcagatttttaggtctttcgtggtcagtaaattccgggaaattcaacaggagctttccagtggaaggaatgaaggccagctgaatggtgaaacaaatacacccattgaaggaaaccaggcgggtgatgcagctgcctttgccaggagtctaccaaa

SEQ ID NO: 36598 - DNA, 421 bp, Homo sapiens
actactatagggcgaattgggccctctagatgcatgctcgagcggccgccagtgtgatggatatctgcagaattcgccctttcgagcggccgcccgggcaggtacacagcaggcttttcaggcagggcacatggctcagggccccatggtgtgataccttgaagcacaccattacagacaagtggacccccagaatcacccccacaagtgtctttaccacctgtccagagcccagcacacaacatgaactctgtcaccttctcagagtaagctctagcacacatgtcattggacaggagatggaggctcacacactgaagactcctggggcgcaagaactcctctggttcgatgctgccccagcctgaggcgtagcaggtggtccccagtgctggctcctgggtgggcaggcccaagacct

SEQ ID NO: 36599 - DNA, 386 bp, Homo sapiens
cactactatagggcgaattgggccctctagatgcatgctcgagcggccgccagtgtgatggatatctgcagaattcgccctttcgagcggccgcccgggcaggtactggagcaagctttattcgttgcatcaaacctaacttaaagatgacaagccaccactttgaaggtgctcaaatttctgtctcagcttcagtgttcagggatggtgtctgttttggacttgatgcagggtggttgcccatcacgagcttcatttcatgaactctacaacatgacttctttttttttttttttgacttcatttttttaatttattttgcttattacgaaaacgccccataattaactagcaagaaactgcttaggactgtaaaagaaaggctt

SEQ ID NO: 36600 - DNA, 503 bp, Homo sapiens
ggcgaattgggccctctagatgcatgctcgagcggccgccagtgtgatggatatctgcagaattcgccctttcgagcggccgcccgggcaggtacacgtctcccgttttcttttcacatcaatgcagagtccctctgtgaatttacaacacccaacacccatgagttcagtccttaagaaggaaaattgagcaagtatttaattggttggacattgcataaaagaggtccatatccaggctaactctagaaattttattctcaaacttagttggcctctttttcttctgtcagaggaccattcttagtggcactggggaaatcttggcacccagaagaattcaactgcgcccactgcaaaaatacaatggcctacattggatttgtagaggagaaaggagccctgtattgtgagctgtgctatgagaaattctttgcccctgaatgtggtcgatgccaaaggaagatccttggagaagtcatcaatgcgttgaaacaaacttg

SEQ ID NO: 36601 - DNA, 604 bp, Homo sapiens
acgactcactatagggcgaattgcgccctctagatgcatgctcgagcggccgccagtgtgatggatatctgcagaattcgccctttcgagcggccgcccgggcaggtacgcggggagaaaaacagaggggagatttgtgtggctgcagccgagggagaccaggaagatctgcatggtgggaaggacctgatgatacagaggtctgtaggccatgggaatgggtttggaattttattcaaagagctatgggaagtgactagaaggtttaaagttggggaagaggttttgtgtttctgttatatttgtgttttatacaaattactctggttgctgtgttgataggacagcagaagggtaggagcagggacaccagttaagttattgcaatggttaaggtgagaggtggtggctgggcctaggcctttttggagtgaacaagctatttgcttggcttccatgatccttctccctccactggaatggaaggtacctcggccgcgaccacgctaagggcgaattccagcacactggcggccgttactagtggatcccagctcggtaccaagcttggcgtaatcatggtcatagctgtttcctgtgtgaa

SEQ ID NO: 36602 - DNA, 407 bp, Homo sapiens
attgggccctctagatgcatgctcgagcggccgccagtgtgatggatatctgcagaattcgccctttcgagcggccgcccggcaggtaccgaagctcagctcagccctcttccttattttgctcccaaagccttccccagattttttttgcttttcccccttttggaagtttactgcctactttctttttcatctttgtttaagattttaactggcattgaaggacctttacttgcaagtgatgttggacgtgacagatctgctgccagcccggttgtaagtagtatgccagaaagagcttcagagtcttcttcagaggaaaaagatgattatgaaatttttgtaaaagttaaggacactcacgaaaaaagcaagaaaaataagaaccgtgataagggggagaaaga

SEQ ID NO: 36603 - DNA, 431 bp, Homo sapiens
tacactactatagggcgaattgggccctctagatgcatgctcgagcggccgccagtgtgatggatatctgcagaattcgcccttagcgtggtcgcggccgaggtacgcgggggaatttacaacacccaacacccatgagttcagtccttaagaaggaaaattgagcaagtatttaattggttggacattgcataaaagaggtccatatccaggctaactctagaaattttattctcaaacttagttggcctctttttcttctgtcagaggaccattcttagcggcactggggaaatcttggcacccagaagaattcaactgcgctcactgcaaaaatacaatggcctacattggatttgtagaggagaaaggagccctgtattgtgagctgtgctatgagaaattctttgcccctgaatgtggtcgatgcc

SEQ ID NO: 36604 - DNA, 387 bp, Homo sapiens
  misc_feature 341: n = A,T,C or G
tatagggcgaattgggccctctagatgcatgctcgagcggccgccagtgtgatggatatctgcagaattcgcccttagcgtggtcgcggccgaggtacgcggggagacaaggcagttgaggaggagggagcgcttgagggggactggcctggcgtgcactccgcacctcggggacattattgcgcgtggaacggctgcttttggaagactattgcccagaagaaaagatgtttggttttcacaagccaaagatgtacctgcccggggggccgctcgaaagggcgaattccagcacactggcggccgttactagtggatccgagctcggtaccaagcttggncgtaatcatggtcataagctgttttcctgtgtgaaaatttgttatc

SEQ ID NO: 36605 - DNA, 265 bp, Homo sapiens
  misc_feature 157, 189, 253, 254: n = A,T,C or G
gatgcactcgctcgagcggccgccagtgtgatgtatatctgcagaattcgccttttcgagcggctgttctggcaggtacgcgggggtgacacacacacacacacacagcacctgcacgcagatgcacacatctctagtcaaatgaggctctcagctntttgatagcgggctttttgataccgtgtattnaaccaatactttattctcaactgtagtcaagggaccttcattgcaattcagaaaatgagaaagnnctgatccggaa

SEQ ID NO: 36606 - DNA, 545 bp, Homo sapiens
atacgactactatagggcgaattgggccctctagatgcatgctcgagcggccgccagtgtgatggatatctgcagaattcgcccttagcgtggtcgcggccgaggtaccatatactcttccccgccccatgcttcatgggatgttattacagtatggtgctttacagcgaaaatgagagcagtcacttaagcggcttactgagacccaggcaatgttctaagcagctacacacagtaactcctaacaaccttaggaggcaggaaccaaaagctgaagcatcgtacaacttgcctccaactaagaggggatctggggttcaaacccaggcagcctgacatgagcgtttccttttttttttttctcttttgctaagtaaaaagtaggtttaagggaagaatcatttatagtaacactgaattaagtaagggtttgtaggtcacagaatcagactatttagggccgatacttcaagcatatctcaattaacaaaaaagcacattgagactccaaggatgaactgcctttgcttagtggccagggcact

SEQ ID NO: 36607 - DNA, 394 bp, Homo sapiens
tacgactactatagggcgaattgggccctctagatgcatgctcgagcggccgccagtgtgatggatatctgcagaattcgcccttagcgtggtcgcggccgaggtactttccactgcacagaagcctggggattcttattgttttgatatttaaaaattgaatctggccgggcgtggtggctcatgcctgtaatcccaacactttgggaggctgaggagggtggatcacctgaggtcaggaccagcctggccaacatggtgaaccctgtctctactaaaaatacaaaaattagccaggagttgtgtgccgtaatcccagctacctgggaggctgaggtaggagaattgcttgaacttgggagctggaggttccagtgagccgagaacgcaccac

SEQ ID NO: 36608 - DNA, 420 bp, Homo sapiens
tatagggcgaattgggccctctagatgcatgctcgagcggccgccagtgtgatggatatctgcagaattcgccctttcgagcggccgcccgggcaggtactgaggctgtatacagccacagcctctccccatccctccagccttatctgtcatcaccatcaacccctcccatgcacctaaacaaaatctaacttgtaattccttgaacatgtcaggcatacattattccttctgcctgagaagctcttccttgtctcttaaatctagaatgatgtaaagttttgaataagttgactatcttacttcatgcaaagaagggacacatatgagattcatcatcacatgagacagcaaatactaaaagtgtaatttgattataagagtttagataaatatatgaaatgcaagagccacagaggg

SEQ ID NO: 36609 - DNA, 427 bp, Homo sapiens
tactatagggcgaattgggccctctagatgcatgctcgagcggccgccagtgtgatggatatctgcagaattcgcccttagcgtggtcgcggccgaggtacatctacctaaaggactattatgtggaataatacatactaatgaagtattacatgatttaaagactacaataaaaccaaacatgcttataacattaagaaaaacaataaagatacatgattgaaaccaagttgaaaaatagcatatgccttggaggaaatgtgctcaaattactaatgatttagtgttgtccctactttctctctcttttttctttctttttttttattatggttagctgtcacatacaacttttttttttttgagatggggtctcgctctgtcaccaggctggagtgcagtggcgcgatctcggctcactgcaacc

SEQ ID NO: 36610 - DNA, 413 bp, Homo sapiens
actactatagggcgaattgggccctctagatgcatgctcgagcggccgccagtgtgatggatatctgcagaattcgccctttctagcggccgcccgggcaggtacgcagggaatgtaaataaggataactgatcagagttatccactgtatttataaggaagagtcggaaaaaacaatgaccttagttatttttaagcctgatgatactatggtttactctaataagatagctatattgataattatatttttgttactgtgcccttgcacattttggtctttctgttaatatttttattaataacacataattagtaaccactctactgtttcaagttaatctagtaatagagcttacatatatttgtataactgctataccactgaactgaatttattttacaacagtgta

SEQ ID NO: 36611 - DNA, 151 bp, Homo sapiens
ggccgccagtgtgatggatatctgcagaattcgcccttagcgtggtcgcggccgaggtacaaagagtagctgccccttctcagggcagatgatgctttgagaacatactttggccattacccccagctttgaggaaaatgggctttggatg

SEQ ID NO: 36612 - DNA, 410 bp, Homo sapiens
  misc_feature 358, 372: n = A,T,C or G
agggcgaattgggccctctagatgcatgctcgagcggccggcagtgtgatggatatctgcagaattcgccctttcgagcggccgcccgggcaggtacgcgggggcaggcgcacttcctgaagctgaaggtcagcatagacaaagggcctcagaatcgcgcaggcgcaattgtgccctggttcgccaagatgtcgttcccaaagtataagccgtcgagcctgcgcactctgcctgagaccctcgacccagccgaatacaacatatctccggaaacccggcgggcgcaagccgagcggttggccataagagcccagctgaaacgagagtacgagtacccgggctgttgagctgctcactngagtgttacagcangcgatgaagacttggcagaacagctgctggtctattcc

SEQ ID NO: 36613 - DNA, 469 bp, Homo sapiens
ctactatagggcgaattgggccctctagatgcatgctcgagcggccgccagtgtgatggatatctgcagaattcgccctttcgagcggccgcccgggcaggtacctttcattggattgtccatggtgcatcgctttagcaagcggcgtgactctccgctgcccgtcatcttggccaatatctatctgctggttcctcctgtgctcaacccaattgtctatggagtgaagacaaaggagattcgacagcgcatccttcgacttttccatgtggccacacacgcttcagagccctaggtgtcagtgatcaaacttcttttccattcagagtcctctgattcagattttaatgttaacattttggaagacagtattcagaaaaaaaatctccttaataaaaatacaactcagatccttcaaatatgaagctggttggggaatctccattttttcaatattattttcttcttt

SEQ ID NO: 36614 - DNA, 434 bp, Homo sapiens
cgactactatagggcgaattgggccctctagatgcatgctcgagcggccgccagtgtgatggatatctgcagaattcgccctttcgagcggccgcccgggcaggtacttttttttttttttttgagtagctctttgtaaattctttattgccaggagtgaaccctaaagtggcttacaagagtgccctatttctttcaattaactacagggacaaacacatttcaaagttgagataagtgaccagtatgatttgccaaaattctaaagcgcactcaccatgaaatggataaaggttacctttggggatttgcactgcatgaattctgtgaaaagcttgttggatattgtgatagagatagagaaatgaagtatattatataagatactatgaggttccctgcctttgcttcacatcccaggcttacaaacgtgc

SEQ ID NO: 36615 - DNA, 534 bp, Homo sapiens
cgactcactatagggcgaattgggccctctagatgcatgctcgagcggccgccagtgtgatggatatctgcagaattcgcccttagcgtggtcgcggccgaggtactggagtaaattcagtatgaaggaagaaagcgctcctgcgtgttagaaccttgcccatgagctggaccgaggacaggagatggactccaggaaaattggatttcttcaagcagcctcccttggaaatggaatatctttaaaatcttctttgcagaaagacagttagaatgtattaatcagaatagttgaagacttattttcctttttattttttttcaaaatgagcattattatgaagccaagatcccgatctacaagttccctaaggactgcagaggcagtttgttttgatgtggacaatggcacatctgcgggacggagtcccttggatcccatgaccagcccaggatccgggctaattctccaagcaaattttgtccacagtcaacgacgggagtccttcctgtatcgatccgacagcgattatga

SEQ ID NO: 36616 - DNA, 415 bp, Homo sapiens
atacgactactatagggcgaattgggccctctagatgcatgctcgagcggccgccagtgtgatggatatctgcagaattcgccctttcgagcggccgcccgggcaggtacagccatattccatcgcctacaaatgccatatgttatccatttatcaagaaacttaagtagctgtcacctttttgtgtgtagggggttggggaatgctcttaaaaatatatgtgtgcaaatgtctattccaggtcctgctttggatacatagattcccagaagtaggattcctggattgtataatttctcttttcttttctctttctctttctcttctttctttttctttcttttttttttttggagattgggtttcacattgtcacccaggctagagtgtagtggtgcagtaatggctcactgca

SEQ ID NO: 36617 - DNA, 520 bp, Homo sapiens
  misc_feature 24: n = A,T,C or G
tacgactactatagggcgaattgngccctctagatgcatgctcgagcggccgccagtgtgatggatatctgcagaattcgccctttcgagcggccgcccgggcaggtacgcggggaaaagggtggggagtgccctttcttgaaggaatcccttaagtgcacgtctcccgttttcttttcacatcaatgcagagtccctctgtgaatttacaacacccaacacccatgagttcagtccttaagaaggaaaattgagcaagtatttaattggttggacattgcataaaagaggtccatatccaggctaactcgagaaattttattctcaaacttagttggcctctttttcttctgtcagaggaccattcttagtggcactggggaaatcttggcacccagaagaattcaactgcgctcactgcaaaaatacaatggcctacattggatttgtagaggagaaaggagccctgtattgtgagctgtgctatgagaaattctttgcccctgaatgtggtcgatgc

SEQ ID NO: 36618 - DNA, 420 bp, Homo sapiens
ctactatagggcgaattgggccctctagatgcatgctcgagcggccgccagtgtgatggatatctgcagaattcgcccttagcgtggtcgcggccgaggtacgcgggggagtttcgatgccttcactgacctcggcccttagggttcccctaaccccctaactggcaggcccgccctactgtgcacctctaggcatctctgtttaatgggccctgctcctctggaattcctttgtggagactgagctgaaaaggagaaggaaatggacccttttcattatgattaccagaccctgaggattgggggactggtggttcgttgaggaaactgttctaggctgcgacaccgatggattctatcaaaaaggcccgaagatgtttaacctttgtcacagattcatagcaccctggccaaaaggac

SEQ ID NO: 36619 - DNA, 438 bp, Homo sapiens
ggcgaattgggccctctagatgcatgctcgagcggccgccagtgtgatggatatctgcagaattcgccctttcgagcggccgcccgggcaggtacgcggggacatcaatgcagagtccctctgtgaatttacaacacccaacacccatgagttcagtccttaagaaggaaaattgagcaagtatttaattggttggacattgcataaaagaggtccatatccaggctaactctagaaattttattctcaaacttagttggcctctttttcttctgtcagaggaccattcttagtggcactggggaaatcttggcacccagaagaattcaactgcgctcactgcaaaaatacaatggcctacattggatttgtagaggagaaaggagccctgtattgggagctgtgctatgagaaattctttgcccctgaatgtggtcg

SEQ ID NO: 36620 - DNA, 448 bp, Homo sapiens
tacgactactatagggcgaattgggccctctagatgcatgctcgagcggccgccagtgtgatggatatctgcagaattcgccctttcgagcggccgcccgggcaggtacatgtttaatatgtatatttaaaatgcatatatattttattatatctatattatcctatatagatatatgtaacttagctttattgttagctccataagctgccagtgttgcttttctgttggtagagctctcccatttggtgacatggaaaatacctttccattatcacaacaaagcagttgctcagtagaaagtctagatttctgtcttataggtgatttctgtcttataggtgattataatcaagtgtaggcttcctgaattttgacatccttttagaacttgggtctggaattccagaaatgttaattgctgcttgtatttgttcttgtttgtttt

SEQ ID NO: 36621 - DNA, 610 bp, Homo sapiens
tatacgactcactatagggcgaattgggccctctagatgcatgctcgagcggccgccagtgtgatggatatctgcagaattcgccctttcgagcggccgcccgggcaggtacgcggggctactaaaatggttctaggtgctgtgtggacaggtgatacaaaagcctgactcacacggttgacattcattcattccattttcatttctctttgagtgatcctgacaagcagagggtctcaggtggatattactgtgtctttgagacctctctaatccttatctatctctcattttaatacagagagtttcatacgcagaccttaagtagacatagtatccagctaaaagggtctcactctgtcacccaggctggagtgcagtggcgcagtcatggctccctgtaacctcaacctctcagactccagcaatcctcctgcgacagggaagcagtcaatggtgaatgctggcctcgctgattactcacctggagacctttctgaggatcagttttctcatctagaaaatgggacaactgccagaccaccgaagaaaatacagaaaacagccccacacatcagcatgtttggttgctgccagtctacttggatct

SEQ ID NO: 36622 - DNA, 396 bp, Homo sapiens
actatagggcgaattgggccctctagatgcatgctcgagcggccgccagtgtgatggatatctgcagaattcgccctttcgagcggccgcccgggcaggtacagagtctaatccccttctatgtagccaccagcatgacagcacccagcaactttctgcacaggtgctcgtggttggtgccttcgccaaaagtctatgcacatcacgctgtttctactcttgggatttccaaaaggaccacaggatattggtcccattctattcagtttctttttgcacagtatatgcctgaatggctctgggtgtggggagcaaatattctcaaccgttcactacgtaaggaagccttatcctgcacagcctgagtctggatggccacttgagaagttttgccaa

SEQ ID NO: 36623 - DNA, 380 bp, Homo sapiens
atacgactcactatagggcgaattgggccctctagatgcatgctcgagcggccgccagtgtgatggatatctgcagaattcgcccttagcgtggtcgcggccgaggtacttttttttttttttttttttgagtctgatttaagttgttgcttctcttatttaataaaatctaatatagaaccattttgcagattttaccatttttccacttactatactcatggatgctcagtgaccaccggaaatgtagtataataaaatattgttttatggctatgaactaggatataattaatacacaatatggtctggaaacaattctacttatataacttaaccagtatttttatatctgatatccatttttaatatgttgaaat

SEQ ID NO: 36624 - DNA, 418 bp, Homo sapiens
gggccctctagatgcatgctcgagcggccgccagtgtgatggatatctgcagaattcgcccttagcgtggtcgcggccgaggtactatatgccatggatgtgaatttcccatagaagctggtgacatgttcctggaagctctgggctacacctggcatgacacttgctttgtatgctcagtgtgttgtgaaagtttggaaggtcagacctttttctccaagaaggacaagcccctgtgtaagaaacatgctcattctgtgaatttttgaaagtcagcagttcaggagaagagaaggaatttgaagagaaaaaggaaaattaaaattactaattaatttttagattcaatatttatatggagttttgaaaaataataatggccctgaaggaataaattccagctttaaaaaccaagtct

SEQ ID NO: 36625 - DNA, 346 bp, Homo sapiens
ctagatgcatgctcgagcggccgccagtgtgatggatatctgcagaattcgcccttagcgtggtcgcggccgaggtacaagaagagaggatggagacgagggtaggcttcttttcagattatacattctggatcagaaagtctatatcatgggattttctgaatgacccaggttttttttgtttgtttttgtttgtttgtttgtttgttttagaatttctgtgctttggagctagaaggatatataaatgagaaaactgagaacaaaagaagagacaatatatttttggttgcaagggataagaacctaactccaacaagcaaagtaaagggggggttttattaga

SEQ ID NO: 36626 - DNA, 520 bp, Homo sapiens
  misc_feature 502: n = A,T,C or G
ccctctagatgcatgctcgagcggccgccagtgtgatggatatctgcagaattcgcccttagcgtggtcgcggccgaggtacctctctttcttgttggaaatgttgaagtattgaaatacttcttttctgtagaaggtggttctcccttctacccaggaataattttgtggcaagtcattgagtcagcagttattttgaccctaactgaaagagataaagttcctaagaatttattatatatgtttcttgccactgagtgagcaagaaaaatacatacccatcagtgctgactggttggtaatttctgaaacacaatgccacagctcttcatgaataacacagtaacagaattacagagaatttggaagagatcaatctctagatggatgagttagtctataaacaaatagctactcaacttcttttaacttttaagaatgctgtatgtgttttctaatccagatccttgggtttcagtgagtctctagaaatcaagaaatntttacagattaatggatc

SEQ ID NO: 36627 - DNA, 281 bp, Homo sapiens
aattgggccttctagatgcatgctcgagcggccgccagtgtgatggatatctgcagatttcgccctttctgagcggccgcccgggcaggtacccgaatccgaaaagtgtggccatttggggactctgtgagaggagcatccctgtccaccccgggtcattgacactgggcacttcgtcttagtaacatggccatggggaagacaaccacaggccagatagtcaatctgctgtccaatgatgtgaacaagtttgatcaggtgacagtgttcttacacttcct

SEQ ID NO: 36628 - DNA, 423 bp, Homo sapiens
agggcgaattgggccctctagatgcatgctcgagcggccgccagtgtgatggatatctgcagaattcgcccttagcgtggtcgcggccgaggtactatagattatttgtcttgaagaagagctttgatatgtttcaaaattcgacgttggctttggaaggaaactgtaaatttacagatctttgtccttccccacaaagagccttaatctcacaggttggattatgtggaactcactgctatttttcagttctcctttaagtgactaaggaacatccagatacttccaaaaaaaaaaaagtctaagtttttcactttgtccattgccatttaattatcttctgcatattttaaagcatttcctgtgaacataagttttgcccatcccgaaaatttgcgtttacattgattttatgtttaatga

SEQ ID NO: 36629 - DNA, 411 bp, Homo sapiens
gactactatagggcgaattgggccctctagatgcatgctcgagcggccgccagtgtgatggatatctgcagaattcgcccttagcgtggtcgcggccgaggtacgcggggacagaaaatgagagtttcagatactgagaatagaaccactaagaagcagaaaagagaagatattctcgtgggggagaacaacggctgggaggggaggaagcatggccaaggcaaagaggtgggcattaataagaactgcttcttgctgccgccatatgaagaaggacgtgttcgcttccccttcctccatgattgtaagtttcctgagaccttgccagccatgctgaactgaatacaacatgtttaagaccacagaacatctgcataggctgtaaatttcgttgaatgatggatgcaaaga

SEQ ID NO: 36630 - DNA, 615 bp, Homo sapiens
  misc_feature 21, 519: n = A,T,C or G
gactactatagggcgaatggngccctctagatgcatgctcgagcggccgccagtgtgatggatatctgcagaattcgcccttagcgtggtcgcggccgaggtactattttaaggaaaaatttccaagaagttctggactatctttgttcctatggggagggcatataggaacacagttattctctctgatagagctattaatgacttagtttctgtaaaagaaatggagagttgatatggttcagattaacttcactattaagtgttcaatatgaagaattcaagtattctgactgagtgattggttgacctaaaccactttgaatgtttctattttatgaaatgaagtttctcttcttaacacaactagatgtagtaatacactggttatgaaattgtatttttttaagtattaatgaaagaagagccataagcattccaggagaaaatctcaagggagctacatagagcaatttaaatgcaaatttttttcctaacaacttacaaggtgactagctntgaaacccctaatttgcctcagttgattttctaagaatttcaggagtgatgtatgtcttaagagggagaaaaaaatatttcttattactttttctc

SEQ ID NO: 36631 - DNA, 422 bp, Homo sapiens
atacactactatagggcgaattgggccctctagatgcatgctcgagcggccgccagtgtgatggatatctgcagaattcgcccttagcgtggtcgcggccgaggtacatctacctaaaggactattatgtggaataatacatactaatgaagtattacatgatttaaagactacaataaaaccaaacatgcttataacattaagaaaaacaataaagatacatgattgaaaccaagttgaaaaatagcatatgccttggaggaaatgtgctcaaattactaatgatttactgttgtccctactttctctctcttttttctttctttttttttattatggttagctgtcacatacaactttttctttttttgagatggggatctcgctctgtcaccaggctggaagtgcagtggccgcgatct

SEQ ID NO: 36632 - DNA, 435 bp, Homo sapiens
tatagggcgaattgggccctctagatgcatgctcgagcggccgccagtgtgatggatatctgcagaattcgcccttagcgtggtcgcggccgaggtacaccaaatgtgaaggtgatgaggttgaagatctctatgagcttttgaaacttgttaaggaaaaagaagaagtagaggggatatcagtaggtgctatactttctgactatcagcgtattcgagtggaaaatgtgtgtaaaaggcttaatctccagcctttagcttatctttggcagagaaaccaggaagatttgctcagagagatgatatcatctaacattcaagcaatgatcatcaaagtagcagctttgggtttagatcctgataagcatcttgggaaaaccctggatcaaatggagccttatctcatagagctttctaagaagtttggagtacctg

SEQ ID NO: 36633 - DNA, 662 bp, Homo sapiens
gactactatagggcgaattgggccctctagatgcatgctcgagcggccgccagtgtgatggatatctgcagaattcgcccttagcgtggtcgcggccgaggtacattcattaaaacttgcccttgaaggcgtggaaaaggaaagggatttctactttgggaagttgagagagatcgactactctgccaagaacacgggcaggaaaatgatgacctcgtgcagagactaatggacatcctgtatgcttcagaagaacacgagggccacacagaagagccggaagcagaggagcaagcccacgaacagcagcccccgcagcaggaagagtactaactactggatcttacccacggctgccaacctgcattagggacaaaattattcctccagacccaattatcaaaattgaaaaacaagccacactccatcagctgaatcagattcttagacatcggcttgtaaccacagatcttcctcctcagttagcaaatcttacagttgcaaatggccgggtgaagtttcgtgttgaaggagaatttgaagccaccttgactgtgatgggagatgaccctgatgttccatggcgtcttctcaagctagaaattctagttgaggataaggaaacaggagatgggcgagctttggttcatagcatgcaaatc

SEQ ID NO: 36634 - DNA, 179 bp, Homo sapiens
agggcgaattgggccctctagatgcatgctcgagcggccgccagtgtgatggatatctgcagaattcgccctttcgagcggccgcccgggcaggtacttcaaggtctggaacatgttgagctgagtccagtagacatacatgagtcccagcatagcagcatgtcccaggtgaaatataa

SEQ ID NO: 36635 - DNA, 412 bp, Homo sapiens
tagggcgaattgggccctctagatgcatgctcgagcggccgccagtgtgatggatatctgcagaattcgccctttcgagcggcccccgggcaggtacagtttccactgaatacttacagcttttgcaccgatataaaggtaaaaaaaaaaaaatcctaagtctgagactgtctgtattagtctatgtaaagttcactttaaaggtaaatatttcttatgaagaataacaaaacattctatgtcatatatattttggggttttccaacattgttctggatggtatatgtcattgctcctttctcataaaattgatagtcaagatttgcttctacagaaaagggaatttaaactattttctttctttctttctttctttttttttttttgagacagtttccctgtgttggccag

SEQ ID NO: 36636 - DNA, 451 bp, Homo sapiens
  misc_feature 218, 243, 244, 258, 259, 276, 284, 285, 306: n = A,T,C or G
tacgactactatagggcgaattgggccctctagatgcatgctcgagcggccgccagtgtgatggatatctgcagaattcgcccttagcgtggtcgcggccgaggtacaaaaataacagcaagacaagaggaataaaacccacatgaatcactgtggcatccagtttctattcacaaagaaaaagctccagtccatctttttaatttttttgaaaaatntccctgacattacccagaactaaannctgaaatgtattannatattccactcttacantttccatnngacagaacagaaaaattcatngagccaaaaaaaaaaaccaaaaaaaaaaaaagtactcaacaccaacatcgatgggcggcggaaaatagcctttgccatcactgccattaagggtgtgggccgaagatatgctcatgtggtgttgaggaaagcagacattgacctc

SEQ ID NO: 36637 - DNA, 541 bp, Homo sapiens
  misc_feature 21: n = A,T,C or G
gactactatagggcgaattgngccctctagatgcatgctcgagcggccgccagtgtgatggatatctgcagaattcgcccttagcgtggtcgcggccgaggtactccagcctgggcaacagagcgagactctgtctcaaaaataaataaaatagaataaaataaaataaaatgttaactaaaatcgatttctaatttgggaaacgtaataactaataccatttgattttaaaaagaattgtatcttaatcattaagctaaagacatagcaagaaaacaatgacatggtcacttgaagggtgcctcagccaacttttcatcatctaataagacacccttaaagtaattccagcagaaagtctcaaaaattcattgatcaacctccaaagcaccatcagggaaggtgctaatacagtggataacaagaacaataaacagcagaacatgttatttaaatttttgagataatgaaacaataccgaagtaggaacccttgtgaaattatgttctgggtttgggtatgagatcatttataccgttat

SEQ ID NO: 36638 - DNA, 408 bp, Homo sapiens
tacgactcactatagggcgaattgggccctctagatgcatgctcgagcggccgccagtgtgatggatatctgcagaattcgcccttagcgtggtcgcggccgaggtacgcgggggttgaagttactgatataaagatcagcgcctgaaacagattctccgggatattaccggagacggagtgttttattattagcctttcttaggtggacatttccatttgaattaaaagtcctttaggctgggcgtggtgcatggctgtaatctcagcaccttgggaggctgaggcaggaagatcacttgaggccaggcgttggagagcagcctgggcaaggtggcaagaaccttgtctctacaaaaaaaaagcgtctgccatcatggatgttctcgcagaagcaaatggcaccttt

SEQ ID NO: 36639 - DNA, 437 bp, Homo sapiens
atacgactactatagggcgaattgggccctctagatgcatgctcgagcggccgccagtgtgatggatatctgcagaattcgcccttagcgtggtcgcggccgaggtacaagcttcatttgccacaaaactcacaaaaaagtaattgattaaagaatatctcttttatgcaaaatatacattttaggatataatttaattgatattctactatatactgacattgctccttgatcattgaataaaaaaatactctcattgccagaattatgtttttgtaatatttataattgaggtaataatgataaaagacttaaactatgaataatgttggtgagttccatttaagctataacaatttcccagaactaaacaaatatgtgactaaacataggtcatttttgataaatgaatactaacaatttcacaacataattga

SEQ ID NO: 36640 - DNA, 357 bp, Homo sapiens
tgtgatggatatctgcagaattcgcccttagcgtggtcgcggccgaggtacaccaaaaagagaactttgtgatccgttggtaagatagtatccacaagtaagcacttgtgttcactgttttttgttccacactagaatacacccagttggataccagagttatttacagacatctgaggaagatcctagttttcaagtctgtcaggaaaatattccatattgttttaagccagatcatacccatggaaaaatagagaatggttttctttctttttctttctaaccaatacatgctcaagaaatcaaatatctgagatacacaaattgaacgcggtagggtggggagaggaagtaggg

SEQ ID NO: 36641 - DNA, 219 bp, Homo sapiens
tacactcactatagggcgaattgggccctctagatgcatgctcgagcggccgccagtgtgatggatatctgcagaattcgcccttagcgtggtcgcggccgaggtacagaagaaacctatctccaaaaaaggttcctttcagtggtagactcggggagaacttggtggcccctttgagatgccaggttttttttttttaatctataaatggcctgcaag

SEQ ID NO: 36642 - DNA, 414 bp, Homo sapiens
ctactatagggcgaattgggccctctagatgcatgctcgagcggccgccagtgtgatggatatctgcagaattcgccctttcgagcggccgcccgggcaggtacatctctgagcgtgtaaaatggacataatgatatccactgaaaggattactgttagtattaaacaaaataactcacatacaatgcttggcacagtgtcaacttgttgataacagatgctatcaatagatgctattaattttttaaagctaattattttgaaatcacctttttgcaattattcatgcttaacttattttatagacaaaatgtgagtttcacagccattacctttattactgaaatcgtcaattaacacaatttctgctaaatatttccttggagtccttttaattacactgtggactgttct

SEQ ID NO: 36643 - DNA, 413 bp, Homo sapiens
ctatagggcgaattgggccctctagatgcatgctcgagcggccgccagtgtgatggatatctgcagaattcgccctttcgagcggccgcccgggcaggtaccaaaacatttatgaccttataattttatagtgcaagaaaaaggacaaagacaggaatacaaataaattatcccgcgtactcccaccaccaatggaaccccctgaggctgccttgtctgaggacatcaacctgattcgagggactgggtctggggggcagcttcaggatctggactgcagcagctctgatgacgaaggggctgctcaaaactctaccaaacctagtgcgaccaagggaacactgggtggcatgttttggtatgcctgaagggccttgtgggtttcaaagagcttgagtccgtgaagacatgga

SEQ ID NO: 36644 - DNA, 475 bp, Homo sapiens
  misc_feature 12: n = A,T,C or G
gactcactatanggcgaattgggccctctagatgcatgctcgagcggccgccagtgtgatggatatctgcagaattcgccctttcgagcggccgcccgggcaggtactgttcgtttatataataaacttgggagatataggagggagatataggattggctaacttttatgtttatattatgttaatcaattattttttcttacataatatattgcaactcagaagcaatgttttgcttctggggtaatgtttataaacttttgcatgtgaagatgggcaatttggaagacttttggtttctggaagaacagaaatattcctgtaaaaattgagaaaatcttcacataggtagtgggaaatagaattcagacagcccctaagtcctttcttcttatggtttgtggtttgttattgggctgcttacgttagttttgagcatgtttttaagacttgaattttatttttttttgagac

SEQ ID NO: 36645 - DNA, 415 bp, Homo sapiens
agggcgaattgggccctctagatgcatgctcgagcggccgccagtgtgatggatatctgcagaattcgcccttagcgtggtcgcggccgaggtactaattaatgatgatctctcgagatttgtccagtttcctgtttttttactcaaggaacagtcacacatcctgttctgttggagatgggaccttggtggtttttgtggaaagtgaaacaaaactaataaaaccttctggctccctagcttgtcctacttatctgaagtcaaacataatccacttattgggccatctgcaggatttcctccttggctcatccaagtccattttccacataactctgccttaaaagtctgaccgccctgggctgcatggatggtcttccctatcctgcaggtgttgtttgggggttagaaaatg

SEQ ID NO: 36646 - DNA, 437 bp, Homo sapiens
acgactcactatagggcgaattgggccctctagatgcatgctcgagcggccgccagtgtgatggatatctgcagaattcgccctttcgagcggccgcccgggcaggtacctaagcaaataggagttgggtttggtttttctcctaaaataatgctcaatacttacctaatcaaatggcatccatttgaataaaatgacaataactaaagctagttaatgtcagtgacattaaactaactccaggattcaggagttttaatgttagaatttagatttaacagatagagtgtggcttcatttgtccatggtagcccatctctcctaagaccttttctagtctgtcttcctgccttcgaacttgatgacagtaaaaccctgtttagtattcccttgtgcatttggtttgttggttagccgactgtcttgaaactattcat

SEQ ID NO: 36647 - DNA, 441 bp, Homo sapiens
acgactcactatagggcgaattgggccctctagatgcatgctcgagcggccgccagtgtgatggatatctgcagaattcgccctttcgagcggccgcccgggcaggtactatagattatttgtcttgaagaagagctttgatatgtttcaaaattcgacgttggctttggaaggaaactgtaaatttacagatcttgtccttccccacaaagagccttaacctcacaggttggattatgtggaactcactgctatttttcagttctcctttaagtgactaaggaacatccagatacttccaaaaaaaaaaaagtctaagtttttcactttgtccattgccatttaattatcttctgcatattttaaagcatttcctgtgaacataagtattgcccatccagaaaatttgcgtctacattgattttatgtttaatgaaacct

SEQ ID NO: 36648 - DNA, 430 bp, Homo sapiens
ggcgaattgggccctctagatgcatgctcgagcggccgccagtgtgatggatatctgcagaattcgccctttcgagcggccgcccgggcaggtaccacgaggatcggattagagcgaagttttattcagtgtatgggtctggtcaaagagcttttgatctattcaatccaaacttcaagtctacctgtcaacggtttgtggagaagtacctcggccgcgaccacgctaagggcgaattccagcacactggcggccgttactagtggatccgagctcggtaccaagcttggcgtaatcatggtcatagctgtttcctgtgtgaaattgttatccgctcacaattccacacaacatacgagccggaagcataaagtgtaaagcctggggttgcctaatgagtgagctaacttacattaatttgcgttgcgct

SEQ ID NO: 36649 - DNA, 421 bp, Homo sapiens
tactatagggcgaattgggccctctagatgcatgctcgagcggccgccagtgtgatggatatctgcagaattcgcccttagcgtggtcgcggccgaggtacgcggggagttcctgagagggacgcgtgccgcggagccaggcttactacgtgacccggacaccaggcatacgctaggggcagtcagctgtgccttctctttcggagttgttccgtgctcccacgtgcttccccttctccactggctgggatcccccgggctcggggcgcagtaataatttttcaccatgcatcggaaaaaggtggataaccgaatccggattctcattgagaatggagtagctgagcggcaaagatctctctttgttgtagttggggatcgaggaaaagatcaggtggtaatacttcatcacatgttatcc

SEQ ID NO: 36650 - DNA, 432 bp, Homo sapiens
agggcgaattgggcccttagatgcatgctcgagcggccgccagtgtgatggatatctgcagaattcgcccttagcgtggtcgcggccgaggtaccctaaaaatgaaaaaaaaaaaagaagaatggaagaaacagagttgtagactcagacacagagaccatcttcggggcctttctctgtgtgaggacatcacagcgaaatctaaagcaggtcatgtcagtccctggcagggaaccctccaccagcttcccgtgttccccaggacaaaagccccactcctcactgtggctccacagccctgtgtccagggcccctgccagtgtcactcaggaactaggccatttggcagaaaactgtagcaaaaaggcaatccttggcttgactctggcaaagtctgaatgggctaaaagccaaaaggaaaagcttgggtta

SEQ ID NO: 36651 - DNA, 434 bp, Homo sapiens
agggcgaattgggccctctagatgcatgctcgagcggccgccagtgtgatggatatctgcagaattcgccctttcgagcggccgcccgggcaggtacgtccacggtcagccttgcggagaaaatcagcttcctgtttggatacccactagacatttaaagttctacaatgaactcactggagatgcaaagaaaagtgtggagatggagacaccccaatcgactcgccagtctacaggtgtatccagcagctccaaagagacagcaaccagcaagaatgggccatagtgacgatggtggttttgtcaaaaagaaaagggggggatatgtaaggaaaagagagatcagactttcactgtgtctatgtagaaaaggaagacataagaaactccattttgatctgtacctaggccgcgaccacgctaagggcgaattc

SEQ ID NO: 36652 - DNA, 615 bp, Homo sapiens
tacgactactatagggcgaattgggccctctagatgcatgctcgagcggccgccagtgtgatggatatctgcagaattcgccctttcgagcggccgcccgggcaggtacgaaaaaatcaggctactaagcccactgttaatatagacgcagaccaattgttaggaacaggtccaaattggagcaccattaaccaacaatcagtgatgcagaatgaggctattgaacaagtaagggctatttgcctcagggcctggggaaaaattcaggacccaggaacagctttccctattaattcaattagacaaggctctaaagagccatatcctgactttgtggcaagattacaagatgctgctcaaaagtctattacagatgacaatgcccgaaaagttattgtagaattaatggcctatgaaaatgcaaatccagaatgtcagtcggccataaagccattaaaaggaaaagttccagcaggagttgatgtaattacagaatatgtgaaggcttgtgatgggattggaggagctatgcataaagcaatgctaatggctcaagcaatgagggggctcactctaagaggacaagttagaacattgggaaaaaatgttataatt

SEQ ID NO: 36653 - DNA, 408 bp, Homo sapiens
tatagggcgaattgggccctctagatgcatgctcgagcggccgccagtgtgatggatatctgcagaattcgccctttcgagcggccgcccgggcaggtacgaaaaaatcaggctactaagcccactgttaatatagacgcagaccaattgttaggaacaggtccaaattggagcaccattaaccaacaatcagtgatgcagaatgaggctattggacaagtaagggctatttgcctcagggcctggggaaaaattcaggacccaggaacagctttccctattaattcaattagacaaggctctaaagagccatatcctgactttgtggcaagattacaagatgctgctcaaaagtctattacagatgacaatgcccgaaaagttattgtagaattaatggcctatgaa

SEQ ID NO: 36654 - DNA, 436 bp, Homo sapiens
gactcactatagggcgaattgggccctctagatgcatgctcgagcggccgccagtgtgatggatatctgcagaattcgccctttcgagcggccgcccgggcaggtactcaagttagttgttttgcagagatgttgccttcagatgttaatcaggtctctcaagtttcatggagtctatgctgatcctttaattgacaaataaaagatatatatctgtggtgtgcaacataaaaaaaaaaaaaaaaaaaaaaaaaaagtccaatttctgccaggtcttcttcttcctgcagaatttccttagctttcgtcctcagaggaacgaactctgtgaagtgtttgccatagtattcatccaaggcacgcatatacttgctggagctgatgagccaattgacagaggggaaatgcttacgttgagctagtttcttatctaagc

SEQ ID NO: 36655 - DNA, 398 bp, Homo sapiens
  misc_feature 343: n = A,T,C or G
tatagggcgaattgggccctctagatgcatgctcgagcggcccgccgtgtgatggatattctgcaaaattcgccctttcgagcggccgcccgggtaggtactggcctggcttttaagagctgtgaagacttcagaaacttctttggcaaactattttatgttaaacaatagaaatactgtagaaagccatgataaaggaaaacctaaaattagttaatgtcctgagtttttaaaaaagcaaaataaaatagcatgtaataaggtgaagcctattaaacacacacaaaatcaaatcatcaaaatctcaaacttaactcattctttagtaatataatattgtatntataaagtcctttggctagtcttgacattgtagaaataattttatgtagagtgca

SEQ ID NO: 36656 - DNA, 450 bp, Homo sapiens
  misc_feature 16: n = A,T,C or G
acgactcacttagggncgattgggccctctagatgcatgctcgagcggccgccagtgtgatggatatctgcagaattcgcccttagcgtggtcgcggccgaggtaccggccatggtgcaggtgggaataggagatgccagagctgctttagctgaggaaagcaaacagtcagcagtgctcaaaggagcaaaacttcgaatgtgcacattgacccctgacacctgcaagcataacacagatcctaagactagagtgaagtaggaagaagaattagaaaatccagtggatgtcctgagtatagggaaccagggccgttgaaaatcagtaaaggttgattacctggggcgagaccgggtgactgtggcagtgcaggtgaaggtacctgcccgggcggccgcttcgaaagggcgaattccagcacactggcggccgttactagtggatccgagc

SEQ ID NO: 36657 - DNA, 477 bp, Homo sapiens
gcgaattgcgccctctagatgcatgctcgagcggccgccagtgtgatggatatctgcagaattcgcccttagcgtggtcgcggccgaggtacttttttttttcttttctttttttttttgagttgaaattaggtaaaatctcaactcaaaaatcaaactcagggaagaggcccactgaggagaacaagtcttctgcattttcttcctgccctgctcccaccttctcgcctctggctgcttggatagcttggtgactccttcctcaccctcctgcttctctgtctctccaagaagccagagctgcctctttccttccctggaagagattttatgggatcgcttcctgatagaagatgggaaggagagggcagaactttgcctgctgtcatatctgaagaatcactggttctttctgcatcccaggggcgtaactgatctgactccttgggctttttcctgtattgtggaatatagagt

SEQ ID NO: 36658 - DNA, 422 bp, Homo sapiens
gactactatagggcgaattgggccctctagatgcatgctcgagcggccgccagtgtgatggatatctgcaaaattcgccctttcgagcggccgcccgggcaggtacagctgtaactgttttgacatccagaaaggagtttcaaaatttgcagtgttctgtaatatagtggtctgcttaaagaagggttttttttaaaaaaaaacctattatgcacaagtcagattcttagtgaatgattgctttgggaatactaagtgattcatagatctgtcttagaaattaacttttaacatttcatatatgcagaacagattttattattactgccagtcatgatggacatgtcaagttctggaaaaaaatagaagagggaattgaatttgttaaacattttcgtagtcacctgggagttattgagagt

SEQ ID NO: 36659 - DNA, 289 bp, Homo sapiens
acgactcactatagggcgaattgggccctctagatgcatgctcgagcggccgccagtgtgatggatatctgcagaattcgcccttagcgtggtcgcggccgaggtaccccttctaaaagaacaggatattccccttatgaaatattatatcataggccccctcctatattgcggggactttccaggcacttccccgagagtttaggtgaaaattgagttacagctgataggctacagggcttcagggaaaaattatcacaaaacaattctcagtcctgggtttaaatga

SEQ ID NO: 36660 - DNA, 447 bp, Homo sapiens; identical to SEQ ID NO: 32509

SEQ ID NO: 36661 - DNA, 431 bp, Homo sapiens
actactatagggcgaattgggccctctagatgcatgctcgagcggccgccagtgtgatggatatctgcagaattcgccctttcgagcggccgcccgggcaggtacgaaaaaatcaggctactaagcccactgttaatatagacgcagaccaattgttaggaacaggtccaaattggagcaccattaaccaacaatcagtgatgcagaatgaggctattgaacaagtaagggctatttgcctcagggcctggggaaaaattcaggacccaggaacagctttccctattaattcaattagacaaggctctaaagagccatatcctgactttgtggcaagattacaagatgatgctcaaaagtctattacagatgacaatgcccgaaaagttattgtagaattaatggcctatgaaaatgcaaatcccgaatgt

SEQ ID NO: 36662 - DNA, 602 bp, Homo sapiens
  misc_feature 511: n = A,T,C or G
ccctctagatgcatgctcgagcggccgccagtgtgatggatatctgcagaattcgccctttcgagcggccgcccgggcaggtaccttttaatctagtatgcttaacttgatgttaatatttaacttaaatatttgacttacatgttgacgttgaaggctcaaagctatactaagaagctttctgaaagattgggctttaaaataaaataatattttaatattgaaccattttttaacttcttgtcactgttcaattcctaaggtctagttcttgccagttttttttttttttcctgattggcagggcttttaaagaagtaagaagaaaggttaagattattaggctaggttatagctgctcagtagtcattttgacaaagggtagcggatggttggtacctcggccgcgaccacgctaagggcgaattccagcacactggcggccgttactagtggatccgagctcggtaccaagcttggcgtaatcatggtcatagctgtttcctgtgtngaaatgttatccgctcacaattccacacaacatacgagccggaagcataaagtgtaaagcctggggtgcctaatgagtgagctaactcaca

SEQ ID NO: 36663 - DNA, 417 bp, Homo sapiens
agggcgaattgggccctctagatgcatgctcgagcggccgccagtgtgatggatatctgcagaattcgccctttcgagcggccgcccgggcaggtacactgctcgtggtgtggagcatggcatctgtataacctaggctgactggcacaagagggagacatgaacagatgaatgattagggaaacagaggaacaatcctatccacagcccctgaattatgaaaatcttgcagaagcatttttttctccttagaataactaatatttaaaataaataccaatttcattaccatatcactaaatttagaatcaggagtggttgtgggaatctgatggacaagactctggcttacagaaagagaagttttgctagatttttctatcttctgtgtatgatcccattttaatattttctggg

SEQ ID NO: 36664 - DNA, 637 bp, Homo sapiens
gcgaattgcgccctctagatgcatgctcgagcggccgccagtgtgatggatatctgcagaattcgcccttagcgtggtcgcggccgaggtacacattgttttgtttcttatatccagagtctagtcctcaactctaaccaaagtaaaggaaactggaaagacacacgctttttcagtcattaatagaaagttgtccaggtaagtttctgatggtatatcagttagaaataatatttagctatttgtaataaaaagctgaaaacagtagcttgaatcaatggaagactttatctttctcctaatacagctgacaataatgttgttgcctttatgatatcaaagcccccaggttccttttatctttctgcttaacctgccttggcaaatgcttgctgcttcatagtcacatgatggctgacttactgtaaccttcaggtagaaagaaaggaagaggtaaagagataaaggtacctgcccgggcggccgctcgaaagggcgaattccagcacactggcggccgttactagtggatccgagctcggtaccaagcttggcgtaatcatggtcatagctgtttcctgtgtgaaattggtatccgctcacaattccacacaacatacgagccggaagcataaag

SEQ ID NO: 36665 - DNA, 642 bp, Homo sapiens
tacgactcactatagggcgaattgggccctctagatgcatgctcgagcggccgccagtgtgatggatatctgcagaattcgcccttagcgtggtcgcggccgaggtactattttaaggaaaaatttccaagaagttctggactatctttgttcctatggggagggcatataggaacacagtttattctctctgatagagctattaatgacttagtttctgtaaaagaaatggagagttgatatggttcagattaacttcactattaagtgttcaatatgaagaattcaagtattctgactgagtgattggttgacctaaaccactttgaatgtttctattttatgaaatgaagtttctcttcttaacacaactagatgtagtaatacactggttatgaaattgtatttttttaagtattaatgaaaaaagagccataagcattccaggagaaaatctcaagggagctacatagagcaatttaaatgcaaatttttttcctaacaacttacaaggtgactagctttgaaacccctaatttgcctcagttgattttctaagaatttcaagagtgatgtatggtttaagagggagaaaaaaatatttcttattactttttctcttggttctgttggaaacactga

SEQ ID NO: 36666 - DNA, 452 bp, Homo sapiens
gactactatagggcgaattgggccctctagatgcatgctcgagcggccgccagtgtgatggatatctgcagaattcgccctttcgagcggccgcccgggcaggtactggtgatgaaacagaatatatgaaatgtgtagggaggcttttaattatggctcaaaacagaatttatcttgttaataattcctctagatagaataatgtagaaacattttatttgtggactacagcttattcagcctgggaaaaataatgttggagaaatactctatgaatagaatataccttggaagcccttaactaaacgcttacttctcttgacatcagataattcagtctagcaatatgatagataattcagtctgtcatactgaaaatgacagcacttttaacacctttctaaccttcttaacgtcagagaatttttgtagaaatgtagtcctgtgattgt

SEQ ID NO: 36667 - DNA, 415 bp, Homo sapiens
ctactatagggcgaattgggccctctagatgcatgctcgagcggccgccagtgtgatggatatctgcagaattcgcccttagcgtggtcgcggccgaggtacttttttttttttttttttgcttccacaggttgcactattgaaaaatcgagattgtataaacctggtaaaaagctgcaagatgccaaaatcttgtagatgtcaaataaaaagttattatactaacaagaagtggactcttgtttaggccctcactggtgaccttcagaagtagtctgtgacggggactcagcagaatttgtgtgttgtctcagcattccaggtagccttatagtttggcttaaaacttatccctaaaatgtaagatggcattgagggaaagggtataatgatagtacgcgggatacatctcact

SEQ ID NO: 36668 - DNA, 372 bp, Homo sapiens
  misc_feature 82, 102: n = A,T,C or G
tacgactcactatagggcgaattgggccctctagatgcatgctcgagcggccgccagtgtgatggatatctgcagaaggcgngcgttcaagcggcccccccnacaggtactttgcattctgattctttgatatttgaacttggccatctgtgggtgctactctcgtaagactaaaaggcacctactaaatacgaacaaggataaccagttctaccaaaaacattaccaaccaaggggggggctgttcttttttcagactttccttttgctttcaacctcttaaactgtaaaggagagatttaatgtttccctattattctgctttgactcacatactaaaatgaccacatggcactccattgaatcttttca

SEQ ID NO: 36669 - DNA, 404 bp, Homo sapiens
  misc_feature 333: n = A,T,C or G
agggcgaattgggccctctagatgcatgctcgagcggccgccagtgtgatggatatctgcagaattcgccctttcgagcggccgcccgggcaggtacaggccggggaagagactcaagtaggagcgcctgcccgagttgagactagatgtgaacctttcaccatgaaaatgttaaaagatataaaggaagggagttaaaaaatatggatccaactccccttatataagaacagtattagattccattgctcatggaaatagacttactccttatgactgggaaattttggccaaatcttccctttcatcctctcagtatctacagtttaaaancctggtggattgattggagtaccttcggccgctgaccaacgctaaggggcgaatttccagcaacactggcg

SEQ ID NO: 36670 - DNA, 415 bp, Homo sapiens
acgactactatagggcgaattgggccctctagatgcatgctcgagcggccgccagtgtgatggatatctgcagaattcgcccttagcgtggtcgcggccgaggtacacattgttttgtttcttatatccagagtctagtcctcaactctaaccaaagtaaaggaaactggaaagacacacgctttttcagtcattaatagaaagttgtccaggtaagtttctgatggtatatcagttagaaataatatttagctatttgtaataaaaagctgaaaacagtagcttgaatcaatggaagactttatctttctcctcatacagctgacaataatgttgttgcctttatgatatcaaagccccaggttccttttatctttctgcttaacctgccttggcaaatgcttgctgcttcata

SEQ ID NO: 36671 - DNA, 235 bp, Homo sapiens
ctatagggcgaattgggccctctagatgcatgctcgagcggccgccagtgtgatggatatctgcagaattcgcccttagcgtggtcgcggccgaggtacaaatctctcttaatttagttttgacaataaaataaattccatagttttcctattttattagcttaatatttgtcatgttaatattgagtgtcaaactgattgaaggatacaaagtattgatcctgggtgtgtcggt

SEQ ID NO: 36672 - DNA, 314 bp, Homo sapiens
cgactactatagggcgaattgcgccctctagatgcatgctcgagcggccgccagtgtgatggatatctgcagaattcgccctttcgagcggccgcccgggcaggtactaggtcttccttaagcagcaagaaaatgtggggggttttacagaagaaaacaagcaatctgggctatagcagaagagcactaatcaacttaagtccaccttccatggtggttcagaaaccagactaccttaacgattttacccacgaaatcccaaatatccagactgactcctatgaaagtatggcaaaaaccacaccaactggtgg

SEQ ID NO: 36673 - DNA, 329 bp, Homo sapiens
agggcgaattgggccctctagatgcatgctcgagcggccgccagtgtgatggatatctgcagaattcgcccttagcgtggtcgcggtcgaggtacagaaattctcctgtgaaattaagtaaaccattttccagatcttgactgcattgctgagattttgcagtctggaaaataatttcaaatttttcaggttttttgtatatttatttttttctaacaaatatatttaactataaaattaaaattcagtagttaaactcttcataatgcagaaatggatggcttgattgtatagaaaaatgagtctttcagttacaccattcttgaaaa

SEQ ID NO: 36674 - DNA, 514 bp, Homo sapiens
tacgactcactatagggcgaattgggccctctagatgcatgctcgagcggccgccagtgtgatggatatctgcagaattcgcccttagcgtggtcgcggccgaggtaccagttgtaaaattaccaggaaccgccatgcctcaagatcgccctgttttctggcttcatcaatgactgcatgcagtgcaccaccctgtccactacgtgatgctgtaggattaagtctcacagtgggcggctgaggatacagcgccgcgtcctgtgttgctggtgaattagacgccatcgctgtgggttgctggtatggtgccgtgctatttggcacgggacacaccgcttgaggtctgtattgaacctctgaaggaggccgatactgaagctcggttggcagccggtattgataaactaccagcggttgggtcttattttctaccggctgatattgtggatactgtatctgagttggcattgccgggatagagactctgtccctttctacttgattttctcttggg

SEQ ID NO: 36675 - DNA, 423 bp, Homo sapiens
actatagggcgaattgggccctctagatgcatgctcgagcggccgccagtgtgatggatatctgcagaattcgcccttagcgtggtcgcggccgaggtacatgctgcacgcacacaaaagacactgagaatatttttaaggagccacacatcacagaatttgatagtcaacttcatgcaatgagttccttttatatttcatcaaaaggtttacttgcccctttacttgttccaaatttccaagattaactcttaaatttgaaaaagtatctttttaataaaaatcaggtatctctttatatccatgatctatatggacagtgatttggattttttcaatcaaactctccctaagatacactcaggctgtgtttccattttagaaagtccatggcagatagctcaaattaaaaagaagcaattt

SEQ ID NO: 36676 - DNA, 418 bp, Homo sapiens
tacgactactatagggcgaattgggccctctagatgcatgctcgagcggccgccagtgtgatggatatctgcagaattcgcccttagcgtggtcgcggccgaggtactactcgattgtcaacgacaaggagtaccatgtcgcctggttctaggaataatgggggaagtatgtaggagttgaagattagtccgccgtagtcggtgtacaaaactgaaggtgccgtgtctgatttcacatcaacaagtcactggaaattatgtcacattagtttcataaatcatggtctttgattttttctaaacagagctattacaaattaatacaaacttgaaacataccctaatttaaactaataagctttgggccctgctttttaaattttaaggcatgtgtgtttctctaccataacaacattgt

SEQ ID NO: 36677 - DNA, 622 bp, Homo sapiens
ttgtaatacgactcactatagggcgaattgggccctctagatgcatgctcgagcggccgccagtgtgatggatatctgcagagtgggcggttagcgtggtcgcggccgaggtacaaaaattagctgggcatagtggtacatgcctgtagtcccagctactcgggaggctgatgaacaagaatcacttgaacctgggaggaggaggttgcagtgagctgagatcgtgccactgcactccagcgggagcgacagagcaagactgtctcaaaaaaataaaaaagaaaaaaataataaaaaggaaaacaaagcctttagaaaaacaaagcctttgaaaaaggatgtaaaattgaatatatagatacaattatttttaaaaagttttatagaaaaatatcctggattgttgatgttgttttaatatattttaatcatttttgtataatgtcatgtataatatgttataatgaaagtaaaaaaaaaggtcttagcagagcaggcagaaaaatgccaaactcagtgccttttagttattttgatatgtgggaagatcatgcataaggctccttttagctccttgcttgagctaggaaggttaatccccctgaaggtcaccttggaaagg

SEQ ID NO: 36678 - DNA, 427 bp, Homo sapiens
gactcactatagggcgaattgggccctctagatgcatgctcgagcggccgccagtgtgatggatatctgcagaattcgccctttcgagcggccgcccgggcaggtacagatgtccagtagacctactggatatgcaggcctgcagctcaggggagagctgggttaagaaccgtcaaggcagtaatcatctgcatttagaagggcgagtgaagccatgacaggggctgaaatggcccagcaagaataaatcaaaccatgagaaacacatacatttaagaataaggagatgtggtcaggcgcggtggctcacacctgtaatcccagcactttgggaggccgaggcgggtggatcacttgaggtcaagtagtttgagaccagcctggggcaacctagtgaaatcccgtctctgcttaaaatacagaactt

SEQ ID NO: 36679 - DNA, 564 bp, Homo sapiens
  misc_feature 23: n = A,T,C or G
tacgactactatgggcgaatggngccctctagatgcatgctcgagcggccgccagtgtgatggatatctgcagaattcgcccttagcgtggtcgcggccgaggtaccagaagagcccagtgcccagaaaccaatatcagttctatacagatacaaggtgatgctgattatttatcaaccatcttggagttcccatcgtgcagtttgcttacgaggacatcaaaacattagagggtccaagttttctctccgaggcccgtttttctacacgagcaacaaaaattgaagaaatggatcgctctttcaaccttcatgaaaccattactaagctctcaggagaagtgattttgcaaattgccaacgaacctgttctgccctttaatgcacttgatatagctttagaagttcaaaacaaccttaaaggtgatcaacccaacactcatcaactgttagccatggcgtcacgcctgcgggagagtgctgaactttttcagtctgatgagatgcgacctgctaatgatcccaaggagagagcacccatccgcatccggatgctgaatgacat

SEQ ID NO: 36680 - DNA, 338 bp, Homo sapiens
tacgactcactatagggcgaattgggccctctagatgcatgctcgagcggccgccagtgtgatggatatctgcagaattcgccctttcgagcggccgcccgggcaggtacaactgactagatttgtttgagacaagagtggtgggatcagagccatgtggagagctcatggcctgtctaaattgttgccatgtggaaatggggcagagtgttgccaattttctgattttttgtgtggaaaaaaatctccaaattgtagtttttaaatttggggaatgcaaatatatatatatatacacacacacacacacacacacatacacatacaatccatataca

SEQ ID NO: 36681 - DNA, 389 bp, Homo sapiens
atagggcgaattgggccctctagatgcatgctcgagcggccgccagtgtgatggatatctgcagaattcgccctttcgagcggccgccgggcaggtacatctttaaggtccagaaagaggacaacagcacctacatcatgagggtgttgaaaaagactgggaatgagcaagaatggaagatcaagcttgcagtggcttgaccctgtactgtacttctcatgctggatttcaaaaaaaaaagtatcaaaaacaaaaaaaactaaagggtggtgttttattggattgtgacaggttgagtaataaggaattaagtcgtcgtcatttcattaaaactgaaagatgatgtaatgcatatataagagttttctgaagggtatttttttgggctt

SEQ ID NO: 36682 - DNA, 441 bp, Homo sapiens
actactatagggcgaattgggccctctagatgcatgctcgagcggccgccagtgtgatggatatctgcagaattcgccctttcgagcggccgcccgggcaggtacagcaacaacatctccactttggatgtgcactgtctcccccagctcccagagaaagcttctccccctgcctcaccacccatcgccttccctcctgcttttgaagcagcccaagtcgaggccaagccagatgagctgaaggtgacagtcaagctgaagcctcggctaagagctgtccatggtgggtttgaagattgcaggccgctcaataaaaaatggagaggaatgaaatggaagaagtggagcattcatattgtaatccctaaggggacatttaaaccaccttgtgaggatgaaatagatgaatttctaaagaaattgggcacttcccttaaacct

SEQ ID NO: 36683 - DNA, 313 bp, Homo sapiens
atagggcgaattgggccctctagatgcatgctcgagcggccgccagtgtgatggatatctgcagaattcgcccttagcgtggtcgcggccgaggtactagggccgaagtaaaaaaccatcacctcccattcccaggggcatcatcatgttcaacaaggcatggaggcagggccatctttgcggctcagtctaaaagggctgcactctcttcaggttgataaatccttaaggctttgatttgttttgtttttggttttgttttcagtggagctggggaggtagttaatgtttggctttatttttgctattttgt

SEQ ID NO: 36684 - DNA, 172 bp, Homo sapiens
tatagggcgaattgggccctctagatgcatgctcgagcggccgccagtgtgatggatatctgcagaattcgccctttcgagcggccgcccgggcaggtacgctcagagttgttaaccagaaagtcctggctgtggttgcagaaacactgttggaagtaaaagagatgactta

SEQ ID NO: 36685 - DNA, 199 bp, Homo sapiens
acgactcactatgggcgaattgggccctctagtatgcatgctcgagcggccgccagtgtgatggatatctgcagaattcgccctttcgagcggccgcccgggcaggtacttcttctctttcttttttttttttttccgtctccccaaagctttatctgtcttgactttttaaaaaattgggggcaaatttgatggctaa

SEQ ID NO: 36686 - DNA, 607 bp, Homo sapiens
tatagggcgaattgggccctctagatgcatgctcgagcggccgccagtgtgatggatatctgcagaattcgccctttcgagcggccgcccgggcaggtacttggatcaaatggctacattaattggtcagggaagattatgaataataacattgtgtggaaatgacccagataaatcactgttcctttcaacaagcaacaggttagacaagcctttatcaattctggtgcatggcagattggtcttgccgattttgtgggaattattgacaatcgttaccccaaaacaaaaatcttccagtttttaaaattgactacttggattttacctaaagttaccaaacataagcctttaaaaaatgctctggcagtgtttactgatggttccagcaatggaaaagtggcttacaccgggccaaaagaatgagtcatcaaaactcagtatcacttgactcaaagagcagagttggttgccgtcattacagtgttaacaagattttaatcagtctattaacattgtatcagattctgcatatgtagtacctcggccgcgacccgctaagggcgaattccagcacactggcggccgttactagtggatccgagct

SEQ ID NO: 36687 - DNA, 426 bp, Homo sapiens
acactactatagggcgaattgggccctctagatgcatgctcgagcggccgccagtgtgatggatatctgcagaattcgccctttcgagcggccgcccgggcaggtacacaaatgcatgagtatgtttatacagtgttagactgatgtgaatttgcatttgttacattacattgccagcgcatatcatttagcaagttggcattaacatttatgctttaattaaatgccagtatacctatgtgtgcagcagtaaaaaattagtgagaaaaagcaactttttgtcactcttaggaaatattttgtcttattagtgttcttggcacatgtatattactaaagtagatagttccaatgagaaatactaccagattattgtcataaaattaatttacaatgtccctgatattgagctaactcttaaaaaaa

SEQ ID NO: 36688 - DNA, 393 bp, Homo sapiens
tacgactcctatagggcgaattgggccctctagatgcatgctcgagcggccgccagtgtgatggatatctgcagaattcgccctttcgagcggccgcccgggcaggtactaaaagtttgttttattttatcaaacattaagcttttttaagaaaataattgggcagcgaaataaatgtatcttcttgtcaaaaaaaaaaaaaaaaaaaaagtacctcagccagcagaacatcgctgggacgcgcctggcctaaggcatcctaccaacagcaccatcaaggcacgttggagctttcttgccagaactgatctcttttggtgtgggaggacatggggtacaaaatattttgtcataaaaatggtaaagatttaaaatgataataaatgcagcaaa

SEQ ID NO: 36689 - DNA, 454 bp, Homo sapiens
actactatagggcgaattgggccctctagatgcatgctcgagcggccgccagtgtgatggatatctgcagaattcgccctttcgagcggccgcccgggcaggtacaccaaaaagagaactttgtgatccgttggtaagatagtatccacaagtaagcacttgtgttcactgttttttgttccacactataatacacccagttggataccagagttatttacagacatctgaggaagatcctagttttcaagtctgtcaggaaaatattccatattgttttaagccagatcatacccatggaaaaatagagaatggttttctttctttttctttctgaccaatacatgctcaagaaatcaaatatctgagatacacaaattgaacgcggtagggtgggggaggaagtagggagataaagcctatgctgctgattcctcagttataggagcagtct

SEQ ID NO: 36690 - DNA, 419 bp, Homo sapiens
  misc_feature 311, 356: n = A,T,C or G
agggcgaattgggccctctagatgcatgctcgagcggccgccagtgtgatggatatctgcagaattcgccctttcgagcggccgcccgggcaggtactaacaagtttgttgtaagtagacagaattatcaaaaacctagatgcttattttaaaagtttgcattatttagaatttcttccttaggaaccaaagcagttgcttttcctggaactgcatttttcagaactgctcaaagcacctcatctagatgagtgttttaaaaaatatatataaaaagtctataaagagacttcaaacatcacatacttcancctcttacagggcttttttaaaatcatgtattcccttccttaaangtccttcagaataaaataaaaagtaaacctcttcgcatttccatttagaaaaaaatgggaaac

SEQ ID NO: 36691 - DNA, 140 bp, Homo sapiens
  misc_feature 119, 130: n = A,T,C or G
tacgactactatagggcgaattgggccctctagatgcatgctcgagcggccgccagtgtgatggatatctgcagaattcgccctttcgagcggccgcccgggcaggtaccccctccaangcccggacatnacccgggcga

SEQ ID NO: 36692 - DNA, 415 bp, Homo sapiens
  misc_feature 180, 181, 198, 266, 320, 406: n = A,T,C or G
tacgactactatagggcgaattgtgccctctagatgcatgctcgagcggccgccagtgtgatggatatctgcagaattcgccctttcgagcggccgcccgggcaggtactacatatgcagaatctgatacaatgttaatagactgattaaaatcttgttaacactgtaatgacggcaacnncaactctgctctttgangtcaagtgatacctgagttttaatgggctcattcttattggcccgagtgtaagccacttttccattgnctggaacacatcagtgaaacactgccagagcatatttttaagaggcttatgttntggtaacctttaggtaagaatccaagcgtagtctaattttaaaaaacttggaagaatttttggttttgcgggtaaccgaattgtgncaataattc

SEQ ID NO: 36693 - DNA, 316 bp, Homo sapiens
tatagggcgaattgggccctctagatgcatgctcgagcggccgccagtgtgatggatatctgcagaattcgcccttagcgtggtcgcggccgaggtactaccggcccattcttgtccattataactgtgtgcagtgtgatgatggctgccaactatgatataccggtctggagatgtcaagcccattacaaatccaacaacattagtaactgttttcaattttgtgactgtctgaacttgcatgctgacgactcttatttcattatttggaagctctagagagctacacgcttcatttttggttctagcttttggc

SEQ ID NO: 36694 - DNA, 369 bp, Homo sapiens
tacgactcctatagggcgaattgggccctctagatgcatgctcgagcggccgccagtgtgatggatatctgcagaattcgcccttagcgtggtcgcggccgaggtactttctgatttttctacaaagattgtgtattacttgtataataaaaataagagctttaaattgtgaaattcttctggatttggttttctcattttattatggaatttttcatacctaaataagatgaatagttgggtaattttttttctgctttgtcagttattggtgtttgttaacttcttaaaaaaattaaaaagaacttgggaagctctgtttttctatgccctggaaacatttaaatatttagaattttttgctctttg

SEQ ID NO: 36695 - DNA, 435 bp, Homo sapiens
ctatagggcgaattgggccctctagatgcatgctcgagcggccgccagtgtgatggatatctgcagaattcgccctttcgagcggccgcccgggcaggtacccccgaatctaaaataaaagcagaaattatatgaaaaaactggggtgggagttggaaggaactttagatatgtaataaacttgtttgaaaactgttaatttctcatgctttcattaaaaaataattttcctcaagaaaccccaaattctccacctcaggaatgaaaagtgcatttgaatttcaagaaggtatgggcatgagaaccttgcagttttctaatttgtggagacaaaataatttttataacaccaaccagaggtttcctctacaaaccccttgtaattcctttctgagctctcttccttctagaatcttggggcatctgaaaaactca

SEQ ID NO: 36696 - DNA, 450 bp, Homo sapiens
tatagggcgaattgggccctctagatgcatgctcgagcggccgccagtgtgatggatatctgcagaattcgccctttcgagcggccgcccgggcaggtacatggagaataggcatatagccactaggctacatgaacacgtcacgtttgtagcctgagccggcctattagctgggattactggcgcgtgccactgcgtccggctaatttttgtattcttagacaaggcgcatcacacaaaaggcaccaagacgtgaaactttttaaaccaaaaggacgaagaaaaaacactttcaaaaaaaaaaaaaaagaaaaaaggaaaagtactttattttcaaaacactcatatgttgcaaaaaacacatagaaaaataaagtttggtgggggtgctgactaaacttcaagtcacagacttttatgtgacagattggagcagggtttgttatgcat

SEQ ID NO: 36697 - DNA, 397 bp, Homo sapiens
acgactcactatagggcgaattgggccctctagatgcatgctcgagcggccgccagtgtgatggatatctgcagaattcgccctttcgagcggccgcccgggaaggtacctttcattggattgtccatggtgaatcgctttagcaagcggcgtgactctccgctgcccgtcatcttggccaatatctatctgctggttcctcctgtgctcaacccaattgtctatggagtgaagacaaaggagattcgacagcgcatccttcgacttttccatgtggccacacacgcttcagagccctaggtgtcagtgatcaaacttcttttccattcagagtcctctgattcagattttaatgttaacattttggaagacagtattcagaaaaaaaatttcctta

SEQ ID NO: 36698 - DNA, 161 bp, Homo sapiens
  misc_feature 144: n = A,T,C or G
tactatagggcgaattgggcccttagatgcatgctcgagcggccgccagtgtgatggatatctgcagaattcgccctttcgagcggccgcccgggcaggtactgttcaaaaaggaatgccccacaagtgttaccatggcaaaanctggaagaagtctacaa

SEQ ID NO: 36699 - DNA, 608 bp, Homo sapiens
tacgactcactatagggcgaattgggccctctagatgcatgctcgagcggccgccagtgtgatggatatctgcagaattcgccctttcgagcggccgcccgggcaggtacgcggggacatcaatgcagagtccctctgtgaatttacaacacccaacacccatgagttcagtccttaagaaggaaaattgagcaagtatttaattggttggacattgcataaaagaggtccatatccaggctaactctagaaattttattctcaaacttagttggcctctttttcttctgtcagaggaccattcttagtggcactggggaaatcttggcacccagaagaattcaactgcgctcactgcaaaaatacaatggcctacattggatttgtagaggagaaaggagccctgtattgtgagctgtgctatgagaaattctttgcccctgaatgtggtcgatgccaaaggaagatccttggagaagtcatcaatgcgttgaaacaaacttggcatgtttcctgttttgtgtgtgtagcctgtggaaagcccattcggaacaatgtttttcacttggaggatggtgaaccctactgtgagactgattattatgccc

SEQ ID NO: 36700 - DNA, 667 bp, Homo sapiens
acgactactatagggcgaattgggccctctagatgcatgctcgagcggccgccagtgtgatggatatctgcagaattcgccctttcgagcggccgcccgggcaggtactgtgctcttccagggcaggggtcggcacaattttttcagacgtctgaaactccagctacaacacaggacgaatatcctgtgaagagcatagtgatgccaccgaatccactcttccttatggtggtgttgcacctgatccagcctttttgtaccccttactccccatcaaaaaaaaaatggatacatggttaaaggatagaagggcagtattttatcatatgttctaaaagagaaggaagagaaaatactactttctcaaaatggaagcccttaaaggtgctttgatactgaaggacacaaatgtggccgtccatcctcctttagagttgcatgacttggacacggtaactgttgcagttttagactcagcattgtgacacttcccaagaaggccaaacctctaaccgacattcctgaaatacgtggcattattcttttttggatttctcatttatggaaggcttaccctctgttgactgtaagccttttggtttgggctgtattgaaatcctttctaaattgcatgaataggctctgctaacgtgatgagacaaactga

SEQ ID NO: 36701 - DNA, 405 bp, Homo sapiens
tacgactactatagggcgaattgggccctctagatgcatgctccgaagccggcccccatgtgaagggttttttgcaaaattcccccttaccggggccgcggccgaggtcctgtaaaagtaacagctaactcaggataataaaatttttgtaatcaaaattacaaggagacagaataataacttaattaacataacaatgagtgggagtcaataagtgcatattatcaaaccaaaaaatgtggtttcattctgcttctagtatacccctcaacaactggttatagttaggatatatcacagttgtggttatatgaatctgaaattataattttaacatttaaaatgtttttttagtatacattcacaatatgtaatgtatcattataaaaatatttcctttaaaat

SEQ ID NO: 36702 - DNA, 561 bp, Homo sapiens
  misc_feature 337: n = A,T,C or G
aatacgactcactatagggcgaattgggccctctagatgcatgctcgagcggccgccagtgtgatggatatctgcagaattcgccctttcgagcggccgcccgggcaggtacaagaagagaggatggagacgagggtaggcttcttttcagattatacattctggatcagaaagtctatatcagtgggattttctgaatgacccaggttttttttgtttgtttttgtttgtttgtttgtttgttttagaatttctgtgctttggagctggaaggatatataaatgagaaaactgagaacaaaagaagggacgatatatttttggttgcaagggatangaacctaactccaacaagcaaagcaaaggggggttttattagaaagatacattgagctttctatcagaatcaaaggaagaggtgatcagccaagcctccaaaccagaatcagggtctagaaaaccagagaccacactctttctcaccttatggctctgctgccctctggctaatggccttgttttcgcttactatagaccagaatttacacagggatggagaat

SEQ ID NO: 36703 - DNA, 403 bp, Homo sapiens
atacgactcatatagggcgaattgggccctctagatgcatgctcgagcggccgccagtgtgatggatatctgcagaattcgccctttcgagcggccgcccgggcaggtactaagcaatgtgtcttgcatttgttttcaataggaaaacaaagttctagataggttaaaagaaaaacaccataaaagtggtagtatatttaagtggaaaattatgtattttaaagtgtgtaactattaaaaatatattgcctggaaaaggaatactactgttttgttttgttaagaccacaaactgtattgctaaggacattttaagagtctgcttagccataacactcatttaacagcatgggtagtaagcatggtttcttgcagaaaacacaaagttctcagctaacacatt

SEQ ID NO: 36704 - DNA, 386 bp, Homo sapiens
atacgactcactatagggcgaattgggccctctagatgcatgctcgagcggccgccagtgtgatggatatctgcagaattcgcccttagcgtggtcgcggccgaggtacgtcactttttaaaaatgacagcaacatgtctttatcatggattaagcaagtttaagaaatactatttttaatctcaaacaatgcactgaaagtgagtcttaatttcagagttttattgtattgcactaaaggaacagcaggatggttatacaattttctctcattcagttttgaaaatctgtagtacctgcccgggcggccgctcgaaagggcgaattccagcacactggcggccgttactagtggatccgagctcggtaccaagcttggcgtaatc

SEQ ID NO: 36705 - DNA, 503 bp, Homo sapiens
  misc_feature 348: n = A,T,C or G
ccctctagatgcatgctcgagcggccgccagtgtgatggatatctgcagaattcgcccttagcgtggtcgcggccgaggtacacttcctactctcgcttcatggagaagaccgcctactgacaagagaatccatcccctttgcacacagtggtcacctgacagctcagaggtcaacttcttggttttgaggaaaaattcaaaaggctgcacgtttaaaggagttgttccatttcagtgccccattagcctgtctttcctcagaaatttaccaatctcttgatgtgataagcaccaaactatgaagcttttcccttcctctccccgctgctccgttctgtgaaccgacnttttgtctacaatcacactgatttcttcactgtttgctctgaaacttcactttttctgagtgatgtgttctgtcaaataggctaaaataaaatacagtatctgcttacaggtaatatacggaacaataacaagggactgaaggtacctgcccggg

SEQ ID NO: 36706 - DNA, 400 bp, Homo sapiens
tatagggcgaattgggccctctagatgcatgctcgagcggccgccagtgtgatggatatctgcagaattcgcccttagcgtggtcgcggccgaggtactggttctgtcacctgggctgctcacagtatttggggccagagcctacgtgaatatatgtgtgtggacaggtcagctgccatgttggttttggcagaaaaactactgaaaggtggttcagaatctggggagccttatattccaggtgtctttttcagacagtttctacctgtatcacccaaggtgcagtttgatgtagtagtgtcagctttttccttaagtgaactgcccagcaaggctgaccacactgaggtagttcaaaccttatggcgtaagacaggtcatttcctggtacgcgggggag

SEQ ID NO: 36707 - DNA, 594 bp, Homo sapiens
atcgactactatagggcgaattgcgccctctagatgcatgctcgagcggccgccagtgtgatggatatctgcagaattcgcccttagcgtggtcgcggccgaggtactcggccattctgccagcatttctgtttcagcaactgctgataagttccccaggtgagcttaacagaagaatgggtgtcatacttgctgaagataaagatgcgtcccaaagaatgatggggcatgggcggccatcttaccatcttggccgtttcatttgtcttccaccagttctggaaagagaaggcctagaagttcagaaaaaaaggtaagaaagagttaatataaatgaggagaaaaaatagaacagtgagataagagtacctgcccgggcggccgctcgaaagggcgaattccagcacactggcggccgttactagtggatccgagctcggtaccaagcttggcgtaatcatggtcatagctgtttcctgtgtgaaattgttatccgctcacaattccacacaacatacgagccggaagcataaagtgtaaagcctggggtgcctaatgagtgagctaactcacattaattgcgttgcgctcact

SEQ ID NO: 36708 - DNA, 423 bp, Homo sapiens
actactatagggcgaattgggccctctagatgcatgctcgagcggccgccagtgtgatggatatctgcagaattcgccctttcgagcggccgcccgggcaggtacttcctctaaggaaatgtgtcattttttctaacatagtttatattcataaggagacaacacacaaacacatacacaatcaatcaacaaaaatgtgatacagtagattattaagcaccttgctctgattaaaaaggaaaaaaagaaagaaaaaagaacagactttttcaaccagcaattccagaataaaataaatctaattacatagtcaaaatgacaaaatttaaaaatcacttaatgggcagccaacatgtctccagttctcattttcttttatcccctgcttaagatttgcattcataattagattgttgttaatat

SEQ ID NO: 36709 - DNA, 438 bp, Homo sapiens
tatagggcgaattgggccctctagatgcatgctcgagcggccgccagtgtgatggatatctgcagaattcgcccttagcgtggtcgcggccgaggtacaatctggggctgaggccactccactgcctggcatcaaatcccactcttctgctttcagctcctgtggccaccacagtcctctgtgggatcgcaggagatgcttagtaatccaaggcaagattagttgtggtaaaaatggcccataaaataaaagcacatttttccacttacagaacctaaaactcattttagtaagagttcacagcaaaattttaatgtgagaagagtttgaaactgaatttatattattcttaaaaaatgtcacccagactcagtgacttttatttttcatttccctaaaagtttcccaaatatgaattaaattgtcaaggataagaaa

SEQ ID NO: 36710 - DNA, 396 bp, Homo sapiens
cgactactatagggcgaattgggccctctagatgcatgctcgagcggccgccagtgtgatggatatctgcagaattcgcccttagcgtggtcgcggccgaggtactaaatagttgaaaaatcaaacataatttactaataatgaacaactgcacacttcatactatgaccgtttgatgactggtcatgttaaactatcaccaaatgctgatttgtcttctatatataaatagtgaaaataaaacaaaaaggtcttctttcctagttaaccttcttgaaggttgttttaacccaatataaaattaagcaaaataatagtataatttaaaaaaaatttatgtgaagaagggcagcaattctaacatttttctgaactatggggttttcaatattttaa

SEQ ID NO: 36711 - DNA, 297 bp, Homo sapiens
cgactcactatagggcgaattgggccctctagatgcatgctcgagcggccgccagtgtgatggatatctgcagaattcgccctttcgagcggccgcccgggcaggtacgcggggacactatgcgggttgcggggcctgggggccggacggctgtttcctgtcctggtgcatggtggtcggacgaaggaattgttggaaaattttctcggaggtagaagatgttgttagcccaaataaatcgagattctcagggaatgacagagtttcctggaggagggatggaggcgcaacatgtta

SEQ ID NO: 36712 - DNA, 560 bp, Homo sapiens
ccctctagatgcatgctcgagcggccgccagtgtgatggatatctgcagaattcgccctttcgagcggccgcccgggcaggtacgcggggaggctttgtgacacacacacacacacacacacagcacctgcacgcagatgcacacatctctagtcaaatgaggctctcagctttttgataggggctttttgatacgtgtataaccaatactttattctcactgtagtcaaggactcattgcaattcagaaatgggaagctgatccggaactccactacagctcaaagaaattctcgaatgttctcacctattaacagttattaaaatggaagaagctggggatgaaattgtgagcaatgccatctcctacgctctatacaaagccttcagcaccagtgagcaagacaaggataactggaatgggcagctgaagcttctgctggagtggaaccagctggacttagccaatgatgagaatttcaccaatgaccgccgatgggagtctgctgaccttcaagaagtcatgtttacggctctcataaaggacagacccaagtttg

SEQ ID NO: 36713 - DNA, 653 bp, Homo sapiens
ctagatgcatgctcgagcggccgccagtgtgatggatatctgcagaattcgcccttagcgtggtcgcggccgaggtacatgaagactggtaaaactgcaaataagaattacaatttgaagtcacagaaaatattttaaatggctaattctgaagaggagacaagaatccattttggacatgttctcagttttgtaaatatgacttcactatcacattctctcatgtgtttccatacccaccttttcttggaaattatgggcagaaaatggatagaaggaaggaaaaggaatcttgagaaatttgtttggaggctgcattttaataataaggatgacttcactttatctctttggtcatcaaaggaataggaagaataagagattctcattatagttatccacctcacctaacagtaatgatatcagaatgaaggatttaaatgaaagtcaaactgacaggggaaaaaggcatctagcactctagtgtatttacctgtgaaaataaaaatccagtggaaaactgacatgtgtttagacattgaataaacaagttattttaaatattaaaagaattttcaatttcaagtcttagctgttttacatttcctcttgtggaaaaaagaaaaattttactaaactgaaatagctttact

SEQ ID NO: 36714 - DNA, 358 bp, Homo sapiens
ctactatagggcgaattgggccctctagatgcatgctcgagcggccgccagtgtgatggatatctgcagaattcgccctttcgagcggccgcccgggcaggtacgcggggtgcaaagcaagcaaggaacatttggggtaagaaaacaaacatgaggcaaaagaaaaaatacatgtttttaagaaaacattgagcagagaactgcagccaggatgcgctcagcagacattcactctggctgctgggacatcagaaaacaaagtcttcatctctctctccagtttcacccaccccaccctttgctttcattttaggtgtgttggtctatatgacagggaggagagtaaaggagagcagga

SEQ ID NO: 36715 - DNA, 202 bp, Homo sapiens
ctcactatagggcgaattgggccctctagatgcatgctcgagcggccgccagtgtgatggatatctgcagaattcgcccttagcgtggtcgcggccgaggtactctatggtggaatttaacgggaagctgttagccagcatcaatagcacggtgcggctctatgagtggacaacagattaatgagctgcgcactgagtgcaa

SEQ ID NO: 36716 - DNA, 403 bp, Homo sapiens
tacgactactatagggcgaattgggccctctagatgcatgctcgagcggccgccagtgtgatggatatctgcagaattcgcccttagcgtggtcgcggccgaggtacatctacctaaaagactattatgtggaataatacatactaatgaagtattacatgatttaaagactacaataaaaccaaacatgcttataacattaagaaaaacaataaagatacatgattgaaaccaagttgaaaaatagcatatgccttggaggaaatgtgctcaaattactaatgatttagtgttgtccctactttctctctcttttttctttctttttttttattatggttagctgtcacatacaacttttttttttgagatggggtcttgctctgtcaccaggctggagtgc

SEQ ID NO: 36717 - DNA, 430 bp, Homo sapiens
ctatagggcgaattgggccctctagatgcatgctcgagcggccgccagtgtgatggatatctgcagaattcgccctttcgagcggccgcccgggcaggtacaccgactacggcggactaatcttcaactcctacatacttcccccattattcctagaaccaggcgacctgcgactccttgacgttgacaatcgagtagtacgcggggacacatcaatgcagagtccctctgtgaatttacaacacccaacacccatgagttcagtccttaagaaggaaaattgagcaagtatttaattggttggacattgcataaaagaggtccatatccaggctaactctagaaattttattctcaaacttagttggcctctttttcttctgtcagaggaccattcttagtggcgctggggaaatcttggcacccagac

SEQ ID NO: 36718 - DNA, 413 bp, Homo sapiens
tactatagggcgaattgggccctctagatgcatgctcgagcggccgccagtgtgatggatatctgcagaattcgcccttagcgtggtcgcggccgaggtacgctgtctagatgacattgacagagggacatttgtttgcatttattcaggaagattactaagcagagctaacactgaaaaatcttatggtaattgatgaaaaacgggagagatgagaatactatgaaaaatatattttcaaaaaagaggaaattagaagttgcatgttcagattgtgaagttgaagttctcccattaggattggaaacacatcctagaactgctaaaactgagaaatgtccaccaaagtttcagtaataatcccaaggagcttactatggaaacgaaatatgataatatttcaagaattcagt

SEQ ID NO: 36719 - DNA, 632 bp, Homo sapiens
  misc_feature 10: n = A,T,C or G
ggcgaattgngccctctagatgcatgctcgagcggccgccagcgtgatggatatctgcagaattcgcccttagcgtggtcgcggccgaggtacaattttaagatgattttgagggttgtatttctttatcatttaaaaatatcctaaagtcagtaatttatatgaaggaaactcattcattattgaaggtattaaaaatagccatcatctgtattaggtagcagttttggaggatcatctttttcttttgctataaagccctattaatgaagaatacttccagtagagttaatagctgtagcttacctagtgtgttaatgaagtgtgtttatttatgtgacttgataccagtagtcataatagagactgaagaggtatgcgttaagcacgcctacttctatgcagtaaacaggctgcagctgcctagattagattcttagaaatgtcatattttgaattgttttatttcttgtaggggaagctttgtcccacttcattcatttgcatgccataggaattacatattggttatcattacgtatctaacaagattcagaaacaaaaatcctggacttttcacatccgaaatatgtcagctcttaataaatgtgtggtgcttaagtctacatatg

SEQ ID NO: 36720 - DNA, 447 bp, Homo sapiens
gagctccaccgcggtggcggccgaggtacttcctgtaattgacagccttgccttgttcctcatggcatcattcaaggtcatcttaaatgagagaggagggaaagaaagaaaaagaaatcatacgttatggttttcaaatgcatccagaggaaaggcagggttgtttttgaaaaagttacttctatctgaaagcttctagcaaatgaaagcaaacagtgcaaagctgaactacaaataataaagcacaattatggcaggaatctgtccacattcacccaagctactgtgccattaaagaggaaaatagacagttgagctgcaggttagtcaccaactgggaacatggaagaacgtcaacaatacatacaggatgatccattggccaccttccttatttaaaagagcttaaggacgcaacaagaaagctaaacgtgcactaaaaagttt

SEQ ID NO: 36721 - DNA, 380 bp, Homo sapiens
actactatagggcgaattgggccctctagatgcatgctcgagcggccgccagtgtgatggatatctgcagaattcgccctttcggcggccgcccgggcaggtactattaactttaaggaaaaggacatgagattttaagtcagaaaggaaaaatgctgactaaggcccaaatgctcaactccaagctttcattcacctaaaaaaatgcaatcaaatctcctcacttgaaagagttctttttttttccctttttctccagttttggaggagaactggaagggagtaaaaagacctgtccacagcacaaacttccactctggctgtgaaggactagccaattgctaaatgtttcatcacggaggtgctcgatcatattatat

SEQ ID NO: 36722 - DNA, 477 bp, Homo sapiens
acgactcactatagggcgaattgggccctctagatgcatgctcgagcggccgccagtgtgatggatatctgcagaattcgcccttagcgtggtcgcggccgaggtacctagaattcaaacaagaatcacacatcacatgctaaaaaaacttctagcatctaaaatacatacaagagctgtgcagggcatagacttcaaataaagccgaacactggttaatccatcagtcctatggcaagttgatcataaagcattccttacgcggagatctgggcaaggtaaagagtataagttagagcagcagcagttctgatgggtatcagaaaggcaaaatacaagacgagtcatgaggagcaccatacacatgaggaaagagttatttggggggtctcagtttgccccaaaatggatcaccatttttctcattctttgatcttttttttttccagtatctctagctcaaactttctgttaact

SEQ ID NO: 36723 - DNA, 447 bp, Homo sapiens
gcgaattgggccctctagatgcatgctcgagcggccgccagtgtgatggatatctgcagaattcgcccttagcgtggtcgcggccgaggtaccagttgtaaaattaccaggaaccgccatgcctcaagatcgccctgttttctggcttcatcaatgactgcatgcagtgcaccaccctgtccactacgtgatgctgtaggattaagtctcacagtgggcggctgaggatacagcgccgcgtcctgtgttgctggtgaattagacgccatcgctgtgggttgctggtatggtgccgtgctatttggcacaggacacaccgcttgaggtctgtattgaacctctgaaggaggccgatactgaagctcggttggcagccggtattgataaactaccagcggttgggtcttattttctaccggctgatattgtggatactgtatctgagtt

SEQ ID NO: 36724 - DNA, 429 bp, Homo sapiens
gggccctctagatgcatgctcgagcggccgccagtgtgatggatatctgcagaattcgccctttcgagcggccgcccgggcaggacaacattggattatttctttgggctgtttccaactcaagattctgttatttcattataagcattttgaggaaggcagttggtataaaggtgaccttagtaataaaagtcagtgtgaagtctatagaaattccacaatgaatttaaagacaagaattttagggacaaggatacagaaatttgcctagtaacttgcacacagcagatggtaaatatttattgactcaatggagtaatgttaaaaataaggtttcccatggactgtgtgagggccaggcatacttaacatcctttgtgagagagaggatggaaacggagtctactgtgaaagccacaagttttgggg

SEQ ID NO: 36725 - DNA, 439 bp, Homo sapiens
gagtcgggccctctagatgcatgctcgagcggccgccagtgtgatggatatctgcagaattcgccctttcgagcggccgcccgggcaggtacgcggggatcaatgcagagtccctctgtgaatttacaacacccaacacccatgagttcagtccttaagaaggaaaattgagcaagtatttaattggttggacattgcataaaagaggtccatatccaggctaactctagaaattttattctcaaacttagttggcctctttttcttctgtcagaggaccattcttagtggcactggggaaatcttggcacccagaagaattcaactgcgctcactgcaaaaatacaatggcctacattggatttgtagaggagaaaggagccctgtattgtgagctgtgctatgagaaactctttgcccctgaatgtggtcgatgcca

SEQ ID NO: 36726 - DNA, 412 bp, Homo sapiens
tgcatgctcgagcggccgccagtgtgatggatatctgcagaattcgccctttcgagcggccgcccgggcaggtacagctctcccagcgatttgtgaacaggcaggaggcaagcaatatcctggatgatgactttcccagcagccttgatctgtcgattgccagagtctgatccctcacgcttacttttccatcgtcttgatttccgctccttgtagtagaaggagctgatggagacctgctctttctcgctgcgagtggggctcccactgtataaacgaaggtttccaggggcctctgggcgggatctttatgggcggcgatcaagccagccgtgataagcacacaaggctgagaagagatcttgggagtaagcctctgtggggagacaccgcccgatgcattggtcatggg

SEQ ID NO: 36727 - DNA, 447 bp, Homo sapiens
actactatagggcgaattgggccctctagatgcatgctcgagcggccgccagtgtgatggatatctgcagaattcgccctttcgagcggccgcccgggcaggtaccaaagaagaaataagtccaaaccattagatcagaaggctaaattttcctatggttgaatgttaaatattgagttggaaatacccagaaatctttgttctagcttgtttgcagaaaggtaaagatttactagttggtttatttaacagtagaataaaatataataaacagtgtttaactttttttatgtattttttttctgtgaaactagaaagtttatgatgatgagaagcttgaggtttctgaattagcaactgtgaaacgtcctcaggagagaagctacatgctgcagaggtggcaagaagatggtggtgctatgatcataggctatgagatgtatagaa

SEQ ID NO: 36728 - DNA, 451 bp, Homo sapiens
atgctctagcggccgccagtgtgatggatatctgcagaattcgcccttagcgtggtcgcggccgaggtacgatcttggctcactgcaacctctccctcccgggttcaagtgattctcgtgcctcagcctcttgagtagctgggattacaggcgcgtgccactgcgtccggctaatttttgtatttttagtagagatggggtttcaccatgttggccaggctgatctcaaactcctgacctcatgtgggccacccaccttggcctcccaaagtgctgggattacaggcgtgagccaccacgctcagcctacaagcaatttttttaaaaactgacacctattactgataaaattctctgtttaaaatcctatttactattttaaagataagtattaattttttttaaatacaataattctggtattgataaaatttaaggcattttcattgcc

SEQ ID NO: 36729 - DNA, 533 bp, Homo sapiens
ggcgaattgagccctctagatgcatgctcgagcggccgccagtgtgatggatatctgcagaattcgccctttcgagcggccgcccgggcaggtactaaatgcatcctccatttcttattaacaatcttttctaaatatcaacgggatattaaataccagcttacttttagttctagaacttttgctttctttcaaaaacttttcagaaacatatatccattctataattgtgatagattggaagaaatattttccttagaaattttgtaaaggaatacttccactcttttgtatgtaagatttgataaacgataaaaacccaagtaaggccattattatcatcttgatcaaaaatatacacagatcgtgatgctactatattgtgtgatcctgagttctagtaaccactagatacatgcataccattcactgatttgtctattctaataaaaatttaatcctgtcttactacctttgaagacagaaatacttttaaaactttttgataggtcttcataacattacagattatc

SEQ ID NO: 36730 - DNA, 438 bp, Homo sapiens
atgcatgctcgagcggtcgtcagtgtgatggatatctgcagaattcgcccttagcgtggtcgcggccgaggtacagatctgggaactaaatattaaaaatgagtgtggctggatatatggagaatgttgggcccagaaggaaccgtagagatcagatattacaaacagctttgttttgagggttagaaatatgaaatgatttggttatgaacgcacagtttaggcagcagggccaagaatcctgaccctctgccccgtggttatctcctccccagcttggctgcctcatgtcatcacagtattccattttgtttgttgcatgtcttgtgaagccatcaagattttctcgtctgttttcctctcattggtaatgctcacttttgtgacttcattacaaatctgtaatcccgttcaaataaatatccacaacaggatctg

SEQ ID NO: 36731 - DNA, 432 bp, Homo sapiens
tgggcccttagatgcaagctccagcggccgccagtgtgatgtttatctgcagaattttcccttagcgtgtgcgcggccgaggtacaaagtccctgaggcaaaagcatgcttgctgtgttctaggaaaagcaaggaagacagcatgtctatagcagtgggaggtggaaggataatagacagtaggtgaggttagaggggaccaaatcatgtattttccatccagaggttcccaaccttggctgcacattagatttattctaaggagcttttaaaaaataccaatgactgggtcccagcctagagtgattaaatcagaatctctggaggtagacttgagaatctgatgtttgcaagtttcctaggcaagtcaaggctgaggaagactgctgcaggccattgtaagagccaggcgttgatctcattcaacctttc

SEQ ID NO: 36732 - DNA, 251 bp, Homo sapiens
  misc_feature 73, 85, 86, 111, 124: n = A,T,C or G
agacatatacatagctggcttttactagccaaggcaatgtaaatggactaagattctcatgtgacttgagggnatctgttttatnnattcttttcaaaaccaccttttttnacagggcatgtanaacccctctctttatttaaggagggagggaaaaacacatgtaaccagaattcagagtgggttactcaacctaagagaacatacggagttctctttgggaaaacaacaagactacagtgttcacttcg

SEQ ID NO: 36733 - DNA, 456 bp, Homo sapiens
agggcgaattgggccctctagatgcatgctcgagcggccgccagtgtgatggatatctgcagaattcgccctttcgagcggccgcccgggcaggtactacatatgcagaatctgatacaatgttaatagactgattaaaatcttgttaacactgtaatgacggcaaccaactctgctctttgagtcaagtgatactgggttttgatgactcattcttttggcccggtgtaagccacttttccattgctggaaccatcagtaaacactgccagagcattttttaaaggcttatgtttggtaactttaggtaaaatccaagtagtcaattttaaaaactggaagatttttgttttggggtaacgattgtcaataattcccacaaaatcggcaagaccaatctgccatgcaccagaattgataaaggcttgtctaacctgttgcttgttgaaaggaaca

SEQ ID NO: 36734 - DNA, 582 bp, Homo sapiens
gtatacgactcctatagggcgaattgggccctctagatgcatgctcgagcggccgccagtgtgatggatatctgcagaattcgcccttagcgtggtcgcggccgaggtacacatttgagatgcagatcatcaaggccaaagataactttgcaggaaattacagatgcgaggtcacctataaggataagtttgacagctgttcatttgatcttgaagtgcacgaatctactgggactactccaaacattgacatcagatctgctttcaagagaagtggagaaggtcaagaggatgcaggagaacttgactttagtggtctcctgaaacgtaggtgagaacaaagtgatggagtgagacattgtggcctggaagtctttcagacacccactcagagaagtcaagtttaaagtggatgttcttcagagaatttttcatttctgaaaatgtgttttgcttatagaaatatacagagttgactagaaagagagaaacaactgcatactaatcttttaaagcctttaacagttgctttaaacttttttttaaatgtttcatgactcttaactattttttttaaatggg

SEQ ID NO: 36735 - DNA, 454 bp, Homo sapiens
ctactatagggcgaattgggccctctagatgcatgctcgagcggccgccagtgtgatggatatctgcagaattcgccctttcgagcggccgcccgggcaggtacgaaaaaatcaggctactaagcccactgttaatatagacgcagaccaattgttaggaacaggtccaaattggagcaccattagccaacaatcagtgatgcagaatgaggctattgaacaagtaagggctatttgcctcagggcctggggaaaaattcaggacccaggaacagctttccctattaattcaattagacaaggctctaaagagccatatcctgactttgtggcaagattacaagatgctgctcaaaagtctattacagatgacaatgcccgaaaagttattgtagaattaatggcctatgaaaatgcaaatccagaatgtcagtcggccataaagccattaaaa

SEQ ID NO: 36736 - DNA, 493 bp, Homo sapiens
acactactatagggcgaattgggccctctagatgcatgctcgagcggccgccagtgtgatggatatctgcagaattcgccctttcgagcggccgcccgggcaggtacactttcttaacaaggaatggctgttttcaggccttattaggaaaacaaacaaacaatggcagttactacctgttttttatcactgataagctaaaataaagctcaaatatggacagtttaactgtgtgatattaagtaaaaaatgaaaaccattatagttttaccaaaagaaacacaaaaaatatgggaaggagtgaaatgaacatggcataggtcccaaagattacactatgattctgaacagcattttcaaaacaaagggtatctacatacaatttctgtgaatatttcttatactagatagatcaaaagcaaatgtaggctcagccctaccttgtcaaagataaatattcagataaactagaagttccatctgctaaagtgca

SEQ ID NO: 36737 - DNA, 359 bp, Homo sapiens
tagggcgaattgggccctctagatgcatgctcgagcggccgccagtgtgatggatatctgcagaattcgcccttagcgtggtcgcggccgaggtacgcgggggagcggagacccgggagcaggagctgggcctaggtctgcgccctgaattagagcccattgggaacgatgccaccaccgtcagacatttgccaaagtggccattgagtggccaggtgctaacgcccagctccttgaaatcgaccagaaacggcccctggcatccattatcaaggaagtttgtgatgggtggtcgttgccaaacccagagtattataccctccgttatgcagatggtcctcaactgtacctgcccgggc

SEQ ID NO: 36738 - DNA, 424 bp, Homo sapiens
tgctcgagcggccgccagtgtgatggatatctgcagaattcgcccttagcgtggtcgcggccgaggtactacatatgcagaatctgatacaatgttaatagactgattaaaatcttgttaacactgtaatgacggcaaccaactctgctctttgagtcaagtgatactgagttttgatgactcattcttttggcccggtgtaagccacttttccattgctggaaccatcagtaaacactgccagagcattttttaaaggcttatgtttggtaactttaggtaaaatccaagtagtcaattttaaaaactggaggatttttgttttggggtaacgattgtcaataattcccacaaaatcggcaagaccaatctgccatgcaccagaattgataaaggcttgtctaacccgttgcttgttgaaagg

SEQ ID NO: 36739 - DNA, 440 bp, Homo sapiens
gactcactatagggcgaattgggccctctagatgcatgctcgagcggccgccagtgtgatggatatctgcagaattcgccctttcgagcggccgcccgggcaggtacacaggtatctaataatactagtgagaaatactacagctatattccaggaagaagtggtaatactggaaagtttctttcctttttgagttgtctatacaataagtccttcacagaaatatagtatcccaaaattcatagagaagtgcagaaatgaaacaaatgaaatgtcttctgacaagctcaaccaaactggtcccaaatcatgacagttattttgtctaagaccgtattaatactttgcactgcagcaccttttacaagaggacagcaaaaaacttcacatgtgtaatcactgggctcctctgcaagaggctgggaggtaaaggaggggca

SEQ ID NO: 36740 - DNA, 436 bp, Homo sapiens
agggcgaattgggccctctagatgcatgctcgagcggccgccagtgtgatggatatctgcagaattcgccctttcgagcggccgcccgggcaggtaccagaagatagccgaggaaatcaccgtgggacagctcatctcacacctccaggtctccaaccaggagattcagacctacgccattgcactgattaatgcactttttctgaaggctcctgaggacaaacgacaggatatggcaaatgcatttgcacagaagcatctccggtctataatcctgaatcatgtgatccgagggaaccgccccatcaaaactgagatggcccatcagctatatgtccttcaagtcctaacctttaaccttctggaagaaaggatgatgaccaagatggaccccaatgaccaggctcaaagggacatcatatttgaactgaggagg

SEQ ID NO: 36741 - DNA, 613 bp, Homo sapiens
ctatagggcgaattgtgccctctagatgcatgctcgagcggccgccagtgtgatggatatctgcagaattcgcccttagcgtggtcgcggccgaggtaccttgttaacaatatgtttgcaggcagtatgtttggtaaaagtcatcgccattctccattctcgataaccaggggctcaatgcactgtggaaagccacaggaacctctgcccaagaaagcctggctgttgtgggaagtcagggaccccgaatggagggaccagctggtgctgcatcaggaaacataaattgtgaagatttcttggacatttatcagtttccaaaattaatacttttataatttcttacacctgtcttactttaatctcttaatcctgttatctttgtaagctgaggatatacgtcacctcaggaccactattgtacaagaaaaccccaaagctaactagaactataggcaaaatcatagctgactttctaaactaatgcaccactatataatgctttcccggagaaagtagaaggttctcaagattttatgttgacccatgatttttcacgtgttctcaaatataaaaccagagttttctttttgtctttaatttacactcatgt

SEQ ID NO: 36742 - DNA, 474 bp, Homo sapiens
gcgaattgggccctctagatgcatgctcgagcggccgccagtgtgatggatatctgcagaattcgccctttcgagcggccgcccgggcaggtaccaaggtctggcaatagtcatgttcattctctctctctctgtccttcctttctttcttccttccagggatcactacttgtgtgatgtgacatgggcaacacaagaaagaatttctttgcagtggctcaggaggattcagaactattcggtcatggatatttgtgactatgatgaatccagtggaagatggaactgcttagtggcacggcaacacattgaaatgagtacctttctgtcacatgactggtggcagaccctactttaacccagcccaacaaggtcatgctacagagctgctcatggcattttcctggactctcctcccttggtcctgactggattcttctaccctgatccacttagtaagtccaagctccatct

SEQ ID NO: 36743 - DNA, 406 bp, Homo sapiens
tcgagcggccgccagtgtgttggatatctgcagtattcgccctttagtgcggacgcccgggcaggtactcttaaaaatctgttaagagagtggatctcattttaagggttcttaccacaataaaattaaatttttgaaataaatcagtcatatttgagtgaaatgaaacctttccgagtagtttcagacaattgataatacctagtttacagttcctgtagtcattttggagggtgaggacttgatgtgtttagtaaagttgagaaataaatacatgaaagaatgtgtggggaagagaaagtgtggggaagagaaattgtctcagaggaccattcttagtggcactggggaaatcttggcacccagaagaattcaactgcgctcactgcaaaaatacaatggccta

SEQ ID NO: 36744 - DNA, 646 bp, Homo sapiens
  misc_feature 517, 518, 519, 520, 522, 525, 527, 528, 534: n = A,T,C or G
ctagatgcatgctcgagcggccgccagtgtgatggatatctgcagaattcgccctttcgagcggccgcccgggcaggtacatttggtggaactgagaaatggcataacaccaaatttaatatatgtcagatgttactatgattatcattcaatctcatagttttgtcatgcccaatttatcctcacttgtgcctcaacaaattgaactgttaacaaaggaatctctggtcctgggtaatggctgagcaccactgggcatttccattccagttggcttcttgggtttgctagctgcatcactagtcatcttaaataaatgaagttttaacatttctccagtgatttttttatctcacctttgaagatactatgttatgtgattaaataaagaacttgagaagaacaggtttcattaaacataaaatcaatgtagacgcaaattttctggatgggcaatacttatgttcacaggaaatgctttaaaatatgcagaagataattaaatggcaatggaccnnnnanaanannaaaaanaaaaaaggtccctcggccgcgaccacgctaagggcgaattccagcacactggcggccgttactagtggatccgagctcggtaccaagcttggcgtaatcatggtcatagctg

SEQ ID NO: 36745 - DNA, 475 bp, Homo sapiens
acgactcactatagggcgaattgggccctctagatgcatgctcgagcggccgccagtgtgatggatatctgcagaattcgccctttcgagcggccgcccgggcaggtaccagtgtccttgtccacggagattcccctttttacctcctccataatatctgagcagcaaaaattcagatttgctattttcttcaccttactgacacacagcagaaatttaacatttaattttttgaaggaaatttttatttaaaaacaaagatttgaaacttggtccatgtaggatgaatacatcctcaaaacagaagaaaagaagaatctgaggaataagaagcaagcttccttttcttctgaagcgctcaaattagaactgttggaagtttatgcaccctataaaagcaaaatgatgtaggtttatgttttaaaagacagatgtaataaaatgaacacattctttcaatagctatttgagaagt

SEQ ID NO: 36746 - DNA, 555 bp, Homo sapiens
  misc_feature 376, 459: n = A,T,C or G
cctctagatgcatgctcgagcggccgccagtgtgatggatatctgcagaattcgccctttcgagcggccgcccgggcaggtactttttgtttagaataagagaatttaaaaaatatccagtaatgagatacttagcaagaagtcaaatataaagccctttgctgtctttactgggacatactttttatgaaactatcctcatctattagggtagatgctgcagtgagctgcccagatcctcttcagcaccaaggccctaactctcccagctgctgggagtacaatagtggtcctgaggtgacgtatatcctcagcttacaaagataacaggattaagagattaaagtaagacaggtgtaagaaattataaaagtanttaatttggaaactgataaatgtccaagaaatcttcacaatttatgtttcctgatgcagcaccagctggtccctccattcggngtccctgacttcccacaacagccaggctttcttgggcagaggttcctgtgggcttacacagtgcattgagcccctggttaatcgagaatggagaat

SEQ ID NO: 36747 - DNA, 572 bp, Homo sapiens
cgactactatagggcgaattgggccctctagatgcatgctcgagcggccgccagtgtgatggatatctgcagaattcgcccttagcgtggtcgcggccgaggtacattctacatgcacggcataagaacagagagaaatacaataaatgtgacagtattttcaaatattttgtttctgagacattttgataagcaaatatcatactagaagggttcttctgagaattattacatcctatcctaacctgtgaatatggaacttgattattttcccatgatgacttgatggaaaccactcgccaaccaacaacaacaaaaaggagagctcatttacaacaatgcagtcatttatttattgagtatgtgcacattatggtattattactatactgattatatttatcatgtgacttctaattagaaaatgtatccaaaagcaaaacagcagatatacaaaattaaagagacagaagatagacattaacagataaggcaacttatacattgagaatccaaatccaatacatttaaacatttgggaaatgagggggacaaatggaagccagatcaaa

SEQ ID NO: 36748 - DNA, 496 bp, Homo sapiens
actactatagggcgaattgggccctctagatgcatgctcgagcggccgccagtgtgatggatatctgcagaattcgcccttagcgtggtcgcggccgaggtactttgcaagttttcttcttttaaaacaataatttgagtttttttttcttccttgccactaaattcaaactcattcatgtaagtaataagaatttccaccaaatgaacatctgctaagtattgagggacacaaaaaagagaaatcttaaaaaaaaaaaaaaaaaagtacctttggagaagttcttatggtgcaggtcaagaaagatcttaagactggtcattcaaaggggtttggctttgttcgttttacggaatatgaaacacaagtgaaagtaatgtcacagcgacatatgatagatggacgatggtgtgactgcaaacttcctaattctaagcaaagccaagatgagcctttgagaagcagaaaagtgtttgtggggcgctgtacctgcccg

SEQ ID NO: 36749 - DNA, 458 bp, Homo sapiens
gggccctctagatgcatgctcgagcggccgccagtgtgatggatatctgcagaattcgccctttcgagcggccgcccgggcaggtacatctacctaaaggactattatgtggaataatacatactaatgaagtattacatgatttaaagactacaataaaaccaaacatgcttataacattaagaaaaacaataaagatacatgattggaaccaagttgaaaaatagcatatgccttggaggaaatgtgctcaaattactaatgatttagtgttgtccctactttctctctcttttttctttctttttttttttattatggttagctgtcacatacaactttttttttttgagatggggtctcgctctgtcaccaggctggagtgcagtggcgcgatctcggctcactgcaacctccacatcccatgttgaagtaattcttctgcctcagcctcccga

SEQ ID NO: 36750 - DNA, 442 bp, Homo sapiens
atacgactactatagggcgaattgggccctctagatgcatgctcgagcggccgccagtgtgatggatatctgcagaattcgcccttagcgtggtcgcggccgaggtacgcgggggaaggaatcccttaagtgcacgtctcccgttttcttttcacatcaatgcagagtccctctgtgaatttacaacacccaacacccatgagttcagtccttaagaaggaaaattgagcaagtatttaattggttggacattgcataaaagaggtccatatccaggctaactctagaaattttattctcaaacttagttggcctctttttcttctgtcagaggaccattcttagtggcactggggaaatcttggcacccagaagaattcaactgcgctcactgcaaaaatacaatggcctacattggatttgtagaggagaaaggagccct

SEQ ID NO: 36751 - DNA, 453 bp, Homo sapiens
agggcgaattgggccctctagatgcatgctcgagcggccgccagtgtgatggatatctgcagaattcgccctttcgagcggccgcccgggcaggtacgcggggacatcaatgcagagtccctctgtgaatttacaacacccaacacccatgagttcagtccttaagaaggaaaattgagcaagtatttaattggttggacattgcataaaagaggtccatatccaggctaactctagaaattttattctcaaacttagttggcctctttttcttctgtcagaggaccattcttagtggcactggggaaatcttggcacccagaagaattcaactgcgctcactgcaaaaatacaatggcctacattggatttgtagaggagaaaggagccctgtattgtgagctgtgctatgagaaattctttgcccctgaatgtggtcgatgccaaaggaag

SEQ ID NO: 36752 - DNA, 634 bp, Homo sapiens
  misc_feature 600, 622: n = A,T,C or G
gtatacgactcactatagggcgaattgggccctctagatgcatgctcgagcggccgccagtgtgatggatatctgcagaattcgcccttagcgtggtcgcggccgaggtacgcgggacacacacacacagcacctgcacgcagatgcacacatctctagtcaaatgaggctttcagctttttgataggggctttttgatacgtgtataaccaatactttactctcactgtagtcaaggactcattgcaattcagaaatgagaagctgatccggaactccactacagctcaaagaaattctcgaatgttctcacctattaacagttattaaaatggaagaagctggggatgaaattgtgagcaatgccatctcctacgctctatacaaagccttcagcaccagtgagcaagacaaggataactggaatgggcagctgaagcttctgctggagtggaaccagctggacttagccaatgatgagattttcaccaatgaccgccgatgggagtctgctgaccttcaagaagtcatgtttacggctctcataaaggacagacccaagtttgtccgcctctttctggagaatggcttgaacctacngaagtttctcacccatgatgtnctcactgaactc

SEQ ID NO: 36753 - DNA, 523 bp, Homo sapiens
  misc_feature 486: n = A,T,C or G
gatgcatgctcgagcggccgccagtgtgatggatatctgcagaattcggcttagcgtggtcgcggccgaggtacatctacctaaaggactattatgtggaataatacatactaatgaagtattacatgatttaaagactacaataaaaccaaacatgcttataacattaagaaaaacaataaagatacatgattgaaaccaagttgaaaaatagcatatgccttggaggaaatgtgctcaaattactaatgatttagtgttgtccctactttctctctcttttttctttctttgtttttattatggttagctgtcacatacaactttttttttttgagatggggtctcgctctgtcaccaggctggagtgcagtggcgcgatctcggctcactgcaacctccacatcccatgttgaagtaattcttctgcctcagcctcccgagtagctgggactagaggaacgtgccaccatgactggctaattntctgtattttttagtagagacagagtttcaccatgtt

SEQ ID NO: 36754 - DNA, 72 bp, Homo sapiens
atagggcgaattgggccctctagatgcatgctcgagcggccgccagtgtgatggatatctgcagaattcgcc

SEQ ID NO: 36755 - DNA, 458 bp, Homo sapiens
tacgactactatagggcgaattgggccctctagatgcatgctcgagcggccgccagtgtgatggatatctgcagaattcgcccttagcgtggtcgcggccgaggtacctgggaccacaggcacatgctaacgcacccacttaatttttttattcgtagagccgaggtctcactatgttgcccagactggtctaagctttgggctaagcagtcctctgcctagcctcccaaagtgccaggattacaggtgtgagccaccacacccagtccaaaaagtgattttctaattccatagtttcttctacatttcttaactggaattttgtaaggaagagttatccttattcatttatttacccatttacttgtgggagcatgtttcaataaattctaaatctatggggttgtagttagctactggtaaatttgatgcacatattttttccagattcaataagt

SEQ ID NO: 36756 - DNA, 516 bp, Homo sapiens
  misc_feature 364: n = A,T,C or G
atgcatgctcgagcggtcgacagtgtgatggatatctgcagaattcgcccttagcgtggtcgcggccgaggtcctactctcagtgttggagatcatcaaaatacagttggaccagaccctatggaaataattctgtgtctcaaatgccctgtggagcacacacttatcagttgatggctatggaattttccaacatcagctaaagagaaggagtggtgacttccaagcttcatgcagaaccggacaacagaaattgagagggaaatttctatgacagaagagagaaagaagataattgctggaataatgaccttgaatagaggaaatgggatatcatctggtaagcaaatagagaagctggctntagataagagcctggacaattcattcatagaatagcagaaaaggcagaatttatgtccatagatgcaagtggtatagtagatatagtgatgggagtatgtaaaagttaccttctaattgctattttttttaatgaaataagaaacaaagtca

SEQ ID NO: 36757 - DNA, 606 bp, Homo sapiens
acgactcactatagggcgaattgggccctctagatgcatgctcgagcggccgccagtgtgatggatatctgcagaattcgccctttcgagcggccgcccgggcaggtacgcggggacatcaatgcagagtccctctgtgaatttacaacacccaacacccatgagttcagtccttaagaaggaaaattgacaagtatttaattggttggacattgcataaaagaggtccatatccaggctaactctagaaattttattctcaaacttagttggcctctttttcttctgtcagaggaccattcttagtggcactggggaaatcttggcacccagaagaattcaactgcgctcactgcaaaaatacaatggcctacattggatttgtagaggagaaaggagccctgtattgtgagctgtgctatgagaaattctttgcccctgaatgtggtcgatgccaaaggaagatccttggagaagtcatcaatgcgttgaaacaaacttggcatgtttcctgttttgtgtgtgtagcctggggaaagcccattcggaacaatgtttttcacttggaggatggtgaaccctactgtgagactgattattatgccc

SEQ ID NO: 36758 - DNA, 600 bp, Homo sapiens
tatagggcgaattgggccctctagatgcatgctcgagcggccgccagtgtgatggatatctgcagaattcgcccttagcgtggtcgcggccgaggtacatagggatacttgagcttttagaattacttttttatatttcccatcccagagttttactttttgcctgggctgagaagcacttcatttagtcagtcagtaatcatttactgaatgctataagcatcaatgggtatggggcacaggagagagatgaaatagagtctttacccttagggagctaacaacataagacaaattagtgtgtttggggaacattgagtaaagagcaatcatttgaagaggaatgtgcaaaataaatttattagaccaattgtaaatgatttgagattctttattaagaattattcatatcactgttcccattattaatctaatgtctgtagatagtatgaagtaacaggcttcctttgccccttctaaaccagtcttaatgagaacactaatttaagcatggaagcttcagtgtttgatgctttttattttaggttttgctttcaaattatagcttatgtaacaatatcaataatttgaaacagtatg

SEQ ID NO: 36759 - DNA, 478 bp, Homo sapiens
ctactatagggcgaattgggccctctagatgcatgctcgagcggccgccagtgtgatggatatctgcagaattcgcccttagcgtggtcgcggccgaggtaccttaccacatttacagaataatacagataaccaaaagatcatttcaatagataagtctttcatcaaacttaaaacccacttatgattttaaaaactcttcttcaattagaaatgagaaaggatagttcttaacctgactaaaagcatctataaaataatccaaaagttaacattatcttaaatgagcaaacattggaagcattctctttgaaatcaggaatggcacaaggaaaaaacttattaccacttttgttcataattgtacaaaacactatttcaaatctaggccttctgacagaatccaatatctatttttatacttacttttctttctactaagttctttaataaaattatgaatcagaaagcaagtacc

SEQ ID NO: 36760 - DNA, 458 bp, Homo sapiens
ctatagggcgaattgggccctctagatgcatgctcgagcggccgccagtgtgatggatatctgcagaattcgccctttcgagcggccgcccgggcaggtacatctacctaaaggactattatgtggaataatacatactaatgaagtattacatgatttaaagactacaataaaaccaaacatgcttataacattaagaaaaacaataaagatacatgattgaaaccaagttgaaaaatagcatatgccttggaggaaatgtgctcaaattactaatgatttagtgttgtccctactttctctctcttttttctttctttttttttattatggttagctgtcacatacaacttttttttttttttgagatggggtctcgctctgtcaccaggctggagtgcagtggagcgatcttggctcactgcaaccttcacattccatgttgaagtaaatttttt

SEQ ID NO: 36761 - DNA, 460 bp, Homo sapiens
atacgactactatagggcgaattgggccctctagatgcatgctcgagcggccgccagtgtgatggatatctgcagaattcgcccttagcgtggtcgcggccgaggtaccagttgtaaaattaccaggaaccgccatgcctcaagatcgccctgttttctggcttcatcaatgactgcatgcagtgcaccaccctgtccactacgtgatgctgtaggattaagtctcacagtgggcggctgaggatacagcgccgcgtcctgtgttgctggtgaattagacgccatcgctgtgggttgctggtatggtgccgtgctatttggcacaggacacaccgcttgaggtctgtattgaacctctgaaggaggccgatactgaagctcggttggcagccggtattgataaactaccagcggttgggtcttattttctaccggctgatattgtggatactgtatctga

SEQ ID NO: 36762 - DNA, 447 bp, Homo sapiens
ttagggcgaattgggccctctagatgcatgctcgagcggccgccagtgtgatggatatctgcagaattcgcccttagcgtggtcgcggccgaggtacctgactgtggctcagatctgcgtcgcagcagcgagagaagaaatcactccatatccgatgagaggaagggtggcacagagatggtgtctacaattagagacatttctgactccaccttagcctaagcaaactttatatactgagtaacatttgaaggttgtcttttaatggtggggggtgttttttcctttttaaactacagtgcttgcacaagagagggagggactcagaaaaggttagggcaggtgagggagacagtagatggcctgggatgacttgagtccatcatactattgcttggcaggtgtcctcccccatgtttgattcaaattccatgagtgacctacctt

SEQ ID NO: 36763 - DNA, 403 bp, Homo sapiens
ctactatagggcgaattgggccctctagatgcatgctcgagcggccgccagtgtgatggatatctgcagaattcgcccttagcgtggtcgcggccgaggtacatctacctaaaggactattatgtggaataatacatactaatgaagtattacatgatttaaagactacaataaaaccaaacatgcttataacattaagaaaaacaaataaagatacatggattgaacccaagttgaaaaatagcatatgccttggaggaaatgtgctcaaattactaatgatttagtgttgtccctactttctctctcttttttctttctttttttttattatggttagctgtcacatacaactttttttttttttgagatggggtctcgctctgtcaccaggctggagtgc

SEQ ID NO: 36764 - DNA, 485 bp, Homo sapiens
tacgactcactatagggcgaattgggccctctagatgcatgctcgagcggccgccagtgtgatggatatctgcagaattcgcccttagcgtggtcgcggccgaggtaccacaggcttgaatctgtcctccccaggagctagtccattgccgcctcggttgggcatggggtcattgacatctctgtcttccctcatcctgcttagcgggcttgggtcgtccggccgcggggtcagggaagaccagaggaccactagccccaggaagcttcccaccaccagcaaactgcgtaagatgaatccaatcttcagcctcatcttcctccggcggcgagagactcacagcccggcgcagccgcccccgcgtacctgcccgggcggccgctcgaaagggcgaattccagcacactggcggccgttactagtggatccgagcttggtaccaagcttggcgtaatcatggtcataagctgattcctgtgtgaaat

SEQ ID NO: 36765 - DNA, 457 bp, Homo sapiens
tatagggcgaattgggccctctagatgcatgctcgagcggccgccagtgtgatggatatctgcagaattcgcccttagcgtggtcgcggccgaggtacaacattggattatttctttgggctgtttccaactcaagattctgttatttcattataagcattttgaggaaggcagttggtataaaggtgaccttagtaataaaagtcagtgtgaagtctaaagaaattccacaatgaatttaaagacaagaattttagggacaaggatacagaaatttgcctagtaacttgcacacagcagatggtaaatatttattgactcaatggagtaatgttaaaaataaggtttcccatggactgtgtgagggccaggcatacttaacatcctttgtgagagagaggatggaaaccgagtctactgtgaaagccccaagttttggggaaatacacttctgcaa

SEQ ID NO: 36766 - DNA, 602 bp, Homo sapiens; identical to SEQ ID NO: 33064

SEQ ID NO: 36767 - DNA, 473 bp, Homo sapiens
gcgaattgggccctctagatgcatgctcgagcggccgccagtgtgatggatatctgcagaattcgcccttagcgtggtcgcggccgaggtacatttataagttatgaccttgagtcgtgttcaaggagaaagtgacattggaacttggaaaatttaaaaatgattctacttgaaaaatttgaccattgcatagaaatattagctatcgtctaatcttttgtaatcttagaaacaatcgtgaattgtttggtgaaaaatgaaaaaataaccatttcttatgtctccgtgacctttatagaccaatgtcaccaacttttcctaaggtaattgtttcctactgtcaaatagctctagtgatataaatcttaacaatcaatgaagggaaaactggtggaaacatatgaggaaaaatactgggataattttcatcacaaagtattggcattaacattggttagaataggggagaaact

SEQ ID NO: 36768 - DNA, 400 bp, Homo sapiens
gactcactatagggcgaattgggccctctagatgcatgctcgagcggccgccagtgtgatggatatctgcagaattcgcccttagcgtggtcgcggccgaggtacttctataattactgcttcataaaaaagtggatttttccagctctccagttcagatgctattaacaggtaatcagatagcactgactaagtagaaatagattaagagtaatacctaaatttaatgtattttagcatattgaaatgagtatcatcagtgtatatttcatttatcactttgtctacactttattaggtggccttaatgcttgtcattgacaaatgttaactttcctcacaaaacctacactattcacttttttccagtatttttgccttccttattaaaaatgtttct

SEQ ID NO: 36769 - DNA, 215 bp, Homo sapiens
ctcactatagggcgaatcgggccctctagatgcatgctcgagcggccgccagtgtgatggatatctgcagaattcgcccttagcgtggtcgcggccgaggtacgcggggggtccatatccaggctaactctagaaattatattctcaaacttagttggcctctttttcttctgtcagaggaccattcttagtggcactggggaaatcttggcgcc

SEQ ID NO: 36770 - DNA, 469 bp, Homo sapiens
tacgactactatagggcgaattgggccctctagatgcatgctcgagcggccgccagtgtgatggatatctgcagaattcgccctttcgagcggccgcccgggcaggtacgcggggatcaatgcagagtccctctgtgaatttacaacacccaacacccatgagttcagtccttaagaaggaaaattgagcaagtatttaattggttggacattgcataaaagaggtccatatccaggctaactctagaaattttattctcaaacttagttggcctctttttcttctgtcaggggaccattcttagtggcactgggaaatcttggcacccagaagaattcaactgcgctcactgcaaaaatacaatggcctacattggatttgtagaggagaaaggagccctgtattgtgagctgtgctatgagaaattctttgcccctgaatgtggtcgatgccaaaggaagatccttg

SEQ ID NO: 36771 - DNA, 444 bp, Homo sapiens
tatagggcgaattgggccctctagatgcatgctcgagcggccgccagtgtgatggatatctgcagaattcgcccttagcgtggtcgcggccgaggtacatgggactacaggcacgccccaccatgcccagctcatttttgtatttttagtagagacagggtttcaccatgttggccaggatgatcttgatctcttgacctcatgatccgcccctcttggcctcccaaagtgctgggatcacaggcgtgagccaccacacctggccctctatttattctctttaaagagagagaaaactatgagaggccaaaattatttaattaaatctttaccttagcacaagggaaaaaatggaatttgcctaatataggtgatgaagcatacacaatgaacagaaacaatcacattttagtaaaaggcaaaaatttgagacttataagctat

SEQ ID NO: 36772 - DNA, 355 bp, Homo sapiens
attgggccctctagatgcatgctcgagcggccgccagtgtgatggatatctgcagaattcgccctttcgagcggccgcccgggcaggtacaggaaaagccaaacaacaggcttcccttctctaattacaattttttcagcaccaaattacttagatgtatacaataacaaagctgcagtatagaattattgagaacaatgttttgaatatcaagcagagaatcggatggccttttatatgttgctttctaaaattaatggccgtcgggcctgagatggatggagggaccggggatttgggaacttggaaacgagctgagggaagggagcctgtggaaatagactggagtctgggt

SEQ ID NO: 36773 - DNA, 479 bp, Homo sapiens
tacaactcactatagggcgaattgggccctctagatgcatgctcgagcggccgccagtgtgatggatatctgcagaattcgcccttagcgtggtcgcggccgaggtacagaaaaggtgaatctgtgttctgtatattctgcctaaggcaaagaaatgtttagctctctttaaaatagttccataattttttctaaaaagcctttgcttgaaaactgtaagcttcccatatctggagcatttcactttaaatatttggataaatatgttatctttttacttggacatttcatgtgtttagggaatatgtcttctaaattcttcctaattcatatagctgctaacacttcccgcagagctaaaccattacagatatgaaataaagacctattgatttgacttacttttacttgtaaaaccttctgagtgttataacctcatttaatctttcagcatttacagtttcaagagtttgtgtcac

SEQ ID NO: 36774 - DNA, 435 bp, Homo sapiens
tatagggcgaattgggccctctagatgcatgctcgagcggccgccagtgtgatggatatctgcagaattcgcccttagcgtggtcgcggccgaggtaccatcgatccagatatacatggcctggactttctcaccctgaggcagggacatgtacccactgggtatccgttagaggtaagggagaggagaggattgatagagtgttgcaaaagtatagattattcattgagataaaggatttggtttccctgccatgagtattaaaaaaatttaagttttcccaagcttgcatctctgaccaaatttcaacataaaacattggaaggaggctgggtgcggtggctcatgcttgtaatcccagcactgggaagctaaggcgggtggatcacttgaggtcaggagttcgagaccagcctggccaacatggtgaaaccc

SEQ ID NO: 36775 - DNA, 472 bp, Homo sapiens
tgggccctctagatgcatgctcgagcggccgccagtgtgatggatatctgcagaattcgcccttagcgtggtcgcggccgaggtacagtctcggggaacaagttaccaagagtggccttttatttccactgttcctaccatggcaaaatcatgtcagtcattgatgttgggttcccacttactttccaaccctccccaaacccaaaagcctgggacactgatactccaccagccagaggtcatgtcagttgatgacatgaatgacagtatagggcaggtgcagctcagagtgagacaaattcttgccaatcattctgaccgggaaggatgactctggaactagcaagagaagcactgaaggatgcctttcctgaccctcacatccaacaagggcctccaaatcctcgccttcctgatccatttgttgtagttgttgttggtgagatagagccttgcttggtcacccaggctg

SEQ ID NO: 36776 - DNA, 472 bp, Homo sapiens
gggccctctagatgcatgctcgagcggccgccagtgtgatggatatctgcagaattcgcccttagcgtggtcgcggccgaggtacagcctattatattcccacatcctgagaaaggtcatttctcccacacacgacaaagtcacagacatcctgcacctgccactaggcatcctcatcctacttgacatgcccatttctccagttttcttaatctgagactcccttcccttgttttttaaagataccgtgcttctccacatcctcatccttcaaggagcatattttgctcttaggatggtctttgggattcaagaatagaataataaatccaaacttggtcattcccattttgaagagatgcaagagggcccagtgaggacatccgcctccctgaaagtggtgctagacagagctgaggtcattgtatctgtgtatccacataggatttctcttaattcagcttgaattgat

SEQ ID NO: 36777 - DNA, 257 bp, Homo sapiens
ctatagggcgaattgggccctctagatgcatgctcgagcggccgccagtgtgatggatatctgcagaattcgcccttagcgtggtccccggccaaggacattttggtaccggattcaacaaacctgagcttttgagcagactctgagaagtatcattgcttgtgttgaaagaatacaacaggatttaagtttctctttagaaattgcactgaagaaaggccgggcgcgggtggctccccctgtaatcccagcgcttt

SEQ ID NO: 36778 - DNA, 544 bp, Homo sapiens
ctactatagggcgaattgggccctctagatgcatgctcgagcggccgccagtgtgatggatatctgcagaattcgcccttagcgtggtcgcggccgaggtactttttttttttttttttttttttgttttcagattttaaccaggtgggtgctacgtagcacacggaagagcaagctcttaagggtagcatctatcaggttttcagatactaaacagaaatgagcacagtctgtacccgctaaaactgcacagctcgaccttcatggcgacagctcccccgcgtactctcaaaccatctctctggattattcatcctctgattctcactaagaactgagctctgtctgggcactttcactaacacacctgtctgataggctctttctcctaattggaaactctggaggttaatgaggtcctcatgttgttgcaagttttctacacttgacacacttggatggagactctcctctctagaccctctaagatgtttgacaggatttgagtctgtaatgcagttttctccaacagcattgaacttct

SEQ ID NO: 36779 - DNA, 448 bp, Homo sapiens
  misc_feature 443: n = A,T,C or G
ctctagatgcatgctcgagcggccgccagtgtgatggatatctgcagaattcgccctttcgagcggccgcccgggcaggtactgtcccaatataaaacagtaattatttgacctttgcactgtttgtctggtccttttcagtttgattgcatataaatgtggaacttgatagatctctatatttttaatgcacttgtgataaactggcagcagggttagacattactttcaaagcttgaggtagaccgagtcagcatgctagacaggcttctctctctaaccaaaactgtaatcttcaggaccagcaaactcagcccaaggcagctaatccccccaaccccatcctccgcgccccgtgcggctgatcggcagccctgattcgccaatttgtcctctctcattcactgatccaccagcctgactgctaagagctatagtctttntagtt

SEQ ID NO: 36780 - DNA, 477 bp, Homo sapiens
ctactatagggcgaattgggccctctagatgcatgctcgagcggccgccagtgtgatggatatctgcagaattcgcccttagcgtggtcgcggccgaggtacctgcaacagtggctcaacctgttaggtctacgtattacctgcatcacttaagcagaagtgccggctccaaccatatttttgtctaaattagcacccttcgggctttgggaccaggaatgtatagtttgggaaggctgcgtgtgagtttaatgtgcaaaatgtgaacttctaatcactggtcaaccaaaacaaatcctccttctaaaggaagaaaataaaacccccaaagtcagcaggactctttaaaccaaatttatgtagttaacgaggattaggaaacaaggaatcctcagaaatgcttttcagggtaattaagcaatgtggtattggccaattcaactgaccttagaaactctgagactagttttacgaact

SEQ ID NO: 36781 - DNA, 449 bp, Homo sapiens
gcatgctccagcggccgccagtgtgatggatatctgcagaattcgcccttagcgtggtcgcggccgaggtacgcggggagaagaaatagcaagtgccgagaagctggcatcagaaaaacagaggggagatttgtgtggctgcagccgagggagaccaggaagatctgcatggtgggaaggacctgatgatacagaggtgagaaataagaaaggctgctgactttaccatctgaggccacacatctgctgaaatggagataattaacaccactagaaacagcaagatgacaatataatgtctaagtagtgacatgtttttgcacatttccagcccctttaaatatccacacacacaggaagcacaaaaggaagcacagagatccctgggagaaatgcccggccgccatcttgggtcatcgatgagcctcgccctgtgcctggtcccgctt

SEQ ID NO: 36782 - DNA, 469 bp, Homo sapiens
gggccctctagatgcatgctcgagcggccgccagtgtgatggatatctgcagaattcgcccttagcgtggtcgcggccgaggtacttttttttactttggcaacaaatatttatacatacaagatgctagttcatttgaatatttctcccaacttatccaaggatctccagctctaacaaaatggtttatttttatttaaatgtcaatagttgttttttaaaatccaaatcagaggtgcaggccaccagttaaatgccgtctatcaggttttgtgccttaagagactacagagtcaaagctcatttttaaaggagtaggacaaagttgtcacaggtttttgtagctgtttttattgcccccaaaattacatgttaatttccgtttatatcagggattctatttacttgaacactgggaagttgccatttcggctcattgatttctttgacataactaggatccattatt

SEQ ID NO: 36783 - DNA, 450 bp, Homo sapiens
gcatgctcgagcggccgccagtgtgatggatatctgcagaattcgccctttcgagcggccgcccgggcaggtacgaaaaaatcaggctactaagcccactgttaatatagacgcagaccaattgttaggaacaggtccaaattggagcaccattaaccaacaatcagtgatgcagaatgaggctattgaacaagtaagggctatttgcctcagggcctggggaaaaattcaggacccaggaacagctttccctattaattcaattagacaaggctctaaagagccatatcctgactttgtggcaagattacaagatgctgctcaaaagtctattacagatgacaatgcccgaaaagttattgtagaattaatggcctatgaaaatgcaaatccagaatgtcagtcggccataaagccattaaaaggaaaagttccagcaggagttgatgt

SEQ ID NO: 36784 - DNA, 161 bp, Homo sapiens
actatagggcgaattgggccctctagatgcatgctcgagcggccgccagtgtgatggatatctgcagaattcgccctttcgagcggccgcccgggcaggtactcggctgttcttctcttcacagcttctcgacgggaagggcttgactctacttgaacacc

SEQ ID NO: 36785 - DNA, 402 bp, Homo sapiens
gctcgagcggccgccagtttgatggatatctgtataattcgccccttcgagcgcgccgcccgggcaggtaccttgcaggatactactcccttatctacaagcaatccaaatgactaagggataatttccaaacacttctgcttgttaacccctcctctccagtgctgaaaaactcaagacaagtaaaagacacatttttaattaacatttggaagatggctttagttagttaatagcaattgttaactctcaaaataaacaggaaatagtgccacttagcaagttgtatgttccaaacccaagagtaatgggccttaagaaatccaagtactcagtgcagcaaagaaagactacagacatctcaatggcaggggtgagaaataagaaaggctgctgacttta

SEQ ID NO: 36786 - DNA, 470 bp, Homo sapiens
tatagggcgaattgggccctctagatgcatgctcgagcggccgccagtgtgatggatatctgcagaattcgccctttcgagcggccgcccgggcaggtacctttcattggattgtccatggtgcatcgctttagcaagcggcgtgactctccgctgcccgtcatcttggccaatatctatctgctggttcctcctgtgctcaacccaattgtctatggagtgaagacaaaggagattcgacagcgcatccttcgacttttccatgtggccacacacgcttcagagccctaggtgtcagtgatcaaacttcttttccattcagagtcctctgattcagattttaatgttaacattttggaagacagtattcagaaaaaaaatttccttaataaaaatacaactcagatccttcaaatatgaaactggttggggaatctccattttttcaatattattttcttctttggttt

SEQ ID NO: 36787 - DNA, 477 bp, Homo sapiens
agggaattgggccctctagatgcatgctcgagcggccgccagtgtgatgggatatctgcagaattcgccctttcgagcggccgcccgggcaggtactacatatgcagaatctgatacaatgttaatagactgattaaaatcttgttaacactgtaatgacggcaaccaactctgctctttgagtcaagtgatactgagttttgatgactcattcttttggcccgtgtaagccacttttccattgctggaaccatcagtaaacactgccagagcattttttaaaggcttatgtttggtaactttaggtaaaatccaagtagtcaattttaaaaactggaagatttttgttttggggtaacgattgtcaataattcccacaaaatcggcaagaccaatctgccatgcaccagaattgataaaggcttgtctaacctgttgcttgttgaaaggaacagtgattttatctgggtcatttcc

SEQ ID NO: 36788 - DNA, 461 bp, Homo sapiens
gcgaattggatgctccaccgcggtggcggccgcccgggcaggtacacacacccaacctctaccctgtggatgtcctagataagggttttctcttcacaaaggtaaatcaactctttgcctccttagggagggaaggaataaaggcattatttttgagacttttctgcagtccattcttgaagtattagtagtgggtaatccctccaacgtccaggactccaaacgagcagctgctccctaaagctcacccaccaatcctggccctccacctgctactggggtagaggcctgggctacagacacagaggctgggcttctgcccagctgccagtggttagacatggcctttaggagcctcaggtggcttttttaactgccaccatgaaagattccaaacctgggtggagttcagtgtccacacatacccgcgtacctcggccgctctagaactagtggatccc

SEQ ID NO: 36789 - DNA, 67 bp, Homo sapiens
actatagggcgaattgggccctctagatgcatgctcgagcggccgccagtgtgatggatatctgcag

SEQ ID NO: 36790 - DNA, 170 bp, Homo sapiens
ggcgaattgggccctctaatgcatgctcgagcgggcgccagtgtgatggatatctgcagaattcgccctttcgagcggccgcccgggcaggtacttggatcaaatggctacattaattggtcagggaagattatgaataataacattgtgtggaaatgacccagataaaa

SEQ ID NO: 36791 - DNA, 457 bp, Homo sapiens
gcgaattgggccctctagatgcatgctcgagcggccgccagtgtgatggatatctgcagaattcgccctttcgagcggccgcccgggcaggtacaaaatcgcttcttgacctgcacaactttctgatttgatgagttcaacagaaaccaactcaagggagaagaataaagacattgttgaacttagactttgacaagataagcaaaaagaaaagcaagagatatggaactgaacttccctttggcaaaaaatttagaaaatgataatgaggaacatcgatttcagcataccttaagccttttgaacagacttgtcgatactctcttggaaaagtatttttaaaaatagaattgaatatttttaaactttcatcccaatagaaagctaaagttaatgaggaaacttggattcatttcacaaaacgttgcttgttggagtgcaatggtgcgatcttggc

SEQ ID NO: 36792 - DNA, 127 bp, Homo sapiens
gatatctgcagaattcgcccttagcgtggtcgcggtctaggtacacacatgagaactgaaatggcccaaacccagaaagaaagcccaactagatcctcagaagacgctttctagggacaactaaccg

SEQ ID NO: 36793 - DNA, 426 bp, Homo sapiens
gcgaattgtgccctctagatgcatgctcgagcggccgccagtttgatggatatctgtatgaattcgcccttagcgtggtcgcggccgaggtacaagcttcatttgccacaaaactcacaaaaaagtaattgattaaagaatatctcttttatgcaaaatatacattttaggatataatttaattgatattctactatatactgacattgctccttgatcattgaataaaaaaaatactctcattgccagaattatgtttttgtaatatttataattgaggtaataatgataaaagacttaaactatgaataatgttggtgagttccatttaagctataacaatttcccagaactaaacaaatatgtgactaaacataggtcatttttgataaatgaatactaacaatttcacaacataattgacaa

SEQ ID NO: 36794 - DNA, 465 bp, Homo sapiens
attgggccctctagatgcatgctcgagcggccgccagtgtgatggatatctgcagaattcgcccttagcgtggtcgcggccgaggtactacatatgcagaatctgatacaatgttaatagactgattaaaatcttgttaacactgtaatgacggcaaccaactctgctctttgagtcaagtgatactgagttttgatgactcattcttttggcccggtgtaagccacttttccattgctggaaccatcagtaaacactgccagagcattttttaaaggcttatgtttggtaactttaggtaaaatccaagtagtcaattttaaaaactggaagattttgttttggggtaacgattgtcaataattcccacaaaatcggcaagaccaatctgccatgcaccagaattgataaaggcttgtctaacctgttgcttgttgaaaggaacagtgattttatctgggtcat

SEQ ID NO: 36795 - DNA, 201 bp, Homo sapiens
atagggcgaattgggccctctagatgcatgctcgagcggccgccagtgtgatggatatctgcagaattcgccctttcgagcggccgccgggcaggtaccaggaaatcgtcctggaagtgtaatccgtgtatatggtgatgaaaacagtgataaagtgactccagggacatttataccctattgttcaatggcacatgcaca

SEQ ID NO: 36796 - DNA, 387 bp, Homo sapiens
taactactcactatagggcgaattgggccctctagatgcatgctcgagcggccgccagtgtgatggatatctgcagaattcgcccttagcgtggtcgcggccgaggtactttctaactgagccctctattttctttattttaataatatttctccccacttgagaatcacttgttagttcttggtaggaattcagttgggcaatgataactttttatggtgcaaaaacatttcttattaatagtgaacaaatgaaaataacagcgtattttcaatatttttcttattccttaaattccactccttttaacacctatgccttaaccacttaaatgtgatgaaaatatttcctaaaagttaaaatgactatttaaaagcataatattgt

SEQ ID NO: 36797 - DNA, 318 bp, Homo sapiens
ataggcgaattgggccctctagatgcatgctcgagcggccgccagtgtgatggatatctgcagaattcgccctttcgagcggccgcccgggcaggtacgcggggagaagaaatagcaagtgccgagaagctggcatcagaaaaacagaggggagatttgtgtggctgcagccgagggagaccaggaagaatctgcatggtggggaaggacctgatgatacagaggtgagaaataataaagggctgctgactttaccaatctgaagccacacaatcttgctgaaaatggaagataaattaacaatcacttagaaaacag

SEQ ID NO: 36798 - DNA, 468 bp, Homo sapiens
atagggcgagagtccgctccctctacgatgcatgctcgagcggccgccagtgtgatggatatctgcagaattcgccctttcgagcggccgcccgggcaggtacctattactacattctaaaggacgaaatttcagggattaaaaacaaaaacaaagaaataaaaacaatccaatcctagttccttaaggaacgttttgagtaaaggttggggcggacagacttagaccacacaaactcagttcagtgtgatgtcatgacaggttgtgatggggacatgaagaatctgcatgtgcccctgtactacaaaacctgaaccagtctcagcatagatagtagtaatagaaagaaatgccgctcctttctgtgctttaattagttgttttccaatttttagtgtcacgaaagctgtgccatttagaactatgtcagttatggttttccaagcattaggagaaagtcttttagta

SEQ ID NO: 36799 - DNA, 374 bp, Homo sapiens
  misc_feature 338: n = A,T,C or G
cgaatagggccctctagatgcatgctcgagcggccgccagtgtgatggatatctgcagaattcgccctttcgagcggccgcccgggcaggtactgaggctgtatacagccacagcctctccccatccctccagccttatctgtcatcaccatcaacccctcccatgcacctaaacaaaatctaacttgtaattccctgaacattgtcaggccatccattaatttccttctggcctgagaaagctctttccttgtctcttaaattcttagaatgatgttaaaggttttggaataaagttgacttattccttacttcatggcaaagaagggggacacatnagtgagattcaatcattcacattgaagaccagcaaa

SEQ ID NO: 36800 - DNA, 404 bp, Homo sapiens
gcgaattgggccctctagatgcatgctcgagcggccgccagtgtgatggatatctgcagaattcgccctttcgagcggccgcccgggcaggtacatctacctaaaggactattatgtggaataatacatactaatgaagtattacatgatttaaagactacaataaaaccaaacatgcttataacattaagaaaaacaataaagatacatgattgaaaccaagttgaaaaatagcatatgccttggaggaaatgtgctcaaattactaatgatttagtgttgtccctactttctctctcttttttctttcttttttttttattatggttagctgtcacatacaactttttttttttgagatggggtctcgctctgtcaccaggctggagtgcagtggcgcgatc

SEQ ID NO: 36801 - DNA, 455 bp, Homo sapiens
atacgactactatagggcgaattgggccctctagatgcatgctcgagcggccgccagtgtgatggatatctgcagaattcgccctttcgagcggccgcccgggcaggtactcccagctactcgggaggctgaggcaagagaatggcatgaacccaggaggcggagcttgcagtgagctgagatcgcgccactgcactcctgcctgggtgacagagtgagactccatctcaaaaaaaaacaaaaacaacaacaacaacaacaaaaaacaaccagagaaatagcacttgttaactacaattgtgactctaggtaaacttgggccttaatatggttagacaagaagggttttaggtaacttgcctttttagatcctatttaggcttattagtctatattctacattcttgcacgatggaaattactagagaagtgggataattctttgttgtggggaa

SEQ ID NO: 36802 - DNA, 369 bp, Homo sapiens
atagggcgaattgggccctctagatgcatgctcgagcggccgccagtgtgatggatatctgcagaattcgcccttagcgtggtcgcggccgaggtactgtcattgaggattacagaaatactttgcatcaactacagatgtctcaaaatagaattctttctagctcattcagttttgttagaaacacttcatgttctccaaaaaagaaaagcacctaacgaaaagcatgtcctattcatgctagcaagaaatgaatcccaaagggcacgcaccaagaaccaaagtaaaagaatgtcagcaaaacaggacccatcttttatcatcccaaactgctatttccatttctgactttctgccaaattatcttta

SEQ ID NO: 36803 - DNA, 384 bp, Homo sapiens
  misc_feature 209, 210: n = A,T,C or G
tatagggcgaattgggccctctagatgcatgctcgagcggccgccagtgtgatggatatctgcagaattcgcccttagcgtggtcgcggccgaggtaccctgatccagaactgtggggccagcaccatccgtctacttacctcccttcgggccaagcacacccaggagaactgtgagacctggggtgtaaatggtgagacgggtccttnntaccttatcagatacctgtgttccaatgatatccatagctcacctttattctgaataaaccatttatcaagagtgcgcctgaaaagagtggaaaaaaataaaggagcccatcaaaaaaaagttccctggcaagtgggagggaggacatgatgttgggagccctgtttggggaag

SEQ ID NO: 36804 - DNA, 424 bp, Homo sapiens
ttgggcccttagatgcatgctcgagcggccgccagtgtgatgtatatctgcagaattcgccctttgagctgtcgcccgggcaggtacttttttttttttttttttttttttttattctttcatggacatctgttgcccatggtcaagtaaatttttaatgacacatagtcactacacacctgagcggctggagagcctgttggagaaacacaaagagctgcattaatactacattgtcaaagacaaagacgaacatgagacatgcgatatgagttttaaaaggagagaagagcaaaaaaaacaatacagctatccaaggagcaagtgctgagcttgtgaaaaaacagcttctattttattaaataatagtgttcctgcagggaatgtctgaaaaacctcggccgcgaccacgctaagggcgaat

SEQ ID NO: 36805 - DNA, 366 bp, Homo sapiens
agggcgaattgggccctctagatgcatgctcgagcggccgccagtgtgatggatatctgcagaattcgccctttcgagcggccgcccgggcaggtacgtccacggtcagccttgcgacatttaaagttctacaatgaactcactggagatgcaaagaaaagtgtggagatggagacaccccaatcgactcgccagtctacaggtgtatccagcagctccaaagagacagcaaccagcaagaatgggccatagtgacgatggtggttttgtcaaaaagaaaagggggggatatgtaaggaaaagagagatcagactttcactgtgtctatgtagaaaaggaagacattagaaactccattttgatct

SEQ ID NO: 36806 - DNA, 460 bp, Homo sapiens
actatagggcgaattgggccctctagatgcatgctcgagcggccgccagtgtgatggatatctgcagaattcgccctttcgagcggccgcccgggcaggtactgggaatacaggcatgagccaccgcacccggccagaaattataaatctaaccaggattcccaaacctacaatacaatgaagtatcatttctctcttataggtttttggttttaaccaatctattttaaaaggggcaattcaaggattgtggtttatatggtggatttctgttgaatatgatcaaatgttcactggagaacaagcaataatttgcaaaaggcatatttatgccttacattaaatgtggatcctcttctaaaactagaataagcatcagttcagtcacccaacgtgggaagaaagaatagaggtggcaagaaatgaagctcaagtttgttttgaaacaaaagaagaaact

SEQ ID NO: 36807 - DNA, 170 bp, Homo sapiens
attgggccctctagatgcatgctcgagcggccgccagtgtgatggatatctgcataattcgacctttccatcggaccggcgggcaggtactcaacaccaacattgatgggcggatgcataatacacctttcgccatctactgccattaaggggtgtggagcctgaagata

SEQ ID NO: 36808 - DNA, 458 bp, Homo sapiens; identical to SEQ ID NO: 36749

SEQ ID NO: 36809 - DNA, 461 bp, Homo sapiens
ggccctctagatgcatgctcgagcggccgccagtgtgatggatatctgcagaattcgcccttagcgtggtcgcggccgaggtaccagttgtaaaattaccaggaaccgccatgcctcaagatcgccctgttttctggcttcatcaatgactgcatgcagtgcaccaccctgtccactacgtgatgctgtaggattaagtctcacagtgggcggctgaggatacagcgccgcgtcctgtgttgctggtgaattagacgccatcgctgtgggttgctggtatggtgccgtgctatttggcacaggacacaccgcttgaggtctgtattgaacctctgaaggaggtcgatactgaagctcggttggcagccggtattgataaactaccagcggtcgggtcttattttctaccggctgatattgtggatactgtatctgagttggcattgccgggatagagactc

SEQ ID NO: 36810 - DNA, 401 bp, Homo sapiens
  misc_feature 354: n = A,T,C or G
ctactatagggcgaattgggccctctagatgcatgctcgagcggccgccagtgtgatggatatctgcagaattcgcccttagcgtggtcgcggccgaggtaccttgttaacaatatgtttgcaggcagtatgtttggtaaaagtcatcgccattctccattctcgattaaccaggggctcaatgcactgtggaaagccacaggaacctctgcccaagaaagcctggctgttgtgggaagtcagggaccccggatggagggaccagctggtgctgcatcaggaaacataaattgtgaagatttcttggacatttatcagtttccaaaattaatacttttataattttcttacacnctgtcttactttaaatctcttaattcctgttatcctttgtaagctga

SEQ ID NO: 36811 - DNA, 462 bp, Homo sapiens
tacactactatagggcgaattgggccctctagatgcatgctcgagcggccgccagtgtgatggatatctgcagaattcgccctttcgagcggccgcccgggcaggtactacatatgcagaatctgatacaatgttaatagactgattaaaatcttgttaacactgtaatgacggcaaccaactctgctctttgagtcaagtgatactgagttttgatgactcattcttttggcccggtgtaagccacttttccattgctggaaccatcagtaaacactgccagagcattttttaaaggcttgtgtttggtaactttaggtaaaatccaagtagtcaattttaaaaactggaagatttttgttttggggtaacgattgtcaataattcccacaaaatcggcaagaccaatctgccatgcaccagaattgataaaggcttgtctaacctgttgcttgttgaaag

SEQ ID NO: 36812 - DNA, 478 bp, Homo sapiens
ctcactatagggcgaattgggccctctagatgcatgctcgagcggccgccagtgtgatggatatctgcagaattcgccctttcgagcggccgcccgggcaggtacgttcaattctgcttaatcatcagatgatgcatactggagagaaaccttataaatgtaatgaatgtggtaaagcttttatcgaaaggtcaaacttggtttaccatcaaagaaaccatactggagagaagccatacaaatgtatggaatgtggcaaggcgtttgggcggcggtcttgcctcactaaacaccaacgaattcattctagtgaaaaaccttataaatgtaatgagtgtggcaaatcttacattagtcgctcaggcctcactaaacatcagaaaaaacatgctggagagaaccttacaactaaactcaaatgtggaaaggccgttagatgttgtactaacctctgggatccccaaataaatttatactt

SEQ ID NO: 36813 - DNA, 575 bp, Homo sapiens
cctctagatgcatgctcgagcggacgccagtgtgatggatatctgcagaattcgccctttcgagcggccgcccgggcaggtacatgcaggtcacaggggatatgatggcttagctttggctcagagacctgacaggggcaatctacctagcttgtttgtaaaatggggatcctaatataacctcttgggataggttgtaagcagtggtggtctggtaaatgttaacaatctagtgtgcagtgtggggagaggaaagtccggatttgtaatatttgctgatttctgtggtgtaaatactcccatcactggcaattttaaactccaatgtaacgtcactgagcacagatttgggaaaaggtgcatggcagtacctcggccgcgaccacgctaagggcgaattccagcacactggcggccgttactagtggatccgagctcggtaccaagcttggcgtaatcatggtcatagctgtttcctgtgtgaaattgttatccgctcacaattccacacaacatacgagccggaagcataaagtgtaaagcctggggtgcctaatgagtgagctaactcacat

SEQ ID NO: 36814 - DNA, 474 bp, Homo sapiens
gactactatagggcgaattgggccctctagatgcatgctcgagcggccgccagtgtgatggatatctgcagaattcgccctttcgagcggccgcccgggcaggtactgattccttggacagccttagctcccgaactgaggctgtctccccaactgtgagtcaactgagtgcagtatttgagaacactgattctcccagtgccatcatttctgagaaggctgaaaacaatgaatactcagtgactgggcattatcccttgaatttaccatctgttactgttacaaatcttgacacatttggtcacctgaaggattctaattcctggcctccttcaaacaagcgaggtgttgatacagaggatgctcacaagagtaatgcaactccagtacacctcataaaagaagcatactgacacttttatgttcatcttaaaaaccagaaacttctaggaaatagcaacaatttgtttttta

SEQ ID NO: 36815 - DNA, 454 bp, Homo sapiens
gactactatagggcgaattgggccctctagatgcatgctcgagcggccgccagtgtgatggatatctgcagaattcgccctttcgagcggccgcccgggcaggtaccacaatttataaagaaaccaatgatctcaggagatatttttggtctgtcttccctgaaataagaattgtgttttggaaatctaaagggtgttctgttccaaaatcttaagttattagttatttccacatcaaatagcaaacactacaatacagccagggaaagaggatcttccaaacaaacaaaaaaggtatgttttctagattgctccactactaaatgagaactttttttttttgaggcataattataaatcaagttcttgatcaattttacaaatctttcccagtgacaagctcatatttccaataaaaagtgctcttttgctttcctaaggccacactaaatct

SEQ ID NO: 36816 - DNA, 473 bp, Homo sapiens
agggcgaattgggccctctagatgcatgctcgagcggccgccagtgtgatggatatctgcagaattcgcccttagcgtggtcgcggccgaggtacaagcgcaagccactgtgcccagctgtcagacgctgagttttaattatgcaccaaactccagcccgcagatcctcttcaccaaagcccctggctggtctagcccatcatgacttctctaggaacagtccttctttaggactataaagtattaacaaaagtctgtagattaaggagcctgcataaagaattctggatacaggcccctgtctttccaaagttcctctccaatatcccttggggtcctcatgtttttgaagcagcttcactctgcacaggcagcaggaggttgggggagccatagctctgggccacggaggcagatttatttggatgataggactaatatttgtgtaacctgctgagacctgtgtgggagag

SEQ ID NO: 36817 - DNA, 397 bp, Homo sapiens
ctatagggcgaattgggctctctagatgcatgctcgagcggccgccagtgtgatggatatctgcagaattcgccctttctagcggccgcccgggcaggtaccaatctctgggctgccctagtgacttttttgatacctcagagtcctattgaagaaccaggtggaatgattgtggtaagggctatagtgctggagccaaacaccccagcaagaaaactctaaaaggacaaaagataaggtagtgcctccaaggtggcacctgaaccctctcaggctactttttggtttctactaacaaacctgagggaaggaactgcctcccaaagtgcagaaccagattcttaactgccacagactcttgtattatgtaatttatatacagaacacaaagcacttg

SEQ ID NO: 36818 - DNA, 472 bp, Homo sapiens
tatagggcgaattgggccctctagatgcatgctcgagcggccgccagtgtgatggatatctgcagaattcgcccttagcgtggtcgcggccgaggtactgttacaaacggagagaataaaagggcaaactgaaataatagatcctggaatagcacagacactgacctctgaccacagaccaaaagttagggcctagttgtatttcttagaaatacaaagaaaacaagtttagaatcatagaaaacactgttaacacattagcctgggaggtggtactattggaatgagacgcagcacgagccgtatcccctcatgctacctggctgcagccccagctgtcctctggagaggtttgctgagctggttggccctgtgatcccttaagactggttcacggagtgtatgaccacaaacagccatcaaggtacctgcccgggcggtcgctcgaaagggcgaattccagcacactggc

SEQ ID NO: 36819 - DNA, 436 bp, Homo sapiens
gggcgaattgggccctctagatgcatgctcgagcggccgccagtgtgatggatatctgcagaattcgccctttcgagcggccgcccgggcaggtacataaatatcaggaaagtttaaatacttttattttactattttaatcttttccttaaagatgcagggtttcatactacatcaattaggcggacatgacaaaaatgacttaaataggaactgaatataaagaatactcgataccatgacatcatcatctggaacaactgaagttttctacctcttgctccattttctgaataagtggatgttttattcatggtccttgcgatgccgataaatacattggctgattactgcatacaaattttccaactgaaatatgttgtagttttgactttttttaacaacagttcttcaaaagattttttaatcgctcatg

SEQ ID NO: 36820 - DNA, 217 bp, Homo sapiens
  misc_feature 125: n = A,T,C or G
atagggcgaattgggccctctagatgcatgctcgagcggccgccagtgtgatggatatctgcagaattcgcccttagcgtggtcgcggccgaggtactcttttttttttttttttttttttccgnctccccaaagctttatctgtcttgactttttaaaaaagtttgggggcagattctgaattggctaaaagacatgcatttttaaaactagcaac

SEQ ID NO: 36821 - DNA, 468 bp, Homo sapiens
ttgggccctctagatgcatgctcgagcggccgccagtgtgatggatatctgcagaattcgcccttagcgtggtcgcggccgaggtaccctggaagggacatctaaggctgccataagaaaaatgactggcagctaaaaatgttgtagaagttggaatcctgatggaatcataatgagtcagctaaaggaataatgattcttgccgctgtaagaataccacaatgactagtcaggatttaaatgggtagcaagttgcagtagggagaagggcagaagagtggcttcacacaaaattacaaagtcctatggaatcccattgttgcctctcagctgttcagttaagtcaaaattacaaatatttacttatttatctgatcactgaaaaatattgagtgttaaggcttgctgtgccagacacttggctaggtgtaggataaaagaaatagggagcttttgattacagtctag

SEQ ID NO: 36822 - DNA, 712 bp, Homo sapiens
  misc_feature 630: n = A,T,C or G
actactatagggcgaattgggccctctagatgcatgctcgagcggccgccagtgtgatggatatctgcagaattcgccctttcgagcggccgcccgggcaggtactacagggatggactcagttctctctcaggtgatactgttttggaagcttatttccactcttgcactggattcagtagctgcacctgggcccataccccaaaacaaactctcattaattaaacacaagacccatcaataagaaagttgtcccagggaaggtgcacagcagggacctctgcttttgggaacctgtggctatgcaggcagggtcaggagtgtgacccattttcttctcctccccctgcctgctgcacagacaactgaaaccaggagctttccattgctaagtatataaaatacgtgatagttccagggaaatgtaatacacatatgaaggaatgaggaacctacataaaattaaaataaaatgaatatattaaatatacaacactgtaagagataatcacggaaaagacaacaaatataaaaaacctgtgtgtatacgtgtgacatagtgttcttgtaaattaaatcgtaatttgcttatgaagtccttcaagtaggtacctcggccgcgaccacgcntagggcgaattccagcacactggcggccgttactagtggatccgagctcggtaccaagcttggcgtaatcatggtcatagct

SEQ ID NO: 36823 - DNA, 184 bp, Homo sapiens
atagggcgaattgggccctctagatgcatgctcgagcggccgccagtgtgatggatatctgcagaattcgccctttcgagcggccgcccgggcaggtacttattaatacttcgattctgtaaagagtttagggttttgattttataaaaatccaaaaaatgagcccttttatttgaaatccagt

SEQ ID NO: 36824 - DNA, 443 bp, Homo sapiens
agggcgaattgggccctctagatgcatgctcgagcggccgccagtgtgatggatatctgcagaattcgcccttagcgtggtcgcggccgaggtacctttctccaaacgacaactgatgcctttctttatgtaagcttttcacgtgttttggcacatattccattgcatttcaataaaaatgttaatgcattatcagttaattaaaagaattctatataaaactattctcagtttcataattgcttcctatatatttccttggaaaatagtgaaattacatatgacaaggcaaccagccaaatttaaagagattttgtagataaaattcatttatgaccattaagttttggctggggggccaaaacatcaaagtctcacttgtgatttttaaaatgcactcttaattcattttgagttaattaaaattccatttgcaaaacact

SEQ ID NO: 36825 - DNA, 463 bp, Homo sapiens
tacactactatagggcgaattgggccctctagatgcatgctcgagcggccgccagtgtgatggatatctgcagaattcgcccttagcgtggtcgcggccgaggtacctttatctctttacctcttcctttctttctacctggaggttacagtaagtcagccatcatgtgactatgaagcagcaagcatttgccaaggcaggttaagcagaaagataaaaggaacctggggctttgatatcataaaggcaacaacattattgtcagctgtatgaggagaaagataaagtcttccattgattcaagctactgttttcagctttttattacaaatagctaaatattatttctaactgatataccatcagaaacttacctggacaactttctattaatgactgaaaaagcgtgtgtctttccagtttcctttactttggttagagttgaggactagactctggatat

SEQ ID NO: 36826 - DNA, 464 bp, Homo sapiens
agggcgaattgggccctctagatgcatgctcgagcggccgccagtgtgatggatatctgcagaattcgccctttcgagcggccgcccgggcaggtaccaaaggtgatggggaagataaccgtccaggaatgagaggaggccatcagatggttattgatgttcaaacagagactgtttatttgtttggtggctgggatggaacacaagatcttgctgacttctgggcgtaccgtattagagatagcagttttggaggccaaatgttactgaatcctcttcctgatcagtatattaatatgaaaatgaaactgctctgtaacacaataaagaataaaatctttcatgaggtatgtattatcagtatgtatttcatgtctcaaatatattttaaatataatttcaggtttaatttgtctttttaatttgtgtctcttcatataatcacattgcttcatacaattaat

SEQ ID NO: 36827 - DNA, 455 bp, Homo sapiens
agggcgaattgggccctctagatgcatgctcgagcggccgccagtgtgatggatatctgcagaattcgccctttcgagcggccgcccgggcaggtaccctggaatatgacggtgatcacaagcctgcaacaggaactctgccccagtttcctcctcccctctgctccagctctggggcgctgctttccatggaccaacgttactccaccggcgctcccagggatcaccaatgacaccaccatacagcaggggatcagcggtcttattgacagcctcaatgcccgagacatcagtgttaagatctttgaagattttgcccagtcctggtattggattcttgtggctgtgggacagatgatgtctaccatgttctacccactggtcacctttgtcctcctcctcatctgcattgcctactgggccatgactgctcttacctggctacatcggggcaa

SEQ ID NO: 36828 - DNA, 462 bp, Homo sapiens; identical to SEQ ID NO: 32488

SEQ ID NO: 36829 - DNA, 454 bp, Homo sapiens
agggcgaattgggccctctagatgcatgctcgagcggccgccagtgtgatggatatctgcagaattcgcccttagcgtggtcgcggccgaggtacgccgggattgcaattcaaaaatgagaagctgatcccggacctcactacaagtgggctttttaaaaaagatcttctcacaaaaagaaaagaagtttatgctcctcatgcctaaatctgttggctgacactttgttctttaatttccccagctcaaagaaattctcgaatgttctcacctattaacagttattaaaatggaagaagctggggatgaaattgtgagcaatgccatctcctacgctctatacaaagccttcagcaccagtgagcaagacaaggataactggaatgggcagctgaagcttctgctggagtggaaccagctggacttagccaatgatgagattttcaccaatgac

SEQ ID NO: 36830 - DNA, 369 bp, Homo sapiens
gcgaattggagctccaccgcggtggcggccgaggtaccacaaagacaaacctgaacttaatttcaaggaaaacttaaacccatgcacaaataattggtgagccttcatttccctgacttcaagtttccatgtgaggactcatgctctctccactttcttcttgggaggagggaagatttacctaatgggttaatttgggcaaagcacattgagtgtgcttgtttggctctgagtctctttgcaaacatgtgtctgcccacagtgacatgagtttgcgttgactgacatgtctgcaggaagctgcctgctcctgtggccatgtcaagcaattctttcttttaactgcaactgtgtgtaagagctttattt

SEQ ID NO: 36831 - DNA, 432 bp, Homo sapiens
ggcgaattgggccctctagatgcatgctcgagcggccgccagtgtgatggatatctgcagaattcgcccttcgagcggccgccccggcaggtaccaaaaatagctgggtggtgtggccggtgccttgtattccaacctcctaaggaggctgaggcaggaaaactgcttgaacctgggaggcggaggttgcagtgagctgaaattgcgccactgcactccagcctgggcgacaagagcaagactccatctcaaaaaaaaaacaaagaacaaaaaacaaaaacaaaaaaacctgttctgaccttgaaacacacaaacacacactctctctcttatacacacacagagacccactgaaattcctccttttgattacagtatgttgagaacagtatgttctgcttattcaaatttatgacgccccttctgttttgt

SEQ ID NO: 36832 - DNA, 323 bp, Homo sapiens
acgactcactatagggcgaattggagctccaccgcggtggcggccgcccgggcaggtacagtggtccttttcagagttggacttctagactcacctgttctcactccctgttttaattcaacccagccatgcaatgccaaataatagaattgctccctaccagctgaacagggaggagtctgtgcagtttctgacacttgttgtttgaacatgggctaaaatacattgggtatccgctgagactaagtttgtcagaaattaacataatgtgtctgtcttggtttaataaatggcttccacttcattctgactcatttctttat

SEQ ID NO: 36833 - DNA, 447 bp, Homo sapiens
gaattgggccttctagatacatgcccgagcggccgccagtgtgattgatatctgcagaattcgccctttcgagtttccgcccgggcaggtactctcatatggagggtgtggcctcagtgtccacagcctcagtggctacgagctcatttccagagccaacaacagatgatgtgtctccatctctgcatgctgagtttggctccccacattccacagaagtagatgactccctttcagtgtctgttgtgcaaacacctaccacattccaggaaacagaaatgtctccacctaaagaagaatgcccaagaccgatgtcaatttctccaccagatttctcccctaaaactgcaaagtccaggacacccgttcaagatcacagatctgaacagtcctcaatgtctattgaatttggccaaaaatctcctgagcaatcccttgctatggact

SEQ ID NO: 36834 - DNA, 584 bp, Homo sapiens
gcgaattgtgccctctagatgcatgctcgagcggccgccagtgtgatggatatctgcagaattcgcccttagcgtggtcgcggccgaggtctcacctttatgggctgcagagcacctctgccgcagcccagatatcttttcagagcagcggcagagcaaacataggcgctttcagaataccctagtagtcctacataaatctggtttgctggagatcactttgaaaaccaaggagttgattcgtcagaatcatgcaactcatgtagaactagaccagctaaaggagcaaacccagctgtttatagaagccaccaagagcatggcccctaaggcttgggccaagctgcaggcatctttaacacctgggtccagtaatacaggcagtgacctagaagcattctctgatcacccagccatatagcacagaggcatattttcctgttacttgagtggttcttttagctcatttgctgttacctactcctgtttcccaaagcttatgtaagagcttttccttctaaacttaaactgtgttgtggttcacttaagaagccacgtgccaatacctggctgctgtcttaact

SEQ ID NO: 36835 - DNA, 611 bp, Homo sapiens
actatagggcgaattgggccctctagatgcatgctcgagcggccgccagtgtgatggatatctgcagaattcgcccttagcgtggtcgcggccgaggtaccagttgtaaaattaccaggaaccgccatgcctcaagatcgccctgttttctggcttcatcaatgactgcatgcagtgcaccaccctgtccactacgtgatgctgtaggattaagtctcacagtgggcggctgaggatacagcgccgcgtcctgtgttgctggtgaattagacgccatcgctgtgggttgctggtatggtgccgtgctatttggcacaggacacaccgcttgaggtctgtattgaacctctgaaggaggccgatactgaagctcggttggcagccggtattgataaactaccagcggttgggtcttattttctaccggctgatattgtggatactgtatctgagttggcattgccgggatagagactctgtccctttctacttgattttctcttggggtttgtgcttgtctaacctgcgtttgaggttggaatgttacaagcatctgaaccgcgggaggaggagttgatggcgatcgtggtttatgctctgatggccccaat

SEQ ID NO: 36836 - DNA, 194 bp, Homo sapiens
gggcgaattgggccctctagatgcatgctcgagcggccgccagtgtgatggatatctgcagaattcgccctttcgagcggccgcccgggcaggtactgaggttgattgttacagactattaaatggttacatcttaattgtttatacagaacattggtccaataacattaaaatagagaacaggcacctggaaa

SEQ ID NO: 36837 - DNA, 452 bp, Homo sapiens
acgactactatagggcgaattgggccctctagatgcatgctcgagcggccgccagtgtgatggatatctgcagaattcgccctttcgagcggccgcccgggcaggtactccggcagggtgggcctcggagcgtaaaggcggcaaagtgctggggttacaggcgtgagcaccatgcccagcctagacttttttttttttgactaaccattatgcaaacaaggaagtatggactttaatgataaaaacaatttagtatcacttgataaatagtttaattgaagctattacacctcatgtatttcttttcaaatgtagacattgacatagaactcttactgaaatgcttttaatgtgtttacatttgtttttcacttagctgaatgcaatatccatacatctccttctccgggaattcaagtaaggcatgtctacaccccctctacaacaaagca

SEQ ID NO: 36838 - DNA, 468 bp, Homo sapiens
tatagggcgaattgggccctctagatgcatgctcgagcggccgccagtgtgatggatatctgcagaattcgcccttcgagcggccgcccgggcaggtacaaggtaagtatagagaaaaaagtaatcgcttttttgagggggctagaactagctgggtattgtaatgttattgcgattaaaatagatggtgaatgctaattcttaagccaaaataattatttcggtgcccatttattccccccttttcttgctctgtagcggttcctctttgagagcagtgtgaccactatccccagttgtcttgcatgattaattacagcatctgtcctgtcagaagctataatgaagaggtcttgataaaaattgcaaattgccactggcaacagtcttaaactgcttatgataaaatgaaaattaaaaacagcaagtgtcaaccctgaccagaatcctaatctggaaagaatgagg

SEQ ID NO: 36839 - DNA, 468 bp, Homo sapiens
agggcgaattgggccctctagatgcatgctcgagcggccgccagtgtgatggatatctgcagaattcgccctttcgagcggccgcccgggcaggtaccaatttgggttctatattttgtcaaacagttgggtttttaaaaaaattcaaaactcatgcatgttacctacttgtcatgtgtgaattatttctcacaattttaattaatctgtgtgtatattagttatataaagcaatggatttccacattcttaaagcaggaacctatattcaccagaaaaggatcctcctgtttctcatcaaattttttttcagctcgaacaatccaagattgggaatagtaagagtggcaaacaaatgttttcttagggacctactgagaaaagaaaaaacttactgggagaacagagacttagtaaaatttctattgctacagacaaatgctaaaaaccagctttataataacagca

SEQ ID NO: 36840 - DNA, 443 bp, Homo sapiens
ctatagggcgacattgggccctctacatgcagtgctcgagcggccgacagagtgatggatatctgcagaattcgccctttcgagcggccgcccgggcaggtacatctacctaaaggactattatgtggaataatacatactaatgaagtattacatgatttaaagactacaataaaaccaaacatgcttataacatttagaaaaacccaataagatgcatgattgaaaccaggttgaaaaatagcatatgccttggaggaaatgtgctcaaattactaatgatttaatgttgtccctactttctctctcttttttctctcttttttttttattatggttagctgtcacatacaacttttttttttttgagatggggtcttgctctgtcaccaggctggagtgcagtggcgcgatctcggctcactgcaacctccacatcccat

SEQ ID NO: 36841 - DNA, 200 bp, Homo sapiens
actatagggcgaattgggccctctagatgcatgctcgagcggccgccagtgtgatggatatctgcagaaatttgcccttttcgaaccggcccccccggccaggtcccaatatgaaagtaattttactggtgtaaactcattttatcatctgcataattactgtaaacacacacaaaaccaatggctttttaaaccatgca

SEQ ID NO: 36842 - DNA, 483 bp, Homo sapiens
agggcgaattgggccctctagatgcatgctcgagcggccgccagtgtgatggatatctgcagaattcgccctttcgagcggccgcccgggcaggtacgcgggacgtcgatgcagagtccctctgtgaatttacaacacccaacacccatgagttcagtccttaagaaggaaaatcgagcaagtatttaattggttggacattgcataaaagaggtccatatccaggctaactctagaaattttattctcaaacttagttggcctctttttcttctgtcagaggaccattcttagtggcactggggaaatcttggcacccagaagaattcaactgcgctcactgcaaaaatacaatggcctacattggatttgtagaggagaaaggagccctgtattgtgagctgtgctatgagaaattctttgcccctgaacgtggtcgatgccaaaggaagatccttgaagaagtcatcaatgcgttgaagc

SEQ ID NO: 36843 - DNA, 474 bp, Homo sapiens
ctatagggcgaattgggccctctagatgcatgctcgagcggccgccagtgtgatggatatctgcagaattcgccctttcgagcggccgcccgggcaggtacgcggggacatcaatgcagagtccctctgtgaatttacaacacccaacacccatgagttcagtccttaagaaggaaaattgagcaagtatttaattggttggacattgcataaaagaggtccatatccaggctaaccctagaaattttattctcaaacttagttggcctctttttcttctgtcagaggaccattcttagtggcactggggaaatcttggcacccagaagaattcaactgcgctcactgcaaaaatacaatggcctacattggatctgtagaggagaaaggagccctgtattgtgagctgtgctatgagaaattctttgcccctgaatgtggtcgatgccaaaggaagatccttggagaagtcat

SEQ ID NO: 36844 - DNA, 468 bp, Homo sapiens
gcgaatagggccctctagatgcatgctcgagcggccgcccgcgtgatggatatctgcagaattcgccctttcgagcggccgcccgggcaggtacctactactttgcctttttattaacaaaataatatatttaatttatgattctcctactaacttccacttgatttcactggcaaaatggtcactttttcaaatgacttaccaatacaaaaactatcctttcagcttcaaaatattggtcacaataattctgtaagcctccactgtagaagcaatttaattaccttacaaacaaaaagcacatttgaagtttaggtaacatttctttctcaaaagataaatgattcacaaggaatatatgtaattatgtaaaaaaacagaaacaaaaaacctcatgtttccagttgttaatcgtaaaaacagaaatcttaaaacacatacatacactcatgaggaaaaaggatatga

SEQ ID NO: 36845 - DNA, 465 bp, Homo sapiens
gcgaattggagctccaccgcggtggcggccgggggccattgagactgccatggaagacttgaaaggtcacgtagctgagacttctggagagaccattcaaggcttctggctcttgacaaagatagaccactggaacaatgagaaggagagaattctactggtcacagacaagactctcttgatctgcaaatacgacttcatcatgctgagttgtgtgcagctgcagcggattcctctgagcgctgtctatcgcatctgcctgggcaagttcaccttccctgggatgtccctggacaagagacaaggagaaggccttaggatctactgggggagtccggaggagcagtctcttctgtcccgctggaacccatggtccactgaagttccttatgctactttcactgagcatcctatgaaatacaccagtgagaaatttcttgtaatttgcaagttgtctgggttcat

SEQ ID NO: 36846 - DNA, 423 bp, Homo sapiens
gcgaattgggccctctagatgcatgctcgagcggccgccagtgtgatggatatctgcagaattcgcccttagcgtggtcgcggccgaggtacctctcagctcctgatacatttattatacagaaattatagaccggctgacttaactattgctaagaaacatgcttcttgattttccttacgtggttaaaaaaaaaaatcttgggagaaaacatgttttctgaagacattgaagtcagaattatttaaacaattctatgtctgtctcttacattatgcagttaaggtctacccattttcaagaaactcagaagaaagaggaagatgtcacatgacaccatggaagccaatcagcaaaatccaaaatgtaagacattctacaggacaaatgactgaaataagtggcaaaagataaaaaaggggg

SEQ ID NO: 36847 - DNA, 585 bp, Homo sapiens
ctactatagggcgaattgggccctctagatgcatgctcgagcggccgccagtgtgatggatatctgcagaattcgcccttagcgtggtcgcggccgaggtacaagctgagattgacagagtgattggccaggggcagcagccgagcacagccgcccgggagtccatgccctacaccaatgctgtcatccatgaggtgcagagaatgggcaacatcatccccctgaacgttcccagggaagtgacagttgataccactttggctgggtacacagccctcacttgaaagatgctctctacgatgtcatcgctgtgggagccccagctgcccattttcagggatttaagaatggtggtcttcggaagctactccatagatttgaaacagaaagaagaaataccggataccagtttatttactattcacctgaaaacacagccaaagcaaaggaagttctcagcaacatcaatcaactacaacctcttatagcaacccatgcagacctactgcttaattctgcaagccagcattcttcagacagcttggagaattctttaaagaatgctttcaaaaaagcagagctttt

SEQ ID NO: 36848 - DNA, 456 bp, Homo sapiens
  misc_feature 329: n = A,T,C or G
gaattgggccctctagatgcatgctcgagcggccgccagtgtgatggatatctgcagaattcgccctttcgagcggccgcccgggcaggtacctgcgctgtggagtgaagtgaaccggtatggccagaacggcgacttcacgcgcgctctcaagaccgtcaataagatactacagatcaacaaagatgacgtaactgccctgcattgtaaagtggtatgccttatccagaatggaagtttcaaggaagctttgaatgccatcaatacttacaccaaagtgttagccaataactctctctcctttgaaaaggcatattgcgagtactttnttttttttttttttttttttttgggtaatactttattttctattgtattaaacgaaagccaggaaaataccaagttatttaaaggcaaatctttactccttaaagaaaaaatacaaactgtggtatt

SEQ ID NO: 36849 - DNA, 395 bp, Homo sapiens
acgactcactatagggcgaattgggccctctagatgcatgctcgagcggccgccagtgtgatggatatctgcagaattcgccctttcgagcggccgcccgggcaggtactgcttgactctggtcttgatgcccacaaatggctagcgtgcttgtcttcccatgcagtggaaggaagacagttaaatgaaatagtagtattagatatatatgaaaaagaaaacagcaaaataaatttgaagttaatgctttcgtctcttgtaaggtaaggcatatactgcttgcttacacaagaactattggcattttctttttttcgtttgaaacaaatatgaaaaatagtattttggttttaagaaatttttattttagcatacaacatataactgacatttgt

SEQ ID NO: 36850 - DNA, 438 bp, Homo sapiens
gaattgggccctctagatgcttgctcgagcggccgccagtgtgatggatatctgcagaattcgccctttcgagcggccgcccgggcaggtacttggcccctgaggtaattgcacagggaattttcaaaaccactgatcacatgccaagtaaaaaaccattgccttctggccccaaatcagatgtatggtctcttgggaatcattttatttgagctctgtgtgggaagaaaattatttcagagcttggatatttctgaaagactaaaatttttgcttactttggattgtgtagatgacactttaatagttctggctgaagagcatggttgtttggacattataaaggagcttcctgaaactgtgatagatcttttgaataagtgccttaccttccatccttctaagaggccaaccccagatgaattaatgaaggacaaa

SEQ ID NO: 36851 - DNA, 443 bp, Homo sapiens
agggcgaattgggccctctagatgcatgctcgagcggccgccagtgtgatggatatctgcagaattcgcccttagcgtggtcgcggccgaggtacgcggggaagtgcacgtctcccgttttcttttcacatcaatgcagagtccctctgtgaatttacaacacccaacacccatgagttcagtccttaagaaggaaaattggagcaggtatttaattggttggacattgcataaaagaggtccatatccaggctaactctagaaattttattctcaagcttagttggcctctttttcttctgtcagagggccattcttagtggcactggggaaatcttggcacccagaagaattcaactgcgctcactgcaaaaatacaatggcctacattggatttgtagaggagaaaggagccctgtattgtgagctgtgctatgagaaat

SEQ ID NO: 36852 - DNA, 470 bp, Homo sapiens
agggcgaattgggccctctagatgcatgctcgagcggccgccagtgtgatggatatctgcagaattcgcccttagcgtggtcgcggccgaggtactttttttttttttttttggtggggggcacaccaaccatccaaaaaagttgcttctgtttttactgtagttcaattacaggagttgggttttccactttttaaagggcatggcttttatttctaacttctgatttttttctaatttacctaaatctttattttacttaaataatgttaaaagtgtcatgcttcatcagccagtgtgtcatgctgcagatgttcttttggttcattagaagaaaatcttaagaagagcttcagaaagttgattttttaaaaaagaaagaaaactggctcgccgtttgtgttcataaaatggacccaaatttttattaaattcctactgaaagtatttgtggtggcccggtaaacttt

SEQ ID NO: 36853 - DNA, 469 bp, Homo sapiens
agggcgaattgggccctctagatgcatgctcgagcggccgccagtgtgatggatatctgcagaattcgccctttagcggccgccgggcaggtaccttcagctcaggctttcatcgggtcataatgggctactagttctccgatgggggttttgaacatatcacctgctttttgaaattaaacattatctctaacattttttccttctttccttcactcattcacttattcactcatgaaatatttattaaacatatgtcatgtgccaggtaaaagaagtgtggttccttcccttgaggatctcagagttcagcaaaggtataaccctgatgtttacagcaaagacatagctgttataacaaggaatgtattccggatgtcctggtgtggggaaaagcaagagagatcagattgttactgtgtctgtgtggaaagaggtagacataggagactccattttgctctgtacc

SEQ ID NO: 36854 - DNA, 471 bp, Homo sapiens
gcgaattggagctccaccgcggtggcggccgcccgggcaggtacattgtaggatgcttaccagatcctgcccactagaggccaatagcacctcatcatcatagcaccccttccctcagtgataataaaaaatgtctccagacattgtttaagttaataaatgtgcccagagcccaggcacagtggctcaggcctgtgattttagctctttgggagaccgaggtgggtggatcacttgaggccaggagttcctagaacgttcctctgtcaaaagacaaaattacaacaatttaaaatctaattggctgttattggccattctagaattggttgacatctcattctatgaaatacaatgagtgctcttcaataagctgagcagaggggggttagctttattggcagaaaagggctaaagaaaacagaaaaagaacaaaaagtgattggttgtttcagagttactttccttaaa

SEQ ID NO: 36855 - DNA, 473 bp, Homo sapiens
tacactactatagggcgaattgggccctctagatgcatgctcgagcggccgccagtgtgatggatatctgcagaattcgccctttcgagcggccgcccgggcaggtacgtgcctcacttgccttgccctgggcctagcccagctccagcacttctttgcccagtggcccactgtttaatccactggcagaagtaagcagcacaatctatgaccacagaacagatggagtcagcctagcacgcccatgatatcacacatatggtcatgaccttgctagcgcagagcactctttcaatctcagctaactgaatagttaccagatagaagaaaaggaaactacctacaaaataaaaataaaatgtcataaaattcttgtacgcgggggcggtcgggcggaccactgcagactgagcggtggaccgaattgggaccgctggcttataagcgatcatgtttctccagtattacctcaa

SEQ ID NO: 36856 - DNA, 458 bp, Homo sapiens
ggcgaattgggccctctagatgcatgctcgagcggccgccagtgtgatggatatctgcagaattcgcccttagcgtggtcgcggccgaggtacttccaaaccctcctgttctttcctttttgttttccccaattttaacataaggcaaaagcagtaattgagcaattctatcacctggattggcactccggggaacagtggagctgatcactaactgaattccccctttataatctgaataaattaccccagtatgaatttggactcccttcaaatttagacttgatctccctcaaaggcctaccctcccttctggcagcggccatgtacccctctaggaatcttttgtgggggctttccagggagtaaaaagaccatttgggtggaacataaatctactgcggtgctgcctgctgtggcgcgggacagctgttggattgttgtaattggctgactcc

SEQ ID NO: 36857 - DNA, 191 bp, Homo sapiens
aatagggccctctagatgcatgctcgagcggccgccagtgtgatggatatctgcagaattcgcccttagcgtggtcgcggccgaggtacatgggcaatgctggacgtaaagaaagaagtgatgcactcaattctgcaatagataaaatgaccatgaagaccagggacttgcgtagacagctccccaaaagc

SEQ ID NO: 36858 - DNA, 688 bp, Homo sapiens
  misc_feature 557: n = A,T,C or G
cctctagatgcaagtgcgagacggccgccctgtgatggatatctgcagaatttttccttagcgtggtcgcggtttatgtaccagattttatgaaaccctaaagaagactgctgggccatgagttgcttcctcctcctccaccttaaccctctgattccagaattgcagtcatttcttctgccaaggaaatccattaaaaactgcagccacactgcaatttcctaatgtagaacaagatataaagcaggctttgagacaacaacctacctttgtttactctttccaagctggaagagtccttctcctctagttgctcctaggtcactggctaatttattttaaaatttggatggaactcatgtatagttaagtgcacaaatcttagccgtgcagatgggtaattttcacatagctatttgcccacatccgtgcctctaagatagagacatacactgttttcagcaccccagaaagttcccacatgcccatggtgccattttgcgaaaggtatttataaggcccttcaaatttgtggcttcctttctcatacttctcangtataatgaaagggggagaaaaaccccaccatcaacacaaaacaaggctataaagactgtgcaccttttaacaagtcaatttgtagtcagtccctgggcctgtcttttttttttttttttttttctaattt

SEQ ID NO: 36859 - DNA, 473 bp, Homo sapiens
attgggccctctagatgcatgctcgagcggccgccagtgtgatggatatctgcagaattcgcccttagcgtggtcgcggccgaggtacttcagaatgaaactggatacagtatattcagttcataagtgtaattgaccatacttgaatatgtttaagtttataagtaacatcaggtgttatgaaattaatataaataagatgtttttgtaagtttttattttgaaataagtttagattcacaaaatcttaccaaaatattccagagttcttgcccttaacccagcttcttccaaagataacaacttacataagcatagttcattaccaaatacaggaaagtgaaattgttacaatactgttaactacagaatttatttggaaatcaccagttttaacatgcatgcatttttgtttgttttttatatgtagctttaagaaatcttaacacatatattgattcatgttaccacca

SEQ ID NO: 36860 - DNA, 467 bp, Homo sapiens
ttgggccctcagatgcatgctcgagcggccgccagtgtgatggatatctgcagaattcgccctttcgagcggccgcccgggcaggtacgcggggacatcaatgcagagtccctctgtgaatttacaacacccaacacccatgagttcagtccttaagaaggaaaattgagcaagtatttaattggttggacattgcataaaagaggtccatatccaggctgactctagaaattttattctcaaacttagttggcctctttttcttctgtcagaggaccattcttagtggcactggggaaatcttggcacccagaagaattcaactgcgctcactgcaaaaatacaatggcctacattggatttgtagaggagaaaggagccctgtattgtgagctgtgctatgagaaattctttgcccctgaatgtggtcgatgccaaaggaagatccttggagaagtcatcaatgc

SEQ ID NO: 36861 - DNA, 476 bp, Homo sapiens
ccctctagatgcatgctcgagcggccgccagtgtgatggatatctgcagaattcgcccttagcgtggtcgcggccgaggtacatgtgcaaatagcatacacactgttgcaaaataaataaggagccaagttctttctctccccatgacttttcagttatgccatcattttattcaaaaatttttagtttgctctgatctaaactcttccctgggaaacttggggttatatttccatagaattctgtcttgctcttaataaattcaaaattctttggaaaagatgcatttcagaggattattcttatgaccagttatgctttataaaaattaaagtcttaattaaaatgcacttatatttaatgcattagtgggtagatttttgttttgagtaaaatctttattagaatctatttgtaactggatattttgtaattatgggctcacacatatttactcttgggtacctgcccgggcg

SEQ ID NO: 36862 - DNA, 201 bp, Homo sapiens
atacgactactatagggcgaattgggccctctagatgcatgctcgagcggccgccagtgtgatggatatctgcagaattcgcccttaacggggtcgcggccgaagtactttaatttatttcccctttctagtgtattaagaaatgacatgcactttaatttgccaaaagtaatgcttgtattctggcagcaacatgctact

SEQ ID NO: 36863 - DNA, 479 bp, Homo sapiens
agggcgaattgggccttctagatgcatgctcgagcggccgccagtgtgatggatatctgcagaattcgccctttcgagcggccgcccgggcaggtaccacaaaacccaacagaccatttgaaataggttacctcaaccagtaaagcccttaacatctacggaaaacgggttaactttaagatatatcagagctgtattataataaatccatggggatgggcttcaaaatttttataagatacatatgaccataaactatatataataaacttgtgtgaacatgtagaaatgagaaaatactactaccattaaacaaggtagcactaaaagttgatttaagttcaaaaatcaaagtagtttgagatattggactggctatatttttttaaaaggggacattagaagaaactagaatatctcttctaataatgctttaaagacatggtatttaaatatacaaatacaaagccacatcaaaa

SEQ ID NO: 36864 - DNA, 452 bp, Homo sapiens
ggcgaattgggccctctagatgcatgctcgagcggccgccagtgtgatggatatctgcagaattcgccctttcgagcggccgcccgggcaggtaccaccatgcgagataaagtgtttggaaattacattcctgtgtctgctgctgactgtatggctgtttcaactttctggattgctcatcccaacaataatcctgattaaataatgcagctgcaggctcacaggatgctggaatatggtatttattccacaaggaaccaactggggaatccagtggattgcagctcttggcaaaaccagaactcactccattgggtatattttataacaacagggtccattcaaattttaaggttggcttatttattgacaaaggtgtcaaaacaaccaactctagtgctgctgacccaagggaatacctctgtttggacaatagtgcaagatttcgacct

SEQ ID NO: 36865 - DNA, 398 bp, Homo sapiens
atggatatctgtagaattcgcccttttgagcggccgcccgtgtaggtactgatgtccagtagacctactggatatgcttgcctgcagctcaggggagagctgggttaagaaccgtcaaggcagtaatcatctgcatttagatggcgaagggagccatgacaggggctgaaatggcccagcaagaataaatcaaaccatgagaaacacatacatttaagaataaggagatgtggtcaggcgcggtggctcacacctgtaatcccatcactttgggaggccgaggcgggtggatcacttgaggtcagtagtttgagaccagcctgggcaacctagtgaaatcccgtctctgctaaaaatacagaacttagctgggtgtggtggtgcctgcctatagtccc

SEQ ID NO: 36866 - DNA, 471 bp, Homo sapiens
agggcgaattggagctccaccgcggtggcggccgaggtaccttttagcttcgtcctcacatggtggaaaggagcaggcagctctctgggacccttttataaggatagtaatcccatttttgagggctctgtgcttgtgacctaatcacctggtaatatcacatatgtatggtgggggctacacaaacattgagaccatagcagtggcattttaatggatgtcagcctcttgagagtttgaatagtgtcagtgttaggttgagtttctaaccctgcaaaggccagggctacctcttggagcctaaggaccctacagaggtttttctacttcctaaagacctttgacagcaagtgatgttttgcttgcttctgctagatcctgtggcattctaacttatctttcttagcaaacaaaaactacattctacagttctatatgtataattctctataaatggcaaccacaactagg

SEQ ID NO: 36867 - DNA, 467 bp, Homo sapiens
agggcgaattgggccctctagatgcatgctcgagcggccgccagtgtgatggatatctgcagaattcgcccttagcgtggtcgcggccgaggtacaaaaattagctgggcatagtggcacatgcctgtagtcccagctactcgggaggctgatgaacaagaatcacttgaacctgggaggaggaggttgcagtgagctgagatcgtgccactgcactccagcctgagcgacagagcaagactgtctcaaaaaaataaaaaagaaaaaaataataaaaaggaaaacaaagcctttagaaaaacaaagcctttgaaaaaggatgtaaaattgaatatatagatacaattatttttaaaaagttttatagaaaaatatcctggattgttgatgttgttttaatatattttaatcatttttgtataatgtcatgtataatatgttataatgaaagtaaaaaaaaaaaaaag

SEQ ID NO: 36868 - DNA, 451 bp, Homo sapiens
actactatagggcgaattgggccctctagatgcatgctcgagcggccgccagtgtgatggatatctgcagaattcgccctttcgagcggccgcccgggcaggtacgaaaaaatcaggctactaagcccactgttaatatagacgcagaccaattgttaggaacaggtccaaattggagcaccattaaccaacaatcagtgatgcagaatgaggctattgaacaagtaagggctatttgcctcagggcctggggaaaaattcaggacccaggaacagctttccctattaattcaattagacaaggctctaaagagccatatcctgactttgtggcaagattacaagatgctgctcaaaagtctattacagatgacaatgcccgaaaagttattgtagaattaatggcctatgaaaatgcaaatccagaatgtcagtcggccataaagccatt

SEQ ID NO: 36869 - DNA, 290 bp, Homo sapiens
cactatagggcgaattgggccctctgatgcatgctcgagcggccgccagtgtgatggatatctgcagaattcgccctttcgagcggccgcccgggcaggtacttgctaccacgtggctttttcccagggaaagtattaatttttgtttgacaaaacaccttgataggtcatggttctgcaaggcagagatgttgaaacaaagaaagcttaactgttgcaaataataaaaaagttggagtttcctttgagctaaaagctaaaggtgggcaaaaggaggaaaaaggtttcaa

SEQ ID NO: 36870 - DNA, 427 bp, Homo sapiens
tgggcccttagatgcatgctcgagcggccgccagtgtgatgtgttatctgcagaatttgcccttagcgttttcgcggccgaggtaccagttgtaaaattaccaggaaccgccatgcctcaagatcgccctgttttctggcttcatcaatgactgcatgcagtgcaccaccctgtccactacgtgatgctgtaggattaagtctcacagtgggcggctgaggatacagcgccgcgtcctgtgttgctggtgaattagacgccatcgctgtgggttgctggtatggtgccgtgctatttggcacaggacacaccgcttgaggtctgtattgaacctctgaaggaggccgatactgaagctcggttggcagccggtattgataaactaccagcggtcgggtcttattttctaccggctaatattgtggat

SEQ ID NO: 36871 - DNA, 455 bp, Homo sapiens
gacttctatagggcgaattgggccctctagatgcatgctcgagcggccgccagtgtgatggatatctgcagaattcgccctttgagcggccgcccgggcaggtacaccaatcaaacatagtgtgtccagaattggtgggttcttggtctcactgacttcaagaacgaagctgcggaccctcacggtgattctaagcacattaaaatctggatgacacttatctgaatcatttcgcaacttggagagagatggagaagacacgcatggtgtaactgggcatcaccagaatgtgcactgccatctgtggctgtcttcctgctggcaatccttttcattccaagcaaataagattccctaaattagacaaaaaggaagaaacacaacagagtccataattctgagaggaagagaagagtgatcatcagcagcaaaaggcaattgcagagaagcaccac

SEQ ID NO: 36872 - DNA, 334 bp, Homo sapiens
tgggccctctagatgcatgctcgagcggccgccagtgtgatggatatctgcagaattcgcccttagcgtggtcgcggccgaggtaccagttgtaaaattaccaggaaccgccatgcctcaagatcgccctgttttctggcttcatcaatgactgcatgcagtgcaccaccctgtccactacgtgatgctgtaggattaagtctcacagtgggcggctgaggatacagcgccgcgtcctgtgttgctggtgaattagacgccatcgctgggggttgctggtatggagccgtgctatttggcacaggacacacccgtttgaggtctgtattgaacc

SEQ ID NO: 36873 - DNA, 437 bp, Homo sapiens
actcactatagggcgaattgggccctctagatgcatgctcgagcggccgccagtgtgatggatatctgcagaattcgcccttcgagcggccgcccgggcaggtacttttttttttttttttggtatttctttttaattgcattcgttgtctaacaacaataatactcattggcaagaaatttatttacacttacaaattaaatttaatcacaagtattgttagaattggtcagaaaaccaaaagaccactgtgatattttgcttgaatgcctctgaaaaccaaagagtaaggaatgtcatttgaaactttttgaaccaatctagagaagtacaaccgtttgggggcaactgaattgtgccctgtgtaacactccggttaagagcgagctcctgtggcagactcacgtcctgggaaagcagcaccgagagaaagtggc

SEQ ID NO: 36874 - DNA, 444 bp, Homo sapiens
tatagggcgaattggagctccaccgcggtggcgtccagaaaatcctggcgtcttttctgagtagtatcttgttttagcttatccttaagagactccttccggtcctggattactttctctgtgaactgatgaagttcttggttaaatttagaaaagatttggccttgagagctgaatttgaaaaccaggtcgttgtgatgtagaaaattgttcatgcgctggttggagattttgctaaggttgaacactgctttcaggtatgagtccagggtacctcggccgctctagaactagtggatcccccgggctgcaggaattcgatatcaagcttatcgataccgtcgacctcgagggggggcccggtacccagcttttgttccctttagtgagggttaattgcgcgcttggcgtaatcatggtcatagctgtttcctgtgtgaaatt

SEQ ID NO: 36875 - DNA, 598 bp, Homo sapiens
  misc_feature 350: n = A,T,C or G
ctatagggcgaattgggccctctagatgcatgctcgagcggccgccagtgtgatggatatctgcagaattcgcccttagcgtggtcgcggccgaggtacgaaaaaatcaggctactaagcccactgttaatatagacgcagaccaattgttaggaacaggtccaaattggagcaccattaaccaacaatcagtgatgcagaatgaggctattgaacaagtaagggctatttgcctcagggcctggggaaaaattcaggacccaggaacaactttccctattaattcaattagacaaggctctaaagagccatatcctgactttgtggcaagattacaagatgctgctcanaagtctattacagatgacaatgcccgaaaagttattgtagaattaatggcctatgaaaatgcaaatccagaatgtcagtcggccataaagccattaaaaggaaaagttccagcaggagttgatgtaattacagaatatgtgaaggcttgtgatgggattggaggagccatgcataaggcaatgctaatggctcaaggcatgagggggctcactctaggaggacaagttaaaacatttgggaaaaaatg

SEQ ID NO: 36876 - DNA, 715 bp, Homo sapiens
ctctagatgcttgctcgagcggccgccagtgtgatggatatctgcagaattcgccctttcgagcggccgcccgggcaggtactgctgacttaaatagaggtttttttaaggtattgggtcagctaacagagactggagttgtcagccctgaacaatttatgaaatcttttgagcatatgaagaaatctggggattattatgttacagttgtagaagatgtgactctaggacagattgttgctacggcaactctgattatagaacataaattcatccattcctgtgctaagagaggaagagtagaagatgttgttgttagtgatgaatgcagaggaaagcagcttggcaaattgttattatcaacccttactttgctaagcaagaaactgaactgttacaagattacccttgaatgtctaccacaaaatgttggtttctataaaaagtttggatatactgtatctgaagaaaactacatgtgtcggaggtttctaaagtaaaaatcttgtaagaaaattgtcaaaggggctaatgctacaaggctacactcttcctagagttgaaatattttgttgctgcagccgagtgacctccataaatactggactgaaaaaacattgtaatactacaagtataatgacatttagaagattactttgggctggtgggacatgctgtgaatttagattacaaatgaatattataaaggggatga

SEQ ID NO: 36877 - DNA, 452 bp, Homo sapiens
ctactatagggcgaattgggccctctagatgcatgctcgagcggccgccagtgtgatggatatctgcagaattcgccctttcgagcggccgcccgggcaggtacatataattatctgctatatattatgcatatgtaatacatatgcacctgtgtaagttggaattcttatctattctatagaaagaaaagttctacattgaaatatagccaacatccagttaactctgaaaaaaaatcacatcattgcttggctttttctgttgttacttcctgttggcctagtggcaatgattcattataatgcaatgtaattcaatatcacatggtgaatttaaatggctgtataggaaatctgtaacactgttcttgcttaaaaatgtaaaacttcaatagaaggcggttcatcagagaatttggtaacaccaaatagtaaacgctttgatttcagta

SEQ ID NO: 36878 - DNA, 468 bp, Homo sapiens
atggggccctctagatgcatgctcgagcggccgccagtgtgatggatatctgcagaattcgcccttagcgtggtcgcggccgaggtaccttggtggaagctctattccatgtgggattggaacaaatatttcatggagagcatgtgaccatctgcgttgtatagcctgtgatttcttggtagtcagctatgatgactatatgtgggacaaatcgtgtgattatctgtttttcaggaacaacatgccagaatttcacaaattaaaagcaaagttgataaagaagaaaggaacacgggcatatgcctgccagtgtagctggagaactgttgaagaagtgactgaccttcatacagatcatcagcttcgctgggtttgtggtaaacattaagaatgcagactgcacattcggacagatgcatccatgagagtggtctccatgaatcatcatcatgtttagacaatagtccc

SEQ ID NO: 36879 - DNA, 593 bp, Homo sapiens
  misc_feature 131, 435, 576: n = A,T,C or G
acgactcactatagggcgaattgggccctctagatgcatgctcgagcggccgccagtgtgatggatatctgcagaattcgccctttcgagcggccgcccgggcaggtactttccactgcacagaagcctgnggattcttattgttttgatatttaaaaattgaatctggccgggcgtggtggctcatgcctgaatcccaacactttgggaggctgaggagggtggatcacctgaggtcaggaccagcctggccaacatggtgaaccctgcctctactaaaaatacaaaaattagccaggagttgtgtgccgtaatcccagctacctgggaggctgaggtaggagaattgcttgaacctgggagctggaggttccagtgagccgagatcgcaccactgcactccagcctaggcaacagagtgagaccccatctcanaaaaaaaaaattgaatctatctcaatagagaacaggtgaactagccctcctaaccggaccatgcacaagacaagaaattctagcctttttttccccttccaaggtgcaagtgaagacataagccacactgtattctgcctncaaatgattacacactt

SEQ ID NO: 36880 - DNA, 453 bp, Homo sapiens
tacgactactatagggcgaattgggccctctagatgcatgctcgagcggccgccagtgtgatggatatctgcagaattcgccctttcgagcggccgcccgggcaggtacgcggggacatcaatgcagagtccctctgtgaatttacaacacccaacacccatgagttcagtccttaagaaggaaaattgagcaagtatttaattggttggacattgcataaaagaggtccatatccgggctaactctagaaattttattctcaaacttagttggcctctttttcttctgtcagaggaccattcttagtggcactggggaaatcttggcacccagaagaattcaactgcgctcactgcaaaaatacaatggcctacattggatttgtagaggagaaaggagccctgtattgtgagctgtgctatgagaaattctttgcccctgaatgtggtcga

SEQ ID NO: 36881 - DNA, 229 bp, Homo sapiens
atagggcgaattgggccctctagatgcatgctcgagcggccgccagtgtgatggatatctgcagaattcgccctttcgagcggccgcccgggcaggtcactctataaataaacacatcaattttgctctattactactcttccaaaaacgtctcatataattggaattaacctagcatttacttatcattaaatatatttttttttgttagaaaggatataccagcata

SEQ ID NO: 36882 - DNA, 420 bp, Homo sapiens
  misc_feature 283, 348, 401: n = A,T,C or G
tatagggcgaattgggccttctattatgcatgctcgagcggccgccagtgtgatggatatctgcagaattcgccctttcaagcggccgtccgggcaggacatctacctaaaggactattatgtggaataatacatactaatgaagtattacatgatttaaagactacaataaaaccaaacatgcttataacattaagaaaaacaataaagatacatgattgaaaccaagttgaaaaatagcatatgccttggaggaaatgtgctcaaattactaatgatttangtgttgtccctactttctctctcttttttctttctttttttttattatggttagctgggactagnaggaacgtgccaccatgactggctaatttttctgtattttttagtagagacangagtttcaccatgttggcc

SEQ ID NO: 36883 - DNA, 450 bp, Homo sapiens
agggcgaattgggccctctagatgcatgctcgagcggccgccagtgtgatggatatctgcagaattcgcccttagcgtggtcgcggccgaggtaccctttccaaggtgaccttcagggggattaaccttcctagctcaagcaaggagctaaaaggagccttatgcatgatcttcccacatatcaaaataactaaaaggcactgagtttggcatttttctgcctgctctgctaagacctttttttttttttttactttcattataacatattatacatgacattatacaaaaatgattaaaatatattaaaacaacataacaatccaggatatttttctataaaactttttaaaaataattgtatctatatattcaattttacatcctttttcaaaggctttgtttttctaaaggctttgttttcctttttattatattttttctttttta

SEQ ID NO: 36884 - DNA, 377 bp, Homo sapiens
agggcgaattgggccctctagatgcatgctcgagcggccgccagtgtgatggatatctgcagaattcgccctttcgagcggccgcccgggcaggtatgaaaaaatcaggctactaagcccactgttaatatagacgcagaccaattgttaggaacaggtccaaattggagcaccattaaccaacaatcagtgatgcagaatgaggctattgaacaagtaagggctatttgcctcagggcctggggaaaaattcaggacccaggaacagctttccctattaattcaattagacaaggctctaaagagccatatcctgactttgtggcaagattacaagatgctgctcaaaagtctatttacagatgacaatgcccgaa

SEQ ID NO: 36885 - DNA, 419 bp, Homo sapiens
catgctcgagcggccgccagtgtgatggatatctgcagaattcgccctttcgagcggccgcccgggcaggtacgcggggacatcaatgcagagtccctctgtgaatttacaacacccaacacccatgagttcagtccttaagaaggaaaattgagcaagtatttaattggttggacattgcataaaagaggcccatatccaggctaactctagaaattttattctcaaacttagttggcctctttttcttctgtcggaggaccattcttagtggcactggggaaatcttggcacccagaagaattcaactgcgctcactgcaaaaatacaatggcctacattggatttgtagaggagaaaggagccctgtattgcgagctgtgctatgagaaattctttgcccctgaatgtgggcgatg

SEQ ID NO: 36886 - DNA, 463 bp, Homo sapiens
attgggccctctagatgcatgctcgagcggccgccagtgtgatggatatctgcagaattcgcccttagcgtggtcgcggccgaggtaccagttgtaaaattaccaggaaccgccatgcctcaagatcgccctgttttctggcttcatcaatgactgcatgcagtgcaccaccctgtccactacgtgatgctgtaggattaagtctcacagtgggcggctgaggatacagtgccgcgtcctgtgttgctggtgaattagacgccatcgctgtgggttgctggaatggtgccgtgctatttggcacaggacacaccgtttgaggtctgtattgaacctctgaaggaggccgatactgaagctcggttggcagccggtattgataaactaccagcggttgggtcttattttctaccggctgatcttgtggatactgtatctgacttggcattgccgggatagagac

SEQ ID NO: 36887 - DNA, 471 bp, Homo sapiens
ctactatagggcgaattgggccctctagatgcatgctcgagcggccgccagtgtgatggatatctgcagaattcgccctttcgagcggccgcccgggcaggtactctggcaattcacctttcaattcaaatattctgtagagaacgcttcctctgagaagccactggatgtctgtatggtgcaggaggtttatgtgctgcctgtccaggtttttgttttgggtgtttttttttttttaacatttttgcataaatgggtctttgatacaggtaaccagttttgtaacattattcagaacttcactgtatcttcaagtttttgatatcagcatctctgtggagaaagcagtgtgctataatgtcaacatcaggatttcttttttttttaataacgcaaaatgacttatggagacaaccactgatggggcaccaggagtgtagattccagacctctggttatcagatatgatgt

SEQ ID NO: 36888 - DNA, 654 bp, Homo sapiens
  misc_feature 364: n = A,T,C or G
ctatagggcgaattgggccctctagatgcatgctcgagcggccgccagtgtgatggatatctgcagaattcgcccttagcgtggtcgcggccgaggtacatgaagactggtaaaactgcaaataagaattacaatttgaagtcacagaaaatattttaaatggctaattctgaagaggagacaagaatccattttggacatgttctcagttttgtaaatatgacttcactatcacattctctcatgtgtttccatacccaccttttcttggaaattatgggcagaaaatggatagaaggaaggaaaaggaatcttgagaaatttgtctggaggctgcattttaataataaggacgacttcactntatctctttggtcatcaaaggaataggaagaataagagattctcattatagttatccacctcacctaacagtaatgatatcagaatgaaggatttaaatgaaagtcaaactgacaggggaaaaaggcatctagcactctagtgtatttacctgtgaaaataaaaatccagtggaaaactgacatgtgtttagacattgaataaacaagttattttaaatattaaaagaattttcaatttcaagtcttaactgttttacatttcctcttgtggaaaaaagaaaatttttgc

SEQ ID NO: 36889 - DNA, 289 bp, Homo sapiens
gggccctctagatgcatgctcgagcggccgccagtgtgatggatatctgcagaattcgccctttgagcggccgcccgggcaggtacttatctacaaaacttccattactagacccttttgacctacgagaatagcagtttctatggttcaacctaatacactgtatgggctcaaatatataacaattaaaatttgaaagtattcaaaataccaataattaccccccttcttaaaaagtaacaggtctttgaagaagagagcccattccaacacccctttacacacaggc

SEQ ID NO: 36890 - DNA, 464 bp, Homo sapiens
tgtcactacttagggcgaattgggccctctagatgcatgctcgagcggccgccagtgtgatggatatctgcagaattcgccctttcgagcggccgcccgggcaggtactttttttaatgatatacatacccatgaaaccttttcttgaatggcacaacccagagcttctgtgcttaaaatgttataatccaaattcctctcttttaagaaaaaaaaatcagccatgacaatacttagcaattaccatctgagctatgtaaagtctaaaacaactataagggccatacattagtggccatttttaagcttgctaaacgatgatgggcttaaagaggtgggagccgggctatttaagatacagatctatttatatttagaggatgtgctaaatactttgagtggccatcctcttacacataattatactaaactcagattgaaacctgcctacaaatttcattctt

SEQ ID NO: 36891 - DNA, 496 bp, Homo sapiens
tacacttctatagggcgaattgggccctctagatgcatgctcgagcggccgccagtgtgatggatatctgcagaattcgccctttcgagcggccgcccgggcaggtacgcgggggccggagtgcggcgctgggcggaagctaccatggcggccgagagaaagacaaagttgtccaagaatctgctgcgcatgaagtttatgcaaaggggactggactcagaaaccaagaaacaactagaagaagaagaaaagaaaatcattagtgaagagcactggtacgcggggggagaaggcgcggcgcccgtgggagtgcaaaaatggactaatacagatgacatggagaagatctggcaccacaccttctgcagtgagctgcacgtggccccagaggagcacctagtgctgctgaccaaggcccccctgaaccccaaggtcaacagagagaagataactcagatcatgtttgagacctttaacacctgggccatgtacctcg

SEQ ID NO: 36892 - DNA, 242 bp, Homo sapiens
acgactcatatagggcgaattgggccctctagatgcatgctcgagcggccgccagtgtgatggatatctgcagaattcgccctttcgagcggccgcccgggcaggtactatgaattactaaattgctatacaccatgtaatagtgagtatagctaatatttagtatgccttttaaaaattttggactgcttttcggtttttaacaaaattctccacattgtgaaactacttcaaggaaattt

SEQ ID NO: 36893 - DNA, 457 bp, Homo sapiens
attgggctctctagaagcatgctcgagcggccgccagtgtgttggatatctgcatatattctcccttatcttggtcgcggccgaggtacgcgggggagcgagttgacgctgaaaggctgctcacctttccctctcctggtagcgataccttttgtgcgtgggagtggacatcgcccaagttctgcgttagcctgggctcttgactcatggtttccgtgaatcctctaaagtatatgcaaaatttcgcgtgaaacattggcaaatttggagcgacagatctatgcttttgagggaagctacctggaagacactcagatgtatggcaatattattcgtggctgggatcggtatctgaccaaccaaaaaaaactccaatagcaaaaatgatcgaaggaaccggaagtttaaggaagctgagcggctcttcagtaaatcctcggttacctcagcagctgca

SEQ ID NO: 36894 - DNA, 483 bp, Homo sapiens
tatagggcgaattgggccctctagatgcatgctcgagcggccgccagtgtgatggatatctgcagaattcgccctttcgagcggccgcccgggcaggtacagaagcgagaccctgctgggcagagaaagggtgacctggaaggtgtgtgagggctccgcccatgggcccctgtgatggtcatggcctcaagaatcacagtccagtttccatcattatcttctatggagttcttcattcccacatctgtggaccttaaaatcctaccgttgagtgcctgccttggatcagcagtcagttcgttaccttggttctcagacgatgcttgcaacaacaccatgcgattcgcccactcttggagaaaataagagaagtatccctgaaggatgaaatatcctcgaatatgaaaaggtctgctctctgaagaccaactgtctcagtctgctttttgctgctgtaacagaataccacagacttgtaggcag

SEQ ID NO: 36895 - DNA, 472 bp, Homo sapiens
actatagggcgaattgggccctctagatgcatgctcgagcggccgccagtgtgatggatatctgcagaattcgccctttcgagcggccgcccgggcaggtacgcgggggccctttcttgaaggaatcccctaagtgcacgtctcccgttttcttttcacatcaatgcagagtccctctgtgaatttacaacacccaacacccatgagttcagtccttaagaaggaaaattgagcaagtatttaattggttggacattgcataaaagaggtccatatccaggctaactctagaaattctattctcaaacttagttggcctctttttcttctgtcagaggaccattcttagtggcactggggaaatcttggcacccagaagaattcaactgcgctcactgcaaaaatacaatggcctacattggatttgtagaggagaaaggagccctgtattgtgggctgtgctatgagaaat

SEQ ID NO: 36896 - DNA, 442 bp, Homo sapiens
tacgactacttagggcgaattgggccctctagatgcatgctcgagcggccgccagtgtgatggatatctgcagaattcgccctttagagcggccgcccgggcaggtactcagagaggaaggcagccttaagaaatgatgcaggaatagccaagcaagatttttccaagcactggttaaatcaccagcaaaacaaagcatttatgtgagtactggcgtggattctgcataatggtgatcacacgttccacctcatcctcagtgagttctcccgccctcttggtgaggtcaatgtctgctttccccaacaccacatgagcatatcttcggccacacccttaatggcagtgatggcaaaggctattttccgccgcccatcgatgttggtgttgagtaccttggccgcgaccacgctaagggcgaattccagcacactggcggccg

SEQ ID NO: 36897 - DNA, 471 bp, Homo sapiens
ctactatagggcgaattgggccctctagatgcatgctcgagcggccgccagtgtgatggatatctgcagaattcgcccttagcgtggtcgcggccgaggtacgcggggattgcaattcagaaatgagaagctgatccggaactccactacaggtggtctttttaaaaagatctctcacaaaaagaaagaagtttatgctcctcatgcctaaaatctgttggctgacactttgttctttaatttcgccagctcaaagaaattctcgaatgttctcacctattaacagttattaaaatggaagaagctggggatgaaattgtgagcaatgccatctcctacgctctatacaaagccttcagcaccagtgagcaagacaaggataactggaatgggcagctgaagcttctgctggagtggaaccagctggacttagccaatgatgagattttcaccaatgaccgccgatgggag

SEQ ID NO: 36898 - DNA, 467 bp, Homo sapiens
gcgaattggagctccaccgcggtggcggccgcccgggcaggtactcacagttgagataggattaaaccccaatttcaaagccccttacagagttccacttaccaggttatttcagccggcaaccaggaactagactgaatgcaatcctcccacatccaaggtcccccgcgtacctcggccgctctagaactagtggatcccccgggctgcaggaattcgatatcaagcttatcgataccgtcgacctcgagggggggcccggtacccagcttttgttccctttagtgagggttaattgcgcgcttggcgtaatcatggtcatagctgtttcctgtgtgaaattgttatccgctcacaattccacacaacatacgagccgggagcataaagtgtaaagcctggggtgcctaatgagtgagctaactcacattaattgcgttgcgctcactgcccgctttccagtcggg

SEQ ID NO: 36899 - DNA, 360 bp, Homo sapiens
ctactatagggcgaattgggccctctagatgcatgctcgagcggccgccagtgtgatggatatctgcagaattcgccctttcgagcggccgcccgggcaggtacaggccggggaagagactcaagtaggagcgcctgcccgagctgagactagatgtgaacctctcaccatgaaaatgttaaaagatataaagggaggagttaaacaatatggatccaactccccttatataagaacattattagattccattgctcatggaaatagacttactccttatgactgggaaattttggccaaatcttccctttcatcctctcagtatctacagtttaaaacctggtggattgatggagtacc

SEQ ID NO: 36900 - DNA, 641 bp, Homo sapiens
actatagggcgaattgggccctctagatgcatgctcgagcggccgccagtgtgatggatatctgcagaattcgcccttagcgtggtcgcggccgaggtactgttaaatgaatattgccttttactgctctttatggcttattggaataggagctcatttaagattgatcttggagagtttcttcttgtgattttagttcataagtatgtcacctttcattttatagtgttcatcattgagtaatggattaagtgaaaatccaggagtatccatctgcagttatgtgctgaggtgataattcatccaacatatttgttagcataaatattatgcttcagtttctgttgcaaattggtgattgtgaaattacagaaagtgattttctagtctgctttttttgtttaattcttgtaatgtaagcaataaatatggagtgtcagtagtctccttccaccccagaaatgtgttggtgtaacattctcgtttcttttaacaacctggaagtacccagccggctcagcccacagcactgtcctatgaaccttcctgcacgccattctccacctcagtatctgctttcggggaacccaacctgcgacagtgcttctgtgtgttttcagtcctgcaggtttgaactctga

SEQ ID NO: 36901 - DNA, 260 bp, Homo sapiens
tatagggcgttttgggccacatctacatgcatgctcgagcggccgctagtgtgatggatatctgcagaattcgctttttcgagcggccgcccgggcaggtactcatacaagcatctaggtaggatattaataaataatacaggataatagcatcaccagtgtccaataacgggccatcaggaacaagattcacgtttggtggatatgagagaaaataaacacttcgggaaacttgctcaccacagctggagatcaagaat

SEQ ID NO: 36902 - DNA, 451 bp, Homo sapiens
tacactactatagggcgaattgggccctctagatgcatgctcgagcggccgccagtgtgatgggatatctgcaaaattcgcccttaccgtggtcgcggccgaggtactttaatattaatgtggttgttttcttgtttcttttttactcactgcagtatgaggaacaaatcacaaacacttactttggagaaacagaaacccgagtgtagattttacaaaatcactttttaaaatctctgtattgtgctcctcaaatacctagagccagtctttgcataaaatatcacagctttatctataaccttaaaattctgcagcagcctaaagatatggataagatataccaccacttgctattctgaaatatatctattaccatatccaacctaatgatagtatctaaaaaattctttcttccatagggaagtctctgacaagctgttattcattt

SEQ ID NO: 36903 - DNA, 485 bp, Homo sapiens
atagggcgaattgggccctctagatgcatgctcgagcggccgccagtgtgatggatatctgcagaattcgccctttcgagcggccgcccgggcaggtacatgagcaaaaacagcaagtggtgaaatttttaatcaagaaaaaagcaaatttaaatgcactggatagatatggaaggtatagttctttcttttaatctgtgtgttctagatggatagcagtcactcaagtcataaatattaaattaataagattaatgtatacttattgggatatagggatcagtatgaacacaaatcagttaggtagaaaaacaattatttggactgggcaacataaaagttttagtaggattcatcttttattatattgactgatgttatttgctatgtaatgtttttggttacatgatcttatgttagctaaagggatttcatattttatgaagtttgaactttaattttagtttactttatgactcagtatt

SEQ ID NO: 36904 - DNA, 296 bp, Homo sapiens
tatagggcgaattgggccctctagatgcatgctcgagcggccgccagtgtgatggatatctgcagaattcgccctttcgagcggccgcccgggcaggttctgattccaattgatgggatacatgcccttaatacagaaagtttccattatttattcaaatatcaaaaattaagattattgagaaagtttattgcttttatggctgggcaaggatgcctactagcaacatttttagggtaaaataaatatttcttttatataaaaaaccttatgagggtcatttctggttttaaaaa

SEQ ID NO: 36905 - DNA, 434 bp, Homo sapiens
ggcgaattgggccctctagatgcatgctcgagcggccgccagtgtgatggatatctgcagaattcgcccttagcgtggtcgcggccgaggtacgcgggggagggtggaagaaagtcagagctcagcccaggctgccttttccctgcagcgagcctcagccctctccccagcacgcccagcttttttatcatggattattcttcagctcattgtcttaagtcgtcctgtgacacctcccagtgaccgcacgctgttcttccttttcagtggtcagcaagtccatctgggcagcgcagagggaccaaaggtgtccatcgttggcctggacgattctggcttcctccaggttcaccaggagggcggcgaggttgtgactgtgcacccggacggcaactccttcgacatgccgagaaacctcatcctccccaaacgac

SEQ ID NO: 36906 - DNA, 448 bp, Homo sapiens
ctataggccgaattgggctctctagatgcatgctcgagcggccgccagtgtgttggatatctgcagaattcgcccttttttgcggccgcccgggcaggtacctgcattttacagatgaggaaactgaggttgagagaagctgtttgttcagggtcactgagttagtaagtggatgtgtatttgattccaaagatcatgctctgcacaactgctttattctgtcttttcatttcatgagacatgcacttagcaggcattgaaaggcaaagaaacatcttttctcatccttccctgagctgttcttgtatcatttcccattgtagttcaaatagatattttccccttctttcactagaaaaattcttattaagagacttttcctttgccaaaacaaaacaattttttatctaaaactgcactttaaaaaaagcagttccataaactaaaa

SEQ ID NO: 36907 - DNA, 436 bp, Homo sapiens
ggcgaattgggccctctagatgcatgctcgagcggccgccagtgtgatggatatctgcagaattcgccctttcgagcggccgcccgggcaggtacttggcccctgaggtaattgcacagggaattttcaaaaccactgatcacatgccaagtaaaaaaccattgccttctggccccaaatcagatgtatggtctcttgggattcattttatttgagctctgtgtgggaagaaaattatttcagagcttggatatttctgaaagactaaaatttttgcttactttggattgtgtagatgacactttaatagttctggctgaagagcatggttgtttggacattataaaggagcttcctgaaactgtgatagatcttttgaataagtgccttaccttccatccttctaagaggccaaccccagatgaattaatgaagg

SEQ ID NO: 36908 - DNA, 459 bp, Homo sapiens
gcgaattgggccctctagatgcatgctcgagcggccgccagtgtgatggatatctgcagaattcgcccttagcgtggtcgcggccgaggtacctcaatgaagcagcaggtgtcgcagcagaagaagccaggaactacaaggaaaagaaaaagttaaagggccaggaaaattctctgtgttggactgctttagacaaaaatgaaggcgaaatgataacttctaaggataatttagaagatgagactgaagatgatgacctatttgaaactgagtttagacaatataaaagaacatattacatgacgaagatgggggttgacgtagtatctgatgactttctggctgatcaagctgcatgttatgttcaggcaatacagtggattttgcactattactatcatggagttcagtcctggagctggtattatccttatcattatgcacctttcctgtctgata

SEQ ID NO: 36909 - DNA, 257 bp, Homo sapiens
tactatagggcgaattgggccctctagatgcatgctcgagcggccgccagtgtgatggatatctgcagaattcgcccttaacgtggtcccggccgaggtactttgacagctgggcacaatgccatccttgaggacttggtcttcccaagcgaaattgtgggcaagagaatccgcgtaaaactagaaggcagccggctcataaaggttcatttggacaaagcacagcagaacaatggtggaacacaagggttgaaact

SEQ ID NO: 36910 - DNA, 611 bp, Homo sapiens; identical to SEQ ID NO: 36835

SEQ ID NO: 36911 - DNA, 427 bp, Homo sapiens
ctatagggcgaattgggccctctagatgcatgctcgagcggccgccagtgtgatggatatctgcagaattcgcccttagcgtggtcgcggccgaggtactactggcccattcttgtccattataactgtgtgcagtgtgatgatggctgccaactatgatataccggtctggggatgtcaagcccattacaaattcaacagcattagtaactgttttcaattttgtgactgtctgaacttgcatgctgacgactcttatttcattatttggaagctctagagagctacacgcttcatttttggttctagcttttggcgaagggatcagttttgcaacgagggatgcagaaatgggctgcactaatagagaggtgaggtttgatcggctttgtctaaaactttcatcgacacttgggtaaccaggcgt

SEQ ID NO: 36912 - DNA, 451 bp, Homo sapiens
ggcgaattgggccctctagatgcatgctcgagcggccgccagtgtgatggatatctgcagaattcgcccttagcgtggtcgcggccgaggtacgcgggacatcaatgcagagtccctctgtgaatttacaacacccaacacccatgagttcagtccttaagaaggaaaattgagcaagtatttaattggttggacattgcataaaagaggtccatatccaggctaactctagaaattttattctcaaacttagttggcctatttttcttctgtcagaggaccattcttagtggcactggggaaatcttggcacccagaagaattcaactgcgctcactgcaaaaatacaatggcctacattggatttgttgaggagaaaggagccctgtattgtgagctgggctatgagaaattctttgcccctgaatgtggtcgatgccaaaggaagatt

SEQ ID NO: 36913 - DNA, 504 bp, Homo sapiens
ccctctagatgcatgctcgagcggccgccagtgtgatggatatctgcagaattcgcccttagcgtggtcgcggccgaggtacaagaagagaggatggagacgagggtaggcttcttttcagattatacattctggatcagaaagtctatatcagtgggattttctgaatgacccaggttttttttgtctgtttttgtttgtttgtttgtttgttttagaatttctgtgctttggagctagaaggatatataaatgagaaaactgagaacaaatgaagagacaatatatttttggttgcaagggataagaacctaactccaacaagcaaagcaaaggggggttttattagaaagatacattgagctttctatcagaatcaaaggaagaggtgatcagccaagcctccaaaccagaatcaaggtctagaaaaccagagaccacactcttttttaccatatgtttcttgttgcctctgcctaatggccttgttttcgcttactttag

SEQ ID NO: 36914 - DNA, 700 bp, Homo sapiens
atacgactcactatagggcgaattgagccctctagatgcatgctcgagcggccgccagtgtgatggatatctgcagaattcgcccttagcgtgatcgcggccgaggtaccaaagagggcataataatcagtctcacagtagggttcaccatcctccaagtgaaaaacattgttccgaatgggctttccacaggctacacacacaaaacaggaaacatgccaagtttgtttcaacgcattgatgacttctccaaggatcttcctttggcatcgaccacattcaggggcaaagaatttctcatagcacagctcacaatacagggctcctttctcctctacaaatccaatgtaggccattgtatttttgcagtgagcgcagttgaattcttctgggtgccaagatttccccagtgccactaagaatggtcctctgacagaagaaaaagaggccaactaagtttgagaataaaatttctagagttagcctggatatggacctcttttatgcaatgtccaaccaattaaatacttgctcaattttccttcttaaggactgaactcatgggtgttgggtgttgtaaattcacagagggactctgcattccccgcgtactgaatgataaaaatgtaacatgttatacatttaactttattctagtagccacattttaaaagttaaaaaggataatattttacttaac

SEQ ID NO: 36915 - DNA, 178 bp, Homo sapiens
ggccctctagatgcatgctcgagcggccgccagtgtgatggatatctgcagaattcgccctttcgagcggccgcccgggcaggtacttatactaaattatggtagttattctgccttccagtttgcttgatatatttgttgatattaagattcttgacttatattttgaatgggttct

SEQ ID NO: 36916 - DNA, 456 bp, Homo sapiens
gactactatagggcgaattgggccctctagatgcatgctcgagcggccgccagtgtgatggatatctgcagaattcgccctttcgagcggccgcccgggcaggtacgcgggggatataaagatcagcgcctgaaacagattctccgggatattaccggagacggagtgttttattattagcctttcttaggtggacatttccatttgaaattacaagtcctttaggctgggcgtggtgcatggctgtaatctcagcaccttgggaggctgaggcaggaagatcacttgaggccaggcgttggagagcagcctgggcaaggtggcaagaaccttgtctctacaaaaaaagcgtctgccatcatggatgttctcgcagaagcaaatggcacctttgccttaaaccttttgaaaacgctgggtaaagacaactcgaagaatgtgtttttctcgcccatg

SEQ ID NO: 36917 - DNA, 489 bp, Homo sapiens
agggcgaattgggccctctagatgcatgctcgagcggccgccagtgtgatggatatctgcagaattcgccctttcgagcggccgcccgggcaggtactttatgtgatttccctaaaaagaatgaactaccactacactatggtgttaaaccaaaatatagggaaaataaacactaactgctgcttatggataatgttgcaactacttggtatgcatataaatattttactttttcacatgtatagattgcatttcttaggtgttttaattttttaaatatatttatgttttaaaaatttagttttgttttctgttttataactatagtgagaatgatgttttgaagcaaaatttttggttataaaatagttttcaggattatatatatatatactggatcctatcgccttttagtagaatatgaaatattcttttagaaatccaatataaataggttataatagccatattctttattactttattgag

SEQ ID NO: 36918 - DNA, 468 bp, Homo sapiens
aatacgactactatagggcgaattgggccctctagatgcatgctcgagcggccgccagtgtgatggatatctgcagaattcgccctttcgagcggccgcccgggcaggtacatttttagggacaaagctacatgatagaaatataacttgccggcaggaaaaaatgaaagaaattaattctgaagaagtgaaaattaatgatattacagtagaaattaataaaaccacagaaagggctcccgaaaattgtcatttggccaatgggataaaaccttctgacccaccattggataatcagatgaaacattcttttgattcagcatcaaataagaatttcagccaatgtttggaatccaagctagaaaacagtccagtggaaaatgttactgctgcttcgactctgctcagtcaagcaaaaattgatacaggagagaataaatttccaggttcagctccccaacagcatag

SEQ ID NO: 36919 - DNA, 315 bp, Homo sapiens
agggcgaattgggccctctagatgcatgctcgagcggccgccagtgtgatggatatctgcagaattcgccctttcgagcggccgcccgggcaggtacaattacattcattactttttggagcccattcatgttaggcttgattaaaaaggtagactcagtagtcagtctcagaatccagtgatcagcattcaagcatatagctaactctagtgtattccaaacctacacttcatgaaaaaatatacaactggcatttacatgccattcaagctacaggataaatggtaactctgaaagacatcatttatttacaa

SEQ ID NO: 36920 - DNA, 475 bp, Homo sapiens
  misc_feature 244, 321: n = A,T,C or G
ctatagggcgaattgtgccctctagatgcatgctcgagcggccgccagtgtgatggatatctgcagaattcgcccttagcgtggtcgcggccgaggtacgaaaaaatcaggctactaagcccactgttaatatagacgcagaccaattgttaggaacaggtccaaattgagcaccattaaccaacaatcagtgatgcagaatgaggctattgaacaagtaagggctatttgcctcagggcctgnggaaaaattcaggacccaggaacagctttccctattaattcaattagacaaggctctaaagagccatatcctgactntgtggcaagattacaagatgctgctcaaaagtctattacagatgacaatgcccgaaaagttattgtagaattaatggcctatgaaaatgcaaatccagaatgtcagtcggccataaagccattaaaaggaaaagttccagcaggagttgatgta

SEQ ID NO: 36921 - DNA, 196 bp, Homo sapiens
gcgaattgggccctctagatgcatgctcgagcggccgccagtgtgatggatatctgcagaattcgcccttagcgtggtcgcggccgaggtacttttgattgagatatttatatttttacaaagaaataaaaataaatgaggtgttagtttctttgccatatttaggaaagttagttttcttcctctatttgttatt

SEQ ID NO: 36922 - DNA, 461 bp, Homo sapiens
attgggccctctagatgcatgctcgagcggccgccagtgtgatggatatctgcagaattcgcccttagcgtggtcgcggccgaggtacttttttttttttttttttttttcgagaggccagtggaaaaacactggtttattttcctttatgaaatttttgtgggtatggtgtagggtctggataacattgcttaatggcttttttgatgttgttttttttgagatggagcctcactttgtttgcctaggctggagtgcaaagcaagacactgtctttaaaaaaaaagggggggggaggggcattttctacttttaattgagcagcaggggaaatccacaaggtgagaagatgcataggaatatggtgtgatcttcatgatcaaattacaaagccccttattgaaagaaaggagcctaaatttattattaccaattaacttttcaacttactccttggcaaa

SEQ ID NO: 36923 - DNA, 399 bp, Homo sapiens
ttactatagggcgaattgggctctctagatgcatgctcgagcggccgccagtggtgttggatatctgcaaaattcgccctttttagcggccgcccgggcaggtacatctacctaaaggactattatgtggaataatacatactaatgaagtattacatgatttaaagactacaataaaaccaaacatgcttataacattaagaaaaacaataaagatacatgattgaaaccaagttgaaaaatagcatatgccttggaggaaatgtgctcaaattactaatgatttagtgttgtccctactttctctctcttttttctttctttttttttattatggttagctgtcacatacaacttttttttttttttgagatggggtctcgctctgtcaccaggctg

SEQ ID NO: 36924 - DNA, 453 bp, Homo sapiens
gggccctctagatgcatgctcgagcggccgccagtgtgatggatatctgcagaattcgcccttagcgtggtcgcggccgaggtacctccactggctgaagtctctacatagctctcaggaaccttcggaaaggcatccaactcttttaccaaacctaaagtttttttccgattcagtcgcctcatcttcaggaaaaccttcctcttccttcatatagtcatgcttgtgttatggtcccagcctaccgccatgtttcacagaagcccgggtcgccggggctcccgcgtacaaccctgaaaaagaggaggctggtcacttgtatagacttatgcaaagcttctgctttgagaaaatatgtggaatttggcaaccccaagtagagtcaccacatgaatgtttatcttaaaaactgtttacaagcacactggtggtaactgtggcttcccaattcgt

SEQ ID NO: 36925 - DNA, 461 bp, Homo sapiens
cactactatagggcgaattgggccctctagatgcatgctcgagcggccgccagtgtgatggatatctgcagaattcgcccttagcgtggtcgcggccgaggtacctgttgtgggaagttttgtctgcagagaagcttgaatagaccccccgactcttcccggagcagaatttgtatggactctctgggtgtggagcccaggcagggctcacttctcaggctgaagtcgctgagatgaatgggcagcccaggctcagccccaggccctgctgcaggcttgtgggaattggtgtctcaccagggtgtgcgcggctcaaggttctcacatcccccaaaaagatctggtgacttctaggcttcctgcctagaaactgaactgagggcacccagttttagaaagattcaaacatacaccagaaggatcacagcccaaatatcaggacactggggtgagagagggct

SEQ ID NO: 36926 - DNA, 460 bp, Homo sapiens
actactatagggcgaattgggccctctagatgcatgctcgagcggccgccagtgtgatggatatctgcagaattcgcccttagcgtggtcgcggccgaggtacttttttttttttttttttttttttgggagaaggagccaatgcaatggctagtctttactggaaagaagaaactttacagcacattttgagtaatttagtgcaggtgctcagtgtaccaaagacgtctcatataactacacaattaaccagtaaattaaaatatgtaatttatgagtctcttgctgacattcatagtagctacttgaagattaaaggctttaataagctcttcattaacgtaactagttcactatttttaagttgtaaaaaatgttgttttactagatgtgcatagcaaatgagcaccacgttataaaacgatatgtgctaaagtaataacaatgtggagcttgaatt

SEQ ID NO: 36927 - DNA, 677 bp, Homo sapiens
  misc_feature 509: n = A,T,C or G
cgactcactatagggcgaattgggccctctagatgcatgctcgagcggccgccagtgtgatggatatctgcagaattcgcccttagcgtggtcgcggccgaggtacatgaaggaggaagtttaataaatttcagctaaattaattaacatgccccatgttgtatgaaaagataatcatcccactcattgtatttctcactcaaattctaacagtagtgaccaaaatagatgtatagacctcaacggtctgatatggtagccactagagacttaatggccatttaagttaaaattcattaaaattaaataaaatttaaaactcatctctttatttgcacttactacattcaggggctcaaaaaccacatgtggctagtggctgccgtattagacagagggataaaggacattccacagaaagctctagttagtcaggaagttcttctgctgacagcactggttaacaaggttagcaaaagggttccaatgttaatggggggaaagctcanaaaaatttcccaaattagcattcctttgatcaatatcttcaaatgcatctatatgttttacacacatacacacacaccacacagctgatcttggttatcatgaataatcatatcttcatatctttcatagccgcttgtttaatattagcgaaacgaaccctgaatctg

SEQ ID NO: 36928 - DNA, 439 bp, Homo sapiens
ataggcgaattgggccctctagatgcatgctcgagcggccgccagtgtgatggatatctgcagaattcgcccttagcgtggtcgcggccgaggtactttatttttttctttttttctttagttttttgaagtgtcggggttatggttttgttatctgagtttgttgggtgacctactgtaaagcaagcttaaatactcccacaattcaaccccctgggaagttataaatttcctccattatccatcactgttgtaaaagcctccatagccacctccaccaaatcctctgctgctaccgtggccacctccgccactgcggctgctgcttgcgcggctgctgctgaagctggaactgctggcaccgctactttgtcggtagtctctggcaccaaacccttcactaaatctgctactcttagaacgtccacgactgctaccc

SEQ ID NO: 36929 - DNA, 445 bp, Homo sapiens
  misc_feature 243: n = A,T,C or G
attgggccctctagatgcatgctcgagcggccgccagtgtgatggatatctgcaaaattcgcccttagcgtggtcgcggccgaggtacttctacagagatcctgaagagattgaaaaagaagagcaggctgctgctgagaaggcagtgaccaaggaggaatttcagggtgaatggactgctcccgctcctgagttcactgctactcagcctgaggttgcagactggtctgaaggtgtactttntttttataatttttttttttttttttaaagcttattttatgggcataaaatacaggaaaaagttataataaatgccaaaccgtctctttactttatgaagccaaatatttcctcagacttggtttttaaagccggaatttattccttcagggccactattatttttcaaaactccatataaatattgaatctaaaaattaat

SEQ ID NO: 36930 - DNA, 432 bp, Homo sapiens
  misc_feature 405: n = A,T,C or G
gggccctctagatgcatgctcgagcggccgccagtgtgatggatatctgcagaattcgccctttcgacggccgcccgggcaggtacagatgtccagtagacctactggatatgcaggcctgcagctcaggggagagctgggttaagaaccgtcaaggcagtaatcatctgcatttagatggcgagtgaagccatgacgggggctgaaatggcccagcaagaataaatcaaaccatgagaaacacatacatttaagaataaggagatgtggtcaggcgcggtggctcacacctgtaatcccagtactttgggaggccgaggcgggtggatcacttgaggtcagtagtttgagaccagcctgggcaacctagtgaaatcccgtctctgctaaaaatacagaacttanctgggtgtggtggtgcgtgcctatagt

SEQ ID NO: 36931 - DNA, 477 bp, Homo sapiens
actactatagggcgaattgggccctctagatgcatgctcgagcggccgccagtgtgatggatatctgcagaattcgccctttcgagcggccgcccgggcaggtaccaggagggtattgatgtttgaggtccaaactgaaaacccatcacctccttcccactgctatagcagcgttagccctggggttcattatctagccagttcacaccttctaaagtggggctctgaaaatgtcttacttccctcacagacaaagcaattctcaagcctcctgagatcacccaccaaccagagcaactgctgtcacttggaggtgcagctgaattcttctaattgtgacacaaactcttgaaactgtaaatgctgaaagattaaatgaggttataacactcagaaggttttacaagtaaaagtaagtcaaatcaataggtctttatttcatatctgtaatggtttagctctgcgggaagtgttagc

SEQ ID NO: 36932 - DNA, 421 bp, Homo sapiens
tagatgcatgctcgagcgttcgccagtgtgatgtatatctgcagaattctgcccttagcgtggtcgcggccgaggtacaggcttgtcagggagaggcactgggctgtaatgtggccacaatgaggtctcaccgaccccacaaggggctctggagctgggatggccccagagggtttcccaagttggggtgaggaggccagacctttgtacgcgggagcctaaggcgtgcaaacagagcgccactgggaggctgaaacctttaggccgatgcctgcttgcaaggtcaggcaagctggattctggtccccacctttgcagagagaacagcgatgttgtgcgcccatttctcaaatcaaggaccggcccatcttactacctccaagagtgcttttctctctaataagaaaacatctactttgaa

SEQ ID NO: 36933 - DNA, 440 bp, Homo sapiens
actacttagggcgaattgggccctctagatgcatgctcgagcggccgccagtgtgatggatatctgcagaattcgccctttcgagcggccgcccgggcaggtacctttcattggattgtccatggtgcatcgctttagcaagcggcgtgactctccactgcccgtcatcttggccaatatctatctgctggttcctcctgtgctcaacccaattgtctatggagtgaagacaaaggagattcgacagcgcatccttcgacttttccatgtggccacacacgcttcagagccctaggtgtcagtgatcaaacttcttttccattcagagtcctctgattcagattttaatgttaacattttggaagacagtattcagaaaaaaaatttccttaataaaaatacaactcagatccttcaaatatgaaactggttggggaatc

SEQ ID NO: 36934 - DNA, 547 bp, Homo sapiens
acgactcactatagggcgaattgggccctctagatgcatgctcgagcggccgccagtgtgatggatatctgcagaattcgcccttagcgtggtcgcggccgaggtactacaaggactggttagagggttgaatgaatctgtatactcagcacttaacacagcactctgggtaaaagaaaaaagatcctcaaagatattagttggttacatcaagaaaggacaaacttaggttaatctataacttcacctcagaggaacaggaactttggagataaacagggctctgccacttgcaagttgcaccatccctggtttctccatctgtaaattgattaaaacactgcctatctaataagattaaataagttagaagcattcagttaaatgtcaactgaaactattgttcatgtaaattgtgcttgatgctttttctttctagattcaatgattattgtcattttacctccataggccctcaatagaaatcagttgcagagggcagaagcctagatattttcaccttaaaattggagggcgaaagacattg

SEQ ID NO: 36935 - DNA, 180 bp, Homo sapiens
gcgaattgggccctctagatgcatgctcgagcggccgccagtgtgatggatatctgcagaattcgcccttagcgtggtcgcggccgaggtacacttaaaattggtgccgagcagggatataacctgcagttaagtgaaaagaaaatccagcctccccctccaaaaaaagaaaaaaaaatt

SEQ ID NO: 36936 - DNA, 576 bp, Homo sapiens
tgctcgagcggccgccagtgtgatggatatctgcagaattcgcccttagcgtggtcgcggccgacgtacttggaacctagattataatctagctcctaatcaaactagattctgctccagttcagtttactaagcattccctctaagctgcctcagtgaaaccagtgagagccactggattacaattctaagtgcagctgtgcctaagaaggagagtcccacaggagaggagaccggagggcataaggcaggggatgatacaaaatcctggacagtcatcacatcagtaacacagcttcataaagtggtgggcttggaggaggggagagaaagaaacaaaatgtcccaataatttaatggcagagctagaagagagcatttacagctattttgggactctccaacagaacacttttcctggatgcacagacattcataatactggtaactctcatcaacagctctggcatgtacctgcccgggcggccgctcgaaagggcgaattccagcacactggcggccgttactagtggatccgagctcggtaccaagcttggcgtaatcatggtcatagct

SEQ ID NO: 36937 - DNA, 554 bp, Homo sapiens
actatagggcgaattgggccctctagatgcatgctcgagcggccgccagtgtgatggatatctgcagaattcgcccttagcgtggtcgcggccgaggtactacatatgcagaatctgatacaatgttaatagactgattaaaatcttgttaacactgtaatgacggcaaccaactctgctctttgagtcaagtgatactgagttttgatgactcattcttttggcccggtgtaagccacttttccattgctggaaccatcagtaaacactgccagagcattttttaaaggcttatgtttggtaactttaggtaaaatccaagtagtcaattttaaaaactggaagatttttgttttggggtgacgattgtcaataattcccacaaaatcggcaagaccaatctgccatgcaccagaattgataaaggcttgtctaacctgttgcttgttgaaaggaacagtgattttatctgggtcatttccacacaatgttattattcataatcttccctgaccaattaatgtagccatttgatccaagtacctgcccgggcg

SEQ ID NO: 36938 - DNA, 462 bp, Homo sapiens
ctactatagggcgaattgggccctctagatgcatgctcgagcggccgccagtgtgatggatatctgcagaattcgcccttagcgtggtcgcggccgaggtacattctctaaagtcacctgtcaataacacactaggcctgcctcctgcctgctataaatatcctcaacaggttataaacagcagcaggctacccgtgttcattgcaaggtaaatactcatcatttgtaggttaaaagcataggcccgacttcttaaataaacatagggaatttgctgcagcagcaggccagaaaccactgtttcaaatctgcaagattttcctatcaggtgggaagacagagataagaaatatggtaaggcctgaaaaattgcaaaagtagaagcaagtcaggtttgctgatctaagagctaagtttgatcccaaatgcactgaagaagttagaggagcttaaagaagtctc

SEQ ID NO: 36939 - DNA, 199 bp, Homo sapiens
taattgggccctctagatgcatgctcgagcggccgccagtgtgatggatatctgcagaattcgccctttcgagcggccgcccgggcaggtacttctccatggagcagcctgaggcgatccctttattctgggcttctcttataaatggattcccacacagtatttcaaagcaaatttccccagaggaaaatcctatttg

SEQ ID NO: 36940 - DNA, 496 bp, Homo sapiens
gcgaattgtgccctatagatgcatgctcgagcggccgccagtgtgatggatatctgcagaattcttcctttcgagcgttcgcccgggcaggtacccaaaaagcagccaggaatatgtcataccagggctttaccaaagacaatggcgtggtgcctgttgttaaggaattaatgggggaggaaattcttggtgcatcactttctgcacctttaacatcatacaaggtgatctatgttctcccaatgctaactattaaggaggataaaggcactggtgtggttacaagtgttccttccgactcccctgatgatattgctgccctcagagacttgaagaaaaagcaagccttacgagcaaaatatggaattagagatgacatggtcttgccatttgagccggtgccagtcattgaaatcccaggttttggaaatctttctgctgtaaccatttgtgatgagttgaaaattcagagccagaatgaccgggaaaaacttgc

SEQ ID NO: 36941 - DNA, 452 bp, Homo sapiens
ggcgaattgggccctctagatgcatgctcgagcggccgccagtgtgatggatatctgcagaattcgcccttagcgtggtcgcggccgaggtactttggtgttgcttcatactcttcaagtagatgaaagctcctggtaggaactgagcgcagcattagtgcctaataaacatgtattgtttatttatttttaatcagctgtagaacaagactgcttatgacccagttattagctgcacggattaccgacatctttcaaattataatttaataaatcttaggaactcacatttattttgcaagaatacttgtatgcttattttgccaccatgcataactgcaagaaccccacccctcaatctattttctgcctcagttcaataagagattcccctgaaaatctttccatccctgccacttgttgcccctaacaaagcaacttgaaggttttaa

SEQ ID NO: 36942 - DNA, 533 bp, Homo sapiens
gactcactatagggcgaattgtgccctctagatgcatgctcgagcggccgccagtgtgatggatatctgcagaattcgccctttcgagcggccgcccgggcaggtacgatggtccagatgaccagtcaacagagggacaagcaggccacaacttttcaaagctagaaaaagagattcggcaatgtatatttttagtgcttgagtcttttatcattctatccccagaattagctttttcttggctagagtccagaaatatcaacctaccatctgggcagagaggaattcttattattaccacagattggaagaatgtatctcaggaatttattgtttccgtatcacaagatagaatttccttgcctggaagccatctctgaatacaaagcgtccattcagttagtcagtgtgagattcccccaccagagggataaatgctgtctagattccatgggaaggagtgggctgctgctttcctgattgcagttttggttgagaaggttgttcttccctgctgagatggctggctgact

SEQ ID NO: 36943 - DNA, 460 bp, Homo sapiens
ccctctagatgcatgctcgagcggccgccagtgtgatggatatctgcagaattcgccctttcgagcggccgcccgggcaggtaccttatggatgacttcacaagagatccactgtatatcctggacaacaaccacacacatttgctgctcgtggacaatggctgtcatggacatcccactgtcgaaacaaagctccggaatcagctagagaagtatatctctgagcgcactattcaagattccaactatggtggcaagatccccattgtgtgttttgcccaaggaggtggaaaagagactttgaaagccatcaatacctccatcaaaaataaaattccttgtgtggtggtggaaggctcgggccagatcgctgatgtgatcgctagcctggtggaggtggaggatgccctgacatcttctgccgtcaaggagaagctggtgcgctttttaccccgcacgg

SEQ ID NO: 36944 - DNA, 447 bp, Homo sapiens
tatagggcgaattggagctccaccgcggtggcggccgaggtacttgttagccacttgtgtatcttctttggagaaatgtctatgcgaatcctttgcccatttttaaattgggttatttggctttttattgttgagttgtctggataaaaatcccttgtcaggtgtatgatttacaaacatttttttctcattctatgggctgtcttttcacttacctgatgtcctctgaggcccaaaaatgtttaatgctgatgaaatccaatttatgtatttctggtatttgtgcttttggtgtcatatctaatgaaacattgcataaaggtcttcagttttgaatggaagatattttttaaaaattctgttattaaattttatatacaaatgatatcatataaataaacaaacatacccacatcttgcaaaacaattaagaattcagattctggt

SEQ ID NO: 36945 - DNA, 448 bp, Homo sapiens
actactatagggcgaattggagctccaccgcggtggcggccgaggtacatgctatggtattaagtcaaaggaaatctgagatctctgaatcatttacagacacactccaatttcctcctggaacatgcagttgccatttgggggcatgggttggtgagaggagggagaaaaggagggaagatgggagagggcaccagggctgcatgtaaagctctgcctcacactgtcagttgttttcagctcactgcatgaactctgtagagagaccagataatttcacaaagcttaccttaatttgcaacctacctagaggagacatggtcaggcagctggatggtgattcttttccagcttgagctgttgacagagttgtagatggtggcttcatggaactggaaaggggagcagccaatgctgttagaagaggaaggaaggcactgggtctgta

SEQ ID NO: 36946 - DNA, 446 bp, Homo sapiens
ctactatagggcgaattgtagctccaccgcggtggcggccgcggccactgtaaccaagaaagtggctaagagcccaaagaaggccaaggttgcgaagcccaagaaagctgccaaaagtgctgctaaggctgtgaagcccaaggccgctaagcccaaggttgtcaagcctaataaggcggcgcccaaaaagaaataggcgaacgcctacttctaaaacccaaaaggctcttttcagagccaccactgatctcaataaaaagagctggaataatttctttaaaaaaaaaaaaaataaaaaaaacaaaagttacctcggtccgcttctaagaactaggtggattcccccggggctgcaggaaattccgatatcaaagcttattcgatacccggtcaaccttcaagggggggggccccggtacccagctttttgttcccctttagtgagg

SEQ ID NO: 36947 - DNA, 427 bp, Homo sapiens
tatagggcgaattggagctccaccgcggtggcggccgcccgggcaggtacattccttatgagggctttcttcctcagtgttctctttagagggtcgagcggccgcccgggcaggtacgcggggacatcaatgcagagtccctctgtgaatttacaacacccaacacccatgagttcagtccttaagaaggaaaattgagcaagtatttaattggttggacattgcataaaagaggtccatatccaggctaactctagaaattttattctcaaacttagttggcctctttttcttctgtcagaggaccattcttagtggcactggggaaatcttggcacccagaagaattcaactgcgctcactgcaaaaatacaatggcctacattggatttgtagaggagaaaggagccctgtatttgtgagctgt

SEQ ID NO: 36948 - DNA, 417 bp, Homo sapiens
gcggccgaggtacaacctgttgctagatttaatcaaaaatgcgttagagtctaacaatcctctcctccctggtcacattatcttttccactatatttggaggtccacagagtgtaaactagcagatctgagaactatggatagctctacaaagaggtgtttgccaattggcaaggtttggaaaagacgtaaggttacagttttactgaaagaagaatgagattttattaaatgacagaattaacatatgaaaatgaacactatcttaggaaaagaatacatacctacacacacacacacacacattttcatggttgtttccttgaatatgggtaggattttaaggaagatacttgcagtagaattttagtgttatggggaaaaaattacagcaccacattggcctcaaacttaggga

SEQ ID NO: 36949 - DNA, 378 bp, Homo sapiens
gtatacgactcctatagggcgaattggagctccaccgcggtggcggccgaggtacacagtccaggctctccaaacggaactctacagacagccgccccgtaagtgtcacgtatcggtttggttccgtgggccaggacacacagctctgtttatgggaccttacagaagatatccttttccctcaccaacccctctcaagagcaaggacacacacaaatgtcatgaatgccacgagtcctcctgctggaagcaatgggaacagtgttacaacacccgggaactctgtgccgcctcctctgccacggtccaacagccttccacattcagcagtctcaaatgctggcagcaaaagcagtgtcatggacggggccattgctt

SEQ ID NO: 36950 - DNA, 367 bp, Homo sapiens
  misc_feature 340, 341: n = A,T,C or G
tacgactactatagggcgaattggagctccaccgcggtggcggccgctgagtgaggcgtcggctgtgtttctcaccgcggtcttttcctcccactcttggctggttggaccccgctatggaaaagttggcccctgagccagagctccagcagccttgttagggcgtggcctgaggctttgattaagtggggatgtaaaacgaagaatcaggagcagatttgaagaattacaaagtgaattggtgccagtcagcatgttcagagaccagaccacaatttagcctctactttccttctgataagaaatgtttggtggaaaacaccctgaattttaaagggannagacttcatgcaaactttgttttttc

SEQ ID NO: 36951 - DNA, 324 bp, Homo sapiens
  misc_feature 246, 271, 283, 284, 292, 293, 303, 304, 305: n = A,T,C or G
actactatagggcgaattggagctccaccgcggtggcggccgaggtacaaagagtagctgccccttctcagggcagatgatgctttgagaacatactttggccattacccccagctttgaggaaaatgggctttggatgattattttatgttttagggacccccaacctcaggcaattcctacctcttcacctgaccctgcccccacttgccattcgagcggccgcccgggcacgtacgcgggcancccacttccacttttccttccacangatgcccctctnntctgtgcnncttaagcagnnnagtcaggagtaaaccccaa

SEQ ID NO: 36952 - DNA, 446 bp, Homo sapiens
ggcgaattggagctccaccgcggtggcggccgcccgggcaggtacttttttttttttttttttttttttttttgtttttgaaaggccactttattgatggagataaaactgaatggagttccccacagcccttccctcacttatgttagtggcttcactgggcatctgagaccagcgtggcctgtttacccacattgactaggctgcttagcccacccagcctatcacactgcccgcttcccgttgggcacccacataaaaacacgtcacagctcaagaagatccgtggatgcacctctgaatcccccccaatggtttttgtgcatttttttaatattgtaccttggccgttcttgaactagtggatcccccgggctgcaggaattcaatattaagcttattagataccgttgaccttgagggggggcccggtacccaacttttgt

SEQ ID NO: 36953 - DNA, 454 bp, Homo sapiens
actactatagggcgaattggagctccaccgcggtggcggccgaggtactaactcatccagtatctgattctgtcttttcctctatccatctgtcttccatctttgcatccatcattcaacgaaatttacagcctatgcagatgttctgtggtcttaaacatgttgtattcctctttgccttggccatgcttcctcccctcccagccgttgttctcccccacgagaatatcttctcttttctgcttcttagtggttctattctcagtatctgaaactctcattttctgtgaagttttcccaggtggttccccgcgtacctgcccgggcggccgctctagaactagtggatcccccgggctgcaggaattcgatatcaagcttatcgataccgtcgacctcgagggggggcccggtacccagcttttgttccctttagtgagggttaattgcgcgc

SEQ ID NO: 36954 - DNA, 434 bp, Homo sapiens
tattgggcgaattgtagctccacctcggtggcggccgcataatttaataacatcgtccttccatttggccgcgactgctctggaaaattggttcagtagtaaacagaattctagcaggtggaacaagaacaggcgaggcatcctgggcctggtctctcctggaggtctgggtgttgcagcctttcaggactgcggctgctgtggcctacacacctgggcctgtgtgcctgtcccgggctttaggctgctttccctacccggctcaaccagtctcccgcgtacctcggccgctctagaactagtggatcccccgggctgcaggaattcgatatcaagcttatcgataccgtcgacctcgagggggggcccggtacccagcttttgttccctttagtgagggttaattgcgcgcttggcgtaatcatggtcatagc

SEQ ID NO: 36955 - DNA, 446 bp, Homo sapiens
tatagggcgaattggagctccaccgcggtggcggccgaggtaccttccgtgttcacttcgcgctcctggggatactagaagctccacttcagatccttcttgtgacaccatctgagcttcctccaatagataagaaaaaaggcagaggatacactacagttatcagttcccgtcttccccgcgtacctgcccgggcggccgctctagaactagtggatcccccgggctgcaggaattcgatatcaagcttatcgataccgtcgacctcgagggggggcccggtacccagcttttgttccctttagtgagggttaattgcgcgcttggcgtaatcatggtcatagctgtttcctgtgtgaaattgttatccgctcacaattccacacaacatacgagccgggagcataaagtgtaaagcctggggtgcctaatgagtgagctaactc

SEQ ID NO: 36956 - DNA, 430 bp, Homo sapiens
  misc_feature 320: n = A,T,C or G
gcgctatacgactactatagggcgaattggagctccaccgcggtggcggccgaggtacaagatgtgttactatcgctttggacaggtttacacagaagccaagcgtcctccaggctttgaccgtgtcccgaaatgctgagattgggaataaagactttgagcttgatgtcctggaggaagcatataccacagaacattggctggtcaggatatacaaggtaaaggacctggataatcgaggcttgtcaaggacataaatgtcacgtccagctctgatatgcttcgcactgagcacatcacatttaggacgttgaagattntttttttttttttttttttaatatgcagtttgtaagaacaaaactggatggcatcagaattgtggggaagtttttgtcttggggcagtatggggctggggccaaatgaaa

SEQ ID NO: 36957 - DNA, 275 bp, Homo sapiens
tcactatagggcgaattggagcctccaccgcggtggcggccgcccgggcaggtacttgatagactttcattgatttcacttccaaatctcggtggtcaaggaagctttattcttttttgcaggaaggtttgctcttcagtcatctagccactaaatgttaattatctgatacttttgaaacagatatgaaaaaaagtggcctccatataaaaagacatactgcacttcaagggttggtttttgttgattttggtttttggcctgatttcttgtag

SEQ ID NO: 36958 - DNA, 436 bp, Homo sapiens
tatagggcgaattggagctccaccgcggtggcggccgaggtacatttggtggaactgagaaatggcataacaccaaatttaatatatgtcagatgttactatgattatcattcaatctcatagttttgtcatggcccaatttatcctcacttgtgcctcaacaaattgaactgttaacaaaggaatctctggtcctgggtaatggctgagcaccactgagcatttccattccagttggcttcttgggtttgctagctgcatcactagtcatcttaaataaatgaagttttaacatttctccagtgatttttttatctcacctttgaagatactatgttatgtgattaaataaagaacttgagaagaacaggtttcattaaacataaaatcaatgtagacgcaaattttctggatgggcaatacttatgttcacagg

SEQ ID NO: 36959 - DNA, 430 bp, Homo sapiens
tttacgactactatagggcgaattggagctccaccgcggtggcggccgaggtacgtgttaatagaggctagtttgggtcttgcagaaatgatttcatttgggatgctttggttgtcattggggggcttggttgttggagacgtgagtcttgccgaagatcccggccgctctagaactagtggatcccccgggctgcaggaattcgatatcaagcttatcgataccgtcgacctcgagggggggcccggtacccagcttttgttccctttagtgagggttaattgcgcgcttggcgtaatcatggtcatagctgtttcctgtgtgaaattgttatccgctcacaattccacacaacatacgagccgggagcataaagtgtaaagcctggggtgcctaatgagtgagctaactcacattaattgcgttgcgc

SEQ ID NO: 36960 - DNA, 450 bp, Homo sapiens
ctcactatagggcgaattggagctccaccgcggtggcggccgtgcgagccctctgccagatcactgatagcaccatgctgcaggctattgagcgctacatgaaacaagccattgtggacaaggtgcccagtgtctccagctctgccctcgtgtcttccttgcacctgctgaagtgcagctttgacgtggtcaagcgctgggtgaatgaggctcaggaggcagcatccagtgataacatcatggtccagtacctcggccgctctagaactagtggatcccccgggctgcaggaattccatatcaagcttatcgataccgtcgacctcgagggggggcccggtacccagcttttgttccctttagtgagggttaattgcgcgcttggcgtaatcatggtcatagctgtttcctgtgtgaaattgttatccgctcacaattccccacaacata

SEQ ID NO: 36961 - DNA, 387 bp, Homo sapiens
gcgaattggagctccaccgcggtggcggccgcccgggcaggtaccgtcttatattttcctgcctggcaagagggtttttatgggaggcgaatatgaggaagaaaaggtggtttggatcaagagatgatgatgattgcaggcatctgggcgccagctagggtccaaggaagttgggatcttctttgtccttggtcaggtcacagtgatcctgtaagtctttaacaaaacgtagccaattgtttatcccgcgtacctcggccgctctagaactagtggatcccccgggctgcaggaattcgatatcaagcttatcgataccgtcgacctcgagggggggcccggtacccagcttttgttccctttagtgagggttaattgcgcgcttgg

SEQ ID NO: 36962 - DNA, 396 bp, Homo sapiens
attggagctccaccgcggtggcggccgaggactccacctagtatagacattaggctgggttgaagatgttgttgttgtagctggggtctaggaactaagaatggcagaggaacagttaaatcaactttgtcagggtgtttctggaatatagggtcacctagatcagttaaaggcccgattggcttggggggggctccatgagaccaagattttcttttggatggtgaacatagtcccaacatcaaatcctgggatataaagtcttaatccccatgacatgccataataccattgagctgaattagcgtcatggacagttatagtaagaggattacaattttttctagtacctgcccgggcggccgctctagaactaggtggaatcccccgggctgc

SEQ ID NO: 36963 - DNA, 403 bp, Homo sapiens
  misc_feature 281, 292, 293, 336, 352, 353: n = A,T,C or G
gactcactatagggcgaattggagctccaccgcggtggcggccgaggtacaatgcacagtgttaaaaaaattactgtaacagcctcatgttcgagaagtctaaaattttaaggctactacatgtgttaattttcagtacctgcccgggcggccgctctagaactagtggatcccccgggctgcaggaattcgatatcaagcttatcgataccgtcgacctcgagggggggcccggtacccagcttttgttccctttagtgagggttaattgcgcgcttggncgtaatcatgnngtcatagctgttttcctgtgtgaaattgttatccgctcacaanttccacacaacatacnngagccgggagcataaagtgtaaagcctggggtgcctaatgagtgagctaa

SEQ ID NO: 36964 - DNA, 459 bp, Homo sapiens
tacgactcactatagggcgaattggagctccaccgcggtggcggccgcataatttaataacatcgtccttccatttggccgcgactgctctggaaaattggttcagtagtaaacagaattctagcaggtggaacaagaacaggcgaggcatcctgggcctggtctctcctggaggtctgggtgttgcagcctttcaggactgcggctgctgtggcctacacacctgggcctgtgtgcctgtccccccgcgtacctgcccgggcggccgctctagaactagtggatcccccgggctgcaggaattcgatatcaagcttatcgataccgtcgacctcgagggggggcccggtacccagcttttgttccctttagtgagggttaattgcgcgcttggcgtaatcatggtcatagctgtttcctgtgtgaaattgttatccgctcacaattccacacaacatc

SEQ ID NO: 36965 - DNA, 259 bp, Homo sapiens
actactatagggcgaattggagctccaccgcggtggcggccgaggtactttttttttttttttttttttttgggttgggtcaagcactgctttaagtgctctttgtgcatttattcaatacttgccacacactgtcattgttgtcaacacccccattttacagatgagcaggattgagcttttccccaagggcacatggctggtgaatagagacgcctttcaatccaggaacctctggcttccaaatgtcattgcctgg

SEQ ID NO: 36966 - DNA, 420 bp, Homo sapiens
cgactcactatagggcgaattggagctccaccgcggtggcggccgaggtaccttccattccagtggagggagaaggatcatggaagccaagcaaatagcttgttcactccaaaaaggcctaggcccagccaccacctctcaccttaaccattgcaataacttaactggtgtccctgctcctacccttctgctgtcctatcaacacagcaaccagagtaatttgtataaaacacaaatataacagaaacacaaaacctcttccccaactttaaaccttctagtcacttcccatagctctttgaataaaattccaaacccattcccatggcctacagacctctgtatcatcaggtccttcccaccatgcaagatcttcctggtctccctcggctgcagccacacaaatctcccctctgtttt

SEQ ID NO: 36967 - DNA, 438 bp, Homo sapiens
tactatagggcgaattggagctccaccgcggtggcaagaaggaaaaaccttgtttttggagtatcaggctgttccagtaatattaagtcatctaagaatatccagtaaaggactcctgtctaatgttattgatagtttgctccagatgacggtggaatctaaatccttgcagcctttcctggagcctgtaacaactctttattttttcgtacctcggccgctctagaactagtggatcccccgggctgcaggaattcgatatcaagcttatcgataccgtcgacctcgagggggggcccggtacccagcttttgttccctttagtgagggttaattgcgcgcttggcgtaatcatggtcatagctgtttcctgtgtgaaattgttatccgctcacaattccacacaacatacgagccgggagcataaagtgtaaagcc

SEQ ID NO: 36968 - DNA, 427 bp, Homo sapiens
  misc_feature 346, 347: n = A,T,C or G
cgactcactatagggcgaattggagctccaccgcggtggcggccgcccgggcaggtacgcggggagggtagagtgagaagcaccagcaggcagtaacagccaacccttagccattgctaagggcagagaactggtggagcctttctcttactcccaggacttcagcacctaagacagctccaaaacaaaccagaacagtcagctccgggggagcacgactgggcgagaggcacagaaatggacaccagtaaataagggcccagactccttgtgtctgcctgacatctatctcagctgtgcctgcttctcacagcacattcggacatgcgcctctcttacaggagcnnaccttctgcatcgtcagggttgaggtcgcacagaataccctttgaggggagccaaatgacaccttgatcaagttttcatt

SEQ ID NO: 36969 - DNA, 314 bp, Homo sapiens
atacgactcactatagggcgaattggagctccaccgcggtggcggccgcataatttaataacatcgtccttccatttggccgcgactgctctggaaaattggttcagtagtaaacagaattctagcaggtggaacaagaacaggcgaggcatcctgggcctggtctctcctggaggtctgggtgttgcagcctttcaggactgcggctgctgtggcctacacacctgggcctgtgtgcctgtcccgggctttaggctgctttccctacccggctcaaccagtctccccgcgtacctcggccgctctagaactag

SEQ ID NO: 36970 - DNA, 417 bp, Homo sapiens
gcgaattgtagctccaccgcgggggcggccgcccgggcaggtaccggggagaagaaatagcaaggggccctaaaacctggcatcagaaaaccagaggggagatttgtgtggctgcagccgagggagaccaggaagatctgcatggtgggaaggacctgatgatacagaggtgagaaataagaaaggctgctgactttaccatctgaggccacacatctgctgaaatggagataattaacatcactagaaacagccagatgacaatataatgtctaagtagtgacatgtttttgcacatttccagcccctttaaatatccacacacacaggaagcccaaaaggaagcacaggagatccctgggagaaatgcccggccgccatcttgggtcatcgatgagcctcgccctgtgcctggtc

SEQ ID NO: 36971 - DNA, 167 bp, Homo sapiens
gggcgtttggagcaccaccgcggtggcggccgaggtactgacgtatgaggaatttcatcctttctttttttctcaacattcacaatgtccatatatagaatttgaatcatttgacaaggcaggtggatgaatttttatttccaagaatagaaggcccagaaaatttg

SEQ ID NO: 36972 - DNA, 405 bp, Homo sapiens
ctcactatagggcgaattggagctccaccgcggtggcggccgaggtacaacaccatctgacttctctattttgaaactccacaccaggttaatcttgtccatggctgtggcttaaatctaaagtcaggttctggtgttttctggaatccatgcctagctctttgattctgaaaccaaatctggattctggactcttctgcattgattgctaaagcaagtttttgtttggtagcaaaacctgggtaaggtttttgagtgaaggtattgatgaggattttcaattgatcttctgtgaatttggtgcaattgcacctatgatttgttgctaccatcttgtgtgaagaggggtcttcaactatgcagaaagagagttctggaggctgagctactgtctgggagactgct

SEQ ID NO: 36973 - DNA, 435 bp, Homo sapiens
ctccaccgcggtggcggccgaggtactatttattctgtttaccagacatatagcattcggtcagggagtcttcatagcctgttgcgtcatgtgattccattccagatttttccttttattcctgtctccaaggccccattgtgcaggtgctactaattttcatgaaatgatactaggaggtaaagaaagttcgctggctctcagatatccatcgtgagccacgcgtgtgctgtggttacatccgtggaacagacagacagcagtgcctgatcttgtaattcttccatcctttcattcctttctctcagtctcgtagctgatccacagattgcaacgtacgcgggaactactaaggcctgagcccccttgaccccttgattgccctcactggccttacagcattagtgggggaaaaaaaaatcttctttcaagctt

SEQ ID NO: 36974 - DNA, 464 bp, Homo sapiens
  misc_feature 241: n = A,T,C or G
actcactatagggcgaattggagctccaccgcggtggcggccgaggtacaggggctggagacggggtgggaagtggggcaaacactttagatgagcacagtagctcctgctagctggggcatcagggcactcaccatgtccctgcacaagatgctcacccactccaccttcccatcctggagctgcacaaattgtcccttttcttggagttgatgcaatgtgtctctgtgttagatatgangctcccaactgtggcccaaggacttggggatgatggaggcttgcagggctcttgcctaaagccaggttttaaaatccctgtgttctatttttaccagccaggtgaaggaaatgaagaggtcgtagttggagaaatgtctccagttaaagacagttcagttcacggggacaagctgtattcctcaggacccaagcctgtcattcgattaagatccaaagccctg

SEQ ID NO: 36975 - DNA, 442 bp, Homo sapiens
actactatagggcgaattggagctccaccgcggtggcggccgaggtactactgaatccaactgccaacaataaaaagacttttatttagtagaggctacctttcccaccagtgactctttttctacaactgccttgtcagtttggtaattcacttatgattttctaatgttctcttggtgaattttattatcttgtacctgcccgggcggccgctctagaactagtggatcccccgggctgcaggaattcgatatcaagcttatcgataccgtcgacctcgagggggggcccggtacccagcttttgttccctttagtgagggttaattgcgcgcttggcgtaatcatggtcatagctgtttcctgtgtgaaattgttatccgctcacaattccccacaacatacgaaccgggagcattaaagtgtaaagcctggggtgcct

SEQ ID NO: 36976 - DNA, 404 bp, Homo sapiens
atagggcgaattggagctccaccgcggtggcggccgggtatggtgactcatgcctgtaatcctagcactttgggaggccgaggtgggtggaccacctgaggttaggacttcaagaccagcctggccaacatggtgaaaccccatctgtacgcggggactggttgagccgggtagggaaagcagcctaaagcccgggacaggcacacaggcccaggtgtgtaggccacagcagccgcagtcctgaaaggctgcaacacccagacctccaggagagaccaggcccaggatgcctcgcctgttcttgttccacctgctagaattctgtttactactgaaccaattttccagagcagtcgcggccaaatggaaggacgatgttattaaattatgcggccgctctagaa

SEQ ID NO: 36977 - DNA, 441 bp, Homo sapiens
tatagggcgaattggagctccaccgcggtggcggccgaggtactagaaaaaattgtaatcctcttactataactgtccatgaccctaatgcagctcaatggtattatggcatgtcatggggattaagactttatatcccaggatttgatgttgggactatgttcaccatccaaaagaaaatcttggtctcacggagctcccccaagccaatcgggcctttaactgatctaggtgaccctatattccagaaacaccctgacaaagttgatttaactgttcctctgccattcttagttcctagaccccagctacaacaacaacatcttcaacccagcctaatgtctatactaggtggagtacctgcccgggcggccgctctagaactagtggatcccccgggctgcaggaattcgatatcaagcttatcgataccgtcgacct

SEQ ID NO: 36978 - DNA, 400 bp, Homo sapiens
gcctaacactactatagggcgaattggagctccaccgcggtggcggccgcccgggcaggtacagaaatgacacagataaaaatactcatgagcgcaatgtctggagataagcatttcaaagtctgtgccctttttttgtctaccccagtctgcctcttgtgaaccccttcacaggactgaaagcaaaaagcacccgagacaaaacagtcagcatggatttccaggtgagtacctcggccgctctagaactagtggatcccccgggctgcaggaattcgatatcaagcttatcgataccgtcgacctcgagggggggcccggtacccagcttttgttccctttagtgagggttaattgcgcgcttggcgtaatcatggtcatagctgtttcctgtgtgaaa

SEQ ID NO: 36979 - DNA, 422 bp, Homo sapiens
actatagggcgatttggagctccaccgcggtggcggccgaggtacaccaaatgagatactatttggaaaggcaatatagggagtgtaaaagcctaggtagcttaaatacaggctctggaatttccttcgcaggaaggtgaagcaccaatgatggcaaaaattaaataaatacatcatcttaaaaaggcagagggtaggctgcgtgcagtggtttacgcctataatcccagcactttgggaagccaaggcgggcacattgcttgagctcaggagtttgagaccagcctggacaaccccatctctacaaaaaaataaaaatcggccgctctagaactagtggatcccccgggctgcaggaattcgatatcaagcttatcgataccgtcgacctcgagggggggcccggtacccagcttttgttc

SEQ ID NO: 36980 - DNA, 396 bp, Homo sapiens
cgactactatagggcgaattggagctccaccgcggtggcggccgaggtactttaattagaacaaaagaccgacattaacttcaatgcaacataataattcataataatgattgtatattaatctcttgagcttgcaggaatatagcacatgacatatgacatgatacaggcacctgtgtgatcctttggggacttaggtggtgcatattaattagcccctggaaaataaaatctgtttccttctgagaaaagctacctcagtgcttattggcttaagccatcaaagaaattagatgaaatactgttaggctgggtctgcactcattaaagctttgtctagatgtaagcactgaatcaactgcctctgagttaagtcttgactgaatggtgcataag

SEQ ID NO: 36981 - DNA, 406 bp, Homo sapiens
actactatagggcgaattggagctccaccgcggtggcggccgaggtaccagcatcacctccatcttgactagtgccagcttcagccaataaatttgcattcacattcctatcaccatctggccccgagagtagagcaccatctaaatctggttcttccttgatgagtagtgtattttcttctggataggcaacaggtggctgcattactgagcaatcttctaaattcgtttcattattaggtggaatattataaataaatctttttgtagtttggtttttcctccttgttttgccagtctcttgaattccctgggagcccatattattccaaataaacacttttgtttgaccttcagattcattttcagccatttcaggagatccatcctggacccaactactgtc

SEQ ID NO: 36982 - DNA, 346 bp, Homo sapiens
actactatagggcgaattggagctccaccgcggtggcggccgcccgggcaggtaccgtgtgagctcagctctagagggtttcacaaacactgggtttcctgatcctcacgaatcccccatgagagctgccctaaaagcagagaggcagcgtgatggaaaggttcagcacatgctctctgatcccaggaaatcctgggtatggtgtttcgtatctgtgtgacctcaggtgagttccaggaactctatgtgccataatctcctcatgtaaaatgaagttataatggccccgttttcctgggagtttatgtgggattaagattgaggttaattgaacacctgggcacat

SEQ ID NO: 36983 - DNA, 441 bp, Homo sapiens
cgactactatagggcgaattggagctccaccgcggtggcggccgcccgggcaggtactgcagccacaggctggctcttcccaaggggcctcttctgggctctctgtagttaaagttctgagtgccagtgaagtggcagctttgtcatcaccagcaagctctgctcctcattcggggggaaagacaggaatggaggaaaaccgcagattggaacaccagaagaagcaagagaaagcaaatcggattgtagcagaggccattgcgagagcccgtgcccgcggtgagcagaacatacctcgagtcttaaatgaggacgagttgcccagcgttcggccagaggaggaaggcgagaagaaacgcatgaagaagagtgctggggagaggctgaaagaggagaagccaaagaagagtaaaacatctggtgcctccaaaacaaagggca

SEQ ID NO: 36984 - DNA, 387 bp, Homo sapiens
tacgactactatagggcgaattggagctccaccgcggtggtcgagcggccgcccgggcaggtacgtctccactctgacagatcaggtgaccctcctcatcatcctctacactcctggttcttttccttcggtgactcttcccatgtgaacgacgatgtgaagtactttttttttttttttttttttttcggggtttaattttcctttcctctacctgcattcccaagtaacggaaaggagtagaggtttgaatcttatcagatgttattgtcagtcccgcgttggcaacctctgtctgcagaaatgtgtaacggccaattaatttgtctctcgtttctgcagcacacaaaatatcaacatagtgaacgatgtaacagtctgaaaact

SEQ ID NO: 36985 - DNA, 456 bp, Homo sapiens
atagggcgaattggtgctccaccgcggtggcggccgcataatttaataacatcgtccttccatttggccgcgactgctctggaaaattggttcagtagtaaacagaattctagcaggtggaacaagaacaggcgaggcatcctgggcctggcctctcctggaggtctgggtgttgcagcctttcaggactgcggctgctgtggcctacacacctgggcctgtgtgcctgtcccgggctttaggctgctttccctacccggctcaacccctgcgtacctcggccgctctagaactagtggatcccccgggctgcaggaattcgatatcaagcttatcgataccgtcgacctcgagggggggcccggtacccagcttttgttccctttagtgagggttaattgcgcgcttggcgtaatcatggtcatagctgtttcctgtgtgaaattgttatccgct

SEQ ID NO: 36986 - DNA, 475 bp, Homo sapiens
atacactactatagggcgaattggagctccaccgcggtggcggccgaggtacatctctagatgatcacgaatgtcaaatatcacactacactgtgatatggggattccccttgggggttttcatgtgtatagggtgcctgcagctacactaaacatcttaaagctaccacaatgttcacttcatatttttgctttttataggcttttcttggtctcctcctatgttcccatcattttcttgctttgaatctgtaagaatcgagttgaatcttctccattttaaattttccataggctgagaaactgtttagccaagtttggataaaattgtatccaaagtaagagtatacaagctatgggcaagtccaaaatcaagctgttcacaggaccatgttctctctaaaggttctaggagagaatccctcatttccttccagcttctgggtggctgctggcattcctgggccggtggctg

SEQ ID NO: 36987 - DNA, 165 bp, Homo sapiens
tatagggcgaattggagctccaccgcggtggcggccgcccgggcaggtacttcccgtgtctttgaagctgtctcagcttggactttctttgtctcctcctgtaatgtctgtatttctttctcctgcttttcctttaatatagcaatgtccctcattgcctgcaac

SEQ ID NO: 36988 - DNA, 164 bp, Homo sapiens
tacactcacttagggcgaattggagctccaccgcggtggcggccgggcatttctcccagggatctctgtgcttacttttgtgcttcctgtgtgtgtggatatttaaaggggctggaaatgtgcaaaaacatgtcactacttagacattatattgtcatcttgct

SEQ ID NO: 36989 - DNA, 166 bp, Homo sapiens
attggagctccaccgcggtggccggccgcccgggcaggtacaacatcttacgggaagagcatagtatttcctagaggaatatgaacataacaggaaggtatcattggctctgaattaaatttgaacttgtcccctgaatagttacagggttttggaagctgaatca

SEQ ID NO: 36990 - DNA, 299 bp, Homo sapiens
actcactatagggcgaattggagctccaccgcggtggcggccgaggtacaaaaatatggccatttcctctaaattttctttcccctgtttttttttaaggtctgaatttcctgctgctgttcacaaagatgctttttatctttaactttttgttttccccacttccgaccccggcgttgatctgcatcctgacatttggagctgccatcttcttgtggctgatcaccagacctcaacctgtcttacctcttcttgacctgaacaatcagtctgtgggaattgagggaggagcacggaag

SEQ ID NO: 36991 - DNA, 175 bp, Homo sapiens
attggagctccaccgcggtggcggccgaggtacctgggaaaaggctgtttgtgtcaccaggtggggagaaattcaccttatggtagaattgctctctttggttcattatttctgtgaactcctcaggagacacacactttcgggaggctaggcgtttttggcaggtcttgaatgt

SEQ ID NO: 36992 - DNA, 435 bp, Homo sapiens
cgactcactatagggcgaattggagctccaccgcggtggcggccgaggtaccagaaaaggaatctaaatgtttactttctaaaaataaacacaaacagatttctgaaaaatagggaaaagtttacttgagggttaaaagtaggtaatctagaaactatggcttaaaaacaataaatctacaaaacacaacaagactgacaattatattctaaataatatagagatttttgatcactgaaaacatgactcccacaaactaaagctcttcatatactgcccatttttaagatctgacttggtagaaacacagaaaaataaaaatgcaaaattaactgtttagcattagtttcattcatttaataatgtagacataaccatttttcattgtccctgctagatataaaattattataacacactgcaaaccatcctttt

SEQ ID NO: 36993 - DNA, 471 bp, Homo sapiens
ctactatagggcgaattggagctccaccgcggtggcggccgaggtacatctctagatgatcacgaatgtcaaatatcacactacactgtgatatggggattccccttgggggttttcatgtgtatagggtgcctgcagctacactaaacatcttaaagctaccacaatgttcacttcatatttttgctttttataggctttcttggtctcctcctatgttcccatcattttcttgctttgaatctgtaagaatcgagttgaatcttctccattttaaattttccataggctgagaaactgtttagccaagtttggataaaattgtatccaaagtaagagtatacaagctatgggcaagtccaaaatcaagctgttcacaggaccatgttctctctaaaggttctaggagagaatccctcatttccttccagcttctgggtggctgctggcattcctgggccggtggctgca

SEQ ID NO: 36994 - DNA, 456 bp, Homo sapiens
actatagggcgaattggagctccaccgcggtggcggccgaggtacattaagcaaacttaagtagaaaagaaactgaatatgttaaatatattaacaacatatttggacttgcttaactaagattatagagatgatcagtttataaaaccaccttcaacttaaataaatttgaactcgaaattgcaaaagcagtctagaggctttgctagtatccttcaaccaatttctagtaaaaatatcctatataaccataattatcaaaaccagaaaaacaacattggtaggatactataaagtacctgcccgggcggccgctctagaactagtggatcccccgggctgcaggaattcgatatcaagcttatcgataccgtcgacctcgagggggggcccggtacccagcttttgttccctttagtgagggttaattgcgcgcttggcgtaatcatggtcata

SEQ ID NO: 36995 - DNA, 155 bp, Homo sapiens
atagggcgaattggagctccaccgcggtggcggccgggcatttctcccagggatctctgtgcttccttttgtgcttcctgtgtgtgtggatatttaaaggggctggaaatgtgcaaaaacatgtcactacttagacattatattgtcatcttgct

SEQ ID NO: 36996 - DNA, 392 bp, Homo sapiens
acgactcactatagggcgaattggagctccaccgcggtggcaattaaacctgtgtggcctatataaatgaagttaataacttcatagtaagaataaataggtttaactaatgtgatagttttctaaaaggagattgtttgaagacaactattatgtaactgagggaaaagcaacttaactgtatgtgattgtgaatgagaaagttttgtgctatgtgggtcatttatctagacattgctgtggtgaataccagttatgtttgattttattctcaaatcattagttgcctttttttttttttttttttttgctttctaggaagaaaacaatcttttttatctagaaggaaagatactttgtgttttcatttttagccatttgaagtttttaat

SEQ ID NO: 36997 - DNA, 500 bp, Homo sapiens
  misc_feature 336: n = A,T,C or G
actactatgggcgaattggagctccaccgcggtggcggccgcccgggcaggtacatcagaatttgttttacccactgatgaacaattgaaggtagggtgtctcatttcacaatataaatcttaacactgtgaggtgtgttatactatgtatgtatcttgttttaagtcatggatttacaaaataatttcaacacattttaggctgtttacttatttcaaaacagggatttcatagactgacacaggaataattagttcagtgttcacagtattcctaaataaatatttacttattacatttatgatactttatttaaaataccacattagaaactntaaatatttcataaataaatctctttttttgggggaaactgtacgcgggaaggaaaggttaaaaaaagtaaaaggaactcggcaaatcttaccccgcctgtttaccaaaaacatcacctctagcatcaccagtattagaggcaccgcctgcccagtgacacatg

SEQ ID NO: 36998 - DNA, 430 bp, Homo sapiens
gactcactatagggcgatttggagctccaccgcggtggcggccgaggtaccaaattactgccatgggagtgcacatattaacaaaatgctctacctgctgccaaatggcttactattctgtggaagaaacaaagtatataatcctccccaataacagttatgtattgtttgttcacttaatgtggaaggcaagactgatgcagacacacaaggaaggctcaaaaatataaatctagcagcaatgtcatcttttttgattttaaataccatatgtgcttactgctaatcaggaaatgaacaacctcagtaaaattcatcagtgctggtaaatagtttgctgtagtggaaagctcataacctttggattcaaatgatcctagtttctgtacctgcccgggcggccgctctagaactagtggatcccccgggc

SEQ ID NO: 36999 - DNA, 284 bp, Homo sapiens
ctactatagggcgaattggagctccaccgcggtggcggccgaagtggctggctcatttaagatgaggcttctgctgcttctcctagtggcggcgtctgcgatggtccggagcgaggcctcggccaatctgggcggcgtgcccagcaagagattaaagatgcagtacctcggccgctctagaactagtggatcccccgggctgcaggaattcgatatcaagcttatcgataccgtcgacctcgagggggggagcccggtaccccagcttttttgtttccctttta

SEQ ID NO: 37000 - DNA, 430 bp, Homo sapiens
gactcactatagggcgaattggagctccaccgcggtggcggccgaggtactcagtgcagcaaagaaagactacagacatctcaatggcaggggtgagaaataagaaaggctactgactttaccatctgaggccacacatctgctgaaatggagataattaacatcactagaaacagcaagatgacaatataatgtctaagtagtgacatgtttttgcacatttccagcccctttaaatatccacacacacaggaagcacaaaaggaagcacagagatccctgggagaaatgcccggccgctctagaactagtggatcccccgggctgcaggaattcgatatcaagcttatcgataccgtcgacctcgagggggggcccggtacccagcttttgttccctttagtgagggttaattgcgcgcttggcgtaa

SEQ ID NO: 37001 - DNA, 457 bp, Homo sapiens
tacactactatagggcgaattggagctccaccgcggtggcggccgaggtactgcaactgtaggtaaactgaaaaaaaataagaaagaaagagttggatgaaaatgtgaaagcccaagtttagatgtgcattaagtattaaatagcacagtatcttcttcatggagccttttttcctcccccatcccctgcagctgccttttttttgggggcagggtgggggttgatgttgaactttaagagtttaaaagtttagcttattgagtagttgtcatttaaaatataattgcgaatatcagaaaactcatactggaaaactaaattttttttttctcttgagacggagtctcgctctgttgcccaggctggagtgcagtggcgcgatctcggctcactgcaagctccacctcccgggttcacgccatccttctgcctcagcctcctgagtagctgggacta

SEQ ID NO: 37002 - DNA, 417 bp, Homo sapiens
gggcgcggtacattaagcttatttaagtagcaattttaaccgcatatggtatatatattaacaacatatttggacttgcttaactaagattatagagatgatcagtttataaaaccaccttcaacttaaataaatttgaactcgaaattgcaaaagcagtctagaggctttgctagtatccttcaaccaatttctagtaaaaatatcctatataaccataattatcaaaaccagaaaaacaacattggtaggatactataaagtacctgcccgggcggccgctctagaactagtggatcccccgggctgcaggaattcgatatcaagcttatcgataccgtcgacctcgagggggggcccggtacccagcttttgttccctttagtgagggttaattgcgcgcttggcgtaatcatg

SEQ ID NO: 37003 - DNA, 423 bp, Homo sapiens
gtaatacgactcactatagggcgaattggagctccaccgcggtggcggccgcccgggcaggtacgcgggggttggagaaaactaaacaatttgttataaaacatccttaaaagcatcagaaagttaatacagcaatgaagaattacaggaccaaattaagaatgcaaccaggttgccaagaactgagtgatgtgtccacatcccgggagagagaagccaccaaaagctggaagagctaaatcagactgctccctagagcttcagaaggagccagaactgatgactccaagatcttagcccagtgaaactgatctggacttctgaactatgagagattccattcctgttgtttgaagctaccacattattgagaacttgttacaggagcccgaggacactaacacaaatggggcttcgggaaaa

SEQ ID NO: 37004 - DNA, 386 bp, Homo sapiens
ggcgaattggagctccaccgcggtggcggccgagtttgatttcttgcagtcctgagcgatggagcccgggggtgcctggttattgtccgctttctctctcagatgcttggcttgtttttcaagagaacctttttcgatattcattgctccatcgattggatccagtccttgttcagaaaattgtttcaaggcacttaaggctgcctgatcatggctggcttcaatggagcttccaatagcatggaaagtcatctgcacaggggctaatgtcagacaggtcacacactctttgccactttgtctatcacagtagtgaacctgaaagccttgaatccttgctaaatattccagttgttttgaaggttgtacctcggccgctctagaac

SEQ ID NO: 37005 - DNA, 354 bp, Homo sapiens
  misc_feature 177, 217, 218, 241, 267, 301, 302, 312, 313, 314: n = A,T,C or G
tcactatagggcgaattggagctccaccgcggtggcggccgccatcttgggtcatcgatgagcctcgccctgtgcctggtcccgcttgtgagggaaggacattagaaaatgaattgatgtgttccttaaaggatgggcaggaaaacagatcctgttgtggatatttatttgaacggngattacagatttgaaatgaagtcacaaagtgaggcattannccaatgagaggaaaacagacgangaaaatctttgatgggctttcacaangacattgccaacaaacaaaaatgggaatacctgnntgatgacatnnnaggcagccaagccctggggagggagaaataaccacggggc

SEQ ID NO: 37006 - DNA, 450 bp, Homo sapiens
tatagggttattggaactcctccgcggtggcggccgaggtattcatccacattggaatatacatggaattttgtaaaacctacatgagcagatgaaatagaagcattaaatatttttatctatatccaaaaaggagcacatttttatatttacaaaaccgtttaagctggcttgaataatttaaaaaagtttcagcacacctatacccccgatctcagagggggccaccaatatctagctatggatcgtgtgttttgtttagaaatcagtagcttggttttcttacttgtcgagcggccgcccgggcaggtaccactgcactccagcctgggtgacagagtgagactccgtctccaaaaaaaaactttgcttgtatattatttttgccttacagtgggatcattctagtaggaaaggacaataagattttttatcaaaatgtgtcatgcc

SEQ ID NO: 37007 - DNA, 441 bp, Homo sapiens
actactatagggcgaattggagctccaccgcggtggcggccgcccgggcaggtactattttcactgaactgatttgaaaaagccatatattaaaatggcattaccagtgttaactgaaaacaggcaacgtgttttactagaaaattaacctaataaccaaaaaactccacttcttcccagagtgttatattgtgctgacatcccatagataatattataaaaagattttatttttgcaataggctgggttcacagtgagtatgttagtacctcggccgctctagaactagtggatcccccgggctgcaggaattcgatatcaagcttatcgataccgtcgacctcgagggggggcccggtacccagcttttgttccctttagtgagggttaattgcgcgcttggcgtaatcatggtcatagctgtttcctgtgtgaaattg

SEQ ID NO: 37008 - DNA, 447 bp, Homo sapiens
actactatagggcgaattggagctccaccgcggtggcggccgcccgggcaggtacccatttaatataactatgatgcacttaaattgaagctatgccacaggatagaaaatgaattacaacttaaatacatgttggaagtgtaacactgtttttcaaggtttaaaaaaattcctaatgccttttagccttctttaatatttttaggtaaggaaagtatgtttggattttttcctctttgtaggtatatgagattgaaatgtgaagtatttggacaacaaacgtcaagcaatgggaagccattttgatttcttgagtaatcttgtaagcattaagtgaatgacaaagtagtagtgtaacttatttcttatgttataacttcagtcaattaatataaggatagtttttgttcgagcggccgcccgggcaggtacatgtccaacagaaaa

SEQ ID NO: 37009 - DNA, 282 bp, Homo sapiens
acgactcactatagggcgaattggagctccaccgcggtggcggccgcccgggcaggtactcttactacctcttttctaaatgttcaggaaaagcattgccagttcagtcttttcaaaatgagggagaaacatttgcctgccttgtaataacaagactcagtgcttattttttaaactggcattttaaaaaattggcatagtactaataacaaataaggtagtaatgccacctttttattcggcacccctgtagtctttatagtttcttaatcctaaaacatt

SEQ ID NO: 37010 - DNA, 365 bp, Homo sapiens
tacgactcactatagggcgaattggagctccaccgcggtggcggccgcccgggcaggtaccagttgtaaaattaccaggaaccgccatgcctcaagatcgccctgttttctggcttcatcaatgactgcatgcagtgcaccaccctgtccactacgtgatgctgtaggattaagtcttacagtgggcggctgaggatacagcgccgcgtcctgtgttgctggtgaattagacgccatcgctgtgggttgctggtatggtgccgtgctatttggcacaggacacaccgcttgagggtctgtattgaacctctgaaggaggccgatactgaagctcggttggcagcccggtatttgaataaactacc

SEQ ID NO: 37011 - DNA, 463 bp, Homo sapiens
acgactcactatagggcgaattggagctccaccgcggtggcggccgcataatttaataacatcgtccttccatttggccgcgactgctctggaaaattggttcagtagtaaacagaattctagcaggtggaacaagaacaggcgaggcatcctgggcctggtctctcctggaggtctgggtgttgcagcctttaaggactgcggctgctgtggcctacacacctgggcctgtgtgcctgtcccgggctttaggctgctttccctacccggctcaaccagtctccccgcgtacctcggccgctctagaactagtggatcccccgggctgcaggaattcgatatcaagcttatcgataccgtcgacctcgagggggggcccggtacccagcttttgttccctttagtgagggttaattgcgcgcttggcgtaatcatggtcatagctgtttcctgtgtgaaattg

SEQ ID NO: 37012 - DNA, 418 bp, Homo sapiens
ctactatagggcgaattggagctccaccgcggtggcggccgaggtacgcggggagaaaaacagaggggagatttgtgtggctgcagccgagggagaccaggaagatctgcatggtgggaaggacctgatgatacagaggtctgtaggccatgggaatgggtttggaattttattcaaagagctatgggaagtgactaaaaggttaaagttggggaagaggttttgtgtttctgttatatttgtgttttatacaaattactctggttgctgtgttgataggacagcagaagggtaggagcagggacaccagttaagttattgcaatggttaaggtgagggcttcgggtggtgctataatgtggcactggatcttgagtaataaatttgctgtggtttgtaaaaaaaaaaaaaaaaaaaa

SEQ ID NO: 37013 - DNA, 441 bp, Homo sapiens
ctatagggcgaattgtagctccaccgcggtggcggccgcccgggcaggtacgcggggaaaaaagggtggggagtgctctttcttgaaggaatcccttaagtgcacgtctcccgttttcttttcacatcaatgcagagtccctctgtgaatttacaacacccaacacccatgagttcagtccttaagaaggaaaattgagcaagtatttaattggttggacattgcataaaagaggtccatatccaggctaactctagaaattttattctcaaacttagttggcctctttttcttctgtcagaggaccattcttagtggcactggggaaatcttggcacccagaagaattcaactgcgctcactgcaaaaatacaatggcctacattggatttgtagaggagaaaggagccctgtattgtgagctgtgctatgagaaattct

SEQ ID NO: 37014 - DNA, 186 bp, Homo sapiens
ctcactatagggcgaattggagctccaccgcggtggcggccgggcatttctcccagggatctctgtgcttccttttgtgcttcctgtgtgtgtggatatttaaaggggctggaaatgtgcaaaaacatgtcactacttagacattatattgtcatcttgctgtttctagtgatgttaattattctc

SEQ ID NO: 37015 - DNA, 414 bp, Homo sapiens
tcactatagggcgaattggagctccaccgcggtggcggccgcccgggcaggtacctcctcctgctcctcaagagtgtggtctattttgccatcatcacctgctgtctgcttagaagaacggctttctgctgcaatggagagaaatcataacagacggtggcacaaggaggccatcttttcctcatcggttattgtcccttagaagcgtcttctgaggatctagttgggctttctttctgggtttgggccatttcagttctcatgtgtgtacctcggccgctctagaactagtggatcccccgggctgcaggaattcgatatcaagcttatcgataccgtcgacctcgagggggggcccggtacccagcttttgttccctttagtgagggttaattgcgcgcttggcgtaatcat

SEQ ID NO: 37016 - DNA, 369 bp, Homo sapiens
  misc_feature 259, 287, 288, 298, 300, 301, 308, 309, 317, 318, 334, 335,342, 343, 351, 352, 362, 363: n = A,T,C or G
taatacgactactatagggcgaattggagctccaccgcggtggcggccgaggtactcagaaagtgccgtcgatggtgatccagccctgtgtcactgaggagactcacagcggactagctcttcacttattgatcttggtgttcattgaaacactaagtatatgtgttgtaattcctattcttatctttcttcatagcattcaaaacaattgactacttccttctccttgatgtctatttcatcttggcttctatggcantcgttttcttttccaaatgccccccccnnacctgctggnannagctctnngtttctgnntttcctttttgctggnnctcctcnnctcttgtnngttttaactnntctaca

SEQ ID NO: 37017 - DNA, 405 bp, Homo sapiens
acgactactatagggcgaattggagctccaccgcggtggcggccgaggtacatattgaacagaaactccttctccagctccagtgtctggtgcttcgtgtaggggcagcgcttcttccgaccactctttgccgtgagccagttggctgcgttttcacctttggaattgcttggaagatgggccaggcagcttggctgtctcaccccagggccctgattgcccaagactcgataaggggagaaagaagggcatcattggtccaatggggaaggcaggaaaaaccgattcgggggtcaagggccctccctcaagtttctccaggagccagggatagatagctgggcgattccgaggtccaggggaagggaaatggcccttctctggctctcagctcagggccccccg

SEQ ID NO: 37018 - DNA, 407 bp, Homo sapiens
cactactatagggcgaattggagctccaccgcggtggcggccgaggtacgcggggagaaaaacagaggggagatttgtgtggctgcagccgagggagaccaggaagatctgcatggtgggaaggacctgatgatacagaggtctgtaggccatgggaatgggtttggaattttattcaaagagctatgggaagtgactagaaggtttaaagttggggaagaggttttgtgtttctgttatatttgtgttttatacaaattactctggttgctgtgttgataggacagcagaagggtaggagcagggacaccagttaagttattgcaatggttaaggtgagggcttcgggtggtgctataatgtggcactggatcttgagtaataaatttgctgtggtttgtgaaaaa

SEQ ID NO: 37019 - DNA, 201 bp, Homo sapiens
cactatagggcgaattggagctccaccgcggtggcggccgggcatttctcccagggatctctgtgcttccttttgtgcttcctgtgtgtgtggatatttaaaggggctggaaatgtgcaaaaacatgtcactacttagacattatattgtcatcttgctgtttctagtgatgttaattatctccatttcagcaaatgtgtg

SEQ ID NO: 37020 - DNA, 250 bp, Homo sapiens
agggcgaattggagctccaccgcggtggcggccgcccgggcaggtacgatttcaaagtagtgcaatatcgccatgatgtgctggggcatgaagacgtatcctgtgtatagtgccatccccacaatggaaaccagtatggaattgaacaccggtcgcttccagggctccagcatgtagagcgccgtgaccagcaggtacctcggccgctctagaactagtggattcccccgggcctgcaggaatttcgata

SEQ ID NO: 37021 - DNA, 429 bp, Homo sapiens
gactcctatagggcgaattggagctccaccgcggtggcggccgaggtacaagtggcagcgctggtgctcccaggattacctcctaattcatcataaatatgtttccactgacggcgggctgttattgtttcatatcctcccagtttttgagcagcttgaaacatagtccaaaggttaatctgtttaaaacctaaatagggtattcgtttcgagcggccgcccgggcaggtacaaaggaaattattgggataaatagcaaaatctgaataaggtctatagattaaatagttcacttaagtgttaatttccttagtttgccaatggtaatattgttatgcaaaagaacatcgtgattttaggaaatacacaatgaaatatttaaaacatcatgtcttcaactgacacacaaatatgaaaacatcatgtgaa

SEQ ID NO: 37022 - DNA, 401 bp, Homo sapiens
cactactatagggcgaattggagctccaccgcggtggcggccgcccgggcaggtacttttttttttttttttttttttttttttttgataaaatgtcttttgcccattttctaatttgattttttttttctgttaaggtttgagaattccttatatcagaggatatataataatatttgcaaaccatttatacaacaaagtacagtgggcgtagtgctgttattggaacctattttggaacctattccacctttggatgatgttgccagaccagtcaaacccacaggtttctggttagctgacgaagtagcaggtttcccagaattgttttgggttgttgaactcaattttgctgttgaaggaccaacaaaggaagttttggctgcaaaagctgcccatcc

SEQ ID NO: 37023 - DNA, 448 bp, Homo sapiens
actactatagggcgaattggagctccaccgcggtggcggccgaggtactctttctttagcatgcaaaatcgcccagctaataagccaaaaaatttttcgtatgtcctctgttgggcacagcaatcaagtatcatgttgcagagttcttttgtttggctttcaggaaactccattttcagcaatttgtgagcacattcttccccgcgtacctgcccgggcggccgctctagaggtagtggatcccccgggctgcaggaattcgatatcaagcttatcgataccgtcgacctcgagggggggcccggtacccagcttttgttccctttagtgagggttaattgcgcgcttggcgtaatcatggtcatagctgtttcctgtgtgaaattgttatccgctcacaattccacacaacatacgagccgggagcataaagtgtaaagcctggggt

SEQ ID NO: 37024 - DNA, 408 bp, Homo sapiens
gcgaattggagctccaccgcggtggcggccgcccgggcaggtacagagccatggtataaattaacaggttaatgtcagtcatcagatcttccttctcttcctaaggatgcttgtgttgcctcaatctatcaatctatctttcttgttttgggttgttttctctctctctctctctctctctctctctcttcttagagacatggtctaaccatgttgtctaggatatagggcagtggctattcacagatgtgatgatagcacactggagcctcaaactcttaggctcaggcgatccttcaagcctcccggggagctgggaccacaggcacgtgccaccacacccagctctctttcttggtttttcatcatttcatgtatctatcaaagcccagttcacctcctccccca

SEQ ID NO: 37025 - DNA, 210 bp, Homo sapiens
acgactcactatagggcgaattggagctccaccgcggtggcggccgcccgggcaggtacacacatgagaactgaaatggcccaaacccagaaagaaagcccaactagatcctcagaagacgcttctagggacaataaccgatgaggaaaagatggtcctccttgtgccacccgtctggttatgaatttctctccatttgcagcagtaaag

SEQ ID NO: 37026 - DNA, 405 bp, Homo sapiens
ctatagggcgaattggagctccaccgcggtggcggccgcccgggcaggtacatattatatgcaaggttacaaaaaaaaatcaatggttaatgattttttagctcaaccaagctaaaagatgtgaacaagaaattgaactcaaaacaacttaagatacaaagctcttgttactgataatgtctaataatattcatcaatttaccatatcttgttcttatattaaaatgttctatcattttcctaattattttaaagtcgattacaaaaatatatatatattcttgtagtgccagaaaattgaatacattaataaatggggtagaatagatgaatctcccatgaagaagaattccaaataatttatgaactctgccctcaaggatatggagcagaacttcctacttc

SEQ ID NO: 37027 - DNA, 385 bp, Homo sapiens
actactatagggcgaattggagctccaccgcggtggcggccgcccgggcaggtacctaagaaatgttcactattataaactggacttgatataaaattattgtaaaaacctttatgtttaccttgttcaagacacatttgagttaaagcagcatttctcgaaatgtggtttgcaaactcttggggatgtcctgagaccttttcagaggatatgcatggtcagaactattttcataacaatattctaatattatgcacctttttcattctcattctctcacagattgcagcagagttctccagagactacatgacatgtgatgatgtaatcattctaatggaatttatatttgtgtagaattttctaaattagtagggtttaaagt

SEQ ID NO: 37028 - DNA, 195 bp, Homo sapiens
ctatagggcgaattggagctccaccgcggtggcggccgaggtacgcggggaatcccttaattaaatagcttcccctctacaggcttttgaagtggtagcagttcctcctaactcctgccagaaacagctctcctcaacatgagagctgcacccctcctcctggccagggcagcaagccttagcccttggcttctt

SEQ ID NO: 37029 - DNA, 256 bp, Homo sapiens
ggcgaattggagctccaccgcggtggcctgcccgctttccagtcgggaaacctgtcgtgccagctgcattaatgaatcggccaacgcgcggggagaggcggtttgcgtattgggcgctcttccgcttcctcgctcactgactcgctgcgctcggtcgttcggctgcggcgagcggtatcagctcactcaaaggcggtaatacggttatccacagaatcaggggattaacgcaggaaaggaacattgtgaggcaaaa

SEQ ID NO: 37030 - DNA, 476 bp, Homo sapiens
ctatagggcgaattggagctccaccgcggtggcggccgcccgggcaggtaccctgctgcattggagatgatctcaataagccctcgcaccttggtcttggcgttgaggtgagattttaaaagtcaccagattagtttcaaatgaacagccttgagaatcttagaatatcttgagggtaagttaacgggtgtcattgtaggaggtgatagagaagtaggccaaacccaccaccatgctctgggcctaatacagtcttttcctattgaaaagtgacggttggggaagaaaaaaaatctcggcctgtttctgttactgtagtagctagcacttatgaattggcaaagtttcagagaccctccctcccctatgtcagatactacaataccatacaggattaaaggtgtaatatgcagatcaagacctagagattaaatacagacttcaggtaggctgctgcttggaatacttattatttt

SEQ ID NO: 37031 - DNA, 438 bp, Homo sapiens
actactatagggcgaattggagctccaccgcggtggcggccgaggtactttaccaagtaggcacttgggaaatgctgtgtccacatacttaggaaatggcttcagttaacactgggcttgggaagggctctcttatccaaggagcagtcttctctggagccatgaaaccagccttggcagcactggtaataaactagtctgtgaaatctggcaaagcctctgtcctgtttggatatacgcaaaactgccttttaccatttccattgctttttattacttaatctcccaactttgtgcctggtgtcttttttttttttttaaaatagaaaatttttgaggtaattatgtattcatataaaagtctttggtggatatgctttttcccacaagcacttggttagaatggcccattacctcatttgtttatttttttgagac

SEQ ID NO: 37032 - DNA, 417 bp, Homo sapiens
cactcactatagggcgaattggagctccaccgcggtggcggccgaggtactcagtgcagcaaagaaagactacagacatctcaatggcaggggtgagaaataagaaaggctgctgactttaccatctgaggccacacatctgctgaaatggagataattaacatcactagaaacagcaagatgacaatataatgtctaagtagtgacatgtttttgcacatttccagcccctttaaatatccacacacacaggaagcacaaaaggaagcacagagatccctgggagaaatgcccggccgctctagaactagtggatcccccgggctgcaggaattcgatatcaagcttatcgataccgtcgaccttgagggggggcccggtacccagcttttgttccctttagtgagggttaattgc

SEQ ID NO: 37033 - DNA, 403 bp, Homo sapiens
tacgactactatagggcgaattggagctccaccgcggtggcggccgaggtactttttgaattgttgcagtgttggagatgccattttcacctttttaaaaagatgcattttatttgcaggtttgtgaagttcttgcaaactcttactacagaaatgttttaaatacattctcaggcatgtttgcaaaaatatggcacatgtatacattttaggaaatgttacttttgttaatctttaaaaaatacacctaatgaaagacattccactattatgcgtaatgctcagctttttgtaaagaaatatttaattgtattttgtgtttatacaggtatttcacacaataatttgttcttaatgcagccactataacttgataagtcattgcactatttaaaaagtttta

SEQ ID NO: 37034 - DNA, 378 bp, Homo sapiens
ctatagggcgaattggagctccaccgcggtggcggccgcccgggcaggtaccatgctgacttcttggtatcttttaaggcctaattttcccttccttgagattactgtagtgtgttccagctaatttctatttggaaacgagttggaacagctgaaaactaggtattattgaaggcaaagcagcctcacgtcagttttttatcagctcatttgggaaggttttttttttttttttttttttttaattaattagaaagtaggctgggcacggtggctcatgcctataatcccagcacttggggaggccgaggatctcctctctggtggatcacttgagggcaggagttaagagaccatcctggccaacatgattgaaac

SEQ ID NO: 37035 - DNA, 437 bp, Homo sapiens
tactatagggcgaattggagctccaccgcggtggcggccgaggtacacagatgaagtagcaccggggcagcaccaccatcttaagatgataaaccaaactgcacatacattaaatgaaaatacatatatgtttaatttggcccaccctgtagccaagaggtgtaaggaaagtacagataccttgtgtgattgtggaacgcagtcaaggtggatgtcagggtcggattgtccacctgagcaattcctttacccagactgtcaattgcaggaagccatttttttcctcctggtagtaaatgtcagagtaagagaaacaaactgtttagaattatcatgtttttaaaacatcatagtaatataaatctgctgttaggagctccagttgctaaaacctcaatttaagtctttaaaaggttgtattttgaatgtaaccaaaa

SEQ ID NO: 37036 - DNA, 404 bp, Homo sapiens
actactatagggcgaattggagctccaccgcggtggcggccgccgggcaggtacgcgggacatcaatgcagagtccctctgtgaatttacaacacccaacacccatgagttcagtccttaagaaggaaaattgagcaagtatttaattggttggacattgcataaaagaggtccatatccaggctaactctagaaattttattctcaaacttagttggcctctttttcttctgtcagaggaccattcttagtggcactggggaaatcttggcacccagaagaattcaactgcgctcactgcaaaaatacaatggcctacattggatttgtagaggagaaaggagccctgtattgtgagctgtgctatgagaaattctttgcccctgaatgtggtcgatgccaaa

SEQ ID NO: 37037 - DNA, 429 bp, Homo sapiens
atacgactactatagggcgaattggagctccaccgcggtggcggccgaggtacactggaggctggagcctgcagatggcatagctctgcggctcaccttgctgcagttggtggtggtgacagagactgcagcttgactgtagtggtaagaggatgcctgtggcagccagatgataggggccttatagggtgggccagtgcattgagggtgacagcagaggtggttgtattggcatcagtgctagtggtggcagcagcagcaagtctgggaaaaaaaaaaaaaaaagaacaaaaaaaaaaggtacctgcccgggcggccgctctagaactagtggatcccccgggctgcaggaattcgatatcaagcttatcgataccgtcgacctcgagggggggcccggtacccagcttttgttccctttagtgaggg

SEQ ID NO: 37038 - DNA, 184 bp, Homo sapiens
cactatagggcgaattggagctccaccgcggtggcggccgaggtactttttttttttttttttttttttttgttttaatattttttattaagggctataaaaatacccagaaagataaataaatgtgatgcaatgatatctgtcctaatatgaaaaactttttttcactgcattgttttccttc

SEQ ID NO: 37039 - DNA, 386 bp, Homo sapiens
  misc_feature 221, 222, 223, 224: n = A,T,C or G
tactatagggcgaattggagctccaccgcggtggcggccgcccgggcaggtaccatgctgacttcttggtatcttttaaggcctaattttcccttccttgagattactgtagtgtgttccagctaatttctatttggaaacgagttggaacagctgaaaactaggtattattgaaggccaagcagcctcacgtcagttttttatcagctcatttgggaagnnnntttttttttttttttttttttaattaattagaaagtaggctgggcacgggggctcatgcctataatcccagcacttggggaggccgaggatctcctctctgggggatcacttgagggcaggagttaagagaccatcctggccaacatgatgaaaccctgtct

SEQ ID NO: 37040 - DNA, 184 bp, Homo sapiens
cactatagggcgaattggagctccaccgcggtggcggccgcccgggcaggtacccttggttccccttggaatcattttcatttttcttcggcgatattttttggaaacgtcaagagatgtgaagcgcctggaatctacagctcggagtccagtgttttcccacttgtcatcttctctccagggg

SEQ ID NO: 37041 - DNA, 342 bp, Homo sapiens
  misc_feature 239, 240, 249, 251, 309, 310, 311: n = A,T,C or G
tatagggcgaattggagctccaccgcggtggcggccgaggtactgatggggaagtgccggcgcttcttggatgaactagatgcggttcagatggactgagcttggatgcttctgaggcaagctgaagctttgggttctgactgacccaccctacaggactgctgaacagagagcccagtgtgactagggatcctgaggttttctgggaccaacttccagctttaatcaataacattttnntgttaaatngntgccataaaatgtagaactttttacgcctttataaggggccttagatgttaaataaannnctcacccaaggcaataaaaaataaaaaaaaa

SEQ ID NO: 37042 - DNA, 432 bp, Homo sapiens
atacgactcactatagggcgaattggagctccaccgcggtggcggccgaggtacgcgggatgtgaaggcttgtgatgggattggaggagctatgcataaggcaatgctaatggctcaagcaatgagggggctcactctaggaggacaagttagaacatttgggaaaaaatgttataattgtggtcaaatcggtcatctgaaaaggagttgcccaggcttaaataaacagaatataataaatcaagctattaacagcaaaaaataaaaagccatctggcctgtgtccaaaatgtggaaaagcaaaacattgggccaatcaatgtcattctaaatttgataaagatgggcaaccattgtctggaaacaggaagaggggccagcctcaggccccccaacaaactggggcattcccagttaaactgtttgttcctc

SEQ ID NO: 37043 - DNA, 430 bp, Homo sapiens
agggcgaattggagctccaccgcggtggcccgcccgggcaggtactacatatgcagaatctgatacaatgttaatagactgattaaaatcttgttaacactgtaatgacggcaaccaactctgctctttgagtcaagtgatactgagttttgatgactcattcttttggcccggtgtaagccacttttccattgctggaaccatcagtaaacactgccagagcattttttaaaggcttatgtttggtaactttaggtaaaatccaagtagtcaattttaaaaactggaagatttttgttttggggtaacgattgtcaataattcccacaaaatcggcaagaccaatctgccatgcaccagaattgataaaggcttgtctaacctgttgcttgttgaaaggaacagtgattttatctgggtcatttccaca

SEQ ID NO: 37044 - DNA, 384 bp, Homo sapiens
ttggagctccaccgcggtggcggccgaggtaccttccgtgttcacttcgcgctcctggggatactagaagctccacttcagatccttcttgtgacaccatctgagcttcctccaatagataagaaaaaaggcagaggatacactacagttatcagttcccgtctttcccgcgtacctgcccgggcggccgctctagaactagtggatcccccgggctgcaggaattcgatatcaagcttatcgataccgtcgacctcgagggggggcccggtacccagcttttgttccctttagtgagggttaattgcgcgcttggcgtaatcatggtcatagctgtttcctgtgtgaaattgttatccgctcacaattccacacaacatacga

SEQ ID NO: 37045 - DNA, 444 bp, Homo sapiens
tcggcgaattggtgctccaccgcggcggcggccgcccgggcaggtactcggggctcttccataggaggcctacattccgccgcttgtgctgcagccatgtctctagtgatccctgaaaagttccagcatattttgcgagtaccttaatgaatgcattttatttatctcaatttttatttgcttcaaaatagaattggataagtttaaaatgttcctcttacatttgtgaatgtgtctatgagagaggggccatttctcacatattttaattaacaactaaataaacagacgttgttttaaaggaattaacacttaaatcccaaccatcctcatatagaataaaatatcaacctaaatctttactatagatagtataattctattatgtacctcggccgctctagaactagtggatcccccgggctgcaggaattcgatatcaag

SEQ ID NO: 37046 - DNA, 460 bp, Homo sapiens
gtatacgactcactatagggcgaatcggagctccaccgcggtggcggccgcccgggcaggtacgcggtgacatcaatgcagagtccctctgtgaatttacaacacccaacacccatgagttcagtccttaagaaggaaaattgagcaagtatttaattggttggacattgcataaaagaggtcctatccaggctaactctagaaattttattctcaaacttagttggcctctttttcttctgtcagaggaccattcttagtggcactggggaaatcttggcacccagaagaattcaactgcgctcactgcaaaaatacaatggcctacattggatttgtagaggagaaaggagccctgtattgtgagttgtgctatgagaaattctttgcccctgaatgtggtcgatgccaaaggaagatccttggagaagtcatcaatgcgttgaaacaaacttggcat

SEQ ID NO: 37047 - DNA, 176 bp, Homo sapiens
agggcgaattggttctccaccgcggtggcggccgcccgggcaggtacagctgaggaaataaatggcagatgttacacaggaagcaatataacatggtcattaagtaactgtattcaaccatcaaatttaattttaaatcttggcacagtgcccacaagccgtgtgactttagtccc

SEQ ID NO: 37048 - DNA, 416 bp, Homo sapiens
ctactatagggcgaattggagctccaccgcggtggcggccgaggtacaataagcacattttttcaaatagccgtagtctaacagttacatctattgagaacaaatgacagaatgattaaacattcttcacttgtccaaaaaacgtgttatatacttaaataaatgtgttatagaaatgaatccatgtttttcagtgttttcatttcagcttgatctcaaacacaaaagatttatacaaaactcacctatctgcttaccacatcaaccaaattaccaaattctctttaaggacatagtacctgcccgggcggccgctctagaactagtggatcccccgggctgcaggaattcgatatcaagcttatcgataccgtcgacctcgagggggggcccggtacccagcttttgttcccttt

SEQ ID NO: 37049 - DNA, 409 bp, Homo sapiens
actactatagggcgaattggagctccaccgcggtggcggccgcccgggcaggtacttgttctgggcacttaattcaacaaatggtcctgggacaactaaatatccacatgtaaaagaatcaagttagactccctcctcgcacataaaaattaactcaaaatggatcagagacctaaaggtaggtggtaaaattataaatcacttagaaatagtaaatctttgtaatgtgggataagcaaagttttcacaaatatgactgaaagcacaagcaacaaaagaaaaaataaattgtattccatcaagttaaaaacatttgggctgaaaagtctatcatcaagaatgtgaaaagacagtacctcggccgctctagaactagtggatcccccgggctgcaggaattcgatatcaa

SEQ ID NO: 37050 - DNA, 436 bp, Homo sapiens
actactatagggcgaattggagctccaccgcggtggcggccgaggtacatgaactaacacgcacaggagaggtcctggttcagttccattaatgcagcgagtgagacctgaggtgcagaccaaccaggtattgttgggtgcttggtaagagactgaggtcgagcggccgcccgggcaggtacttagggtaagcattaacaatattattcaaaatgttatatagagttcaactgtatacaatagagcatttattaaagtgtgtccaaagcgcttataaataaagcatcttcgaggcaggcggctcacttgaggttaggaggaaagcagactgaccaacatggtgaaaccccgtctctgtggtcccagctacttaggaggctaaggtgggaggatcacttgaggacaagaagttgaggctgcattgagccaagtgttt

SEQ ID NO: 37051 - DNA, 434 bp, Homo sapiens
atacgactcactatagggcgaattggagctccaccgcggtggcggccgaggtacaaagagtagctgccccttctcagggcagatgatgctttgagaacatactttggccattacccccagctttgaggaaaatgggctttggatgattattttatgttttagggacccccaacctcaggcaattcctacctcttcacctgaccctgcccccacttgccattcgagcggccgcccgggcacgtacgcgggcacccactccactttcctccacagatgcctcttctgtgccttaagcagagtcaggagaccccaaggcatgtgagcatctgcccagcaacctgtggagacaacccacactgtgtctgggggtgaaaggacaccaggagtcacttctatacctccctaacctcacccctggaaagccaccagattgg

SEQ ID NO: 37052 - DNA, 377 bp, Homo sapiens
ctactatagggcgaattggagctccaccgcggtggcggccggaaagactctataacccagttctgggaagaactccaagctgggagtcagccacactgactctaccacttactagctgtgtaaccacaggcaagttactcaccccgtccaaacctcagttttctcttctataaacaaggttcttagaataaaatgagaattcaaggaagcacttaacatagcacctggtttgtggtacctcggccgctctagaactagtggatcccccgggctgcaggaattcgatatcaagcttatcgataccgtcgacctcgagggggggccccggtacccagcttttgttccctttagtgaggggttaattgcgcgcttggcgt

SEQ ID NO: 37053 - DNA, 445 bp, Homo sapiens
tatccggcgaattggagctccaccgcggtggcggccgcccgggcaggtacgcggtgacatcaatgcagagtccctctgtgaatttacaatttccaacacccatgagttcagtccttaagaaggaaaattgagcaagtatttaattggttggacattgcataaaagaggtccattccaggctaactctagaaattttattctcaaacttagttggcctctttttcttctgtcagaggaccattcttagtggcactggggaaatcttggcacccagaagaattcaactgcgctcactgcaaaaatacaatggcctacattggatttgtagaggagaaaggagccctgtattgtgagttgtgctatgagaaattctttgcccctgaatgtggtcgatgccaaaggaagatccttggagaagtcatcaatgcgttgaaacaaacttggc

SEQ ID NO: 37054 - DNA, 432 bp, Homo sapiens
gactactatagggcgatttggagctccaccgcggtggcggccgcccgggcaggtacgcggggtgtaaccacctgggaaaacttcacagaaaatgagagtttcagatactgagaatagaaccactaagaagcagaaaagagaagatattctcgtgggggagaacaacggctgggaggggaggaagcatggccaaggcaaagagaactgcttcttgctgccgccatatgaagaaggacgtgttcgcttccccttcctccatgattgaatacaacatgtttaagaccacagaacatctgcataggctgtaaatttcgttgaatgatggatgcaaagatggaagacagatggatagaggaaaagacagaatcagatactggatgagttagtacctcggccgctctagaactagtggatcccccgggctgcaggaat

SEQ ID NO: 37055 - DNA, 267 bp, Homo sapiens
ttttaaaaatttattctagctgtgaggcgttcactcactatagggcgaattggagctccaccgcggtggcggccgaggtacttcttgcccttgtagaatttcctgaggttttctttctgagtctggttaataactgtgagaacacgggcaatggatttccggacgactcggaccttagagagcttggaggccgcaccgcctgtcactttggcgacgcgcaagctgggacagcctccaccttcaggttcgtccaagctgtttcagtca

SEQ ID NO: 37056 - DNA, 432 bp, Homo sapiens
cactactatagggcgaattggagctccaccgcggtggcggccgcccgggcaggtacttggcccggatggcctggccgttctgcagcggcatttcctcatagtcactcccataaatcacatcatcatccgagtcattcagcatggagaaggcaggattgtccttcagctgggactcatagagggcattcttcgatggagaatatacaaaggccaaggtgtagagatagaagttcaacaggccatagaaagataagaactcggctgaattctggtagtgagttgacagctctgctacaaaattgtcttatagtacctcggccgctctagaactagtggatcccccgggctgcaggaattcgatatcaagcttatcgataccgtcgacctcgagggggggcccggtacccagcttttgttccctttagtgagggt

SEQ ID NO: 37057 - DNA, 211 bp, Homo sapiens
agggcgaattggagctccaccgcggtggcggccgggcctcgtccactttgcctaacggcggcctcgatcctacgtaaaggcatgacttcctggcaccacagggaaaatcgggtgcaagcccagaaactatttccccaccaccacttgttgaaaaacctgattttgaaggcattcttccgggggttgaaaccaaacgggaaagtggccaggg

SEQ ID NO: 37058 - DNA, 525 bp, Homo sapiens
  misc_feature 144, 145, 169: n = A,T,C or G
cggccgcccgggcaggtactcatttaattagggttgcagaggatatggaaaaacatgttgtttgattatgaaggcaacacttctgtcagtagaattgctttggattgtaaatatgtttacttcagaggaaatcagtcagagtgnngatggctcagcaaaacccatcacnaactgcggaaaaaggaagtgactggctagaggtaaggaaatagattttctctaagttaactggcctacgtgtgaatcgaactctgcaccctggcctcattagcaccaacactgtgaagaacagctgtggcagagaaagtgccacggccccaccccatcaccagattcagtagaaaggcccttggaatttcctacaaggttcaattctgaacagctccacttcaaatcagtatagaatcctcacagtgactctgtgagggaggtaaatgtcactgctccccggtggtgggggaaacagaggccaaagtggttaaagattttggctgaagttaaaacaaaaaatgaaaagtcacttgg

SEQ ID NO: 37059 - DNA, 391 bp, Homo sapiens
ttggagctccaccgcggtggcggccgtgtgacaatcgaatattattcacagctgaagactgtgtgtgtggagatgggtgatgtggaatctactttttgaaaacctgcagtgaaacctattgacatggccacgctgtggaatgatgtgaattggccctgtttacagaggcagtacctcggccgctctagaactagtggatcccccgggctgcaggaattcgatatcaagcttatcgataccgtcgacctcgagggggggcccggtacccagcttttgttccctttagtgagggttaattgcgcgcttggcgtaatcatggtcatagctgtttcctgtgtgaaattgttatccgctcacaattccacacaacatacgagccgggagcataaag

SEQ ID NO: 37060 - DNA, 634 bp, Homo sapiens
cgcgtatacgactcactatagggcgaattggagctccaccgcggtggcggccgaggtacgcgggaggacagaggaagatgggtgcaggacactcatactggagacaggggtcagaaaaaccgtctcttaaggatgtgacgtgtgatgagaaaacaccagccattctaagatccagggaaagtgcattccaaccgtgggagacagcaagagaaaagcgtcccccagcaagaatgatactgggggattcatggaacaaaaggaaggtcaaggtggccagagcatcaagagcacaacagagtttgagaagatgaggcgggaggaaggcaaggacctcgtcagccatgtaagacgcctgctcccactttgccttccaccatgagtcaaagtttcctaagtcttccccagaagccgccatgcttcctgtacctgcccgggcggccgctctagaactagtggatcccccgggctgcaggaattcgatatcaagcttatcgataccgtcgacctcgagggggggcccggtacccagcttttgttccctttagtgagggttaattgcgcgcttggcgtaatcatggtcatagctgtttcctgtgtgaaaatgttatccgctcacaattccacacaacatacg

SEQ ID NO: 37061 - DNA, 443 bp, Homo sapiens
actcactatagggcgaattggagctccaccgcggtggcggccgaggtacctttcattggattgtccatggtgcatcgctttagcaagcggcgtgactctccgctgcccgtcatcttggccaatatctatctgctggttcctcctgtgctcaacccaattgtctatggagtgaagacaaaggagattcgacagcgcatccttcgacttttccatgtggccacacacgcttcagagccctaggtgtcagtgatcaaacttcttttccattcagagtcctctgattcagattttaatgttaacattttggaagacagtattcagaaaaaaaatttccttaataaaaatacaactcagatccttcaaatatgaaactggttggggaatctccattttttcaatattattttcttctttgttttcttgctacatataattattaatac

SEQ ID NO: 37062 - DNA, 416 bp, Homo sapiens
acgactcactatagggcgaattggagctccaccgcggtggcggccgggaggctccatgcgcggcgcggaagacgctgttatttctccggaggaaagcagagaaaccgagagccagccgagcagggaagtcccttctgggtccagatatgggacgcaacccccgcgtacctcggccgctctagaactagtggatcccccgggctgcaggaattcgatatcaagcttatcgataccgtcgacctcgagggggggcccggtacccagcttttgttccctttagtgagggttaattgcgcgcttggcgtaatcatggtcatagctgtttcctgtgtgaaattgttatccgctcacaattccacacaacatacgagccgggagcataaagtgtaaagcctggggtgcctaatgagtgagct

SEQ ID NO: 37063 - DNA, 432 bp, Homo sapiens
actactatagggcgaattggagctccaccgcggtggcggccgaggtactttaattagaacaaaagaccgacattaacttcaatgcaacataataattcataataatgattgtatattaatctcttgagcttgcaggaatatagcacatgacatatgacatgatacaggcacctgtgtgatcctttggggacttaggtggtgcatattaattagcccctggaaaataaaatctgtttccttctgagaaaagctacctcagtgcttattggcttaagccatcaaagaaattagatgaaatactgttaggctgggtctgcactcattaaagctttgtctagatgtaagcactgaatcaactgcctctgagttaagtcttgactgaatggtgcataagaaatcagagtaatcatgcatttctttggccttgatgat

SEQ ID NO: 37064 - DNA, 397 bp, Homo sapiens
acgactactatagggcgaattggagctccaccgcggtggcggccgaggtaccaccagaactcattgatcaatattaaaatcactgaaagtggaacaatcagacatcatgttcctcctgaaatgatgtaagagaaagtgtatagcatcacctatggagtattcttgggggaaaataaatgaaccaggatcaaatccagcttctaggtctaactggacactctggggatactctcagtcaaatcctgagtggaggaaattccacaggacaaataaaagccgaaaagaactaaaacgcaggggtaaattttacagagtaaaggagacacatcaaccaaatgcaatgttggatctagatttcaacaaccaagaaaactgtattttttgagaaatagaaaca

SEQ ID NO: 37065 - DNA, 549 bp, Homo sapiens
gctccaccgcgttggcggccgaggacatacgttacctttacatatgctcttgctcaaaattgtgaacctagttacatttcttcttgctcccttcctttttatgctcaaacagcgaaacccaaaacttaaaagatctgaactttcagcatgcattctgatgctgaagatttcctgatttagtgcattctcaaaaggactttcccataatctaaagggaaatgtaagcacctatactcttgtgcctgtgggcacttcaataataaaaaccaactttttaaactaatcatcttttatcaatgataaagttgttttcagtcccacactaggagagttcctttaagtcagctgatcaagcataagatacttccgtaaagaaataaactaagaaaaatttttatggcttgagaaaattccttgaggccaaattaatatatttttctttgttattttatttgagtcattttaaatttgttaatacaaaatttaagataatttacagagacaatttatccagctttcttctaccttaatacaaatgtttggcttccc

SEQ ID NO: 37066 - DNA, 400 bp, Homo sapiens
ctactatagggcgaattggagctccaccgcggtggcggccgaggtaccagttgtaaaattaccaggaaccgccatgcctcaagatcgccctgttttctggcttcatcaatgactgcatgcagtgcaccaccctgtccactacgtgatgctgtaggattaagtctcacagtgggcggctgaggatacagcgccgcgtcctgtgttgctggtgaattagacgccatcgctgtgggttgctggtatggtgccgtgctatttggcacaggacacaccgcttgaggtctgtattgaacctctgaaggaggccgatactgaagctcggttggcagccggtattgataaactaccagcggttgggtcttattttctaccggctgatattgtggatactgtatctgag

SEQ ID NO: 37067 - DNA, 267 bp, Homo sapiens
ggcggccgaggtacagttgtgatgctagtataagtttaagcctttgaaataccactttcatattttcagatgtcatggatttaatgagtaatttatgtttttaaaattcagaatagttaatctctgatctaaaaccatcaatctatgttttttacggtaatcatgtaaatatttcagtaatataaactgtttgaaaaggctgctgcaggtaaactctatactaggatcttggccaaataatttacaattcacagaatattttattta

SEQ ID NO: 37068 - DNA, 431 bp, Homo sapiens
tacgactcactatagggcgaattggagctccaccgcggtggcggccgaggtacatatatgtatattataccaatagctagtaatttcaaaaaaaacattgacttgagtgttagataaccattctctaaattcagtttttgatgtttcaagaaacccaaaagcctgtcttttcacctacagaccctttgtgcacgtggcaaatcacctctgaaaggcaaaaactaactggattctcttcatttgttcaaaaaagagaagaaagctttaaagatatgcctataaataaaagaaaattaggttgctatattatgattgtgcaataagtattaatttcattgaagtttgaccctgttccatgtattagatgactaagacatttaactcttagggatgttgaaagcgcaccacaaaacataagtaatcaataaagt

SEQ ID NO: 37069 - DNA, 299 bp, Homo sapiens
agggcgaattgtagctccaccgcggtggcggccgcccgggcaggtacatgaaatggttttgaaacaataggaacagataagtcccagataggaggctcactgatacttaattggccatgtcaccaatgtttgtttttaagggagtttggtggttgccatgttatcattttttttattctttctttctttttctttctttctttctttctttctttcttttctttcttcctcttcttcttcttttttgcaaataatttacaggcatatgtaaaatacagtaagaatactgggtcatagtt

SEQ ID NO: 37070 - DNA, 361 bp, Homo sapiens
  misc_feature 323: n = A,T,C or G
ctactcatatagggcgaattggagctccaccgcggtggcggccggcccggtggcttggcaggcagtgctgtgcgctgctcatggagaagacctgggcttagcaatctccttagttcttgctacacaggatggtgactggaactaaggctacacagagggtcgcacttggactctgagggttgggtgtggaagggggaaaaggagatggagtacctgctccccagcttcttcctgttcagccggtttacatgggtaacagggttaacattctgtgtttaggggaggtttcacctttaccctttttttatagtgggaagaagtgntcacactttcctggctaatcttaggggggaattgggga

SEQ ID NO: 37071 - DNA, 414 bp, Homo sapiens
ctcactatagggcgaattggagctccaccgcggtggcggccgaggtactttaaagaaaggtctgttaggaccagaagcagagacaccacttttcaaaggacttcttggtttcagcataacctaagacagggaattgggagccatcatatgtcacagtgttcagaattcaagcatatttaagggcattttctttgattctcaaagtcgagcggccgcccgggcaggtacgcgggggcggacgtcgccattcctggcccatgggaagattgcgtttcacctgctcctgaaggccgaaggtggctctagcgcatcctttgtcgcgccgtgacctgcaggtacctcggccgctctagaactagtggatcccccgggctgcaggaattcgatatcaagcttatcgataccgtcgacctc

SEQ ID NO: 37072 - DNA, 379 bp, Homo sapiens
atagggcgaattggagctccaccgcggtggcggccgcccgggcaggacgcgggggtgacacacacacacacacacagcacctgcacgcagatgcacacatctctagtcaaatgaggctctcagctttttgataggggctttttgatacgtgtataaccaatactttattctcactgtagtcaaggactcattgcaattcagaaatgagaagctgatccggaactccactacagctcaaagaaattctcgaatgttctcacctattaacagttattaaaatggaagaagctggggatgaaattgttagcaatgccatctcctacgctctatacaaagccttcagcaccagcgagcaagactaggattactggaatgggca

SEQ ID NO: 37073 - DNA, 423 bp, Homo sapiens
ggcgaattggagctccaccgcggtggcggccgaggtacgcggggagaagtggtgaaggtaaggcttggattcaattacagtaatctcagaagttcttggtagaagaggggcacagaatcccagcctccattttgcagatcacagaactgtgtggtgcaaagcgggttggttattttggtccaacacagttttacattgccctgaaattaattgctgcagcacaatctggcctcccggtacctgcccgggcggccgctctagaactagtggatcccccgggctgcaggaattcgatatcaagcttatcgataccgtcgacctcgagggggggcccggtacccagcttttgttccctttagtgagggttaattgcgcgcttggcgtaatcatggtcatagctgtttcctgtgtgaaattgttatt

SEQ ID NO: 37074 - DNA, 452 bp, Homo sapiens
tacgactactatagggcgaattggagctccaccgcggtggcggccgcccgggcaggacgcggggagtttacggaagtgtaacgttgaggcccttcttgtgtatctggagaaaatagaggttctgactcctcaggagcaaaaaacataacctgaagagggaggaagtggatttggggttcaccatttcttggggcacacttgattgaaaactgaaacttttgaagagaaggccaaaagatacaaagacagaccatcccagttgaatgctgtcttccaagaacagaagaaaatgatccaggcccaggaatccataacactggaggatgtggctgtggacttcacttgggaggagtggcaactcctgggcgctgctcagaaggacctgtacctcggccgctctagaactagtggatcccccgggctgcaggaattcgatatcaagcttatcgata

SEQ ID NO: 37075 - DNA, 286 bp, Homo sapiens
  misc_feature 271: n = A,T,C or G
aatacgactcactatagggcgaattggagctccaccgcggtggcggccgcccgggcaggtacagaaactcctgttggtgatggacaagagagcctcaggaatgaatgactcattggagttgctgcagtgtaatgagaatttgccatcttcacctggatataactcctgtgatgaacacatggagcttgatgaccttcctgaacttcaggcagttcaaagtggatcctacccaatctggcattgttaccttcggcccgctctaggaactagntgggattccccccgg

SEQ ID NO: 37076 - DNA, 407 bp, Homo sapiens
  misc_feature 55: n = A,T,C or G
tagggcgaattggagctccaccgcggtggcggccgaggtcggccgaggtactttnttttttttttttttttttttttttttttgggcaaataaaggattttattttttaaagaagtggcagtgtgagaatttaaaatcaatcacataaaacaatcaggaaaggggtggggagagaagtgtccagtacctgcccgggcggccgctctagaactagtggatcccccgggctgcaggaattcgatatcaagcttatcgataccgtcgacctcgagggggggcccggtacccagcttttgttccctttagtgagggttaattgcgcgcttggcgtaatcatgggcatagctgtttcctgtgtgaaattggtatccgctcacaattccacacaacatacgagccgggagcat

SEQ ID NO: 37077 - DNA, 416 bp, Homo sapiens
ggcgaattgtagctccaccgcgggggcggccgaaggagaaatagaacagcgcaggcaaaagaagaaaggcgcgggctgggtgggaagaggattcggactcgtcacactgcagagcagcagagcgagaaaggatgagaaaaggcagagaaggcgacggcagaagaaaaaaggaaaaactgcggccgctctagaactagtggatcccccgggctgcaggaattcgatatcaagcttatcgataccgtcgacctcgagggggggctccggtacccagcttttgttccctttagtgagggttaattgcgcgcttggcgtaatcatggtcataggctgtttcctgtgtgaaaaagttagccgctcacaattccacacaacatacgagccgggagcataaagtgtaaagcccggggggccta

SEQ ID NO: 37078 - DNA, 432 bp, Homo sapiens
gcgcgtaatacgactcactatagggcgaattggagctccaccgcggtggcggccgcccgggcaggtacacttcagctaaaatcagaattttattctgtctagacaaggttaagaagatgtatatataaccttttgcttgttgctgtgctaactgacatagctgattgtttgaataatttaagccgatcatacagtctgtttatgactgtagcatgtatctgtgaagagctgaccccgtgtgcagtgtagtgttcatgcagacctttttgctacttgatgagatatcacagcgcaaccgtcagctgccgtcagatggtaaaaagatggtgcatgtgcaggattttactgctttttgggataaggcatcatagacccctacttctacaaggcctttcctttactgtcatacctggcgaattgttagcttgtggt

SEQ ID NO: 37079 - DNA, 439 bp, Homo sapiens
tacgactcactatagggcgaattggagctccaccgcggtggcggccgggatcttcggcaagactcacgtctccaacaaccaagccccccaatgacaaccaaagcatcccaaatgaaatcatttctgcaagacccaaactagcctctattaacacgtacctcggccgctctagaactagtggatcccccgggctgcaggaattcgatatcaagcttatcgataccgtcgacctcgagggggggcccggtacccagcttttgttccctttagtgagggttaattgcgcgcttggcgtaatcatggtcatagctgtttcctgtgtgaaattgttatccgctcacaattccacacaacatacgagccgggagcataaagtgtaaagcctggggtgcctaatgagtgagctaactcacattaattgcgttgcgctcactgcccg

SEQ ID NO: 37080 - DNA, 417 bp, Homo sapiens
tacgactactatagggcgaattggagctccaccgcggtggcggccgggatcttcggcaagactcacgtctccaacaaccaagccccccaatgacaaccaaagcatcccaaatgaaatcatttctgcaagacccaaactagcctctattaacacgtacctcggccgctctagaactagtggatcccccgggctgcaggaattcgatatcaagcttatcgataccgtcgacctcgagggggggcccggtacccagcttttgttccctttagtgagggttaattgcgcgcttggcgtaatcatggtcatagctgtttcctgtgtgaaattgttatccgctcacaattccacacaacatacgagccgggagcataaagtgtaaagcctggggtgcctaatgagtgagctaactcacattaa

SEQ ID NO: 37081 - DNA, 404 bp, Homo sapiens
ctactatagggcgaattggagctccaccgcggtggcggccgaggtacataatagaattatactatctatagtaaagatttaggttgatattttattctatatgaggatggttgggatttaagtgttaattcctttaaaacaacgtctgtttatttagttgttaattaaaatatgtgagaaatggcccctctctcatagacacattcacaaatgtaagaggaacattttaaacttatccaattctattttgaagcaaataaaaattgagataaataaaatgcattcattaaggtaccaaggaaactctgaaaccaaaaatacatggatctggtcatgttgaagaaccagcatcaccactagcagcatatcagaaatctctagaagaaaccagcaagcttataata

SEQ ID NO: 37082 - DNA, 377 bp, Homo sapiens
tatagggcgaattggagctccaccgcggtggcggccgcccgggcaggtaccttgttaacaatatgtttgcaggcagtatgtttggtaaaagtcatcgccattctccattctcgattaaccaggggctcaatgcactgtggaaagccacaggaacctctgcccaagaaagcctggctgttgtgggaagtcagggaccccgaatggagggaccagctggtgctgcatcaggaaacataaattgtgaagatttcttggacatttatcagtttccaaaattaatacttttataatttcttacacctgtcttactttaatctcttaatcctgttatctttgtaagctgaggatatacgtcacctcaggaccactattgtacc

SEQ ID NO: 37083 - DNA, 432 bp, Homo sapiens; identical to SEQ ID NO: 37056

SEQ ID NO: 37084 - DNA, 451 bp, Homo sapiens
cgactcactatagggcgaattggagctccaccgcggtggcggccgggatcttcggcaagactcacgtctccaacaaccaagctccccaatgacaaccaaagcatcccaaatgaaatcatttctgcaagacccaaactagcctctattaacacgtacctcggccgctctagaactagtggatcccccgggctgcaggaattcgatatcaagcttatcgataccgtcgacctcgagggggggcccggtacccagcttttgttccctttagtgagggttaattgcgcgcttggcgtaatcatggtcatagctgtttcctgtgtgaaattgttatccgctcacaattccacacaacatacgagccgggagcataaagtgtaaagcctggggtgcctaatgagtgagctaactcacattaattgcgttgcgctcactgcccgctttccagtcggga

SEQ ID NO: 37085 - DNA, 429 bp, Homo sapiens
actactatagggcgaattggagctccaccgcggtggcggccgaggtaccacatgccacacaagaaaaatgaaccacaaaatgcccatatatatttcctcggatctctgttgcctgagtcctatctcctgcctctcagattgtttcagcatcatatttaagatagttctatttcttgaaatcaaaatgtttaaaatcccatttgctgcttgctctatttcttgatttttatattttaaaacattttgagggtaacacttaggttcaaaatatttaaaagcatatgaattatcacaaaagcttggtaatttataatttaattatatgtttccacatttcatccttactttatcagtaaaggctacaccttagtcacttttgcaggcaacgtggatttactgtaatctgtctacatttattcacccgattcc

SEQ ID NO: 37086 - DNA, 389 bp, Homo sapiens
tacgactcactatagggcgaattggagctccaccgcggtggcggccgcccgggcaggtactatacctcagtcctatttgaaagacctaattgaaagaaaaatcatagaaataagtaaaatgatttgttttataatttatccaccatgtccagtttggttagcttgttatgcaatataagtgaaatatcaggtttttacccgtgtcccttttatcatgaaaattaacacaaaatgtgcattctcttttgtttcatacttagcgggatattgattgttttgaaattatgatcaatacttaatttatttttttctgtccttgaagtcactacaccttgatacagtctttctagtagtcaccatgattcaacagtctcaaaaatcttacaaat

SEQ ID NO: 37087 - DNA, 412 bp, Homo sapiens
ccgccgtggcggccgggatcttctgtcaagactcacgtttccaacatccaagtcctccaatgacaaccaaagcatcccaaatgaaatcatttctgcaagacccaaactagcctctattaacacgtacctcggccgctctagaactagtggatcccccgggctgcaggaattcgatatcaagcttatcgataccgtcgacctcgagggggggcccggtacccagcttttgttccctttagtgagggttaattgcgcgcttggcgtaatcatggtcatagctgtttcctgtgtgaaattgttatccgctcacaattccacacaacatacgagccgggagcataaagtgtaaagcctggggtgcctaatgagtgagctaactcacattaattgcgttgcgctcactgcccgcttt

SEQ ID NO: 37088 - DNA, 419 bp, Homo sapiens
cgtaatacgactcactatagggcgaattggagctccacgcggtggcggccgaggtacctctcagctcctgatacatttattatacagaaattatagaccggctgacttaactattgctaagaaacatgcttcttgatacgttgatctggcagcggcatgggagatggatccaaagagattaaaactggagtgaaggagtccagtaatgatgtgaagagatgagggtctgaactaggacagaagtcagtcacagggatggatttgagacgttttggagggttacacatgcagtacctgcccgggcggccgctctagaactagtggatcccccgggctgcaggaattcgatatcaagcttatcgataccgtcgacctcgagggggggcccggtacccagcttttgttccctttagtgaggg

SEQ ID NO: 37089 - DNA, 425 bp, Homo sapiens
tatagggcgtattggagctccaccgcggtggcggccgaggtacatctacctaaaggactattatgtggaataatacatactaatgaagtattacatgatttaaagactacaataaaaccaaacatgcttataacattaagaaaaacaataaagatacatgattgaaaccaagttgaaaaatagcatatgccttggaggaaatgtgctcaaattactaatgatttagtgttgtccctactttctctctcttttttctttctttttttttattatggttagctgtcacatacaacttttttttttttgagatggggtctcgctctgtcaccaggctggagtgcagtggcgcgatctcggctcactgcaacctccacatcccatgttgaagtaattcttctgcctcagcctcccgagtagctgggact

SEQ ID NO: 37090 - DNA, 410 bp, Homo sapiens
tatagggcgaattggagctccaccgcggtggcagcggccgcccgggcaggtacactggaggctggagcctgcagatggcatggctctgcggctcaccttgctgcagttggtggtggtgacagagactgcagcttgactgtagtggtggttaccaggagctctgccactgcatgtccactagtgacgggttcgctccaccaccccagctgggtagccgctgctctcacataaggggtccaattaaaattgccaggaataaattcccccggactttgacttctcaagagctaagaaggtttgctgagtattctggcatgatgtttggtgatcaaacaactgctggccaaaaatgatgagtatttccccctcttgctgaagatgtgctccatacaatagtccatcacattcat

SEQ ID NO: 37091 - DNA, 365 bp, Homo sapiens
cgactactatagggcgaattggagctccaccgcggtggcggccgggtacagatgtccagtagacctactggatatgcaggcctgcagctcaggggagagctgggttaagaaccgtcaaggcagtaatcatctgcatttagatggcgagtgaagccatgacaggggctgaaatggcccagcaagaataaatcaaaccatgagaaacacatacatttaagaataaggagatgtggtcaggcgcggtggctcacacctgtaatcccagcactttgggaggccgaggcgggtcgagcggccgcccgggcaggtactcattagccagctcctcggactccccagcagcattgatgtcgttcttcactttg

SEQ ID NO: 37092 - DNA, 311 bp, Homo sapiens
cactactatagggcgaattggagctccaccgcggtggcggccgcccgggcaggtactactgaatccaactgccaacaataaaaagacttttatttagtagaggctacctttcccaccagtgactctttttctacaactgccttgtcagtttggtaattcacttatgattttctaatgttctcttggtgaattttattatcttgtacctcggccgctctagaactagtggatcccccgggctgcaggaattcgatatcaagcttatcgataccgtcgacctcgagggggggcccggtacccagcttttgttc

SEQ ID NO: 37093 - DNA, 428 bp, Homo sapiens
gactcactatagggcgaattggagctccaccgcggtggcggccgcccgggcaggtactgcggcgggtaggcctaggattgtgggggcaatgaatgaagcgaacagattttcgttcattttggttctcagggtttgttataattttttatttttatcccgcgtacaataaagcctgaaatagccaactaattgaatgttattcttaatcctttacactggcactaaaaatagttcatctgtaataagcatgaatacgaccatgtaataattaatggcactaattgaaaaggaataaaaaaatctaaccaccatagcaaaataaggggtttaagtattattaatagccctggtacctcggccgctctagaactagtggatcccccgggctgcaggaattcgatatcaagcttatcgataccgtcgacctc

SEQ ID NO: 37094 - DNA, 453 bp, Homo sapiens
cgactactatagggcgaattggagctccaccgcggtggcggccgaggtacgcggggacgcatcaatgcagagtccctctgtgaatttacaacacccaacacccatgagttcagtccttaagaaggaaaattgagcaagtatttaattggttggacattgcataaaagaggtccatatccaggctaactctagaaattttattctcaaacttagttggcctctttttcttctgtcagaggaccattcttagtggcactggggaaatcttggcacccagaagaattcaactgcgctcactgcaaaaatacaatggcctacattggatttgtagaggagaaaggagccctgtattgtgagctgtgctatgagaaattctttgcccctgaatgtggtcgatgccaaaggaagatccttggagaagtcatcaatgcgttgaaacaaacttggcatgtt

SEQ ID NO: 37095 - DNA, 415 bp, Homo sapiens
gtaatacactactatagggcgaattggagctccaccgcggtggcggccgaggtacttagatactggagttcagaagatgtgatttttgttgcttttcagaaaaaggaacgtggtagggagtgttttttcccacgcttttccagtaactttgcaaaagcattaattgttcactggcaattactaaatgtattttgttgctctgagaaactcagcagtgtacgcggggcttctctcgccaggcgtcctcgtggaagtgacatcgtctttaaaccctgcgtggcaatccctgacgcaccgccgtgatgcccagggaagacagggcgacctggaagtccaactacttccttaagatcatccaactattggatgattatccgaaatgtttcattgtgggagcagacaatgtgggctccaa

SEQ ID NO: 37096 - DNA, 184 bp, Homo sapiens
ctcactatagggcgaattggagctccaccgcggtggcggccgccatcttgggtcatcgatgagcctcgccctgtgcctggtcccgcttgtgagggaaggacattacaaaatgaattaatgtgttcccttaaaggatgggtcaggaaaacagactcctgttgtggatattttatttggaacggga

SEQ ID NO: 37097 - DNA, 224 bp, Homo sapiens
ggcgaattggagctccaccgcggtggcggccgcataatttaataacatcgtccttccatttggccgcgactgctctggaaaattggttcagtagtaaacagaattctagcaggtggaacaagaacaggcgaggcatcctgggcctggtctctcctggaggtctgggtgttgcagcctttcaagaacttgcgctggttgtggcctacacacctgggcgctgtgtg

SEQ ID NO: 37098 - DNA, 431 bp, Homo sapiens
ctactatagggcgaattggagctccaccgcggtggcggccgcccgggcaggtacatattatatgcaaggttacaaaaaaaaatcaatggttaatgattttttagctcaaccaagctaaaagatgtgaacaagaaattgaactcaaaacaacttaagatacaaagctcttgttactgataatgtctaataatattcatcaatttaccatatcttgttcttatattaaaatgttctatcattttcctaattattttaaagtcgattacaaaaatatatatatattcttgtagtgccagaaaattgaatacattaataaatggggtagaatagatgaatctcccatgaagaagaattccaaataatttatgaactctgccctcaaggatatggagcagaacttcctacttctctagtgtgagctgaatagtggc

SEQ ID NO: 37099 - DNA, 402 bp, Homo sapiens
atacgactcactatagggcgaattggagctccaccgcggtggcggccgaggtacatggatgggcggggaggtaactaaaagatcctttacacaataaagtagatgatcatgataaatgaggtaaggtcctattatcacacacttcaaacacggtagatcagaaacccgctatgatactcgcttcctgtctgtttgctaaggaatataaaatggctagaaagtttaatttgaaacctttgcctccatttggaatagtagacaccagttaagagggtgtcagatgcctttttttttttttttttttttggctggtccctgttgattggtcagaagatagctcagctaaaaggggaagttgtctgggtggttgctttttttctgacgtctgttcctcaggctgga

SEQ ID NO: 37100 - DNA, 450 bp, Homo sapiens
ctactatagggcgaattggagctccaccgcggtggcggccgcccgggcaggtacagaaagatttatcacccacaagcattgtgaatgcacctgggattcaaaactaattttgacgaaagccccatggcctgttagatctgcttcatatacaagacatagaaggcagcgtgatgcatacagtgcatttatggatcgtgtgggagaaaaagtttacaaagatatgcaagagcagatagctgagggaccaaaacagcatagggcttcctgaactctggcctgaatgttcatctcccgtgcatttcccagtgagaacattgatgaattctggcaccttcctggattctacagaaatctgcactctcccagaggcatgagaaagtgctaaaacaacaaatgaaagttgcataatttgaaattcccttgttaccacagggatcagaatccaatcat

SEQ ID NO: 37101 - DNA, 394 bp, Homo sapiens
actactatagggcgaattggagctccaccgcggtggcggccgcccgggcaggtacgcggggacatcaatgcagagtccctctgtgaatttacaacacccaacacccatgagttcagtccttaagaaggaaaattgagcaagtatttaattggttggacattgcataaaagaggtccatatccaggctaactctagaaattttattctcaaacttagttggcctctttttcttctgtcagaggaccattcttagtggcactggggaaatcttggcacccagaagaattcaactgcgctcactgcaaaaatacaatggcctacattggatttgtagaggagaaaggagccctgtattgtgagctgtgctatgagaaattctttgcccctgaatgtg

SEQ ID NO: 37102 - DNA, 208 bp, Homo sapiens
cgactactatagggcatttggagcaccaccgcggtggcggccgcccgggctggtacttcccgtgtctttgaagctgtttcagcttggactttctttgtctcctcctgtaatgtctgtatttctttctcctgcttttcctttaatatagcaatgtccctcattgcctgcaacttccgcttcaaactggattggatattttccttttgca

SEQ ID NO: 37103 - DNA, 459 bp, Homo sapiens
tatacactactatagggcgaattggagctccaccgcggtggcggccgaggtaccaaggcccaatcaccccaaacagtgacaggaacataatttcctgttgggaccagttctcggaattttgcaccaacatgatcccatagttccacatctaacgttcccttttcaggaaaccaaggacagtgttcttccactgcccttgaatagggtgaccatattttccatgggaacccgaactcccccattttaacaggaatttaatatagcagagataagcataatgtttagactctgcgtgacccatagttaccccggacaatacacagacaactcaccaatcgtcggggagccgaacaagcatttctgtggactggaccgatgaacatttctccgcacctaccaaagggaatcgggttcccacatgcacttaggaaaaagaaaaccacgttgggcgccagatat

SEQ ID NO: 37104 - DNA, 431 bp, Homo sapiens
atagggcgaattggagctccaccgcggtggcggccgccatcttgggtcatcgatgagcctcgccctgtgcctggtcccgcttgtgagggaaggacattagaaaatgaattgatgtgttccttaaaggatgggcaggaaaacagatcctgttgtggatatttatttgaacgggattacagatttgaaatgaagtcacaaagtgagcattaccaatgagaggaaaacagacgagaaaatcttgatggcttcacaagacatacaacaaacaaaatggaatactgtgatgacatgaggcagccaagctggggaggagataaccacggggcagagggtcaggattctggccctgctgcctaaactgtgcgttcataaccaaatcatttcatatttctaaccctcaaaacaaagctgttgtaatatctgatctctac

SEQ ID NO: 37105 - DNA, 422 bp, Homo sapiens
ctactatagggcgaattggagctccaccgcggtggcggccgaggtacttccttacatataaaaggtgctgaaaacagttgcttccaatgaaaataagatgatttaacaaagcaacacaaaatcatattaaaacacattattttctgggaaagatacgcacatacacaaaaatacatttcttagcattatcataatggcacagaagaaatttttaattattccccaaaatttgaaagataaaggcatagaaatcattataaacatgttaataaatatacatataaaaatataattagcaacatcaagaacaaatctgagaacatatgtaatgagaaaaaatttttgcatgcaacaaaagttcatttttaactagactgaaatacattgtatctcttaaaggttttatgtaatcccccacgtac

SEQ ID NO: 37106 - DNA, 229 bp, Homo sapiens
gaattgtagctccaccgcggcggcggccgaggtacatcatgttctatgtagtggaatttttttggacatggaggcatagagttcagttctggcaatgacacccacttcctctgtgacctggacaaagtcatttggattcactaaattgattcacttgtaatttctggttgtattcggtcctgtcagattggctcctcctcaaggtgccagagtagtccccagaaacact

SEQ ID NO: 37107 - DNA, 454 bp, Homo sapiens
gactatagggcgaattggagctccaccgcggtggcggccgcccgggcaggtactgtcgggacacctttgaccacccgactctcatagaaaacgagagtatatgcgatgagtttgcgccaaatcttaaaggcagaccacgcaaaaagaaaccatgcccacaaagaagagattcattcagtggtgttaaggattccaacaacaattccgatggcaaagccgttgccaaggtgaaatgtgaggccaggtcagtcttgaccaagccgaagaataaccataactgtaaaaaagtctcaaatgaagaaaaaccaaaggttgccattggtgaagagtgcagggcagatgaacaagccttcttggcggcactttataaatacatgaaagaaaggaaaacgccgatagaacgaataccctatttaggttttaaacagattaacctttggactatgtttcaagc

SEQ ID NO: 37108 - DNA, 406 bp, Homo sapiens
  misc_feature 300, 381: n = A,T,C or G
agggcgaattggagctccaccgcggtggcggccgcccgggcaggtacagctcctgattcccaggatagaagatggaaacaactttggggtgtccattcaggaggaaacagttgcagagctaagaactgttgagagtgaagctgcatcttatctggaccagatttctagatattatattacaagagccaaattggtttctaaaatagctgagcggagaccaaagtcagccgggagacagtgggtctgtgagagaccgaatagaggggctggggccacgagcgccattgacaagcaatgggngaagaaacagaaaaacaagagcgaagacagcaccaaggatgacattgatcttgatgccttggctgcagaaatagaaggagnctgggtgctgccaaagaacaggagt

SEQ ID NO: 37109 - DNA, 164 bp, Homo sapiens
ggcgaatgggagctccaccgcggtggcggccgtcgccatggtgaagctgagcaaagaggccaagcagagactacagcagctcttcaaggggagccagtttgccattcgctggggctttatccctcttgtgatttacctggcctactttggggataaaggattat

SEQ ID NO: 37110 - DNA, 465 bp, Homo sapiens
actactatagggcgaattggagctccaccgcggtggcggccgagtttgatttcttgcagtcctgagcgatggagcccgggggtgcctggttattgtccgccttctctctcagatgcttggcttgtttttcaagagaacctttttcgatattcattgctccatcgattggatccagtccttgttcagaaaattgtttcaaggcacttaaggctgcctgatcatggctggcttcaatggagcttccaatagcatggaaagtcatctgcacaggggctaatgtcagacaggtcacacactctttgccactttgtctatcacagtagtgaacctgaaagccttgaatccttgctaaatattccagttgttttgaaggttgtacctcggccgctctagaactagtggatcccccgggctgcaggaattcgatatcaagcttatcgataccgtcgacctcgagggggggcc

SEQ ID NO: 37111 - DNA, 419 bp, Homo sapiens
ggcgaattggcgctccaccgcggtggcggcctaggtacgtgttaattgaggctagtttgggtcttgcagaaatgatttcatttgggatgctttggttgtcattggggggcttggttgttggagacgtgagtcttgccgaagatcccggccgctctagaactagtggatcccccgggctgcaggaattcgatatcaagcttatcgataccgtcgacctcgagggggggcccggtacccagcttttgttccctttagtgagggttaattgcgcgcttggcgtaatcatggtcatagctgtttcctgtgtgaaattgttatccgctcacaattccacacaacatacgagccgggagcataaagtgtaaagcctggggtgcctaatgagtgagctaactcacattaattgcgttgcgctcact

SEQ ID NO: 37112 - DNA, 443 bp, Homo sapiens
cactactatagggcgaattggagctccaccgcggtggcggccgaggtacaagataataaaattcaccaagagagcattagaaaatcataagtgaattaccaaactgacaaggcagttgtagaaaaagagtcactggtgggaaaggtagcctctactaaataaaagtctttttattgttggcagttggattcagtagtacctgcccgggcggccgctctagaactagtggatcccccgggctgcaggaattcgatatcaagcttatcgataccgtcgacctcgagggggggcccggtacccagcttttgttccctttagtgagggttaattgcgcgcttggcgtaatcatggtcatagctgtttcctgtgtgaaattgttatccgctcacaattccacacaacatacgagccgggagcataaagtgtaaagcctggggtgccta

SEQ ID NO: 37113 - DNA, 481 bp, Homo sapiens
actactatagggcgaattggagctccaccgcggtgggcggccgaggtacaagaccagcaaagcccagcttctcggctgtgagctctgagaacctggggacgatccgccctcccgttgcgatggcaatcagctcaatttcaggtcctcctacccagcgaaccgcaggcaagttgttctgaagaagtaagtgatttgcttcatcatcaaagcctcgagcggccgcccgggcaggtacgcggggacatcaatgcagagtccctctgtgaatttacaacacccaacacccacgagttcagtccttaagaaggaaaattgagcaagtatttaattggttggacattgcataaaagaggttcatatccaggctaactctagaaattttattctcaaacttagttggcctctttttcttctgtcagaggaccattcttagtggcactggggaaatcttggcacccagaagaattcaactgcgctcact

SEQ ID NO: 37114 - DNA, 402 bp, Homo sapiens
ggcgaattgtagctccaccgcgctggcggccgaggtaccagggtagaacaaggaggacttcatttggggattcctcagagctcgtcattagagaagaacatctggcatttagaggaagagaaaaaattaaatggcccagagacttggagaaggaatagttgcctccgccgcacagcacccagcaccctgaggcgctcagagttcgtgcaaaacagcaagaaaacccaagaaatgacgctcctctcctcccagtcttcatcactggtggccccttctgggtctgtgtctgccgaaaatccagagcagaggatgctggagaagagagccaaggtcatagaagaacttcttcagacagaaagagactacattcgggatctggaaatgtgtattgagcggatcatg

SEQ ID NO: 37115 - DNA, 455 bp, Homo sapiens
actactatagggcgaattggagctccaccgcggtggcggccgcccgggcaggtactttttttttttttttttttttttttttcctctttggactaacagttaaatttacaaggggatttagagggttctgtggctcattcctggaaaataccattctacaaaaccatccacctacctgtctcaccccaacctcagtggctcattcctggaagatacgatcttcctacaccatccacctttcctgtttacttaaccccacacattctgaagaccattcttagaaaatcccgcgtacctcggccgctctaaaactagtggatcccccgggctgcaggaattcgatatcaagcttatcgataccgtcgacctcgagggggggcccggtacccagcttttgttccctttagtgagggttaattgcgcgcttggcgtaatcatggtcatagctgtttcct

SEQ ID NO: 37116 - DNA, 407 bp, Homo sapiens
tcactatagggcgaattggagctccaccgcggtggcggccgcataatttaataacatcgtccttccatttggccgcgactgctctggaaaattggttcagtagtaaacagaattctagcaggtggaacaagaacaggcgaggcatcctgggcctggtctctcctggaggtctgggtgttgcagcctttcaggactgcggctgctgtggcctacacaccccgcgtacctcggccgctctagaactagtggatcccccgggctgcaggaattcgatatcaagcttatcgataccgtcgacctcgagggggggcccggtacccagcttttgttccctttagtgagggttaattgcgcgcttggcgtaatcatggtcttagctgtttcctgtgtgaaattgttatccgctc

SEQ ID NO: 37117 - DNA, 200 bp, Homo sapiens
ctcactatagggcgaattggagctccaccgcggtggcggccgggcatttctcccagggatctctgtgcttccttttgtgcttcctgtgtgtgtggatatttaaaggggctggaaatgtgcaaaaacatgtcactacttagacattatattgtcattcttgctgtattcttagtgatgtttaatttatcttccatttttca

SEQ ID NO: 37118 - DNA, 426 bp, Homo sapiens
  misc_feature 348: n = A,T,C or G
tatagggcgaattggagctccaccgcggtggcggccgcccgggcaggtacactgttcattgtgggcaaaggcagttttaggagcttttggagtagaagttcatgtatcttccttttaatatgataccattattaacatgaaccagatactctctgaatgttggcttccttcttcatcctttaatcattttttgatggtaatggtccggttgcttcattcttggcttcctagttcaaattcttatgcttgaataaccaccagtcttgtttggacagtgttttactccaggctaagtcagaggccattagcaagacaataggctgcccatgactctggggcctgccccanttcagtcagctgggcccagagcatgaaggtcatgcggtgtataacatggcttgctttcaagatgcttgttttagcaaa

SEQ ID NO: 37119 - DNA, 438 bp, Homo sapiens
acgactcacttagggcgaattggagctccaccgcggtggcggcctaggtacacactactgccctagccaactttccagtgtctcaaatcaaccccatcattccaaaaatgagaaatgtttctacttgcttctgatctcttttcctggtgctaataggcctttttgtcgggaaaatcaattaccatctttcagagctagtatcatccaatctgaagccagaaaagtttatagcaacatgcctacccagagtgttgagtagaactgtattacttgggacccttgtctaccacacggcctaacaagccttaaaatctctagtagcccttttcttcatctgtaaaactaggttaatatttatgttacaagttacacataaattccaaacttttacatctccccgcgtacctgcccgggcggccgctctagaactagtggatc

SEQ ID NO: 37120 - DNA, 471 bp, Homo sapiens
actcactatagggcgaattggagctccaccgcggtggcggccgagggaccaaaattttggccatttcctttaaattttctttcccctgttttttttttaaggtctgaatttcctgctgctgttcacaaagatgctttttatctttaactttttgttttccccacttccgaccccggcgttgatctgcatcctgacatttggagctgccatcttcttgtggctgatcaccagacctcaacccgtcttaccctcttcttgacctgaacaatcaggtctgtgggaaattgagggaggagcacggtagggggttttcccagaagaacattgaccctaacaagttgctgccttctcgagcggccgcccgggcaggtacaggtaaaattgaatttaaaaaaaatgctacacatgtgtagggcagtttcattataatttgtccatctttgactgaaacattattattcagcgtatgac

SEQ ID NO: 37121 - DNA, 389 bp, Homo sapiens
tacgactactatagggcgaattggagctccaccgcggtggcggccgaggtacagagaagcaggttgagtggatggcaaagtgaccggttgagggaccaaaatgataggagggtgaggggctgtggtggatgggggagggcctgcagaattacaggtaaattgtagtttggattgctcccggaggcaaaaactgcaaaggtttggagagggaagagttagcatagatatggtcctgggctgtctgagttggggccgcaggagctacaagtgtcggctcttcgtgaaaagaaataagatcatcagggggtgatgttaagccaaagtcactggagttagatattgaatcctcagtatcgtcaggtgggggaggagtaggcaaagggaggggc

SEQ ID NO: 37122 - DNA, 400 bp, Homo sapiens
ctactatagggcgaattggagctccaccgcggtggcggccgcccgggcaggtaccttgttaacaatatgtttgcaggcagtatgtttggtaaaagtcatcgccattctccattctcgattaaccaggggctcaatgcactgtggaaagccacaggaacctctgcccaagaaagcctggctgttgtgggaagtcagggaccccgaatggagggaccagctggtgctgcatcaggaaacataaattgtgaagatttcttggacatttatcagtttccaaaattaatacttttataatttcttacacctgtcttactttaatctcttaatcctgttatctttgtaagctgaggatatacgtcacctcaggaccactattgtacctcggccgctctagaactag

SEQ ID NO: 37123 - DNA, 297 bp, Homo sapiens
ttcagcttctgatattgtgattactgtgatgttctttcattcatacagtaagtatctgcccaatacgtaacttccgagatctattgcttcctacataattagacaagcctcctcacacatatgggcccatgccgtgcacatagcaggcactcaacaagtgtttgcttaactacagaagaataatataattgccttccttcttaactgttttacctttttctatacttgatatatttgaaaaacaacatgcttgcaaaactaaaatctaacatgcattactaactttatcaaaagatc

SEQ ID NO: 37124 - DNA, 438 bp, Homo sapiens
gaattggagctccaccgcggtggcggccgccttggcaggtaccgttttttcaggcacaatgtaggtttcaccccgttgccgaaagactaagcgtcccgttggccagtgcaacgaagaacggaggaagcgacaagatttcagtttgtaagtagtgagagcaatgatcttggctttgcatggtgctcaggaagccttccccgctcccaaaccagaaaggaatccatccagattttcctccactgtctggatggccgctctgtggatgcttccatctgtatccattgccggcacctggtgagattccgtctctagagcctttgaggtcactcctgacgctgacatggctgtgaagagctgggtgccaggcattactgcctccaaggttgctttgcgaggaataggtggggcatcaggaagaagccagttgcaggcaaggcc

SEQ ID NO: 37125 - DNA, 459 bp, Homo sapiens
tatagggcgaattggagctccaccgcggtggcggccgaggtaccagttgtaaaattaccaggaaccgccatgcctcaagatcgccctgttttctggcttcatcaatgactgcatgcagtgcaccaccctgtccactacgtgatgctgtaggattaagtctcacagtgggcggctgaggatacagcgccgcgtcctgtgttgctggtgaattagacgccatcgctgtgggttgctggtatggtgccgtgctatttggcacaggacacaccgcttgaggtctgtattgaacctctgaaggaggccgatactgaagctcggttggcagccggtattgataaactaccagcggttgggtcttattttctaccggctgatattgtggatactgtatctgagttggcattgtcgggatagagactctggccctttctacttgattttctcttggggtttgtgctt

SEQ ID NO: 37126 - DNA, 185 bp, Homo sapiens
actactatagggcgaattggagctccaccgcggtggcggccgaggtactggaggagtggacactgctgccacaggcggtgtctttgatatttctaatttggaccgactaggcaaatcagaggtggagctggtgcaactggtcatcgatggagtaaactatttgattgattgtgaacggcgttctg

SEQ ID NO: 37127 - DNA, 429 bp, Homo sapiens
gtaatacactactatagggcgaattggagctccaccgcggtggcggccgcccgggcaggtacttcccaactaggggtgagtttgccacccttacccccatcccagtgaatatttgcaattcctaaagacgtgttttgattgtcacacctgggtggggaacatgctactggcatctaatgcatagagggcagtaatgctgctaaacatctttcaacgcacaggacagagccccacaaaagagaattatctagccccaaatgtccatatcactgctgttgagaaaacctaccgcaggatcttactggcttcataggtaagcttgcctttgtttctggcttctgtagatatataaaataaagacactgcccagttccctccctcaacgttcccgagccagggcctcaagggcaatttccaattaacagtaga

SEQ ID NO: 37128 - DNA, 604 bp, Homo sapiens
gactactatagggcgaattggagctccaccgcggtggcggccgcccgggcaggtaccaacatgaaatgacacgaatttaagtgaagctcaacaacgaaaagcaaaaagaaccaaagaggaagcaactgaaacaacatctggatgtatttaaaaatatacgatgcctccaaaatcaggtgtcataatgaaaattctgaagaaatgccaccggacatagccaacgcacctacgctgttgttattcatttcctgcttttcacagaaaacaattttgttgcatggaagatcgtgaacttcaaagggcagaggggaaactgtcccttggcctctacccctccaaggccccactttttcgtcaacactccttggacgcagcagaagtatgaacataatatggtcctgaatgaggctgagtctttgggcgcagaagacccgggttaataaaaataggaaggtggtgtgaagaccagaaaggaggctgttgcactagttcaggaagagaagaggaggtgggcgacagaagtagaggcagcgctctgagggaccttgggcaggtggaagccacaaaactggatggccatgagggcaaggaggcacctgttgaa

SEQ ID NO: 37129 - DNA, 456 bp, Homo sapiens
actactatagggcgaattggagctccaccgcggtggcggccgaggtactggatatagtcattttttaaaatgctacaaactgttcaaaagagcatgaacaacatgataactccttataattttgttgtaagacaaatggctaaaagtatgtgggatgtttaatttggataagtggaaattctatcacttgataagctctcttgaagaataattatttgaaagattggacttaattctgtattgcctgaagtgtaaatcagaagtcaacaattagattgcaaattatgaaaagcataacttttctaattgtttagtctttttagagaaacaagcccaggaaaaaagtaagattctcattcattggagataagatttctatttatcaaagatacttcagaagagttagatagcaagtaggtaaaatgtcttttaaaggtatctgacatctttaaagct

SEQ ID NO: 37130 - DNA, 164 bp, Homo sapiens
tacgactactatagggcgaattggagctccaccgcggtggcggccgccacgctggttttgcatcttcaggagacgctcgtagccctcgcgcttctcctcggccaattcgcggaagaagtggctcacgccttccagagccacatcatcgtcggtcgaatatagaa

SEQ ID NO: 37131 - DNA, 542 bp, Homo sapiens
tacgactcactatagggcgaattggagctccaccgcggtggcggccgaggtacgcggtgtggttgagccgggtagggaaagcagcctaaagcccgggacaggcacacaggcccaggtgtgtaggccacagcagccgcagtcctgaaaggctgcaacacccagacctccaggagagaccaggcccaggatgctcgcctgttcttgttccacctgctagaattctgtttactactgaaccaattttccagagcagtcgcggccaaatggaaggacgatgttattaaattatgcggccgctctagaactagtggatcccccgggctgcaggaattcgatatcaagcttatcgataccgtcgacctcgagggggggcccggtacccagcttttgttccctttagtgagggttaattgcgcgcttggcgtaatcatggtcatagctgtttcctgtgtgaaattggtatccgctcacaattccacacaacatacgagccgggagcataaagtgtaaagcctggggtgcctaatgagtgagctaactca

SEQ ID NO: 37132 - DNA, 645 bp, Homo sapiens
  misc_feature 547: n = A,T,C or G
tacgactcactatagggcgaattggagctccaccgcggtggcggccgaggtacagtattgttaataaagcagcccagtatagttgtaaacatcttaaatgtagtaaacaagacttggcatgtcttttctccccaaaacatgccattacaatgctctttccatgaataattattcttcctagaaaagttttcaggtatattttaaatctataaaaaaaatacactgaaatatgtgaaaagatttagtcatggcaatttcactgcagcttttattgcctctgttggtaatatgacagggactgtaagaaacacaattgaacttacagagatatgcagatgatattcactaaagataatcttcatctcaagtattttttatatgtgggcacttctaattttatacatttttctatttaaaaagcattacattttaaatttgtacctgcccgggcggccgctctagaactagtggatcccccgggctgcaggaattcgatatcaagcttatcgataccgtcgacctcgagggggggcccggtacccagctnttgttccctttagtgagggttaattgcgcgcttggcgtaatcatggtcatagctgtttcctgtgtgaaattgttatccgctcacaattccacacaaca

SEQ ID NO: 37133 - DNA, 208 bp, Homo sapiens
actactatagggcgaattggagctccaccgcggtggcggccgccatcttgggtcatcgatgagcctcgccctgtgcctggtcccgcttgtgagggaaggacattagaaaatgaattgatgtgttccttaaaggatgggcaggaaaacagatcctgttgtggatatttatttgaacgggattacagatttgaaatgaaagtcacaaaag

SEQ ID NO: 37134 - DNA, 404 bp, Homo sapiens
ggcgaattgtagctccaccgcggtggcggccgcataatttaataacatcgtccttccatttggccgcgactgctctggaaaattggttcagtagtaaacagaattctagcaggtggaacaagaacaggcgaggcatcctgggcctggtctctcctggaggtctgggtgttgcaacctttcaggactgcggctgctgtggcctacacacctgggcctgtgtgcctgtcccgggctttaggctccccgcgtacctgcccgggcggcgcgtggtctacgccgagtgacagagacgctcaggctgtgttctcaggatgaccgagtgggagacagcagcaccagcggtggcagagaccccagacgtcaagctctttgggaagtggagcaccgatgatgtgcagatcaat

SEQ ID NO: 37135 - DNA, 435 bp, Homo sapiens
actatagggcgaattggagctccaccgcggtggcggccgggcagtagaggaaattgcggtagtgaccctcgggcctcgccatgaagagccgctttagcaccattgacctccgcgccgtacgaaaggacaagagaaataaggcctacttcacaaagcgccttcccccgtaaatgatatcatctcaacttagtattatacccacacccacccaagaacagggtttgttaaaaaaaaaaaaaaaaaaaaacaaaaaaggtccttccttttttatgttttttttttttggagtttttaaacttttatttgcatattaaaaaaattgggcattccaataattaaaatcatttgaacaaaaaaaaaatggcactctgattaaactgcattacagcctgcaggacaccttgggccaccttggttttactctaaatttcactg

SEQ ID NO: 37136 - DNA, 658 bp, Homo sapiens
  misc_feature 129, 182, 215, 279, 296, 388, 488, 555, 588: n = A,T,C or G
gcgaattggagctccaccgcggtggcggccgggcatttctcccagggatctctgtgcttccttttgtgcttcctgtgtgtgtggatatttaaaggggctggaaatgtgcaaaaacacgtcactacttanacattatattgtcatcttgctgtttctagtgatgttaattatctccatttcancaaatgtgtggcctcaaatggtaaagtcagcancctttcttatttctcacctggaaatacatacgaccatttgaggagacaaatggcaaggtgtcancataccctgaacttganttgaaagctacacacaatattattggtttccaagcatcacaaacaccctctctgtttcttcactgaacacagaattttaatacttatttcantgggctgttggcaagaacaaatgaaccaatctacataaagtcactagtgcagtgcctgacacacaccattctcttaaggtcccctctaaaaatcccacangtcatataacttcttggggagcaatgactcacacctataatcccaacactttaaaaagctaaagcangtggatcaccttaagtcaagaattcaaaaccancctaaccaatataataaaaccccatctctactaaaaatacaaaaattaaaaaaaaaaaaaaaatacctca

SEQ ID NO: 37137 - DNA, 559 bp, Homo sapiens
cgcgtatacgactcactatagggcgaattggagctccaccgcggtggcggccgcccgggcaggtacagactctcattttatgacgtatcctactgcatcaggacatttgtgtcaatgtcaggtgacgaggggaaatgaaagtgatgagacgatgagaggagtgaaataccaaggacgccatactaggaaacccaggtctatttgttatcagagtaaggatcaagccagatagcctgttatgtagtttctccgataaaagattttgaaagcaggtgctgtgggcatctgtatggggaatcgcactcatagaattattttcatttgtaaatatttggtatcaggccaagcaagggaaagaagctttactgtattaccatctttcctggaaaagattgatttttctctctcccttaggggatatgaggtatgatacctgcaaccaaaataagctggctgttaagtgctctctccttaactattgtccaagcaatgtacctcggccgctttagaactagtggatcccccgggctgcaggaatttcatatcaagcttatcgata

SEQ ID NO: 37138 - DNA, 510 bp, Homo sapiens
gctccaccgcggtggcggccgataattaataacatcgtccttccatttggccgcgactgctctggaaaattggttcagtagtaaacagaattctagcaggtggaacaagaacaggcgaggcatcctgggcctggtctctcctgaggtctgggtgttgcagccttcaggactgcggctgctgtggcctacacacctgggcctgtgtgcctgtcccgggctttaggctcccgcgtacctcggccgctctagaactagtggatcccccgggctgcaggaattcgatatcaagcttatcgataccgtcgacctcgagggggggcccggtacccagcttttgttccctttagtgagggttaattgcgcgcttggcgtaatcatggtcatagctgtttcctgtgtgaagatgctatccgctcacaattccacacaacatacgagctcggagcataaagtgtaaagcctggggtgcctaatgagtgagctaactcacattaattgcgttgcgctcac

SEQ ID NO: 37139 - DNA, 672 bp, Homo sapiens
ggcgaattggagctccaccgcggtggcggccgaggtacttttttttttttttttttttttggagagacagggtctcactttgttgcccaggctattttctggatgtctattaaaaaaaaaattagtcctgcacagtgttctagaaagggtttttcttttcagaatatccatattctcaagtagcaagttagaatataaggaatatttgccattaaacctttctgttagaaatgtaaacatgaaattacctaatatagacctatctcagatgctaaatagaattgtttataacacctttggaatataattatgtgagctacacttaaccatctggcattttgcttcctgcggacaatttgcaatagcatagaaaaatattttgtttgtgtatttcttatcaaacagatatgctaaagttctgtttagagagtaatagcattttattctaacttttaaaataaggtagtccatttgcagcagcttgatatataagtaaacaaaaatttttaatattaataaaacactagcacatacactgaaagcatctaagaaattcaaaatataaaacacttaccaagtaatgaccatatgagtggtaacatattgaataaaggccctttgaagaagttggagagttatgattactgagcaggctagataattaaataatta

SEQ ID NO: 37140 - DNA, 619 bp, Homo sapiens
gactcactatagggcgaattggagctccaccgcggtggcggccgcataatttaataacatcgtccttccatttggccgcgactgctctggaaaattggttcagtagtaaacagaattctagcaggtggaacaagaacaggcgaggcatcctgggcctggtctctcctaaggtctgggtgtccacctttcaggactgcggctgctgtggcctacacacctgggcctgtgtgcctgtcccgggctttaggctgctttccctacccggctcaaccagtctccccgcgtacctgcccgggcggccgctctagaactagtggatcccccgggctgcaggaattcgatatcaagcttatcgataccgtcgacctcgagggggggcccggtacccagcttttgttccctttagtgagggttaattgcgcgcttggcgtaatcatggtcatagctgtttcctgtgtgaaattgttatccgctcacaattccacacaacatacgagccgggagcataaagtgtaaagcctggggtgcctaatgagtgagctaactcacattaattgcgttgcgctcactgcccgctttccagtcgggaaacctgtcgtgccagctgcattaatgaatc

SEQ ID NO: 37141 - DNA, 526 bp, Homo sapiens
  misc_feature 482: n = A,T,C or G
cgcgcgtaatacgactcactatagggcgaattggagctccaccgcggtggcggccgcccgggcaggtacagtggcacgaacttggctcactgcaacctccgcctcccaggttcaaacagttctcctgccttagtttccaaagtagctgggattacaggcacccaccaccatgcccggctaatttttgtattttcatagagatggggtttcaccatgtttgaccaggctggtctcgaactcctgacctcaggtgatctgcccaccttggcctcccaaagtgctgggattacaagtgtgagccacggtgcccggcctgattttcttcttatatttaaggatggattcttggcttaaaaagaggaaactagaacactttttcaatccacggctgcactatctaggactgccattgtgagcttatagctatccaatacttaaaacttcctgatgagatcagtggtgatagtcatgaaggctaactnttgacactgtataatgaagtgtgtcaccatgtggaaaatgtata

SEQ ID NO: 37142 - DNA, 421 bp, Homo sapiens
agggcgaattggagctccaccgcggtggcggccgaggtacgcggggcgtccgcctcagttcccgccgaaggacgtattcgctgaactgggacgagtctactcctcccccacaggagcccacgatttcaaatcctctttgctgcaacctctcgaggacctgcgagggaacaagacaagcatccagttcgagcggccgcccgggcaggtacccactctggacgtatgtgttggtgttctcttcccgtttctgttggtccagtctgtgttcttctgtaggatgtctgtgcaggccagaccaaagtctcctatttttacttgctgatcagggtcatgaagaaaaatatttcttggcttcagatctcggtgcacaattcccatgttatgtatgtaaaacacaccttctaccaattcttgaaaaatt

SEQ ID NO: 37143 - DNA, 231 bp, Homo sapiens
ctactatagggcgaattggagctccaccgcggtggcggccgtgcgagccctctgccagatcactgatagcaccatgctgcaggctattgagcgctacatgaaacaagccattgtggacaaggtgcccagtgtctccagctctgccctcgtgtcttccttgcacctgctgaagtgcagctttgacgtggtcaagcgctgggtgtaatgagggctcaggagggcagtcatcca

SEQ ID NO: 37144 - DNA, 420 bp, Homo sapiens
actactatagggcgaattggagctccaccgcggtggcggccgaggtacctttcattggattgtccatggtgcatcgctttagcaagcggcgtgactctccgctgcccgtcatcttggccaatatctatctgctggttcctcctgtgctcaacccaattgtctatggagtgaagacaaaggagattcgacagcgcatccttcgacttttccatgtggccacacacgcttcagagccctaggtgtcagtgatcaaacttcttttccattcagagtcctctgattcagattttaatgttaacattttggaagacagtattcagaaaaaaaatttccttaataaaaatacaactcagatccttcaaatatgaaactggttggggaatctccattttttcaatattattttcttctttggtttct

SEQ ID NO: 37145 - DNA, 406 bp, Homo sapiens
ggagctccaccgcggtggcggccgaggtacaattacattcattactttttggagcccattcatgttaggcttgattaaaaaggtagactcagtagtcagtctcagaatccagtgatcagcattcaagcatatagctaactctagtgtattccaaacctacacttcatgaaaaaatatacaactggcatttacatgccattcaagctacaggataaatgtcaactctgaaagacatcatttatttacaactatattgggggaaaaaagaggagaccaaaccaaaatattaacaaggattatacctgggcaatagaaatatgggttactttttttttctttgacttctctgtagtttcccaattttctttaaagagtttgtagtgcttttacatatatgagcgatgcc

SEQ ID NO: 37146 - DNA, 647 bp, Homo sapiens
gcgtaatacgactcactatagggcgaattggagctccaccgcggtggcggccgcataatttaataacatcgtccttccatttgtccgcgactgctctggaaaattggttcagtagtaaacagaattctagcaggtggaacaagaacaggcgaggcatcctgggcctggtctctcctgaggtctgggtgttgcagcctttcaggactgcggctgctgtggcctacacacctgggcctgtgtgcctgtcccgggctttaggctgctttccctacccggctcaacccccgcgtacctcggccgctctagaactagtggatcccccgggctgcaggaattcgatatcaagcttatcgataccgtcgacctcgagggggggcccggtacccagcttttgttccctttagtgagggttaattgcgcgcttggcgtaatcatggtcatagctgtttcctgtgtgaaattgttatccgctcacaattccacacaacatacgagccgggagcataaagtgtaaagcctggggtgcctaatgagtgagctaactcacattaattgcgttgcgctcactgcccgctttccagtcgggaaacctgtcgtgccagctgcattaatgaatcggccaacgcgcggggagaggcggtttgcgt

SEQ ID NO: 37147 - DNA, 517 bp, Homo sapiens
  misc_feature 223: n = A,T,C or G
acgactcactatagggcgaattggagctccaccgcggtggcggccgcccgggcaggtacaaattgttggcagttcttaaagggacagaagattactgtttacattttgcagtctcttgcttttttaagacaatttcatgaatgataaaagtgatgtcgggaagacataaacctgaaactccaacccccatccatcgcttcttttattgttgttaaaatcatcnatataagtaattctgagtttaacgactatacttcagcacattcagaataatattagaaagtattttcctacaatcatttaataaccagtgaccacaatacaataaagatttggttctaagattacaaataatgaaaaatgttaactttgagattcaaaaccctgtagcatctggaaaaggttgtttataaagtataatcataacaataacattaagacttatgtgtgaaataaaacatttctgaaacacttaggaatacatgcttatcccacttttgggataactactagtacc

SEQ ID NO: 37148 - DNA, 424 bp, Homo sapiens
agggcgaattggagctccaccgcgggggcggccgaggtactactcgattgtcaacgtcaaggagtcgcaggtcgcctggttctaggaataatgggggaagtatgtaggagttgaagattagtccgccgtagtcggtgtactgtgacaagtgcgggacgtcctattaggattaccgtcccccaggcattacttcttattgcagtaagacctctaaaaggtggagctgtacagtagtgcactcttggctcactgtagcctcgacctccggggctcaagtgatcctcctgccttagccccacaagtagtgggactataggcacacagcaccatgcccatctaagtttttgtattttatgtagagacaaggtttcaccatgttgcccaggctgatcttgagctcctgagctcaagtgatctgcccacc

SEQ ID NO: 37149 - DNA, 527 bp, Homo sapiens; identical to SEQ ID NO: 33247

SEQ ID NO: 37150 - DNA, 243 bp, Homo sapiens
actactatagggcgaattggagctccaccgcggtggcggccgaggtacgcggggagattctggaggcgaagaacgcaaagctgagaacatggacgttaatatcgccccactccgcgcctgggacgatttcttcccgggttccgatcgctttgcccggccgctctagaactagtggatcccccgggctgcaggaatttcgatatcaaggctttatcgattaccgttcgtaccttcgtagggggg

SEQ ID NO: 37151 - DNA, 428 bp, Homo sapiens
attggagctccaccgcggtggcggccgaggctgtcctctttgggttggtcactctgagatcatcctccactacctggattcctgcactggccgtgaacttctgccaagctccccagtcatcctggtcaaagggatcttcagtagacaccactgggtagtttttgatgaaggacttgtaccatgttgacaaaaatgccagatcaaatggatttgagaaataagcccaattcaaggctggctcagccctccacggggcctcccagggaaaggaattcctttatgttcttggaagcccttttctagaaaagccattccattcatacctttgtagagcagtgggctgggtgtggagggcagcgcggagggtatctgcaagagcctgtatttttcgccttccttgcccccactccttttatccttttaaaagt

SEQ ID NO: 37152 - DNA, 421 bp, Homo sapiens
tactatagggcgaatgggagctccaccgcggtggcggccgttaaacatgtgtcactgggcaggcggtgcctctaatactggtgatgctagaggtgatgtttttggtaaacaggcggggtaagatttgccgagttccttttactttttttaacctttccttatgagcccgcgtacaatttctggccgggtcttcttcttcctgcagaatttccttagctttcgtcctcagaggaacgaactctgtgaagtgtttgtcatagtattcatccaaggcacgcatatacttgctgtagctgatgagccaattgacagaggggaaatgcttacgttgagctagtttcttatctaagccccagaacacctgaacgataccaagagtggcagatgtaactggatcagaaaaatcaccaccaggtggaga

SEQ ID NO: 37153 - DNA, 392 bp, Homo sapiens
atacgactactatagggcgaattggagctccaccgcggtggcggccgcccgggcaggtacaacagtggtagcagtggaaagggaaagcctggcagagtattgtcagctgagaaacagaaaagtagcaacagccatcttatttttgctccactgagcacatttcaccactcagaccatgggatgagagtcacatttctgatgggaggaggaggaagaaccaatagctggctccctggctctgaccccttgagttgagacacatccttatttactccaggctattcatgcttcagattcaaacaattccttcccaaaagcttttccaagtgtggcctgtggcccatgggtgaaaagagaagttctgatctagaaaaatcatgtccattcatggg

SEQ ID NO: 37154 - DNA, 593 bp, Homo sapiens
ctcactatagggcgaattggagctccaccgcggtggcggccgaggtacccttcattggattgtccatggtgcatcgctttagcaagcggcgtgactctccgctgcccgtcatcttggccaatatctatctgctggttcctcctgtgctcaacccaattgtctatggagtgaagacaaaggagattcgacagcgcatccttcgacttttccatgtggccacacacgcttcagagccctaggtgtcagtgatcaaacttcttttccattcagagtcctctgattcagattttaatgttaacattttggaagacagtattcagaaaaaaaatttccttaataaaaatacaactcagatccttcaaatatgaaactggttggggaatctccattttttcaatattattgtcttctttgttggcttgctacatataattattaataccctgactaggttgtggttggagggttattacttttcattttaccatgcagtccaaatctaaactgcttctactgatggtttacagcattctgagataagaatggtacctgcccgggcggccgctctagaactagtggatcccccgggctgc

SEQ ID NO: 37155 - DNA, 612 bp, Homo sapiens
  misc_feature 501, 539: n = A,T,C or G
gcgaattggagctccaccgcggtggcggccgaggtactaactcatccagtatctgattctgtcttttcctctatccatctgtcttccatctttgcatccatcattcaacgaaatttacagcctatgcagatgttctgtggtcttaaacatgttgtattcctctttgccttggccatgcttcctcccctcccagccgttgttctcccccacgagaatatcttctcttttctgcttcttagtggttctattctcagtatctgaaactctcattttctgtccccgcgtacagtcagaagtgatctctactttttcttaaagctgactggcgcccgcaggggccgccgacctcttcacagacccacggaaactgccggccgctctagaactagtggatcccccgggctgcaggaattcgatatcaagcttatcgataccgtcgacctcgagggggggcccggtacccagcttttgttccctttagtgagggttaattgcgcgctnggcgtaatcatggtcatagctgtttcctgtgtgaaatngttatccgctcacaattccacacaacatacgagccgggagcataaagtgtaaagcctggggtgcctaatgagt

SEQ ID NO: 37156 - DNA, 194 bp, Homo sapiens
tatagggcgaattggagctccaccgcggtggcggccgcccgggcaggtacgcgggggcggcgcgggtcctccatatgctgagcgccggtcccctgggcccacttttctttctctatactttgtctctgttgtctttcttttctcaagtctctcgttccacctgaggagaaatgcccacagctgtggaggcgcag

SEQ ID NO: 37157 - DNA, 460 bp, Homo sapiens
atagggcgaattggagctccaccgcggtggcggccgcccgggcaggtactacagagataccttgattccaagtatcccacttactttccacaaccaaaagttttgttccagttttcataaagctctaaatcttttggagaaacactaggtcgcacagttctaaaagcattttcaaaatcaatgtaagctatgggtcgaacttgatccggtgttatggtagcaatgtcagcagtttgtaaactgcgaataggaccaagagaagcctccctgcaaagctgtgtcatgtctgctcctgaaaacgcatcagactgctgtacctcggccgctctagaactagtggatcccccgggctgcaggaattcgatatcaagcttatcgataccgtcgacctcgagggggggcccggtacccagcttttgttccctttagtgagggttaattgcgcgcttggcgtaatcat

SEQ ID NO: 37158 - DNA, 426 bp, Homo sapiens
ctactatagggcgaattggagctccaccgcggtggcggccgaggtacaacatgctgaatatttattctattaatgacatttacaatacctttatcacctctttctctcatttttgctctaaataattaagttggacattttatcaagttgataagttgacataacttagtctccattaatagtaaattgtattagccagggttctctagaggaacagaactaatggaatgcagatatatatatatatatatatatatgaatgaatgtattaagtattaactcataggatcacaaggtcccacaataggccgtctgcaggctgaggagcaaggagagccagtctgagttccaaaattgaagaacttggagtctgatgttccagggcaggaagcatccagcacaggaaaaagatgtcggctgggaagc

SEQ ID NO: 37159 - DNA, 540 bp, Homo sapiens
  misc_feature 227, 251, 275: n = A,T,C or G
gcgcgtaatacgactcactatagggcgaattggagctccaccgcggtggcggccgaggtacttaaaaaatggaaaaagaggatcatcgataaatgagagaagagtctatattcgttgatgggtgagtgttttgttttgttttgtttttttgaggcagagtctcgctctgtcgcccaggctggagtgcagtggtgcgatctcggctcaccacaacctccgcctcccangttcaagtgattcttctgcctcancttcccgagtagctgggacttcangcacgcaccaccatgcccagctaatttttgtattttttgtaaagacagggtttcaccatattggccaggctggtctcaaactcctgacatcatgatctgcctgccttcacctcccaaagtgctgggattacaggtgtgagccactgtgcccagccgagtgttttaaaatcagctatccctacatccactgctgattcatttagtatcaaatcagtagccttatccttggggcccaactgaagagcctcctacggctccagtgcat

SEQ ID NO: 37160 - DNA, 520 bp, Homo sapiens
gagctccaccgcggtggcggccgcccgggcaggtacgcgggaatctgtatgtttttcagccgtctctagcagtatttaaaggacaaggaaccaaagaatatgaaattcatcatggaaagaagattctatatgatatacttgcctttgccaaagaaagtgtgaattctatgttaccacgcttggacctcaaaattttcctgccaatgacaaagaaccatggcttgttgatttctttgccccctggtgtccaccatgtcgagctttactaccagagttacgaagagcatcaaatcttctttatggtcagcttaagtttggtacctcggccgctctagaactagtggatcccccgggctgcaggaattcgatatcaagcttatcgataccgtcgacctcgagggggggcccggtacccagcttttgttccctttagtgagggttaattgcgcgcttggcgtaatcatggtcatagctgtttcctgtgtgaaattgttatccgctcacaattccacacaacata

SEQ ID NO: 37161 - DNA, 633 bp, Homo sapiens
gagcgcgcgtaatacgactcactatagggcgaattggagctccaccgcggtggcggccgcccgggcaggtacgggcaggtactcttcatacctcgttggatgtggaaatgcctactgtcccaatcaaaaagttctaaaatactactatgtttgccaatattgtcctgctggtaattgggctaatagactatatgtcccttatgaacaaggagcaccttgtgccagttgcccagataactgtgacgatggactatgcaccaatggttgcaagtactactcgattgtcaacgtcaaggagtcgcaggtcgcctggttctaggaataatgggggaagtatgtaggagttgaagattagtccgccgtagtcggtgcactcgtaggttcagtacctcggccgctctagaactagtggatcccccgggctgcaggaattcgatatcaagcttatcgataccgtcgacctcgagggggggcccggtacccagcttttgttccctttagtgagggttaattgcgcgcttggcgtaatcatggtcatagctgtttcctgtgtgaaattgttatccgctcacaattccacacaacatacgagccgggagcataaagtgtaaagcctggggtgcctaatgagtg

SEQ ID NO: 37162 - DNA, 200 bp, Homo sapiens
actatagggcgaattggagctccaccgcggtggcggccgaggtactgtcgttccattcctttttttgaggtgttatgagtggggctataacatcgccatcctattaggaagagagagaaaaacaggcaatagagaaaagtcagtttccatcatcttatttctgagtgaaagtctcaagtgcgcacatgcctcatcttgca

SEQ ID NO: 37163 - DNA, 430 bp, Homo sapiens
attggagctccaccgcggtggcggccgcccgggcaggtacaaagagctacctacggtggtctggagccggaggaccacagcatcaaaggatataagatgcatagccaactgaggaacctgagcaattaaagagatccacagttaagccacacttaactggcacttgtggaagccccgcaaggcctgaaggagagctgacataggcaccccagagagtcagaatctggatccgatcttaataaggccatgaacaccagtggagaagaggcagaaacaccaatggataaggaacattcacatctttcttcccacgtgcctctaagtgccagtgcaggccccacaggccaagctacagggagaaaggagatgatgcaaaggaacctaactggactttaatcactagaagtgagaaaagaaatttattggaacc

SEQ ID NO: 37164 - DNA, 450 bp, Homo sapiens
atacgactcactatagggcgaattggagctccaccgcggtggcggccgcccgggcaggtacgcgggagagtgattgcagctttatgttcatttgtttgtttgtttgtctgtttgtttcaagaacctggaaaaattccagaagaagagaagctgctgaccaattgtgctgccatttgatttttctaaccttgaatgctgccagtgtggagtgggtaatccaggcacagctgagttatgatgtaatctctctgcagctgccgggcctgatttggtacctcggccgctctagaactagtggatcccccgggctgcaggaattcgatatcaagcttatcgataccgtcgacctcgagggggggcccggtacccagcttttgttccctttagtgagggttaattgcgcgcttggcgtaatcatggtcatagctgtttcctgtgtgaaattgttat

SEQ ID NO: 37165 - DNA, 400 bp, Homo sapiens
cactactatagggcgaattggagctccaccgcggtggcggccgcccgggcaggtacaagcagactctgaagatgatcagacaaggcaaagcgaaattggtcattctcgctaacaactgcccagctttgaggaaatctgaaatagagtacttaatatggtgtcttgttcactatacttaaaaatgcaccactcataaatatttaattcagcaagccacaaccaagacttgattttatcaacaaaaacccctaaatataaacggcaaaaaagatagatataattattccagtttttttaaaacttaaaagatattccattgccgaattaagaagaagataagtgttatatggaaagaagggcattcaagcacactaaagaaacctgaggtaagcataatctg

SEQ ID NO: 37166 - DNA, 485 bp, Homo sapiens
tactatagggcgaattggagctccaccgcggtggcggccgaggacatatatacttggtaattatgagcttgattttgtttttggaaatatgtgttcataatttaggtaatttgctacttaaagcactaagtctctgatacctgaaaagtacacttaaacatggcccaatgacacagcctttaaacttgtcaatattttcctcttggtggtattgaaaaccagtgagcagagagcataagaacagaacttcaagaccgtggcaggagcttgtatttgtacctgcccgggcggccgctctagaactagtggatcccccgggctgcaggaattcgatatcaagcttatcgataccgtcgacctcgagggggggcccggtacccagcttttgttccctttagtgagggttaattgcgcgcttggcgtaatcatggtcatagctgtttcctgtgtgaaattgttatccgctcacaattccacacaacata

SEQ ID NO: 37167 - DNA, 362 bp, Homo sapiens
ttggagctccaccgcggtggcggccgcccgggcaggtacagtggtgtttatacatggccatagtttatgaatgagtttactctttcaacaaataaacaacatttgggaagaagtttttctggttgctattatcctccttcatttgctttgcccacccttacttttttgttccctctctttgtgccctggggctcactgttccccttccagatggagggcatactcctttttttttttaagatgagatcttgctatgatgcccagactagaatgcagtggctattcgcaggcataatcatagtgcacaacagccctgaactagcaccctacagcctcgatctcctgggctcacgtgatccttt

SEQ ID NO: 37168 - DNA, 622 bp, Homo sapiens
ctcactatagggcgaattggagctccaccgcggtggcggccgagtacagttcagcccttctcgactggaggcggttctgcctattccgctccccacctggacacttagcaatgcctggagacatttttgattgttgtaaatggcatctagcaaggatgctgctaaatatcctataatgcacaggacagctgggaccctccccccgccaacaaggaataatccacccaaggtctccatagcactgaggcgccgacagcttgcagtggctcacgcaggaggaaggagcctggcgctttctagacgcctcctctgagaatattacgaatgcactacatgctaggcagaaagattgtgcaagatcattatgctaatcgttgtaaccctgtgcactgtaagatcctggaatatgaattatcgcagtaaaaattccgtccagcgtggttgggatgtgttgcgtcaacagtatggtcgctacaacccagcactctctggagaagaaaaacagtgatgaggtgactgctgaaccagcttcacagggaagaaaggaaggtcaacagaaatactctcaacatggggcagcatgggcggcggcagctgtccgccttaccgctcaatgtgcaca

SEQ ID NO: 37169 - DNA, 453 bp, Homo sapiens
actactatagggcgaattggagctccaccgcggtggcggccgcccgggcaggtacagttttatgtggggaacaattcatgcaggctactggaaaattaaatcttattaccagaaaaaaaaaaaaaaaaaaaaaaaaaagtaccctgaacagtggcccaaaggccactgatcaaaaataaaatagtggctgtatatcaatgaaatgaaatccaagaagctttaaccctttggcatcagaaatccagatttttccaattcccgcgtacctcggccgctctagaactagtggatcccccgggctgcaggaattcgatatcaagcttatcgataccgtcgacctcgagggggggcccggtacccagcttttgttccctttagtgagggttaattgcgcgcttggcgtaatcatggtcatagctgtttcctgtgtgaaattgttatccgctcacaatt

SEQ ID NO: 37170 - DNA, 466 bp, Homo sapiens
ggcgaattggagctccaccgcggtggcggccgaggtacctttcattggattgtccatggtgcatcgctttagcaagcggcgtgactctccactgcccgtcatcttggccaatatctatctgctggttcctcctgtgctcaacccaattgtctatggagtgaagacaaaggagattcgacagcgcatccttcgacttttccatgtggccacacacgcttcagagccctaggtgtcagtgatcaaacttcttttccattcagagtcctctgattcagattttaatgttaacattttggaagacagtattcagaaaaaaaatttccttaataaaaatacaactcagatccttcaaatatgaaactggttggggaatctccattttttcaatattattttcttctttgttttcttgctacatataattattaataccctgacaggttgtggttgaagggtattacttttc

SEQ ID NO: 37171 - DNA, 522 bp, Homo sapiens
gcgaattggagctccaccgcggtggcggccgaggtacgcggggagcctaaagcccgggacaggcacacaggcccaggtgtgtaggccacagcagccgcagtcctgaaaggctgcaacgcccagacctccaggagagaccaggcccaggatgcctcgcctgttcttgttccacctgctagaattctgtttactactgaaccaattttccagagcagtcgcggccaaatggaaggacgatgttattaaattatgcggccgctctagaactagtggatcccccgggctgcaggaattcgatatcaagcttatcgataccgtcgacctcgagggggggcccggtacccagctttttgttccctttagtgagggttaattgcgcgcttggcgtaatcatggtcatagctgtttcctgtgtgaaattgttatccgctcacaattccacacaacatacgagccgggagcataaagtgtaaagcctggggtgcctaatgagtgagctaactcacattaattgcgttgcgc

SEQ ID NO: 37172 - DNA, 451 bp, Homo sapiens
actactatagggcgaattggagctccaccgcggtggcggccgtccgagccctggagctcattaggttggaaggttcacctattccatatcataaatgttttctgaataactgatatatgccaagctattatgttctatgtgctggagatgtagcaataaacaaaacagagtccctgccctcatggaatttatatttcagtgggggagacagataataaacaaatgaagatacattataacgtcaagtacctcggccgctctagaactagtggatcccccgggctgcaggaattcgatatcaagcttatcgataccgtcgacctcgagggggggcccggtacccagcttttgttccctttagtgagggttaattgcgcgcttggcgtaatcatggtcatagctgtttcctgtgtgaaattgttatccgctcacaattccacacaacatacga

SEQ ID NO: 37173 - DNA, 625 bp, Homo sapiens
gcgcgtaatacgactcactatagggcgaattggagctccaccgcggtggcggccgaggacgcggggagactggttgagccgggtagggaaagcagcctaaagcccgggacaggcacacaggcccaggtgtgtaggccacagcagccgcagtcctgaaaggctgcaacacccagacctccaggagagaccaggcccaggatgcctcgcctgttcttgttccacctgctagaattctgtttactactgaaccaattttccagagcagtcgcggccaaatggaaggacgatgttattaaattatgcggccgctctagaactagtggatcccccgggctgcaggaattcgatatcaagcttatcgataccgtcgacctcgagggggggcccggtacccagcttttgttccctttagtgagggttaattgcgcgcttggcgtaatcatggtcatagctgtttcctgtgtgaaattgttatccgctcacaattccacacaacatacgagccgggagcataaagtgtaaagcctggggtgcctaatgagtgagctaactcacattaattgcgttgcgctcactgcccgctttccagtcgggaaacctgtcgtgccagctgcattaatgaatc

SEQ ID NO: 37174 - DNA, 539 bp, Homo sapiens
gcgcgtatcgactcactatagggcgaattggagctccaccgcggtggcggccgcccgggcaggtccgggcaggtacaccaaaaagagaactttgtgatccgttggtaagatagtatccacaagtaagcacttgtgttcactgttttttgttccacactagaatacacccagttggataccagagttatttacagacatctgaggaagatcctagttttcaagtctgtcaggaaaatattccatattgttttaagccagatcatacccatggaaaaatagagaatggttttctttctttttctttctgaccaatacatgctcaagaaatcaaatatctgagatacacaaattgaacgcggtagggtgggggaggaagtagggagataaagcctatgctgctgattcctcagttataggagcagtctctaaaagccctcgtcaatctagtgatgtgtttctctctggaattgggggactgggtggtgggctgcattttgtgggtgaatgggggtacctcggccgctctagaactagtggat

SEQ ID NO: 37175 - DNA, 309 bp, Homo sapiens
  misc_feature 210, 211, 230, 237, 243, 244, 297, 298, 299: n = A,T,C or G
gtatacgactcactatagggcgaattggagctccaccgcggtggcggccgcataatttaataacatcgtccttccatttggccgcgactgctctggaaaattggttcagtagtaaacagaattctagcaggtggaacaagaacaggcgaggcatcctgggcctggtctctcctggaggtctgggtgttagcagcctttcagggactgcgnngctgctgtggcctacacancctgggncctgtnngtgcctgtcccgggcttttaggggctgctttccctttacccggctttcaaccnnngccccgcgta

SEQ ID NO: 37176 - DNA, 191 bp, Homo sapiens
cactactatagggcgaattggagctccaccgcggtggcggccgtccctcttaatcatggcctcagttccgaaaaccaacaaaatagaaccgcggtcctattccattattcctagctgcggtatccaggcggctcgggcctgctttgaacactctaattttttcaaagtaaaccgcttcgggtgcccccccg

SEQ ID NO: 37177 - DNA, 448 bp, Homo sapiens
gactactatagggcgaattggagctccaccgcggtggcggccgaggtactgtggatatttaaaatatcacagtaacaagatcatgcttgttcctacagtattgcgggccagacacttaagtgaaagcagaagtgtttgggtgactttcctacttaaaattttggtcatatcatttcaaaacatttgcatcttggttggctgcatatgctttcctacccgcgtacttttttttttttttttttgctttatgactgagcatgtggttgatcttggagtatgttctgtgtgcagatgatcgagcggccgcccgggcaggtacggtggtgtttttcttaaaggatgaattatcaaatgcttgctccccatggaagcctcttaaggaaaagttaaaactttgaatatgtcttatgggaagagactgacgtatcacaaatcattaaaaaacctt

SEQ ID NO: 37178 - DNA, 560 bp, Homo sapiens
gcgtatacgactcactatagggcgaattggagctccaccgcggtggcggccgcccgggcaggtactcaaattcctctggccattaatggtattgatgtcaagctgaaccatcgtaggaagttgaaagccttagaaagaggacttggtaaagtttttggattatcttgaaactctggcaagatggccaagtatggagaacatgaagccagtcctgacaatgggcagaacgaattcagtgatatcattaagtccagatctgagtgggaaaccacccatcaatgatatgttcacagacctcaaagatggaaggaagctattggatcttctagaaggcctcacaggaacatcactgccaaaggaacgtggttccacaagggtacttttttttcccttctttttttttttttctttggtcaagtagggattaatgccataggtttagagagaaggattgttttcagtttttaagagaattttttaaaaatacattttatggttctcttaaagaattaatattcacttctgaaggaactacttgtaatatataatttatcatttta

SEQ ID NO: 37179 - DNA, 548 bp, Homo sapiens
cgaattggagctccaccgcggtggcggccgaggtacgtgttaatagaggctagtttgggtcttgcagaaatgatttcatttgggatgctttggttgtcattggggagcttggttgttggagacgtgagccttgccgaagatcccggccgctctagaactagtggatcccccggctgcaggaattcgatatcaagcttatcgataccgtcgacctcgagggggggcccggtacccagcttttgttccctttagtgagggttaattgcgcgcttggcgtaatcatggtcatagctgtttcctgtgtgaaattgttatccgctcacaattccacacaacatacgagccgggagcataaagtgtaaagcctggggtgcctaatgagtgagctaactcacattaattgcgttgcgctcactgcccgctttccagtcgggaaacctgtcgtgccagctgcattaatgaatcggccaacgcgcggagagaggcggtttgcgtattgggcgctcttccgcttcctcgcttactgactcgctgcgctcggtcgttcg

SEQ ID NO: 37180 - DNA, 398 bp, Homo sapiens
actactatagggcgaattggagctccaccgcggtggcggccgggcaaagcgatcggaacccgggaagaaatcgtcccaggcgcggagtggggcgatattaacgtccatgttcccccgcgtacccaggcccctacaaaggcttcagagtagatatctctgccaacatgaggacagaaggactggtgcgaccccccacccccgcccctgggctaccatctgcatggggctggggtcctcctgtgctatttgtacctcggccgctctagaactagtggatcccccgggctgcaggaattcgatatcaagcttatcgataccgtcgacctcgagggggggcccggtacccagcttttgttccctttagtgagggttaattgcgcgcttggcgtaatcatggt

SEQ ID NO: 37181 - DNA, 590 bp, Homo sapiens
gcgcgtaatacgactcactatagggcgaattggagctccaccgcggtggcggccgttaaacatgtgtcactgggcaggcggtgcctctaatactggtgatgctagaggtgatgtttttggtaaacaggcggggtaagatttgccgagttccttttactttttttaacctttccttatgagctcgagcggccgcccgggcaggtacttttttttttttttttttttttgttgggatttcagatagagtttggtttataaaaagtaaacagggccaacgtccacaccaaattcttgatcaggaccaccaatgtcatagggtgcaatatctacaataggtagtctcacagccttgcgtgttcgatattcaaagactgttttgctccattccccagtgtgtttcgtgtaaccatcctccagaactgtgtaggtgaatttgctatttccttcagccttgaattcaccttcatttgaccccatcagcttcagggccttctttacatttccactggcctgatccatgtatgcaatgctatttttgcagtgatatgtgatgttctgggaagctcggctggagagaagtccaaggaatg

SEQ ID NO: 37182 - DNA, 269 bp, Homo sapiens
  misc_feature 192: n = A,T,C or G
tatacgactactatacggcgaatcggagctccaccgcggtggcggccgcccgggcaggtaccctgggtaaatccctactgaaacttctggggcaaaccctctgctactcaggctcacaaattccagatgcttctacaacttggaacaaccatctcttcctccaccgctcagtgaaactgttttgattgggcnataaaatgtctctcagtgcataaagccacggcacatttgtacttagtaaccatggccattggggaagaacaaccaca

SEQ ID NO: 37183 - DNA, 560 bp, Homo sapiens
atacgactcactatagggcgaattggagctccaccgcggtggcggccgaggtacttttttttttttttttttttgtaaatatttttgatccctggttggttgatctgaggatgcagaactagggagggaacatggctacatgttgttggggataaaaaggtaaacgtgactctacttttctcttgagcttgaaatcagcctgtgaatatctgagttggtagagctggacgaggttacagctgagcataatttttgtttctaaaggagagataaaaccaagtatctcaggaatcaaaaacagctattaggtacctgcccgggcggccgctctagaactagtggatcccccgggctgcaggaattcgatatcaagcttatcgataccgtcgacctcgagggggggcccggtacccagcttttgttccctttagtgagggttaattgcgcgcttggcgtaatcatggtcatagctgttacctgtgtgaaattgttatccgctcacaattccacacaacatacgagccgggagcataaagtgtaaagcctggggtgcctaatga

SEQ ID NO: 37184 - DNA, 458 bp, Homo sapiens
actatagggcgaattggagctccaccgcggtggcggccgaggtacttttcgaagtaactggacatgttgcaggtcaggggaatggaagtattgctatggactgaactgtgcccccaaaattcatatgttgaagccctgagctctgacatgattgtatctgaagtcctaaagccaggaatgaggaaggctgtgaatgtccattgttccatacaagaatgactcttctcttggctatttagagatcatgagggatactgccccagtttccacaggccagatggtctccaacaaaagccacgggggagtcgcccctgcctggcagatctatcgggtcaggaccaccgcccagggggtcctggagaggacagtataggaccaaagaggattattcatgagcctaagatctcatgaaacgtgccttgctaagttttagacttgcataggaccatcatccccct

SEQ ID NO: 37185 - DNA, 446 bp, Homo sapiens
gcgaattggagctccaccgcggtggcggccgcccgggcaggtacaaagagctacctacggtggtctggagccggaggaccacagcatcaaaggatataagatgcatagccaactgaggaacctgagcaattaaagagatccacagttaagccacacttaactggcacttgtggaagccccgcaaggcctgaaggagagctgacataggcaccccagagagtcagaatctggatccgatcttaataaggccatgaacaccagtggagaagaggcagaaacaccaatggataaggaacattcacatctttcttcccacgtgcctctaagtgccagtgcaggccccacaggccaagctacagggagaaaggagatgatgcaaaggaacctaactggactttaatcactagaagtgagaagagaaatctattggaacctcccaagataat

SEQ ID NO: 37186 - DNA, 568 bp, Homo sapiens
agctccaccgcggtggcggccgacgtactaagggagtctactgcttaaagccaattcacatccttaaaaggtcaaatggagagaaattaaacttgggagaagcattttaagactgtgctgttataaaacctcggggcacttaactgattaatcatggcaatgaggcagggaccagaaaagagtctttagaacctgtcatccccacacagaagagcaactttcagggaaacacccttatctttccattttcagaccccgggaggtgtgagggtggaaaggctacgtagagaagagagcagaaaggagatgagatgacacaaccaggattctccgaagctgggcttgaagtcctcaagaaaaactcccatgaacaaggaaggaagagtgaagaaaaaaacagggatacctggaactggacaaaagtaaaaagatagaaggatactttttttcccccagaagaagtctgtcacaaaagcaaacctgcaaatatacgatcagtataacacccaagaaaatgacacatgcggccaggcatggtggctcatgcctggaatcccaccactttgag

SEQ ID NO: 37187 - DNA, 400 bp, Homo sapiens
tatacactactatagggcgaattggagctccaccgcggtggcggccgcccgggcaggtacgcgggggcggcgcgggtcctccatatgctgagcgccggtcccctgggcccacttttctttctctatactttgtctctgttgtctttcttttctcaagtctctcgttccacctgaggagaaatgcccacagctgtggaggcgcaggccactccatctggtgcccgacgtggatgcttttctctagggtgaagggactctcgagtgtggtcattgaggacaagtcaacgagagattcccgagtacctcggccgctctagaactagtggatcccccgggctgcaggaattcgatatcaagcttatcgataccgtcgacctcgagggggggcccggtacccagc

SEQ ID NO: 37188 - DNA, 445 bp, Homo sapiens
actactatagggcgaattggagctccaccgcggtggcggccgcccgggcaggtactgctcggaggttgggttctgctccgaggtcgccccaaccgaaatttttaatgcaggtttggtagtttaggacctgtgggtttgttaggtactattcataatagctcagaattgaaaaattctcaaaagactattaatgggagaatgaataacttttggatgtaatgaaaaatggataaacaaacggaagactatacagcaatgagaatgaatgaactacaaatacatgcaacaataagaatggatctcactttggcaggttgaataacggcctccaaagatagccagcgtatgaatccctggaacctgtgaatgtcacttatatggcaaaagagattctgcagatgtgattaaattaaggatcttgagatagggggattatccctgcttt

SEQ ID NO: 37189 - DNA, 429 bp, Homo sapiens; identical to SEQ ID NO: 37037

SEQ ID NO: 37190 - DNA, 545 bp, Homo sapiens
gactcactatagggcgaattggagctccaccgcggtggcggccgaggtactttttttttttttttttttttgggtagaatttcaacatcaaataatcaataaagatagactatattttcctatttcatttccaccatcctttaaaatgggtcaaaatcatcctgccttccactaacgactaaaagggtatcattttcttatgtgattcccactgttttacctttaaaggagactcgctcaatgaactgaattgttttcaaccttagcttttctcctcccagttttcatcattgggtatcattccacttcagcaacagttcccccataccataggttttcctggtgttaaaaaatatcagacattgcccacttgcacctttaggaactttgcaagccaaggctccccagcacagatcaatattccacattagagaaatgcaggaacaagccaatagaattagcagactaatttactgtgcctcggccgctctagaactagtggatcccccgggctgcaggaattcgatatcaagcttatcgatacc

SEQ ID NO: 37191 - DNA, 431 bp, Homo sapiens
ctactatagggcgaattggagctccaccgcggtggcggccgggatcttcggcaagactcacgtctccaacaaccaagctccccaatgacaaccaaagtatcccaaatgaaatcatttctgcaagacccaaactagcctctattaacacgtacctcggccgctctagaactagtggatcccccgggctgcaggaattcgatatcaagcttatcgataccgtcgacctcgagggggggcccggtacccagcttttgttccctttagtgagggttaattgcgcgcttggcgtaatcatggtcatagctgtttcctgtgtgaaattgttatccgctcacaattccacacaacatacgagccgggagcataaagtgtaaagcctggggtgcctaatgagtgagctaactcacattaattgcgttgcgctcactgcc

SEQ ID NO: 37192 - DNA, 293 bp, Homo sapiens
  misc_feature 263: n = A,T,C or G
gtatacgactcactatagggcgaattggagctccaccgcggtggcggccgaggtacatttacattacctggggactggacatcaggtcacgttggggtgcccctggcttgcaattacgtgaagctggaagatgtggctgacatgaactactttacagtgaataatgaaggagaggtctgcatcaagggtaccagtttgctgttggtgcagtgtggtctatttaagaataccatggcgctgaaacaagcctagtgcttgagtcnattggagggaattctcaggacgttggaaca

SEQ ID NO: 37193 - DNA, 600 bp, Homo sapiens
  misc_feature 272, 294, 340, 428: n = A,T,C or G
actatagggcgaattggagctccaccgcggtggcggccgaggtacgcggggacatcaatgcagagtccctctgtgaatttacaacacccaacacccatgagttcagtccttaagaggaaaatgagcagtattaattggttggcattgcataaaagagtcattcagctacttaaatttatttcaactagttggctcttttcttctgcagagaccattctagtgcgctgggaaatcttggcacccagaagaattcaactgcgctcactgcaaanatacaatggcctacattggatntgtagaggagaaaggagccctgtattgtgagctgtgctatgagaanatctttgcccctgaatgtggtcgatgccaaggaagatccttggagaagtcatcaatgcgttgaaacacacttggcatgtttcctgttntgtgtgtgtagcctgtggaaagcccattcggaacaatgtttttcacttggaggatggtgaaccctactgtgagactgattattatgccctctttggtacctgcccgggcggccgctctagaactagtggatcccccgggctgcaggaattcgatatcaagcttatcgatacc

SEQ ID NO: 37194 - DNA, 180 bp, Homo sapiens
ctactatagggcgaattggagctccaccgcggtggcggccgccatcttgggtcatcgatgagcctcgccctgtgcctggtcccgtttgtgagggaaggacattagaaaatgaattgatgtgttccttaaaggatgggcaggaaaacagatcctgttgtggatatttatttgaatcgggat

SEQ ID NO: 37195 - DNA, 445 bp, Homo sapiens
ctatcgggcgaattgtagctccaccgcggtggcggccgaggtacactgtttccatgttatgtttctacacattgctacctcagtgctcctggaaacttagcttttgatgtctccaagtagtccaccttcatttaaccctttgaaactgcatcatctttgccaagtaagagtggtggcctatttcagctgctttgacaaaatgactggctcctgacttaacgttctataaatgaatgtgctgaagcaaagtgcccatggtggcggcgaagaagagaaagatgtgttttgttttggactctctgtggtcccttccaatgctgtgggtttccaaccaggggaagggtcccttttgcattgccaagtgccataaccatgagcactactctaccatggttctgcctcctggccaagcaggctggtttgcaagaatgaaatggatgattct

SEQ ID NO: 37196 - DNA, 438 bp, Homo sapiens
tatagggcgaattggagctccaccgcggtggcggccgaggtacttatttttttgaggttaaaatattcagaaactacttttatgcattgtagcagtaatcatttatggaatgcttttgacatgttttaacagggtaaccaaaacttttaggcctgttttttttggttgtccttgttgttatatgtttaatggaaatctgttactcaggctggtagcattaaattagctttttaccctcaactcaagtagcaaatatcatggagaacttcagtgtttagcaggctgttaatttcccatctatgaatagcactttatgatgtaggctaaactaagcaaataatgcagcgttatgtggatcattatgcaataaagctgctaaagtcacatttgtggttgatactcaagccttgtcctgcccgggcggccgctctaaaacta

SEQ ID NO: 37197 - DNA, 420 bp, Homo sapiens
actactatagggcgaattggagctccaccgcggtggcggccgcccggggcaggtaccagatgaaaatgaaaccctaaagaagactgctgggccatgagttgcttcctcctcctccaccttaaccctctgattccagaattgcagtcattttcttctgccaaggaaatccattaaaaactgcagccacactgcaatttcctaatgtagaacaagatataaagcaggctttgagacaacaacctacctttgtttactctttccaagctggaagagtccttctcctctagttgcccctaggtcactggctaatttattttaaaatttagatggaactcatgtatagttaagtgcacaaatcttagccgtgcagatgggtaattttcacatagctatttgcccacatccgtgcctctaagatag

SEQ ID NO: 37198 - DNA, 623 bp, Homo sapiens
  misc_feature 18: n = A,T,C or G
ctcactatagggcgaatnggagctccaccgcggtggcggccgcggccccctgttgtgttgctgcggagaggcgcagtcatgcaggaaaacctcagatttgcttcatcaggagatgatattaaaatatgggatgcttcatctatgacattggtggataaattcaacccacacacatcaccacatggaatcagctcaatatgttggagcagcaataataactttttagtaacagcatcttccagtggcgacaaaatagttgtctcaagttgcaaatgtaaacctgttccacttttagagcttgctgaagggcaaaagcagacatgtgtcaatttaaattctacatctatgtatttggtaagcggaggcctaaataacactgttaatatttgggatttaaaatcaaaaagagttcatcgatctcttaaggatcataaagatcaagtaacttgtgtaacatacaattggaatgattgctacattgcttctggatctcttagtggtgaaattattttacacagtgtaaccactaatttatctagtacctcggccgctctaaaactagtggatcccccgggctgcaggaattcgatatcaagcttatcgataccgtcgacctcgagggg

SEQ ID NO: 37199 - DNA, 412 bp, Homo sapiens
tatagggcgaattggagctccaccgcggtggcggccgaggtacatcttgtttggatcaccacggagtataggtgtaggaccgcaggataaggctggacatctgctcgtatgtcatacattctgcggagggatgtagagatggcatactgcctggcctctaagatggttgagggatgctttgtgcatggccaaagaaccttggtacggatcaggagggagggtataactttggttttcttaaaagcttacagtgtttggctaattctcctcccctttttacaagacgggggccggagggtggacactggtggcaggttaagggatactgtcactttaagaagcctgcagatagaagtggaaacatggagaaattaggggctgattttttaaactgtgtgagatattaaccagc

SEQ ID NO: 37200 - DNA, 589 bp, Homo sapiens
gcggccgggtacatacgctaggcttttctgtagctatgtttatggctttacagcagattttatggagctgcaattactttgatcatgagggactgatgctagtggatttacttcaccaaatggaactcactttgtggcttctgaagaaggacctttgtggactgtcatggagtagttaagagtgcaggctctgatttagtgatcagagtctgcattgtcaggaatgggacaaagtgaagttatgtggcacttgataggatgccctgagaagattgcaacatcacccctgtgatattcctgctgaagatccataacctggatgtaatcatgaggatatatcagacaaacccacgtaaagagacatgctgtatacaaaactgtaatcttagaaagtgccaaggtcatgaaaatcaaagatagaccctggaactgttccaaactggaggggaccaaagaggcatgacaactaaacacaacacgtgattctgaactggatctttttgcttgaaaggaagttacagggacagttggaaaagtttaaatggggcctacaatgccgtggtaatgatgtgtccgtgttaatttcctg

SEQ ID NO: 37201 - DNA, 450 bp, Homo sapiens
acgactactatagggcgaattggagctccaccgcggtggcggccgcccgggcaggtacgcggggagcctcaaaaactcacaccagctcctgcaaggaatgtgaatcttggagctcccagctattctgttcctgtttctgtcagctccttccctgaaaactcagaggtgctcagcatgccatgctaaaaggcaaaataaaaagatcttggagacatctcagctttaatgaggactttccaacattccagactgccgtcctgcaatgaagctctgagtcacggtctgtgaggctaaggtacctcggccgctctagaactagtggatcccccgggctgcaggaattcgatatcaagcttatcgataccgtcgacctcgagggggggcccggtacccagcttttgttccctttagtgagggttaattgcgcgcttggcgtaatcatggtcatag

SEQ ID NO: 37202 - DNA, 583 bp, Homo sapiens
  misc_feature 46, 325: n = A,T,C or G
tagggcgaattggagctccaccgcggtggcggccgaggtacgcggnggcacttcctgcgaggcccctgcagcagcagcggcgtggtcagagcgagcttcggagaagcagtggtgggttccatgtgatggtggagtaggaggcaggtctccgcggttcatctgtgttgctctaaatgacactgcttcattattttgatggctggagaatatttcctagtgtatgtatatgagagtttcttgatctctttatctgtggatgaacaggctagtcaccctgctgtggaatagaaggccagaattgatcagtctcatctgagagtaactntgtacctgcccgggcggccgctctagaactagtggatcccccgggctgcaggaattcgatatcaagcttatcgataccgtcgacctcgagggggggcccggtacccagcttttgttccctttagtgagggttaattgcgcgcttggcgtaatcatggtcatagctgtttcctgtgtgaaattgttatccgctcacaattccacacaacatacgagccgggagcataaagtgtaaagcctggggtgcctaatgagtgag

SEQ ID NO: 37203 - DNA, 536 bp, Homo sapiens
cgcgcgtaatacgactcactatagggcgaattggagctccaccgcggtggcggccgaggtacatctacctaaaggactattatgtggaataatacatactaatgaagtattacatgatttaaagactacaataaaaccaaacatgcttataacattaagaaaaacaataaagatacatgattgaaaccaagttgaaaaatagcatatgccttggaggaaatgtgctcaaattactaatgatttagtgttgtccctactttctctctcttttttctttcttttttttttattatggttagctgtcacatacaactttttttttttgagatggggtctcgctctgtcaccaggctggagtgcagtggcgcgatctcggctcactgcaacctccacatcccatgttgaagtaattcttctgcctcaacctcccgagtagctgggactagaggaacgtgccaccatgactggctaattttctgtattttttagtagagacagagtttcaccatgttggccaggatggtctcgatctcctg

SEQ ID NO: 37204 - DNA, 432 bp, Homo sapiens
actactatagggcgaattggagctccaccgcggtggcggccgaggtacattgagaagtatagcaatctatgtaaatgtaatcctcagtgaggttcctcagtgctaggtcccataggattgtcgttgcccttgttaatgaggtttctctgttcagcggcttcaatttttttctctttgtacctgcccgggcggccgctctagaactagtggatcccccgggctgcaggaattcgatatcaagcttatcgataccgtcgacctcgagggggggcccggtacccagcttttgttccctttagtgagggttaattgcgcgcttggcgtaatcatggtcatagctgtttcctgtgtgaaattgttatccgctcacaattccacacaacatacgagccgggagcataaagtgtaaagcctgggggggcctaatgagtg

SEQ ID NO: 37205 - DNA, 561 bp, Homo sapiens
acgactcactatagggcgaattggagctccaccgcggtggcggccggaaccgcaatcttccagtaattcgccaaaatgacgaacacaaagggaaagaggagaggcacccgatatatgttctctaggccttttagaaaacatggagttgttcctttggccacatatatgcgaatctataagaaagggatattgtagacatcaagggaatgggtacgcggggagcacactgaggaggacacaaaagaagtagacagaatctctgcctctgcttaggagtatgcaatttagttggggcgacaaaacttaaatgctagaaccaataaaagaagattacaaagcaactcgcaaattctggacaatcaggaagtccaagccacaatgatcctgccaagaatcctccaggttaccttgaggatagttttgtaaaatctggagtcttcaatgtatcagaacttgtaagagtatccagaacgcccataacccagggaactggagtcaacttcccaattggagaaatcccaagccaaccatactatcatgacatgaactcgggggtcaatc

SEQ ID NO: 37206 - DNA, 415 bp, Homo sapiens
tatagggcgaattggagctccaccgcggtggcggccgaggtaccttaaggactggcaaagcctttccaataaggaagcatcctggttctagcttattttaaaacaaagtgacaggacaccaactgaagtcaacgtggctcgatttagaggcggtaggcatttgaaacattttgaggctgcatggggtgccaaattggttgagttctttttccgagactctcaggcaaaatacatcgtgtgctgggtatcatggtggatttgcacagccttagccaaggcctgaggatcccggccgctctagaactagtggatcccccgggctgcaggaattcgatatcaagcttatcgataccgtcgacctcgagggggggcccggtacccagcttttgttccctttagtgagggttaattgcgc

SEQ ID NO: 37207 - DNA, 408 bp, Homo sapiens
gactactatagggcgaattggagctccaccgcggtggcggccgaggtaccgctgcgagtgcaagcctggctacgctggcaatggcatcatctgcggggaggacacagacctggatggctggcccaatgagaacctggtgtgcgtggccaatgcgacttaccactgcaaaaaggtagagccaggtcctttgtgtgcctccagaaagagggcccatcaccttatcaaaacacaggctaaggaattttaaatacttaaagtttggacatgaaactgaaagattaaatctcccaaagggagaggggcactaattcctattaaaattaaatcacttggtgccaaaaacatgaacagggctagctctttttgggcaactgtgttccatagtcaacttttctgtccaaaaaaaag

SEQ ID NO: 37208 - DNA, 617 bp, Homo sapiens
  misc_feature 478, 553: n = A,T,C or G
gtaatacgactcactatagggcgaattggagctccaccgcggtggcggccgaggtaccaggagggtattgatgtttgaggtccaaactgaaaacccatcacctccttcccactgctatagcagcgttagccctggggttcattatctagccagttcacaccttctaaagtggggctctgaaaatgtcttacttccctcacagacaaagcaattctcaagcctcctgagatcacccaccaaccagagcaactgctgtcacttggaggtgcagctgaattcttctaattgtgacacaaactcttgaaactgtaaatgctgaaagattaaatgaggttataacactcagaaggttttacaagtaaaagtaagtcaaatcaataggtctttatttcatatctgtaatggtttagctctgcgggaagtgttagcagctatatgaattaggaagaatttagaagacaatccctaaacacatganatgtccaagtaagaagataacatatttatccaaatatttaaagtgaaatgctccagatatgggaagcttacagtnttcaagcaaagctttttaaaaaaaattatggaactattttaaagagagctaaacattttctttg

SEQ ID NO: 37209 - DNA, 307 bp, Homo sapiens
tacgactcactatagggcgaattggagctccaccgcggtggcggccgaggtacagatctgggaactaaatattaaaaatgagtgtggctggatatatggagaatgttgggcccagaaggaaccgtagagatcagatattacaacagctttgttttgagggttagaaatatgaaatgatttggttatgaacgcacagtttaggcagcagggccagaatcctgaccctctgccccgtggttatctcctccccagcttggctggcctcatgtcatcacagtatttccatttttgtttgttgcatgttctt

SEQ ID NO: 37210 - DNA, 620 bp, Homo sapiens
  misc_feature 193, 194: n = A,T,C or G
gcgtaatacgactcactatagggcgaattggagctccaccgcggtggcggccgaggtactttttttttttttttttctattattttaaaatttctctggagaaagcaaactgattaaaaattaattcacgctgaaggatggtggaaaacctggagtcacttaagggaatctctgctggaggtgttgctttagnncagaaagccgaaagaaagggggggcccacaaggcctggctttccttgattcaggccaatgccactcagaagaagggcagtgaggagaaaaatgaaattttgtagctcccagacctgatcaggtgtcaagtttgtggggcttaggtttaaggacaatcaatctccccagggtgctttcagtaagatcctcccctcagctccccccgcgtacctgcccaggcggccgctttagaactagtggatcccccgggctgcaggaattcgatatcaagcttatcgataccgtcgacctctagggggggcccggtacccaacttttgttccctttagtgagggttaattgcgcgcttggcgtaatcatggtcatagctgtttcctgtgtgaaattgttatccgctcacaattccacacaacatacgagccggga

SEQ ID NO: 37211 - DNA, 431 bp, Homo sapiens
actactatagggcgaattggagctccaccgcggtggcggccgaggtactctctatagtgcttgcacaatgacaaaatcccccaacaacacatttctcagaaggtatccccattgttaagtgactcatgactgtaactgaataaacaaaatttgataaggcacaagatacttacgtcatctccaagcacctccccacattatacttagaaattacaaagaagaagaaagtaacttttcctggcttcctccactttaatcaagtgatcaaagttaacatcactgcaacggtaatgggatgatgaagccaagctgggagcaggggtgcactgagaacagacgccgcttctgcggtatccctgccagaaagcctcaacctgaacctaatcatgaggaaacatcaggccaacccaaactaagggacaacctacaca

SEQ ID NO: 37212 - DNA, 380 bp, Homo sapiens
aatacgactactatagggcgaattggagctccaccgcggtggcggccgaggtacatcaggcagtagtccttaaacttttgcccatacgttgtggagcatttacaaaagcaattctctggacagtgagccctcaatgcctttttatatgtggcttcttgaatagatcacattagaaattgagcagtccccttcctcagctaccagtgtcaatgctggtatgaggaggagcagtgggggcactgacagacactggtgattcgtttcttttatcatagtggaactgagatttcattccttttcagtagaaaatattaatccaagggaagaattaaaaaaaaaatggaaacaatgactggtgccttaaatataagactgtcatt

SEQ ID NO: 37213 - DNA, 429 bp, Homo sapiens
cactactatagggcgaattggagctccaccgcggtggcggccgccacgctggttttgcatcttcaggagacgctcgtagccctcgcgcttctcctcggccaattcgcggaagaagtggctcacgccttccagagccacatcatcgcggtcgaaatagaagcccagagagaggtaggtgtaggaggcctgcaggtacctcggccgctctagaactagtggatcccccgggctgcaggaattcgatatcaagcttatcgataccgtcgacctcgagggggggcccggtacccagcttttggttccctttagtgagggttaattgcgcgcttggcgtaatcatggtcatagctgtttcctgtgtgaaaatgttatccgctcacaattccacacaacatacgagccgggagcataaagtgtaaagcctggggt

SEQ ID NO: 37214 - DNA, 423 bp, Homo sapiens
cactactatagggcgaattggagctccaccgcggtggcggccgaggtacttgaagaaattatttcattgagaaaatatgaaacttgggagaaactttaagataatgcataaaaacaaattgatgcttcagtgaggttgcagagtcatagaacttctttcagtgaatatctaactttgggctttatcttcttatcactttataatagtatctctcacccaaagattattttgtcctccacccaaaggggcatatggcaatgtctggagatatttttggttgtgacaagtgggaaagtgaagtgggacctgcccgggcggccgctctagaactagtggatcccccgggctgcaggaattctatatcaagcttatccataccgacgacctttagggggggcccggtacccagcttttgacccttta

SEQ ID NO: 37215 - DNA, 414 bp, Homo sapiens
tatagggcgaattggagctccaccgcggtggcggccgcccgggctggtaccacaagaccacccaagtgtaaggagcaatgcagtcgaccaccaacttgtcatcatacaagtcaagaaaaacatcgctgtcactttggttcttgtccaccatgtcatcaaccttgccaaaaagttttggagaaatgtggtcacttgtgtcctgctccgtgtcatgatcaagcgttaataaagcagactggcaggcaccagcctacaggcccttgggaacagccttctgagccagcatttattcagactgcattaccgtgtcctccatgtcaagttcctattcctatggaatgtcttgggaaacatgaggtgagtccactaccatgccatgctgtaggaccctactcttgtaaaagagtttgtgga

SEQ ID NO: 37216 - DNA, 423 bp, Homo sapiens
ctatagggcgaattggagctccaccgcggtggcggccgaggtacgcggggacatcaatgcagagtccctctgtgaatttacaacacccaacacccatgagttcagtccttaagaaggaaaattgagcaagtatttaattggttggacattgcataaaagaggtccatatccaggctaactctagaaattttattctcaaacttagttggcctctttttcttctgtcagaggaccattcttagtggcactggggaaatcttggcacccagaagaattcaactgcgctcactgcaaaaatacaatggcctacattggatttgtagaggagaaaggagccctgtattgtgagctgtgctatgagaaattctttgcccctgaatgtggtcgatgccaaaggaagatccttggagaagtcatcaatgc

SEQ ID NO: 37217 - DNA, 701 bp, Homo sapiens
  misc_feature 673: n = A,T,C or G
tacgactcactatagggcgaattgggccctctagatgcatgctcgagcggccgccagtgtgatggatatctgcagaattcgccctttcgagcggccgcccgggcaggtactacatatgcagaatctgatacaatgttaatagactgattaaaatcttgttaacactgtaatgacggcaaccaacttctgctctttgagtcaagtgatactgagttttgatgactcattcttttggcccggtgtaagccacttttccattgctggaaccatcagtaaacactgccagagcattttttaaaggcttatgtttggtaactttaggtaaaatccaagtagtcaattttaaaaactggaagatttttgttttggagtaacgattgtcaataattcccacaaaatcggcaagaccaatctgccatgcaccagaattgataaaggcctgtctaacctgttgcttgttgaaaggaacagtgattttatctgggtcatttccacacaatgttattattcataatcttccctgaccaattaatgtagccatttgatccaagtacctcggccgcgaccacgctaagggcgaattccaacacactggcggccgttactagtggatccgagctcggtaccaagcttggcgtaatcatggtcatagctggttcctgtgtgaaattgntatccgctcacaattccacacaacatac

SEQ ID NO: 37218 - DNA, 565 bp, Homo sapiens
acgactcactatagggcgaattggagctccaccgcggtggcggccgaggtactcttgaaggctatgcaacatgagtctttgaacaagaattccttgctactttgattcattcatcaaatactgagtgcctgtgtgccaggcacaggtgaactctggggattcaggggtaactaaaacagattggaaccctgcccttgtgaagctttcagtctagaagggagacgtgaaacaaattttagcttcaaaagcaacatctatttttgcctgttagcatgcatttattttaaaagtcatattagagttacctggttccgcttcagagcagactgggaaaatcaggcttacaatggaatcagatgctgtgggcctaaaacagctctttaaaaatctatttttttaggccaggtgcgttggctcacacctgtaatcccagcactttgggaggccaaggtgggtggatatgaggtcaggaggccgagaccagcctggccaatatgatgaaaccttacctctactaaaaataaaaaattagccgggcatggtggcacatgcctgtagtcccagc

SEQ ID NO: 37219 - DNA, 321 bp, Homo sapiens
actcactatagggcgaattggagctccaccgcggtggcggccgaggtacctgacgcggggcaagattctgctgtgcacaggtgccatcatggaagaacaggcagcagaactccttggagtgaagatgtgcacgtttgttccaagacacacccggaacttggcaaatgagtttcgctgttatgtgaattatgattctgggctggactgtgggatctgattacagaccgtgacataacacagggaaggaaccctgtcacattccttcttttttgtatttttcgtagttagatttaaaagtttataatcttctttcccctcccc

SEQ ID NO: 37220 - DNA, 604 bp, Homo sapiens
gactactatagggcgaatgggagctccaccgcggtggcggccgcccgggcaggtactcccacagccaggaatctgccatagaacaactctaccatggggttctttggcttctcttcatccgtctcctcttcagctttcatttggaaggcatcttctaaccaatctaataatttgtgtgtaaactcactcacatcttgctgctgtgagtcatttgatttgaaagcatccttaagaatttcaactgctcttgatggatcaacatacttccttttggtacctcggccgctctagaactagtggatcccccgggctgcaggaattcgatatcaagcttatcgataccgtcgacctcgagggggggcccggtacccagcttttgttccctttagtgagggttaattgcgcgcttggcgtaatcatggtcatagctgtttcctgtgtgaaattgttatccgctcacaattccacacaacatacgagccgggagcataaagtgtaaagcctggggtgcctaatgagtgagctaactcacattaattgcgttgcgctcactgcccgctttccagtcgggaaacctgtcgtgccaactgcattaatgaatcgg

SEQ ID NO: 37221 - DNA, 420 bp, Homo sapiens
tacgactcactatagggcgaattggagctccaccgcggtggcggccgccgggcaggtactagctgagaaaagggcatgttttaagaaattgcctcgcattttgagtttcaatactatgagatacacatttaatatggtcacgatgatgaaagagaaagtgaatacacacttttccttcccattacggtatggacatgacgccctatacagaagattatgttatgggaaagagtgagaggaaagaagggtttaaagaagacagtgatcattctaaagactcacagagctatgaatatgacttgatcggagtgactgatcacacaggaacggcagatggtggacactattatagctttatcagacatatagtatatccccgtgcttataaaaacaataaatggaatcttattaatgatgctg

SEQ ID NO: 37222 - DNA, 395 bp, Homo sapiens
caccgcggtggcggccgcccggggcaggtacggtattctgtgagctggggaagacagatacccttttattgggggcagggggaggatgtagcaaaggaccaattttcctggagatcctattacgtgaagggacttatactggacacatcatggagaaaatcagaaagaaggctgcttaataagacccactcctggatgcggccactctcaattctcagtgtctttgggaagcaaggtttgccatccacttgtctaaacagatgatgatagcagaggtgctgcacaccttctccctgtgacttgagaatgcctttcgtgctcccaaataaggaactcctctcactgctgtctgctctgagctgtatttcattttgatagccatttgcaggagacac

SEQ ID NO: 37223 - DNA, 426 bp, Homo sapiens
atacgactcactatagggcgaattggagctccaccgcggtggcggccgaggtactagataaattagtggttacactgtgtaaaataatttcaccactaagagatccagaagcaatgtagcaatcattccaattgtatgttacacaagttacttgatctttatgatccttaagagatcgatgaactcttttgattttaaatcccaaatattaacagtgttatttaggcctccgcttaccaaatacatagatgtagaatttaaattgacacatgtctgcttttgcccttcagcaagctctaaaagtggaacaggtttacatttgcaacttgagacaactattttgtcgccactggaagatgctgttactaaaaagttattattgctgctccaacatattgagctgattccatgtggtgatgtgtgtgg

SEQ ID NO: 37224 - DNA, 431 bp, Homo sapiens
acgactactatagggcgaattggagctccaccgcggtggcggccgaggtactccggatatgcagtagaggaatcctctaagaaccatagagacttcttttctgtgatttttgttccccacccttgaacaccatctctaggatggagttggcctaagagtgaatgctgcaagatctgtgtttatgcctcttttcctcattcttcctcagtttgttcgtctgcttgaaagttggccaaaaaatcctgctgctcaccgacttcccgtggtcagctgctgtcaagcgttcactttctcttctgtcattcctcatggaatgagggtggttttgtcttcccgcttcccttgacctcaaaatcaggattaaaacctggggtagcctctgtgctcctttcttcaaaaaaaaaaaaaaaaaaaaagtacctgcccgggcg

SEQ ID NO: 37225 - DNA, 659 bp, Homo sapiens
ggcgaattggagctccaccgcggtggcggccgcccgggcaggtactcctgagataagagaacattatcttgactctaaaaaagacgtagaccgtcatctgaaatcggcctgtgagcagtttattcagcagcagaccaagctgtttgtagaacagctggaggagttcatgacaaaggtttcagcgttaaaaacaatggccagtcagggaggccccaagtatactctctcacagcagccttgggcacaaccagcaaaggtcagtgaccttgcggcaactgcatataagacaataaaaacaaagctgcctgtgacattgagaagtatgtccttgtacctcggccgctctagaactagtggatcccccgggctgcaggaattcgatatcaagcttatcgataccgtcgacctcgagggggggcccggtacccagcttttgttccctttagtgagggttaattgcgcgcttggcgtaatcatggtcatagctgtttcctgtgtgaaattgttatccgctcacaattccacacaacatacgagccgggagcataaagtgtaaagcctggggtgcctaatgagtgagctaactcacattaattgcgttgcgctcactgcccgctttccagtcgggaaacctgtcgtgccagctgcattaatgaatc

SEQ ID NO: 37226 - DNA, 450 bp, Homo sapiens
ctactatagggcgaattggagctccaccgcggtggcggccgcccggcaggtactcttgaaggctatgcaacatgagtctttgaacaagaattccttgctactttgattcattcatcaaatactgagtgcctgtgtgccaggcacaggtgaactctggggattcaggggtaactaaaacagattggaaccctgcccttgtgaagctttcagtctagaagggagacgtgaaacaaattttagcttcaaaagcaacatctatttttgcctgttagcatgcatttattttaaaagccatattagagttacctggttccgcttcagagcagactgggaaaatcaggcttacaatggaatcagatgctgtgggcctaaaacagctctttaaaaatctatttttttaggccaggtgcgttggctcacacctgtaatcccagcactttgggaggccaa

SEQ ID NO: 37227 - DNA, 453 bp, Homo sapiens
ctactatagggcgaattggagctccaccgcggtggcggccgaggtacttcttttcctcgtagcttgagtctgtgtattccaggagcaggcggatggaatgggccagcccgcggatgttccagtactccattccccacttaagtttcaccatcactggctttcctgttagtccattgaggaaaggtttgggattgaggggtaaactcatcgtaaccacggccgctctagaactagtggatcccccgggctgcaggaattcgatatcaagcttatcgataccgtcgacctcgagggggggcccggtacccagcttttgttccctttagtgagggttaattgcgcgcttggcgtaatcatggtcatagctgtttcctgtgtgaaattgttatccgctcacaattccacacaacatactagccgggagcattaagtgtaaagcctggggtgcctaat

SEQ ID NO: 37228 - DNA, 613 bp, Homo sapiens
  misc_feature 254, 423: n = A,T,C or G
tacgactcactatagggcgaattgggccctctagatgcatgctcgagcggccgccagtgtgatggatatctgcagaattcgcccttagcgtggtcgcggccgaggtacgaaaaaatcaggctactaagcccactgttaatatagacgcagaccaattgttaggaacaggtccaaattggagcaccattaaccaacaatcagtgatgcagaatgaggctattgaacaagtaagggctatttgcctcagggcctgnggaaaaattcaggacccaggaacagctttccctattaattcaattagacaaggctctaaagagccatatcctgactttgtggcaagattacaagatgctgctcaaaagtctattacagatgacaatgcccgaaaagttattgtagaattaatggcctatgaaaatgcanatccagaatgtcagtcggccataaagccattaaaaggaaaagttccagcaggagttgatgtaattacagaatatgtgaaggcttgtgatgggattggaggagctatgcataaggcaatgctaatggctcaagcaatgagggggctcactctaggaggacaagttagaacatttgggaaaaagtgttataa

SEQ ID NO: 37229 - DNA, 427 bp, Homo sapiens
cactactatagggcgaattggagctccaccgcggtggcggccgaggtacgcctaaccgctaacattactgcaggccacctactcatgcacctaattggaagcgccaccctagcaatatcaaccattaaccttccctctacacttatcatcttcacaattctaatacgactcactatagggctcgagcggccgcccgggcaggtacaatccagaaaattaagaaggaagggaagatgtctgagtgcttgttaaaagccatgctgaattgtaaaacttttgaagaactagaacacgtgtctgctccatataaaactggaagcaaagggactaaagcccagagagcaagacagttgggcttagaaggagcagccagggcactgcttgagaaaccaggggagctcagtctgctatcgtacctcggccgctc

SEQ ID NO: 37230 - DNA, 427 bp, Homo sapiens
agctccaccgcggtggcggccgaggtactaactcatccagtatctgattctgtcttttcctctatccatctgtcttccatctttgcatccatcattcaacgaaatttacagcctatgcagatgttctgtggtcttaaacatgttgtattcctctagccttggccatgcttcctcccctcccagccgttgttctcccccacgagaatatcttctcttttctgcttcttagtggttctattctcagtatctgaaactctcattttctgtccccgcgtacagtcagaagtgatccctactttttcttaaagctgactggcgcccgcaggggccgccgacctcttcacagacccacggaaactgccggccgctctagaactagtggatcccccgggctgcaggaattcgatatcaagcttatcgataccgt

SEQ ID NO: 37231 - DNA, 442 bp, Homo sapiens
gcgaattggagctccaccgcggtggcggccgaggtacctactccataaagttacgaagaacacataaaacctgtgaagcacttataatagtgccagaacattgtgagcacacatgagatgttcattggcgttattattaagggcttatataaattcccaggtaatgcataataacagtagagactgtgacaagccctggcttccataaattgtcagcttcattttccctgtttcatttgatatgttattccattttatgctttgagacagctaaccataataaaaaaaaaagaaagaaaaaagagagagaaagtagggacaacactaaatcattagtaatttgagcacatttcctccaaggcatatgctatttttcaacttggtttcaatcatgtatctttattgtttttcttaatgttataagcatgtttggttttattgt

SEQ ID NO: 37232 - DNA, 622 bp, Homo sapiens
  misc_feature 172, 357: n = A,T,C or G
gtatacgactcactatagggcgaattggagctccaccgcggtggcggccgcccgggcaggtacagtttaaagccattaatatgttttatccatttgataattttacagtaagtaggtctcattcattttgacagttatcaaagatgtacgcgggggccgccgccagattctnaggcgaagacgcaagtgagaacatggacgttaatatcgccccactccgcgcctgggacgatttcttcccgggttccgatcgctttgcccggccgctctagaactagtggatcccccgggctgcaggaattcgatatcaagcttatcgataccgtcgacctcgagggggggcccggtacccagctnttgttccctttagtgagggttaattgcgcgcttggcgtaatcatggtcatagctgtttcctgtgtgaaattgttatccgctcacaattccacacaacatacgagccgggagcataaagtgtaaagcctggggtgcctaatgagtgagctaactcacattaattgcgttgcgctcactgcccgctttccagtcgggaaacctgtcgtgccagctgcattaatgaatcggccaacgcgcggggagaggcggtttgcgtattgggcgc

SEQ ID NO: 37233 - DNA, 435 bp, Homo sapiens
gtaatacgactactatagggcgaattggagctccaccgcggtggcggccgaggtacaccctgtcctcaagataaatcggaaacaatcaacccaaaaacatgttctcccaaagaatatttggaaactttcatctttcctgttctgcttcccggaatggctagcctgcttcaccaagcgaagaaagaaaaatgttttgagaggaaaagaaccaaattcattgcctgtgattttctgactgagtggttatacaaccaaaatccaaagagggcaggggagccattcacagaatttttctccattccatttgtggaggagcggctaaagcaacacccacggccgctctagaactagtggatcccccgggctgcaggaattcgatatcaagcttatcgataccgtcgacctcgagggggggcccggtacccagcttttgtt

SEQ ID NO: 37234 - DNA, 521 bp, Homo sapiens
ggcgaattggagctccaccgcggtggcggccgcccggcaggtacaaaacggtcttcaactgtcacgtcagttgttcctggagtgttttatggggaaaagcaaacttcaccaaacatagagtacgcggggacatcaatgcagagtccctctgtgaatttacaacacccaacacccatgagttcagtccttaagaaggaaaattgagcaagtatttaattggttggacattgcataaaagaggtccatatccaggctaactctagaaattttattctcaaacttagttggcctctttttcttctgtcagaggaccattcttagtggcactggggaaatcttggcacccagaagaattcaactgcgctcactgcaaaaatacaatggcctacattggatttgtagaggagaaaggagccctgtattgtgagctgtgctatgagaaattctttgcccctgaatgtggtcgatgccaaaggaagatccttggagaagtcatcaatgcgttgaaacaaacttggcat

SEQ ID NO: 37235 - DNA, 448 bp, Homo sapiens
actactatagggcgaattggagctcgagcggccgcccgggcaggtacgcggggagagaaacaagcggagttaaccgaagagggggtcgaggagagccagagtcggggacccaggagtttcctgtgtccagcgctgccggagccgcctgaggtgccatgtttcagaacagagtaagacccctggtaaagaagaactgaagatattatacagataccagatatagcctaattacaaagaaagcattaacctgcctttgaggtgactaaaggggaataatggtgattttgcgccgggctcggccgctctagaactagtggatcccccgggctgcaggaattcgatatcaagcttatcgataccgtcgacctcgagggggggcccggtacccagcttttgttccctttagtgagggttaattgcgcgcttggcgtaatcatggtcatagctg

SEQ ID NO: 37236 - DNA, 439 bp, Homo sapiens
gcgaattggagctccaccgcggtggcggccgaggtacaagacagttttgcttccactcagcttcttcaacctgttatcggcaaatatattatattttatacgttataggccaaacgatgcaactatatacatattgttttatacaactgtgttttacattagttaagagaaaaaagaaaaatgcatagattgtttctgataattacataattatttttgcctgtgctctttttctgcatgtgtgtagattcagattactgtctgtggtcacttgctttcaggctgaagaacttccttttgtatttccagcaagtcaggtctgccagcaacaaattctcttggtttttgattatgtgagatgttttatttcacgttcatttttgaaaaatagttttattgtatataggattattggttgacagttattttctttgaacac

SEQ ID NO: 37237 - DNA, 608 bp, Homo sapiens; identical to SEQ ID NO: 36699

SEQ ID NO: 37238 - DNA, 637 bp, Homo sapiens
gtatacgactcactatgggcgaatgggagctccaccgcggtggcggccgaggtactttaatcttcttagcaccctatgagataaacggtgttaacaccaattttatagatgacatatctggagctcagagaaaccacatctcttgcctaaggtcaatacaccatatatgagagtaggggctgtccgtatcaacatgcatttcttgagaaactacaagtgggccaaagacatacttaatactatggaaaggaagagctgtggggaaattaacaccacttacaggtgagatacagttcacatttataacaacatagataatttggatacatatatcacagataaactagacagttatatcatctgacatatacttatttggaagagtctgatttattggataggatcgattttaaccacctataaatgttttcttttttctggtataaagtaacataattattgcaataccattttcctgtagtaaatttaagttaataactttttttcagttgctcaaaagatttataaatatgtaggttttttactaagaagataattacagaaatcgtaacttactgtcaatgctatttctaggtgtatgcctagcatctatatttctttttcaactgaacaatgc

SEQ ID NO: 37239 - DNA, 393 bp, Homo sapiens
gggcgaattggagctccaccgcggtggcggccgtccgggcaggtaccccgacgcggtgaagatctgcaatatctgtcacagcctcctcatccagggtcaaagctgcgaaacctgtgggatcaggatgcacttaccctgcgtggccaagtactggagagctgttcacacagatgtttagacctttctctctctctgttttcttctttctcaacaactctttcacagaggcagtcattttgaaaggttgaaatatttggcctttaccaaagagctgttctttttccttaagcaaaatcctttcagaaagaaacaaatggggaagggcagattaagaatgcatatgtcccaatccacttctataggagtttaatcatattcacatgagtgaaatga

SEQ ID NO: 37240 - DNA, 413 bp, Homo sapiens
atacgactactatagggcgaattggagctccaccgcggtggcggccgaggtacattagtggtcctgaggtgacctatattctcacattacaaagataacatgattaagagattcatgtaagacccgtgtcagaaattataaaaggattaattgtggaaactgataaatgggcaagaaatcttcacactttatgctcccctgatgcaccaccagctggtccctccattcggggtccctgacttcccacaacagccaggctttcttgggcagaggttcctgtggctttccacagtgcattgagcccctggcgagtcgattggggtgtctccatctccacacttttctttgcatctccagtgagttcattgtagaactttaaatgtcgcaaggctgaccgtggacgtacctgcccg

SEQ ID NO: 37241 - DNA, 579 bp, Homo sapiens
gcgaattggagctccaccgcggtggcggccgcccggcaggtacctgtcagtgttcaatatttaacaaactccagttaaacaggtaagaggtcagcagtagcttataggccttggttctattatccatgtgcccaactgcagccatcgtgggctggtgttaaaattttcctttcaatgtcatttttctaataattgcaatcagtgagaggagaagaaaaagttcaagggaatgacctgacctttcaccatcctacacaggagatgactgatgacatggattcatacactaatgtatatcgtatattctccaaagaccctcaaaaatcacaagaagttttgaaaaattctgagatcataaactggaaacagaaactccaaatccaaggtaacaagtctgaagaaatgggcaagcagctgtgcttctcaaattgtgtcttcaactaacagcattagcatcacctgagagctcattagaaatgtaaattcatagaaactctctgagctgggagaggtggagcaatctgtggtgtgccaaggactatagctgattgtggtgtaaactcaactttgaaaactact

SEQ ID NO: 37242 - DNA, 440 bp, Homo sapiens
gactcactatagggcgaattggagctccaccgcggtggcggccgaggtacgatacacacccaaagtcttagaagaaatggagtcgcgctttgaaaaaatgagatcagcaaaacgcaggcaacagacctaatacatttcaaaacttgatatttcattttgcgttttagctagagaagttttccttgtgacttactaatggctgcaatgccaatgattgtaagaaaacaaacaaatttatcatgaaattctccttgtcattttataaatgcctattttaacatcatttatggttccagagatgcatacacttttttctgacaagaaaaagtaaaaggtgatgagggcaattctgtcctactgtttttacaggcctttttcaaatgcagattttgtcataaagttgttatagattttttaaaatgcttttttaatattaaaat

SEQ ID NO: 37243 - DNA, 190 bp, Homo sapiens
atagggcgaattggagctccaccgcggtggcggccgaggtacctgtgatggcagtggcttgctcttgtctttttcttttctttttaactaagaatggggctgttgtacctaagaaaacagaaacttgagtagacatggtaatgaccagcaaaaggcctatctttataacaatttcttttatgctaccgct

SEQ ID NO: 37244 - DNA, 441 bp, Homo sapiens
tacgactcactatagggcgaattgcgccctctagatgcatgctcgagcggccgccagtgtgatggatatctgcagaattcgccctttcgagcggccgcccgggcaggtacccgtctagcagctgatgtgggtaaagctggagctgaaagggaattccgaggcctcggtgactgcctggttaagatctacaaatctgatgggattaagggcctgtacgcggggctttctttccgcgccgatagcgctcacgcaagcatggttaacgtccctaaaacccgccggactttctgtaagaagtgtggcaagcaccaaccccataaagtgacacagtacctcggccgcgaccacgctaagggcgaattccagcacactggcggccgttactagtggatccgagctcggtaccaagcttggcgttatcatggtcatagctgttttctg

SEQ ID NO: 37245 - DNA, 530 bp, Homo sapiens
  misc_feature 187: n = A,T,C or G
actactatagggcgaatgggagctccaccgcggtggcggccgggtaccattcttatctcagaatgctgtaaaccatcagtagaagcagtttagatttggactgcatggtaaaatgaaaagtaataaccctccaaccacaacctagtcagggtattaataattatatgtagcaagaaaacaaagaagnaataatattgaaaaaatggagattccccaaccagtttcatatttgaaggatctgagttgtatttttattaaggaaattttttttctgaatactgtcttccaaaatgttaacattaaaatctgaatcagaggactctgaatggaaaagaagtttgatcactgacacctagggctctgaagcgtgcgtggccacatggaaaagtcgaaggatgcgctgtcgaatctcctttgtcttcactccatagacaattgggttgagcacaggaggaaccagcagatagatattggccaagatgacgggcagcggagagtcacgccgcttgctaaagcgatgcaccatggac

SEQ ID NO: 37246 - DNA, 342 bp, Homo sapiens
aaggggctggaaggggtaccttggccgctctagaactagtgtatcccccgggctgcaggaattcgagatcaagctgatgcgataccgacgacctcgagggggggcccggaacccagcttttgttggcgaactgaggggtagaagcccgctgggcgtaatcatggtcatagcggtctacaagcgagaaaatgccatccgctcacaaatccacacaacatacgagccgggagcataaagtgtaaagcctggcgcgcctcacgagtgagctaactcacattaatggcgtagcgctcactgcccgcaatcaaggccaaaaacctgtcctgccagaagcattaatga

SEQ ID NO: 37247 - DNA, 424 bp, Homo sapiens
atacgactcactatagggcgaattggagctccaccgcggtggcggccgatgccacatatcttcctctaacccagatagtcaaaaagtttctcctttaaaaattaaaatttgtcaacacttcccctccattcaaggtttcctctatcttcaaatgtgtatttttctatgtaactgtgtattttcctatgtgtaactgctaaatgctaaataatcactaaagtggtatttcccaaaagatattttcaagatgaaacatacaaaagtatgagattagtttggaaggaagcttgtaaattattgaaaattaccagctaacctcaaaatactttgaggtctcaaacaaaatctattttattcacctaagagctagaccaggagatttattttgaaactctctttaaatctacttaaatagattatgtgc

SEQ ID NO: 37248 - DNA, 442 bp, Homo sapiens
tatagggcgaattggagctccaccgcggtggcggccgccacgctggttttgcatcttcaggagacgctcgtagccctcgcgcttctcctcggccagttcgcggaagaagtggctcacgccttccagagccacatcatcgcggtcgaaatagaagcccagagagaggtaggtgtaggaggcctgcaggtacataagctcacgcgtgctcctcacattctgctcctttcacagaatggtcagtccccggtcatgccctcgagcccctccagggagacagtgtggttctgctctaaaaacgtgaggtggaaactgaaatatgtcaaaacaacaactgaggaactgcggctgtgctgcctggtgcatgagcagacgtacctcggccgctctagaactagtggatcccccgggctgcaggaattcgatatcaagcttatcgataccg

SEQ ID NO: 37249 - DNA, 373 bp, Homo sapiens
ctactatagggcgaattggagctccaccgcggtggcggccgaggtacctggtgtcttttattaagaatttactccccccatttctcacagagaataacagtcgggagtcattgtcacaatataatagaaatgttagcaaccagattcatgtaaggactaagtggtcctcatgaattgcattaagactctgtacacttcggtctagccagaaaaaaagcagaaacaagaagccaaggctaaggcttgccgccctggccaggaggaggggtgcagctctcatgttgaggagagctgtttctggcaggagttaggaggaactgctaccacttcaaaagcctgtagaggggaagctatttaattaagggattccccg

SEQ ID NO: 37250 - DNA, 437 bp, Homo sapiens
ctactatagggcgaattggagctccaccgcggtggcggccgaggtaccattcttatctcagaatgctgtaaaccatcagtagaagcagtttagatttggactgcatggtaaaatgaaaagtaataaccctccaaccacaacctagtcagggtattaataattatatgtagcaagaaaacaaagaagaaaataatattgaaaaaatggagattccccaaccagtttcatatttgaaggatctgagttgtatttttattaagcgagcggccgcccgggcaggtacgcgggtgctggaaacagttcctcggagtggagaggtttacacctgccaagtggagcacccaagcgtgacaagccctctcacagtggaatggagagcacggtctgaatctgcacagagcaagatgctgagtggagtcgggggctttgtgctgggc

SEQ ID NO: 37251 - DNA, 421 bp, Homo sapiens
gcgtaatacgactcactatagggcgaattggagctccaccgcggtggcggccgcccgggcaggtacaatctgcattcttcttattaatttaatccatattttgaagtcagaaaagaattcatctcatttgagttagtttagatcaacatactgatattgctgaatagcttcacttccctgaaactaaacatatctattcctttcgtcttagacaaattatgaggggaaacctgtctgaaatttggctaacacatggtgtgcatttgatgccactggaggatttgctttgtcaatttaagattgagtgatggctatagaggaaagtgacggaaaaaaaaaccttcttaatgtgaaatagaaagtataaaggacaataaaatgctaaaaagtacctcggccgctctagaactagtggatcccc

SEQ ID NO: 37252 - DNA, 459 bp, Homo sapiens
tacactactatagggcgaattggagctccaccgcggtggcggccgaggtacctgtgatggcagtggcttgctcttgtctttttcttttctttttaactaagaatggggctgttgtacctagaaaacagaaacttgagtagacatggtaatgaccagaaaaggctatctttatacatttcttttgctacgcttcaaattcatgtcacctaaaagttgtgaagtgcacaaaacaaatctacttaactgaaaattattttcaatgaatgggatgtttagaactctgtgagggtttttaaggtcttttcgaatagcaaattctaatgaggcttttttaagttggcaatttaaactcatacaagaaataaaaactcaccagtgtggctgggcagaatatatatattttctcaaatattgtttgtttgttttttccctgcactgtatccatggtcccatgatgaa

SEQ ID NO: 37253 - DNA, 426 bp, Homo sapiens
  misc_feature 362, 363, 380: n = A,T,C or G
ctactatagggcgaattggagctccaccgcggtggcggccgcccgggcaggtaccatttaatttttttggttggcccaaaaaacaaagcttttgtggaaccatggaaaaagatgaaaatgagactggcaaagaacaaatgctgaatctgaagaagaggacaactttgggcaaataatctgcatacttttaattgggaataagatgcccgcgtacgcgggatactaataaagtaggtgtttaaaaatcattatacctatattctatatgttcaagaagtgagaagaaggattaaccatgtaatgtagaaacatagaggatatttttaaaaacccaaatcaaacttttaaagatgaaaactacnnaaaaaaaaaaaaaaaanaaagtacctcggccgctctagaactagtggatcccccgggctgcag

SEQ ID NO: 37254 - DNA, 492 bp, Homo sapiens
tacgactcactatagggcgaattggagctccaccgcggtggcggccgcccgggcaggtacccgggggcccatccctctttgtgtgctttggaaagccgcggagctggtggtggctacagttggtgttgggggcttaggcgagggacgttaccgggaagttgcaggcgggaggacccttccccatccagtcacctgacaggtcacaaacatgtcagacaaaagtgaattaaaggctgagttggaacgtaagaagcagcgactggcccaaatcagagaggaaaagaagagaaaagaagaagaaaggaaaaaaaagaaacagaccagaagaaggaagctgttgctcctgtgcaagaagaatcagatcttgaaaaaaaaaaggagagaagctgaagcattgcttcaaagcatggggctaactccagaatcccccattgtccctcctcctatgtctccatcctccaaatctgtgagcactccaagtgaagctggaag

SEQ ID NO: 37255 - DNA, 289 bp, Homo sapiens
  misc_feature 271, 272: n = A,T,C or G
cgtatacgactcactatagggcgaattggagctccaccgcggtggcggccgaggtactccaggaggcccgtgtatttaatgaaactcccatcaaccctcggaaatgtgcccacatcctcaccaagattctttatctcataaaccagggggagcacctggggaccacggaagcgaccgaggccttctttgccatgaccaagctctttcagtccaatgatcccacactccgtcggatgtgctatcttgaccatcaaggagatgtcttgcattnngcagaggatgtcatcat

SEQ ID NO: 37256 - DNA, 454 bp, Homo sapiens
  misc_feature 26: n = A,T,C or G
gtatacgactcactatagggcgaatnggagctccaccgcggtggcggccgcccgggcaggcacagctttctaaaagtaataaaggtttagcataaatacagccttccagtagtcaataggatttttctgtttttagaacagagctcttattggtaatcattttaattttacataaagcatgttttttgttagaggaatgaaaccaaaccttccctattagaaaaaagatgattgtcttgaagggcagttcatctgtgcccaggcagaggcggtgtgctttccctaacagacatgaacagcatcccttcttgggaaaaaatggctttgcagccttccacagagcagcactgcagatttgtgcagccatctgttaagggctgctcccatgatgggggaacagcattgagtctcttctggtagcactagtggataaactgaatgctatttttgttca

SEQ ID NO: 37257 - DNA, 390 bp, Homo sapiens
cgactcactatagggcgaattggagctccaccgcggtggcggccgaggtacaaggctaagcattttaactttatactggaaaaaaaatcaaacaaaggggagggataaaggacttagtcatctttgcactggaaaacaaaatatgtaattaaattcccatagctgcatgtaacattgaaattcttcccaggttaaaaaaaaagttaattcctgttgatattaatggaaaatgacattttgagggtcttgagaatgtggcactaaaagtgggtaaatgaattttctagtatggtgcaaagaacacttgagtgatgattgttgatttacgaataatttcacttccgtaaatgaatcatgcctgtgttgctagttaaagtataaaaccctgga

SEQ ID NO: 37258 - DNA, 415 bp, Homo sapiens
tcactataggttcgattgggaactctagatgcatgctcgagcggccgccagtgtgttggatatctgcagaattcgccctttcgagcggccgcccgggcaggtacgcggggacatcaatgcagagttcctctgtgaatttacaacacccaacacccatgagttcagtccttaagaaggaaaattgagcaagtatttaattggttggacattgctttaaagaggtccatatccaggctaactctagaaattttattctcaaacttagttggcctctttttcttctgtcagaggaccattcttagtggcactggggaaatcttggcacccagaagaattcaactgcgctcactgcaaaaatacaatggcctacattggatttgtagaggagaaaggagccctgtattgtgagctgtgc

SEQ ID NO: 37259 - DNA, 432 bp, Homo sapiens
ctactatagggcgaattggagctccaccgcggtggcggccgaggtactttgagatgtgtgacagcattatagcaaccccaaattatctgtcttatggtgaagatggagagagtaaaaatcgtatgctgtgaatgataccaaaaacaaaaaaaaaaatctgtcccaaacccaaagttccctccccaggccttccaacaggccatgtggaatgactgcacacttctttcctcctcgtggaaggttgagaaaggaggaaacttaccacccagggggcaggtaacgggaagacccaagaacagggccaagtcctttcaaatgaatatacaggtgacattaggataaaacaatcctgggagggttggacacaagtggattcaataagcgacagccttaattttggggatgggtgtcaatgctggttttttaaactca

SEQ ID NO: 37260 - DNA, 426 bp, Homo sapiens
actactatagggcgaattggagctccaccgcggcggcggccgtgtgacaatcgaatattattcacagctgaagactgtgtgtgtggagatgggtgatgtggaatctgctttttgaaaacctgcagtgaaacctattgacatggccacgctgtggaatgatgtgaattggccctgtttacagaggcagtacagatctcatcaggtatgagggcagtctctgacgcgaacgtctcttcctcgtggtttttattgtcagtattcacacgaagtttaagtctcctagtgggcacccagacgggattgacgatctcctggtaaaacacaagcataccctcttccccacgttataattgttccaggttcccaggtattggtttgggagtttttccatgacactggcttgccttcgtttagggagaatttttt

SEQ ID NO: 37261 - DNA, 418 bp, Homo sapiens
gcgaattggagctccaccgcggtggcggccgcccgggcaggtaccccaattctaaaataaaggttaaaaaagaaaaagatatttcagcatcacttgtttcatcttacaagggcattgtaaaataataaagataaaagttaagagataggaaaagaaaaaagggaaaaagaaaaaaaccctcattggagtcctgttctgcccacccctggagttactaagtaagcccaacttaaggggtcccttgagctccagactgtaaagcccccaaggcagcatcatccacaccaccttatcagatcctcaaagcaattcttctaagttggtagaccggggtagttatttccattctgcaaatggggaaactgagactcagaaagtacctcggccgctctagaactagtggatcccccgggctgca

SEQ ID NO: 37262 - DNA, 353 bp, Homo sapiens
cgtaatacgactactataggtgcgattggagctccaccgcggtggcggccgaggtacgcggggaccttacagcacctgcacgcagatgcacacatctctagtcaaatgaggctctcagctttttgataggggctttttgatacgtgtataaccaatactttattctcactgtagtcaaggactcattgcaattcagaaatgagaagctgatccggaactccactacagctcaaagaaattctcgaatgttctcacctattaacagttagttaaaatggaagaagctggggatgaaattgtgagcaatgccatctcctacgctctatacaaagccttcagcaccagtgagcaag

SEQ ID NO: 37263 - DNA, 330 bp, Homo sapiens
gaattgagctccaccgcgtgctgccgaggtacatatatacttggtaattatgagcttgattttgtttttggaaatatgtgttcataatttaggtaatttgctacttaaagcactaagtctctgatacctgaaaagtacacttaaacatggcccaatgacacagcctttaaacttgtcaatattttcctcttggtggtattgaaaaccagtgagcagagagcataagaacagaacttcaagaccgtggcaggagcttgtatttgtacctgcccgggcggccgctctagaactagtggatcccccgggctgcaggaattcgatatcaagctt

SEQ ID NO: 37264 - DNA, 447 bp, Homo sapiens
ggcgaattggagctccaccgcggtggcggccgaggtacatctacctaaaggactattatgtggaataatacatactaatgaagtattacatgatttaaagactacaataaaaccaaacatgcttataacattaagaaaaacaataaagatacatgattgaaaccaagttgaaaaatagcatatgccttggaggaaatgtgctcaaattactaatgatttagtgttgtccctgctttctctctcttttttctttcttttttttttattgtggttagctgtcacatacaactttttttttttgagatggggtctcgctctgtcaccaggctggagtgcagtggcgcgatctcggctcactgcaacctccacatcccatgttgaagtaattcttctgcctcagcctcccgagtagctgggactagaggaacgtgccaccatgactggcta

SEQ ID NO: 37265 - DNA, 446 bp, Homo sapiens
acgactcactatagggcgaattggagctccaccgcggtggcggccgaggtacaactttaaactgtattgtattcatgttgctaaacaatattggccttctcgatgattttattcatgttgctccaaagttaaaaccctgtagaactaagtaggtgaagagatattttgtataagtgccacagaagagaaaatataataaattaaatagtgaattgagcatcactagaataaaataaaatgagtaggcattcctaagatgtgaaatgatcacctaagatatacatgctccaaccatattgattttagaacaaaacacagcagcccataacagtttgtggcctctactaactgtcctctgctgtcccatctagaggttatgtttctctatttttaaaataaaatgtagttaaattagcctgacggatgtttcctctctatcccttatc

SEQ ID NO: 37266 - DNA, 424 bp, Homo sapiens
cgtatacgactcacttagggcgaattggagctccaccgcggtggcccgcccgggcaggtacacaatgaaatcacctaacgatgcattcatcagaacctatccctgtgattaaatgacacatgactgtatttactaaaaacccatcagaggccaggtgcagtggttcacacctatagtcctagcactttgggaggccggggtgagaagaccgcttgagcccaggagtttgagacacgcctgtgcaacatagtgagttctcatctcaaaaaacaaaaacaaaaaccaaacccattagaacccatcagggtctcaaacaaggtgaaggtttaacaaatattatttcttttccccctcattttcttccctgtgaaaatgtttgcatttcaggccaggacacaaagttcaactcctaatgaaaaaaagt

SEQ ID NO: 37267 - DNA, 379 bp, Homo sapiens
ctatagggcgaattggagctccaccgcggtggcggccgcccgggcaggtacacataaatcacctggaaccttgttaaaatgcagatcctgactcaggaggtctgagttagagcccaggatttcatatttctagccagctccatgatgagctgctggtccgcagatcatgcttgcaggttttgaccagagtcagtgttggttagagtaagaggatgaggcagacatctgggaaaagtccagctggggcaagcatttgaagtctgccttcctaccaggtcaaaatcaaggcaacgaccttccatagataactatcaaagcttgagggggtgccttgaacccatctcctaaatccctaagacctgcccacctcttgtgtctc

SEQ ID NO: 37268 - DNA, 178 bp, Homo sapiens
tactatagggcgaattggagctccaccgcggtggcggccgggcatttctcccagggatctctgtgcttccttttgtgcttcctgtgtgtgtggatatttaaaggggctggaaatgtgcaaaaacatgtcactacttagacattatatttgtcaatcttgctgttctctagtgatgttt

SEQ ID NO: 37269 - DNA, 226 bp, Homo sapiens
tacgactactatagggcgaattggagctccaccgcggtggcggccgcccgggcaggtaccagctttccaagagggtaagtgagtcttcaccctgatatttttgccccgggttttacgaggcttctcttctttatgcaccttcatgtgctgcctcagatgaggagctctggactgaaaccatttggcccacatttcaactggcaactgggtttaggggtttttcttc

SEQ ID NO: 37270 - DNA, 643 bp, Homo sapiens
gcgaattggagctccaccgcggtggcggccgaggtactcattagccagctcctcggactccccagcagcattgatgtcgttcttcactttggccagagtcttcagaagcttgctggctcccagggctgccagagtgcagcccctggtccgctcccaaatgactttggagagttcttcttattctgaagaatggcccagatgaagagagcttgcagggggtgctcgagcggccgcccgggcaggtacgcggggacatcaatgcagagtccctctgtgaatttacaacacccaacacccatgagttcagtccttaagaaggaaaattgagcaagtatttaattggttggacattgcataaaagaggtccatatccaggctaactctagaaattttattctcaaacttagttggcctctttttcttctgtcagaggaccattcttagtggcactggggaaatcttggcacccaaaagaattcaactgcgctcactgcaaaaatacaatggcctacattggatttgtagaggagaaaggagccctgtattgtgagctgtgctatgagaaattctttgcccctggatgtggtcgatgccaaagggagatccttggagaagtcatcaatgcgttgaaacaaacttggca

SEQ ID NO: 37271 - DNA, 380 bp, Homo sapiens
atacgactcactatagggcgaattggagctccaccgcggtggcggccgaggtacctttcattggattgtccatggtgcatcgctttagcaagcggcgtgactctccgctgcccgtcatcttggccaatatctatctgctggttccctcctgtgctcaacccaattgtctatggagtgaagacaaaggagattcgacagcgcatccttcgacttttccatgtggccacacacgccttcagagccctaggtgtcagtgatcaaacttcttttccattcaaagtcctctgattcagattttaatgttaacattttggaagacagtattcagaaaaaaaatttccttaataaaaatacaactcagatccttcaaatatgaaact

SEQ ID NO: 37272 - DNA, 439 bp, Homo sapiens
tatagggcgaattggagctccaccgcggtggcggccgcccgggcaggtactcgcaaaatatgctggaacttttcagggatcactagagacatggctgcagcacaagcggcggcgtgtaggcctcctgtggaagagcccgcgtacgcggggcccaggcttaaataaacagaatataataaatcaagctattaacagcaaaaaataaaaagccatctggcctgtgtccaaaatgtggaaaagcaaaacattgggccaatcaatgtcattctaaatttgataaagatgggcaaccattgtctggaaacaggaagaggggccagcctcaggccccccaacaaactggggcattcccagttaaactgtttgttcctcagggttttcaaggacaacaacccctacagaaaataccaccacttcagggagtcagccaattacaaca

SEQ ID NO: 37273 - DNA, 286 bp, Homo sapiens
ctactatagggcgaattggagctccccgcggtggcggccgaggtacaatacccagtgcttctgccacagaagaaggaatccacgatgttttatcaaccagggaatttagattttgtatggatctcaaactagaacactgtttacatccatagtgatgtattgttccttgtataagaaatggtgctgaaaggtccaaaagttccaggtcttcgtggccagatctcacaggaattacactattaaacttgttcgagagtttgcaaatttcactgagtgtacctgcccg

SEQ ID NO: 37274 - DNA, 345 bp, Homo sapiens
tactatagggcgaattggagctccaccgcggtggcggccgccgggcaggtacataggtaacctctgctgaactaatacagcactcaccaccttacttaagaggccaccccatctataaacaaggccgttagaaggttctgccttactagatcaaaaatatttatgttggtgcaaaggtaattgcggtcttgccattactttcagtggcaaaaacaacaattacagggggagggggaagggatagcattaggagatatacctaatgtaaatgacgagttaatgggggcagcacaccaacatggcacatgtttacatatgtaacaaacctgtacgtttgtgcacatg

SEQ ID NO: 37275 - DNA, 399 bp, Homo sapiens
gcgaattggagctccaccgcggtggcggccgaggtacctgcaagcctcctacacctacctctctctgggcttctatttcgaccgcgatgatgtggctctggaaggcgtgagccacttcttccgcgaactggccgaggagaagcgcgagggctacgagcgtctcctgaagatgcaaaaccagcgtggcggccgaggtacagattagtgtgcacagagatctctgtagaaggagtagctgccccttctcagggcagatgatgctttgagaacatactttggccattacccccagctttgaggaaaatgggctttggatgattattttatgttttagggaccccccacctcaggcaattcctacctcttcacctgaccctgcccccacttgccataaaactt

SEQ ID NO: 37276 - DNA, 397 bp, Homo sapiens
actactatagggcgaattggagctccaccgcggtggcggccgaggtgtccgtgcgggcagaacccagggcatgaagatccaaaagggcctggttcagctttttctccagggccatggcagctttcatggcgtctggggttttaccccactcatcttcagctggcttcttgatgtcctggaagagagcgcggccgctctagaactagtggatcccccgggctgcaggaattcgatatcaagcttatcgataccgtcgacctcgagggggggcccggtacccagcttttgttccctttagtgagggttaattgcgcgcttggcgtaatcatggtcatagctgtttcctgtgtgaaattgttatccgctcacaattccacacaacattcgagccgggagc

SEQ ID NO: 37277 - DNA, 487 bp, Homo sapiens
gcgaattggagctccaccgcggtggcggccgaggtacagaatctggagcgcctggatgagtctgtgaaagaggaggcagatggcgtccacaacactctggctattgtggaaaacatggctgagttccggcctgagatgtgtactactcgattgtcaacgtcaaggagtcgcaggtcgcctggttctaggaataatgggggaagtatgtaggagttgaagattagtccgccgtagtcggtgtacctgcccgggcggccgctctagaactagtggatcccccgggctgcaggaattcgatatcaagcttatcgataccgtcgacctcgagggggggcccggtacccagcttttgttccctttaatgagggttaattgcgcgcttggcgtaatcatggtcatagctgtttcctgtgtgaaattgttatccgctcacaattccacacaacatacgagccgggagcataaagtgtaaagcctggggtgccta

SEQ ID NO: 37278 - DNA, 602 bp, Homo sapiens; identical to SEQ ID NO: 33064

SEQ ID NO: 37279 - DNA, 227 bp, Homo sapiens
ctactactatagggcgaattggagctccaccgcggtggcggccgccgggcaggtacccagtgcatatactctggagaggttctcaaagctggacagtaagtcctctggctcaggaactctgccccctaaagctgggaggaaagctggttgctcctaaacatggcttcctttctagaggctcgggccataaaaatcttatgtctttgggaaaaatatccacagtttta

SEQ ID NO: 37280 - DNA, 410 bp, Homo sapiens
cgtatacgactcactatagggcgaattggagctccaccgcggtggcggccgaggtacagtgtgcacgacgctgagccggatctcccctatcaccccatcaacatcaggtgggttcttcacctggcaggtgtatgtcccattgtcgtcgaactgcagtttccagagaaggatggaggcatcgtactgcagacatcatgaaatcacctatgtggcccttgtctcggataaagaaggaagccatgtcaaggttaagtctttcgagaaggaaaggcagacagagaagcgtgtgctggagactgaacttgtggaccatgtacctgcccgggcggccgctctagaactagtggatcccccgggctgcaggaattcgatatcaagcttatcgataccgtcgacctcgagggggggcc

SEQ ID NO: 37281 - DNA, 388 bp, Homo sapiens
gactactatagggcgaattggagctccaccgcggtggcggccgcccgggcaggtacagattctgagcctggcttataagccaggatgccaggatctggaggtcttaatttcccctcttctacctttttatcttcaagttctgatttgtcccggaaatgttcattttccttttgttgagacattttttccttacgtttgaaatatgaattaatatgatttgataaaaagtagaatgagtctccaaattttgtggttatagaacttgtgtaatgaaaaagactgcgtttacctatatcttcttctttgtctataatgtgacttttctcttctggaaaaggactctttgctgctgatttgtcactatatattttcagagatttgatggctt

SEQ ID NO: 37282 - DNA, 251 bp, Homo sapiens
ctactatagggcgaattggagctccaccgcggtggcggccgcccgggcaggtacatacattacacccctatttctacaaagcttggctattagagcattatgaacattaatgacctcaaactcacgttgtccaaagctgggcaagagcacctactacgtttctggaatgagcttgaagaagcccaacaggtagaactttatgcagagctccaggccatgaactttgaggagctgaacttctttttccaaaa

SEQ ID NO: 37283 - DNA, 563 bp, Homo sapiens
  misc_feature 465: n = A,T,C or G
acgactcactatagggcgaattggagctccaccgcggtggcggccgcccgggcaggtacttccactcttgtttccaattcaccccaggtcattcaactctatagccactcctaatgcctctcctgaggtaggacaaaagtgggcttcccaaaccaaaaagattcacagatccatgaagaaactgaacatccacttcaaatttcctcctctgatcttggcaactgcaggaaatgaaagcatttgtccagatctctggcaaagatggcactgtggtgttttctctggggccagttgtgcaaaaccttatagaagagaaggctgatctcattgcttcagacttggcccagattccacagaaggaagacctactacgttatctgagacaatggggaaagctgacgtatggcttattcgaaactcctggaattttcagtttcctcatccactcttaccaaatgttgattntgttggaggactccactgcaaacctgccaaacccctgcctaaggaaatggaagactttgtacctcggccgctctagaactagtggatcccccgggctg

SEQ ID NO: 37284 - DNA, 241 bp, Homo sapiens
cactactattgggcgaattggagctccaccgcggtggcggccgccacgctggttttgcatcttcaggagacgctcgtagccctcgcgcttctcctcggccagttcgcggaagaagtggctcacgccttccagagccacatcatcgcggtcgaaatagaagcccagagagaggtaggtgtaggaggcctgcaggtacctcggccgctctagaactagttggattccccccggggctggcagg

SEQ ID NO: 37285 - DNA, 406 bp, Homo sapiens
gtatacgactcactatagggcgaattggagctccaccgcggtggcggccgaggtacttgaaacatggtcatttttagcccttttccttaggaaccatgtctttattttctcaataaagaaattactttcaactttctaggctcacagtcattcagatcatctaccatctgccaatgagatcaacttggttgagaattttgggattttaaattagctgtcctacctttttaaatctcttttaaatccttcccatattaggatccaacaaaactttatcttaggaaatatgataagtagcttccaattgttgtagtgtggtcgacaaatgtgatttgattcatcttcccccactctaattttctccccttttctcctcccttacatggagtctaagtaagtatttgaa

SEQ ID NO: 37286 - DNA, 429 bp, Homo sapiens
cactactatagggcgaattggagctccaccgcggtggcggccgcccgggcaggtaccccaattctaaaataaaggttaaaaaagaaaaagatatttcagcatcacttgtttcatcttacaagggcattgtaaaataataaagataaaagttaagagataggaaaagaaaaaagggaaaaagaaaaaaaccctcattggagtcctgttctgcccacccctggagttactaagtaagcccaacttaaggggtcccttgagctccagactgtaaagcccccaaggcagcatcatccacaccaccttatcagatcctcaaagcaattcttctaagttggtagaccggggtagttatttccattctgcaaatggggaaactgagactcagaaagtacctcggccgctctagaactagtggatcccccgggctgc

SEQ ID NO: 37287 - DNA, 207 bp, Homo sapiens
actactatagggcgaattggagctccaccgcggtggcggccgaggtacgcggggggattcccgacgctgtggttgctgtaaggggtcctccctgcgccacacggccgctctagaactagtggatcccccgggctgcaggaattcgatatcaagcttatcgataccgtcgacctcgagggggggcccggtacccagctttttgtttcc

SEQ ID NO: 37288 - DNA, 210 bp, Homo sapiens
ctatagggcgaattggagctccaccgcggtggcggccggttctggagtctttgtgagacttctttgaaggaggctttgcgtgaaggctgctcggctcacttttcctaagtgtggttcctgaaggctgtctttgtaactttttgtagttctttgtgtaaaaagcgtattctgaatttatacacatggcatgtttcttcattatatctttcc

SEQ ID NO: 37289 - DNA, 597 bp, Homo sapiens
cgcgcgtaatacgactcactatagggcgaattggagctccaccgcggtggcggccgaggtacagccacttactcttaaagagactgctgaaagttttggaagcccaccaaaagaagaaatgggaaatgaacacatcagtgtccaccctgaaaactcagactgtatccaagcagatgttaactctgatgattacaagggtgataaagtataccatccagaaacaggaaggaaaaacgagaaagagaaagttggaaggaagggcaagcatctgttgactgttgatcagaaacgtggagagcatgttgtctgtggcagcacacgtaataatgagtcagagagcactttggatttagaaggcttccaaaatcccacagctaaagagtgtgagggacttgccactttagataacaaggctgatcttgatggagaaagtacctgcccgggcggccgctctagaactagtggatcccccgggctgcaggaattcgatatcaagcttatcgataccgtcgacctcgagggggggcccggtacccagcttttgttccctttagtgagggttaattgcgcgcttggcgtaatcatggtcatagctgt

SEQ ID NO: 37290 - DNA, 358 bp, Homo sapiens; identical to SEQ ID NO: 36550
  misc_feature 25: n = A,T,C or G

SEQ ID NO: 37291 - DNA, 386 bp, Homo sapiens
ctactatagggcgaattgggccctctagatgcatgctcgagcggccgccagtgtgatggatatctgcagaattcgccctttcgagcggccgcccgggcaggtacttgggactacaggcacgccccaccatgcccagctcatttttgtatttttagtagagacagggtttcaccatgttggccaggatgatcttgatctcttgacctcatgatccgcccctcttggcctcccaaagtgctgggatcacaggcgtgagccaccacacctggccctctatttattctctttaaagagagagaaaactatgagaggccaaaattatttaattaaattttttaccttagcacaaggggaaaaaatggaattttgcctaatataggtgatga

SEQ ID NO: 37292 - DNA, 415 bp, Homo sapiens
tacactactatagggcgaattgggccctctagatgcatgctcgagcggccgccagtgtgatggatatctgcagaattcgcccttagcgtggtcgcggccgaggtacaaacaccttttatgactcgccaggaacattctattcgtagaaatttcttaaaaacaggtgctaaatttagcaactttattcatgaggaacaccagtccaatggtggtgctcttgtccttcatgcttacatggatgaactctcatttttgtctccaatggagatggagagattttctgaggagtttcttgctttgacattcagtgaaaatgagaaaaatgctgcttactatgctttagcaatagtgcatggagcggctgcttatctcccagacttcttggactactttgcttttaatttccccaacactc

SEQ ID NO: 37293 - DNA, 285 bp, Homo sapiens
tacactactatagggcgaattgggccctctagatgcatgctcgagcggccgccagtgtgatggatatctgcagaattcgcccttagcgtggtcgcggccgaggtacttttttttttttttttttttttttttgttttttttttttttttttttttttttttttttttttttttttggggaattgaaaccaaatgggtttaattccaccaaaaggggtttaattccaaagccccatgagtttttccatgcccagcacaatagcacggttttcctggggtggggtaa

SEQ ID NO: 37294 - DNA, 443 bp, Homo sapiens
ctactatagggcgaattgggccctctagatgcatgctcgagcggccgccagtgtgatggatatctgcagaattcgccctttcgagcggccgcccgggcaggtactaaggaaggcttttaactatttaagataaaccaacctaattttgattttttacttgcttcaacgtgtttcagttcattaatgtttcaataataaggaatgaattctcttgtcttgacaaaccaagcatggaaatttccccataagagaaaagaagaaattaaaatgatttccatattcaagtcacagcacgctgaaaagagaactttgagttcttaggaaaggcatctgttacctccaaaggagggccactcattacagttttgtgtaatattacagtaaggtctgccaagaaggaattcaaggaaattgggaatgacgacactgtgatcccaggccac

SEQ ID NO: 37295 - DNA, 401 bp, Homo sapiens
  misc_feature 211, 321: n = A,T,C or G
gtatacgactcactatagggcgaattgggccctctagatgcatgctcgagcggccgccagtgtgatggatatctgcagaattcgcccttagcgtggtcgcggccgaggtaccatgtgcacaacgtgcaagtttgttacatatgtatacatgtgccatgttggtgtgctgcaccattaactcgtcatttacattagggggaggggggagggntagcattaggagatatacctagtgataaacctctcatttcaaaaataatctgcaaggcttcaacacacacttcacaaaaaatacatattaacagtcaatggaaggcattnttaagttatatttaaagtgcaatgaaatatcattccatacaaaactaacagagcatatttaaaaatactcaaagtacctg

SEQ ID NO: 37296 - DNA, 180 bp, Homo sapiens
cactatagggcgaattgggccctctagatgcatgctcgagcggccgccagtgtgatggatatctgcagaattcgccctttcgagcggccgcccgggcaggtacatgggactacaggcacgccccaccatgcccagctcatttttgtatatttagtaatagacagggttttcaccatgttt

SEQ ID NO: 37297 - DNA, 291 bp, Homo sapiens
gggcgaattgggccctctagatgcatgctcgagcggccgccagtgtgatggatatctgcagaattcgccctttcgagcggcctgccgggcaggtactttattttcaaaacactcatatgttgcaaaaaacacatagaaaaataaagtttggtgggggtgctgactaaacctcaagtcacagacttttatgtgacagattggagcagggtttgttatgcatgtagagaacccaaactaatttattaaacaggatagaaacaggctgtctggttgaaaaggatctgagaacca

SEQ ID NO: 37298 - DNA, 394 bp, Homo sapiens
gggccctctagatgcatgctcgagcggccgccagtgtgatggatatctgcagaattcgccctttcgagcggccgcccgggcaggtacttcgaggctctacagacaatctgatggatgacatagaaagggcagtagacgatggtattaatactttcaaagttcttacaagggataaacgtcttgtacctcggccgacctcggccgcgaccacgctaagggcgaattccagcacactggcggccgttactagtggatccgagctcggtaccaagcttggcgtaatcatggtcatagctgtttcctgtgtgaaattgttatccgctcacaattccacacaacatacgagccggaagcataaagtgtaaagcctggggtgcctaatgagtgagctaac

SEQ ID NO: 37299 - DNA, 389 bp, Homo sapiens
gactactatagggcgaattgggccctctagatgcatgctcgagcggccgccagtgtgatggatatctgcagaattcgcccttagcgtggtcgcggccgaggtaccatttgtgtctctttattataagtgagagaaatgaagtttatattatcaaggggactaaagtcacacggcttgtgggcactgtgccaagatttaaaattaaatttgatggttgaatacagttacttaatgaccatgttatattgcttcctgtgtaacatctgccattcatttcctcagctgtacctggaggctcaacggcagaagcttcaccacaaaagcgaaatgggcacaccacagggagaaaactggttgtcctggatgtttgaaaagttggtcgttgtcat

SEQ ID NO: 37300 - DNA, 327 bp, Homo sapiens
atacgactcactatagggcgaattgggccctctagatgcatgctcgagcggccgccagtgtgatggatatctgcagaattcgcccttagcgtggtcgcggccgaggtacaaggataggaagaaatccttaaagttacctactgtagtttatgatataataaatacatatctatatagcattgtatatacatatatagattgtgtgtgtttatatgtaatttatttgcccaattatcctgttagttttgtggatctgcaactttcaggaatgaaaaaacttcttttcactgcaagtttcatctttccccaaacttaaaaaatattcat

SEQ ID NO: 37301 - DNA, 392 bp, Homo sapiens
  misc_feature 314, 340, 350, 361: n = A,T,C or G
agggcgaatgggcccttgatgctgctcagcggcgccagtgtgatggatatctgcagaattcgccctttcgagcggcgccgggcaggtcggcggtcattaagaagagatccaattacagaaggcaataaatttgaattctttagcttattaacgaagttgagtacatcccgttatcttcctttcactaatcacgttccctgttaagcacatcataacaacagcacagtgaagtgaatgatgaaataagagcattttgatacactagaaaacagtgctcagtgagacatttacattctatttatatgattaaacantttgatcatacagtacaagggctaangcattttaanctttatactgngaaaaaaaatcaaacaaaggggaggggataa

SEQ ID NO: 37302 - DNA, 181 bp, Homo sapiens
tctagatgcatgctcgagcggccgccagtgtgatggatatctgcagaattcgccctttcgagcggccgcccggcaggtacgcggggtatctttctaaaggactgacgttcaatcaaatatctgaaaatactaaaggtcaaaaccttgtcagatgttaacttctaagtttcggtttgggata

SEQ ID NO: 37303 - DNA, 436 bp, Homo sapiens
tatagggcgaattgggccctctagatgcatgctcgagcggccgccagtgtgatggatatctgcagaattcgcccttagcgtggtcgcggccgaggtactatgaaaagttgattgtagcacaactgttcaatcagtaaaaggtcttcggcaaattccctttagagtatactttctataaactacatgttccacaaaaaggtcaattatatatacaattgacttgttttacttaatcttatttgctcagatcttgcaaatgcaatgagaatattaagcctgaggctagttctcagtgtataggtttaacaaattaaggctcattttcccaaatcaaaatagtttttagttttccttttaaattatgaattacattcatagtacctgcccgggcggccgctcgaaagggcgaattccagcacactggcggccgttacta

SEQ ID NO: 37304 - DNA, 358 bp, Homo sapiens
tacgactcatatagggcgaattgggccctctagatgcatgctcgagcggccgccagtgtgatggatatctgcagaattcgcccttagcgtggtcgcggccgaggtacccgagcgccttcccctcacctcaaccagagaagagcatacggttgctttttaaagctgttagcctgccctagcaaggacaaagcatgttagattagagatgcttctgctgatcgcaggggttcttgtttgaaaacatctatgatgggggtggggcgggaggatactggaataagtcttaatctataaagcacattttttataattgttatcagaaaacctataaacaagctccattctgcctcacttttcc

SEQ ID NO: 37305 - DNA, 380 bp, Homo sapiens
cgactcatatagggcgaattgggccctctagatgcatgctcgagcggccgccagtgtgatggatatctgcagaattcgccctttcgagcggccgcccgggcaggtactcaaagtctttgggtaggcaattctgatgaagatgaggagcaagatgacaaaaatgaagagtggtatcgattgcaagaaaaaaaaatggaaaaagacccaagcagattgcttctttgggctgctgaaaaaaatcggcttaccacagtgcggagactcctttctgaaaaggccactcacgtgaacactagggatgaagatgagtatacccctcttcatcgagcagcctacagtggacacttagatattgttcaggagcttcattgtacaggggg

SEQ ID NO: 37306 - DNA, 406 bp, Homo sapiens
  misc_feature 328, 354: n = A,T,C or G
gcggccgccagtgtgatggatatctgcagaattcgccctttcgagcggccgcccgggcaggtacagttgatcccactttggaataaatgcccagaaggtaataagcattatcagtgagtgagagctctaggcacaaaataagttctcattcagaaaatggacagagatatgaagcagtgaaacatatagctttaaaaactggaaatcattcatgacatttgttttcaaagtaaacattatctgcatttcaagaactgtaattttcaaaagtagaatcaggcctgattaagtaatatttatgacttacagataaaattacaaaaaatanaaaatgaaaacttctttctgcccttngaaagaagaatagaaaactatattttttttccctggtaatggttcacagaga

SEQ ID NO: 37307 - DNA, 600 bp, Homo sapiens
acgactcactatagggcgaattgggccctctagatgcatgctcgagcggccgccagtgtgatggatatctgcagaattcgccctttcgagcggccgcccgggcaggtaccagagtgcccactggttccaacagttcttctcagaccacagagtgtcttacacctgaatcctgttcgcagactacaagcaatgtggcttcccaatcgatgcctcctgtgtatccttcagttgacattgatgcacatactgagagcaatcatgacacagcattaacactagcttgtgcaggtggtcatgaagaacttgtatctgtgctcattgcacgggatgccaaaattgaacacagagacaaaaaaggtttcacaccactaatcctggcagcaacagcagggcatgttggagttgttgaaatccttttggataaaggtggagatatagaagcacagtctgaacgaactaaggatactccgctttcattggcatgttctggtggacgtcaggaggtggtagacttgctgctggctcgaggtgcaaataaagaacataggaacgtatctgattatacaccactgagtctagctgcgtctggaggatatgtta

SEQ ID NO: 37308 - DNA, 348 bp, Homo sapiens
tacgactcactatagggcgaattgggccctctagatgcatgctcgagcggccgccagtgtgatggatatctgcagaattcgccctttcgagcggccgcccgggcaggtactatactcctccctggtagtgttaaaccagcagaatatgaccaagaggggtcatacccttatttcataggggtctctcttggcagcattatagtgattgtattttttggtattttcattaagcatttaattcacagtcaaataccctgccttacaagatatgcatgctgaaatagctcaaccattattacaagcctaatgttactttggaagggattggcatattgaaggggagattcc

SEQ ID NO: 37309 - DNA, 537 bp, Homo sapiens
tacgactcactatagggcgaattgtgccctctagatgcatgctcgagcggccgccagtgtgatggatatctgcagaattcgccctttcgagcggccgcccgggcaggtacttgaagcccagaagtcaagtcttgcttgctggaatggaagtcttagggaaacttgcaggtagtagaagatcaaatgtgtgcccttatagtaacacctttcgttttcctagttaataaaaacaattttagggggagtagaggacatcaggaaatagcctaaaaatatattttacttattttcaaatttaaagtctaattagaagatgggattttgagaaacttaacagttttcatctaggatatggatattgaattattgaaaattggactagaactaaaaggtttagatttggcctatgaaataaaaatgatctctattttctttgatgtacctcggccgcgaccacgctaagggcgaattccagcacactggcggccgttactagtggatccgagctcggtaccaagcttggcgtaatcatggtca

SEQ ID NO: 37310 - DNA, 114 bp, Homo sapiens
cgagcggccgccagtgtgatggatatctgcagaattcgcccttagcgtggtcgcggccgaggtactttttttttttttttttgttttgttttgttgttgttgttgttgttgttg

SEQ ID NO: 37311 - DNA, 422 bp, Homo sapiens
agggcgaattgggccctctagatgcatgctcgagcggccgccacgtgtgatggatatctgcagaattcgcccttagcgtggtcgcggccgaggtacttctatgatatagttgtcaaaatcaactggaggataataaaatattgtgggttctcagcattcttagaatccaaattacaaccatatcaaaaagggtttggtccacatgatccaactgaagtcattttcctcaaggtgggaatttgtgccaacctaaatacgttgtttctttgatggtgtatattgctattggtattattttgaactaataacaattattttgactaaataatgctaacacaattctgttaagaattttgtcagctaacataattcattaagtatgttaaggcatcatatggaccaaaatatttggctgaatgact

SEQ ID NO: 37312 - DNA, 380 bp, Homo sapiens
gtatacgactcatatagggcgaattgggccctctagatgcatgctcgagcggccgccagtgtgatggatatctgcagaattcgccctttcgagcggccgcccgggcaggtaccaaatgaaaggggcaccatttcaagagcactaggactacattaaacttaaatatattcccatattcttaaaaatgtaactcaaaaccaaatctagtcttaaaaaagctccagtaactaaaactacattaacaggcacgatgaacagtgtaaacactgtgtatgggcaccaagtttaacagggcagacaatatttgcttctgcattcacacttattcaattacattttttaaaaaaatgatgctgcttaaactattaatgttttaccaa

SEQ ID NO: 37313 - DNA, 433 bp, Homo sapiens
  misc_feature 359: n = A,T,C or G
agggcgaattgggccctctagatgcctggctcggccggccgccagggtgatggatatctgcagaattcgcccttagcgtggtcgcggccgaggtacctttaccacacagacaaagtggactccaacgacagcctctacgggggagactccaagttcctggcagaaaacaacaagctgtgtgagacggtgatggctcagatcctagagcatctgaaaaccctggccaaggacgaggccctgaagcgccagagctcgttgggcctttccttctttaacagcatcttggcccatggggacctacgcaacaacaagctcaaccagctctccgtcaacctgtggcacctggcacagaggcacgngctgtgcagacaccaggaccatggttgaaaacgctagaatacatcaagaagcaaagcaaacaaccagacatgac

SEQ ID NO: 37314 - DNA, 430 bp, Homo sapiens
cgactcactatagggcgaattgggccctctagatgcatgctcgagcggccgccagtgtgatggatatctgcagaattcgccctttcgagcggccgcccgggcaggtacatttaattctgtgcatgtaaactcactgatttttctgtttttctgtggctaagcaaagaaaataaggaaagtcagagaaatctgctgacctatggactgcaaattcaaattctgccaatttcagaacacaaatatggagtcttgataattactctgtaactttagtttataagtaaaatataaagagaacgggactacagtaaagtatagcacgtgattcaatctctctgaatcccttagcactttgctaatttgctagttaaaagttgacttaaaagtgacaagaaattaaattaggggatctacagaagagacacatcaa

SEQ ID NO: 37315 - DNA, 181 bp, Homo sapiens
gcgaattgggccctctagatgcatgctcgagcggccgccagtgtgatggatatctgcagaattcgccctttcgagcggccgcccgggaaggtactcccgattgaagcccccattcgtataataattacatcacaagacgtcttgcactcatgagctgtccccacattgggcttaaaaacag

SEQ ID NO: 37316 - DNA, 598 bp, Homo sapiens
cgactcactatagggcgaattgggccctctagatgcatgctcgagcggccgccagtgtgatggatatctgcagaattcgccctttcgagcggccgcccgggcaggtactcatctgttttaaacaaaaatcaaaccgaaactattcttatctgtcaggtttacagttatgtagaaactacaatatagatgacaaaagatgcatctaaccatgtaactgtaatttatctttgatttatccaagcagaaacatcattgtctaacaataaaccattattctactgaaatcagagacaatgataaagcttgtctcttaaaaaacatcaacttttcaactttgatcagatggagcaccaaagggattatatctgtcaaagcatctttgcaattttttccacacaactagcataatttagttacctgatataaaataggaaaatatactcaatttttatttaaaagaaagctgaaaatatgacatccctcaatcttatataatatacaatatgctaataaatgccatacatgttaacaatacgtgaaatgctgctgagagttccacaatcagctaattcatgtcaccaggctaagtaaatctgac

SEQ ID NO: 37317 - DNA, 625 bp, Homo sapiens
gactcactatagggcgaattgggccctctagatgcatgctcgagcggccgccagtgtgatggatatctgcagaattcgccctttcgagcggccgcccgggcaggtacagtttgttcggatgatgaaacgtttcattcccctggctgagctcaaatcctatcatcaagctcacaaagctactggtggccccttaaaaaatatggttctcttcactcgccagagattatcaatccagcccctgacccaggaagagtttgattttgttttgagcctggaggaaaaggaaccaagttaactgagatactgctgctggaatgggcgagacattgctgcaaagaagtcaagcttttttcagacaaaaggtgtgagggggcttgcttggtatgcttacctgggcttgtgtacaaacagagggtcaaccacgatccccacattgaagccctcacgcaccaaccgggtcttcatcagtttgaacgtgctggtgacctccatggcgtcctggatgcggatgaaatggggggtagcgtaggcagggagccaagcgcgaacgtgctggtacctcggccgcgaccacgctaagggcgaattccagcacactggcggccgttactagtggatccgagct

SEQ ID NO: 37318 - DNA, 385 bp, Homo sapiens
atacgactcactatagggcgaattgggccctctagatgcatgctcgagcggccgccagtgtgatggatatctgcagaattcgcccttagcgtggtcgcggccgaggtactttttgagctgtgataatagcaaaattgtttttcggtaataatatcacactaatgcttcttttaaacattaaacctattttccttttttacagaataagggaaaatgtgataagaagtttgtatacatttctggattatagattattatttatcttttgaaccagagctaaatggtaaaagaaaaaaaatcagtgatgattgttatgttgatctcccacaattaatttatcttttgacaaaggggataaagagtttcagtttagctccttttgatt

SEQ ID NO: 37319 - DNA, 337 bp, Homo sapiens
gcgaattgggccctctagatgcatgctcgagcggccgccagtgtgatggatatctgcagaattcgccctttcgagcggccgcccgggcaggtacgcgggggcatctgcctggggccagtgaggagaatgcatctagacagagcttttcgtgctgctgagatctgttacctaaagcaataaaaaatggccagaggatcagtgtccgatgaggaaatgatggagctcagagaaacttttgccaaagttgatactgatggcaatggatacattagcttcaaatgagttgaatgacttgttcaaggctggcttgcttacctttgcctggggatagagtacc

SEQ ID NO: 37320 - DNA, 182 bp, Homo sapiens
agggcgaattgggccctctagatgcatgctcgagcggccgccagtgtgatggatatctgcagaattcgcccttagcgtggtcgcggccgaggtacagtatattctaataagatgctgtcagtgtttctgtgaatccaaaacttaaaccatttaattggcaaatattaacttagagctggttt

SEQ ID NO: 37321 - DNA, 101 bp, Homo sapiens
tacgactcactatgggcgattgggcccttagtgctgctcggcggccgccagtgtgatggattctgcagaattcgcccttagcgtggtcgcggccgaggtac

SEQ ID NO: 37322 - DNA, 665 bp, Homo sapiens
  misc_feature 491: n = A,T,C or G
tcgactactatagggcgaatggcgccctctagatgcatgctcgagcggccgccagtgtgatggatatctgcagaattcgccctttcgagcggccgcccgggcaggtactttttcttttttttttttgaggtggagtctccctctgttgcccaggctggagtgcagtggcatgatctcggctcactgaaccctccacctcctgaattaaagtgattctcctgcctcagcctcccgggtagctgggattacaggcacgcaccactacacccagataatttttgtatttttagtagagacgtgatttcaccatgttggccaggctggtctcgaactcctgacctcagctgatctgcccgccttggcctcccaaagtgctgggattacaggcgtgatccactgcacctggcctcaggtatgtttttctatctacacacaaaaagtttattttccttcctcttatttgatatcagaagaatgacaggaatcagttnttaacagagatagtttttccgtttctccattgtgttaatcagagcgcagacttacattctcagtcatttatcttttctggtggagaataaaaagtcacttatagttaaagatcagaaaattatcacaccaaatccattacatatgttagaatcaataatttactcaaaaatcag

SEQ ID NO: 37323 - DNA, 527 bp, Homo sapiens
ccctctagatgcatgctcgagcggccgccagtgtgatggatatctgcagaattcgccctttagagcggccgcccgggcaggtacctatttgagcttcccaattaggtatttgttttagattaaacaatagtgtaatgcatcaattccttgggtaatttaccgattggaattcctagtgtcatccttgagacacacgcgaaaaaactcaacattattatccacgtgaaatgggacctctaaactgtcctgttttgttacagcctctaatgagccaaaatagtataagaatcttgaagattaagaatttctgtagtgctctacttgcctgaaatttggggtgctaagcattaaaaaaatgcaattttagtgtgttatacttgcggacattaaacactatgtgtaaaggttgagaatttctaccataaaatacatagatcctctggatgtgaatcttgtatatgacaacaaactagatgttttaccctaaaaaagatgttcagattcttcatgtgacaagcccttcattt

SEQ ID NO: 37324 - DNA, 351 bp, Homo sapiens
agggcgaattgggccctctagatgcatgcctcaaccggccgccagtgtgatggatatctgcagaattcgcccttagggtggtcgcggccgaggtacgaaagaaaactctgcagttagcactggatcttgtctcttctagaaatgttgaagagctggttattgtcctgaagaaggaagtgataaaaacaaataatgtgtctgagcatgaggatactgacaaatacagacaactcctagtgcgaacattgcattcctgttctgtccgatttccagatatggctgcaaatgttattcctgtgttaatggaatttctcagtgacaacaacgaagcggcagcttgctgatgttctt

SEQ ID NO: 37325 - DNA, 628 bp, Homo sapiens
gactactatagggcgaattgggccctctagatgcatgctcgagcggccgccagtgtgatggatatctgcagaattcgccctttcgagcggccgcccgggcaggtacctctccaattcgtcatctgggtggcctgtctcagcccagcttccaagcttgcttttattggtggcatagagcttcaggatatcttccgtaacaaagaggagtgctctcgaatgctctaccttcactgaatttgaaaatgcagctgctcttatcccctcacctaaaccttcttgaaaacctgagagaaagccaagaaagcaatattgtcagacatgcagttctctacttacactgctcacacctgattaatgcctcagtgcttagtagttctcaaagttgagtttacaccacaatcagctatagtccttggcacaccacagattgctccacctctcccagctctgagaatttcaaggaatttacatttctaatgagctctcaggtgatgctaatgctgttagttgaagacacaatttgagaagcacagctgcttgcccatttcttcagacttgttaccttggatttggagtttctgtttccagtttatgatctcagaattttcaaaacttcttgtgatttttg

SEQ ID NO: 37326 - DNA, 395 bp, Homo sapiens
tagggcgaattgggccctctagatgcatgcttcagccggccgccatggtgatggatatctgcaaaattcgccctttcgagcggccgcccgggcaggtacaagaggaccatcctaccagtggggccacgtctcaacggtttatccttcacccatttttctgcacgtcatcctgaggtaaaccaattttaaatgtgtttgttttcagtaaaccagctatgacaatttatactaaacaaattgaactagaacccatttgaataggttttgaatttgttttttcatttttcatttttaatacaaaggcccgactgtgctcaatcgtcaagctgcatgcatgaagaactggccagcccaaacagtgtattaatcattagcaaatggaactttaaggagtt

SEQ ID NO: 37327 - DNA, 400 bp, Homo sapiens
tacgactactatagggcgaattgggccctctagatgcatgctcgagcggccgccagtgtgatggatatctgcagaattcgcccttagcgtggtcgcggccgaggtacctctgctgttgttggggggtttgcggagcgctgtgggagcgtccaccctgggtgtcgttacttgcggctccgcggtgaagctactcaatacgcgccacaacgtccgactgcactcacactacgtgcgctatgggtcaggtaatgggcagcactcagtgacaggtgtaacctctgtggatgacagcaacagctactggaggatacagcaggaagagtgccacaatgtgtgagaggggaacccccatcaagtgtggccaccccgtccggctgacacatgtcaacactggccgaaa

SEQ ID NO: 37328 - DNA, 437 bp, Homo sapiens
  misc_feature 89, 94: n = A,T,C or G
ttcagatgttaatcaggtctctcaagtttcatggagtctatgctgatcctttaattgacaaataaaagatatatatctgtggtgcgcancatanaaaaaaaaaaaaaaaaaaaaaaaaggtacaatttctgccaggtcttcttcttcctgcagaatttccttagctttcgtcctcagaggaacgaactctgtgaagtgtttgtcatagtattcatccaaggcacgcatatacttgctgtagctgatgagccaattgacagaggggaaatgcttacgttgagctagtttcttatctaagccccagaacacctgaacgataacaagagtggcagatgtaactggatcagaaaaatcaccaccaggtggagaaactgctcctacaatgctgacactcccttctctttcaggatttccaagacatttcaccctgcctgctc

SEQ ID NO: 37329 - DNA, 643 bp, Homo sapiens
tatagggcgaattgggccctctagatgcatgctcgagcggccgccagtgtgatggatatctgcagaattcgccctttcgagcggccgcccgggcaggtacgcgggggccagcgaagagagacactcagaatggacgatctaaagttccttccagcttcaaattctgggctggttttcagagatccagggctcgggatgcgaatgtccctgtctacgatggggctgccgttacagccttcctcccggggctctggagacgcgccagctctttgacacctctcctgcgctaaggaagagttggtttacagaaaatgcgccaattccagctggacatcactgtgaaaatgggacgggataaagtccgagaaatgtttatgaagaatgcccatgtcacagaccccagggtggttgatcttctggtcattaagggaaagatcgaactggaagaaacaattaaagtatggaagcagcggacacatgttatgcggttcttccatgaaacagaagcgccaaggccaaaggatttcctatccaggttctatgttggccacgatccatgaagtcattcagtggaaagatgcacgttgatactattttagagcacaaataaactcactatacaatggcccaaaaaaaaaaaaaa

SEQ ID NO: 37330 - DNA, 258 bp, Homo sapiens
gggcgaattgggccctctagatgcatgctcgagcggccgccagtgtgatggatatctgcagaattcgcccttagcgtggtcgcggccgaggtactttttttttttttttttttttttatgaattaaattcttgatgtcatctccaagaactctgcctaattgtaggtcacgaagattttacctattttttattttaaaaagttaaaaagtttttatgttttacattaaggtcctatgaatgctttttgaattaatttt

SEQ ID NO: 37331 - DNA, 420 bp, Homo sapiens
actactatagggcgaattgggccctctagatgcatgcctcagccggccgccggggggatggatttctgcaaaattcgccctttcgagcggccgcccgggcaggtacttgatcatattgatctggaagatggaatttccctgggaagagtccaaaaccactacatccacaccagcctgggcgagcaagtccagcctatacttgtcatcctcatgagtgccaatggctgccccacacagcagctgtttcttggcatctttggaggctagtgggtagtcccgattcttcttcaggtctgtccgggcaatgatggccacaagctcatcatcttcatttacaatgggcaactttcccttcttgctgcgctgcagaatttcatttgcctccttcagtgtgatgcctgcaggggctaccaccaagtc

SEQ ID NO: 37332 - DNA, 455 bp, Homo sapiens
ctactatagggcgaattgggccctctagatgcatgctcgagcggccgccagtgtgatggatatctgcagaattcgccctttcgagcggccgcccgggcaggtactggcgtgtatccattggttgcaaatatgctcttgacccaaacgtagacacacattctccagcttggctgactgaatttaattctgttacattgtgctttattttatcaaaaatgtgcatattaatagattgtagtttagcctttgtcaaaagacatgcaagtatttagtatttacattaaaaggattgcctcagaagaaacattgaattcataagccctcttaaaaagtcaaaaatatgcataaagaagactagtattgatattttctgatattttagatatgattaatattttggacctccattggtttccacactatcatgcaaatttccaacttgcttcaacacaaca

SEQ ID NO: 37333 - DNA, 384 bp, Homo sapiens
atagggcgaattgggccctctagatgcatgctcgagcggccgccagtgtgatggatatctgcagaattcgcccttagcgtggtcgcggccgaggtaccaagaaagtcgggatcgtcggtaaatacgggacccgctatggggcctccctccggaaaatggtgaagaaaattgaaatcagccagcacgccaagtactgttggcgagggtaggacctaggtcacgggcaatgaagtctcgctgatgttcaggggtgaagcccaggcactggaaggggtatccactcaacagcccagcagaaggctcattttcagctgtcactgcccaaaactgtaacttgtgctcagcataggcatccagggaacttcacaaagtatcttggcccag

SEQ ID NO: 37334 - DNA, 184 bp, Homo sapiens
attgggccctctagatgcatgctcgagcggccgccagtgtgatggatatctgcagaattcgcccttagcgtggtcgcggccgaggtactttttttttttttttttttttgaagaggatggggcctgtttggcccatgaattcaattgactcattggccccatcacaagagatcagtgactcaat

SEQ ID NO: 37335 - DNA, 549 bp, Homo sapiens
  misc_feature 25: n = A,T,C or G
tacgactcactatagggcgaatggngctcctctagatgcatgctcgagcggccgccagtgtgatggatatctgcagaattcgcccttagcgtggtcgcggccgaggtacagtagtgcactcttggctcactgtagcctcgacctccggggctcaagtgatcctcctgccttagccccacaagtagtgggactataggcacacaccaccatgcccatctaagtttttgtattttatgtagagacaaggtttcaccatgttgcccaggctgatcttgacctcctgagctcaagtgatctgcccacctcggactcccaaaatgctgggattataggcgtaaaccaccatgcctggccttaaatcaactttagagtcaacatctcttatcactggagcttctggagaaactccatcacgtggtgctctctttcctgatgtgttgtgcccaaatagcttgttctcatcagatgacttatttgctatgatatatatacttcaagagctgctatatgtattacatacatcaaatctttctgtaaagtttgattttt

SEQ ID NO: 37336 - DNA, 481 bp, Homo sapiens
ctactatagggcgaattgggccctctagatgcatgctcgagcggccgccagtgtgatggatatctgcagaattcgccctttcagcggccgcccgggcaggtacaactaaagggaatgagaaggagggcgctgcaggaacaagtgggcttggggaattgaatagcagagagcaaaccaatcagtccctcaggaaagggaagaaaaagaagaggtggcaccatgaagaggagaagatgggggtcttggaggaaggaggaaaaggcaaggaggccgcaggcagtgtcaggacagaggaggtagaaagcagggcatatgctgacccatgcagccgaagaaagaagaggcagcaacaggaggaggaggacttgaacctagaagatagaggtgaggaaactgttttaggtggtggaaccagggaagcagagagcagagcatgcagtgatggaagaagcaggaaaagcaagaagaaaagacagcagca

SEQ ID NO: 37337 - DNA, 371 bp, Homo sapiens
agggcgaattgggccctctagatgcatgctcgagcggccgccagtgtgatggatatctgcagaattcgcccttagcgtggtcgcggccgaggtactttttttttttttttttttttttttttttggagaattaatttttaatattctaaaggtgcttactcttacaaattaataaaaattagatagaaggcacaatagaagaacgtactttatgtgtcatttccatgactactaaccacatatatagagactaggggatacttagtgaagacggctttccaggaagtttacaaaattgaagaaaaaaaaagtatgtccaaatatggcataagtagcaatggggccctgaatttactttggaaagattgcct

SEQ ID NO: 37338 - DNA, 172 bp, Homo sapiens
  misc_feature 112, 142: n = A,T,C or G
tatacgactcatatagggcgaattgggccctctagatgcatgctcgagcggccgccagtgtgatggatatctgcagaattcgcccttagcgtggtcgcggccgaggtacttntttttttttttttttttttttttgggattnttagtaaagacagggtttcaccatgtttgg

SEQ ID NO: 37339 - DNA, 446 bp, Homo sapiens
atacactactatagggcgaattgggccctctagatgcatgctcgagcggccgccagtgtgatggatatctgcagaattcgccctttcgagcggccgcccgggcaggtacacggtgagaaactctcgaagaggacactgtttggctgggccaagacccagagcatgctcaatctcctgaataaatcttagtaatgggtggaatatgacgggaatgtttctggctccaggtttgcagacaaattttgttcctccaccttcaattaagttgtcatcaggacccccttgcagttctccactccgactatagagctcccttctctgttctcgcagataggcgctcatactgatggcatgggaggacgattcgaacttgaaaagagaattttttggcctttgaggtttcttcttggcaaaaaaggctgcaaactctcgtccagtgctggcat

SEQ ID NO: 37340 - DNA, 385 bp, Homo sapiens
tacgactcatatagggcgaattgggccctctagatgcatgctcgagcggccgccagtgtgatggatatctgcagaattcgcccttagcgtggtcgcggccgaggtacagaaacacacacacacacacaaatctgtcaatgcctctgctgagaagatgtgcagaaatacaagagaccaatggagaactgccttctaacatttattctttttctgtattattttgcctgttttggccctttactcttctttaggaatatatagatcaatttttatagttgtttgaagtagcactatgttgctaaatataaatttataatttaaattcacatatgtaagttatttaagtgtgttctttacaaccacatgtaaatagtatcttataatt

SEQ ID NO: 37341 - DNA, 530 bp, Homo sapiens
gcgaattgtgccctctagatgcatgctcgagcggccgccagtgtgatggatatctgcagaattcgccctttcgagcggccgcccgggcaggtacatatagatatatgatggtggctttgcctgtagtaaattcacgccaaaacataggctttcagtgcctattacatatggctttcagctctctctactgagggatgtaggagtttatttctgaggtctgagcctcttttcctttacttcctttactctttcctaagccttctttataaaaactatgcatgttctattgttttcctttttgattccctttcttttattatccccagtaggagtgacttgtaattctcatatgttagaaaggcagatctcctggttgaagaaaagatccacccaagcaagtcagcatgtttaataatttttgagggggatctcaaatgtgggaaggattgttatataagacaaccaaatgatgacatgagacaataaatgctataggaattatggaggaataattagctatttattttctt

SEQ ID NO: 37342 - DNA, 447 bp, Homo sapiens
ctactatagggcgaattgggccctctagatgcatgctcgagcggccgccagtgtgatggatatctgcagaattcgccctttcgagcggccgcccgggcaggtacaacaaagatgtgccttatcctcccccgctatcccctgctatagaggcaatccagaaagaaagaaacatcacaagggaaagatttctggtattaaaattataaagacaaatttgagcctggcattctacagctgagtcagtggtttaaagaaggaaagctaaagattaaagagacggtaataaatgggttggaaaacatgggagctgcattccagtccatgatgacaggaggtaacattggaaagcagatagtttgcatttcagaagaaatctctttgtaattgctgtaaatgtcatcaaggcaatcatagatttcttttccattttgcatattttcaaagata

SEQ ID NO: 37343 - DNA, 313 bp, Homo sapiens
ccctctagatgcatgctcgagcggccgccagtgtgatggatatctgcagaattcgcccttagcgtggtcgcggccgaggtacatgccacactactacccttcctgctcttgtgcgcacacctaccctgatgatgcagccttcactggatatcaagccatttatgtctttccggtggacagtagttctgctgttgggctctttccaaattttaacacaatggatcctgtgcaaaaagcggttattaaccatacatttggagtatccattcccccaaagaagaaacaagttatttcttgtaatgtctgtcagctt

SEQ ID NO: 37344 - DNA, 622 bp, Homo sapiens
acgactcactatagggcgaattgggccctctagatgcatgctcgagcggccgccagtgtgatggatatctgcagaattcgcccttagcgtggtcgcggccgaggtactaactcatccagtatctgattctgtcttttcctctatccatctgtcttccatctttgcatccatcattcaacgaaatttacagcctatgcagatgttctgtggtcttaaacatgttgtattccttattaatgcccacctctttgccttggccatgcttcctcccctcccagccgttgttctcccccacgagaatatcttctcttttctgcttcttagtggttctattctcagtatctgaaactctcattttctgtccccgcgtcctgcccgggcggccgctcgaaagggcgaattccagcacactggcggccgttactagtggatccgagctcggtaccaagcttggcgtaatcatggtcatagctgtttcctgtgtgaaattgttatccgctcacaattccacacaacatacgagccggaagcataaagtgtaaagcctggggtgcctaatgagtgagctaactcacattaattgcgttgcgctcactgcccgctttccagtcgggaaacctgt

SEQ ID NO: 37345 - DNA, 172 bp, Homo sapiens
gccagtgtgatggatatctgcagaattcgcccttagcgtgtttgcggccgaggtacaatccaggtgcagtgccagcaagtatttcaaataaatttcaacgacttgatattcaagtccaaactaaatatttaatgttttctttattgcaaatatgatgtcttttgacctgagg

SEQ ID NO: 37346 - DNA, 367 bp, Homo sapiens
cttgatagtggccacctgtgaagagtggagaagggaaaataatgagtgtgggaggtgggatgggtattggttaaaggggacttcagctttttatataaacatccacttctctttcaaaagacttcaagtaaatataagaagatactgattgattctggattgtggtatagggatatcttgtcttatcttttgtacacaccacgcgtcacccaacgacccatgaccgttctctgaggcaaaggagggcagcctgacagcaaacacagtcactgttggttccttctgatccacagcctcatcagtatttggactttttaaagctcgtagaaacaagacaaggtgcaccggtttcatagacgcaacctta

SEQ ID NO: 37347 - DNA, 365 bp, Homo sapiens
gcagtgtgatggatatctgcagaattcgccctttcgagcggccgcccgggcaggtacgcgggtagcaagatcctgtctctacaagaaattttttaaaaatgagccaagtgtggtggtgcatgcctgtagttccagctactcaggacactgacgtaggagggttgcttgagactgagagttgggggctgcgatgagccatgaatgccccactgcaccccagcctgggcgacagaacgagaccccatctcaaaaaaaataagttctggttgtcattgaattgggataaacagagagcttgatgctttctggcttctgtctcaggtgatgcattgcacatttgggatttttggaaaggtaatgaggaa

SEQ ID NO: 37348 - DNA, 413 bp, Homo sapiens
agggcgaattgggccctctagatgcatgctcgagcggccgccagtgtgatggatatctgcagaattcgccctttcgagcggccgcccgggcaggtactactcgattgtcaacgtcaaggagtcgcaggtcgcctggttctaggaataatgggggaagtatgtaggagttgaagattagtccgccgtagtccgtgtacgagtaagcaatgactctcaagcaatttttggttctgaagatgtaggctctagctcctacgttgctgtggacatattgattgctgtaggtgccatcatcatgattctgggcttcctgggatgctgcggtgctataaaagaaagccgctgcatgcttctgttgtttttcataggctcgcttctgatcctgctcctgcaggtggccacaggtatcctag

SEQ ID NO: 37349 - DNA, 428 bp, Homo sapiens
actatatgggcgaattgggccctctagatgcatgctcgagcggccgccagtgtgatggatatctgcagaattcgccctttcgagcggccgcccgggcaggtacccaaaaagaagaagatgcctgaaaacttcatgcctcctgttcccatcacatcaccaatcatgaacccgttgggtgacccccagtcacaaatgctgcagcaacagccttcagctccagtacgcggggagccccaagcttaccacctgcacccggagagctgtgtcaccatgtgggtcccggttgtcttcctcaccctgtccgtgacgtggattggcgctgcgcccctcatcctgtctcggattgtgggaggctgggagtgcgagaagcattcccaaccctggcaggtgcttgtggcctctcgtggcagggcagtctgcggcggtgt

SEQ ID NO: 37350 - DNA, 568 bp, Homo sapiens
  misc_feature 338: n = A,T,C or G
acgactcactatagggcgaattgtgccctctagatgcatgctcgagcggccgccagtgtgatggatatctgcagaattcgcccttagcgtggtcgcggccgaggtactttttttttttttttttttttttgtcgagattatggtatcactatgttgctctggctgatctcaaatgtttgacctcaagggatctttctgccacagcctcctaaagtgctaggattatatgcatgatacaccatgcctattgtagagtattacattattttcaaagtcttattgtaagagccatttattgcctttggcctaaataactcaatataatatctctgaaactnttttttgacaaattttggggcatgatgatgagagaagggggtttgaaactttctaataagagttaacttagagccatttaagaaaggaaaaaacacaaattatcagaaaaacaaaagttagatcaagtgcaaaagttctgtggcaaagatgatgagagtaaagaatatatgtttgtgactcaagggggctattactttgttcttgcattttctgagtacctgcccgggcg

SEQ ID NO: 37351 - DNA, 441 bp, Homo sapiens
actactatagggcgaattgggccctctagatgcatgctcgagcggccgccagtgtgatggatatctgcagaattcgccctttcgagcggccgcccgggcaggtacataaacacagtaggtaggtggatggatgaatttgctgtccggtcaagacttcagctagcacattcctaattgacctgcctttacatatatggtttctaaaacactttcacactgggatgatgacagagttctggagatggatggtggtgatggttgcacacactattgggaatatacttaatgacgttgaattgtacctcggccgcgaccacgctaagggcgaattccagcacactggcggccgttactagtggatccgagctcggtaccaagcttggcgtaatcatggtcataggctgtttcctgtgtgaaattgttatccgctcacaattccac

SEQ ID NO: 37352 - DNA, 433 bp, Homo sapiens
  misc_feature 402, 427: n = A,T,C or G
agggcgaattgggccctctagatgcatgcttcaggcggccgccagtgtgatggatatctgcagaattcgccctttcgagcggccgcccgggcaggtacagatgaaggagaagatggagatgaaccagatgacgggagcaatgatgtcgttgatcttttgccgaggacggagatcagtgataaaatcacttcagagttggtatctaagattggtgataagaattggaagattaggaaagaaggcctagatgaagtggcaggtattattaatgacgcaaaatttatccaaccgaatataggtgaacttccaactgccttgaagggtcgactcaatgattcaaataaaatcttggtacagggcttcaaatgtagcttctcttgaatattcacttggatcataagngagtggttttgggggaaacctttgnaaagat

SEQ ID NO: 37353 - DNA, 244 bp, Homo sapiens
ataggcgatagtgccctctatatgcatgctcgagcggccgccagtgtgatggatatctgcagaattcgccctttcgagcggccgcccgggcaggtactcattatttaccttgtagggagggtgggcaatggggttacctgaccttatttgagggtatgggcttcttttctattgcatcacttgttatctcaaagagacttggagccaggtgatccttttatgctgctacagtctttagggagct

SEQ ID NO: 37354 - DNA, 343 bp, Homo sapiens
gactactatagggcgaattgggccctctagatgcatgctcgagcggccgccagtgtgatggatatctgcagaattcgccctttcgagcggccgcccgggcaggtacaaaaagtttattaagatggattaagattccacattgatattaacctttaggaaactaatactcattaagtttcaatgtagctccaaagaaaaatacttgtcattatatgaataaaatattggagcagatttttcttcatacttttacaataaaacaacgtattacaaaagataatgcaggaacaggtatgaaaatccaattgtcctgtattcaggctttatttatttatttatttag

SEQ ID NO: 37355 - DNA, 406 bp, Homo sapiens
ctactatagggcgaattgggccctctagatgcatgctcgagcggccgccagtgtgatggatatctgcagaattcgcccttagcgtggtcgcggccgaggtggcggacactcagctgatgcttggagtcgggctgatcgtgaccatctttccaccgtagaaaaggacacaaatggagaagttctgtgggtgtggtgttatccttccacgacagccacattaaggaacctgctgctgagaaaatgctgccttacagatgaaaacaaacttctccatccctttgtctttggtcagtacgaaagaaaactctgcagttagcactggatcttgtctcttctagaaatgttgaagagctggttattgtcctgaagaaggaagtgataaaaacaaataatgtgtctgagcatg

SEQ ID NO: 37356 - DNA, 414 bp, Homo sapiens
ctataggcgattgggccctctaccagcatgctcgagcggccgctcagtgtgatggatatctgcagaattcgctcttagcgtggtcgcggccgaggtacaatagtggtcctgaggtgacgtatatcctcagcttacaaagataacaggattaagggattaaagtaagacaggtgtaagaaattataaaagtattaattttggaaactgataaatgtccaagaaatcttcacaatttatgtttcctgatgcagcaccagctggtccctccattcggggtccctgacttcccacaacagccaggctttcttgggcagaggttcctgtggctttccacagtgcattgagcccctggttaatcgagaatggagaatggcgatgacttttaccaaacatactgcctgcaaacatattgtt

SEQ ID NO: 37357 - DNA, 589 bp, Homo sapiens
ccctctagatgcatgctcgagcggccgccagtgtgatggatatctgcagaattcgccctttcgagcggccgcccgggcaggtacacatataccaccacagttgggaggcatgactaggctgacccagtcttatctgttcctcctttgaagagggtttgacaaatggaaaaaggaaggagccacatcaggcagaggtttcaagccatggaatggaggaaaggcggcagagaggagcagcaccagaggccaggagagagtgggaagggccacagcttgtttttaaaaaattctataatttggaagagggtggcgattaattttcaaaatacacttcagagtcccactttccacatagttacatgactaacagccctttggtttttttagacaaaatttaagagctctcataatgccagaagttttgataactccttagtgcatccaaaaaaaagtgttcacatcaatcccctaacaaagactatggtgctgtaaactttgcttcttcctatacatttgtcttacggctcagtgggaaagtagctgtaaagacacattacggggtaaatggaaaagggaaattaaggggaag

SEQ ID NO: 37358 - DNA, 233 bp, Homo sapiens
ataggcgaattgggccctctagatgcatgctcgagcggccgccagtgtgatggatatctgcagaattcgcccttagcgtggtcgcggccgaggtactccggtcatcttcgttcgtttggtcgtgcaaggtgttaactattttcacttcccatatcacaaagttagtccacaggaggaagctggtggatcttgcccattatgaggactggatggctttccaggaaggctggatc

SEQ ID NO: 37359 - DNA, 426 bp, Homo sapiens
ctatagggcgaattgggccctctagatgcatgctcgagcggccgccagtgtgatggatatctgcagaattcgccctttcgagcggccgcccgggcaggtacgatcttggctcactgcaacctctccctcccgggttcaagtgattctcgtgcctcagcctcttgagtagctgggattacaggcgcgtgccactgcgtccggctaatttttgtatttttagtagagatggggtttcaccatgtttggccaggcttgatctcaaactccctgacctcatgtgggtccaccccacctttggcctcccaaaggggctgggaattacagggcgtgagtccaccacgcctcaagcctacaaagcaattttttttaaaaactgaacacctatttacctgataaaaaattctcttgttttaaaaatcctatttt

SEQ ID NO: 37360 - DNA, 510 bp, Homo sapiens
ccctctagatgcatgctcgagcggccgccagtgtgatggatatctgcagaattcgccctttcgagcggccgcccgggcaggtactatatgggatactgcatgctatttggaagaattttgtttatttaaacatttcagcaaattcctcagttttgatatggggtgcagtatttttaactcattgagaaatttctactaacttttttgaatgtgctcttttcccactagttgcactaaggaaagaggttagtcatgtggtaaaattaatagtgacaaagctgtaaatagctctgcaggccaaggtagccatagtaagaagtcctggagatttatggaagaaatttttgttcatggaagcctgtcagacatgaagatgtgggtcttgtgaattggagattcagtgcgtgaggaaaacagcctaactatccataattaaggtaactactgtcagatatttgtaacatagtgaacatcctattatgctagatagaagcattctctatttgaatg

SEQ ID NO: 37361 - DNA, 586 bp, Homo sapiens
gactcacttagggcgtattgggccctctagatgcatgctcgagcggccgccagtgtgatggatatctgcagaattcgccctttcgagcggccgcacgggcaggtacccatatactaaccagtttggggcacataaatgttacaagggagaaaaaaagatttagactagcatgtgaatttcatcaagcagagacaccttggttaaaaagcaaaacttgtggggtggagaggaaggaaaaaaggaaaacgtaagaaaaaggaccggagtgctcactgcttatcattatcagcccttttttttgagacggagtcttgctctgtcacccaggctggagtgcagaggcaccatctcggctcactgcaagctccgcctcctgggttcacaccattctcctgcctcagcctcccgagtagctgggactacaggcgcccaccaccacgcccagctaattttttgtatttttagtagagacagggtttcaccgtgtcaggatggtctcgatctcctgacctcgtgatctgcccgcctcggcctcccaaagtgctgggattacaggcgtgagccaccgcgcccagcccattatcag

SEQ ID NO: 37362 - DNA, 415 bp, Homo sapiens
tatagggcgaattgggccctctagatgcatgctcgagcggccgccagtgtgatggatatctgcagaattcgcccttagcgtggtcgcggccgaggtacctaaaacagataagaaaacctgacagaggcaaacaatgcctgatcattgctagttaccaagagctagctttcctattaagttcagctttcattaaaactgaaattaaaagatttaaatattcatacacatccctaaaactcacccgatatgctggagtgtaaaaataaacatttttatcatttgttttggttgtcttgatgttggagaaatagcgtattactgaatgtttaccacctgttttcatgcataatttttaaaaggtgagtcatttttgacattacatattttaaagggaagaaatatgaacaaagggttt

SEQ ID NO: 37363 - DNA, 150 bp, Homo sapiens
actactcactatagggcgaattgggccctctagatgcatgctcgagcggccgccagtgtgatggatatctgcagaattcgcccttagcgtggtcgcggccgaggtactttttttttttttttttttttttttggatagaaccttttatga

SEQ ID NO: 37364 - DNA, 434 bp, Homo sapiens
  misc_feature 288: n = A,T,C or G
tacgactactatagggcgaattgggccctctagatgcatgctcgagcggccgccagtgtgatggatatctgcagaattcgcccttagcgtggtcgcggccgaggtactctggtaagcttgttgttgtccaagtgaagctccctcagatgaggcgtgttggccagagagccattgtcaacagcagagatgctgttgaaactcaattccaacttaacccaaattatttagttcctttcaggcttagctgcattcaactctggctgattttgtttgccattcaagatgtanattccgtaaggggaaggggaggaagaccttgaggggaatgctggtgattattgggtattcagcaattgcggatgtaaggaggagccttcttcatttccctttggaaagccccatttttcaatttcctgagcttcttcagcgggatt

SEQ ID NO: 37365 - DNA, 403 bp, Homo sapiens
gactactatagggcgaattgggccctctagatgcatgctcgagcggccgccagtgtgatggatatctgcagaattcgccctttcgagcggccgcccgggcaggtcaatgtgggaattttgttacctttttaatcaagggcaacttccttttccagcactaccattgtaaggttttttttaaggagggagggctaaccaccttgcttttctcttttatatttttcttttattgatgcttgatatattaatttggggaaaggggtgttagcattaatgccatgatatctactggattttaagtacggagactttatgtataaaggtaggttgaaatttgggagatttctcggcaggaagggctgaaatccaggcccctgtctcaacttggagagaggtgacagac

SEQ ID NO: 37366 - DNA, 573 bp, Homo sapiens
ctatagggcgaattgggccctctagatgcatgctcgagcggccgccagtgtgatggatatctgcagaattcgcccttagcgtggtcgcggccgaggtacggttcagcctgtgatcacttcattccaatcaatttatggggccgagacttgtcacaacaatggcatgcagagattactatcccagcctccatatacagccccaggaataaaaaaatcatgactaaaatgggatagctccctaaaaagggactaggaaagaagtcccaattgaggctgaaaaaaaatcaaaaaaaaaaaaaaaaaaaagtacaggaagttgagcctctggaaggcctcgcggtccttcaccggccccgccatcaccgccgcgctcccccgcgtacctgcccgggcggccgctcgaaagggcgaattccagcacactggcggccgttactagtggatccgagctcggtaccaagcttggcgtaatcatggtcatagctgtttcctgtgtgaaattgttatccgctcacaattccacacaacatacgagccggaagcataaagtgtaaagcctggggtgcctaatga

SEQ ID NO: 37367 - DNA, 431 bp, Homo sapiens
gactcactataggcgaattgggccctctagatgcatgctcgagcggccgccagtgtgatggatatctgcagaattcgcccttagcgtggtcgcggccgaggtacaccaaggtggtgcattaccggaagtggatcaaggacaccatcgtggccaacccctgagcacccctatcaactccctattgtagtaaacttggaaccttggaaatgaccaggccaagactcaagcctccccagttctactgacctttgtccttaggtgtgaggtccagggttgctaggaaaagaaatcagcagacacaggtgtagaccagagtgtttcttagatggtgtaattttgtcctctctgtgtcctggggaatactggccatgcctggagacatatcactcaatttctctgaggacacagataggatggggtgttctgtgtta

SEQ ID NO: 37368 - DNA, 341 bp, Homo sapiens
  misc_feature 246: n = A,T,C or G
atacgactcactatagggcgaattgggccctctagatgcatgctcgagcggccgccagtgtgatggatatctgcagaattcgccctttcgagcggccgcccgggcaggtactttcagtagagatggggtttcactatgttggtcactatggtcttgatctcttgatctcgtgatctacccaccttgggttcccaaaatgttgggattacaggtgtgagccactgcaccaggcaaactgcgatcttnttagtggtgcctcttctctcttttgacttaaggatgttgtcccttaaggaaacctgggaggctactactgtgacacacttacttgagagatggat

SEQ ID NO: 37369 - DNA, 421 bp, Homo sapiens
ctatagggcgaattgggccctctagatgcatgctcgagcgggccgccgtgtgaatggatttttgcaaaattcgccctttcgagcggccgcccgggcaggtacttttttttttttatttgttttttcctttgttgttttaaaggggacaaaaaaaaaaaaaaggacttgactccatgacgtcgaccgtggccgctggctggctggacaggcgggtgtgaggagttgcagacccaaacccacgtgcattttgggacatttgctttttaaaacgtttttatgccaaaaatccttcattgtgattttcagaaccacgtcagatataccaagtgactgtgtgtgggggtttgacaactgtggaaaggcgagcagaaaactccggcggtctgaggccatggaaggtggttgctgcatttgagaggga

SEQ ID NO: 37370 - DNA, 182 bp, Homo sapiens
tatagggcgaattgggccctctagatgcatgctcgagcggccgccagtgtgatggatatctgcagaattcgccctttcgagcggccgcccgggcaggtactcattgtctatgcacaccaggaacccaagtctttcaacggatccttgaagaatgtggctgaagataaactgagcaggcaggg

SEQ ID NO: 37371 - DNA, 360 bp, Homo sapiens
atagggcgaattgggccctctagatgcatgctcgagcggccgccagtgtgatggatatctgcagaattcgcccttagcgtggtcgcggccgaggtacatattcagacatcaaaatttaatgacattctattttgagaagggaagacaatgctgaagaaagtaaaactgttgattgaaatgctgacagggtgggaaaccaattttaaagacagtggaataaactatgaactatgctaatggtaattagatttttcgttcggttagtatagtggtaaattgagtagtatcttgctgggaatctaatcttatcttgtaaaatcaatccaaatgtgtattgtgaaacacctggataaaatcatt

SEQ ID NO: 37372 - DNA, 437 bp, Homo sapiens
ctactatagggcgaattgggccctctagatgcatgctcgagcggccgccagtgtgatggatatctgcagaattcgccctttcgagcggccgcccgggcaggtactttttttttttttttttttttttttcgcttttttttaaattttactttacgttctgggatacatgtgcggaatgtgtaggtttgttacacaggtatacgtgggccatagtggtttgctgcacctatcaacccatcatctaggttttaagtcccacatgcattaggtatttgtcctaatgctctccctcccctgttctcccaccccccgaatcacttattttaaaagtcagcaataaaaataaattgaaactaaatcaaataaattgatcctatggagaacaaaataataacaccgtaatatagttagtaaaagaaaataatattaataaagag

SEQ ID NO: 37373 - DNA, 444 bp, Homo sapiens
tatagggcgaattgggccctctagatgcatgctcgagcggccgccagtgtgatggatatctgcagaattcgccctttcgagcggccgcccgggcaggtacatcatgagcctcagctcagtgacaaggttcacaatgatgctcagagttttgattatgaccatgatgccttcttgggtgctgaagaagcaaagacctttgatcagctgacaccagaagagagcaaggaaaggcttggaatgattgtagataaaatagacgtggataaagatgggtttgtgacggagggggagctgaaatcctggattaagcacgcccagaagaaatacatatatgacaatgttgaaaaccaatggcaggagtttgatatgaatcaagacggcttaatctcctgggatgagtacgcggggaggcattgaggcagccagcgcaggggcttctgctga

SEQ ID NO: 37374 - DNA, 417 bp, Homo sapiens
ctactatagggcgaattgggccctctagatgcatgctcgagcggccgccagtgtgatggatatctgcagaattcgccctttcgagcggccgcccgggcaggtactagatctgtatctcttgtctgaattaaacatttttagttgctgtgtaaatgttaggaagcaaagtagctttgaattttctctgtaagagaataaaagataaaataatgtattttctttatttcacattttatttggagatatttaaatgaaatagaaagccatataacatagctataattactacctgtttgctatttttgtttaacttattttgtagcttcctcactggtttgtgttgctaagcaaacgtatacaaacagaaaaagagcttcctaaattgcacatttttgcacctcttgtgcattctgcaag

SEQ ID NO: 37375 - DNA, 173 bp, Homo sapiens
  misc_feature 148, 152, 153, 164, 165, 166: n = A,T,C or G
cactactatagggcaattggccctctagatgcatgctcgagcggccgccagtgtgatggatatctgcagaattcgccctttcgagcggccgcccgggcaggtaccacctttcagtgctttctctcctcaagggaatgccagagggcgnatcnntagtgtatgtnnntaactat

SEQ ID NO: 37376 - DNA, 421 bp, Homo sapiens
agggcgaattgggccctctagatgcatgctcgagcggccgccagtgtgatggatatctgcagaattcgccctttcgagcggccgcccgggcaggtactccttgaagttctatattggttgttttgggtttcttcttaggtggctgggacccatctgctgaggactgcctcttcttctctgaactagccccttcattcatcaaggaggtttggactgcatccggtggggggccgtaaggattttcttctgggtcttctacctcaggggcagtgggtaaatacaatagagcctttgaatcttccagctcttcatcactgctacagaaggcagcaatagggttccacgcctggttgaccatccacactccttcatcttcttgcagccatcaggccccctgttcttgctcaaggcttcactctta

SEQ ID NO: 37377 - DNA, 428 bp, Homo sapiens
ctactatagggcgaattgggccctctagatgcatgctcgagcggccgccagtgtgatggatatctgcagaattcgcccttagcgtggtcgcggccgaggtacaatttgtctgtctgccagaaagttgtgtctctggttgaaatattcctggatcaatgattaataagttaaggccaactgccaacgaagtcagattattccccaactgccaggtaacattttgatcttctctattaaaatgtcttactggatggaaccagatctcatacttttcatgtatcctctatagcacctactaaagtgttaggcagagatatatgctcaaggaaataatcagtgacgggggcgagaaatgaatcaagggtgaatgaatcaaggttatggtaaagccataccttacttcacccataactcaaaaggcagtcacc

SEQ ID NO: 37378 - DNA, 418 bp, Homo sapiens
gactactatagggcgaattgggccctctagatgcatgctcgagcggccgccagtgtgatggatatctgcagaattcgccctttcgagcggccgcccgggcaggtacaaaagagggctcgttcgcgctccttcagtgggcttattaagcggaaggtcctgggaaatcagatgatgtcagaaaagaaaaagaagaaccctactccagaatctgtggccattggtgaattgaagggaaccagcaaagaaaataggaacttattattttctggctctccagctgtcacgatgacaccaacaagattgaagtggtctgaagggaagaaagaggggaaaaaaggatttctctgaaggatccagagttgtctcctatggtccatgcagaattttctgtttagtgggccaggtgttaattctgccc

SEQ ID NO: 37379 - DNA, 530 bp, Homo sapiens
ctctagatgcatgctcgagcggccgccagtgtgatggatatctgcagaattcgccctttcgagcggccgcccgggcaggcactttctttttttatgttttttctttcttccatatgaaagttcaaaaaaatatttatttataaaaaatacctgggataagtttatgctgagaaatgcagcaataaatccagttgaagaaaacagagcacctctacattgatacattggcacaaacaggaagagcaaatgcatcacccaggcctaaatgtccacaggccacttttgtacttaactacagtgctggatgtaaggtttatgcagtaaaagcttattgaatgaatgaatcataggataaataatacaactagtaatttcttaagatcataaattccattacagtaaccctggtaggcaactctataaagttctgggctccaagaagaggtcagtgcatgccataaatgtgtttgatctgctgcgaagtatattcagtcttcaaaatgtaatgcttacatgagataaaatcggtt

SEQ ID NO: 37380 - DNA, 397 bp, Homo sapiens
ctactatagggcgaattgggccctctagatgcatgctcgagcggccgccagtgtgatggatatctgcagaattcgcccttagcgtggtcgcggccgaggtacagtgatggagttcattagtaggcaatgacccattactacaaacataacggcttctgtgaaacttaagtgctttctcttcttttagtattaacttacgatacatgaggtgacaccagataataggcagtgagatgatatgtgggaagggaagggaagcattaaacaaattcgtatgcctcatctataatttcacatatggataaaggtagtttttggctttgtttttgttgtttattttgttacaagcactcatgttaggacaaagatgaaatgtgcaaactttaaaatttaaata

SEQ ID NO: 37381 - DNA, 598 bp, Homo sapiens
actatagggcgaattgggccctctagatgcatgctcgagcggccgccagtgtgatggatatctgcagaattcgccctttcgagcggccgcccgggcaggtacctatttcaaggcattgctaggccctcgagatactagagtaaaaggatggtttcttctggacaattatatacccacatttatctgctctgtcatatatttactaattgtatggctgggaccaaaatacatgaggaataaacagccattctcttgccgggggattttagtggtgtataaccttggactcacactgctgtctctgtatatgttctgtgagttagtaacaggagtatgggaaggcaaatacaacttcttctgtcagggcacacgcaccgcaggagaatcagatatgaagattatccgtgtcctctggtggtacctcggccgcgaccacgctaagggcgaattccagcacactggcggccgttactagtggatccgagctcggtaccaagcttggcgtaatcatggtcatagcttgttcctgtgtgaaattgttatccgcttacaattccacacaacatacgagccggaagcataaagtgtaaagcctggg

SEQ ID NO: 37382 - DNA, 404 bp, Homo sapiens
ctactatagggcgaattgggccctctagatgcatgctcgagcggccgccagtgtgatggatatctgcagaattcgccctttcgagcggccgcccgggcaggtaccaaggaggaaagaacccaattacaaaagcaaaaaactgatgaatacttcagaatgaaactgcagtggaaatccatcagccaggaacaagagaaaagaaattcgaggttaagagattatagaagtcttatcgaaaaagatgttaacagaacagatcgaacaaacaagttttatgaaggccaaggtaatccagggttgattttacttcatgacattttgatgacctactgtatgtatgattttgatttaggatatgttcagggaatgagtgatttactttcccctcttttatatgtgatgga

SEQ ID NO: 37383 - DNA, 261 bp, Homo sapiens
gcgaagttgggccctctagatgcctgctcgagcggccgccagtgtgatggatatctgcagaattcgcccttagcgtggtcgcggccgaggtactaaacatatccattcacccttagtttatgtgccaaccttattttatattacattcccaaattatatatagctctgtttctaagctctattctgctctattggactattgtctgctcttatgctaatcctaccttattttaatgtctgtgactttagtcataggacatt

SEQ ID NO: 37384 - DNA, 439 bp, Homo sapiens
tatagggcgaattgggccctctagatgcatgctcgagcggccgccagtgtgatggatatctgcagaattcgccctttcgagcggccgcccgggcaggtacaaatacaggaaaaggtgaagacaaattatttgaaaacaattacctttgttatagaagcaaagtgacctgaaaaatgcccccaaagaaaacaaaaacccaaacccaacaaatacagtttgtaaacacaagcataaattgacagattctgtattggaagatagtctctgcaggttgggaaagggaaccgactcccactgtcaccgaaatgttatacaaaaacatatgcgcagaaagaatttgggtaacatgagaatagcctttcatagttttcttcctaggcttttaccttttctgccagatttcataactattttaaattttaaaaaagtaaatatctct

SEQ ID NO: 37385 - DNA, 260 bp, Homo sapiens
tagggcgaattgggctctctagatgcatgctcgagcggccgccagtgtgatggatatctgcagaattcgcccttagcgtggtcgcggccgaggtacttttttttttttttttttttttttgctatatgacacctcaatgctgaatcagagactgattcaaatttcgattctaaaagactaccagagatacctgaatgtgtactactgacccaacaactgtgactagctggccacgccattcagggctggcgtggcattta

SEQ ID NO: 37386 - DNA, 430 bp, Homo sapiens
acgactcactactgactatagggcgaattgggccctctaaatgcatgctcgagcggccgccagtgtgatggatatctgcagaattcgccctttcgagcggccgcccgggcaggcacaaaaattagctgggcatagtggcacatgcctgtatcccagctactcggagctgatgaacaaatactgaacctggagagagttgcaggactgaatcggccctgcactccacctgacgacagagcaagactgtctcaaaaaaataaaaaagaaaaaaataataaaaaggaaaacaaagcctttagaaaaacaaagcctttgaaaaaggatgtaaaattgaatatatagatacaattatttttaaaaagttttatagaaaaatatcctggattgttgatgttgttttaatatattttaatcatttttgtataatgtc

SEQ ID NO: 37387 - DNA, 412 bp, Homo sapiens
tatagggcgaattgggccctctagatgcatgctcgagcggccgccagtgtgatggatatctgcagaattcgcccttagcgtggtcgcggccgaggtacccgccaccatgccaagctaatttttgtatttttagtagagacggggtttcaccatgttggtcaggctggtctcaaactcctgacctcaggtgactgcccaccttggcctcccaaagtgctgggattaaataggtgtgagccaccacacccgaccagcatgacctttaaacacaattggacttaagacaaatttagtaaatgcagatttctgggggggaaggggggaatcttcttttaaaatgcccatatttagtgtaggtgaaatatactgcttataaactattgatattagccttgaagaagccattattggt

SEQ ID NO: 37388 - DNA, 139 bp, Homo sapiens
ttgtatacgactcactatagggcgaattgggccctctagatgcatgctcgagcggccgccagtgtgatggatatctgcagaattcgccctttcgagcggccgcccgggcaggtactttttttttttttttttttttttt

SEQ ID NO: 37389 - DNA, 256 bp, Homo sapiens
atacgactcactatagggcgaattgggccctctagatgcatgctcgagcggccgccagtgtgatggatatctgcagaattcgccctttcgagcggccgcccgggcaggtacgcgggcaatttctggcaatatattatagtaaatgcaaatgttcttgtttaaattttcataaaagtcaacaatgaaaagtttgctagtctctaaaaagctagaaaggacagctacaaataataatgcaggttgtctttatttagat

SEQ ID NO: 37390 - DNA, 410 bp, Homo sapiens
ggcgaattggcctctagatgcatgctcgagcggccgccagtgtgatggatatctgcaagaattcgcccttagcgtggtcgcggccgaggtacatgggactacaggcacgccccaccatgcccagctcatttttgtatttttagtagagacagggtttcaccatgttggccaggatgatcttgatctcttgacctcatgatccgcccctcttggcctcccaaagtgctgggatcacaggcgtgagccaccacacctggccctctatttattctctttaaagagagagaaaactatgagaggccaaaattatttaattaaatctttaccttagcacaagggaaaaaatggaatttgcctaatataggtgatgaagcatacacaatgagcagaaacaatcacattttagtaaa

SEQ ID NO: 37391 - DNA, 442 bp, Homo sapiens
atacgactactatagggcgaattgggccctctagatgcatgctcgagcggccgccagtgtgatggatatctgcagaattcgcccttagcgtggtcgcggccgaggtactaaacaggctcttcgagaaaagttttttcttgggctgcctttgtgcagcctaggggcagctcacctgaaccagaagtcccagccagcctcttccggggtctcgacatggtcacgctgcaggggactttagtgcggacgattctggaatcaacggagatacaggaaagaatgctaatgtcctccaaaacccgcgcagagcgagatggaggcaacgagaggcagcctagaacgtctccaacttttgcgaaacacagacgcctacgtttgagccctcaaatccttccctccgttatctgcgccatttccatctcgcataacctgcccctaaactctt

SEQ ID NO: 37392 - DNA, 174 bp, Homo sapiens
gccctctagatgcatgctcgagcggccgccagtgtgatggatatctgcagaattcgcccttagcgtggtcgcggccgaggtacttttttttttttttttttttttttttttttttattttttttttttttttttttatttttttagaatttggaaaaaaaatttattttggggg

SEQ ID NO: 37393 - DNA, 387 bp, Homo sapiens
  misc_feature 363: n = A,T,C or G
tcactatagggcgaattgggccctctagatgcatgctcgagcggccgccagtgtgatggatatctgcagaattcgcccttagcgtggtcgcggccgaggtacttttttttttttttttttttttttaagaaaagtatggaaaacttttcatttagaaaagtatttgttcctgtattttagaattcagttttgcatctttgctgtagaattcctgttttgtgttaatgttttttactatgtcttattgtgttgtgtgcaatgcattgcactggggggatgcacttgagtgccatttctgatactgtcattgtatgactgctgatgctcgtttatgttgggtctttggaagctatagtgagcctngattgttttcacatttttaaaaaa

SEQ ID NO: 37394 - DNA, 531 bp, Homo sapiens
  misc_feature 500: n = A,T,C or G
gactactatagggcgaattgggccctctagatgcatgctcgagcggccgccagtgtgatggatatctgcagaattcgcccttagcgtggtcgcggccgaggtaccttgatggctgtttgtggtcatacactccgtggaccagtcttgagggatcacagggccaaccagctcagcaaacctctccagaggacagctggggctgcagccaggtagcatgaggggatacggctcgtgctgcgtctcattccgatagtacccaaagttttataaatcaaaagccctaatgataaccatttttagaattcaatcatcactgtagaatcagagtctgtaattcttttcttgattagagtggtaggacactgtaatactgttcctccatgtttccatgcatacaatgttatgtgttactctacactgtaaatgcagtattcaaattcacttgagccgtgggcctggaagttagagactagcttttaccttattactttcaatgattntatctgagttaagctgataaatctcttcgcg

SEQ ID NO: 37395 - DNA, 380 bp, Homo sapiens
atagggcgaattgggccctctagatgcatgctcgagcggccgccagtgtgatggatatctgcagaattcgccctttcgagcggccgcccgggcaggtacgcggggagtcagggagtagtaaatctgatggagaattcactttggggaggggaaaaagaatagtatgcaagacccttattggcttttaattatacctgaaaccaaaatggatatttttagtctctctgcatgtgagatttggtgtaacaagatagaactataatatatacagtatatggaaggatagatatagtgctttgttcattttaattgcaaagctgccaaaatagttgaagcttaattacttgacttgccttgatttataggactggggcttggag

SEQ ID NO: 37396 - DNA, 176 bp, Homo sapiens
tatagggcgaattgggccctctagatgcatgctcgagcggccgccagtgtgatggatatctgcagaattcgccctttcgagcggccgcccgggcaggtacttggaccaagaaaaagaagatggaaaatatcacaagcaaattaaaatagaagaggatgcaacaggttacagttaat

SEQ ID NO: 37397 - DNA, 437 bp, Homo sapiens
acgactactataggcgaattgggccctctagatgcatgctcgagcggccgccagtgtgatggatatctgcagaattcgccctttcgagcggccgcccgggcaggtaccaccatgcccagctaattttgtatttttagtgaaggcagggattctccatgttgatcaggctggtctcgaaactctgacctccagtgatctgcctggtttgacctcccaaagtgctgagattacaggcatgagccatcacgcccagccagttcttcaattcttacagtccctttccatgtcattaaagaactcacactggagagaaatcttatcaatgttagaattgtggtaaagctctctgttgttcccatttacatgaaagatgtgaacagtcacattgtagaaaaatgctgtgagagttgggaatctggaaccacttctttattatc

SEQ ID NO: 37398 - DNA, 643 bp, Homo sapiens
gactcactatagggcgaattgggccctctagatgcatgctcgagcggccgccagtgtgatggatatctgcagaattcgccctttcgagcggccgcccgggcaggtacggtcacgtgagatggtaaagaaggaagggcaagttgcagggcagatctaaaggtgtctgctttccatatgttaagttggagatgactcctgctcatccaagcaaagatgccaagtgggctgtggaatatgcaagtctggagctcagggagagtttaggcttacacatgagaacttgggatgcagctgtgcttggtggctcatgcctggaatcccaacactttgggaggccaagttgggaggatcacttgagcccaggagtttgagaccggcttgggcaacatagggatatcccatctctatataaagtgtacctcggccgcgaccacgctaagggcgaattccagcacactggcggccgttactagtggatccgagctcggtaccaagcttggcgtaatcatggtcatagctgtttcctgtgtgaaattgttatccgctcacaattccacacaacatacgagccggaagcataaagtgtaaagcctggggtgcctaatgagtgagctaactcacattaattgcgttgcgctcactg

SEQ ID NO: 37399 - DNA, 300 bp, Homo sapiens
gggccctctagatgcatgctcgagcggccgccagtgtgatggatatctgcagaattcgccctttcgagcggccgcccgggcaggtacctaaaagtcagaaaccacattttctcctcagaagtagggaccgctttcttacctgtttaaataaaccaaagtataccgtgtgaaccaaacaatctcttttcaaaacagggtgctcctcctggcttctggcttccataagaagaaatggagaataatatatatatatatattgcgaaagatcaatccatctgccgcaatctagtgggatggaag

SEQ ID NO: 37400 - DNA, 414 bp, Homo sapiens
actactatagggcgaattgggccctctagatgcatgctcgagcggccgccagtgtgatggatatctgcagaattcgccctttcgagcggccgcccgggcaggtacccagtttggctctttcccatccctgatctgaaaaaggaactccactgactgataaaattcttcatcgctattagggcaaaatctactccccaaggcactgtgtgcatggtcccaagatggaaattctccacgtgttacttcctaggcagtagcaccactcaaaagaatccaggcctgcgcctcctcggtaagatgcaccacgctgaccgtgatgggtggcggcaggtcaggacccggctcactgaaatgcaaacatacatgagcctcctgctcatttttaaagacaagctccggtgagggctccaaatc

SEQ ID NO: 37401 - DNA, 317 bp, Homo sapiens
agggcgaattgggccctctagatgcctgcctccagccggccgccagggtgatggatatctgcagaattcgccctttcgagcggccgcccgggcaggtacttttttttttttttttttttttttttttttttcttttttttttttttttttccaaaggggaaaaacttcttttatataaaaattatcccaactcccaccccttggctctcagtgttgcatttcccacagaggtaaagttgggccattttcccacggctttaaacaaagcaaaacaaaccccccaatcctaataacccccctccctgccccgtttccac

SEQ ID NO: 37402 - DNA, 245 bp, Homo sapiens
  misc_feature 15, 16: n = A,T,C or G
atacgactcactatnnagggcgaattgggggccctctagatgcatgctcgagcggccgccagtgtgatggatatctgcagaattcgccctttcgagcggccgcccgggcaggtacttttttttttttttttttggtataagaactaacatcaaaaggcctgtttaaagggaaaggttaatgggctacttaatattatgaacaaaacaaaaaaacaaggctgccacagtggaatattatcttacaa

SEQ ID NO: 37403 - DNA, 271 bp, Homo sapiens
tatagggcgaattgggccctctagatgcatgctcgagcggccgccagtgtgatggatatctgcagaattcgccctttcgagcggccgcccgggcaggtacattgatgggctggagagcagggtggcagcctgttctgcacagaaccaagaattacagaaaaaagtccaggagctggagaggcacaacatctccttggtagctcagctccgccagctgcagacgctaattgctcaaacttccaacaaagcttgcccagaccagcacttgtgt

SEQ ID NO: 37404 - DNA, 344 bp, Homo sapiens
ccttagcgtggtcgcggccggggtacgagctcggctcactgcaacctctccctcccgggttcaagtgattctcgtgcctcagcctcttgagtagctgggattacaggcgcgtgccactgcgttccggtaatttttgtatttttagtagagatggggtttcaccatgttggccaggctgatctcaaactcctgacctcatgtggtccacccaccttggcctcccaaagtgctgggattacaggcgtgagccaccacgctcagcctacaagcaattttttaaaaactgacacctattactgataaaattctctgtttaaaatcctatttactattttaaagataag

SEQ ID NO: 37405 - DNA, 389 bp, Homo sapiens
tacgactcactatagggcgaattgggccctctagatgcatgctcgagcggccgccagtgtgatggatatctgcagaattcgcccttagcgtggtcgcggccgaggtacacaaggtgaaactgctccagtttttctcgtagcagggtcagcaggaaagcaagtggtgcccctggtcccatctcacacaggtgagactgcaccgagaggtaacgtggccctcacagcccaccacgcctggccttcgcccaattctgaaacttcgtaggatagagctggaaagtgccacatggtgaagcgagatccagctgtctgggtggatgtcggagtccataggctgagcagagatggttcttagtgaggttctcgctgccagttgacggtgaaatcat

SEQ ID NO: 37406 - DNA, 423 bp, Homo sapiens
atacactactatagggcgaattgggccctctagatgcatgctcgagcggccgccagtgtgatggatatctgcagaattcgcccttagcgtggtcgcggccgaggtacctatggaactatataatggaattactcctgtgccacttagtgggttgatacatattattggccatccatatggagaaaaaaagcagattgatgcttgtgctgtgatccctcagggtcagcgagcaaagaaatgtcaggaacgtgttcagtctaaaaaagcagaaagtccagagtatgtccatatgtatactcaaagaagtttccagaaaatagttcacaaccctgatgtgattacctatgacactgaatttttctttggggcttccggctcccctgtgtttgattcaaaaggttcattggtggccatgcatgctgc

SEQ ID NO: 37407 - DNA, 521 bp, Homo sapiens
  misc_feature 100, 101, 102: n = A,T,C or G
tatagggcgaattgggccctctagatgcatgctcgagcggccgccagtgtgatggatatctgcagaattcgcccttagcgtggtcgcggccgagatactnnnttttttttttttttttttttttggggtgcaaagcctttaattagaatgtttgtattttttacatcatgcataacttcacatttgtgattaattagtaattatttcaatacttgtaagctcatctgcctcagatttaatcataatacatgaattaaattaatcaaattaaggaacagcaatttagaaagaaacacactttaaaaaatcaaaattctcaattcaggcagtctgtttctatcatttggtattctactccttttaaaaatttcatattgcccaacaaaaagtggttatttttactgtttttggagatgactgaacagatgaaggcatcagatgccttcatcggctggtattttgcctaagatctatttaagataaccttttcttatattttttacttaatattgggcataatc

SEQ ID NO: 37408 - DNA, 589 bp, Homo sapiens
acgactcactatagggcgaattgggccctctagatgcatgctcgagcggccgccagtgtgatggatatctgcagaattcgcccttagcgtggtcgcggccgaggtaccgcccctgacagccacaggtggacactagtgcgagcccgtcgttctgccattggggctaactcaagctcaaatggcaattccaatcaagcggcaattgttgctccaagtgctatgttgagaggttctgaggctgtgtctaggctcagtaggaaagatacgatgctcaatatataatgttggtcttggtcttggaggtggtagatggtggtaagtggtagtataatatttcggcttctggctcagtgggaaaacaaaacatagcacactctactgcagagcagggcaggaattctatggattataaatattatgttctggagaattcagttccaggaagttcaagtgggactgttttaagaaaaggaaaaaaaattgagacgtgaggacattgaagaaaaaaagagtaaatcatttgatcaaaaaggatgcatttattcttaaaggatgccaatgttccacagtgggagaaggcatttaaaat

SEQ ID NO: 37409 - DNA, 404 bp, Homo sapiens
actatagggcgaattgggccctctagatgcatgctcgagcggccgccagtgtgatggatatctgcagaattcgccctttcgagcggccgcccgggcaggtactcagctcagggagaatgctgttgaaagacttgattcattaatacaagcgactcacgttgcaatgagaggcaactccgattacgctgatcttagtgatggctggctcgaaataatacgtgtagatgcccctgatccaggtgcagacccgctggctagcagtgtgaacggcatgtgcctggatattcctgctcacctgagcatccgcatcctcatctcggatgctggcgcggtggaagggattactcagcaggagatactcggtgtagagacaaggtttctcctcagtgaactggcagtacctt

SEQ ID NO: 37410 - DNA, 234 bp, Homo sapiens
agggcgaattgggccctctagatgcatgctcgagcggccgccagtgtgatggatatctgcagaattcgcccttctaatacgactcactatagggcagcgtggtcgcggccgaggtactttttttttttttttttttttttttgcttcatcagttttattggtcatatatccagaattcatcatatataaaacttttcaaaataattgagctttttacaaagaatatgtttacaa

SEQ ID NO: 37411 - DNA, 409 bp, Homo sapiens
acgactactataggcgaattgggccctctagatgcatgctcgagcggccgccagtgtgatggatatctgcagaattcgccctttcgagcggccgcccgggcaggtacgcggggacatcaatgcagagtccctctgtgaatttacaacacccaacacccatgagttcagtccttaagaaaggaaaattgagcaagtatttaattggttggacattgcataaaagaggtccatatccaggctaactctagaaattttattctcaaacttagttggcctctttttcttctgtcagaggaccattcttagtggcactggggaaatcttggcacccagaagaattcaactgcgctcactgcaaaaatacaatggcctacattggatttgtagaggagaaaggagccctgtattg

SEQ ID NO: 37412 - DNA, 268 bp, Homo sapiens
  misc_feature 131, 132, 141, 142, 147: n = A,T,C or G
tacgactcctatagggcgaattgggccctctagatgcatgctcgagcggccgccagtgtgatggatatctgcagaattcgccctttcgagcggccgcccgggcaggtacgcgggggtcgctccggaagccnncgcgagttnnccggnaagccttggtaatccagattcggctaggaaaagacaagctttccagagaatgtttcagagaaagttacgtggagcgtgggcgtttcgcagactcctaagtggtctggaacctaacctgcag

SEQ ID NO: 37413 - DNA, 148 bp, Homo sapiens
tatagggcgaattgggccctctagatgcatgctcgagcggccgccagtgtgatggatatctgcagaattcgccctttcgagcggccgcccgggcaggtactttgagggattggtggtcttgggcaccctcctggtcccaggatgatgt

SEQ ID NO: 37414 - DNA, 211 bp, Homo sapiens
gactcatatagggcgaattgggccctctagatgcatgctcgagcggccgccagtgtgatggatatctgcagaattcgcccttagcgtggtcgcggccgaggtactttttttttttttttttttttttcggcgacagttgtatttatttttttaagttacaataaaatgctctcaagtcctctgaatgttctaacacattcaaaactttatt

SEQ ID NO: 37415 - DNA, 354 bp, Homo sapiens
atagggcgaattgggccctctagatgcatgctcgagcggccgccagtgtgatggatatctgcagaattcgccctttcgagcggccgcccgggcaggtacgcgggggctctttctacctaataaatacgaagggctgtagaagctcagggcccttgctcactagaaggagccccctgaccccttcttccaaaaatactttttgtctttgtcttcgtttctgcatccatcccccttcgttcactcccataacaaccaacagcgacaactggcacctaggacagggacgtgagtgaaggtttgttggaacattaaaacttgcacactgactagaagaacgagaatgagaaaccctgc

SEQ ID NO: 37416 - DNA, 632 bp, Homo sapiens
tacgactcactatagggcgaattgggccctctagatgcatgctcgagcggccgccagtgtgatggatatctgcagaattcgcccttagcgtggtcgcggccgaggtacagggaaggcctttcgggcagggcacatggttcactgccccatgacgtgataccttgaagcacaccattacagacaagtgggcccccagaatcacccgagcaggtgcttttgccccctgtccagcgtccagcacacagcatgaacttggtcaccttctgagggtgaacttgcgcacacacgtcattggaagtaacatggaggtccacacactgaagtttctttggggtcaagacatctggcccaggcgcactgctgctgctgctgctgctttggtcttcttagttttgttctttttgtctctcttcttcaacccatccatgttagctctaaggaggtttgaataagccatctgaaacttattcacttccttggagctcaccacagtgctgatcttcttcttcccatcggtagctcttaacagacacttgttgtctgcgggctcaaagccctccacagtacctgcccgggcggccgctcgaaagggcgaattccagcacactggcggccgttactagtggatccga

SEQ ID NO: 37417 - DNA, 183 bp, Homo sapiens
agggcgaattgggccctctagatgcatgctcgagcggccgccagtgtgatggatatctgcagaattcgcccttagcgtggtcgcggccgaggtacatgccacactactacccttcctgctcttgagcgcacacctaccctgatgatgcagccttcactggatatcaaaccatttatgtctttt

SEQ ID NO: 37418 - DNA, 348 bp, Homo sapiens
agggcgaattgggccctctagatgcatgctcgagcggccgccagtgtgatggatatctgcagaattcgcccttagcgtggtcgcggccgaggtacgcgggggcttacacagtatggccggcgacattagctagcgctcgctctactctctctaacgggaaagcagcggaatacaagagactgaactgtatctgcctctatttccaaaagactcacgttcaactttcgctcacacaaagccgggaaaattttatcagtcctttttttaaaaaaagttaatataaaattatagcaaaaaaaaaaaggaactctgaactttattaacaacagctggaacaattccgcagcg

SEQ ID NO: 37419 - DNA, 467 bp, Homo sapiens
  misc_feature 9: n = A,T,C or G
gcgaattgngccctctagatgcatgctcgagcggccgccagtgtgatggatatctgcagaattcgcccttagcgtggtcgcggccgaggtactgtttccaactgtctacgttccagtgcagaatctttgctaaaaaaaatttggcaatagtgtgcacaggaaaactgaatcaaacctggaacatcactgctttcttgaaatggaactgacaagcaattaactggagaataagtgaggggaatggagcagtagtattctttaacttaatttgccatttaagagagcacttggaatctgaagaaagtctatccctaccaaggaaacggagtcaaattgcaattaagattaactttggttatatggaagcaagaatcatgcttctcatcatcaattgcgtctctttggtagccaataattccatctgtaatcatggcaacaacttaagtattgccaatgttttcaaatgt

SEQ ID NO: 37420 - DNA, 372 bp, Homo sapiens
tacgactcactatagggcgaattgggccctctagatgcatgctcgagcggccgccagtgtgatggatatctgcagaattcgccctttcgagcggccgcccgggcaggtaccgggtcggagattatgtctactttgagaattcctccagcaacccatacctaataagaaggatagaagaactcaacaagactgcaagtggcaacgcggaagcaaaagtagtatgcttttatagacgacgtgatatttccaacacacttataatgctcgcagataagcatgctaaagaaattgaggaagaatctgaaacaacagttgaggctgacttgaccgataagcagaaacatcagttgaaacatagggaactcttttcgt

SEQ ID NO: 37421 - DNA, 60 bp, Homo sapiens
ctcactatagggcgaattgggccctctagatgcatgctcgagcggcacgccagatgtgat

SEQ ID NO: 37422 - DNA, 426 bp, Homo sapiens
ctactatagggcgaattgggccctctagatgcatgctcgagcggccgccagtgtgatggatatctgcagaattcgccctttcgagcggccgcccgggcaggtaccatggaaggcacagaaatcgagcaaggaagaaaatattagttattttgatctacatctttttctaaagaaaagtggagcttgcctccagttcaattcacaagagcattttccctcccatgcccaccttttcttgtggctgtcgctaggaaggatgcagaggctgtgtggtttaccaaatgccttaacttagcagtgaatgacaactgtcaaacacatgttgagggaaaatttttactgattcacaaaaaggaagacagtttgcccactcttagtggcacaaatcaaagctgcatgcactacattatccaaattagtcgtaac

SEQ ID NO: 37423 - DNA, 185 bp, Homo sapiens
acgactcactatagggcgaattgggccctctagatgcatgctcgagcggccgccagtgtgatggatatctgcagaattcgcccttagcgtggtcgcggccgaggtacgaggggcaactgatatatctttagggtgagttactgaggctgtttcagctgaggcagtcatcactccgcataaacacg

SEQ ID NO: 37424 - DNA, 377 bp, Homo sapiens
gcagtgtgatggatatctgcagaattcgccctttcgagcggccgcccgggcaggactttataatgagtccacctctgaaatttttctttctgaattctatctcactttattatttcagtgataccaaaagacatcaatgtcacagtagtgatatacttatgtattagttatggaaattccacaggagttcaaggtcattatcactataattattttcctgactaaagccataaaggtgatttaggcaattattgtcatcttagctagtcctgttttatagcttatattcagcagacagctgtatgggaaggtaaatatgttgacaatgtccacaaagcctttatttatttatttatttgatctctgcatgtcctcgt

SEQ ID NO: 37425 - DNA, 382 bp, Homo sapiens
tgggccctctagatgctgctcgagcggccgccagtgtgatggatatctgcagaattcgccctttcgagcggccgcccgggcaggtacgcgggagacagtggcctcgagaccctgcctgcctgaggaggcctcggttggatgcgaaggagctgcagcatccaggggacaagatgccaactggcaagcagctagctgacattggctataagaccttctctacctccatgatgcttctcactgtgtatggggggtacaaggctaagcattttaactctatactggaaaaaaaatcaaacaaaggggagggataaaggacttagtcatctttgcactggaaaacaaaatatgtaatcaaattcccatagctgcatgtaacattgaa

SEQ ID NO: 37426 - DNA, 453 bp, Homo sapiens
  misc_feature 17: n = A,T,C or G
tatacgactcactatanggcgaattgtgccctatagatgcatgctcgagcggccgccagtgtgatggatatctgcagaattcgccctttcgagcggccgcccgggcaggtacaagccctgagccaggttataatcgttggtaaacatggcaaggtgtcctgccaaaagattgtagtcctctattccctttatttgttccaaggacatcactatgccaacatttccaattctccgataaacacggattgcaaactccacttccatgtgatgtagacaagctctggtcaactcattccaggcagcctcatcattcagaatcctgcacatttcccaagcatcagaaaacctctttagcattaaattctgtgccagcattggtctcagttcgtcaggccccgtatcttttaagttgctgagaaagccatgggtgctaaagtagatgttgtttacttt

SEQ ID NO: 37427 - DNA, 428 bp, Homo sapiens
agggcgaattgggccctctagatgcatgctcgagcggccgccagtgtgatggatatctgcagaattcgccctttcgagcggccgcccgggcaggtacaccccatggaaacatgcaataagatcacatcgatccagaggctggctcaagtttgactgaggggaaacggagggaaggctgttcctagcacacaatctcagcagaggttgaggtggtggggatttctttcttctcatatgacgctaccgtcggtgacttcttactaggagaccactgagcactgaatcaaggtttctaatatgtttcaaatcaagattttagagtgtattttcttgtggcaatagagttataaaatggtaacctatgattttcctcatataatgagatcttcataaagtccttgagctttttagactttaacaaattcagc

SEQ ID NO: 37428 - DNA, 321 bp, Homo sapiens
  misc_feature 86: n = A,T,C or G
ccctctagatgcatgctcgagcggccgccagtgtgatggatatctgcagaattcgcccttagcgtggtcgcggccgaggtactttnttttttttttttttttttttttcttttttttttttctttttttttttttttttttttttttgttttttttttgagaggagggtttgggtttttttttcacaaaaaatgggctttttttgtgggggtttgtcccaaagagacaggggcatccctcatgtgtgtttttggggggtggataaacaaaagtttttattaaacaaactgcgaattactctgtcttttttcctaaaaaaaa

SEQ ID NO: 37429 - DNA, 645 bp, Homo sapiens
gcgaattgggccctctagatgcatgctcgagcggccgccagtgtgatggatatctgcagaattcgcccttagcgtggtcgcggccgaggtacaaatgtgcattaacaattcagtgacgtagctgtggatctctggatggctatgtaagctgtgagaaagtcccactggctttgcacttgctgcgcaccagaggtgaccatccaggcggtatcaacctgaagagggggtgaatcccagcagctgctcgatgggcttaaaccgccactcgtcagcctccagctcttctaccaaaccagctagtttttccatccgagcaacttgctgatcatgtttcacctgtttaagcgtggatgccacttgatagctaaaaacagattcgcagaggaatctctcagagccatctcagcggctttagcactttcccctacagccccacccccaggaccagcctgagtggctgcgctcaccacgacgaggaccgcggcgtgttccccgcgtactgtgatggggtcatcaaattattaatctgaaaatagcaacccagaatgtaaaaaagaaaaaactggggggaaaaagaccaggtctacagtgatagagcaaagcatcaaagaatctttaaggaaggtttaaaaaaaaaaaaaaaaa

SEQ ID NO: 37430 - DNA, 498 bp, Homo sapiens
agcgatggatatctgcagaattcgccctttcgagcggccgcccgggcaggtacgcggggaggataccatgatgggtgctggggtggcagctgtgtggtgcagccctgttggcagtgggcatctgggtgtcaatcgatggggcatcctttctgaagatcttcgggccactgtcgtccagtgccatgcagtttgtcaacgtgggctacttcctcatcgcagccggcgttgtggtctttgctcttggtttcctggactgctatggtgctaagactgagagcaagtgtgccctcgtgacggtgtgtgaaacccagctccacaggctgatgaccaagagtcccctcgcctttgacaccaggccctgggattcccaaaccctgctttggacccccctaggctcaggcttctgtctcacttttccgggggggggattagggcaaggagggcatgaaggactgtctcttcctaaaacccagacccctggtccccactcagttcttc

SEQ ID NO: 37431 - DNA, 409 bp, Homo sapiens
acgactcactatagggcgaattgggccctctagatgcatgctcgagcggccgccagtgtgatggatatctgcagaattcgccctttcgagcggccgcccgggcaggtactttttttgttttttttttttgttgctttttcttttttgtttatttcttttttttggaccacatgaaacactttatttataacagcatgggtttaactcccttatacccaagattatccatattcttggcgaaagcaccattatcaaagaaggctttaaaggcaattaaattgggttaatttagataaactttaaggaataagatgggtttcattataatatagggggcacacatttgtccgggggcctaaaaaagataaaggggcacataaaacataccagtagaagcatttaaaatagg

SEQ ID NO: 37432 - DNA, 636 bp, Homo sapiens
acgactactatagggcgaattgggccctctagatgcatgctcgagcggccgccagtgtgatggatatctgcagaattcgcccttagcgtggtcgcggccgaggtacccatggtgcatctttcctggaatatggcacgaaatatcaaagtctcagatccaaagctttttgaaatgattaagtattgtcttttgaagattctgaagcaatatcagacattgagagaagctcttgttgcagcaggaaaagaggttatatggcatgggcggacaaatgatgaaccagctcattactgtagcatttgtgaggtggaggtttttaatctgctttttgtcactaatgaaagctatactcaaaaaacctacatagtaccagtcaaacgtcactcagatgcagtcttcactgacaactatacccgccttagaaaacaaatggctgtaaagaaatatttgaactcaattctgaatggaaagaggagcagtgagggagaatctcccgactttccaaaagagttagaaaaatgatgaaaaagacctttggagcaaagctgatgacaactttccagtgaattcttgaaggaaaatgatacgcaacataattaaattttgagttctacataagtaattcaagaaaacaac

SEQ ID NO: 37433 - DNA, 420 bp, Homo sapiens
acgactcacttagggcgaattgggccctctagatgcatgctcgagcggccgccagtgtgatggatatctgcagaattcgccctttcgacggccgcccgggcaggtacaactacaatctcacagaagtccactaaagttcaccaaaaagctgacttacttcagctctcatgaggccaataattttgataaaggtatctggcaggaaaatgattccacaataacaaatttaaagatacctagaacattgaaaaaaatagcaaattaaaataactggcttaatttccaagaacttatttcattttttgttactcatctagaaggtcaggagtgtggctaaaggcagtttctgatggggttatgagcttccaaagtgtttctaaatccttagtgcagacaccctcccttttggggcaaagtact

SEQ ID NO: 37434 - DNA, 411 bp, Homo sapiens
gggcgaattgggccctctagatgcatgctcgagcggccgccagtgtgatggatatctgcagaattcgccctttcgagcggccgcccgggcaggtacattatagcacagtgatcatcattccattcatacactcaaataactgctgcttctgatcactgaaaactagattcaaagtcattgctcaacaagctgatactacaaatcccttatattaacaggtagtttaaatgtggaaataaggcaaagcatacttgttagtcaccccgcgagctttataaatcaaaaattgattcacatgaccatattaccataatcaccaattttaacagtctcctacatattttctatatcacttttcttgattacaaaatgtcagtaataagaacacgctcttaatataacagaatattt

SEQ ID NO: 37435 - DNA, 379 bp, Homo sapiens
atacgactcactatagggcgaattgggccctctagatgcatgctcgagcggccgccagtgtgatggatatctgcagaattcgccctttcgagcggccgcccgggcaggtacgcgggggcaggcgcacttcctgaagctgaaggtcagcatagacaaagggcctcagaatcgcgcaggcgcaattgtgccctggttcgccaagatgtcgttcccaaagtataagccgtcgagcctgcgcactctgcctgagaccctcgacccagccgaatacaacatatctccggaaacccggcgggcgcaagccgagcggttggccataagagcccagctgaaacgagagtacgagacccgggctgttgagctgttcactgagtgttac

SEQ ID NO: 37436 - DNA, 409 bp, Homo sapiens
tatagggcgaattgggccctctagatgcatgctcgagcggccgccagtgtgatggatatctgcagaattcgcccttagcgtggtcgcggccgaggtaccaagtgctggtgccagcctgttacctgttctcactgaaaagtctggctaatgctcttgtgtagtcacttctgattctgacaatcaatcaatcaatggcctagagcactgactgttaacacaaacgtcactagcaaggtagcaacagctttaagtctaaatacaaagctgttctgtgtgagaattttttaaaaggctacttgtataataacccttgtcatttttaatgtaccccacaaataacacagacaccccatcctatctgtgtcctcagagaaattgagtgatatgtctccaggcatggccagtattc

SEQ ID NO: 37437 - DNA, 242 bp, Homo sapiens
cactatagggcgaattgggccctctagatgcatgctcgagcggccgccagtgtgatggatatctgcagaattcgccctttcgagcggccgcccgggcaggtaccgaatgtgagaagagtttcagcaggagctcagctcttattaaacataagagagttcatacggactaagctataatttataatgggctgataaaatgattcatttgaagatacaatttttattttgatatttcaatgaac

SEQ ID NO: 37438 - DNA, 343 bp, Homo sapiens
  misc_feature 27: n = A,T,C or G
tatacgactcactatagggcgaatggngccctctagatgcatgctcgagcggccgccagtgtgatggatatctgcagaattcgccctttcgagcggccgcccgggcaggtacgcgggggctgcccggacgcggagcgagaggctgagagagtcggagacactatccgcttccatccgtcgcgcagaccctgccggagccgctgccgctatggatgatcgagaggatctggtgtacctcggccgcgaccacgctaagggcgaattccagcacactggcggccgttactagtggatccgagctcggtaccaagcttggcgtaatcatggtcatagctgtttcctg

SEQ ID NO: 37439 - DNA, 305 bp, Homo sapiens
tagggcgaattgggccctctagatgcatgctcgagcggccgccagtgtgatggatatctgcagaattcgcccttagcgtggtcgcggccgaggtacctatccaggcaaatgcattagatgtttctgaacttcctacacaacccgtgtattcatcccccagacgtttaaattgtgcggaaatatctagtatcagctttcatgttacagacccagccccttgctctacctctggagtcacagctggattaactaaattaactacaagaaaggacatctataatgcagagagagagttttttacaggg

SEQ ID NO: 37440 - DNA, 372 bp, Homo sapiens
acgactcactatatggcgaattgggccctctagatgcatgctcgagcggccgccagtgtgatggatatctgcagaattcgccctttcgagcggccgcccgggcaggtacattatttgattctacttaggatagctttttagcaggatctccttcagaatttttgtcttgactttgaatctttgcctgtttgtctaaacatttgactaacattctgtttgaatttggaagtattctaatacaagatttgaataaagtttatccttaaataaagtttatccttaatatgatggtctcattttattaaaaaggaaatagaactcttaaatatacttggttccatctctcctctgtaatggaggattggggaaagc

SEQ ID NO: 37441 - DNA, 398 bp, Homo sapiens
gcggccgccagtgtgatggatatctgcagaattcgccctttcgagcggccgcccgggcaggtaccggaaggtcagggcttgagtcgtagccagggatagattagggtgagaatagacaggatggaggacacgaggccacaaagccccacaatcccagggccacagcgccagaggcctagtttgtccagaggaatgaagagatcacaggcatttctgaccacgtctagcataagtgggggatgacctctaaggactcgagccaggagcaggacttgcagccgaagtttcagagccagttggggcagacctcctcctggagtccctggtcccccaagttcccccagtttcactttcctcctgggaactccttcctccagaaccttttcagtccgccggct

SEQ ID NO: 37442 - DNA, 454 bp, Homo sapiens
acgactactatagggcgaattgggccctctagatgcatgctcgagcggccgccagtgtgatggatatctgcagaattcgccctttcgagcggccgcccgggcaggtacttttttttttttttttttttacttaattagaaagtaggctgggcacggtggctcatgcctataatcccagcacttggggaggccgaggatctcctctctggtggatcacttgagggcaggagttaagagaccatcctggccaacatgatgaaaccctgtctctactaaaaatacaaaaagtagctgggcgtggtggcatactcttacaatcccagctacttgggaggctgaggcaggagaatcacttgaacctaggaagcagaggttgcagtgggccaagatcacaccactatactctagcctgggcgacagaggtggggaaaaaagtaggacccctgtcctatat

SEQ ID NO: 37443 - DNA, 191 bp, Homo sapiens
tagggcgaattgggccctctagatgcatgctcgagcggccgccagtgtgatggatatctgcagaattcgcccttagcgtggtcgcggccgaggtactactaccttgaccctgcttatgaggaaaaataaatctctcttggcattatggagaaagagcatgaggttttctggctgttgtctgctgctgtagg

SEQ ID NO: 37444 - DNA, 391 bp, Homo sapiens
agggcgaattgggccctctagatgcatgctcgagcggccgccggggtgtgggatatcggcagaattcgccctttcgagcggccgcccgggcaggtacttttttttttgtttgttgttttgtttttttttttttctctttttttggggtgtgtctctttggctttggtttctttttgggtttcttttttttggcacaaaacccccggggggggccaggcccccccacccggaaaggggggacccccggaaaggggcccgggttttaccccggggggaccccctccgggggggggcaccccccttgaaaaacccccccccccggccgggggggggaaaccccctcaaaccccctggggggcgaaaaaccccccagggccaaccccccaggggg

SEQ ID NO: 37445 - DNA, 653 bp, Homo sapiens
tgctcgagcggccgccagtgtgatggatatctgcagaattcgcccttagcgtggtcgcggccgagggactttttttttttttttttttttttgtagagttggggatcttgccttgctaaccaggctggtctcaaacttgtggcttcacgcaatccccacacctcagccttccaaagtgctgggattacaggtgtaagccaccatgcctgatctggaatgctttctaaaaatatggcattataaacataatactaaagagaaaaaaaggttaaatttcacttcaagaaattatcagtctaatagcatcagtaaaaatggcgcttttagtcatggcataaaatatacaataaggctatttttcaattattgttttcaagttggaaaatgcattatgaaacactcaaaaagatgctactgggtttactcatcaagtgcttttgacaccatataaatgacagagtaacaccacagttatgtgattgggactcaagaatccttaaatgttaggactgaaaacaggtatatgacttatttgtccagaatttatatttttctgtatcccaataaaataattaagccatgtgtattgtgtaaaattacagtctttcagtctgtcctatgtgcttgctctcctggctagatattagctaaaa

SEQ ID NO: 37446 - DNA, 675 bp, Homo sapiens
gactactatgggcgaattgggccctctagatgcatgctcgagcggccgccagtgtgatggatatctgcagaattcgccctttcgagcggccgcccgggcaggtacgcgggatgaaaaaaggagagaacactggcatctgttgaaatttggaagttctgaaattatagtatttttaaaaattgcactgaagtgtatacacataaagcaggtcttttatccagtgaacaggatgttttgctttagcagcagtgacataaaattccatgttagataagcatatgttacttaccttgttattaaatatttcttgaaaagcaaattttaatggtttaattttatgtggacgtatgttaaattatccaactaccctattgttaagcatttggttttaaaatttttatgctaatataaatgctcaagtaatttaaaatattgaaagcatccctgttggtataaatttctgagtaaatgcattggatcagttggactttgaacgcctttgaaatggctttgctaaaatgctcccgccacaaagttgtaggaaatgggaagaggagtcaactagaggcaagggaattgagagagctgcaactgtaaagggcaagaacaggcagaggtaaaaagatgatggaaggtgtggtgactaagggccacggttattgggtgaaatttgag

SEQ ID NO: 37447 - DNA, 442 bp, Homo sapiens
tacgactactatagggcgaattgggccctctagatgcatgctcgagcggccgccagtgtgatggatatctgcagaattcgccctttcgagcggccgcccgggcaggtactgctttcaacttaaatgactgaggcatttttactactattctgttaaaatcaggattttagtgcttgccaccaccagatgagaagttaagcagcctttctgtggagagtgagaataattgtgtacctcggccgcgaccacgctaagggcgaattccagcacactggcggccgttactagtggatccgagctcggtaccaagcttggcgtaatcatggtcatagctgtttcctgtgtgaaattgttatccgctcacaattccacacaacatacgagccggaagcataaagtgtaaagcctggggtgcctaatgagtgagctaactcacattaat

SEQ ID NO: 37448 - DNA, 510 bp, Homo sapiens
  misc_feature 9: n = A,T,C or G
gcgaattgngccctctagatgcatgctcgagcggccgccagtgtgatggatatctgcagaattcgccctttcgagcggccgcccgggcaggtacgcgggggggcagtccagcagctaggcagctgagcagagcgcatctgcctggggccagtgaggagaatgcattagacagagcttttcgtgctgctgagatctgttacctaaagcaataaaaaatggccagaggatcagtgtccgatgaggaaatgatggagctcagagaagcttttgccaaagttgatactgatggcaatggatacatcagcttcaatgagttgaatgacttgttcaaggctgcttgcttgcctttgcctgggtatagagtacctcggccgcgaccacgctaagggcgaattccagcacactggcggccgttactagtggatccgagctcggtaccaagcttggcgtaatcatggtcatagctgtttcctgtgtgaaattgttatccgctcacaattccacacaaca

SEQ ID NO: 37449 - DNA, 431 bp, Homo sapiens
gggcgaattgggccctctagatgcatgctcggagcggccgccagtgtgatggatatctgcagaattcgcccttagcgtggtcgcggccgaggtaccttgggactgggcctgaggaggaggagttattcatcccgcaagctttcaggccccgaggagaatcttccattcctgtctatttggttatagaaaaggggaaagggacgactttctcaataactacttcaggcgtgacataggggtggcgtgggcaccttggaaaaagaaaaacttaatttttggggtattcttgagagacgggttggtatccatcgtgccgctgtagcaggagcatcatctggattgtcaggaggttaacttgtagtttcaacaagaagtttttaatgggaataccacagggtgagaaacaggagggaccccagtggatgaaaatg

SEQ ID NO: 37450 - DNA, 154 bp, Homo sapiens
  misc_feature 25, 142, 143: n = A,T,C or G
tacgactcatatagggcgattgggnccctctagagcatgctcgagcggccgccagtgtgatggatatctgcagaattcgccctttcgagcggccgcccgggcaggtacttcctggaaatcaattaactgagtcttttgaaanncccctagagaa

SEQ ID NO: 37451 - DNA, 413 bp, Homo sapiens
acgactcactatagggcgaattgggccctctagatgcatgctcgagcggccgccagtgtgatggatatctgcagaattcgcccttagcgtggtcgcggccgaggtacggtgatattggcggacttaaggacatcgaattgtttatcaggaataaagtattatgtgtgttttctgcggccctggataatgctgtagcattcagggtcgattgagtaaaaaaaatgtagagatggttccctgtttgtttttgcttctagttttcattcatttgctatttattctcttctggctttgcttgtgtatgcatatatataaaaccattattattattattattatttttagtttctagtggaaggcttttattttggttctgtgaatagtcatttttgtttcctaagaacttccagcaa

SEQ ID NO: 37452 - DNA, 431 bp, Homo sapiens
  misc_feature 296: n = A,T,C or G
tatagggcgaattgggccctctagatgcatgctcgagcggccgccagtgtgatggatatctgcagaattcgcccttagcgtggtcgcggccgaggtacacataggtataaacaacataaaactgacttggaaacgattcctcagcagcgccccattgatctgccctgccaagtgactggctgccagtgcagggcttacctttatgtccccttgaatggtagccagcccattcgctgcaggtgcaaacactttgctgatcagcacagtgctgcgcctggctttacatgcaatacatngttccaagtgttcaggattcccatagctgctttcacttgttgcttgttggtcaggcctgcaatatggcccattgacacaagtagtgggaaaactaagacaagaaaagaattggcttcaggaaaaaaaccagttgg

SEQ ID NO: 37453 - DNA, 683 bp, Homo sapiens
tacgactcactatagggcgaattgggccctctagatgcatgctcgagcggccgccagtgtgatggatatctgcagaattcgccctttcgagcggccgcccgggcaggtaccggcttcctctctggggtaggggtagcctcgcccggaagcaaggcctctggaaaaccgggcccctgagttgcaaacaaatgtcagatcccaggtaaggcctgtgaagactggaagcggcttacctctgccgcgcgaggatgtggagccagcgcggacaccttcccccagcgactcgcgtgccttcaggcagggactctaggatcttagatattaaggctaagacatactgcatttgtaataccaaagaaaaacgtccctacctcaaaacgtgaaacttacacagaggattttattaaaaagcagattgaagagttcaacatatgaaagagacatttagccaacatgatgggagaagatccagaaactttcactcaagaagatattgacagagctattgcttaccttttcccaagtggtttgtttgagaaacgagccaggccagtaatggagcatcctgaacagatttttccaagacaaagagcaatccagtggggagaagatggccgtccatttcactatctcttctatactggcaaacagtcatactattcattaatgcatgatgtatatgg

SEQ ID NO: 37454 - DNA, 619 bp, Homo sapiens
tatacgactcacttagggcgaattgggccctctagatgcatgctcgagcggccgccagtgtgatggatatctgcagaattcgccctttcgagcggccgcccgggcaggtactttcttctctcattccgccaaaacagggctcagttattcatttgccaagcttcgtggaggaatgtaggtgacatcaatgtgataaagtctgtgttctgagttgtcagatctcttgaagacaatatttttcatcacttattgtttactaaagctacagccaaaaatattttttttcttattctaaactgagccctatagcaagtgaagggaccagatttcctaattaagggaagttaggtacctcggccgcgaccacgtaagggcgaattccagcacactggcggccgttactagtggatccgagctcggtaccaagcttggcgtaatcatggtcatagctgtttcctgtgtgaaattgttatccgctcacaattccacacaacatacgagccggaagcataaagtgtaaagcctggggtgcctaatgagtgagctaactcacattaattgcgttgcgctcactgcccgctttccagtcgggaaacctgtcgtgccagctgcattaatg

SEQ ID NO: 37455 - DNA, 365 bp, Homo sapiens; identical to SEQ ID NO: 35904

SEQ ID NO: 37456 - DNA, 393 bp, Homo sapiens
agggcgaattgggccctctagatgcatgctcgagcggccgccagtgtgatggatatctgcagaattcgccctttcgagcggccgcccgggcaggtactagctaactccaagagatcgttagcagcatcagtccacaaacacttagtggcccacaatatatagagagatagaaaaggtagttataacttgaagcatgtatttaatgcaaataggcacgaaggcacaggtctaaaatactacattgccactgtaagctatacttttaaaatatttattttttttaaagtattttctagtcttttctctctctgtggaatggtgaaagagagatgccgtgttttgaaagtaagatgatgaaatgaatttttaattcaagaaacattcagaaacata

SEQ ID NO: 37457 - DNA, 410 bp, Homo sapiens
agggcgaattgggccctctagatgcatgctcgagcggccgccagtgtgatggatatctgcagaattcgccctttcgagcggccgcccgggcaggtacgaagatctctatagtaactgtaaaagtttgaagctcacattaacctgtaaacatcagttggtcagggacagttgcaaggcctcctgcaatttggtcaaacagcatttattaaatacgcattacacaccgagtagggctatgtagagaggagtcagattatctacttagatttggcatctacttagatttaacatatactagctgagaaattgtaggcatgtttgatgcacatttgatttcaaatgtttttcttctggatctgctttttattttacaaaaatatttttcatacaaatggttaaaaagaaacaaa

SEQ ID NO: 37458 - DNA, 156 bp, Homo sapiens
agatgcatgctcgagcggccgccagtgtgatggatatctgcagaattcgccctttcgagcggccgcccgggcaggtacaaggacactaagacagtgtagcctgctgacttgagaatgttctgtaaggactggaaacactagaatcttgaagaaacg

SEQ ID NO: 37459 - DNA, 431 bp, Homo sapiens
gcgaattgggccctctagatgcatgctcgagcggccgccagtgtgatggatatctgcagaattcgcccttagcgtggtcgcggccgaggtacccactcagagaagaccaacaggaccctgagctatcggactggcttgaagatcaccagccttaccgaggttgtgtgtgggttagacttgtgccacccggggcaactcttggccgggctgtaacctatttcccgaagccgttacctcgaatgcatttcctgtggctcatcagacatgagctgtgagaggggccggcaccagagcctgcagtgccgcagtcctgaagaacagagcctggatgtggtgacccactggatccaggaaggtgaagaagggcgttcaaaggatgaccgccacctccgtggctgtggctaccttcccggctgcccgggctccaatgg

SEQ ID NO: 37460 - DNA, 355 bp, Homo sapiens
tacgactcatatagggcgaattgggccctctagatgcatgctcgagcggccgccagtgtgatggatatctgcagaattcgccctttcgagcggccgcccgggcaggtactcaactgcgtatcaaaaataccggtttagcctatttggttacatgctggcgagcataggatagtcaagattattttgcaactagattattcaatgcagtgatatatttcttatacttaatacttatgactacagtccacaatcagtcttttagaaggtgctctagctaactgtggaatattagacgacatgaaagtacttcttctttgctttacagtggtgggctgtcactgaaagaaagtgtaaa

SEQ ID NO: 37461 - DNA, 441 bp, Homo sapiens
actatagggcgaattgggccctctagatgcatgctcgagcggccgccagtgtgatggatatctgcagaattcgcccttagcgtggtcgcggccgaggtacctacagaactgctctgtgtcagacagggtcagccatttactcattactttggaaagggataagaggaagaagtcacggaagccacctgcttctcagtgtgacactactgtgtccctccaaatcctccataaagtcttccagcaattcaaaatgctcagcatgaatccacttcttttagaagtgagtgaaggtgctgaggtatacatcacggttccacgggggaatgagtacattcttctagaaccaggttcatttttccagttttgtagaaaaatagatgttccagccaccttttacttaactgtctagtcttttaagaccaatcagtatgttccctggaa

SEQ ID NO: 37462 - DNA, 417 bp, Homo sapiens
atacgactactatagggcgaattgggccctctagatgcatgctcgagcggccgccagtgtgatggatatctgcagaattcgccctttcgagcggccgcccgggcaggtactggagatgcaggttgacacgggcttgagttccaaggtgaaaaaactggggaggctgtgaaggaagagctgcattaaggagggtgaggagcgtgtggttctgtatcatggcagccccaatggatccaggggatgcctccaaaaaatacatgcttcccttcccttaatctgtacgcgggaggcattgaggcagccagcgcaggggcttctgctgagggggcaggcggagcttgaggaaaccgcagataagtttttttctctttgaaagatagagattaatacaactacttaaaaatatagtcaataggt

SEQ ID NO: 37463 - DNA, 618 bp, Homo sapiens
actatagggcgaattgggccctgtagatgcatgctcgagcggccgccagtgtgatggatatctgcagaattcgccctttcgagcggccgcccgggcaggtacttggtctgtgaaggaagtggcatcatatcagccattacagcgaaaactcttcactgcagcggttcactgctgaagccagagggtgtgctggtttatagcacgtgcgctataacactggccgaaaatgaagaacaggttgcctgggccctgacaaaatttccttgccttcagcttcagccccaggaaccgcagattggaggagaaggaatgaggggagctgggctctcatgtgaacagttgaaacagctgcagcgatttgatccatcggctgtgccattaccggacactgacatggactctcttagagaggccagaagagaagacatgttgcgtctggctaataaggactctataggtttttttattgcaaaatttgtaaaatgcaaaagcacataggagagggatggatgctcagaaatgaaaattccaaacatttgctgtctgtggttttttttttttttttttaaccaaagtgttgtcaggccaactgaatgatgatgtggttgctatggaaac

SEQ ID NO: 37464 - DNA, 408 bp, Homo sapiens
  misc_feature 357, 368: n = A,T,C or G
acgactactatagggcgaattgggccctctagatgctgctcaagccggccgacgtggtgatggatatctgcagaattcgccctttcgagcggccgcccgggcaggtacttatgtggaagctagtctcccaaaacacaatctttagagagaaaagacatgaacgaactccaaaatatccatttaatcaatcatgtttttggctttgggataaagaactttgaaccagtttttttctcaggagctgtcaaatggacacttaattatgacatgagaatgaagaaattattttggaaaaaaaaatgacctaatttacctatcagtgaaagctttattttctggtgccttttgaaagtatantggagtcatantcattcttctgtttaaaatgttgttttggttttgactttc

SEQ ID NO: 37465 - DNA, 413 bp, Homo sapiens
acgactcctatagggcgatttgggccctctagatgcatgctcgagcggccgtcagtgtgatggatatctgcagaattcgtccttagcgtggtcgcggccgaggtacactatatagattacatagctttcctaccaacctaaagcttatcaactttattattgtctactgattttcaaactaggcattaaatttagggtgagaaagaagtgatacactctgtttcaactagggtggttgcatattatcctctctttaaaccgggcttatatgtaatttttttttttgagacaaaaacaaagtatgagctatcttccattaaaaaactgattctggagcaaggagccaggagccgtggctcacacctgtaatcccagcactttgagaggccgaggcaaatagaacccttgactcc

SEQ ID NO: 37466 - DNA, 488 bp, Homo sapiens
aaagccctcaggcagctctgtgtcagagaaattaaagaaactggactcctctagggagacatcccatggttctcccacagtgactaagctcagcaaggaaccttccgacacttctgctgcatttgaatctacagccaaagaaaactttctaggggaagatgatgattttgttgacttggaagaactttcttctcaaactggtggtggaatgcacaaaaaagacaccttgaaggagtgcctttctcttgacccagaggaacgaaagaaagctgagtcacaaataaacaattctgccgtggaaatgcaggtgcagtcagccctagcctttttgggaacagagaatgatgttgaactgaagggggcgctagatttagaaacctgtgagaagcaagatataatgccagaagtggacaagcagtctggttcgccagaaagccgagtagaaaacacactgaacatacatgaagatttagataaagttaaactca

SEQ ID NO: 37467 - DNA, 501 bp, Homo sapiens
ccctctagatgcatgctcgagcggccgccagtgtgatggatatctgcagaattcgcccttagcgtggtcgcggccgaggtacacgtgtctagaaacaagacaaatctccaaggtctctggggtgcttgctggggcggagataagggaaagacctctccctgagtcttaaagcatcagtctgcacttctactcaacaagtcggcagccaaaagtgacgacgagagagcgactccacgtagcggcgccaggcgcgagcccaagacaaccagaggcggtcacaaggtatacgcccttctcctctttccacgcttctcgagaggctcccgcggccagaaccggaaaacaaggtgtaacagtcgcgtttcaaatctcgcagacctgctggccgatttcgagtcttctgaaagaggaaggcgagcaaagccaaaattctcccagagcgcgaacccaaaacacagatcgccgctggggtccaagcgcccttcaacccccgcgtacctg

SEQ ID NO: 37468 - DNA, 425 bp, Homo sapiens
  misc_feature 295, 303, 304: n = A,T,C or G
agggcgaattgggccctctagatgcatgctcgagcggccgccagtgtgatggatatctgcagaattcgccctttcgagcggccgcccgggcaggtactcaaatgttcttaaaaatgagaaccagtggggaaattgtttataatcattggaaatgaagaaattccaattggctatatctttacttcagctttttcttgaacaatttacagcattgattttcaaactgtgtctacaggcacccttcccctttgtatcagagcagttctgcttttaactgttttatatgtttggggtntctctatnngagatttcatttggaacacaagagtttcactttgatatttcgagtttgaaaaccccattgattttaagtgaaaaaaaacatttctttagaagaaatagggaaatattgtttttaaaaaatg

SEQ ID NO: 37469 - DNA, 468 bp, Homo sapiens
ctactatagggcgaattgggccctctagatgcatgctcgagcggccgccagtgtgatggatatctgcagaattcgccctttcgagcggccgcccgggcaggtacgcgggattttgataaactttattgcactagagtgcttcagtgttgacacgagtttcaaaatctccagagacaccaaagaaatgtgactcaattggaaaaaatggagtttttgacacaatgttagagaaagtagggtatgtagttctcaaaggaaatctgaccaaaccttcctgttttttacaaatgtgatctgcttcctatgtccagggtggacaacactatgatccttagctagagctttcttctcttattctttcaacatgtattcacggggtacctcggccgcgaccacgctaagggcgaattccagcacactggcggccgttactagtggatccgagctcggtaccaagcttggcgtaat

SEQ ID NO: 37470 - DNA, 433 bp, Homo sapiens
ctatagggcgaattgggccctctagatgcatgctcgagcggccgccagtgtgatggatatctgcagaattcgccctttcgagcggccgcccgggcaggtacattgatgggctggagagcagggtggcagcctgttctgcacagaaccaagaattacagaaaaaagtccaggagctggagaggcacaacatctccttggtagcccagctccgccagctgcagacgctaattgctcaaacttccaacaaagctgcccagaccagcacttgtgttttgattcttcttttttccctggctctcatcatcctgcccagcttcagtccattccagagtcgaccagaagctgggtctgaggattaccagcctcacggtagtgacttccagaaatatcctgacccacaagggacgtaacagaaaatcttggagacccaagt

SEQ ID NO: 37471 - DNA, 382 bp, Homo sapiens
ctactatagggcgaattgggccctctagatgcatgctcgagcggccgccagtgtgatggatatctgcagaattcgcccttagcgtggtcgcggccgaggtacctgtaatctcagctactcgggaggctgaggcaggagaaccacttgaactggggaggcagaggttgcagtgagccaaggtcatgccattgcatttcagccctgggcaacaagagcgaactccatcatacatcttaccaccacatcactaaaggcctgtgtactttgaccagcagggtatgttggtgctcatactccccaccctacatgttcccaggttctgtcccatggcacaggtgatggtctcccctctcagactctgggttccattctcccttggcct

SEQ ID NO: 37472 - DNA, 480 bp, Homo sapiens
tacgactactatagggcgaattgggccctctagatgcatgctcgagcggccgccagtgtgatggatatctgcagaattcgcccttagcgtggtcgcggccgaggtaccacaacctctgcctcctgggttcaagtgatcctcctacctcagcctcctgagtagctgggattacaggcacctgccaccacacctggttaattttttgtattgttagtagagatggggtttcactatgttggtcagggtggtctcgaactcctgattacaagtgattcacctgccttggcctcccgagccttagcccttttgattccctgacatcaaatgctacttctcttggatagttatgctgtgagaagttggtgacgggcaaaacgggagcccaggccagtgtcagaaactcacccagagtcgcagggacaaagctgttgtgtgggttcttccctgtgagaatcttaaggatggaaatggtgagcacag

SEQ ID NO: 37473 - DNA, 458 bp, Homo sapiens
actactatagggcgaattgggccctctagatgcatgctcgagcggccgccagtgtgatggatatctgcagaattcgccctttcgagcggccgcccgggcaggtacgcgggggctcactgagaattatcctgagctgtgttaacaaactgacagaacacagaatttttactcaaaatggattggttaaacgtctttaaagattttttcagcattggaaaagtgaaaagaaaacccagtgtgccagattctgcatctcctgctgatgatagttttgttgacccaggggaacgtctctatgacctcaacatgcccgcttatgtgaaatttaactacatggctgagagagaggatgaattatcattgataaagggacaaaggtgatcgtcatggagaaatgcagtgatgggtggtggcgtgggtagctacaatggacaagttggatggttcccttcaaacta

SEQ ID NO: 37474 - DNA, 397 bp, Homo sapiens
tgctcgagcggccgccagtgtgatggatatctgcagaattcgcccttagcgtggtcgcggccgaggtacttcttgaccatctccgagaaactagggctgacaagaagagactgcggaaagccttaagagaatttgaagaacagttttttaaacaaacaggaagaagtccacaaaaggaagataggataccaatggcagatgagcattatgaatataagcacataaaagccaaactgagactattagaggtcctcatcagcaagcaagatgtggccaaaactatttgaggttcaggaaatgttatgatcactttcacccatgatataaagtaaagttttattttcctctgccatccttgctaagtagtttttgacacaatgaaaaatggaagcacttt

SEQ ID NO: 37475 - DNA, 282 bp, Homo sapiens
  misc_feature 268, 269: n = A,T,C or G
tatacgactcactatagggcgaattgggccctctagatgcatgctcgagcggccgccagtgtgatggatatctgcagaattcgccctttcgagcgccgcccgggcaggtacagtgtgcacgacgctgagccggatctcccctatcaccccatcaacatcaggtgggttcttcacctggcaggtgtatgtcccattgtcgtcgaactgcagtttccagagaaggatggaggcatcgtactctcggccgcgaccacgcctaaggggcgannattccagcacact

SEQ ID NO: 37476 - DNA, 436 bp, Homo sapiens
atgcatgctcgagcggccgccagtgtgatggatatctgcagaattcgccctttcgagcggccgcccgggcaggtacttttttttttttttttttttctttttgtgaatgaaagagacacaaaaatagtcaatagaagacagacaaatattcaagtatttgtttctttctttccccgcttcaaatccttggttccaagtcaggcagggagaagagtatgcaaattcatgggtagcagaagttttaaattacctatcaagccttccatgaatataaaagcgacgccaacctttccccaggtttcatctggatattttatcaggaatgacagagtggggaggttaaaaaacagtattgttttctacccttaaagtgttataggttttactggctggggataataaatagggaaacactgagggagatagaagaaaaaca

SEQ ID NO: 37477 - DNA, 381 bp, Homo sapiens
catgctcgagcggccgccagtgtgatggatatctgcagaattcgccctttcgagcggccgcccgggcaggtacaagaatttttatggcagcattatttataatagccaccaaaccagaaatcacctaagtgttccatcaatagtattcatgcaacaaaatactatatagcaatgaaattgatccaactatacccatatgtagcaacatggataaataaggttttttttgtactttcctaattgggaaagtagtgcttaagtttgcaaattaagttggggagggcaataataaaatgaggggcccgtaacagtaaccagtgggtgtataacgaaaaccatgtataaaatgggcctattacccttgtcagagatataaattac

SEQ ID NO: 37478 - DNA, 637 bp, Homo sapiens
acgactcactatagggcgaattgggccctctagatgcatgctcgagcggccgccagtgtgatggatatctgcagaattcgccctttcgagcggccgcccgggcaggtacccctagagaaaattccattaacttgttaaattaatggaattaacaacaaataaagcatgtttgagacctgcaaaaattcctctggtagtatttataaatagagctgcatgcctctagtatgaaaaccgtatcagttgcaagtgccacttctacaagttactcagtttactctttgtatcagtaactttaaaggttggatgatccttgctggttaaagctaaacctcaacctatcaactaaatgaaaatatttagaatcatcagaatctgaacagactaaaattatcagcgataagcagaatcaagcagggtataagtgttatctcaattatttgaaattgactgagttttcttaagtgtaaagctgaaatttgctaaccatgtttttgatgaaccacaatgcagcattgtgtgggttttagattgaatgactctctgctataattatcatgactttgaaatttttcatgagaataaatgaggaatggaggcaatttgtgggttatccaaagcccccttgatgttgagt

SEQ ID NO: 37479 - DNA, 544 bp, Homo sapiens
ccctctatatgcatgctcgagcggccgccagtgtgatggatatctgcagaattcgcccttagcgtggtcgcggccgatgtacacacatgagaactgaaatggcccaaacccagaaagaaagcccaactagatcctcagaagacgctttagggacaataaccgatgaggaaaagatggcctccttgtgccaccgtctgttatgatttctctccattgcagcagaaagccgttcttctaagcagacagcaggtgatgatggcaaaatagaccacactcttgaggagcaggaggaggtacattccacaagcattgccttcttattttacttcttttagctgtttaactttgtaagatgcaaagaggttggatcaagtttaaatgactgtgctgcccctttcacatcaaagaactactgacaacgaaggccgcgcctgcctttcccatctgtctatctatctggctggcagggaaggaaagaacttgcatgttggtgaaggaagaagtggggtggaagaagtggggtgggacgacagtgaaatctaga

SEQ ID NO: 37480 - DNA, 322 bp, Homo sapiens
acgactactatagggcgaattgggccctctagatgcatgctcgagcggccgccagtgtgatggatatctgcagaattcgccctttcgagcggccgcccgggcaggtacagttgccagtgagctatcaggaatcacaagtggatttgaggaaagcttcaatagaaggaatagaggtagtggaaactgattcatgaacccttctgagtaataacaaatactttaaaaaaccatatcatgagttctaatattaattttcttgtctggaatcagctactttcaagatcacttgttcttttaggccttttgaaccttttaccactga

SEQ ID NO: 37481 - DNA, 560 bp, Homo sapiens
gcgaattgtgccctctagatgcatgctcgagcggccgccagtgtgatggatatctgcagaattcgccctttcgagcggccgcccgggcaggtacagacggagaatacctgcatctgccatggcttccacaaagttggcatcttctacaggtcaccagcatcagccagagccaaacgcattccatctgctgaaaatttgtcaatagcttgggtcaaagtgaggaagttgcctgtggattttgacatcttctcagagttcaggaggagatgtccatttgctctcacagctgtaggccatttatcactttgttccggccacatagccgcatgattataaaggtaatatgaaagatgatttggaacaagatccttgccagagacgcgaagatcaacaggataccagaattcaaactcctgctttaactgatctaatttttcctttgcaatctgagtcttaggaaatggagcctccttgaagaaaacataatcccaaacttccttggtcatctgttgcggtctaatgcccagcggagactctgcctgttcatgcaagttaccccc

SEQ ID NO: 37482 - DNA, 659 bp, Homo sapiens
  misc_feature 527: n = A,T,C or G
tgtatacgactcacttagggctgattgggccctctagatgcatgctcgagcggccgccagtgtgatggatatctgcagaatggcccttagcgtggtcgcggccgaggtaccctcaggcttactagggtggggaaaaacccagccctggtaaattcgtggtcagactggttctctgctcttgaaccctgttttctgttgtttaagatgtttatcaagacaatacatgcacagctgaacatagacccttaccagtagttctgctttgcctttgtgctgttccctcagaagcatgtgatctttgttctgctttttgctctttgaagcatgtgatctttgatctactccctgttcttacaccccctccccttttgaaacccttaataaaaaacttgctggtttgagcctcaggtgggcatcacagtcttaccgatatgtgatgtcacccctggcagcccagctgtaaaattcctctctttgtacctgcccgggcggccgctcgaaagggcgaattccagcacactggcggncgttactagtggatccgagctcggtaccaagcttggcgtaatcatggtcatagctgtttcctgtgtgaaattgttatccgctcacaattccacacaacatacaagccggaagcataaagtgtaaagcctggg

SEQ ID NO: 37483 - DNA, 399 bp, Homo sapiens
ctatagggcgaattgggccctctagatgcatgctcgagcggccgccagtgtgatggatatctgcagaattcgcccttagcgtggtcgcggccgaggtactttctggggtcttagatacagaactacgatataagtcagacttgaaagagggctccagaaaaagtagatgcgtatctgtacttcagctactctggtgccttcaagtgtctgagagacggggctggagacgtggcttttatcagagagagcacagtgtttgaggacctgtcagacgaggctgaaagggacgagtatgagttactctgcccagacaacactcggaagccagtggacaagtttaaagactgccatcttggcccgggtcccttctcatggccgttgtggcacgaaattgtgaat

SEQ ID NO: 37484 - DNA, 255 bp, Homo sapiens
ggcgaattgggccctctagatgcatgctcgagcggccgccagtgtgatggatatctgcagaattcgcccttagcgtggtcgcggccgaggtacttactctcggggttgtgagaatgaaattatacaatgcatttaaagtatttagcagccaggcatggtggttcatgcccataatcccagtactttgggaggcttggggcagggcttagagcttgagcccaggagttttgagactcagcctggggcaatatggca

SEQ ID NO: 37485 - DNA, 195 bp, Homo sapiens
gggcgaattgggccctctagatgcatgctcgagcggccgccagtgtgatggatatctgcagaattcgcccttagcgtggtcgcggccgaggtactttttttttttttttttttttttttttgtttttttgttttttttttttttttttttttttttttttttttttttttttttttttttttttttttttttttt

SEQ ID NO: 37486 - DNA, 427 bp, Homo sapiens
agggcgaattgggccctctagatgcatgctcgagcggccgccagtgtgatggatatctgcagaattcgccctttcgagcggccgcccgggcaggtactcactttgtccagttatgctgccaaagaaatattcctctgctgttccttcaaaacattactggatttatggttggtagagagtatgaagctgaaggaattgccaaggatggtgccaagatggtggccgctgtggcctgtgcccaagtgcctaagataaccctcatcattgggggctcctatggagccggaaactatgggatgtgtggcagagcatatagcccaagatttctctacatttggccaaatgctcgtatctcagtggtgggaggagagcaggcagccaatgtgttggccacgataacaaaggaccaaagagcccgggaaggaaa

SEQ ID NO: 37487 - DNA, 573 bp, Homo sapiens
gcgaatggccctctagatgcatgctcgagcggccgccagtgtgatggatatctgcagaattcgccctttcgagcggccgcccgggcaggtacatgtgtggctgcaaatgttctcagtgatttcagagttcatggacccttttcaaaggtctcccagtggtaactatccaaaaatggatgagtaatgtaggctacagtttattcacagttggcttcagtttataaaaacaggctgggcgtggtggctcatgcctgtaatcccagcacttcaggaagctgaggcgggtgatcacccgaggtcaggagttcgagaccagcctgcccaatatggtgaaaccccatctgtaccttttttctaaaattaccaaagatattacacaaaggtaaattatgttctctgttttatgctttatctgatgaagccaaatatcctcttattgttgatcaaaggaggcaaaagaatttagaggcaaatgacaagcgataggctattgcaacctgagaaagagaactgctgcttcatcgtaaatttagaagaccaagtagataatggaaccaaagttgttactttttt

SEQ ID NO: 37488 - DNA, 195 bp, Homo sapiens
ctactatagggcgaattgggccctctagatgcatgctcgagcggccgccagtgtgatggatatctgcagaattcgccctttcagcggccgcccgggcaggtacgcgggggttcttggaaggcggtgctctgagaagccggactacgcggcagcggctcttcaaagcggagccgggagtttttgctacagttttcg

SEQ ID NO: 37489 - DNA, 102 bp, Homo sapiens
cgactcactataggcgattgggccctctagagcatgctccgaggccgggggcccgccagtgtgatggatatctgcagaattcgcccttaagcgtgggtcgcg

SEQ ID NO: 37490 - DNA, 406 bp, Homo sapiens
ttgggccctctagatgcatgctcgagcggccgccagtgtgatggatatctgcagaattcgccctttcgagcggccgcccgggcaggtacaacgtataatggattatgcagtgcaaagtaatgtcactggaccaaaatttagtttaatcatttttatttcaagtgtatttaaaaaatcataaatggggtttcataatccaaagttgaaacatttattcttcatagcttcagaatttaacaaccaattgtagaccatgctttccaaatccagtcttctttgctatttttcaaaacttctgagatctagtattaaactgctccattctaaatgtatagttttagataagtattgtactttaatttttttttttatttatacgaggctgaaattgaagctttttattttg

SEQ ID NO: 37491 - DNA, 164 bp, Homo sapiens
  misc_feature 153: n = A,T,C or G
actatagggcgaattgggccctctagatgcatgctcgagcggccgccagtgtgatggatatctgcagaattcgcccttagcgtggtcgcggccgaggtactgcagtcagcttcagggcagcttcctgccacagcagcattaaatgaagttggngatttacaaaa

SEQ ID NO: 37492 - DNA, 410 bp, Homo sapiens
actacttagggcgaattgggccctctagatgcatgctcgagcggccgccagtgtgatggatatctgcagaattcgccctttcgagcggccgcccgggcaggtacaagtgatcaaggaaaggtaatggatgtgatgaaactaacaagggccctgacttgtgctgtcaagaaagcctctgaaagaagtgacatttaagatgaaacctaaaattatgagagaactgcagctgttacagccaaaggggaaatgatgacatggacaaaggcctcgaggcaggaggagctgctggcagccagctctcggcataagctttggcatacagtaagtgccttgcatactgctgtattgcaattgaaaaaataaggatctggccaggcgcggtggctcacaccggtaattccagcacttta

SEQ ID NO: 37493 - DNA, 328 bp, Homo sapiens
ctctagatgcctgctcgagcggccgccagtgtgatggatatctgcagaattcgcccttagcgtggtcgcggccgaggtacccgaggcagctgggcagtgggcagtcacattccagtaggccctgaggaatccccaaataagtcacgctgggaggaaagtgagacaccaaaacagaaacctgccctgccatccgggcgtggctcactctgtcttcgcgcagggctggttggcatggtgctacactcccgagacctccctccttctccccaagaacagactctgcttatcgacatgcacgcaggcccaggccttcccctagtatccctgg

SEQ ID NO: 37494 - DNA, 449 bp, Homo sapiens
atacgactactatagggcgaattgggccctctagatgcatgctcgagcggccgccagtgtgatggatatctgcagaattcgccctttcgagcggccgcgggcaggtaccacaacctctgcctcctgggttcaagtgatcctcctacctcagcctcctgagtagctgggattacaggcacctgccaccacacctggttaattttttgtattgttagtagagatggggtttcactatgttggtcagggtggtctcgaactcctgattacaagtgattcacctgccttggcctcccgagccttagcccttttgattccctgacatcaaatgctacttctcttggatagttatactgtgagaagttggtgacgggcaaaacgggagcccaggccagtgtcagaaactcaccccgagtcgcaggaacaaagctgttgtgtgggttcttccctgt

SEQ ID NO: 37495 - DNA, 548 bp, Homo sapiens [sequence omitted]

SEQ ID NO: 37496 - DNA, 131 bp, Homo sapiens
  misc_feature 108, 109, 124, 125: n = A,T,C or G
ttggccctctgatgcatgctcgagcggccgccagtgtgatggatatctgcagaattcgccctttcgagcggccgcccgggcaggtacacccccatggctcctggtaannctacctgatcagtgnntcaaat

SEQ ID NO: 37497 - DNA, 159 bp, Homo sapiens
ctacgactactatagggcgaattgggccctctagatgcatgctcgagcggccgccagtgtgatggatatctgcagaattcgcccttagcgtggtcgcggccgaggtaccttctcagagtcttcggtttggtctcaacaatacttctagcacccctcctt

SEQ ID NO: 37498 - DNA, 329 bp, Homo sapiens
gcgaattgggccctctagatgcatgctcgagcggccgccagtgtgatggatatctgcagaattcgcccttagcgtggtcgcggccgaggtacacccaaggattctgttctgcaactccatcctcctgtgtcactgaatatcaactctgaaagagcaaacctaacacgaaagaggacaaccccgataaggctgtgtccaacggagttcacctccactacaagaacactatgctggccttggaatatggccaaggctctctctgtccctgaaaaagaaaggggcccatattccccaggaaaactgcttcaagcagaaacaatcttgaccac

SEQ ID NO: 37499 - DNA, 433 bp, Homo sapiens
cctatagggcgaattgggccctctagatgcatgctcgagcggccgccagtgtgatggatatctgcagaattcgcccttagcgtggtcgcggccgaggtacctcctcctgctcctcaagagtgtggtctattttgccatcatcacctgctgtctgcttagaagaacggctttctgctgcaatggagagaaatcataacagacggtggcacaaggaggccatcttttcctcatcggttattgtccctagaagcgtcttctgaggatctagttgggctttctttctgggtttgggccatttcagttctcatgtgtgtacctgcccgggcggccgctcgaaagggcgaattccagcacactggcggccgttactagtggatccgagctcggtaccaagcttggcgtaatcatggtcatagctgtttcctgtgtgaaa

SEQ ID NO: 37500 - DNA, 158 bp, Homo sapiens
ctcactatagggcgaattgggccctctagatgcatgctcgagcggccgccagtgtgatggatatctgcagaattcgcccttagcggggtcgcggccgaggtacattaactcatatgtaaaaacaacatctggagaaacaaaaaatgaaagtaaaatgg

SEQ ID NO: 37501 - DNA, 377 bp, Homo sapiens
acgactactatagggcgaattgggccctctagatgcatgctcgagcggccgccagtgtgatggatatctgcagaattcgccctttcgagcggccgcccgggcaggtacaacaaacgctccgggaaatggaaagccagttggcagcccacatgtggttacctcacaccagtcaaaagtgacagtggaaagcacttccgatttggaaaaacaaccaaatgaaaatggtgtatctgttcagaatgaaaattttgaagaaattataaacttacccattggatctaaaccatccagattagatgtcaccaacagtgagagcccagaaattcctttgaatccaattttggcctttgatgatgaagggacacttgggcccctgc

SEQ ID NO: 37502 - DNA, 402 bp, Homo sapiens
cgactcactatagggcgaattgggccctctagatgcatgctcgagcggccgccagtgtgatggatatctgcagaattcgccctttcgagcggccgcccgggcaggtacttgttggctaggagctgagcttatcacaacaaacaacagcattacaggaattgtcttatatgtggtcagttgtaaagctgataaaaattttctgtaatcttgaaacctaaaaaatttacacaagaaaagacatcacttgtctactgtaacatccaaaggctttgcccagtatgagctctttaagtcctctgccttggatgatacaatcacagcatcacaaactgcgatcgctttggatatttcctggagtcctgtggatgagattcttcaaatccctccactctcttcaactgc

SEQ ID NO: 37503 - DNA, 337 bp, Homo sapiens
ctactatagggcgaattgggccctctagatgcatgctcgagcggccgccagtgtgatggatatctgcagaattcgccctttcgagcggccgcccgggcaggtcatactggcctctgtgattacatagatcagccattaaaataaaacaagccttaatctacaaaaaaaaaaaaaaaaaaaaaagtaccgtgtaaaattcttctattgtcaactttttctgatgtatgccagttcatttactgacaaatgttgttactaagtgcttattaagaagtgtaatacgctataaaaaagttaatactttttgttcagatgtaaggcaaagataattgatgcc

SEQ ID NO: 37504 - DNA, 528 bp, Homo sapiens
gccctctagatgcatgctcgagcggccgccagtgtgatggatatctgcagaattcgcccttagcgtggtcgcggccgaggtacccagcatcaggtcaaaaaccagaatcgttgcagtgtgccagtagatcaggcctctgagtcactgctgaaaagcaaagcctgctttggagctgaaaacctcatgagggttctggggaactattgccgccttggagaagtgcgcacccacattcgagtgggtgttgtgggtcttcccaatgttgggaagagcagcctgatcaatagcctgaagcgcagccgcgcatgcagcgtgggagctgttcctggaattacaaaattcatgcaggaggtctacctggacaagttcatccggctcttggatgctccaggcattgtcccagggcccaactcagaggtgggcaccatcctgcgtaactgcgtgcacgtgcagaagctggcagaccctgtgaccccagtggagaccattccgcagcgctgcaacctggaggagatttccaactattat

SEQ ID NO: 37505 - DNA, 430 bp, Homo sapiens
ctatagggcgaattgggccctctagatgcatgctcgagcggccgccagtgtgatggatatctgcagaattcgcccttagcgtggtcgcggccgaggtacagagacagaggaaggggggctccaaagccaagagagggaaccccacctgccacagataccagctaggtatatatacagaggctggaggaggcagtgtctgatttgcacaggctcaggggattggtttgactaggcatgtcattcacgtagcccgcaggaaaagctggctctcccaccctagccttttaatatgcaaatgcagggcaccatgatcttctacacaggtggggatacttcggggtgtccatgtatccaggaatgtggggaaagggcaaagaagtccacaggaatcgccatgttttgggtggacccactttctaatggctggcat

SEQ ID NO: 37506 - DNA, 403 bp, Homo sapiens
actactatagggcgaattgggccctctagatgcatgctcgagcggccgccagtgtgatggatatctgcagaattcgccctttcgagcggccgcccgggcaggtaccagttgggcagctctgggtggaattgctgcggttctatgctttagaatttaatttggctgatttagtgataagtattcgtgtcaaagaattggtatctcgggaattgaaggattggcccaaaaagcgcattgccattgaagatccctactctgttaaaagaaatgtggcaagaaccctaaatagtcaacctgtgtttgaatatatacttcattgtttaaggacaacatacaagtattttgctcttccacacaaaattacaaaatccagccttctaaagcctttgaatgcaattacatg

SEQ ID NO: 37507 - DNA, 351 bp, Homo sapiens
tgatggatttctgcagaattcgccctttcgagcggccgcccgggcaggtacatgggactacaggcacgccccaccatgcccagctcatttttgtatttttagtagagacagggtttcaccatgttggccaggatgatcttgatctcttgacctcatgatccgcccctcttggcctcccaaagtgctgggatcacaggcgtgagccaccacacctggccctctatttattctctttaaagagagagaaaactatgagaggccaaaattatttaattaaatctttaccttagcacaagggaaaaaatggaatttgcctaatataggtgatgaagcatacacaatgaacagaaa

SEQ ID NO: 37508 - DNA, 431 bp, Homo sapiens
acactactatagggcgaattgggccctctagatgcatgctcgaaccggccgcaatgggaatggatttttgcaaaattcgcccttaccgtggtcgcggccgaggtacaacagatgcagtctgtgtgctctgattgtaatggagaaggagaggtaattaatgaaaaagaccgctgtaaaaaatgtgaagggaagaaggtgattaaagaagtcaagattcttgaagtccacgtagacaaaggcatgaaacatggacagagaattacattcactggggaagcagaccaggccccaggagtggaacccggagacattgttcttttgctacaggagaaagaacatgaggtatttcagagagatgggaatgatttgcacatgacatataaaataggacttgttgaagctctatgtgattttcagttcacatttaagct

SEQ ID NO: 37509 - DNA, 214 bp, Homo sapiens
tatatggcgaattgggccctctagatgcatgctcgagcggccgccagtgtgatggatatctgcagaattcgccctttcgagcggccgcccgggcaggtacgcggggactccagccacgacctcatgctgctccgcctgtcagagcctgccgagctcacggatgctgtgaaggtcatggacctgcccacccaggagccagcactggggaccacct

SEQ ID NO: 37510 - DNA, 262 bp, Homo sapiens
cgactactatagggcgaattgggccctctagatgcatgctcgagcggccgccagtgtgatggatatctgcagaattcgcccttagcgtggtcgcggccgaggtacaagcccctggacctgcggcctaagaagacacgtgccatgcgccgccggctcaacaagcacgaggagaacctgaagaccaagaagcagcagcggaaggagcgggctgtacgaatctacagaagaaaaacctttatcaaaaatgagggacccattcctt

SEQ ID NO: 37511 - DNA, 368 bp, Homo sapiens
  misc_feature 10: n = A,T,C or G
ggcgaattgngccctctagatgcatgctcgagcggccgccagtgtgatggatatctgcgtaatgcatatttgcaaactgccgccttagcctggtccctgccgaggtacaccaaggtggtgcattaccggaagtggatcgaggacaccatcgtggccaatccctgagcacccctatcaaccccctattgtagtaaacttggaaccttggaaatgaccaggccaatactcaagcctccccagttctactgacctttgtccttaagtgtgaggtccagggttgctaggaaaagaaatcatcacacacaggtgtagaccagagtgtttcttaaatggtgtaatttaggcctctctgtgtcctgcggaatact

SEQ ID NO: 37512 - DNA, 629 bp, Homo sapiens
gtaatacgactcactatagggcgaattgggccctctagatgcatgctcgagcggccgccagtgtgatggatatctgcaaaattggcccggagcgtggtcgcggccgaggtactcaaagacgaatcatgaaaaagaaaaaaaactttatttcaaacaggttcagtgatatatgtgtgtgctacagcaaaggctggttgtggcaaagtttcatttcaaactgtatgatgtgggctgggcaagggggctcacgcctgtaatcccagcactttgtgaggccgaggtgggctgatcaccctgaggtcaggagagaccggcctagccaacatgccgaaaccccgtctccactaataacacaaaaattagccaagtgtggtggcgcgcacctgcaatcccagctactcgggaggctgaggcaggagaatcgcccgaacccggggggcagaggttgcagatcacgccactgcactccagcctgggtgacagagccagactcaaaaacaaaacaaaataaaacaaacaaaaaaacagaactgcatgatgtataattttgacattatgtgggaatgtttaacttctgccaaaatgtagattcaatccaacattatgccaatttttatattaattttagt

SEQ ID NO: 37513 - DNA, 587 bp, Homo sapiens
acgactactatagggcgaattgggccctctagatgcatgctcgagcggccgccagtgtgatggatatctgcagaattcgccctttcgagcggccgcccgggcaggtacacaggccgggcacagtggttcacacctgtaatcccaacactttgggaggctgaggcgggtggatcacaaggtcaggagatcgagaccatcctggccaacatggtgaaactctgtctctactaaaaaatacagaaaattagccagtcatggtggcacgttcctctagtcccagctactcgggaggctgaggcagaagaattacttcaacatgggatgtggaggttgcagtgagccgagatcgcgccactgcactccagcctggtgacagagcgagaccccatctcaaaaaaaaaaaaaagttgtatgtgacagctaaccataataaaaaaaaagaaagaaaaaagagagagaaagtagggacaacactaaatcattagtaatttgagcacatttcctccaaggcatatgctatttttcaacttggtttcaatcatggatctttattggttttcttaatggtataagcatgtttgggttta

SEQ ID NO: 37514 - DNA, 455 bp, Homo sapiens
tacactactatagggcgaattgggccctctagatgcatgctcgagcggccgccagtgtgatggatatctgcagaattcgccctttcgagcggccgcccgggcaggtaccacaaaaacctaaaagttaaatgttagattaaataaaattataaaatatccacacgagaagtatgtgtatacaaagtattgtatgtatgcagtgaaatgagagtgcccatacagttatatgcaaacttttgaaagtttcatagttgtttaacaaaatatttttaatgttgatagtgacataaaaacatcacaagaattatctagataatatagcaatattgccaaaatttgagtcaatgttacctgtgagtgcaataggtcatcattgatcgcgtcctttcatgacctggcggtaatttagatgattgaaggaatattatgaatgtatttacactgtgagtgtgaaa

SEQ ID NO: 37515 - DNA, 563 bp, Homo sapiens
gactcactatagggcgaattgggccctctagatgcatgctcgagcggccgccagtgtgatggatatctgcagaattcgccctttcgagcggccgcccgggcaggtactcagctgtcttaataggatgaagccttaagcagtggaaatttcagttattttccacagtattccattttggaggatttggggtgtttactttttaaattcttgaacaacttaacctccatgaggctttgtgaagtcagctgtgaccaccctcctcttactgtgttctcagtattcattcacttccagggaagaatgacagccacagggagatggtggtgggcaagaatgagagtcccaggatccagatttagcctcagatcttccccattcaggaagggttttccatttaacaagagcactagtatgaaaacattagggacaaatcccccatgtctttgaaattcggattctcctcttgagatccccttcctcacctgccaatcaactttataaggccacaagtggtcactggttttccttccacaggtttgaggttcttagctttccttaagcga

SEQ ID NO: 37516 - DNA, 415 bp, Homo sapiens
tatagggcgaattgggccctctagatgcatgctcgagcggccgccagtgtgatggatatctgcagaattcgcccttagcgtggtcgcggccgaggtactatatggacaccaacatggagcagaaaatgagggcagcagtgtccaatcccattccaggtgagaagttgcacagtgtccaataggtgcatacatctccttagtaagtagttgtgattaacaatgaaatagaaatgaaaaatatatttttttatttatgtgtattatatttttcaagcagctaataagttggtaggacataatatttaattcgttggggacctaattatttataaattgaatggttagatatttcttttggcctaagccaccatgaaaaaatcactgaggcgctaagggaaacatgaactaagaagcc

SEQ ID NO: 37517 - DNA, 379 bp, Homo sapiens
ctcactatagggcgaattgggccctctagatgcatgctcgagcggccgccagtgtgatggatatctgcagaattcgccctttcgagcggccgcccgggcaggtactttagttggagatgccacctcagaagttcacactgtgcaggaaaaaggttttattctctcctggcatacactagaatgtcagatgcttgcatccatgtggaccacgatgggcctctaaaaattggtgggcagggggtttgcttatgagttttctctggaaaccgattttactcctggatgtattgaatgccccttgagctttatgagatacgagtccacatggataaaatgttagagagtggagttctacagaggattccaggatgaggccatg

SEQ ID NO: 37518 - DNA, 132 bp, Homo sapiens
  misc_feature 110, 117, 118, 125, 126: n = A,T,C or G
ctctgatgcatgctcgagcggccgccagtgtgatggatatctgcagaattcgccctttcgagcggccgcccgggaaggtacgtccacggtcagccttgcgacatttaaangttctanncaatgannactcac

SEQ ID NO: 37519 - DNA, 407 bp, Homo sapiens
tacgactactatagggcgaattgggccctctagatgcatgctcgagcggccgccagtgtgatggatatctgcagaattcgcccttagcgtggtcgcggccgaggtacttttttttttttttttttttttttttttggctttatctttagttttattttaagagatcatctgcatttttttctgtaataaacttaaaagatatccacccattttgtcagatttatttattctttagcaatttaagttttaaaatcacagtttttgtctcaatccttaataatactatattcattatatttcatgtttagctttctcatggagaaaaagaaacacaggcataaacctatatacctatccaccttgctggtttttgcaacatgattttaataaagtgttactggcccttg

SEQ ID NO: 37520 - DNA, 310 bp, Homo sapiens
tatagggcgaattgggccctctagatgcatgctcgagcggccgccagtgtgatggatatctgcagaattcgcccttagcgtggtcgcggccgaggtactactactccctaacccaaaccaggtgattctagtgaagactgtcaataaacggagcatgtgatcaagcagggcccatcagaatccttccctaagatttttataaaaagctggacctaattctttttttcatttgaagtggcaaatattttgaagaatatgaggttctaaaagcttgtgaatggctttaattcttccatccccttgtgttaaa

SEQ ID NO: 37521 - DNA, 433 bp, Homo sapiens
agggcgaattgggccctctagatgcatgctcgagcggccgccagtgtgatggatatctgcagaattcgcccttagcgtggtcgcggccgaggttttagccagaagtccaacctcagcagacaccagagaacacattcagaagagaagccttatttgtgcagggagtgtgggcaaagctttagaagtaagtccatcctcaatagacatcagtggactcactcagaggagaagccctatgtttgcagcgagtgtgggcgaggctttagcgagaagtcatccttcatcagacaccagaggacacactccggtgagaaaccctatgtgtgcctggagtgtggacgaagcttttgtgataagtcaaccctcagaaaacaccagaggatacactcaggggagaagccttatgtttgcagggagtgtgggcgaggcttta

SEQ ID NO: 37522 - DNA, 439 bp, Homo sapiens
ctatagggcgaattgggttctctagatgcatgctcgagcggccgccagtgtgatggatatctgcagaattcgccctttcgagcggccgcccgggcaggtaccaaagagatcatattccaagtagcagccaagctgagcaaactccaagagctctttcttatcaagaatagtcctatccaggtgtgacatgactgttttggagatgtctgcgcctgcttcttgcaatattcggataatctgaaatggtgccctggagctccgtccaggatggataataacaggacaaccaagctgagcctgggcatgagctgtggcctggagaacctttctttcactctcagtcaaaggccaggagcaaccaatttctccaataatgccacacttgatactggttccatcagctccatggagaatttcattcataaggacatcggtaagc

SEQ ID NO: 37523 - DNA, 395 bp, Homo sapiens
actatagggcgaattgggccctctagatgcatgctcgagcggccgccagtgtgatggatatctgcagaattcgccctttcgagcggccgcccgggcaggtactggttcttaaacagcccataaaaacccattggcctgaagcttatatctcaggcctatgcccatcttatagtcttggaagacaaaaggctggtagagacagtcttcagtggcttcagtgatgctctgtagaggccagggtgtcttgagtgctgtaactcccaagcactgggctagcctgacttctgtatctccctaccaccacccccttaaaaaaataaggtaacagcaaatctatagtaaaaccatgtctgcatagaacgtgttcaaatcctctgttttcattaaatgtaaaa

SEQ ID NO: 37524 - DNA, 395 bp, Homo sapiens
acactacttagggcgaattgggccctctagatgcatgctcgagcggccgccagtgtgatggatatctgcagaattcgccctttcgagcggccgcccgggcaggtaccagcataaaaaaatgaaatgtgtattgatttctaatggggcaataccacatatcctcctctagcctgtaaaggagtttcatttaaaaaaataacatttgattacttatataaaaacagttcagaatatttttttaaaaaaaattctatatatactgtaaaattataaatttttttgtttgtaatttcaggttttttacattttaacaaaatattttaaaagttataaactaaccttagacctctaatgtaagttggtttcaagattggggaatttggggtttttttttt

SEQ ID NO: 37525 - DNA, 409 bp, Homo sapiens
tacactactatagggcgaattgggccctctagatgcatgctcgagcggccgccagtgtgatggatatctgcagaattcgcccttagcgtggtcgcggccgaggtacctgtcatttgcctttgagcattgtcaccgttctagtcagaagaacaaaaggatgattctgatctatttgcttccagtaaaaatgctattgggtcacatgcccactgtggagctcctgaaaaagtatcacctgatgcagtttgcggaagtaaccagagctgtgagcgggggcaacctgctgctgctgcacgaggcgctggcgaagcacgaggccttcttcattcgctgcggaatcttcctcatcctggagaagctgaagatcatcacctacaggaacctctttaagaaagtgtatttgttactg

SEQ ID NO: 37526 - DNA, 610 bp, Homo sapiens
gtatacgactcactatagggcgaattgggccctctagatgcatgctcgagcggccgccagtgtgatggatatctgcagaattcgccctttcgagcggccgcccgggcaggtacttttttttttttttttttttgttaaaacttcatttatttaagatgactagtgatgcagctagcaaacccaagaagccaactggaatggaaatgctcagtggtgctcagccattacccaggaccagagattcctttgttaacagttcaatttgttgaggcacaagtgaggataaattgggccatgacaaaactatgagattgaatgataatcatagtaacatctgacatatattaaatttggtgttatgccatttctcagttccaccaaatgtacctcggccgcgaccgcgctaagggcgaattccagcacactggcggccgttactagtggatccgagctcggtaccaagcttggcgtaatcatggtcatagctgtttcctgtgtgaaattgttatccgctcacaattccacacaacatacgagccggaagcataaagtgtaaagcctggggtgcctaatgagtgagctaactcacattaattgcgttgcgctcact

SEQ ID NO: 37527 - DNA, 430 bp, Homo sapiens
ctactatagggcgaattgggccctctagatgcatgctcgagcggccgccagtgtgatggatatctgcagaattcgccctttcgagcggccgcccgggcaggtactatgtgcatgtattacattggcaatgtaggaaaagtgagcaatgtgagaaaaaatattgtattaagcaccaggagagttcacaatttattggaaaaagatatacccttaaataattgaaatgaggtgataaaaaaggtaaagatataatatgaagtatgataaatcaattaggaaaatccattgatatgagaaatcaataatgaaaaaataattttgaaaaagatgaaataattgggagggagagggagagtcagttgaaatggggctagcacagaaaatgaacacccagaatacggggaggaaaatagaaaactatgtttgggtc

SEQ ID NO: 37528 - DNA, 180 bp, Homo sapiens
atagggcgaattgggccctctagatgcatgctcgagcggccgccagtgtgatggatatctgcagaattcgccctttcgagcggccgcccgggcaggtaccggaattgacggaggcttttgtcattgtcgcgatctggaagcaggtggagggttatgggaaggatgtaagtcactggatat

SEQ ID NO: 37529 - DNA, 250 bp, Homo sapiens
gactactatagggcgaattgggccctctagatgcatgctcgagcggccgccagtgtgatggatatctgcagaattcgcccttagcgtggtcgcggccgaggtaccctcgtgtgctctgagctaagccacatactaaactgactttttggtttgtatacccttgcttcccccttctgatgaaaacacctttaccctcacaaccaccatttttcctctcctttccaaaagctctttccaaccttgctgcact

SEQ ID NO: 37530 - DNA, 420 bp, Homo sapiens
agggcgaattgggccctctagatgcatgctcgagcggccgccagtgtgatggatatctgcagaattcgcccttagcgtggtcgcggccgaggtaccagccacttgtcctagccaaatgtccaaaacacgcccttgggccccgccacgttacaatccacagattgtctgtctgagtcgtttaaggcatttcctggtgcttgtgttccatgaataaaaggacaaagtcagaagatcactgatgtcttactgtcaacagagatattttaaaagagagaagcaggaaaagatcttcctttttgatctacaacttatatagttttctgattatgcacataatagatatgccttccagatgcataaggcaaacatctggaaagaaatatacccaaatcttagcaggggttatctttgggagtggag

SEQ ID NO: 37531 - DNA, 433 bp, Homo sapiens
cgactactatagggcgaattgggccctctagatgcatgctcgagcggccgccagtgtgatggatatctgcagaattcgcccttagcgtggtcgcggccgaggtactatatgccatggatgtgaatttcccatagaagctggtgacatgttcctggaagctctgggctacacctggcatgacacttgctttgtatgctcagtgtgttgtgaaagtttggaaggtcagacctttttctccaagaaggacaagcccctgtgtaagaaacatgctcattctgtgaatttttgaaagtcaacagttcaagagaagagaaggaatttgaagagaaaaaggaaaattaaaattactaattaatttttagattcaatatttatatgggagttttgaaaaataatagtggccctgaaggaataaattccagctttaaaaacc

SEQ ID NO: 37532 - DNA, 264 bp, Homo sapiens
acgactcatatagggcgaattgggccctctagatgcatgctcgagcggccgccagtgtgatggatatctgcagaattcgcccttagcgtggtcgcggccgaggtaccaaagaaactgaagaagcctgcaaagcctttactttcaaagataaaattgagaaattattgcaagcggctggagcaaaagaatgcttcaagaaaactcgaaatgggaaacttagtacctgcccgggcggccgctcgaaagggcgaattccagcacact

SEQ ID NO: 37533 - DNA, 130 bp, Homo sapiens
  misc_feature 83, 86: n = A,T,C or G
tacgatcactatgggcgattgggcccttagtgctgctcggcggccgccagtgtgatggatatctgcagaattccgcccttttnccnaagccgggcccgccccggggcaggtacttttttaccttaaaaaa

SEQ ID NO: 37534 - DNA, 426 bp, Homo sapiens
ctatagggcgaattgggccctctagatgcatgctcgagcggccgccagtgtgatggatatctgcagaattcgccctttcgagcggccgcccgggcaggtactgtctgtccacaccatggtctcctcagtcccctccacgccagcccctcttccccacacctagtaggtgtgctacacctccctttgccagtcatcccgccatggatggggagcctacttggtgccctggcaaacctgtttacactaaggagatgcccacagggagcgggaagctcccaaaccctcagtcattctccagcagagacctttgctcttggccaggtttgaaacgatgttcaacctcgccacgtcaatgtctcagtaaaagacactatagatagttatggacaatacactccaagaatactgggcttatgggggggttgg

SEQ ID NO: 37535 - DNA, 534 bp, Homo sapiens
  misc_feature 402: n = A,T,C or G
cactatagggcgaattgcgccctctagatgcatgctcgagcggccgccgtgtgatggatatctgcagaattcgccctttcgagcggccgcccggcaggtacgcgggggggggtcgcattccttacctcacctttgtccctgcgcgggctgcggctgggatccggtctttccagccccgaagggacctggttcctctgcccaggcttctgtcactctgtcacctacgctatgccctgctgtagtcacaggaggtgtagagaggaccccgggacatctgaaagccaggaaatggaggagtgggctttgctggatatttcccagaggaaactctacaaggaagtgatgctggaaactttcaggaacctgacctctgtaggaaaaagttggaaagaccagaacatngaatatgagtacctcggccgcgacacgctaagggcgaattccagcacactggcggccgttactagtggatccgagctcggtaccaagcttggcgtaatcatggtcatagctgtttcctgtgtgaaattgtta

SEQ ID NO: 37536 - DNA, 405 bp, Homo sapiens
tcactatagggcgaattgggccctctagatgcatgctcgagcggccgccagtgtgatggatatctgcagaattcgcccttagcgtggtcgcggccgaggtacttcggcagctatggaactctgaaactccacttggagatgttggcagaccagccacgaacaactaaataccacagtgtcatcctgcagaataaagaatccctgacggataaagtcatcctggacgtgggctgtgggactgggatcatcagtctcttctgtgcacactatgcgcggcctagagcggtgtacctgcccgggcggccgctcgaaagggcgaattccagcacactggcggccgttactagtggatccgagctcggtaccaagcttggcgtaatcatggtcattagctgtttcctgtgt

SEQ ID NO: 37537 - DNA, 538 bp, Homo sapiens
  misc_feature 138, 200, 237, 425: n = A,T,C or G
ctcactatagggcgaattgggccctctagatgcatgctcgagcggccgccagtgtgatggatatctgcagaattcgccctttcgagcggccgcccgggcaggtacttctggttggggctctctttacttactgcttangcacatagtcaccttctctggactccctgcttccatgctttctccttcagtccattccgcanactcttgtgatcttccaaaattagctctgattagctntcacttcctgtagaagcaagaacaagctcctctgcttggtacttgacctttatcttctaaccattcttttatgtcatcaagagttgcatcagttgggaagcctttaatataaacagatctgttttttacatcatttttatactcatcagtcacttcaggtaggggtttgcttggagaccttctgattntagttttatcttcactgatttccatgagttctgccttggatttgctcaatgcttccacaattacattaaagtctgttgttagacggttcaacctgttgaattttatcattatc

SEQ ID NO: 37538 - DNA, 434 bp, Homo sapiens
acgactcactatagggcgaattgggccctctagatgcatgctcgagcggccgccagtgtgatggatatctgcagaattcgcccttagcgtggtcgcggccgaggtacaaggctaagcattttaactttatactggaaaaaaaatcaaacaaaggggagggataaaggacttagtcatctttgcactggaaaacaaaatatgtaattaaattcccatagctgcatgtaacattgaattcttccaggttaaaaaaaaaagttaatcctgtgatattaatggaatgacattttgaggtcttgagaatgggcacaaaagtgggaaatgaatttcagtatgggcaaagacactgaggatgatgttgattagataattcactccgtaatgatcatgctgtgtgctagtaagtataaccctggaaagatcttgagatgctt

SEQ ID NO: 37539 - DNA, 183 bp, Homo sapiens
taggatacgactactatagggcgaattgggccctctagatgcatgctcgagcggccgccagtgtgatggatatctgcagaattcgcccttagcgtggtcgcggccgaggtactcagtgcagcaaagaaagactacagacatctcaatggcaggggtgagaaataagaaaggctgctgacttta

SEQ ID NO: 37540 - DNA, 431 bp, Homo sapiens
acgactcactatagggcgaattgggccctctagatgcatgctcgagcggccgccagtgtgatggatatctgcagaattcgccctttcgagcggccgcccgggcaggtactttttcttttttttttttttttttccgtctccccaaagctttacctgtcttgactttttaaaaaagtttgggggcagattctgaattggctaaaagacatgcatttttaaaactagcaactcttatttctttcctttaaaaatacatagcattaaatcccaaatcctatttaaagacctgacagcttgagaaggtcactactgcatttataggaccttctggtggttctgctgttacgtttgaagtctgacaatccttgagaatctttgcatgccgaggaggtaaagaggtattgggattttcacagaggaagaacacagcg

SEQ ID NO: 37541 - DNA, 392 bp, Homo sapiens
tacgactcactatagggcgaattgggccctctagatgcatgctcgagcggccgccagtgtgatggatatctgcagaattcgcccttagcgtggtcgcggccgaggtactaagtgtttgacatatggtatctcatttaaaccttctgtgatcctctgaagagtgtcctccaatttttcccattttaacagatgataaaactcacagaagggcctatggttatatagctagtaaaagtggcagagtccgttgaacttgaattcagattggcgaatgctttaacagttggtatccagcagctacaggacttaatatttctcagtgttgtttcctcatctctaaattgaagatattaaagctcactttgcaaaaaaaaaaaaaaaaaaaaaaagta

SEQ ID NO: 37542 - DNA, 302 bp, Homo sapiens
  misc_feature 32: n = A,T,C or G
agatgcatgctcgagcggccgccagtgcgtcnggaagctgcagaataccccctttcgagcggccgcccgggcaggtacgcggggacttcaatgcagagtccctctgtgaatctacaacacccaacacccatgagttcagtccttaagaaggaaaattgagcaagtatttaattgggtggacattgttttaaagaggcccatatccaggctaactctagaaagtttatgctcaaacttagggggcctctttttcttctgtcagaggaccattcttagtggcactggggaaatctgggcaccca

SEQ ID NO: 37543 - DNA, 432 bp, Homo sapiens
agggcgaattgggccctctagatgcatgctcgagcggccgccagtgtgatggatatctgcagaattcgcccttagcgtggtcgcggccgaggtactggttggggatgggaatcgtgcttttctttaaacttcagtttacgagatgctttgagagcgttaggcaaaagcagaaataaatatcaggagcaacggggaaagcttttgtaaaagatcatggtggccactgttgcagctttgaagaatgagtgttggcttgaacagttctttgcctgcatcattggtagctgcactgaaaggaaaaaactttcaccttaagaatttgaaaaggaagaaacctgggctctggtcttcatggcatttagactgagatgcttaaacagaacagaagtaatacgcatttcctgccataggatagggaaaatgtaacaagct

SEQ ID NO: 37544 - DNA, 558 bp, Homo sapiens
  misc_feature 14, 24: n = A,T,C or G
acgactcactatanggcgaattgngccctctagatgcatgctcgagcggccgccagtgtgatggatatctgcagaattcgcccttagcgtggtcgcggccgaggtacttttttttctttttttttttctcttatttcttttttcttatttgttttcctttttgctttttctttttatcttatttcttttacttatttttcttttttttacttttatttcttctccgtttttcctcattcttttcctcttatttctttgacttttctgatttctttttttttcttattttccttttttttttcatattccttttaattttttcttacttcttttacttttcttatttgccctcttgtggaaatgaggcacagcctcccttatggttgagccgtaattctagctgagcacggatggtttgatcctcctgtgttggggcactgtatggtgtgagggcacaaaaccttgacccacatgggtctggtcaccttctcacagaggtcacctttacagccccccaactctttgaaggatgtgtcccaaggtgtctcaagtctgatg

SEQ ID NO: 37545 - DNA, 304 bp, Homo sapiens
tatagggcgaattgggccctctagatgcatgctcgagcggccgccagtgtgatggatatctgcagaattcgcccttagcgtggtcgcggccgaggtactttttttttttttttttttttttgataatagcaaatatttattgaatgcttatcaagtaaatttcattattctaaagactttccctacattgttttattcttcgtattttagattctttaaaatgaagagactgacacatggagaatctgaacatcttttttagggtctaacatctagtttgtgccatatccaaagatttacatcc

SEQ ID NO: 37546 - DNA, 429 bp, Homo sapiens
gactactatagggcgaattgggccctctagatgcatgctcgagcggccgccagtgtgatgggatatctgcaaaattcgccctttcgagcggccgcccgggcaggtacagaaatttaagctcacatgtatttgacaaatatagtttagtagactagctctatgtgcttttcactttcctctgattttctctccctgattcattattatctgtgcagctcacagttttttttttgtatacaactcacagttctcaaattttcgttacccatgggcttctgttgtcccatgttctctccagttaagatctaatttaaaattcattggattgaaatttattgaatataattcagcttttgtaactaggtaagacttttcttatagttttagttttaatatagtttaggggtattactgggctttttcccaggt

SEQ ID NO: 37547 - DNA, 372 bp, Homo sapiens
gggccctctagatgcatgctcgagcggccgccagtgtgatggatatctgcagaattcgccctttcgagcggccgcccgggcaggtacttttttttttttttttttttttttttttcttttttttttttttttttttttttttttttttttttttttttttttttaaccaaaaaaaaaatttatttaaattaaaaaaaaaaggggtatattaaaaaaaaaaaaaaaattattaaaagaaaaaataataatgggctttaaaaagaattaaaaaatgtaattttaaaataaaaaaaaacgttgtaaaaatgaacaaaaaaaaaaaaaatttaaaaacaatttttttaaatgtcggaagttggtaaggaaaatcca

SEQ ID NO: 37548 - DNA, 201 bp, Homo sapiens
tatagggcgacttgggccctctagatgcatgctcgagcggccgccagtgtgatggatatctgcagaattcgcccttagcgtggtcgcggccgaggtacagtaaaaacacatctaacatctttgaagaccaaatttcctgctgaacagtattacagatttcatgagcactggaggtttgtgttgcaccgcttggtcttcttg

SEQ ID NO: 37549 - DNA, 398 bp, Homo sapiens
actatagggcgaattgggccctctagatgcatgctcgagcggccgccagtgtgatggatatctgcagaattcgccctttcgagcggccgcccgggcaggtactcaccttaaaatgctctacaattttgatcaaaatccagggcgccactcccagacctactgaatcagaatcttcaagagaggagcctgagaatccatatggtttaacaaactccaggtgattatttttatttacttttgagacggagttttgctcgtgttgctcaggctgaagtgcaatggtgagattggctcactgcaaccaccacctcctaactccaggtgattcttattatcagacaagtttaagaaaaactcccaatggatagtgaaagaatacttaagaaattttggagatg

SEQ ID NO: 37550 - DNA, 169 bp, Homo sapiens
agatgcatgctcgagcggccgccagtgtgatggatatctgcagaattcgcccttagcgtggtcgcggccgaggtacgatttcagtatgtcttaatcgcagctgtgattggaacaattcagattgctgtcatctgtgtggtggcctctgcatcacaaggaaatgccccag

SEQ ID NO: 37551 - DNA, 292 bp, Homo sapiens
tacgactcactatagggcgaattgggccctctagatgcatgctcgagcggccgccagtgtgatggatatctgcagaattcgccctttcgagcggccgcccgggcaggtactaccaccggttgtagtgacaaccaaaaatgtctccagacatctccaaatatcccctggggcgtaaaactgcatatcattgagaactttatggccctaaagaaagagatacagttttattctctgctcgctttcttttctgttagtcttgattatttgtcatttacaatatttaaccttgctc

SEQ ID NO: 37552 - DNA, 260 bp, Homo sapiens
agggcgaattgggccctctagatgcatgctcgagcggccgccagtgtgatggatatctgcagaattcgccctttcgagcggccgcccgggcaggtacttggtactacttgctctctttaccatgcgccagttattttttgtatttttagtagagacagggttttaccatgttggccaggatgatcttgatctactgaccctcatgatccgcccctcttggcctcccaaagtgcttgggatcacagcgcgtgagccaccca

SEQ ID NO: 37553 - DNA, 165 bp, Homo sapiens
  misc_feature 159: n = A,T,C or G
ctactatagggcgaattgggccctctagatgcatgctcgagcggccgccagtgtgatggatatctgcagaattcgcccttagcgtggtcgcggccgaggtacattgatgggctggagagcagggtggcagcctgttctgcacagaaccaagaattacangaaaaa

SEQ ID NO: 37554 - DNA, 169 bp, Homo sapiens
  misc_feature 15, 18, 20, 22, 117: n = A,T,C or G
tacgactcacttttnagngngncgaattgggccctctagatgcatgctcgagcggccgccagtgtgatggatatctgcagaattcgcccttagcgtggtcgcggccgaggtacttgngaggctgaggcaggaaaattcttgaacccaggagacggaagttgcagtgagc

SEQ ID NO: 37555 - DNA, 179 bp, Homo sapiens
atacgactcactatagggcgaattgggccctctagatgcatgctcgagcggccgccagtgtgatggatatctgcagaattcgccctttcgagcggccgcccgggcaggtacttttttttttttttttttttttttttggctctttgtaaattctttattgccaggagttgaaccctaaa

SEQ ID NO: 37556 - DNA, 249 bp, Homo sapiens
tagggcgaattgggccctctagatgcatgctcgagcggccgccagtgtgatggatatctgcagaattcgcccttagcgtggtcgcggccgaggtacgcgggtgcctctgacttcctggagcaccatcatctgctgctgccttcaacagctgccatattttattcctccccctccatttcttacttgagttgaattcaggtgaggttgctagatctaccaaataaaaatacaggaagcccagttatattt

SEQ ID NO: 37557 - DNA, 536 bp, Homo sapiens
cgactcactatagggcgaattgggccctctagatgcatgctcgagcggccgccagtgtgatggatatctgcagaattcgcccttagcgtggtcgcggccgaggtactttttttttttttttttttttttttttttttttattttttttttttttttttttttttttttttttttttttttttttttttttttttttttttttttaaaaaaagggggtttttttttttggaaccttttttttgttttgggggggaaattaacttttttaaaacccctttggggggcccccttttttttctctccttaagggctttttgggccgtttttttttttcccggccccccccttttttttttttttttccaggggcccagggttgcccccccttttttggaaactttttttttggggcggtttaattaaaaatttcccctctttttttttaaaacccccattggggttttccctggtgggctttttccccttgcccctttgggtgtttttttgaacctgggggaatttttctttttttaaaa

SEQ ID NO: 37558 - DNA, 411 bp, Homo sapiens
ctactatagggcgaattgggccctctagatgcatgctcgagcggccgccagtgtgatggatatctgcagaattcgcccttagcgtggtcgcggccgaggtacatgggactacaggcacgccccaccatgcccagctcatttttgtatttttagtagagacagggtttcaccatgttggccaggatgatcttgatctcttgacctcatgatccgcccgtcttggcctcccaaagtgctgggatcacaggcgtgagccaccacacctggccctctatttattctctttaaagagagagaaaactatgagaggccaaaattatttaattaaatctttaccttagcacaagggaaaaaaatggaatttgcctaatataggtgatgaagcatacacaatgaatagaaacaatcaca

SEQ ID NO: 37559 - DNA, 546 bp, Homo sapiens
tactatagggcgaattgggccctctagatgcatgctcgagcggccgccagtgtgatggatatctgcagaattcgcccttagcgtggtcgcggccgaggtacagacttagaaattatctaaagatttcatctttttacctcatatttcttaggaatttaatggttatatgttgtctttttttcctatgtcttttggctcaagcaacatgtatatcagtgttgactttttctttcttagatctagtttaaaaaaaaaaaaaccacataacaattctttgaagaaaggaagggattaaataatttttttccctaacactttcttgaaggtcaggggctttatctatgaaaaagtagtaaatagttctttgtaacctgtgtgaagcagcagccagccttaaagtagtccattcttgctaatggttagaacagtgaatactagtggaattgtttgggctgcttttagtttctcttaatcaaaattactagatgatagaattcaagaacttgttacatgtattacttggtgtatcgattatccattaaaagt

SEQ ID NO: 37560 - DNA, 436 bp, Homo sapiens
actatagggcgaattgggccctctagatgcatgctcgagcggccgccagtgtgatggatatctgcagaattcgccctttcgagcggccgcccgggcaggtactttttagaaagtgaaatgctgtggacatttaaggtggagccactgtgagagtctagggggatagatggtagtcgtctcagaatgaaacgaatacacccctttcagagccctttccaaggatcccctccttctttcagctccttccctccacctcaatacacactcctgtcccaggaacctaacctcatctagaaataccagggccagcatgccttacacctagaggtttggttggcttcagagaaacttctggaggctaaaagcagccaagaagaatcagccactacatgctgggcctggatgaacagagcagtgagctgtgatggggctgggg

SEQ ID NO: 37561 - DNA, 611 bp, Homo sapiens
taatacgactcactatagggcgaattgggccctctagatgcatgctcgagcggccgccagtgtgatggatatctgcagaattcgcccttagcgtggtcgcggccgaggtactgcaataatcacagcgtttatccgtgccttgatgtcaaaagttaagagagggtggagaccagaccgaactattgttttctgttcttggggaggaacagcttttggcaatattggctcatatgaatggggagaggatttcaagaaggttcttcaaaaaaatgttgtggcttatattagcctccacagtcccataagggggaactctagtctgtatcctgtagcatcaccatctcttcagcaactggtagtagagaaaaataatttcaactgtacctgcccgggcggccgctcgaaagggcgaattccagcacactggcggccgttactagtggatccgagctcggtaccaagcttggcgtaatcatggtcatagctgtttcctgtgtgaaattgttatccgctcacaatttcacacaacatacgagccggaagcataaagtgtaaagcctggggtgcctaatgagtgagcttactcacattaattgcgttgcgctcactgc

SEQ ID NO: 37562 - DNA, 267 bp, Homo sapiens
tatagggcgaattgggccctctagatgcatgctcgagcggccgccagtgtgatggatatctgcagaattcgcccttagcgtggtcgcggccgaggtacattattttccatatacttatgtagctcgaattttattatgtatctaaatgtcctctgtcagttttaatttggtttaaattcttgataccaataagccttcatcaattcctaagaaaatcactgctcattagtaaaatataagttttaatctgacagttatctttttatt

SEQ ID NO: 37563 - DNA, 166 bp, Homo sapiens
agggcgaattgggccctctagatgcatgctcgagcggccgccagtgtgatggatatctgcataattcgccctttctagcggccgcccgggcaggtacatacatttaaaaggtgttacaaggcaaaatgctaagtcatggtcaatgtcttaaaaaaggacttaatat

SEQ ID NO: 37564 - DNA, 395 bp, Homo sapiens
atacgactcctatagggcgaattgggccctctagagcatgctcgagcggccgccagtgtgatggatatctgcagaattcgcccttagcgtggtcgcggccgaggtacacataaaaaagtcatgggacatttctgttttgtaataaataaggcagtggccaattattactcattagtaacttttttgagataagctattaagtctgccctttcttccttcttcttaatgccgacaaagatcatttttgttccagggatgtactttttttttttttttttttttttttcccaaagattatgaaaattttattaataaagaaaatctgctttacacatatcccctttaaaaacaaccacctcaaacatgtagaaatgctttattttgtatttgctatt

SEQ ID NO: 37565 - DNA, 171 bp, Homo sapiens
actcactatagggcgaattgggccctctagatgcatgctcgagcggccgccagtgtgatggatatctgcagaattcgccctttcgagcggccgcccgggcaggtacttggcttggagactggcgcggcgttcgtgtccgagttctctgcaggtcactagtttcccggtagt

SEQ ID NO: 37566 - DNA, 415 bp, Homo sapiens
agggcgaattgggccctctagatgcatgctcgagcggccgccagtgtgatggatatctgcagaattcgccctttcgagcggccgcccgggcaggtacccattaaaagtggttttgtgtgcaattaacagacacatgttctacccatacattgttttccaaaattattgtgtggctttaaaaaaaaaaacccacacaacaaattgcaaaaggcactgagataacatctgcttctagatcattgctaggctcgaaaaataaagcttgttctaccaggaatgacaagttagaacttagtatttgccaaagcagaaattatatagtgtcagttatttcaggcaaaccttattcggctctcatccccaactatctgtcagaacaattaaaagagatcaaaacagtccagcataactaggc

SEQ ID NO: 37567 - DNA, 405 bp, Homo sapiens
ttgggccctctagatgcatgctcgagcggccgccagtgtgatggatatctgcagaattcgccctttcgagcggccgcccgggcaggtactaacagagacttgatataccaggttttgaatatctaagtaaagcttaaaatacgaaagcaaaaacataatatagaaagaactatctatggttgatattctcacagactttataatttatttagtcatcctaataatactttgattttactgtctgtgtctcttgttgcagttttaaaacatttcctttactttggatatctgataaaattagattacattttcttatcaaattttctatcagatacattatataccataattatagcccccataaattgacaaatttgttgatttgcctcttctcattggtagcaa

SEQ ID NO: 37568 - DNA, 438 bp, Homo sapiens
  misc_feature 87, 88: n = A,T,C or G
ccctctagatgcatgctcgagcggccgccagtgtgatggatatctgcagaattcgccctttcgagcggccgcccgggcaggtacttnntttttttttttttgttttttccctcacattacatgatttccaatggcctatctacaagtttgatagccctttcttctgcttcatcgattcttctgttggacacattaaatttttgagtccagttattgtattcttcaactttatactttttgttatcttttatttctttatgaaaattctcagtttgttcatgcattgctcccatgagactctttatggttgctctttttaatttcctgtcaggttaatcacatatcttcatttcattagggttggtttctgaaaacttatcttcttttatttagagtgtttctgtgtttcatttttcttgactcaatgtgttgatttct

SEQ ID NO: 37569 - DNA, 422 bp, Homo sapiens
tacgactactatagggcgaattgggccctctagatgcatgctcgagcggccgccagtgtgatggatatctgcagaattcgccctttcgagcggccgcccgggcaggtacttctattttaaaacatttcagaaaaaaatatatgttatagcaatactcttactcaaaagaagaaatttcctaactctatcagataaactcatctttagtataaataagcattatttgcaggttgccacaggtggacttttagtaagtaacctaacccatgtttcagcttctaaatctgcaaaatgagcaaggtacctcattagtaattgtttttgttgtttcatttttttctaatgtcctcccctctaccagctcacctgagataacagaatgaaaatggaaggacagccagatttctcctttgctctctgct

SEQ ID NO: 37570 - DNA, 423 bp, Homo sapiens
attgggccctctagatgcatgctcgagcggccgccagtgtgatggatatctgcagaattcgccctttcgagcggccgcccgggcaggtacagactgagcttcctgaaggaggattcccagagttgggtggcagcactggaagcatcaggaaccctggctgctctctaccctgtggccttcagcagccacctcgtacgctcttcccactctgcggttctgccaagcaccttgcctgggcacttgtgtgtgtgcaagactctacagtgtgttgtctgctgcttttttttttttcttcttctgtttcaattggcagctctgtttcctaaagtggaatgaactgaagatacaaatactaatagaagataaatacccataagctgaaaaaagagacagagagcaatcatgttcaatgtcaccatcctg

SEQ ID NO: 37571 - DNA, 589 bp, Homo sapiens
gactactactactatagggcgaattgggccctctagatgcatgctcgagcggccgccagtgtgatggatatctgcagaattcgccctttcgagcggccgcccgggcaggtacgcgggctccagtggattgttggccatgtctttccaactccacaatatctctatcatgggaaacacctggggtttttgcgccacataggagaaagatctggaaactatttgggttttgttttcaacttttcatttggatgtttggcgttgcacacacacatccaccggtggaagagacgcccggtgaaaacacctgtctactttctaagccagtgaggttgaggtgagaggtttgccagagtttgtctacctctgggtatccctttgtctgggataaaaaaaatcaaaccagaaggcgggatggaatggatgcaccgcaaataacgcattttctgagttttcttgttaaaaaaaaaaatttttttaagtaagaaaaaaaaaggtaataacatggccaatttgttacataaaatgactttctgtgtataaattattcctaaaaaatcctgtttatataaaaaatccgtagatgaaaaaa

SEQ ID NO: 37572 - DNA, 421 bp, Homo sapiens
  misc_feature 335: n = A,T,C or G
ctagatgcatgctcgagcggccgccagtgtgatggatatctgcagaattcgcccttagcgtggtcgcggccgaggtactaggaaggcagacggctcgggacttgcccagcatcctcaagctggcaccataccagcgtgactagagccacctcccttggctccttgtccactgccctttgcatctcatgcgggtctccagaagaccccgctcctgctgtgcaggctcccacgcataccttagacactgctgtggtgttgggtggccacgtgacccacacaggccttttctagttcaccagttttctgcaaggatgctggttagggagtgtctgcangaggagcaagtctgaaaccaaatttaggaaacataggaaacgagccaggcacaaggctggtgggccatcagggaccaccctttggg

SEQ ID NO: 37573 - DNA, 371 bp, Homo sapiens
tacgactcactatagggcgaattgggccctctagatgcatgctcgagcggccgccagtgtgatggatatctgcagaattcgcccttagcgtggtcgcggccgaggtacagttcccatcacgtaagtcagtaatgttgtatgcagcagaaatgatacctaaactaaaaacaaggacacaaaaaacaggaggtgctgaccaaagtcttcaacaaggagagggaagtaaaaaagggaaaggaaagaaaaagaagtaacctagtatcagcatcaagtatgtggtacattgatgggctggagagcagggtggcagcctgttctgcacagaaccaagaattacagaaaaaagtccaggagctggagaggcacaacat

SEQ ID NO: 37574 - DNA, 420 bp, Homo sapiens
ctactatagggcgaattgggccctctagatgcatgctcgagcggccgccagtgtgatggatatctgcagaattcgccctttcgagcggccgcccgggcaggtacatgggactacaggcacgccccaccatgcccagctcatttttgtatttttagtagagacagggtttcaccatgttggccaggatgatcttgatctcttgacctcatgatccgcccctcttggcctcccaaagtgctgggatcacaggcgtgagccaccacacctggccctctatttattctctttaaagagagagaaaactatgagaggccaaaattatttaattaaatctttaccttagcacaagggaaaaaatggaatttgcctaatataggtgatgaagcatacgcaatgaacagaaacaatcacattttagta

SEQ ID NO: 37575 - DNA, 565 bp, Homo sapiens
tacgactactatagggcgaattgggccctctagatgcatgctcgagcggccgccagtgtgatggatatctgcagaattcgccctttcgagcggccgcccgggcaggtacttccatttcttgggaaattactcagtaatttaaaaaaaattgttaatgcaacaacctagatgactattcagagatttgtgctgagtgaaaaaagcaatcccaaaaggttgtatcttgtaattccatttatgtatttttcctgaaatgacaaaactgcagaaatgtagaacaaattagtggctgccaggtgttaaggagaaggtgaagataagagaaaaatgtgtgcagctataaaagtgcaacatgagggatccttgtggtagtgaaactattcggtatcttgcttatatcaatgtcagcatgttacttgtgattttgtggtgtttgatttttttggcgttgttatagtttttccattggtggatattgggtgaatagcccatgagatatatctgtattatttcttccaactgcatgtgaatctacaattatctaaaaattaaaattttaattaaa

SEQ ID NO: 37576 - DNA, 338 bp, Homo sapiens
gctcgagcggccgccagtgtgatggatatctgcagaattcgccctttcgagcggccgcccgggcaggtacgcggggccccggtcgggcgggacttcctgtgtcgtatttccaaggactccaaagcgaggccggggactgaaggttgaacagcagagaatttcaaaggaccttgctaatatctgtaagacggcagctacagcaggcatcattggctgggtgtatgggggaataccagcttttattcatgctaaacaacaatacattgagcagagccaggcagaaatttatcataaccggattgatgctgtgcaatctgctcatgtggctgccacacgag

SEQ ID NO: 37577 - DNA, 413 bp, Homo sapiens
gggcgaattgggccctctagatgcatgctcgagcggccgccagtgtgatggatatctgcagaattcgccctttcgagcggccgcccgggcaggtacatctacctaaaggactattatgtggaataatacatactaatgaagtattacatgatttaaagactacaataaaaccaaacatgcttataacattaagaaaaacaataaagatacatgattgaaaccaagttgaaaaatagcatatgccttggaggaaatgtgctcaaattactaatgatttagtgttgtccctactttctctctcttttttctttcttttttttttattgtggttagctgtcacatacaacttttttttttttgagatggggtctcgctctgtcaccaggctggagtgcagtggcgcgatctcggct

SEQ ID NO: 37578 - DNA, 593 bp, Homo sapiens
gactcactatagggcgaattgggccctctagatgcatgctcgagcggccgccagtgtgatggatatctgcagaattcgcccttagcgtggtcgcggccgaggtacatttcacagttttcagtattcagtccctcatgaacattttatagtcatctcttcggccctgttgtgaaatatgtgattccagttcaattcagagtgtatgattccgcttttcacgctgatcaagtaaatttatggtgtctcttttctgatcttcaacattaaaaactaaaaaggaaaaacacataatattctatagagcattaaatgagatactagccctaggcaggtcccattttcttatcaacttctagaaactgtcataaagaggactgcatctcccacagcaacactgtaattgggagttgtattcctcatcaaggacaagatggcaacggtgatatgggagggggacagggaagtgctgggtagagaagggcagggtcactggcaagggctccaccctcaggcttgtgcccatggacctaatgagaacaaggactcctgtcttcttgcccaaatgttacattttccaaggaccactctggcct

SEQ ID NO: 37579 - DNA, 420 bp, Homo sapiens
actactatagggcgaattgggccctctagatgcatgctcgagcggccgccagtgtgatggatatctgcagaattcgccctttcgagcggccgcccgggcaggtacttttttttttttttttttttttttttttttaacactacaggtttcaaatgaatacttttcttatgttgccttcaaaggttcaggacttctgcttttaaaacctgcagcctaccgtgggaaaccaaaaaagcattccctatttccaactgcagtatgtataaatacatatcactacaaaatgtatagaaagtgtgatgagatacatgaatggcatttttattggtcataacattttgatgaaaagcatttaaagttttaactttataaggcttttcaaaatgggtttttttgagatacattggtatttattcatat

SEQ ID NO: 37580 - DNA, 268 bp, Homo sapiens
ccctctagatgcatgctcgagcggccgccagtgtgatggatatctgcagaattcgcccttagcgggtcgcggccgaggtactttttttcattctcattgttacatgattttttaaaaaaaggaaaagaaaatgtgaaacacaatttagtcctcattatttatttgtagatcctgcagcatcatggttgtaattaaatttttttggagttttccgataaatgtaaatatttgcttcttcttgtataccaatactgatttctttttctat

SEQ ID NO: 37581 - DNA, 494 bp, Homo sapiens
gactactatagggcgaattgtgccctctagatgcatgctcgagcggccgccagtgtgatggatatctgcagaattcgccctttcgagcggccgcccgggcaggtacaatcactgcccccccgctttttttttgagatggggtcttgctatgttgcccaggctggtcttaaacgcctgggctcaagcaaccactcccgcctccctgctgagattacaggtgtaagccaccataccgcaacctcaatgacacccttctgatggtctttacacagtctgtgatgtctggtggcccccctgccctggactcaataattgatagattttcctagagtaacagtatgagagctccagctattccattaaaagtattagttctgctttgagctgaaaccagctgagcctaatggaagactggatgtctttcttttttatccaagcaccctaatgactgcttagttacatccataaatgcaagacaacataacacctgtgac

SEQ ID NO: 37582 - DNA, 382 bp, Homo sapiens
tagggcgaattgggccctctagatgcatgctcgagcggccgccagtgtgatggatatctgcagaattcgccctttcgagcggccgcccgggcaggtacccaggaaagacaacataagtatgaaatctatacactgaagttagccaaaagtgagcatgtgttttctgctttaatttactttaatgcaaaaacagaaatgactatttcttaaagtgtatattttaggagaagatgtttcaaatgaaaaagagcaccacaattgcatcaatatgagaaatagtgaatattctatctatcttcttggtgttttcaaatcttttagaagtgctgctgcaaaaaaagaatcttgtttaaagtttgccatcttgtattgcttaaacaac

SEQ ID NO: 37583 - DNA, 144 bp, Homo sapiens
atacgactcactatagggcgaattgggccctctagatgcatgctcgagcggccgcagtgtgatggatatctgcagaattcgcccttagcgtggtcgcggccgaggtacgcaaaaagaaactgcaatagatgcttgtttctctca

SEQ ID NO: 37584 - DNA, 401 bp, Homo sapiens
  misc_feature 364, 365: n = A,T,C or G
acactactatagggcgaattgggccctctagatgcatgctcgagcggccgccagtgtgatggatatctgcagaattcgccctttcgagcggccgcccgggcaggtactggattctataggtccaccattaaaagctggtatgggacaccaatttatacacataagggttagattaaaattttaattttttggttgatattaaactgaaatttatataactgaggtctgaatcttaaaaaaagtaaatgataaaaatttaatatagttaactgttcactgatatgtctattcacttcatcataacctatatatttaattaaaaatcaaattatgagttctgcaaatttcagaatgcttatcaagnncaaattgccatttccagggtccatttaatttctttt

SEQ ID NO: 37585 - DNA, 386 bp, Homo sapiens
gactactatagggcgaattgggccctctagatgcatgctcgagcggccgccagtgtgatggatatctgcagaattcgccctttagcggccgcccgggcaggtaccagccctaccctgcttatttttaataatgcagagattacttactacactttctgaagccttattttgaaatttatttcacatttcagacatgtccataatttactgttgaggaaataaaacagcatgtagaacataattctatttatattaaaattacataggtatgtgtgtatacatacatgacagttcttttctccttctgagtatggtagggttgtagatgatttttactttttatttatacttattaatgttttgactgcttacagtgtcacttttgt

SEQ ID NO: 37586 - DNA, 144 bp, Homo sapiens
tacgactcctatagggcgaattgggccctctagatgcatgctcgagcggccgccagtgtgatggatatctgcagaattcgcccttagcgtggtcgcggcccgaggaccctcttgaggtaggaaatgctctgtgatggtaaataa

SEQ ID NO: 37587 - DNA, 387 bp, Homo sapiens
ggcgggcgatggatatctgctgaattcgcccttagcgtggtcgagggcgcggtccgccgggagaaaatgatagtttatatactgagaatacaaccactaagaagccgaaaagagaagatattctcgtgggggagaacaacggctgggaggggaggaagcatggccaaggcaaagaggtgggcattaataagaactgcttcttgctgccggcatatgaagaaggacgtgtttggttctccttactacatgattggcagtttcctgagacctctccagccatgctgaactgaatacagcgtgtttaagaccacagaacatctgcgtaggctgtaaatctcgttgaatgatggatgcaaagatggaagacagatggatagaggaaaagac

SEQ ID NO: 37588 - DNA, 177 bp, Homo sapiens
gcatgctcgagcggccgccagtgtgatggatatctgcttaattcgccctttcgagcggccgtccgggcaagttctgattatatcaggcccagtaaacataatgctacacagaacccattcttgaattttgatctctaaaatgataaaccttacttaggttagtaataagaatgttat

SEQ ID NO: 37589 - DNA, 552 bp, Homo sapiens
actactcactatagggcgaattgggccctctagatgcatgctcgagcggccgccagtgtgatggatatctgcagaattcgcccttagcgtggtcgcggccgaggtacttctatatctacaagggggtccgcaagacaatcccatgaggttggtagaacagagattctcatctccgttttaactgaggctgctgacttgagtaaaccaatagataaaaggatatacaaaggaacacagcctacttgtcatgacttcaaccacctaacagccacagcagaaagtgtctctctcctagtgggcttttccgcaggccaagtccagcttatagacccaatcaaaaaagaaactagcaaactttttaatgaggaaatggcaagttcctagcgtgcgtgagccaggacgggtttctgcgggtgttcaactttgactcagtggagctgcacggtacctgcccgggcggccgctcgaaagggcgaattccagcacactggcggccgttactagtggatccgagctcggtaccaagcttggcgtaatcatggtcatagctgt

SEQ ID NO: 37590 - DNA, 427 bp, Homo sapiens
agggcgaattgggccctctgatgccttgcctcaagcggccgccagtgtgatggatatctgcagaattcgccctttcgagcggccgcccgggcaggtacagtttcatatgccagttttactaggaaaaaaatatgaaaactattgttaattcaaatctaaatttatttaaaccctaaaacacatggttttgatggctgtaatttaaagtaagagctatcaaatgatgctgacaaaagaaaaaccttccaaaatacaaaagaaagagaactctattatttacttacctgtattaatgaagaaaaatataaataattccacaaaattgattgttttcctaaagagcttaaagattagagttaaaaattggttttgaaacagaattatccttgttatttttgctggagagaagggaggaaattcagaacca

SEQ ID NO: 37591 - DNA, 253 bp, Homo sapiens
  misc_feature 99, 100, 244: n = A,T,C or G
gtatacgactcactatagggcgaattgggccctctagatgcatgctcgagcggccgccagtgtgatggatatctgcagaattcgccctttcgagcggcnncgcccgggcaggtactctggcaattcacctttcaattcaaatatcctgtagagaacgcttcctctgagaagccactggatgtctgtatggtgcaggaaggtttaatgtgctggtctgtccaggttttttggttttgggtgtttnttttttttt

SEQ ID NO: 37592 - DNA, 82 bp, Homo sapiens
acgactcactatagggcgaattgggccctctagatgcatgctctgagcgtgccgtcaatgtgatgagatactatgcagtaat

SEQ ID NO: 37593 - DNA, 436 bp, Homo sapiens
tacgactcactatagggcgaatggtgcatgctagagcgaggcgtcagcgtgatggatatctgcagaattcgccctttcgagcggccgcccgggcaggtacgctggatagcctccaggccagaaagagagagtagcgcgagcacagctaaggccacggagcgagacatctcggcccgaatgctgtcagcttcaggaatgccccccgcgtactttatttttttttattttttttttagggaaattctttattgccaggagtgaaccctaaagtggctcacaagagtgccctatttctttcaattaactacaaggacaaacacatctcaaagttgagataagtgaccagtatgatttgccaaaattctaaagcgcactcaccatgaaatggataaaggttacctttggggatttgcactgcatgaattctgtgaaaagc

SEQ ID NO: 37594 - DNA, 384 bp, Homo sapiens
tagggcgaattgggccctctagatgcatgctcgagcggccgccagtgtgatggatatctgcagaattcgccctttcgagcggccgcccgggcaggtactacctcagctgggagaaatgttggaaatggtttaaacacattatcagattcatcttggaggcatagtcaagttcctagatcttcatcaatggtacaccaaggtggtgcattaccggaagtggatcaaggacaccatcgtggccaacccctgagcacccctatcaactccctattgtagtaaacttggaaccttggaaatgaccaggccaagactcaagccttcccagttctactgacctttgtccttaaggtgtgaggtccagggttgctaggaaaagaaatcagc

SEQ ID NO: 37595 - DNA, 417 bp, Homo sapiens
tatagggcgaattgggccctctagatgcatgctcgagcggccgccagtgtgatggatatctgcagaattcgccctttcgagcggccgcccgggcaggtacccctgttggtatctaggaagtaactagcttgcttttgattttacaggctcataggtggaagggacttgccttgtctcagatgagactttggactgtggatttttgcgttaatgctgaaaagagttaagactttgggggactgttaggaaggcgtgattggttttgaatagtgaggacatgagatttggaggggccaggggtagaatgatatggtttggctatgtccccacccaaatctcaacttgaaattgtatctaccagaattcccacgtgttgtgggagagacccagggggaggtaattgaatcatgggggcca

SEQ ID NO: 37596 - DNA, 341 bp, Homo sapiens
tatagggcgaattgggccctctagatgcatgctcgagcggccgccagtgtgatggatatctgcagaattcgcccttagcgtggtcgcggccgaggtacgcggggcctttctcgttccccggccatcttagcggctgctgttggttgggggccgtcccgctcctaaggcaggaagatggtggccgcaaagaagacgaaaaagtcgctggagtcgatcaactctaggctccaactcgttatgaaaagtgggaagtacgcggggactcacagagaaaaagtaaaagacccaacatggatgctggatagaccaggatccttccagctgaacaaaagtcagccaca

SEQ ID NO: 37597 - DNA, 387 bp, Homo sapiens
  misc_feature 354: n = A,T,C or G
gggcgaattgggccctctagatgcatgctcgagcggccgccagtgtgatggatatctgcagaattcgcccttagcgtggtcgcggccgaggtactatgcccccgtatgggcagggaccgccaatggtgcccccttaccagggtgggcctcctcgacctccgatgggaatgagacctcctgtatggcgaaggggggccgttactgatcttacttaatccagtctaataggtttggagattaaaccttttctcaacttgtgctgtttatatagccaagcttccgtcaataaggcttcattgtgactttaacaaacattatccttcccacatacccaggaactattggacatttatntttacatggggaaaaaattattttggaaataat

SEQ ID NO: 37598 - DNA, 136 bp, Homo sapiens
ccgccagtgtgatggatatctgcagaattcgcccttagcgtggtcgcggccgaggtacctgccatcactgattgtagcctggtgaggcctgttttacacttctgacctgtagagctgtaacataatacatttgggt

SEQ ID NO: 37599 - DNA, 356 bp, Homo sapiens
ctagatgcatgctcgagcggccgccagtgtgatggatatctgcagaattcgcccttagcgtggtcgcggccgaggtactggtctgtggcctgctaggatccagggtgcacagcaggaggtgaatgtaggatgagcaaacattactgcctgagctcactttctgtcagatcagcagtggcattagattctcataggagcatgaactttattgtgaactgcacatgcaagggatctaggttgcacactccttatgagaatctaatgcctgatgatctgaactggaacagtttaatcctcaactccagtccggggggaaaatgtttttcacgaaactggtccctggtgccaaaaagtta

SEQ ID NO: 37600 - DNA, 397 bp, Homo sapiens
  misc_feature 354: n = A,T,C or G
tatacgactcatatagggctgattgggccctctagatgcatgctcgagcggccgccagtgtgatggatatctgcagaattcgccctttcgagcggccgcccgggcaggtacctactccataaagttacgaagaacacataaaacctgtgaagcacttataatagtgccagaacattgtgagcacacatgagatgttcattggcattattattaagggcttatataaattcccaggtaatgcataataacagtagagactgtgacaagccctggcttccataaattgtcagcttcattttccctgtttcatttgatatgttattccattttatgctttgagacagctaaccatantaaaaaaaaaggaaagaaaaaagagagagaaagtagggacaac

SEQ ID NO: 37601 - DNA, 437 bp, Homo sapiens
  misc_feature 176: n = A,T,C or G
agggcgaattgggccctctagatgcatgctcgagcggccgccagtgtgatggatatctgcagaattcgccctttcgagcggccgcccgggcaggtacgatcttggctcactgcaacctctccctcccgggttcaagtgattctcgtgcctcagcctcttgagtagctgggattacnaggcgccgtgcccactgcgtcccggctaatttttgtaattttagtagagatggggtttcaccatgttggccaggctgatctcaaactcctgacctcatgtggtccacccaccttggcctcccaaagtgctgggattacaggcgtgagccaccacgctcagcctacaagcaattttttaaaaactgacacctattactgataaaattctctgtttaaaatcctatttactattttaaagataagtattagttttttttaaat

SEQ ID NO: 37602 - DNA, 217 bp, Homo sapiens
gggcgaattgggccttctagatgcatgctcgagcggccgccagtgtgatggatatctgcagaattcgccctttcgagtggccgcccgggcaggtacacgccatttaggagactataaaattcctttcatttatgccatgtgaacaagttgaggcggtgcatttccaaggtgaattcattgaattcaatgaagttactggcgtggatttctgcattaa

SEQ ID NO: 37603 - DNA, 180 bp, Homo sapiens
tacgactcatatagggcgaattgggccctctagatgcatgctcgagcggccgccagtgtgatggatatctgcagaattcgccctttcgagcggccgcccgggcaggacctctgcagagactccttgcgtatcccaagttgaaaccgcttatgtgctatgaagagatgatgagatcagtca

SEQ ID NO: 37604 - DNA, 442 bp, Homo sapiens
ctactatagggcgaattgggccctctagatgcatgctcgagcggccgccagtgtgatggatatctgcagaattcgccctttcgagcggccgcccgggcaggtacacctgcaaggctgtcaacagtcttggagaagccacctgcacggcagagctcattgtggaaacgatggaggaaggtgaaggggaaggggaagaggaagaagagtgaaacaaagccagagaaaagcagtttctaagtcatattaaaaggactatttctctaaaactcaaaaaaaaaaaaaaactcaagatagtaaaagcacctagtgtgatagattatcggttaggtcatttgtgggttgattcttcagaaacagcagttgatacctagcagcgttattgatgggcattaatctatgttagttggcaccttaaggtactagtgcagctagatttcattta

SEQ ID NO: 37605 - DNA, 399 bp, Homo sapiens
  misc_feature 391, 392: n = A,T,C or G
actactatagggcgaattgggccctctagatgcatgctcgagcggccgccagtgtgatggatatctgcagaattcgccctttcgagcggccgcccgggcaggtacaagttgggaatgagctggtcttcttcatggctcattcctgaacgaaagtgtgtgatacctacatctgtctgtttggaccacctggggtcggattgggggatgagcacatggcccattgagagcatgccgagtccacccaactccttaggggtgtagaacacaaccggggggaaccgacttggcatcttggagttgagtccaatcttgatacgtgtctggatttttgttctcacacctttcaccagttaagtccaagaagctcttggggtgggttcaccaccagccnntcccgaa

SEQ ID NO: 37606 - DNA, 337 bp, Homo sapiens
cgactcactataaggcgatttgggccctctagatgcatgctcgagcggccgccagtgtgatggatatctgcagaattcgccctttcgagcggccgcccgggcaggtacagggcacatccaccagcacccggtcataggtgtccccctccagttctccccatttcctgccatcccatgaggtaactcgaacttgatttccatccctgatctcttcaggcacatagctgggaaggatcttctgtagtctggctattctggacggggagagatcattggcagcaagtattgcggcaaccagccagttctgaagccaacgtctaagtgtcttttcccccag

SEQ ID NO: 37607 - DNA, 617 bp, Homo sapiens
ctatagggcgaattgtgccctctagatgcatgctcgagcggccgccagtgtgatggatatctgcagaattcgcccttagcgtggtcgcggccgaggtactgttccaagcacccaagtgcttgctttggcccttccattgacttaccatgccaccttggcaaactccttaattgctttgggattcatacaaaaaaccgatatacctgtgtagtccagctcatggcattgtaaggatcaaatggcatgctgtatgcaaaaggtctttggaatctatacacaaggctgtaaaactatgtcacactgtttggatggaaagaattctgtattcaggagccaaaatcagatattcagagacaaaaaaaggaagagatggctcctgcggatctatccctccacttccttgcatttctctacattttaaagtcatctcttagcactataaaaaggaaatccagcactttcacagctcctgacttgaacttccatatttttaatttagagacaaggatggtttaagaacttagaaagatgttgccctaccacccaaggaaaatgtctgacaggtttctatctttgattcacctactatttaatgaatattattcattattttaata

SEQ ID NO: 37608 - DNA, 438 bp, Homo sapiens
tatagggcgaattgggccctctagatgcatgctcgagcggccgccagtgtgatggatatctgcagaattcgccctttcgagcggccgcccgggcaggtactttttttttttttttttttttttttttttttatcttacactattaacactttattgaaaatatttctattgaaaagaactctggaaacacataaaaattttttggtaagaaaacaaaagcacatctttactaccagtgtgaattactacctgacaattatcaacttctcaaataagaacattaacctacttgtgattgaagaaagaattatcctgtctatggatgacataagcaacttggccaggacagaaccaatggatgaaaccacatataattccaatttggccagttaacttatgtaggtgaaatgaaacagttaactttattcattaatatga

SEQ ID NO: 37609 - DNA, 435 bp, Homo sapiens
atgaagtctgtagaggtgccaagagagctgcagatgcacagtcacctgctgaagacacatgttcagtccagaatggagaagatgatggacggaatcaagctagactgggccaccgcggaagctcttgccttgggttctttacttgctcaaggttttaatgttcgtctaagtggccaagatgttggtcgtggaactttcagtcagaggcatgcaatggtggtttgcccggagacggatgacacctacatccccctgaaccatatggacccaaatcagaaggggtttctagaggtcagcaacagccccctgtcagaagaggccgtcctgggattcgaatatgggatgagcattgagagcccaaagttactgcccctgtgggaggcacagtttggcgatttcttcaatggtgcccagatcatctttgacacattcatc

SEQ ID NO: 37610 - DNA, 490 bp, Homo sapiens
gtatacgactactatagggcgaattgggccctctagatgcatgctcgagcggccgccagtgtgatggatatctgcagaattcgcccttacgagcggccgcccgggcaggtaccaggtctgtaggctgatggaatagcacacggaaggtagtcagaaggtccaggtgaacactcagcaataggaggcacaggacataattcactttggatggagcatcctcagtttgcactgagggtctggacagaaactcaggtcttctaattcccagtaacagtgctggtggtagtgcttgctcagtcgatgtctctattctcacagcaaggtcaacagtcccaaaactcataaataaaaaaaaatctacctccagtgttactgccgcatcgtgacaagctctttcgggttccaggtccaggtcttgaaaatctggaaatctggagtccatggctgtggctacactgaaagttatctgccccaactattgcagaacact

SEQ ID NO: 37611 - DNA, 333 bp, Homo sapiens
agggcgaattgggccctctagatgcatgctcgagcggccgccagtgtgatggatatctgcagaattcgccctttcgagcggccgcccgggcaggtacttttttttttttttttttttttttttttttgtcctaaattgtttattaagtatgaattttacaaactttacttatattagcggtaacgggggggctggaaaagttttgcgccttttccaagctgcccggggagagccaccaatagtgtggtggaacctgtggccctttccaaggccacggcgtctttcggcctgcagatgtcagcccacgcatttgccctgggacttgtggactgg

SEQ ID NO: 37612 - DNA, 445 bp, Homo sapiens
tagggcgaattgggccctctagatgcatgctcgagcggccgccagtgtgatggatatctgcagaattcgccctttcgagcggccgcccgggcaggtacgcgggggggccgcacgctacgaggcccgcacacccagaaggtggagccccggccgggttacgaggaccacccagctgtctggagagatgaagaaaatgaggttcaaagagatgaagtctcttgcctaaagtcagtgacagaaagtgacagagctgggatgtgaatcctggtctgactctacagtcccacatggtagatggaacctccgagcaacacctaaacaaagggagttgatgcctccgaacagagtaatgtcgctggagacactaagcatcgtcggcccctggcaggagctccctaaatatgtgttggatggatggaagaaaggatggatagttcagagtacc

SEQ ID NO: 37613 - DNA, 196 bp, Homo sapiens
tatagggcgaattgggccctctagatgcatgctcgagcggccgccagtgtgatggatatctgcagaattcgccctttcgagcggccgcccgggcaggtactttttttttttttttttttttttaagatgttttgctcgtcgcctaggctggagtgcaatggcgcgatctcggctcgctgcaacctccgcctccctg

SEQ ID NO: 37614 - DNA, 466 bp, Homo sapiens
actatagggcgaattgggccctctagatgcatgctcgagcggccgccagtgtgatggatatctgcagaattcgcccttagcgtggtcgcggccgaggtacattattctgtatccacattctctgcatctgattggatccctagattttatttcattttctgtgtgacactctccacagatatatatcattggttgctgctttggaggttgaacgtccttctgggtgtccattgttagcccctacacagcacggaaaaactcactccgcgtttccaaatacaacccggctagtccccccgcgtactttatttttttttttttttttttttcttttttttaggtgcaaagattcactttatttattcattctcctccaacattagcataattaaagccaaggaggaggaggggggtgaggtgaaagatgagctggaggaccgcaataggggtaggtcccctggggaaa

SEQ ID NO: 37615 - DNA, 451 bp, Homo sapiens
  misc_feature 355, 408, 409, 419, 420: n = A,T,C or G
actactatagggcgaattgggccctctagatgcatgctcgagcggccgccagtgtgatggatatctgcagaattcgccctttcgagcggccgcccgggcaggtactttttttttttttttttttttttttatttaatcaaagactggtgaataaacataaatacagcacaattacttcagatcattcttcatattgtatacacacaaacccatgaacataatctgaaagaaacctgtagacagcaatgaaatgcatacagctttttcttccctcgctcaaaaaaaagtttaaacacacaaacttacaatctcatcagcacacacttctcttgtgacaaatgtattcagcacatanaataggtgggtgcaaagaaaactatttatgcttaacatttatgaataaccttnntgttaatgannaaaaacagaagcccagccattaatgatttaa

SEQ ID NO: 37616 - DNA, 311 bp, Homo sapiens
gagtcgacgcattcaatatagggcgacattagatgcatgctcgagcggccgccagtgtgatggatatctgcagaattcgccctttcgagcggccgcccgggcaggtactgatggagatagactcaaaacagttatttttttacaattaatctacaaagggaattaatattgttgacttttaaaacatctgctggatatattatatgcaattaatagtagttaagaatttattcatttggtagatatgtttatttggtttttggttgtcatcgatttacattgccactaataaaccatattgagaatttcta

SEQ ID NO: 37617 - DNA, 370 bp, Homo sapiens
cgctccagcggcgcgacagggtagatggatatatgcagaatttgcccttgccggccgggcaggtgcctggcactacatacatgcacaagcatgcatggctaattttaaaaaaatttttgtagaaatggaatcatgaaactcctgggctcaagtgatccttccaccttaacttcccagagtgttgagtgagattacagttatgagccaccatccctggccaataaaggtgtttttaatacctataataatattgcctgcaaggatgtttgataggtttcttgatatttcattctctcttgaaatgtttgctttctcaattttttatttttcataaaagctttactcaagaattaggatgaccactatgtta

SEQ ID NO: 37618 - DNA, 586 bp, Homo sapiens
acgactactatagggcgaattgggccctctagatgcatgctcgagcggccgccagtgtgatggatatctgcagaattcgcccttagcgtggtcgcggccgaggtaccagtgggctctccccgtgtcctttggtgttattggagctggtgtatgacagactcaaggaaattttttaaggaaaatgaagaagaaatcaacctttatggttctctttcattggaagaggagaataaggaaagaaatggcaggtagagagggagggggaaaggaatagaaatggcatgtctttgatgctgtggcttgtgtggggacaatgggaagagcacagcaggcacaacatatctgtgttagtgccacgtggtatctgttaagtatggccagagcctcacatataagtgaagagagttaagacaattcttgctctttgaacaataatagtctatagaatttctattggcaaaccatcccagacaacctgacctatcaaacaaaagcaaataatccctgtctcagaactgctggtctaaaagctagaaggggcatgataatggaaattgctagaaaagagagaatgctctactctctt

SEQ ID NO: 37619 - DNA, 342 bp, Homo sapiens
  misc_feature 14, 256: n = A,T,C or G
ctatagggcgaatngcgccctctagatgcatgctcgagcggccgccagtgtgatggatatctgcagaattcgcccttagcgtggtcgcggccgatgtacagaaaaagagagaagaagagaagagaaaatcagaatataagtcataccggctgcgagcccagctatataaaaagagagtgaccaatcaacttctggggagaaaagttccctgtgactgacacaagtttattttcctcagagccttggaattctattntatgaacctagagaagcagaatccttacttttgtgagtctggttgaataaagcttattctttgtccatgtgtattttagaaatagt

SEQ ID NO: 37620 - DNA, 443 bp, Homo sapiens
cgactactatagggcgaattgggccctctagatgcatgctcgagcggccgccagtgtgatggatatctgcagaattcgcccttagcgtggtcgcggccgaggtacagaaattattgctactatacttcactacaaagcttgtctatacagtatcatatgacctttgattatgaaaaaatcagaataaaaatctttagtgacataagccttacaatcgtatacaacattcacatggcaatattagacagttaagcacccaatacccatagttgacaaaatgtcccactgaccagcattcatttaaatacatccttcgtatagagggaggaaaaagagacagtgtcagctttccaaggcttgtcaaaaaaggattctcatgtactcaatgtcactaatggtaaatttcacatacactttaccataatttttaaaaagctttatta

SEQ ID NO: 37621 - DNA, 497 bp, Homo sapiens
gcagaattcgcccttagcgtggtcgcggccgaggtaccagggcagcaacccaatcagtgacatttgggctacccacgcgctgcggatcgtggctaagtatctgaagaggctgtcagaaatcccgatgatcttgaagcaaggtctcatatgcacttggcaagtgcttttgctagcatcggctttggaaatgctggtgttcatctgtgccatggaatgtcttacccaatttcaggtttagtgaagatgtataaagcaaaggattacaatgtggatcacccactggtgccccatggcctttctgtggtgctcacgtccccagcggtgttcactttcacggcccagatgtttccagagcgacacctggagatggcagaaatactgggagccgacacccgcactgccaggatccaagatgcagggctggtgttggcaggcacgctccggaaattcttattcgatctggatgttgatgatggcctaacagctgttggttactc

SEQ ID NO: 37622 - DNA, 364 bp, Homo sapiens
agggcgaattgggcccttagatgcatgctcgagcggccgccagtgtgatggatatctgcagaattcgccctttcgagcggccgcccgggcaggtacgatcttggctcactgcaacctctccctcccgggttcaagtgattctcgtgcctcagcctcttgagtagctgggattacaggcgcgtgccactgcgtccggctaatttttgtatttttagtagagatggggtttcaccatgttggccaggctgatctcaaactcctgacctcatgtggtccacccaccttggcctcccaaagtgctgggattacaggcgtgagccaccgggctcagcctacaagcaatttttttaaaaactgacaccta

SEQ ID NO: 37623 - DNA, 407 bp, Homo sapiens
  misc_feature 319, 320, 383, 384: n = A,T,C or G
gcggccgccagtgtgatggatatctgcagaattcgccctttcgagcggccgcccgggcaggtacgatcttagcatcagcagggcagcagcgttctcggatgctagctactctttttaaggatgaaaggtgccagcaacttgctgcctatgggatcctagagaaaatgtatctagataggatcatcagaggaaatcaacttcaagaatttgctgccatgctgatgcctcaccaaaaagcaactacagctgatggttccagcatcttggacagagctgttattgaacacaatttgttgtctgcaagcaaattatataatannatattaccttcgaagaaactttggagctcttttagaagatccctgcaggctaaggggcggaannaagatagcaatctcaaatggata

SEQ ID NO: 37624 - DNA, 427 bp, Homo sapiens
tactatagggcgaattgggccctctagatgcatgctcgagcggccgccagtgtgatggatatctgcagaattcgcccttagcgtggtcgcggccgaggtacatgctgtatgattccatttttataacatgctactaatgacaaaactaaagatggaaagatttctgattgccaagggttagggctgaggagaggttgtgactataaacaaggagcatgagggagtttgcattgatgcaacattctgaatctcgattacggtggtggtgacatgaatcaatatatgtgttaagatttcttaaagctacatataaaaaacaaacaaaaatgcatgcatgttaaaactggtgatttccaaataaattctgtagttaacagtattgtaacaatttcactttcctgtatttggtaacgaaccatgcttatgt

SEQ ID NO: 37625 - DNA, 390 bp, Homo sapiens
atacgactcactatagggcgaattgggccctctagagcatgctcgagcggccgccagtgtgatggatatctgcagaattcgcccttagcgtggtcgcggccgaggtacctgtgagcacacactcacggccaccccactgacacgtgcagcaccacacacccacactcactcacacccacacccacacgcacacccactacacacacacacacacacacacacacacggctgtgacagcccaagacccacaccctggacccctggaatgtctctggaccagaaccgaacagctggatccacagtaccttcccgggcggccgctcgaaagggcgaattgcagcacactggcgggcgttactagtggatccgagctcggtgccaagcttggcg

SEQ ID NO: 37626 - DNA, 428 bp, Homo sapiens
actatagggcgaattgggccctctagatgcatgctcgagcggccgccagtgtgatggatatctgcagaattcgccctttcgagcggccgcccgggcaggtacgcgggggatcgaaattaacaccaggtggtgaatagagcccctcctaaggttgctcaggataaatcatttattaaataggtctgcttatcaggaggggcgtgaaggctcccaaaaggaaatgctggcacctgggcccagaagccagggcctctaactcctggggttgattccttcagtgaagttgcaccctacaaagggaatatggccaaagcggcactcaactgaaggctgatatcaggcgattagacagccatgcattctgcgtttgtctggaatggattgtagagagatggacttatatgaggactaccagtccccgtttgatt

SEQ ID NO: 37627 - DNA, 141 bp, Homo sapiens
ttgggccctctagatgcatgctcgagcggccgccagtgtgatggatatctgcagaattcgccctttcgagcggccgcccgggcaggtacacaagcgtgctgaagtggttggagaagagttcagtgagggacatttcatggg

SEQ ID NO: 37628 - DNA, 394 bp, Homo sapiens
tgggccctctagatgcatgctcgagcggccgccagtgtgatggatatctgcagaattcgccctttcgagcggccgcccgggcaggtacccttactctgacaaccttatgagtgagggggacagaaattaaagttcagggcccatataaggtgatgaacctaacaggagaccctccacacaataggctgagactcccaaatactttcacctttaggatgataatgaatcagaggtggaagaaccaatgtaaaaaaacaggcaagtttagaattgccccagtgatctaaagaatcttaagcactgagcttcctttagggtgtccccacactagtaatgcctccaggtgacagagaaaataaaatgtaaatacttttcatggaaaagtaatttcatt

SEQ ID NO: 37629 - DNA, 411 bp, Homo sapiens
tatagggcgaattgggccctctagatgcatgctcgagcggccgccagtgtgatggatatctgcagaattcgccctttcgagcggccgcccgggcaggtacatgggactacaggcacgccccaccatgcccagctcatttttgtatttttagtagagacagggtttcaccatgttggccaggatgatcttgatcttcttgacctcatgatccgcccctcttggcctcccaaagtgctgggatcacaggcgtgagccaccacacctggccctctatttattctctttaaagagagagaaaactatgagaggccaaaattatttaattaaatctttaccttagcacaaggggaaaaaatggaatttgcctaatataggttgatgaagcatacacaatgaacagaaacaatcaca

SEQ ID NO: 37630 - DNA, 362 bp, Homo sapiens
tggcgccctgtgcctgcattgctgcatgctcgagcggccggcgtgtgatggatatctgcagaattcgccctttcagcggccggcgggcaggtactttttttttttttttttttaatggacaagcacaatgtgctttaaaactggttttaaggagatgagctgagaaagaaatgtggaatggagtatatttgaggaggacaaaacataacttcacttttgaacagaaaccactctagcttgcccgcatgggatgtaaaccaagagagtagaaatatacccatcttattttaagttggggtttatggcatcgctcatatctgtaaaagcacttacaaactctttaaagaaaattgggaaactac

SEQ ID NO: 37631 - DNA, 434 bp, Homo sapiens
cgactactataggcgaattgggccctctagatgcatgctcgagcggccgccagtgtgatggatatctgcagaattcgcccttagcgtggtcgcggccgaggtactcttacccttgtccctctcctaaagggagcacaaggaaactgaagagactgaaaaagaagagagtttgtagctggaaaaaaaatagggatagcaaggaaacccagaactgcattcccctaagtggggccatcccatgtgattgaattgtccatagcttgcctatggtgagaaatgtgcatgctccgtgagctggtctcttgaaacaggacttatgcttcctctatattctggttaaattttccaaacacataagttcactgagcacagatttcttatccagagacaagtagaatctaaccgcagactgttggcagagtttccaggcactt

SEQ ID NO: 37632 - DNA, 277 bp, Homo sapiens
agggcgaattgggccctctagatgcatgctcgagcggccgccagtgtgatggatatctgcagaattcgcccttagcgtggtcgcggccgaggtactttttttttttttttttttttttttttttgagaccctcatcaatagatggagacatacagaaatagtcaaaccacatctacaaaatgccagtttcaggccggggggtttaaaacccaaagtgatgttttggatgtaaagtgaaatattactttgggcggatgaagcacgatagtgaggtaaa

SEQ ID NO: 37633 - DNA, 439 bp, Homo sapiens
tactatagggcgaattgggccctctagatgcatgctcgagcggccgccagtgtgatggatatctgcagaattcgccctttcgagcggccgcccgggcaggtaccgtaagttttcttccacatattttgggaaaaaactaaaaaaagaaaaaggacttcctttttgtggacatctacagatgttagggttgccagaagcaaatcccaggaatgagatcagtattttcattgcatcttaaatgtataaccttcctgtgggagttcagtttgtctgtggttaagtgggtgtgcttaatcattctcgaaattgtgatcagatgaaataaaaaaaaaatcttgatgcaataacagtggttttgccacttctggttgtttgcgatggatctgtcccatgtcagtctgggggttttattcagcttgtgttgctaccagcagttcac

SEQ ID NO: 37634 - DNA, 193 bp, Homo sapiens
ctatagggcgaattgggccctctagatgcatgctcgagcggccgccagtgtgatggatatctgcagaattcgcccttagcgtggtcgcggccgaggtacttttttttttttttttttttttttttttttacttttttttaaattttactttacgttctgggatacgtgtgcagaatgtgtaggtttgttacac

SEQ ID NO: 37635 - DNA, 301 bp, Homo sapiens
gcatctccatgcctcatctgctcaatctccaaacttggagacccctcccttccacctctaatgactgaaggaaatggaagtgggtcccacaacttccatcagccgttttactctaggtctccagagcagccttcagtcaaacggctgtgggggaggcaacggtctctgcgtcagggaccagcaagcaggagagcaggtttccaagaaacagctggagacagaaaggatggaccagggatgtctaatgcctcactaagtcgtatttcccccatccccaatttctcctggctactgacaaaat

SEQ ID NO: 37636 - DNA, 259 bp, Homo sapiens
atagggcgaattgggccctctagatgcatgctcgagcggccgccagtgtgatggatatctgcagaattcgcccttagcgtggtcgcggccgaggtactttatagtttaggctggacattggaaaaaaaaagccagaacaacatgtaatagataatatgattggctgcacacttccagactgatgaatgatgaatgtgatggactattgtatggagcacatcttcagcaagagggggaaatactcatcatttttggccag

SEQ ID NO: 37637 - DNA, 432 bp, Homo sapiens
cgactactatagggcgaattgggccctctagatgcatgctcgagcggccgccagtgtgatggatatctgcagaattcgcccttagcgtggtcgcggccgaggtacactattattgagcttatgaataaactctgcacttcagcctgggcaataaagcaagacccagtctctagaaaaaaaaaatgattaggtaaagaaaagaaatcaaattttcacaatgggagaatgtggttttactatctgctaggcccctcccatcaattcttattaaattctcaaaataatcctttgaaaagggagtataattacattttacagtgacctgaaccttacccaaacaagtgggaaagccaggagccaaactatcaggctccaaagcttttttttagtgcatcacaatgacaaagggtggttttctttcacccaagaatg

SEQ ID NO: 37638 - DNA, 411 bp, Homo sapiens
tatagggcgaattgggccctctagatgcatgctcgagcggccgccagtgtgatggatatctgcagaattcgccctttcgagcggccgcccgggcaggtactagttgcttcctgcgctggatcggaaacttagatgatgaactacatgctattatagctggatttttggcaggtatatcaatgatgttttataaaagcacaacaatttccatgtatttagcgtccaaattggtagagacaatgtatttcaaaggcattgaagcagggaaggttccctattttcctcatgcagatactatcatctattccatctctacagcaatttgcttccaggcagctgtcatggaagttcagactttgagaccatcttactgggagttccttttaagactcaccaagggcaaatttgctg

SEQ ID NO: 37639 - DNA, 299 bp, Homo sapiens
acgactcactatagggcgaattgggccctctagatgcatgctcgagcggccgccagtgtgatggatatctgcagaattctcccttagcgtggtcgcggccgaggtacgcggggggagtagcaagtggccatggggagcctcatcggtctgcgcctggcagcaggaagctgttttaggttatgtgaaagagatgtatcctcatctctaaggcttaccataagctttgatttgaagagaataaatggattttgcacaaaaccacaggaaagtcccggagcttcatccctcacttacaacaa

SEQ ID NO: 37640 - DNA, 628 bp, Homo sapiens
actatagggcgaattgcgccctctagatgcatgctcgagcggccgccagtgtgatggatatctgcagaattcgccctttcgagcggccgcccgggcaggtactgttcctgcctcttgacctcaccaagcctcagcttcctcgcctgttaaatggatacaattgtcgtcattatcatctgttgagaactccctaaaatgccagctgagcataggcacagaagtttaggtgtttggaccaaggtcacacaactgatacaacagtagcttcttcacagacttggcacttctccagaaggaggaggacaaaatgacgaagtctaaggaggcagtgacattcaaggacgtggctgtggtcttctctgaggaggagctgcaactgctggaccttgcccagaggaagctgtacctcggccgcgaccacgctaagggcgaattccagcacactggcggccgttactagtggatccgagctcggtaccaagcttggcgtaatcatggtcatagctgtttcctgtgtgaaattgttatccgctcacaattccacacaacatacgagccggaagcataaagtgtaaagcctggggtgcctaatgagtgagctaactcacattaattgcgttgcgctcac

SEQ ID NO: 37641 - DNA, 428 bp, Homo sapiens
ctatagggcgaattgggccctctagatgcatgctcgagcggccgccagtgtgatggatatctgcagaattcgccctttcgagcggccgcccgggcaggtactgtatttctgcaagtctaagacaccactgctattaagatacaccagcactttataaatcactaagcaatgaaaaaattgttccaaatggtttgacacaccattgattataagatgcattgtcatttcagaggtctttaaaatgcctcaaaaatgtgttttagaagtgacaaaatggaaataaaagtttagtatcatcacacactgacacttttcattgttctctcctgcaataaaatttataggatttcattatggatacttagaacataacccatttataagatttctctccatatatatttctataactgctatactcttcacta

SEQ ID NO: 37642 - DNA, 315 bp, Homo sapiens
gggcgaattgggccctctagatgcatgctcgagcggccgccagtgtgatggatatctgcagaattcgcccttagcgtggtcgcggccgaggtactccagccagggcaagagagcgagaccctgtctcaataaataaataaataaataaataaataaataaataaataaataaaaaaaaacaaagttgattaagaaaggaagtataggccaggcacagtggctcacacctgtaatccttgcattttggaaggctgaggcaggaggatcactttaggcctggtgtgttcaagaccagcctggtcaacatagtgagac

SEQ ID NO: 37643 - DNA, 314 bp, Homo sapiens
ctatagggcgaattgggccctctagatgcatgctcgagcggccgccagtgtgatggatatctgcagaattcgccctttcgagcggccgcccgggcaggtacttttttttttttttttttttttttttaagtcttcaaatattttttattggaaggccatgcattgccttcatttattgtatttcaaatcactgtaccacaccccctggcccccatattcttcccattgcataagcatgaggtgtatacagcaatgcaagaataggtaactccagtccaagataagaaaatagaatggattttcttggttgtgag

SEQ ID NO: 37644 - DNA, 302 bp, Homo sapiens
aatactatagggcgaatagggccctctagatgcctgcttcagccggccgccatggtgatggatatctgcaaaattcgccctttcaagcggccgcccgggcaggtactttattttcaaaacactcatatgttgcaaaaaacacatagaaaaataaagtttggtgggggtgctgactaaacttcaagtcacagacttttatgtgacagattggagcagggtttgttatgcatgtatagaacccaaactaatttattaaacaggatagaaacaggctgtctgggtgaaatggttctgagaaccat

SEQ ID NO: 37645 - DNA, 257 bp, Homo sapiens
ctactatagggcgaattgggccctctagatgcatgctcgagcggccgccagtgtgatggatatctgcagaattcgccctttcgagcggccgcccgggcaggtacacacacacacacacacacacacacacacacccctgctcaacagaggtttagtttacagtctctgaactaaagtagtaacctcccaaattgttttttctaataagctgagattcccatttctcttaaggagaagccacccatgagatgtctttt

SEQ ID NO: 37646 - DNA, 630 bp, Homo sapiens
ctatagggcgaattgggccctctagatgcatgctcgagcggccgccagtgtgatggatatctgcagaattcgcccttagcgtggtcgcggccgaggtacctttctctttggcttctttctttttctggtcattttccttcacacgtttcaggaagctatctcggctcttagagtgcttaatgtgctcaatacgcacattaattctcttggcaagaatcttgcccttaacttgtttgtttacaacaatgccaacagcatgctgggtaacattgtagactcttccagttttgccatggtaacacttgtggggcattcctttttgaacagtacccaatagttatcttttctgctcctctcccaaggaatattctgtaaccatctaagaacaacttcagttgataaactggtcaaaaacttaaatctatagaccttgctataaaattaattttgttaatattgagtttacttttttaacttatctgtatctgattccaaggatcccttagttttagcaatttttgccatcatttagcattaattaaatacaaacttgtttaagtaaataatgtgttttcctccaagaagcactcagaatgcatcaggtaactggaaacaaatacatatcatgat

SEQ ID NO: 37647 - DNA, 409 bp, Homo sapiens
atacgactcactatagggcgaattgggccctctagatgcatgctcgagcggccgccagtgtgatggatatctgcagaattcgcccttagcgtggtcgcggccgaggtactttattgtattccaatttaaaaaaacaaaattaagtctatattttaaaaactctgacaatagcaagatatttaatgaactctacttcatatctagttcatttttttttctggtttgaaaaaaagatcagctttccctgaataaacaaaaatgaatgtaaataaacttgaaaatacaaaaccataatttccaaaaacgaaatgaatgggccaacagtaaaatgcacaatgagccacaactgccctggtatttaagaaaataaaggtcaactgtgggtcataaagaagtatcaacttttaaa

SEQ ID NO: 37648 - DNA, 187 bp, Homo sapiens
tagggcgaattgggccctctagatgcatgctcgagcggccgccagtgtgatggatatctgcagaattcgccctttcgagcggccgcccgggcaggtacttttttttttttttttttttttttggggcattcacctgaatagtctgggaactttcacctattttatttagggcttctttttctttttt

SEQ ID NO: 37649 - DNA, 436 bp, Homo sapiens
ctactatagggcgaattgggccctctagatgcatgctcgagcggccgccagtgtgatggatatctgcagaattcgccctttcgagcggccgcccgggcaggtaccacaaggagccactgggtttctcatttgcatggctacattggggaccatgctgttcagtgcaatcagtaatatagggagaggagcagggaggtgaaagaaagagaagataatgagttggattttgaacctcttgagctttaaatatctaatgttcatctaaagcaatatagcccataggcagcatctattggaaattaataaaaataagggtctaggcattcaggttagtggtggggatggaagaaaagacttgagagtcgttgaaattcttgtggggaagtccaaagcaacagagcagagagaggattggtaagcgatgtgttggaaaaaa

SEQ ID NO: 37650 - DNA, 429 bp, Homo sapiens
actactatagggcgaattgggccctctagatgcatgctcgagcggccgccagtgtgatggatatctgcagaattcgccctttcgagcggccgcccgggcaggtacatttcagtcatttagatttttttcagagtgaacatgacagccattaattttattagtctaaaaaaatgacttattctactctaaaattgtgctagaatttgaaattattttagcatatcctgtccgtctaggtccctctatatcaagggatttcatttttagacattcctttccacccacccctgtgccccccttggatgtaacaaggaaaaaggaatgtctcttctgtttaaaaaaaaaaaattctgagaaacctgattgcagaaatgagtgcttaaaatttataataattaaccaacataatgaaatgtggtttttaaagat

SEQ ID NO: 37651 - DNA, 482 bp, Homo sapiens
cgactcactatagggcgaattgggccctctagatgcatgctcgagcggccgccagtgtgatggatatctgcagaattcgcccttagcgtggtcgcggccgaggtactttatttttattgtgtttttttttgtttaatattttatgattggttttatgatttttgtttttttaaggtagtttcggaaaaggtttttgattttaaactttatattgggggggaaacagcgcaatatgttattttcttttaaaaaaaaaggattaagggggggggattaatgaaaaggggaaaggggggaaaaaataaagaaaaatggggggggaagtttactgttttgttcccaaaaaaaaagatatggggggcctagaatttaaaaagaaaaggtaaaacgggaaattggaacaggggggggggaaaaaaaaggttaaaaaaaaaaacccttaaagggaggggttaaaaaagggggaaccccttggggggggg

SEQ ID NO: 37652 - DNA, 345 bp, Homo sapiens
  misc_feature 335: n = A,T,C or G
tacgactcatatagggcgaattgggccctctagatgcatgctcgagcggccgccagtgtgatggatatctgcagaattcgcccttagcgtggtcgcggccgaggtacagccacttactcttaaagagactgctgaaagttttggaggcccaccaaaagaagaaatgggaaatgaacacatcagtgtccaccctgaaaactcagactgtatccaagcagatgttaactctgatgattacaagggtgataaagtataccatccagaaacaggaaggaaaaacgagaaagagaaagttggaaggaagggcaagcatctgttgactgttgatcagaaancgtggagagc

SEQ ID NO: 37653 - DNA, 442 bp, Homo sapiens
  misc_feature 401: n = A,T,C or G
tacgactactatagggcgaattgggccctctagatgcatgctcgagcggccgccagtgtgatggatatctgcagaattcgcccttagcgtggtcgcggccgaggtacacaggccgggcacagtggttcacacctgtaatcccaacactttgggaggctgaggcgggtggatcacaaggtcaggagatcgagaccatcctggccaacatggtgaaactctgtctctactaaaaaatacagaaaattagccagtcatggtggcacgttcctctagtcccagctactcgggaggctgaggcagaagaattacttcaacatgggattgggaggtttgcagttgagccgagatcgcgccactgcacttccaagcctggttgacagaagcgagaaccccattctcanaaaaaaaaaagtttgttatgtggacaggctaaaccataata

SEQ ID NO: 37654 - DNA, 318 bp, Homo sapiens
actcactatagggcgaattgggccctctagatgcatgctcgagcggccgccagtgtgatggatatctgcagaattcgccctttcgagcggccgcccgggcaggtactttttttttttttttttttttttgggggcatcagagtgtggcacagaaagttataaaactatagccagtagtttgagaccagtctgaaaaatgaagaccccccccgccccaccatttttataacataaaaataagacaattagccaggcacattgattcatgcctgcagttagtcaggagactgaggtgagaggatgcttgagcctgaaagg

SEQ ID NO: 37655 - DNA, 418 bp, Homo sapiens
ctatagggcgaatcgggttctctagatgcatgctcgagcggccgccagtgtgatggatatctgcagaattcgcccttagtgtggtcgcggccgaggtacaggtagatttttccgtccctcattaatagtgccttcttaattaatacagactggtgttagctataacaaaactccagtaaggccaaagaatcccaagttctttgtggaaaaaaaaaaaaatcttttagggtcagattttcccttctaatatcattgaagatgatgttgcattgatttattcataaagtattttaactataggaactctagaagataatggataggcaagtgattttttttaaatatggttggcgtaagttgtattttgaaattcacttattttaaaatcgaagaggattgtaatcatggaaatagaatg

SEQ ID NO: 37656 - DNA, 412 bp, Homo sapiens
ctactatagggcgaattgggccctctagatgcatgctcgagcggccgccagtgtgatggatatctgcagaattcgccctttcgagcggccgcccgggcaggtacatgggactacaggcacgccccaccatgcccagctcatttttgtatttttagtagagacagggtttcaccatgttggccaggatgatcttgatctcttgacctcatgatccgcccctcttggcctcccaaagtgctgggatcacaggcgtgagccaccacacctggccctctatttattctctttaaagagagagaaagctatgagaggccaaaattatttaattaaatctttaccttagcacaagggaaaaaatggaatttgcctaatataggtgatgaagcatacacaatgaacagaaacaatcaca

SEQ ID NO: 37657 - DNA, 430 bp, Homo sapiens
agggcgacttgggccctttgatgcatgctcgagcggccgccagtgtgatggatatctgcagaattcgcccttagcgtggtcgcggccgaggtacattcccaaaagaaagtagtgttataggaaatccaaatgcacttcagtgattcactcctgaaaagcagcctgggtatgttggcagattttgtttgcatttgtcttgcgtatttaaagtctcaggaaatctagtcttggtccaaaacactggagaaaaaaataacaccagacaaaacacatttgagtaacttgaagtagcagcatagaataggcccaactaagaagttggaggggcaaagagaaagccgacagaatcagcttctcctggaaggtgaaagcatcaagttctatttatggtagacagagggtccttatttgcttgtccggggtgtctatg

SEQ ID NO: 37658 - DNA, 413 bp, Homo sapiens
tacgactcactatagggcgaattgggccctctagatgcatgctcgagcggccgccagtgtgatggatatctgcagaattcgcccttagcgtggtcgcggccgaggtacagtttttaactgaatgtgtattgcttttgccccattataaagttgaaaaaccataagtcaaaccattgttaagtcggactgtttgtgttacatatatttgggattttttagtggccctttttaaaaaagctgtttcttatttctgatcattgtgagtggggatagatgtgggaagaaccatgtctctactaaaaatacaaaaaatagccaggcttgttggcacacacctatggtcccagctactcgggagaccgaggcaggagaatcacttgaaccgggaggcagagggcagatcatgccactgt

SEQ ID NO: 37659 - DNA, 292 bp, Homo sapiens
atagggcgaattgggccctctagatgcatgctcgagcggccgccagtgtgatggatatctgcagaattcgccctttcgagcggccgcccgggcaggtacaggctatctatgtgcctgctgatgacttgactgaccctgcccctgctactacgtttgcccatttggatgctaccactgtaccattggtagttgtttatgaaattaccagatattcataaatgtgacaaatgaacagcaggattatgaattatcaaaggaaaaagtatttgctgaggtgaaaaaatctgatgtt

SEQ ID NO: 37660 - DNA, 373 bp, Homo sapiens
atacgactcactatagggcgaattgggccctctagatgcatgctcgagcggccgccagtgtgatggatatctgcagaattcgcccttagcgtggtcgcggccgaggtacgcgggggaaaatgatgtcagaaactttaaatttttaaaaaggcttctagttagctgctttaaatctatctatataatgtagtatgatgtaatgtggtcttttttttagattttgtgcagttaatacttaacattgatttattttttaatcatttaaatattaatcaactttccttaaaataaatagcctcttaggtaaaaatataagaacttggtatatttcattctcttatatagtattcattttcctacctatattacacaa

SEQ ID NO: 37661 - DNA, 385 bp, Homo sapiens
cgagcggccgccagtgtgatggatatctgcattattcgccctttctagcggccgcccgggcaggtacaaacgtggcatctgaatagaagcttagctagagaagtggagttagagtccctattttaatgaactacatatatttttcaatcaaaatgtgtaattatttaattatctagcctgctcagtaatcataactctccaacttcttcaaagggcctttattcaatatgttaccactcatatggtcattacttggtaagtgttttatattttgaatttcttagatgctttcagtgtatgtgctagtgttttattaatattaaaaatttttgtttacctatatatcaagctgctgcaaatggactaccttattttaaaagtttag

SEQ ID NO: 37662 - DNA, 287 bp, Homo sapiens
gggcgaattgggccctctagatgcatgctcgagcggccgccagtgtgatggatatctgcagaattcgcccttagcgtggtcgcggccgacgtacgcggagctttttcgcaacgggtttgccgacagaacacaggtgtcgtgaaaactacccctaaaagccaaaatgggaaaggaaaagactcatattaacattgtcggcattggacacgtaaattcgggcaagtccaccactactggccatgtgatctataaatgcggtggcatcgacaaaagaaccattgaaaaat

SEQ ID NO: 37663 - DNA, 399 bp, Homo sapiens
  misc_feature 391: n = A,T,C or G
tagggcgaattgggccctctagatgcatgctcgagccggccgccgtggtaatggatatttgcaaaattcgccctttcgagcggccgcccgggcaggtacgcactgtgctgctccctaaatctgggggtgtggtggagcgctccaaggacttccggcgggaatgtagggatgagcgtatccgtgagtatttttatggattccgaggctgtttctatccccatgccttcaatgtcaaattttcagatgtgaaaatctacaaagttggggcacccaccatcccagactcctgtttacctttgggcatgtctcaagaggataatcagctcaagctggtacctcggccgcgaccacgctaagggcgaattccagcacactggcggccgttactagntggatccg

SEQ ID NO: 37664 - DNA, 408 bp, Homo sapiens
tacgactactatagggcgaattgggccctctagatgcatgctcgagcggccgccagtgtgatggatatctgcagaattcgccctttcgagcggccgcccgggcaggtacttttagtagagacagggttttaccgtgttacccaggatagtctcgatctcctgacctcgtgagccgcctgcctcggcctcccaaagtgctgggattacaggcatgagccaccgtgcctggccacgtccctattttagaaatgagaggagtgactgcacataggaaaatgccacttttagcaattcaaagtggaaaaacttcttttatataaaaattatcccaactcccaccccttggctctcagtgttgcatctcccacagaggtaaagttgtgccattttcccacggctttaaacaaa

SEQ ID NO: 37665 - DNA, 530 bp, Homo sapiens
ccctctagatgcatgctcgagcggccgccagtgtgatggatatctgcagaattcgccctttcgagcggccgcccgggcaggtaccagtttttgagttttcagttgttcgagtttcagatgttttcagttcatttgggtatataccacggagtggaattgctggttcacatggtagctctatattctactttgtgaggaattgccagactgttttccacggaagctgcaccattttacatttccactggtaatttatgagggttccagtttccccacatcttcaccaactctagttattgttcatgcttatggccatcctagatagtgtgaagtagcatctcattgaggtcttctcttccattttgtagaacagaattttgacctacaccaggcagggcagagaccagagtcagtaccccttgaggagcaatctgtggttgtgataatcaccaccttgcgatgaacatggctggtgagctgcagagcagctgatttgactattggggatggttctaagctggatgtgatac

SEQ ID NO: 37666 - DNA, 353 bp, Homo sapiens
actactatagggcgaattgggccctctagatgcatgctcgagcggccgccagtgtgatggatatctgcagaattcgcccttagcgtggtcgcggccgaggtacttcagatgtcttgctcatactaacagactgactgctttagggcatgcatgtaacacagcctccaaaagccttttttagaagagggcaacagctcttcgaatctgcttgcgttgcttttaaagtctggccctccatgtctgctgctctcgggaaattcacataaccagatgcatttctccttacaaacaagcgaagcagggtggctcacagagtaatacccacattcaaattgccatcaatgaccgaccta

SEQ ID NO: 37667 - DNA, 337 bp, Homo sapiens
gactactatagggcgaattgggccctctagatgcatgctcgagcggccgccagtgtgatggatatctgcagaattcgcccttagcgtggtcgcggccgaggtactgagaactgaaatgttggagtgcctacgagacagtgattttcttgccaaacttcactgtattcgacaggcttttcaggtaattctttcagaatcagctaacacgatattcctcgctgagagcggaaggaaaatcttatcagctttaattgtgaaagcacgaaagaatccaaagaagtttgaagatgttgtcgatgaagtgatctattttttagagcagaccgatcactggggt

SEQ ID NO: 37668 - DNA, 386 bp, Homo sapiens
  misc_feature 235: n = A,T,C or G
cgagcggccgccagtgttatggatatctgcagaattcgccctttgtagcggccgcccgggcaggtacttaaaaggttcattttatccaactccccaaagcatgctttgcaggaatgatgaggcgagagcactattagaatagcttgtgcagtgctgtaatacaaaaatgtattttgaaagctattgagtgaccattaaatactgtttctataaaaaatggttttggtgtatttgntgacagacacttaatccactacatttaataaacagggccattggggtgtaccaagatgacatatctgaggttcttcccacccttacagaagcaggagtcagaaccagattaactgactgttggcaagaggaaacgaaatgaagatgatgag

SEQ ID NO: 37669 - DNA, 259 bp, Homo sapiens
cgactactatagggcgaattgggccctctagatgcatgctcgagcggccgccagtgtgatggatatctgcagaattcgcccttagcgtggtcgcggccgaggtactctgggagtgatgatgatgatgattttaacaaacttcctaaaaaagctaaagggaaagctcaaaaatcaaataagaagtgggatgggtcagaggaggatgaggataacagcaaaaaaattaaagagcgtgcaagaataaatccttctggtgaaa

SEQ ID NO: 37670 - DNA, 391 bp, Homo sapiens
acgactactatagggcgaattgggccctctagatgcatgctcgagcggccgccagtgtgatggatatctgcagaattcgcccttagcgtggtcgcggccgaggtactacatatgcagaatctgatacaatgttaatagactgattaaaatcttgttaacactgtaatgacggcaaccaactctgctctttgagtcaagtgatactgagttttgatgactcattcttttggcccggtgtaagccacttttccattgctggaaccatcagtaaacactgccagagcattttttaaaggcttatgtttggtaactttaggtaaaatccaagtagtcaattttaaaaactggaagatttttgttttggggtaacgattgtcaataattcccacaa

SEQ ID NO: 37671 - DNA, 295 bp, Homo sapiens
acgactcatatagggcgaattgggccctctagatgcatgctcgagcggccgccagtgtgatggatatctgcagaattcgccctttcgagcggccgcccgggcaggtacaagtgaaatatttaaataggaatctgaaacaaaacgaattcaatctgatcaaatccacaattaattgaagttttcattttattcaattgtgattaaaatagcagacactgtttcatccaataagccaatgatattagtttaggagaaatgatctgcctggcttgtgctagacaaagaacagttacct

SEQ ID NO: 37672 - DNA, 425 bp, Homo sapiens
agggcgaattgggccctctagatgcatgctcgagcggccgccagtgtgatggatatctgcagaattcgccctttcgagcggccgcccgggcaggtactttttttttttttttttttttgtttttttttattttcactttaacaaatctactttaattctaaaagaaaattattctagaactggcagttatacacaacaaacttttatgtttcttttatagggatttttctaataaaagtttatttgggtatgggcaatgcataactttatcttagatatgaatcctaacaggatgaaaatacttttttgcaactactttatgcttatgaaaggggtgaacttgcaatgtcctcctgtcttaaacccaagttgacagtgccctctcaaaacttttcataaataatgacctagtttcatttaaaaaa

SEQ ID NO: 37673 - DNA, 110 bp, Homo sapiens
gcgattgggccctctagatgcatgctcgagcggccgccagtgtgatggatttctgcagaattcgcccttagcgtggtcgcggccgaggtacctttttttttttttttttt

SEQ ID NO: 37674 - DNA, 438 bp, Homo sapiens
tacgactactatagggcgaattgggccctctagatgcatgctcgagcggccgccagtgtgatggatatctgcagaattcgcccttagcgtggtcgcggccgaggtacttgaccactttaaggggttttgtggcatttcaaaaatcaaaatctctttatccagatccttgtaaatattcaccattacaggtaagaaaaacgcatttaagggaagcagtgaattctccacttggaatcaacctactgattgataattaaattatttcactgtgaaccagaaggctagtatttagaaagcaaaatatttagaagtgaaagaggggggaagaaagaatgatctacaatgtaatataaattaacctaatttaaattagattttaatttaacctactttgatagttttttaaaacaaggaaggatcctaaggacttgcaactat

SEQ ID NO: 37675 - DNA, 427 bp, Homo sapiens
tacgactactatagggcgaattgggccctctagatgcatgctcgagcggccgccagtgtgatggatatctgcagaattcgccctttcgagcggccgcccgggcaggtacatgggactacaggcacgccccaccatgcccagcccatttttgtatttttagtagagacagggtttcaccatgttggccaggatgatcttgatctcttgacctcatgatccgcccctcttggcctcccaaagtgctgggatcacaggcgtgagccaccacacctggccctctatttattctctttaaagagagagaaaactatgagaggccaaaattatttaattaaatctttaccttagcacaagggaaaaaatggaatttgcctaatataggtgatgaagcatacacaatgaacagaaacaatcacattttagtaaa

SEQ ID NO: 37676 - DNA, 314 bp, Homo sapiens
agggcgaattgggccctctagatgctgctccagcgcccgccgtgtgatggatatctgcagaattcgcccttagcgtggtcgcggccgaggtacaaggagtcttggagtcactgcagctagtgtcttcttccacttgactgccactgtccttttccgtgtctgactcaccatcttcctctaaagttagttcaaaactggaatttctcagtttgacccctgccggccctcctctgggtcatcaggtgcaggagaggggcctctgagggaattgtgctcctggtaccctgacccggggccggcccgcttcaaagggc

SEQ ID NO: 37677 - DNA, 582 bp, Homo sapiens
tacgactcactatagggcgaattgggccctctagatgcatgctcgagcggccgccagtgtgatggatatctgcagaattcgcccttagcgtggtcgcggccgaggtactttttgtattttttttctttttttttttgagaaggagtctctctctgtcacccaggctggagtgcagtggcacgatctcggctcactgcaacctctgcctcctgggtttaagcgattctcctgcctcagcctctggagtagctgggactactcgtgcatgccaccacgcccggctaatttttgtatttttagtagagacagggtttcaccgtattggccaggatggtctcgatctcttgacctcgtgatccacctgcctcggcctcccaaattgctgggattacagcactgtgccctcctaagaaattattttttaagtgaaattttatttttattttttttaggattttggtagagaatgagtaggcctactcatcaatatcaaacaggacatttagtttctttccttagaacagacataaatttaatttcatggtaatatgataataaagaaaatgcttctatttttcttta

SEQ ID NO: 37678 - DNA, 337 bp, Homo sapiens
gggcgaattgggccctctagatgcatgctcgagcggccgccagtgtgatggatatctgcagaattcgccctttcgagcggccgcccgggcaggtactattaactaatacacagtgtaaattcacatttttccaattgtccttaaaaaatgacccttttttttcaattcaggatctaatcaaggatcaacaatgcattttaaactgccatgtttcctttaatgtagaacagtccctgccccttgcctttttatgtctttcatagcactggggtgcgtgtgtgtgtgtgtgtatttttttttaggtggggtcatcactgagtcgtcccagcctggaatg

SEQ ID NO: 37679 - DNA, 441 bp, Homo sapiens
ctactatagggcgaattgggccctctagatgcatgctcgagcggccgccagtgtgatggatatctgcagaattcgccctttcgagcggccgcccgggcaggtaccctcacatacaaagggatcaaatttgacctggtgttattttagccccaaatttatgacattacacaatattaaaaatgtaaattgttttttttacccaaactacttctagatattctagtatttgcttctggtggaattaaatgacggtaaaattggctaattatttgaatgaatgaatggatggatgttttgcatgctcaatttctaggtcctttgtctagaaaggaaatttgcctcagttgaattagtgaaatatttctgtcgttgatattaaaagtgacttctgagtacctcggccgcgaccacgctaagggcgaattccagcacactggcggc

SEQ ID NO: 37680 - DNA, 431 bp, Homo sapiens
acgactcactatagggcgaattgggccctctagatgcatgctcgagcggccgccagtgtgatggatatctgcagaattcgccctttcgagcggccgcccgggcaggtacaaggctaagcattttaactttatactggaaaaagaatcaaacaaaggggagggataaaggacttagtcatctttgcactggaaaacaaaatatgtaattaaattcccatagctgcatgtaacattgaattcttccaggttaaaaaaaaaagttaatcctgtgatattaatggaatgacattttgaggtcttgagaatgggcacaaaagtgggaaatgaatttcagtatgggcaaagacactgaggatgatgttgattagataattcactccgtaatgatcatgctgtgtgctagtaagtataaccctggaaagatcttgaga

SEQ ID NO: 37681 - DNA, 391 bp, Homo sapiens
tacgactcactatagggcgaattgggccctctagatgcatgctcgagcggccgccagtgtgatggatatctgcagaattcgccctttcgagcggccgcccgggcaggtactgctgcctgtgcttcagagctgtcttattaccacaaggccggcaagcatcaatgtccccacatccccctctgcctccccctgaaatgtacctcggccgcgaccacgctaagggcgaattccagcacactggcggccgttactagtggatccgagctcggtaccaagcttggcgtaatcatggtcatagctgtttcctgtgtgaaattgttatccgctcacaattccacacaacatacgagccggaagcataaagtgtaaagcctggggtgcctaatgagtg

SEQ ID NO: 37682 - DNA, 403 bp, Homo sapiens
acgactactatagggcgaattgggccctctagatgcatgctcgagcggccgccagtgtgatggatatctgcagaattcgcccttagcgtggtcgcggccgaggtacataaatgggacgcgtctggatgaccgaatcattcgcacagactgggacgcaggctttaaggagggcaggcaataccgccgtgggcaatctgggggccaggttcgggatgagtatcggcaggactacgatgctgggagaggaggctatggaaaactggcacagaaccagtgagtggtgagagctctgtcagtgacaaacactcctttggcctgttgaatttgctgaagaacattacctaaagtctgcacacgagcccatttttaccaagatttgatccagtgtctttactgagctgga

SEQ ID NO: 37683 - DNA, 306 bp, Homo sapiens
ctactatagggcgaattgggccctctagatgcatgctcgagcggccgccagtgtgatggatatctgcagaattcgcccttagcggggtcgcggccgaggtacgaagaaaacaaagagctcggttaccataaagaaggtagttttcaggtctatattcaatggctctggcgtaatagataatagctatatcaaatctttctttggaaaactcttcatttcctttcattttcattagttctccttcctctatacaatccatacaactttgagttttaagttcttcaagcaaattgcagtcttccatta

SEQ ID NO: 37684 - DNA, 306 bp, Homo sapiens
agggcgaattgggcccttagatgcatgctcgagcggccgccagtgtgatggatatctgcagaattcgcccttagcgtggtcgcggccgaggtactttttttttttttttttttttttgggagggagtctcgctctattgcttaggctggaatgcagtggtgcgatcttggttcactgcaacctccacctcccgggttcaagcaatcttcctgctttgccctcctgagtagcctgggattacaggcacatacaccaacctctggctaatttttctgtatttttaagtagagacagggttctcaccat

SEQ ID NO: 37685 - DNA, 247 bp, Homo sapiens
cgaattgggccctctagatgcatgctcgagcggccgccagtgtgatggatatctgcagaattcgcccttagcgtggtcgcggccgaggtacaaggctaagcattttaactttatactggaaaaaaaatcaaacaaaggggagggataaaggacttagccatctttgcactggaaaacaaaatatgtaattaaattcccatagctgcatgtaacattgaattcttccaggttaaaaaaaaagttaatc

SEQ ID NO: 37686 - DNA, 420 bp, Homo sapiens
ctactatagggcgaattgggccctctagatgcatgctcgagcggccgccagtgtgatggatatctgcagaattcgcccttagcgtggtcgcggccgaggtactcgatcataaagagtttaaagctcgagtgaaggagtatgcacgaaacaaaaacatccattactatttcatggccctgaagaatgatgagataatagatgccactcaaaaaggaaattgctctcgtttcatgaatcacagctgtgaaccaaattgtgaaacccaaaaatggactgtgaacggacaactgagggttgggttttttaccaccaaactggttccttcaggctcagagttaacgtttgactatcagttccagagatatggaaaagaagcccagaaatgtttctgcggatcagccaattgccggggttacctgg

SEQ ID NO: 37687 - DNA, 234 bp, Homo sapiens
atagggcgaattgggccctctagatgcatgctcgagcggccgccagtgtgatggatatctgcagaattcgcccttagcgtggacgcggccgaggtactgcaataatcacagcgtttattcgtgccttgatgtcaaaagttaagagagggtggagaccataccgaactattgttttctgttattggggaggaacagattttggcaatattggcttatatgaatggggagaggatt

SEQ ID NO: 37688 - DNA, 426 bp, Homo sapiens
aattgggccctctagatgcatgctcgagcggccgccagtgtgatggatatctgcagaattcgccctttcgagcggccgcccgggcaggtacattattttgaatttaacttaactgttttgtggtgggtgtgaacaaaacattagaaatatattatctttttgtgataatactctctgacctcacttaaagtgatctgccatgaggtatccatgatcaagtttatgtttattctaatacctaaggaattcagccaactttgtttctatcatcagataatctcagaaaatagtgtgttttatctatattactgcctcttttcaatatttaagagaataattgtcttctggtttctactgagcctagtaataatcactaaagacctaaaaaaggaattccttctgttaagagtatttggatagcccatt

SEQ ID NO: 37689 - DNA, 494 bp, Homo sapiens
  misc_feature 306, 307: n = A,T,C or G
gactcactatagggcgaattgggccctctagatgcatgctcgagcggccgccagtgtgatggatatctgcagaattcgcccttagcgtggtcgcggccgaggtacagtgcatattggcggcgcacgcctcattacgattcgcctgcttgcttctcctgttcaatcgtttctttggaaggcagtggatttttctcttgcgtctctgtcttcttcagtttcgacttatcgaatttctcgatctcagccatatcgggtttgtcagacatggttgcggaggaaaagcgaagcgaggcgcacgagtacttnnttttttttttttttttttggtatcaaaaagctttatttccatttggtccaaggcttgttaggatagttaagaaagctgcctattggctggagggagaggcttaggcagaagccctattactttgcaaggggcccttcagaagtcgctgggctcagaaggctcttagtcgtgcttgagagtgagcctt

SEQ ID NO: 37690 - DNA, 378 bp, Homo sapiens
atacgactcactatagggcgaattgggccctctagatgcatgctcgagcggccgccagtgtgatggatatctgcagaattcgcccttagcgtggtcgcggccgaggtacccaggacatgttctagttacagaagccttgctctgctgtcaacaattgggaaatgctcattttttcatgttttgtgaatactctggtcttgctgtaagctaatgtcatggctgtgggatattagagaagtgggtttatgactctgaagaccagcagacaccagactttaaaagtgcttaaattggaatttggaaactacagtaaagaaaccttcagataccagttccatcctgaagccctctgttgaacaacagggccagatcctaaag

SEQ ID NO: 37691 - DNA, 164 bp, Homo sapiens
ccccctaactacgcattttggacttcttaaacacaggatgggaaggatccaatatatcttcaaggcctggggaaacttgcagtgggtcagtggttctgtgccaaccaaacgatagccccatccaagccagcctgaaaacctaggaaggaagtagtaggaatatg

SEQ ID NO: 37692 - DNA, 412 bp, Homo sapiens
gcatgctcgagcggccgccagtgtgatggatatctgcagaattcgccctttcgagcggccgcccgggcaggtacttcctggctagtcggtgtaagcgttgcaaaaccagtctgtgggtctgagagctaatgcggtcctggatctggtgaggcacaacatcttcttggtagctcaggtccgtcagctgcagacgctaattgctcaaacttccaacaaagctgcccagaccagcacttgtgttttgattcttcttttttccctggctctcatcatcctgcccagcttcagtccattccagagtcgaccagaagctgggtctgaggattaccagcctcacggagtgacttccagaaatatcctgacccacaaggacgtaacagaaaatctggagacccaagtggtagagtccaga

SEQ ID NO: 37693 - DNA, 188 bp, Homo sapiens
gcgaattgggccctctagatgcatgctcgagcggccgccagtgtgatggatatctgcagaattcgcccttagcgtggtcgcggccgaggtactctttctctcccctcctctgaatctaattctttcaacttgcaatttgcaaggattacacatttcactgtgatgtgtattgggttgcataaaaaaaa

SEQ ID NO: 37694 - DNA, 392 bp, Homo sapiens
tacgactcactatagggcgaattgggccctctagatgcatgctcgagcggccgccagtgtgatggatatctgcagaattcgccctttcgagcggccgcccgggcaggtacatatgtgactactaactgtcttccttattccacctacggagtgagcaactaggtgaattttacctgggtaaggtccgatataggaggaccgctttcctatgtgtacctgggccgcgaccacgcttagggcgaattccagcacactggcggacgttactagaggatcccagctcggcaccaagcttggcgtaatcatggtcatagctgcatcctgtgtgagattgttatccgctcacaattccgcacaacataccagctcggaagcataaagtgtgactcctg

SEQ ID NO: 37695 - DNA, 434 bp, Homo sapiens
atagggcgaattgggccctctagatgcatgctcgagcggccgccagtgtgatggatatctgcagaattcgccctttcgagcggccgcccgggcaggtactttttttctttctttttttttttattatggttagctgtctcttaaaaagcaagaaaagaaagagaagactgagaataagaaaatttcttttgaaataaaataagactgctaaaagtatttggtatacagtctggaaaataaagttgagggaatctctccagataaagagcaaaaagaaatagatagaaaaatataaagaaagaaaaaagacatagacaatcaatatgtaatgttaggagttcctggaagagagaacagagacagtgtaggtgaagaaataaaaagaaaaagaattgaagaacagagcaagctaagtctccagattgagagggccc

SEQ ID NO: 37696 - DNA, 267 bp, Homo sapiens
agggcgaatgcgggattgggccctctagatgcatgctcgagcggccgccagtgtgatggatatctgcagaattcgcccttagcgtggtcgcggccgaggtacttttttttttttttttttttttttagactgtcctaaattgtttattaagtatgaattttacaaactttacttatattagcggtaacggtggagctggagagtattgcgccttctccaagctgcccggcgagagccaccaatagtgtggtggaacttggggccctt

SEQ ID NO: 37697 - DNA, 554 bp, Homo sapiens
ctatagggcgaattgcgccctctagatgcatgctcgagcggccgccagtgtgatggatatctgcagaattcgcccttagcgtggtcgcggccgaggtaccttcatctcttgtgctagcaaactcttgatcacctcaccaggtagggctactgacttcctgaggaaagactcacagtccctttccaaccacaggcagaaaatggctttcagaggacgtgcttctaaaagtcctgttgccatgattatttggcccacctccgcggcagcgcattcgtcgaccctcttcgcggattctggcatctcttcactcccccgcgtacctgcccgggcggccgctcgaaagggcgaattccagcacactggcggccgttactagtggatccgagctcggtaccaagcttggcgtaatcatggtcatagctgtttcctgtgtgaaattgttatccgctcacaattccacacaacatacgagccggaagcataaagtgtaaagcctggggtgcctaatgagtgagctaactcacattaattgcgttgcgctcactgcccgcttt

SEQ ID NO: 37698 - DNA, 604 bp, Homo sapiens
ccctctagatgcatgctcgagcggccgccagtgtgatggatatctgcagaattcgcccttagcgtggtcgcggccgaggtaccaggagaatttcctaagcttctcagaaagcctgtcagaagcttctgaatatcagactgaccaggtgtaaaccatcagtttttccttgctggtgaggtgggtgtgacagtgggggaggggccagtaggacacactcacaggacttgacatagaacctcatttcacacacacacacacacgcacattcatggccacatttgccaaatgagcttttcagggcgagttatttctttaatgaaaaagcacaagcccttatgtgtcgaaatacacgctgttacactgaaaatatatgcacgacagagcaagaagcttgtgcatgatcacttcttatccgtccccttcccagcactccctcctcttcccattctctccacatgtctcaagcaccctaccgagtagggcaggccaaatgttccttgggagtaatgccaactcccgacgttgccttcaggtccaaagggcttggaaccagctcgtgaggaagttccgaatctggcactaatattcttgagtggataatagt

SEQ ID NO: 37699 - DNA, 396 bp, Homo sapiens
  misc_feature 326, 375: n = A,T,C or G
ctactatagggcgaattgggccctctagatgcatgctcgagcggccgccagtgtgatggatatctgcagaattcgccctttcgagcggccgcccgggcaggtacttttaaattcaatacagatgctgctgaattcattcctcaggagaaaaaaaattctggtctaaattgtgggactcaaaggagactagactctaataggattggtagaagaaattacagttcaccacctccctgtcacctttccaggcaggtcccttatgatgaaatctctgctgttcatcagcatagttatcatccgtcaggaagcaaacctaagagtcagcnagacgtctttccagtcctctccttgtaataaatcgcccaagagccatgngccttcagaatcaaccttggc

SEQ ID NO: 37700 - DNA, 445 bp, Homo sapiens
tagggcgaattgggccctctagatgcatgctcgagcggccgccagtgtgatggatatctgcagaattcgccctttcgagcggccgcccgggcaggtacttttttttttttttttttttttttttttttttattttttttttttttttttttttttttttttttttttggaggcaactcagaaatttttaatggcaacctggaagacaatacatcacagaaactttatggtaggtctggggaaaagtgttttttacaataaatgatgaaataggttgtggctttggcaatttgattccctacgcaaaaatgcaaaatgcaggtttgggatgccttccaagcgacaccaagtccctaaagttcggggtgatcgcgcctgcctccacactgtttttttagggttacctgaacataacagaacatccccgggtaccttggccgggacca

SEQ ID NO: 37701 - DNA, 190 bp, Homo sapiens
tacgactcactatagggcgaattgggccctctagatgcatgctcgagcggccgccagtgtgatggatatctgcagaattcgcccttagcgtggtcgcggccgaggtactttttttttttttttttttttttaggggaaaataacttttattgagaccccaccaactgcaaaatctgttcctggcattaag

SEQ ID NO: 37702 - DNA, 168 bp, Homo sapiens
ctatagggcgaattgggccctctagatgcatgctcgagcggccgccagtgtgatggatatctgcagaattcgccctttcgagcggccgcccgggcaggtacttttttttttttttttttttgagctgcaagtgtttattctatttaaaagtctacaaatttgagcttt

SEQ ID NO: 37703 - DNA, 415 bp, Homo sapiens
ctactatagggcgaattgggccctctagatgcatgctcgagcggccgccagtgtgatggatatctgcagaattcgccctttcgagcggccgcccgggcaggtaccttcagtcccttgttattgttccgtatattacctgtaagcagatactgtattttattttagcctatttgacagaacacatcactcagaaaaagtgaagtttcagagcaaacagtgaagaaatcagtgtgattgtagacaaaaagtcggttcacagaacggagcagcggggagaggagggaaaagcttcatagtttggtgcttatcacatcaagagattggtaaatttctgaggaaagacaggcttatggggcactgaaatggaacaacttctttaaacgtgcaaccttttgaatttttcctcaaaaccaag

SEQ ID NO: 37704 - DNA, 375 bp, Homo sapiens
agtgtgatggatatctgcagaattcgccctttcgagcggccgcccgggcaggtactgatgctttttaaggcatattatcaacatacagccatgactcgtccagagaatctcacctgacaaaaactcagagaagaaagagaaagaagatgaaatggctggttttcagatgtgtattctcattttatggaagacatgttgccagagtaaggcacaatatattcatcttgaaatgtaatactgagaagatatggaagttatggaagttgtggccttcagaattgacacttacggagagactagaacagcgtgggtgagttgtgaggggcaggaagcatgtcttaatggacttaaccaattttcgtcaactattcacag

SEQ ID NO: 37705 - DNA, 388 bp, Homo sapiens
acgactcatatagggcgaattgggccctctagatgcatgctcgagcggccgccagtgtgatggatatctgcagaattcgcccttagcgtggtcgcggccgaggtactatctgtggaaaagccttcatgcgtctctcatcccttactagacacatgaggtctcacactggatacgagctatttgagaagccatataaatgtaaggagcgtgagaaagcctttagttatctcaaatcctttcaaagacatgaaaggagtcacactggagaaaaaccctataaatgtaaacaatgtggaaaaaccttcatatatcaccagccctttcaaagacatgagcggactcacattggagaaaaaccctatgaatgtaggcaatgtggaaaagctct

SEQ ID NO: 37706 - DNA, 421 bp, Homo sapiens
atacgactcactatagggcgaattgggccctctagatgcatgctcgagcggccgccagtgtgatggatatctgcagaattcgcccttagcggtcgcggccgaggtactggggaatcacaggactctctccccgccctgtctagtggagacaggatagcttcttgatggccaggggtggtgtctccacctggaactggctggaaacattgtcacatgatcatctgaagcttgatggtctctaggtgacaggaaatgaatttggttaagagtttaacaaacatggtccaaaaaccaaggcaagtatagtcattactaatgggctggccagaggaaggagccatgaaccccaacttagcatttttgaccaggagccccatgactcagatagctgttggtgtattttagaggcccagttgggtag

SEQ ID NO: 37707 - DNA, 303 bp, Homo sapiens
cgatcactatagggcgaattgggccctctagatgcatgctcgagcggccgccagtgtgatggatatctgcagaattcgcccttagcgtggtcgcggccgaggtacctcattagtaattgttttgttgtttcatttttttctaatgtctctcctctaccagctcacctgagataacagaatgaaaatggaaggacaagccagatttcttccttagcatctctgctcattactctctgaagtcatagggttaccccatttttggggaacccaattatagggcaaataaacacatgtttcccaaag

SEQ ID NO: 37708 - DNA, 600 bp, Homo sapiens
gactcactatagggcgaattgggccctctagatgcatgctcgagcggccgccagtgtgatggatatctgcagaattcgcccttagcgggtcgcggccgaggtactccaaagattcaggtttactcacgtcatccagcagagaatggaaagtcaaatttcctgaattgctatgtgtctgggtttcatccatccgacattgaagttgacttactgaagaatggagagagaattgaaaaagtggagcattcagacttgtctttcagcaaggactggtctttctatctcttgtaccttacatcaatggcaagtttaagaaggataattaattacacaaacccttcacagactgctctggtgcctggtggtgctagctcctcccacctcagcacctgctgcatctggagcagcccaagcctcaggatggacaagaggaaacccacagctcagcttcaggcttcttatgtttctgaaaacagcttggatattttaatgcacgttgcattaaacctcactgaaacctgtaaaaaaaaaaaaaaaaaaaaaagtacagcagtgcgatctcggctcactgcaacctccgtccccgggttcaagcaattc

SEQ ID NO: 37709 - DNA, 228 bp, Homo sapiens
ctctagatgcatgctcgagcggccgccagtgtgatggatatctgcagaattcgccctttcgagcggccgcccgggcaggtactctggcaattcacctttcaattcaaatatcctgtagagaacgcttcctctgagaagccactggatgtctgtatggtgcaggaggtttatgtgctgtctgcccaggtttttgttttgggtgttttttttttttttttaacttttttg

SEQ ID NO: 37710 - DNA, 428 bp, Homo sapiens
atacgactactatagggcgaattgggccctctagatgcatgctcgagcggccgccagtgtgatggatatctgcagaattcgccctttcgagcggccgcccgggcaggtacgcggggagggtagagtgagaagcaccagcaggcagtaacagccaacccttagccattgctaagggcagagaactggtggagcctttctcttactcccaggacttcagcacctaagacagctccaaaacaaaccagaacagtcagctccgggggagcacgactgggcgagaggcacagaaatggacaccagaaataaggcccagctccttgtgctcctgactcttctcagtgtgctcttctcacagacttcggcatggcctctttacagggcaccttctgctctcaggttgggtgacagaataccctttgagggagcaa

SEQ ID NO: 37711 - DNA, 396 bp, Homo sapiens
atacgactcactatagggcgaattgggccctctagatgcatgctcgagcggccgccagtgtgatggatatctgcagaattcgcccttagcgtggtcgcggccgaggtacaatcagtaagattttgatttttaacaagtttacatgtccaattacatgtagataaaaggaatgaaaaccagtaaagacaccttttataatctgaaaatagatttttaaaccttcctttaatgtgaaattttctctttaatgtgttatgaattctatcaaatataaccatttaggattatttatagtatgtcactgatcacttctactagtatagacaaataaatttataaacattattttgaatgtaactaattagcataattttatttaagagttagactgtgttg

SEQ ID NO: 37712 - DNA, 263 bp, Homo sapiens
cactatagggcgaattgggccctctagatgcatgctcgagcggccgtcagtgtgatggatatctgcagaattcgcccttagcgaggtcgcggccgaggtacatttaccatggtttagtctaaatattagacacacagacacacacacagacacacacacagacacacacacagacacacacacagacacacacacacccattttggaactctacaagaccatatacgaatctaggagaatagtgttaaaaaaacgggggagct

SEQ ID NO: 37713 - DNA, 569 bp, Homo sapiens
gactcactatagggcgaattgggccctctagatgcatgctcgagcggccgccagtgtgatggatatctgcagaattcgccctttcgagcggccgcccgggcaggtacctgacagtgtaaagaaggagctcctacaaagaataagaacattccttgctcagcatgccagcctttaagattgaattagattgtgttgttgtggttttatttctgaaagtaaaacttgccataaattagaaaacaatttcccaaaataaaatccttttttgtatgatggtatacagttttcagtaatgatgtatacattgtattgatttttttccctaaatgtgttattttaataaatatctcatgaatgagtttgaagtttgcttggattttgaaatgaatgggactttgtctttatcactaattcaccaaatttgttgagcgcaaaagcaattaatgtagtttaagtatttagtatgtacctcggccgcgaccacgctaagggcgaattccagcacactggcggccgttactagtggatccgagctcggtaccaagcttggcgtaatcatggtcatagct

SEQ ID NO: 37714 - DNA, 227 bp, Homo sapiens
tatacgactcactatagggcgaattgggccctctagatgcatgctcgagcggccgccagtgtgatggatatctgcagaattcgcccttagcgtggtcgcggccgaggtactgcatcttaacagcaaagccatttattctactttataactgagagacttgataccatccatctctaggttacagaggataatttgaagagaaatgttactgtagaatatatagttct

SEQ ID NO: 37715 - DNA, 167 bp, Homo sapiens
atagggcgaattgggccctctagatgcatgctcgagcggccgccagtgtgatggatatctgcagaattcgcccttagcgtggtcgcggccgaggtacttgggaggctgaggcaggaaaattcttgaacccaggagacggaagttgcagtgagcttagatcacaccac

SEQ ID NO: 37716 - DNA, 424 bp, Homo sapiens
gactactatagggcgaattgggccctctagatgcatgctcgagcggccgccagtgtgatggatatctgcagaattcgccctttcgagcggccgcccgggcaggtactttttttttttttttttttttttgagaaacgttgtgtttaatggtaaagcttaacacaccccagcaccaagaatggtgtggagttgcagtagccacaggcccggtgaccccccatggagcctcacatggcgaagaggatgaggaaggcgaccattaaacagaaaagccccatggcctcagacagggcaaagccaagaatggcataggtagaagaggctgctgccttgaagagacggggttcctgggcattagccaattgatcaagccttgccaaaacacggggttccaattgcccagccccctgaaacccagccacac

SEQ ID NO: 37717 - DNA, 467 bp, Homo sapiens
tatagggcgaattgggccctctagatgcatgctcgagcggccgccagtgtgatggatatctgcagaattcgccctttcgagcggccgcccgggcaggtacacatgagagaaaaatctttccaatgtaatgagagtggcaaatcctttaattatagctaactcttaaggaaatatcagataatccatttaggatagaaacaatataaatgtgaggtatgtgacaaggtctttaatcagaattgattccttgtatgccataatagatgtcacactggtaagaaaccttacagttgttatgagtgtggcaagaccttcagtcagacgtcatcctttacatgctatcgtagacttcatactggagggaaaccttacaagtgtagtgagcataacaagacctttggttgaaattcagcccttgtaattcataaggcaattcatactggagagaatccttgcaagtgtaatga

SEQ ID NO: 37718 - DNA, 383 bp, Homo sapiens
atacgactcactatagggcgaattgggccctctagatgcatgctcgagcggccgccagtgtgatggatatctgcagaattcgccctttcgagcggccgcccgggcaggtactagatctgtacctcttgtctgaattaaacatttttagttgctgtgtaaatgttaggaagcaaagtagctttgaattttctctgtaagagaataaaagataaaataatgtattttctttatttcacattttatttggagatatttaaatgaaatagaaagccatataacatagctataattactacctgtttgctatttttgtttaacttattttgtagcttcctcactggtttgtgttgctaagcaaacgtatacaaacagaaaaagagctt

SEQ ID NO: 37719 - DNA, 318 bp, Homo sapiens
cggccgccagtgtgatggatatctgcagaattcgccctttcgagcggccgcccgggcaggtactcatgtattttttttttccagatctctttccccaagttgctattgtaagagtattctgctgcgtgtggatgcagttatacacattaaagcagatctggagtctgaagtagctataaagcagctataaaacagaagtacatgcatagctgcagaaaccatgataggtagaggacttttcttttggttttgttttgttttgttttgttttgtttttggttttacagagaagagattttttatttacaaagaaaaaaa

SEQ ID NO: 37720 - DNA, 427 bp, Homo sapiens
gactactatagggcgaattgggccctctagatgcatgctcgagcggccgccagtgtgatggatatctgcagaattcgccctttcgagcggccgcccgggcaggtacatgggactacaggcacgccccaccatgcccagctcatttttgtatttttagtagagacagggtttcaccatgttggccaggatgatcttgatctcttgacctcatgatccgcccctcttggcctcccaaagtgctgggatcacaggcgtgagccaccacacctggccctctatttattctctttaaagagagagaaaactatgagaggccaaaattatttaattaaatctttaccttagcacaagggaaaaaatggaatttgcctaatataggtgatgaagcatacacaatgaacagaaacaatcacattttagtaaaagg

SEQ ID NO: 37721 - DNA, 696 bp, Homo sapiens
  misc_feature 665: n = A,T,C or G
gactactatagggcgaattgcgccctctagatgcatgctcgagcggccgccagtgtgatggatatctgcagaattcgccctttcgagcggccgcccgggcaggtactggcactgaatatacacatacccataaagtcggatatgttcattaatcccagagttgactgataaaatgctgataaacaaaggtaggctatatgaggcagccacaccctcccaaaacatgtccccagagaccgggtggccttctttcttaaggctgtaatttatgcacagttaggagttactctctcatcctattaatatttaggatggctctcagctggctgattggagttaacacagaataggatcatacagattctgacatggtcccattttgtgtcgttgaattatacatggaaagcaaaaccaggttttttttttctctctttttcaggggaggtgggtgcagataagggtgggcagggcactgtatagggaggaaaaaaatactgatattgatgggtcttgggattgcaataagtcagtttaccatttaagaggaaaatttaaatattcagtggaatgaggcactcaaagggttgaaatgcgatttttctttggtttccagggacctgtccctgggctctcactccaaggttaagttccaaaactatactttntggctcacagggctctctgtgatgctctggt

SEQ ID NO: 37722 - DNA, 328 bp, Homo sapiens
ccctctagatgcatgctcgagcggccgccagtgtgatggatatctgcagaattcgccctttcgagcggccgcccgggcaggtacttccaaacatgggctcacaagttggtgctggctggggaatctcagttcctctctacatgactgtttgagtgtcctgcatggtgattggctgcagccagcattcctaaacactaaggcggaagctataatgccttttgtgaactagccttgggaatcacaacatcatcctttccacagtgttctgttggtcacacaggccaaccatgactcactgttggagagagctgcacaggaatgtgaatat

SEQ ID NO: 37723 - DNA, 430 bp, Homo sapiens
  misc_feature 380: n = A,T,C or G
agggcgaattgggccctctagatgcatgcctcaaccggccgccagggtgatggatatctgcagaattcgcccttagcgtggtcgcggccgaggtactgttcgtgtcgcagcaggaggcctgggtggtggagcgaatgggccgattccaccggatcctggagcctggtttgaacatcctcatccctgtgttagaccggatccgatatgtgcagagtctcaaggaaattgtcatcaacgtgcctgagcagtcggctgtgactctcgacaatgtaactctgcaaatcgatggagtcctttacctgcgcatcatggacccttacaaggcaagctacggtgtggaggaccctgagtatgccgtcacccagcttagctcaaacaanccatgagaatcagagctcggcaaacttctctctggacaaaagtcttccgg

SEQ ID NO: 37724 - DNA, 391 bp, Homo sapiens
  misc_feature 332: n = A,T,C or G
ctatagggcgaattgggccctctagatgcatgctcgagcggccgccagtgtgatggatatctgcagaattcgcccttagcgtggtcgcggccgaggtacagtcacaatattgtgcagtcactagcattgtccatttctggagctttaccaaggcgatgaaaacttttagaaaggttaatagttacaagtaagtaggctggacttcactgatgatgagctaggatctgaaattaaatgacagaaaattcaacttgacacagtcccagaagccaagctcatttccctcactctaacttccgggcctaagatggcattaaagttaaaggattcanggttctctccaagcatagttcagttaatagagttgaaaaataaaagtataggccccttg

SEQ ID NO: 37725 - DNA, 413 bp, Homo sapiens
  misc_feature 324, 328: n = A,T,C or G
agggcgaattgggccctctagatgcatgctcgagcggccgccagtgtgatggatatctgcagaattcgcccttagcgtggtcgcggccgaggtacacctccaataaccagctggggggcatccagattatgcacaacaatggggtgacccactgcactgtgtgtgatgactttgaaggggttttcactgtcctgcactggctgtcttacatgcccaagagcgtgcacagttcagttcctcttctgaactcaaaggatcctatagacagaattatcgagtttgttcccacaaagaccccatacgatcctcgatggatgctagcanggcncgtcctcacccaacccaaaaagggttcagtggttgagtgggcttttttgactaatggatctttctcagagattatgcagccctgg

SEQ ID NO: 37726 - DNA, 424 bp, Homo sapiens
ctactatagggcgaattgggccctctagatgcatggctgaggccggccgccagggggatggatatctgcagaattcgccctttcgagcggccgcccgggcaggtacatgtttggaaatgagttagatacttgaaaagtctaaacacactgatttaggagtgcgtatgttgctgtctcaatgaacaatgggtcaatagttcatatggactaaattaatctctgggtagcacgtatgtgtgtaaatataaaattatattagacattagcaccagtgcagaacatgctcagcatcataagatccaaaacaccagcacaagtttatccatcattaaaaacaattacctccttcctaaaatgtcagaatagtaggtaactgagattaataaatcttatccaaaaagtaactcttataacataaaagttt

SEQ ID NO: 37727 - DNA, 460 bp, Homo sapiens
tatagggcgaattgggccctctagatgcatgctcgagcggccgccagtgtgatggatatctgcagaattcgccctttcgagcggccgcccgggcagatacaaatttagtaacctactaagaaacatgtgcatttttttttcctttcacaagtgctgctgttacttgaaaagaatgcttctgaattagaataactggaataaatatttaaaaaaaaatagtgcagcaagaacctgagacttgcaaaaaacccttttaccagaaacttgctacaaaaaatctgctacatcttacttcatcaaatctttaaattctgtaacaatttccatccccgcgtacttagaataaaaaataaacagaggaaataagaactaactcgagttaataacaacatctttaaggacaagtttggtcatttaaaaactaagtcttgttttgttttgcttgtttttaattactcct

SEQ ID NO: 37728 - DNA, 429 bp, Homo sapiens
atagggcgaattgggccctctagatgcatgctcgagcggccgccagtgtgatggatatctgcagaattcgcccttagcgtggtcgcggccgaggtacagaactgaaattcaaatatcgaggatagcaagaaaagctggcaacttctatgtatctgcagaacccaaattggcgtttgtcaccaggatcggaggttatcaattgggtgagcccaaaggtctgaaaggtgttgcaacttctttgccttcatcaaatcttcaatagaaactttgtgaagctcagcagggcttcaataatgtgctgaggtttgtagaaccatatattgcatgggcatacccaaatctgaagtcagtaaataaactaatctacaaatgtggttatagcaaaatgaataagaaagctacttgctccaacagataatactttggatt

SEQ ID NO: 37729 - DNA, 187 bp, Homo sapiens
agggcgaattgggccctctagatgcatgctcgagcggccgccagtgtgatggatatctgcagaattcgcccttagcgtggtcgcggccgaggtactttttttttttttttttttttgagagaacctgaattaaatttttaatattttaaaaaaggaaagttgctgggaagctggtaaacagaaaccg

SEQ ID NO: 37730 - DNA, 458 bp, Homo sapiens
  misc_feature 54: n = A,T,C or G
tacactactatagggcgaattgggccctctagatgcatgctcgaagcgggccgncagtggtaatgggttttctgcaaaattcgcccttaccgtggtcgcggccgaggtacaccaaatgagatactatttggaaaggcaataaagggagtgtaaaagcctaggtagcttaaatacaggctctggaatttccttcgcaggaaggtgaagcaccaatgatggcaaaaattaaataaatacatcatcttaaaaaggcagagggtaggctgcgtgcagtggtttacgcctataatcccagcactttgggaagccaaggcgggcacattgcttgagctcaggagtttgagaccagcctggacaaccccatctctacaaaaaaataaaaatcggccaggtgtgatggggcaaacctgtggtctcagctacttgggaggtggtccttgagcccaggaggtcaagcc

SEQ ID NO: 37731 - DNA, 492 bp, Homo sapiens
ccctctagatgcatgctcgagcggccgccagtgtgatggatatctgcagaattcgccctttcgagcggccgcccgggcaggtactttaaatttagtggttgctggagcacctaaaagtcagattgtcatgttggaagcctctgcagagaacattttacagcaggacttttgccatgctatcaaagtgggagtgaaatatacccaacaaataattcagggcattcagcagttggtaaaagaaactggtgttaccaagaggacacctcagaagttatttaccccttcgccagagattgtgaaatatactcataaacttgctatggagagactctatgcagtttttacagattacgagcatgacaaagtttccagagatgaagctgttaacaaaataagattagatacggaggaacaactaaaagaaaaatttccagaagccgatccatatgaaataatagaatccttcaatgttgttgcaaaggaagtttttag

SEQ ID NO: 37732 - DNA, 473 bp, Homo sapiens
tacgactactatagggcgaattgggccctctagatgcatgctcgagcggccgccagtgtgatggatatctgcagaattcgcccttagcgtggtcgcggccgaggacatcctgaaagtcgaaaaattccttcagattccagacctgattcctcaactttctcaaaaaatttttgtaataccaggggaactttcactccagggtctttctttcggtcaccgtccaggaggactgtaagtggaactccgaaaatcccattgtcccgtccttttactttctctgttttgttccttttcagttgaattccaaaggcatcaaaaaaggcagtcaattcaatcagagagagatggcggattttcttcatgtcttcagcagacagatctcctgcttcagttaagccaaatctggttttctgaacattaaatttagttaaaacatagtcttctttcttaatctctgatttcttaagtttatt

SEQ ID NO: 37733 - DNA, 413 bp, Homo sapiens
tacgactcactatagggcgaattgggccctctagatgcatgctcgagcggccgccagtgtgatggatatctgcagaattcgcccttagcgtggtcgcggccgaggtactgacagaaattattgcttcaaggacacctgaagaactgagagccatcaaacaagtttatgaagaagaatatggctcaagcctggaagatgacgtggtgggggacacttcagggtacctgcccgggcggccgctcgaaagggcgaattccagcacactggcggccgttactagtggatccgagctcggtaccaagcttggcgtaatcatggtcatagctgtttcctgtgtgaaattgttatccgctcacaattccacacaacatacgagccggaagcataaagtgtaaagcctggggtgcctaatg

SEQ ID NO: 37734 - DNA, 449 bp, Homo sapiens
tatagggcgaattgggccctctagatgcatgctcgagcggccgccagtgtgatggatatctgcagaattcgccctttcgagcggccgcccgggcaggtaccaaatataaaatgctgcaagattttgaatgaatggtgagagtgtaagaaaatgggctgtatttcaatgctcctgtggcaggatgtcaatcaagagcttggagccaaagaaaaagaaatcccttcctagcacaaagcttggctgttcagtgaatagcgtttaaataaccgtaaagtaaaaatcctgtttatgatttttattgattaggggcctacttaattaaggttaccaagtggaatgcaaatgttatctgccatattttaaaaatatcagcggaaatacaagtgggaacgttgaaggagagagagaaaggttaatggaatggtgatagtgtccttataaagtggaca

SEQ ID NO: 37735 - DNA, 411 bp, Homo sapiens
ctactatagggcgaattgggccctctagatgcatgctcgagcggccgccagtgtgatggatatctgcagaattcgcccttagcgtggtcgcggccgaggtacataattattaacgacaatatttctcatctgcaatttttaaacatgctttctcaaataacaaacacgtatttttgtaagttttaaaggcaaagggggcagaatgatgacagacataaaaagctcacatttaaattactggtagattttatcaaaagaaaaaaaaaaagaaaaaaaaagtccaccactgcacaacagtatccaatttgaagactaatggtaaagaaaattcttcaggaaaaactgaaaatccatcaagctgaaaatctaaaattagttctactttctaatgaaaaatacataaaagtgcat

SEQ ID NO: 37736 - DNA, 387 bp, Homo sapiens
tatacgactcatatagggcgaattgggccctctagatgcatgctcgagcggccgccagtgtgatggatatctgcagaattcgccctttcgacggccgcccgggcaggtacagtggttttcttttctttggtcggggagagtgggctggaatggagagtgaggcccacaaattacctgcagagacgtggaggcgtgagggagaacatgcttgttaaatatgcaggtagattaggagacaccaaacagagattcagacacagtaaggctgggatgagatcctcgaagctgtgttttaacaaactccactggagagtcccatattccctcaaatttgggaatcacgaccctgaaccaggttgggcctgaagcagtcaactgaattcactt

SEQ ID NO: 37737 - DNA, 266 bp, Homo sapiens
ctagatgcatgctcgagctgcctccagagtgatggatatctgcagaattcgcccttagcgtggtcgcggccgaggtacagatgtccagtagacctactggatatgcaggcctgcagatcaggggagagctggtttaataaccgtcaaggcagtaatcatttgcatttagatggcgagtgaagccatgacacgggctgaaatggtccagcaagaataaatcaaaccatgagaaacacatacatttaagaataaggagatgtggtcag

SEQ ID NO: 37738 - DNA, 426 bp, Homo sapiens
  misc_feature 271, 277: n = A,T,C or G
gggccctctagatgcatgctcgagcggccgccagtgtgatggatatctgcagaattcgccctttcgagcggccgcccgggcaggtactttttttttttttgtggtttttgttttacttaaaacttttaatttatccagaatggcagtagctttagcaagcagatggtcacaatctgtgttctaaatcattttttattaaatgaatccaaagtatcctagctctttgtcaaagatggtctgtagaaatgtttttaaagattagggatgctgnactttnttttttttttttttttggggcccatttgagtattttgttttcaattagggagatagttggtattaggattaggattgttgtgaagtattgtacctcggccgcgaccacgctaagggcgaattccagcacactggcggccgttactagtg

SEQ ID NO: 37739 - DNA, 202 bp, Homo sapiens
  misc_feature 109: n = A,T,C or G
actactatagggcgaattgggccctctagatgcatgctcgagcggccgccagtgtgatggatatctgcagaattcgccctttcgagcggccgcccgggcaggtactttnttttttttttttttttttttttttttttttcttagaaaattctttattgccaggagtgaaccctaaagtggctcacaagagtgccctattttt

SEQ ID NO: 37740 - DNA, 423 bp, Homo sapiens
tacgactactatagggcgaattgggccctctagatgcatgctcgagcggccgccagtgtgatggatatctgcagaattcgcccttagcgtggtcgcggccgaggtacaccctttggactcagaactctcagtggactaacgtgggtcacctctgtgtagctctgctctgtgctggagagtcaaacctggaattccggcagctctctggaactcagcacagcccgcaaggttgaaaggcccaggacaacacacctgatcccttcccctccctattctaaagggagagaaacatgactttatgggccaactgtgaaagggacaagcgaggctgacctgacaaagtcaaacgcactgggagaaggggaaggaggaacggctgaactttggacagctgagagaaaagcagcactgtttccatagcag

SEQ ID NO: 37741 - DNA, 571 bp, Homo sapiens
gactcactatagggcgaattgtgccctctagatgcatgctcgagcggccgccagtgtgatggatatctgcagaattcgccctttcgagcggccgcccgggcaggtacactggaggctggagcctgcagatggcgtggctctgcggctcaccttgctgcagttggtggtgggacagagactgcagcttgactgtagtgaatttggaaattatctgtctggaagctctgagtttatcttgggacctcaagaggagaggatcacccaactcacagcaatcaaactccaaatggtgctataaactgaaccacacatggacacgtcagtcttccgaggacccttagatcaaccccaggaggagccctagctgctgttccccattcgacgcccctttccagcaggaagtagccagaagacatcgtcgcccaaacctctaacagcagttagtgcggcatctccacaggggggaatgttgtaagagttattgataaattattttaggcagatagagaggaaaaggggtccttaagaagtttttggtttttaaaacccgtctggaaaaatttcttggaaa

SEQ ID NO: 37742 - DNA, 302 bp, Homo sapiens
gccctctagatgcatgctcgagcggccgccagtgtgatggatatctgcagaattcgccctttcgagcggccgcccgggcaggtacgcgggtctctatgttaatacgtagctataaagcaacagttggttttcttatcctttgataaaagcatcccataaaatataaagtagtaagttaacatagtattattgtcacacacaatgctttttttggttaaatgttgatacgaggcaatgttttggaattactttaattgatggagtagtggtggtagagagaaattaataacaataatgagtga

SEQ ID NO: 37743 - DNA, 470 bp, Homo sapiens
  misc_feature 416: n = A,T,C or G
tagacacagtgaaagtctgatctctcttttccttacatatcccccccttttctttttgacaaaaccaccatcgtcactatggcccattcttgctggttgctgtctctttggagctgctggatacacctgtagactggcgagtcgattggggtgtctccatctccacacttttctttgcatctccagtgagttcattgtagaactttaaatgtctagtgggtatccaaacaggaagctgattttctcctggtgaaacacaagcaaaacctctcccccacgttatcaccttccccatttcccatgttttatttttattatctttccaccaaatcagttttccttcatgtgggctgttccttttaccagtaagatgttgttctgcagaggtagtggtctgatttctataaatgtttaanacatttaaagtatagagtgctagattaagttgcatctggggagtgttatactcc

SEQ ID NO: 37744 - DNA, 378 bp, Homo sapiens
gggccctctagatgcatgctcgagcggccgccagtgtgatggatatctgcagaattcgccctttcgagcggccgcccgggcaggtacagagatgtcatgttggagaactacagcaacttggtctcactgggatgcttcatttctaaaccagatgtgatttcctcattggagcaaggaaaagagccttggaaagttgtgaggaaaggaagaagacaatatccagatttggagaccaagtatgagaccaagaagttatctttagaaaatgacatttatgaaataaatttatcccagtggaagataatggaaagaattgaaaaccatggccttaagggtctcattttaaaaaatgattgggaatccacaggaaaaattgaa

SEQ ID NO: 37745 - DNA, 407 bp, Homo sapiens
agggcgaattgggccctctagatgcatgctcgagcggccgccagtgtgatggatatctgcagaattcgccctttcgagcggccgcccgggcaggtactactaccttgaccctgcatattaggaaaaataaattccttggcattaggagaaagagcagaggttttctgctgttgttgctgctgtggtggtggtgggcggcggtggcggctgggctggctgctgctgttgctgtggctgctgctggctacccaagccaagcccatacagagagtgcattgaggaagagatggctttctgcttcaagaggtcattcacattcaagccgaggttgatgggaagaagtacctcggccgcgaccacgctaagggcgaattccagcacactggcgggccgttactagtggatcc

SEQ ID NO: 37746 - DNA, 460 bp, Homo sapiens
ctactatagggcgaattgggccctctagatgcatgctcgagcggccgccagtgtgatggatatctgcagaattcgcccttagcgtggtcgcggccgaggtacaatttctgccactggtctaggtgtctgaggagcatcttcctggctcagagaccttttgctccaggtgcacatgccgcaaatggcaatctgcgcgcgaactaattcgcggccgcataatttaataacatcgtccttccatttggccgcgactgctctggaaaattggttcagtagtaaacagaattctagcaggtggaacaagaacaggcgaggcaccctgggcctggtctctcctggaggtctgggtgttgcagcctttcaggactgcggctgctgtggcctacacacctgggcctgtgtccccgcgtacctgcccgggcggccgcttgaaagggcgaattccagcacactggcggcc

SEQ ID NO: 37747 - DNA, 422 bp, Homo sapiens
ggcgaattgggcccttagatgcttggcctcaccggccgccagtgtgatggatatctgcagaattcgcccttagcgtggtcgcggccgaggtaccggaatctgcagatcgccaagaattcctataatgatgccctcctcacgtttgtctggaaactggttgcgaacttccgaagaggcttccggaaggaaggcagaaatggccgggacgagatggacatagaactccacgacgtgtctcctattactcggcaccccctgcaagctctcttcatctgggccattcttcagaataagaaggaactctccaaagtcatttgggagcagaaccaggggctgccacttctggcaagcccttgggaagccagccatagctttcttgaaagaccttctggcccaaagttgaaagaaacgaacattcaaat

SEQ ID NO: 37748 - DNA, 371 bp, Homo sapiens
tatacgactcatatagggcgaattgggccctctagatgcatgctcgagcggccgccagtgtgatggatatctgcagaattcgcccttagcgtggtcgcggccgaggtacaagcttcatttgccacaaaactcacaaaaaagtaattgattaaagaatatctcttttatgcaaaatatacattttaggatataatttaattgatattctactatataccgacattgctccttgatcattgaataaaaaaatactctcattgccagaattatgtttttgtaatatttataattgaggtaataatgataaaagacttaaactatgaataatgttggtgagttccatttaagctataacaatttcccagaactaa

SEQ ID NO: 37749 - DNA, 525 bp, Homo sapiens
actactatagggcgaattgggccctctagatgcatgctcgagcggccgccagtgtgatggatatctgcagaattcgcccttagcgtggtcgcggccgaggtacaaatctttggcctttctcttgacattttcgtatgtcaaaaaacaaaaaaccttcatgtatttcaatctagtgattactttttgcaccgattttgttttttacaccacaaaaggaggcactttcagtatctgtaaaaggtatttaatcctaaaacatacttacctagagaataattaaaacggaattcaatacaatctagtatctattaggaaattaagagttatcacttctaaaagtcatttgaaagtcaatgatgttatctggtcaatggcaggaaatgggaactggaacaaatataagaacttatgggatttcctacacggagacaaaaaaagatattcctttatgttgtttaaaagtggcagctgctctttctttattccattttaatcaatgagtattgattcaagttttcctttcta

SEQ ID NO: 37750 - DNA, 112 bp, Homo sapiens
ctagatgcatgctcgagcggccgccagtgtgatggatatctgcagaattcgcccttattttggtcgcggccgacgtacaactgtaggtgacgagtagtcagttatatgcttg

SEQ ID NO: 37751 - DNA, 412 bp, Homo sapiens
tagggcgaattgggccctctagatgcatgctcgagcggccgccagtgtgatggatatctgcagaattcgcccttagcgtggtcgcggccgaggtacagatgtttgcaaagaggcagcagacatgatcctagtggatgatgattttcaaaccataatgtctgcaatcgaagagggtaagggatttataataacattaaaaatttcgttagattccagctgagcacgagtatagcagcattaactttaatctcattggctacattaatgaactttcctaatcctctcaatgccatgcagattttgtggatcaatattattatggatggacccccagctcagagccttggagtagaaccagtggataaagatgtcattcgtaaacctccttgcaactggaaagacagcattttga

SEQ ID NO: 37752 - DNA, 348 bp, Homo sapiens
  misc_feature 138, 199: n = A,T,C or G
gggcgaattgttgcctctagatgcatgctcgagcggccgccagtgtgatgtatatctgcagaattcgccctttcgagcggccgtccgggcaggtactgcccagggaaagccgctgtcctttccttatcctcatcctgngtcccatgctttatacagttagcctcattctgctggttggacccaactgttaacagagttncccggattcggcttggtagtgcttaaagcatcctcaacattgcctcgcttgcaccagccctaacccagcgggctaagaaacaagtgcctcaatcctagggccaagcacttctctgttctcccctgcgtcgtcccttcagtatggaggcg

SEQ ID NO: 37753 - DNA, 181 bp, Homo sapiens
gggcgaattgggccctctagatgcatgctcgagcggccgccagtgtgatggatatctgcagaattcgcccttagcgtggtcgcggccgaggtacagggatgtaatgctggagaactataggaacctggtctccttgggtgagcttgggtccttccaccccagattgacctttcaggatacc

SEQ ID NO: 37754 - DNA, 631 bp, Homo sapiens
  misc_feature 596: n = A,T,C or G
tacgactactatagggcgaattgggccctctagatgcatgctcgagcggccgccagtgtgatggatatctgcagaattcgcccttagcgtggtcgcggccgaggtactattccggatatacaagatcactgggagatgttgatgatggagacacagtgacagatttcatggcccaagagcagaaagaggcattactattcaatcagctgctgttacatttgattggaaaggttatagagtcaatctaattgatacaccaggtcatgtggactttaccttggaggttgagcggtgcctaagagtgttggatggtgcagtggctgtatttgatgcctctgctggtgtagaggcccagactctcacagtatggaggcaagctgataaacacaatatacctcgaatctgttttttaaacaagatggacaaaactggagcaagctttaagtatgcagttgaaagcatcagagagaagttaaaggcaaagcctttgcttttacagttaccaattggtgaagccaaaactttcaaaggagtggtggatgtagtaatgaaagaaaaacttctttggaattgcaattcaaatgatggaaaagacnttgagagatagcccctcttggaaatgaatgatcct

SEQ ID NO: 37755 - DNA, 581 bp, Homo sapiens
ggcgaattgggccctctagatgcatgctcgagcggccgccagtgtgatggatatctgcagaattcgcccttagcgtggtcgcggccgaggtactttacacctgggtctgaagtagggttgccagatgaaatacaggacacccagctaaatttgaatttcaggtgaacaacaaatcattgtttagattaagcatgttccatgcagttctggggacatacttaaccttatagatttatttcatttatctaaaattcaatgaactggggcagtctgtatttgctaaatctgctggccttagcctagaggcagtggtatgttccagctgactccaatcagctcatgagagtcaactgtaaaatatttaggagatttatgagctggttattaaaccactggtggcttgaaatcaaccatggtgggagtatttacaccacagaaattggtgactaccacacatcagtgcttttcctttacagagctggttatagaacattccccctggctgggtgcggtggctcacgcctgtaatcccagcactttgggaggccgaggtgggtggatcaccaggtcaggagatcgag

SEQ ID NO: 37756 - DNA, 403 bp, Homo sapiens
tagggcgaattgggccctctagatgcatgctcgagcggccgccagtgtgatggatatctgcagaattcgcccttagcgtggtcgcggccgaggtaccatgcgtgaaaaagcagctgttaccctccaagtgcaatatgaaatctggaacaagaccctctcagaggcctgcgtgtctcaatgagtgaccctcaaagaaaccaaaatgtataggaggaagtagctgaccagtcatgggcatttttccacattgggataattcttaaaacagaggcagcttttggacctctagcgtaagagatagactttacattctttgattttatttacacttttttaaaaagataaagtatatctgaatttctcttatcacacctaaactgctggtgcactggcagttcaagct

SEQ ID NO: 37757 - DNA, 437 bp, Homo sapiens
cactactatagggcgaattgggccctctagatgcatgctcgagcggccgccagtgtgatggatatctgcagaattcgcccttagcgtggtcgcggccgaggtacattctgggagaatatcactgacgctcaaaccatttttatttccaatatgtatttcaatacatgtttgtttccacttttcccagtgccacacacacacacacaaaaacaaaacaaaacaaaaaaaaacagtcacaagttggattacattagaattggtgccacagttgacttttaaaagcattttaataaccacccaactcttagattttgcagtttagggacttcaagttcagaaccaaaaagcagagaatcgtttcatgtgacatgatgttctctatagaacctcttgctctctaggtgacaaatgcaagagccagggcaaaggtgtttaag

SEQ ID NO: 37758 - DNA, 361 bp, Homo sapiens
  misc_feature 304, 307: n = A,T,C or G
tacgactcactatagggcgaattgggccctctagatgcatgctcgagcggccgccagtgtgatggatatctgcagaattcgcccttagcgtggtcgcggccgaggtaccatgctgacttcttggtatcttttaaggcctaattttcccttccttgagattactgtagtgtgttccagctaatttctatttggaaacgagttggaacagctgaaaactaggtattattgaaggcaaagcagcctcacgtcagttttttatcagctcatttgggaagtttttttttttttttttttttttttaatnaantagaaagtaggctgggcacggtggctcatgcctataatcccagcacttggggag

SEQ ID NO: 37759 - DNA, 429 bp, Homo sapiens
ctactatagggcgaattgggccctctagatgcatgctcgagcggccgccagtgtgatggatatctgcagaattcgccctttcgagcggccgcccgggcaggtactcaggtttttaagactaataaccacacaaggtgggtacctaagaaggcagctgttaatacattctccatctttcctgcctggcaacagggaagatattattggtgagatagtgcaaaattgtgagaattggttatgttcgatgatgaataaattcaagatttttgaaggcttcactgctatttgggatgggaaggtgagtttacaaaatgaaaaaggtagatttttatgttacagaaatcagtaacgggtttcttgttgtgttaattacctttcacttgatttgccatgatgtttcttcctcattattgatctagaaagtttgcc

SEQ ID NO: 37760 - DNA, 423 bp, Homo sapiens
  misc_feature 30: n = A,T,C or G
cgactactataggcgaattgggccctctanatgcatgctcgagcggccgccagtgtgatggatatctgcagaattcgccctttcgagcggccgcccgggcaggtacatgtaatatgcagaggtgtttgtgagctgcagcagtagtgtatcatttgcatcttttgaacaattgtctttgggatccatgtgatgacatctgtctttattggaggaaagataatttcttgatcaactccgtttttattattctcacgtctgacgatacatctgtgttctttgtccagtgacttttctggcaccgttaaccagctaaatttcatgtatgtgtcgttagtcttcatggtgttcccctcctgggatcccagaatcgtgttgctcttcttttcttgccaatgtatcttaataacatcagggaaaaatttc

SEQ ID NO: 37761 - DNA, 240 bp, Homo sapiens
tacgactactatagggcgaattgggccctctagatgcatgctcgagcggccgccagtgtgatggatatctgcagaattcgccctttcgagcggccgcccgggcaggtacttttttttttttttttttttttttttttttgggttttttttttaagtaactttgttgctttaaatataagtgaaaaatactgtatttaactttttgggtgccttccatcttgaactaaagatttcccatgg

SEQ ID NO: 37762 - DNA, 607 bp, Homo sapiens
  misc_feature 378: n = A,T,C or G
catgctcgagcggccgccagtgtgatggatatctgcagaattcgccctttcgagcggccgcccgggcaggtacagattcctcttagtcaagtcctgattaaaactccagctaagacattagtaagccttggttagtgaagtggcataggaagtgcctacattttcatggcctggtagcgttcagtgaaaatgttcattaacagacacaggccattcagtcccgaatcccaagacactgaagactctgtttgaatcagactcacgggttccttcctagccactctcagggacaggaatgcttctggtgaagaagttttcggtggtggttcatggagcttccctacaccaacttggaaatggcattcattttattggctnttgttatcttttccttatttaccctggcttccatctacactactccggatgacagtaatgaagaggaagaacatgaaaaaaagggaagggaaaagaaaaggaaaaagtctgaaaagaagaaaaattgctcagaggaagagcacagaattgaagctgttgagctatgatctcatagccaccgatatttctcgctaagaagacagaggaagcaatccatgggaactactta

SEQ ID NO: 37763 - DNA, 438 bp, Homo sapiens
tatacgactcactatagggcgaattgggccctctagatgcatgctcgagcggccgccagtgtgatggatatctgcagaattcgcccttagcgtggtcgcggccgaggtacttttttttttttttttttttttttcttttttttttttttttttttttttttttttttttttttaaaaaaaaaaggccttacatatttattactgaatccacccaaccaacgtgttcataacagattcagagaggaaaacccgtcaaaatctccaaataggggggacattttcagcttgatatggtaacatgatcgggaccttcaaacagcataaatttcccgcgtccagggacttatcaaatcccctggtcattttccagctttttgaaaagatcaaagttcctgttgactggaccaaagtaaacaaaccgccataccccaaactggg

SEQ ID NO: 37764 - DNA, 376 bp, Homo sapiens
gcgaatcgggccctctattatgcatgctcgagcggccgccagtgtgatggatatctgcagaattcgccctttcgagcggccgcccgggcaggtacaaggctaagcattttaactttatactggaaaaaaaatcaaacaaaggggagggataaaggacttagtcatctttgcactggaaaacaaaatatgtaattaaattcccatagctgcatgtaacattgaattcttccaggttaaaaaaaagttaatcctgtgatattaatggaatgacattttgaggtcttgagaatgggcacaaaagtgggaaatgaatttcagtatgggcaaagacactgaggatgatgttgattagataattcactccgtaatgatcatg

SEQ ID NO: 37765 - DNA, 443 bp, Homo sapiens
ctactatagggcgaattgggccctctagatgcatgctcgagcggccgccagtgtgatggatatctgcagaattcgccctttcgagcggccgcccgggcaggtactttgtagaacacaaagctgatttggaagtgtcaaaccgacatgggcatacgtgcttgatgatttcatgttacaaaggacataaagagattgctcagtatttacttgaaaagggggcagatgttaatagaaaaagtgtcaaaggtgagttcagcttctttgtttttctaaatgtctaccacttattttcaggaagtttgatacatcattataagcactggtgttgagtaaaccagcattgacagacctgttttgattaggtaatactgcattgcatgattgtgcagaatctggaagtttggacatcatgaagatgcttcttatgtattgtgccaagatgg

SEQ ID NO: 37766 - DNA, 530 bp, Homo sapiens
actatacggcgaattgggccctctagatgcatgctcgagcggccgccagtgtgatggatatctgcagaattcgcccttagcgtggtcgcggccgaggtaccaaatataaaatgctgcaagattttgaatgaatggtgagagtgtaagaaaatgggctgtatttcaatgctcctgtggcaggatgtcaatcaagagcttggagccaaagaaaaagaaatcccttcctagcacaaagcttggctgttcagtgaatagcgtttaaataaccgtaaaataaaaatcctgtttatgatttttattgattaggggcctacttaattaaggttaccaagtggaatgcaaatgttatctgccatattttaaaaatatcagcggaaatacaagtgggaacgttgaaggagagagagaaaggtaaatggaatggtgatagtgtccttataaagtggacagttgagccaggcacagtggctcacacctgtaatcccagcactttggtaggccgaggcggggggatcacctgaggtcaggag

SEQ ID NO: 37767 - DNA, 363 bp, Homo sapiens
ggatatctgcataattcgcccttgtgagcggccgcccgggcaggtaccagctaacgcatctgggaggcaacaaaacaatactctcctgaggttaatgtggaccaaaaactagatttcatataaaagagtttattccttctacttgaggtgtgacatgaaggaaagtaatggaaataattctgccctcccattctcaagggccagggggaattcaaatattgaacggaagtgattttggaattgcatggaattctcactgccatcccaaagaaatgctgatcttgtcactcttacctgtttcattccctgggggcagaacaaaaggacgcactccaaagatcggcatgaaccaagaactgggtt

SEQ ID NO: 37768 - DNA, 239 bp, Homo sapiens
aattgggccctgtagatgcatgctcgagcggccgccagtgtgatggatatctgcagaattcgccctttcgagcggccgcccgggcaggtacgcgggggggcctgaggcgaacaatggcggagctgggcgaagccgatgaagcggagttgcagcgcctggtggccgccgagcagcagaaggcgcagtttactgcacaggccacgtgcccgtagaaaagatactcatccactgtgggtttt

SEQ ID NO: 37769 - DNA, 179 bp, Homo sapiens
gactcactataggcgaattgggccctctagatgcatgctcgagcggccgccagtgtgatggatatctgcagaattcgccctttcgagcggccgcccgggcaggtacaaagaagcctcaatccccaggacacccttccgtgcatggtgtcactgacatctttatttcttttgtcacgttc

SEQ ID NO: 37770 - DNA, 393 bp, Homo sapiens
  misc_feature 9: n = A,T,C or G
tagggcganttgggccctctagatgcatgctcgagcggccgccagtgtgatggatatctgcagaattcgcccttagcgtggtcgcggccgaggtacttttttttttttttttttttttttttgccttgaaatgtttttaatagaattggtctagtaatcgttcaggatttcggtgatgggccctccctgtctggacactgccaacccacagctggaggggcacttaaggcacgtcattttgtgattagaattacacaaaatttgattaatattatagctgcaaaattaacatacacaattttcactcataatttaaaatattttgatgaaattctttgctttcacaatagaagatcaatggtacctgcccgtgcggccgctcgaaagggcgaa

SEQ ID NO: 37771 - DNA, 496 bp, Homo sapiens
ccctctagatgcatgctcgagcggccgccagtgtgatggatatctgcagaattcgcccttagcgtggtcgcggccgaggtactccagccagggcaagagagcgagaccctgtctcaataaataaataaataaataaataaataaataaataaataaaaaaaaacaaagttgattaagaaaggaagtataggccaggcacagtggctcacacctgtaatccttgcattttggaaggctgaggcacgaggatcactttaggcctggtgtgttcaagaccagcctggtcaacatagtgggacactgtctctaccaaaaaaaggaaggaagggacacatatcacactgaaacaaaattagaaatgtaattatgttctaagtgcctccaagttcaaaacttattggaatgttgagagtgtggctacgaaatacgttaggaagacaaaaggaatgtgtaagtctttaatgtcgatatcttcagaaaacctaagcaaacttac

SEQ ID NO: 37772 - DNA, 267 bp, Homo sapiens
atagggcgacttgggccctctagatgcatgctcgagcggccgccagtgtgatggatatctgcagaattcgcccttagcgtggtcgcggccgaggtactttttttttttttttttttctgaattaattaggtattggtaaaatacatttttaaatttagttagctttataaacacaattagaattacaattaattaacagaggtataattgtctcactttcaaaagtgaacatttatttttatttatgcacagttcataagaaaaata

SEQ ID NO: 37773 - DNA, 426 bp, Homo sapiens
atacactactatagggcgaattgggccctctagatgcatgctcgagcggccgccagtgtgatggatatctgcagaattcgccctttcgagcggccgcccgggcaggtactactactccctaacccaaaccaggtgattctagtgaagactgtcaataaacggagcatgtgatcaagcagggcccatcagaatccttccctaagatttttataaaaagctggacctattctttttccatttgagtggcaaatatttgaagatatgaggtctaaagctgtgatggcttattctccatccctgtgtaaattctggtctatagtaagcgaaaacaaggccattaggcagagggcagcagagacataaggtgagaaagagtgtggtctctggtttttctagaccctgattctgggtttggaggcttggctg

SEQ ID NO: 37774 - DNA, 271 bp, Homo sapiens
tatagggcgaattgggccctctagatgcatgctcgagcggccgccagtgtgatggatatctgcagaattcgccctttcgagcggccgcccgggcacgtcgcggggaaggttttccatgatattgcttaatttcatctgcacaagatgagacacaaacataaaaattccctgctcattttaataccaataaagggctgaggttattttctctgtccataaaattgtaaattagcattttttaagttcaaaattacattttaaaaacagttgg

SEQ ID NO: 37775 - DNA, 413 bp, Homo sapiens
atacgactcactatagggcgaattgggccctctagatgcatgctcgagcggccgccagtgtgatggatatctgcagaattcgccctttcgagcggccgcccgggcaggtacaggaagacaggaaaaagaaaacagaaacaaaagaaaccagacagagcagacaggaaacaaaatctaaaatgacagacttaaaccctaacttaaatgtaaatggtttgaatttagcaattaaatgacggagtggtaaaatggattaaaacacatgacccagatatataatatttacaagaaacaaatttaaaacataatgatatagccagtttgaaaataaaagggttaaaaatacacaaacaccattcaaagaaaagtgggaatggctatattaatatcagataagatagacttccaagcaa

SEQ ID NO: 37776 - DNA, 338 bp, Homo sapiens
cgactcactatagggcgaattgggccctctaaatgcatgctcgagcggccgccagtgtgatggatatctgcagaattcgcccttagcgtggtcgcggccgaggtactttttttttttttttttttttttttttatctaacacatttaattttggaacaaaggagcaactcctttaaatttgaagtccatatatttatatcagcttaaacctaagctttgtaacaatattttgagcagcaaaaaggaaggctagaaaaatgctaaagatgtccttactagtgacaaattcttgctgaagaacaagttctctggaagtgaaactcaaataggagagaaca

SEQ ID NO: 37777 - DNA, 407 bp, Homo sapiens
  misc_feature 301: n = A,T,C or G
agggcgaattgggccctctagatgcatgctcgagcggccgccagtgtgatggatatctgcagaattcgcccttagcgtggtcgcggccgaggtactgcataattatagtcaatgcttgcaataattttcagtttgtctcatcacgttagcagagcctattcatgcaatttagaaaggatttcaatacagcccaaacccaaaaggcttacggtcaacagagggttagccttccataaatgagaaatccaaaaaagaataatgccacgtatttcaggaatgtcggttagaggtttggccttcntgggaagtgtcacaatgctgagtctaaaactgcaacagttaccgtgtccaagtcatgcaactctaaaggaggatggacggtcacatttgtgtctttcagtatcaaa

SEQ ID NO: 37778 - DNA, 443 bp, Homo sapiens
tatagggcgaattgggtcctctagatgcatgctcgagcggccgccagtgtgatggatatctgcagaattcgcccttttgagcggccgcccgggcaggtaccagagacaaaaacagaagaggggaaacatgtttcctactgacgacaggtgattacacgtgtgcttctgatggagggatcaggaaaggatatgaaaaatcccgaagcttaaacaacatagcgggcttggcaggcaatgctctgaggctctctccagtaacatcaccctacaactctccttgtcctctgaggcgctctcgatctcccatcccatctatcttgtaaaccaaacaaccaaactgcatcagtcggctaaattgtattaattcaagcgctgtttaccccataatggaaataattaaatgtagagttactccaggctccattaatacagtataaatcttg

SEQ ID NO: 37779 - DNA, 430 bp, Homo sapiens
actactatagggcgaattgggccctctagatgcatgctcgagcggccgccagtgtgatggatatctgcagaattcgccctttcgagcggccgcccgggcaggtacttttttttcttttttttttttttttggcagttctcttctctgctaggcattaaactttaaaacatttgaatcattggaccataatgcttcaccctaacgatatttatataaaaggaagagaaagacattttcttttttttgagacggagtttcactcgttgcccaggctggagtgcaatggcgcaatctcggctcaccgcagcctccacctcctgggttcaagtgattctcctgcctcagccttccaagtagctgggattgcaggcatgcgccgccatgcctagctaaatttttttttgcatttttagtagagacggggcttctc

SEQ ID NO: 37780 - DNA, 467 bp, Homo sapiens
gctctagatgcatgctcgagcggggatatctgcagaattcgccctttcgagcggccgcccgggcaggtactcagccttttaaagcttgaggtgggatgtgtgtgggctgaaattccgagctgcggttgtgcatgagaatacacccttcgtggtactaaataggtgggttaaatgtggtaattctagttcagtgtcttaccctgaagagaaagttgtaggttggctgttgaaattcattccttagatatgatcagtttgattgcccggctttattgcctttacaggaatgtgatactcagggcttactctatacaccaatgagtcttctttgatcccaagaccaccactgaagttgtttaggttcttttggacaaacatgataaacttcttcagatacttttttttcctttggcaggaaggtgtcttgctgcaagtaactaatgaagaagtggtcaaccacagagtct

SEQ ID NO: 37781 - DNA, 226 bp, Homo sapiens
tgctcgagcggccgccagtgtgatggatatctgcagaattcgcccttagcgtggtcgcggccgaggtacctgccctcaatggagctcacagtctagtgggggttgaaagacaggatatagacaataaaataaatatgtaaaatatttgtcatgttacattttgatatacaacatgaagaaaaattaatcaaggaagagagatagggagtaaagggtggagggttat

SEQ ID NO: 37782 - DNA, 441 bp, Homo sapiens
actatagggcgaatggggccctgtacatgcatgctcgagcggccgccagtgtgatggatatctgcagaattcgcccttagcgtggtcgcgggcgaggtacgaaaaaatcaggctactaagcccactgttaatatagacgcagaccaattgttaggaacaggtccaaattggagcaccattaaccaacaatcagtgatgcagaatgaggctattgaacaagtaagggctatttgcctcagggcctggggaaaaattcaggacccaggaacagctttccctattaattcaattagacaaggctctaaagagccatatcctgactttgtggcaagattacaagatgctgctcaaaagtctattacagatggcaatgcccgaaaagttattgtagaattaatggcctatgaaaatgcaaatccagaatgtcagtcggccataaag

SEQ ID NO: 37783 - DNA, 439 bp, Homo sapiens
cgactcactatagggcgaattgggccctctagatgcatgctcgagcggccgccagtgtgatggatatctgcagaattcgcccttaacactatcggaataagggcgaattccagcacactggcggccgttactagtggatccgagctcggtaccaagcttggcgtaatcatggtcatagctgtttcctgtgtgaaattgttatccgctcacaattccacacaacatacgagccggaagcataaagtgtaaagcctggggtgcctaatgagtgagctaactcacattaattgcgttgcgctcactgcccgctttccagtcgggaaacctgtcatgccagctgcattaatgaatcggccaacgcgcggggagaggcggtttgcgtattgggcgctcttccgcttccttcctcactgactcgctgcgctcggtcgttcggctg

SEQ ID NO: 37784 - DNA, 426 bp, Homo sapiens
cgactactatagggcgaattgggccctctagacgcatgctcgagcggccgccattgtgatggatatcttcagaattcgcctctagcgtggtcgcggccgaggtactattaggaaaaatctgtgtgtattgtatagctctagctgtttgactatctgtaatgaaaatgctgcacttcaactggtattccattagagaaccgtgtgtgtgcgtgtgtgtggtgcctttgagcaactttatttatggttaccatattttaaaaagatttttttgtcagggtgacttaacatggactcttatagggtattaaaacaatctagattattccttttcatcctaaataagcctaccaaatttcatgctgttggtttgccatgaatgatattacttcctacattatatttgtgttttttcaaatctgctatgga

SEQ ID NO: 37785 - DNA, 512 bp, Homo sapiens
ctactatagggcgaatggggccctctagatgcatgctcgagcggccgccagtgtgatggatatctgcagaattcgcccttagcgtgtcgcggccgaggtacattgtttttctcctgctgttaattaggtgtatccccaagacaataaatacatgaatggaaaagtatattctgtgttttaagtctctttaataaaaaacaaaacaaaatccaaaaaaactcctaacatggcaactcaggacattttaatccttttttttgttgttgggcttctgataggatccattttattgattccataaatatttagtagactttagacatattaatacattgtagtttgagttaatttgcattaaattctgttttttccccctaggtatagattgtctgttggaaaaatatattgcttgtggatttcttggggagtgggaaggtgaattatacctgttgtctctacagtccactaccttccacaccctagggcagtggtccccaaccttcttggcacca

SEQ ID NO: 37786 - DNA, 554 bp, Homo sapiens
acgactcactatagggcgaattgggccctctagatgcatgctcgagcggccgccagtgtgatggatatctgcagaattcgccctttcgagcggccgcccgggcaggtacccctccaccttcagcttgtagcgagtcttggcatctcccacgctgaacttgtcatagacagcaaaggctgtctccccatggtcccgcaggtccacccggagctcgtactccagccagggcaagagagcgagaccctgtctcaataaataaataaataaataaataaataaataaataaataaataaataaaaacaaagttgattaagaaaggaagtataggctaggcacagtggctcacacctgtaatccttgcattttggaaggctgaggcaggaggatcactttacgcctggtgtgttcaagaccagcctggtcaacatagtgagacactgtctctaccaaaaaaaggaaggaagggacacatatcaaactgaaacaaaattagaaatgtaattatgttctaagtgcctccaagttcaaaacttattggaatgttgagagtgt

SEQ ID NO: 37787 - DNA, 434 bp, Homo sapiens
tatagggcgaattgggccctctagatgcatgctcgagcggccgccagtgtgatggatatctgcagaattcgccctttcgagcggccgcccgggcaggtacgcggggagatggctgtgtctgtaagcgggaggcgtgcccggttcatccaaggcgcaagatggcgctgctttttgcacgttctttgcgcttgtgccgctggggagccaaacgattgggagttgcctccacagaggcccagagaggcgtcagtttcaaactggaagaaaaaaccgcccacagcagcctggcactcttcagagatgatacgggtgtcaaatatggcttggtgggattggagcccaccaaggtggccttgaatgtggagcgcttccgggagtgggcagtggtgctggcagacaccagcggtcaccagtggcagacactactgggaagc

SEQ ID NO: 37788 - DNA, 443 bp, Homo sapiens
ctatagggcgaattgggccctctagatgcatgctcgagcggccgccagtgtgatggatatctgcagaattcgcccttagcgtggtcgcggccgaggtacttttttttttttttttttgtggtgggattatgtgcctcccatccactagaaaatgagaaaattgtctgggttccaaaatattgacattgaatggatcaatacacacacacagacatatatatatatgcacacatatataggcagttgcatgctagcatgggtatttttataacaatataactgagttatattggaattataaatattttccgtcacttaaatttgttctttgtttagcctgaaaacctttatggctcaagatcagattcctgactaacccctctcttagagctacagcgagctgcattaccagcttaaaacacttcttagggattaaatataga

SEQ ID NO: 37789 - DNA, 650 bp, Homo sapiens
tacgactactatagggcgaattgggccctctagatgcatgctcgagcggccgccagtgtgatggatatctgcagaattcgccctttcgagcggccgcccgggcaggtacaccatgacgatgctgatttgtgaacaggataccaccaggatgatgaaaacaaggaacaggaagccaaaaggtaatagaactgattctcccagatagcactgaagatgaagaagagctcgatgaacatggcgccgaagggcaagatcccagccatgaggatgcccacaaatcggttcatgtactcgaaaccttcaccgtgaagtcctgtcctgatgccatcaaagaggtcttcgacaataaattccacatcatcggcgcagtgggcatcggcattgccgtggtcatgatatttggcatgatcttcagtatgatcttgtgctgtgctatccgcaggaaccgcgagatggtctagagtcagcttacatccctgagcaggaaagtttacccatgaagattggtgggattttttgtttgtttgttttgttttgtttgttgtttgttgtttgttttttgccactaaatttagtattcattctggattgctagataaaagctgaaagtactttatggttggcttttaatgcttcattcaatattgaca

SEQ ID NO: 37790 - DNA, 255 bp, Homo sapiens
gcatgctcgagcggccgccagtgtgatggatatctgcagaattcgcccttagcgtggtcgcggccgaggtacttttttcacttttttccctttgtatatcagttacgggttacaactggttcattctgaaaacaacaacaacaaaagtccattcatattttttaacaattgtataagtgcccaagtaattcactacagcctaaagccttgcctttgtaatttgacttctgacatgttggcaatcaaagcatgcac

SEQ ID NO: 37791 - DNA, 401 bp, Homo sapiens
actactatagggcgaattgggccctctagatgcatgctcgagcggccgccagtgtgatggatatctgcagaattcgcccttagcgtggtcgcggccgaggtaccccaaattatattcaagtccctgtgactccaatgcttggagaagtcattgatatgatttgattaatgttataactttgaatttcctaactttctcagcggcatagattctaagccacttccatgtgctttcagatggcatcttaatagattggtgttgaggttattttaatgtccataaacaagaaaggtctgggaacaatctgtatgatttttctttcacattttcttatctttgccactggaggttaactgtcgtccagatatgcatatgaattgtgaaatgcaaagaagcaaaca

SEQ ID NO: 37792 - DNA, 308 bp, Homo sapiens
acactactatagggcgaattgggccctctagatgcatgctcgagcggccgccagtgtgatggatatctgcagaattcgcccttagcgtggtcgcggccgaggtactggaagattatgagataaagtgcacatgctagtctttcctggattgaatttaccaaaagccaaacatgctgtgaaacgtctgcaatcagaacagtgctgatagccgggcgggtggctcacgcctgtaatcccagcacttcgagaggccaaggcgggtggatcacttgaggtcaggaaatctagactagcctagccaacatgac

SEQ ID NO: 37793 - DNA, 637 bp, Homo sapiens
  misc_feature 343: n = A,T,C or G
ctactatagggcgaattgggccctctagatgcatgctcgagcggccgccagtgtgatggatatctgcagaattcgcccttagcgtggtcgcggccgaggtacacaagtaactctgattatttgcaaatactaattaaaatatatcacaccaaagaactgccaagtttttatattgtggtctgtggtcctgtcataatctgttttcccagtgcaaaattaataatgctatgtgttcatccaactcagccactgcttttcacagggcatagagctctttgagagctcagctgagaagtgtaatgcatggttgtagctcaacaagtgaaggatagaccaaacgctntttgtcagaagtcattcagtccttggtcctatctgctaagttaatgtccttttctgtgggttaagttacaaaaagtgaaatcaaattctcaaatctcatagactccgtaaggtaaagatacaaactatgtacctgcccgggcggccgctcgaaagggcgaattccagcacactggcggtcgttactagtggatccgagctcggtaccaagcttggcgtaatcatggtcatagctggtttctgtgtgaaattgttattccctcacaattccacacaacatacgagccggaagcat

SEQ ID NO: 37794 - DNA, 443 bp, Homo sapiens
actactatagggcgaattgggccctctagatgcatgctcgagcggccgccagtgtgatggatatctgcagaattcgcccttagcgtggtcgcggccgaggtacaaccctgaagaagaggaggctggtcacttgtatagacttatgcaaagcttctgctttgagaaaatatgtggaatttgggcactccaagttgagtcaccacatgaatgtttatcttaaaaactgtttacaagcacactggtggtaactgtggcttcccaattcgtaattataaacaaagactcaataaacatttattgaatgggatggctcaaactgtctgctgctgtgcacctcccacaaggcacagtagtaggtagctatgtcctgtttctctacattgtgaatggtggagagtgggatgttagacgcttcaggtatcctatccacctcaaatttgcct

SEQ ID NO: 37795 - DNA, 430 bp, Homo sapiens
acgactcctatagggcgaattgggccctctagatgcatgctcgagcggccgccagtgtgatggatatctgcagaattcgccctttcgagcggccgcccgggcaggtacgcggggatctcgcgagactgtcggacgtatggcgagaggtgtgggaggaagattgtgttgtcgcgagaactctgcctttgggccgtaggttagtgtggggccgtgtctcagtccacccaaggtctcctcggatcgcctggagaggcactcggacctggagcagtgaggagaatgaataccttccaagaccagagtggcagctccagtaatagagaaccccttttgaggtgtagtgatgcacggagggacttggagcttgctattggtggagttctccgggctgaacagcaaattaaagataacttgcgagaggtcaaagctc

SEQ ID NO: 37796 - DNA, 373 bp, Homo sapiens
ttgggccctctagatgcatgctcgagcggccgccagtgtgatggatatctgcagaattcgccctttcgagcggccgcccgggcaggtactggcacaagttgatgggtccattttcttcatacagcatacatggcataattctttatcatctttgccatcagaactggcacacgtacttttttttttttttttttttttcacaattgcaggagattttattggccccatgacatccagtgacagtgtgggagcaggctactctccagggacatgtttttggaggcatatggagaagggggcccaggcgaggtggctcacacctgtaatcccagcactttggggaggtcgaggtgggaggatcgcttgaggccag

SEQ ID NO: 37797 - DNA, 200 bp, Homo sapiens
acgactcactatagggcgaattgggccctctagatgcatgctcgagcggccgccagtgtgatggatatctgcagaattcgcccttagcgtggtcgcggccgaggtaccctcattgtagccaggggaaaattgatgttcagtggggatcagtgaattaaatggggttcataccaagtataaaaatttaaaaaaaaagactt

SEQ ID NO: 37798 - DNA, 360 bp, Homo sapiens
  misc_feature 15, 158: n = A,T,C or G
tacgactcactatanggcgaattgggccctctagatgcatgctcgagcggccgccagtgtgatggatatctgcagaattcgcccttagcgtggtcgcggcccgaggtactatgatcagtgtgaatcccagtggcgtaatccaagattttatatttttnttgtgatgcccgttgcatcatggattaacccaaaagatgatctcagagacatgttctgtaagatccttcatggatttaaaaatcaagttggcgatgaaaattggaggcgtttctctgaccagtttcctcttcccttaaaagagcgtcttggagctttttatggtgtttaatctaatacacttaagctgcagtcccaaaatta

SEQ ID NO: 37799 - DNA, 259 bp, Homo sapiens
agggcgaatagggccctctagatgcatgctcgagcggccgccagtgtgatggatatctgcagaattcgccctttcgagcggccgcccgggcaggtacgcggggagattacctcatttcagctcaataaaacatcaccaaattcccttaggcagaaaaagggtggggagtgccctttcttgaaggaatcccttaagtgcaccgtctcccgtttttcttttcacatcaatgcagagtaccccttctgtgaatttacaacac

SEQ ID NO: 37800 - DNA, 422 bp, Homo sapiens
tatagggcgaattgggccctctagatgcatgctcgagcggccgccagtgtgatggatatctgcagaattcgcccttagcgtggtcgcggccgaggtaccgtctttgttgacacagtagggctgggcagtgtttaatccttccattttatagatttttttttaatcaggccttttggacttcattcataattttgcaataatctcttttcccttgtcatgcaagccaaaaatataccagtaaaacagattctgacgtgtttgtagttatcaaatgaatggctcgaaacacttctcaaaaggatatacgtattgaccccaacaataaatgtttgtggctagtgacttgttttttgctatgttgattcagtgaatgacctagaagtcagtcttgatgaaaaaagatatggtttatgcaacctttg

SEQ ID NO: 37801 - DNA, 400 bp, Homo sapiens
  misc_feature 333: n = A,T,C or G
actatagggcgaattgggccctctagatgcatgctcgagcggccgccagtgtgatggatatctgcagaattcgcccttagcgtggtcgcggccgaggtacaggtataatgttaatcaacttggtgatgcccatgactggaaccagaacagagcaaaacaagctatcgatcagggaagatctccagttataatagataacactaatatacaagcttgggaaatgaagccatatgtggaagtggccataggaaaaggatacagagtagagtttcatgaacctgaaacttggtggaaatttgatcctgaagaattagaaaagaggaataaacatgngtgtgtctcgaaagaagattgctcagatgtttggatcgttatgaatatcaaatggtccatttctatt

SEQ ID NO: 37802 - DNA, 399 bp, Homo sapiens
  misc_feature 40: n = A,T,C or G
tagggcgaattgggccctctagatgcatgctcgagcgggncgccagtgtgatggatatctgcagaattcgccctttcgagcggccgcccgggcaggtacgcgggaccttgagatctgagcaactgtgttaatgaagtaatagcaatggtccacagtgaaagatgtgttggggtttgcaaaacaagcattccgtcacctctttaataatgtcacagactttttaaaagagaggctatcaagttgtaatataatctgtcatgttttatttaggaaggaaggtaaatttgtgcttgcacggggatcattttgtattatttttgctaatacccagttgaagctaaaaagcaactatttgaatcctgtgaattaatttataagaaatgttaaacagctttggaa

SEQ ID NO: 37803 - DNA, 418 bp, Homo sapiens
  misc_feature 367: n = A,T,C or G
ctactatagggcgaattgggccctctagatgcatgctcgagcggccgccagtgtgatggatatctgcagaattcgcccttagcgtggtcgcggccgaggtactagctctctgcttcattaaaagctcttggaaagaatattaaatctcaagacaacagaataattgaacacacaatacatttgtgtctttgtatccaatatattacctttgtcttattaacaaaaattatatctctcattatatatttcttggatctgaagtttttattcacactcagtaatttctgtaaaggacaaatctgtctctattttccatatcatttagaaatataccacattcactctttttgatgtgaactttcccagngaaaattctcttgtgcccatttagttttagaagagtgtcattttgtgctat

SEQ ID NO: 37804 - DNA, 350 bp, Homo sapiens
ggcgaattgggccctctagatgcatgctcgagcggccgccagtgtgatggatatctgcagaattcgcccttagcgtggtcgcggccgaggtacgcggggcttcttttcgaggtcggccgcgtggctggaagacatggccactccagtcggtgttgagcacggcgagcagtctaaggcctttagtgatgatgattaaaggtggcggctgtggccttgaaaacagtcatgtgaaaactcatcaccttaaggtgttaagtgtaaggatcttcacgatgaaatttctgtaaatggtgcagtcagcctcagtttccaaagccggaaaaggaatcctctagtagccacggtgtggc

SEQ ID NO: 37805 - DNA, 433 bp, Homo sapiens
gcgaattgggccctctagatgcatgctcgagcggccgccagtgtgatggatatctgcagaattcgccctttcgagcggccgcccgggcaggtactttttttctttctttttttttttattatggttagctgtctcttaaaaagcaagaaaagaaagagaagactgagaataaaaaaaatctctttgaaaataaaataagactgctaaaagtatttggtatacagtctggaaaataaagttgagggaatctctccagataaagagcaaaaagaaatagatagaaaaatataaagaaagaaaaaagacatagacaatcaatatgtaatgttaggagttcctggaagagagaacagagacagtgtaggtgaagaaataaaaagaaaaagaattgaagaacagagcaagctaagtctccagattgagagggcccaat

SEQ ID NO: 37806 - DNA, 425 bp, Homo sapiens
acgactcactatagggcgaattgggccctctagatgcatgctcgagcggccgccagtgtgatggatatctgcagaattcgcccttagcgtggtcgcggccgaggtaccaagaaagtcgggatcgtcggtaaatacgggacccgctatggggcctccctccggaaaatggtgaagaaaattgaaaatagcccgcacgccaagtgtaccaaagagggcataataatcagtctcacagtagggttcaccatcctccaagtgaaaaacattgttccgaatgggctttccacaggctacacacacaaaacaggaaacatgccaagtttgtttcaacgcattgatgacttctccaaggatcttcctttggcatcgaccacattcaggggcaaagaatttctcatagcacagctcacaatacagggctcctt

SEQ ID NO: 37807 - DNA, 142 bp, Homo sapiens
  misc_feature 79, 83, 92: n = A,T,C or G
acgactcctatagggcgaattgggccctctagatgcatgctcgagcggccgccagtgtgatggatatctgccagaattnccgnccccccctntagcgtggtcgcggccgaggtactttttaccctcagcatttatgatgtaa

SEQ ID NO: 37808 - DNA, 437 bp, Homo sapiens
actactatagggcgaattgggccctctagatgcatgctcgagcggccgccagtgtgatggatatctgcagaattcgccctttcgagcggccgcccgggcaggtacctcctgttccctgtctgagcatcctgcatggaagtcaaaggaaatccctttcttggtgacgacttaaatctgggttccctcagacattgggttgcaccccaacaaatattaaatggcttcttcttaaagcccagagaaagaggttttttaaaagactgtcgccaaatagctgagccaaaaggctgatcagaattcactttttggaatgtggcagttaaacactaccttgatcattctctcctctttcctcgaggaactcctggagggtttgagcgtctggaaactctctgctctgacccgaggaagcaccctcctgacgccgccttcctccg

SEQ ID NO: 37809 - DNA, 282 bp, Homo sapiens
cgactcacttagggcgaattgggccctctagatgcatgctcgagcggccgccagtgtgatggatatctgcagaattcgcccttagcgtggtcgcggccgaggtacagagaattcctagatagccctcacccagtttcagtttctctaacgttatcatcttacattaccttgctatatttgtcaagatcaagaaatcaacactactgttaaaaatactccagattctattcagacttcatcagttttttcattactgatctttttctgttccaggatcttgtt

SEQ ID NO: 37810 - DNA, 426 bp, Homo sapiens
  misc_feature 50: n = A,T,C or G
tacgactactatagggcgaattgggccctctagatgcatgctcgagcggncgccagtggtgatgggatattctgcaaaattcgccctttcaaccggccgcccggccaggtactttgaatatggagtagtttacagctatttttttttcttactggtaatcttaactaatatgattcccttattagagagcctctcactcccccaccccgaaaaatgtctactattcatgacagtaaccaattattctggacaaattgcttctttttaatttgagctatctgccatggactttctaaaatggaaacacagcctgagtgtatcttagggagagtttgattgaaaaaatccaaatcactgtccatatagatcatggatataaagagatacctgatttttattaaaaagatactttttcaaatttaaaag

SEQ ID NO: 37811 - DNA, 208 bp, Homo sapiens
atagggcgaattgggccctctagatgcatgctcgagcggccgccagtgtgatggatatctgcagaattcgccctttcgagcggccgcccgggcaggtacgcgggggcagccgagggggaccaggaagatctgcatggtgggaaggacctgatgatacagagctcttctagagacagccagcattctcttatggcacaaatacagcctt

SEQ ID NO: 37812 - DNA, 668 bp, Homo sapiens
  misc_feature 150, 160, 187, 188, 230: n = A,T,C or G
agatgcatgctcgagcggccgccagtgtgatggatatctgcagaattcgccctttcgagcggccttccgggcaggtactcaccaaaaagccaaatttcccctttggagttggtgacttagtgtagtctgtggctgacctagaaagacacnagagttatcnaagagtttccctttcctagaagaatgnnaatgttaccttttgtgttagggaggtagagaaaataaaaatnagcttttttttccctagaattgctaattactcttaacagcaaattaaattcaaagcctgtccttgagaactggaaatgtaaaatcatggttcaagttttataccttagtgattcctcagtaggtgttactaggagttcactgaatgaacttaggagtgaaccttcgatgtgcttgattttcttttgtgccttagtttctctgaatagcagaggcatcaaattttggtggggaatgagaggagtattaggggaaagtttgaaaatagctctcctggagatggagggcacacagagtggtcctcaggctcaccttgactgagttgattcacagttatcctgcatcagaccattagatttctttagtgctatgattataatagggatttttgaatcaccaaaaacaggttttaagaagtttatggtctttggtttactatc

SEQ ID NO: 37813 - DNA, 422 bp, Homo sapiens
  misc_feature 178, 187, 188: n = A,T,C or G
tacactactatagggcgaattgggccctctagatgcatgctcgagcggccgccagtgtgatggatatctgcagaattcgcccttagcgtggtcgcggccgaggtactacagcctcaaactcctggcacaagggctcctcctaccttaccctgcctagtagctgggactacaggcacanccgccacanncgtggctaaggttggttgacttattaattaaattaagcatttgtttaatttaatatcactaatttaattatttcctagaagccaactgaaacatcataacatttattttcttggtagaccttatgagtttattctcaaaggcaattaaaaaatctccttcaggaaagccatgcacatttttattaatcatatttatactactaacaatgcttggctgatgattaaaaatactta

SEQ ID NO: 37814 - DNA, 389 bp, Homo sapiens
agggcgaattgggcccttagatgcatgctcgagcggccgccagtgtgatggatatctgcagaattcgcccttagcgtggtcgcggccgaggtactaatcaaataataatcaatcaatcagcatatacatttcagccaaagccatagaagaaaaagcaatagttgcttgaattatgatcatctaccaccaactctgctcagccctgtaacagggtagggagagggtataacaggaagagctttgacttgtccctgtctatacattctctgtatcttttgggggtaacttcttggcagtttttcagtgttcagccatgtcagttgaaactaggatttttctggagattttttacttacccatgtgagcctaacactatcctgtaattcatt

SEQ ID NO: 37815 - DNA, 554 bp, Homo sapiens
atacgactactatagggcgaattgggccctctagatgcatgctcgagcggccgccagtgtgatggatatctgcagaattcgcccttagcgtggtcgcggccgaggtacacatgagagaaaaatctttccaatgtaatgagactggcaaagcctttaattgtagctcatttgtaaggaaacatcagataatccatttaggagaaaaacaatataaatttgatatatgtggcaaagtctttaatgagaagcgatgccttgcacgccatcgtagatgtcacactagtgagaaaccttacaagtgtaatgaatgtggaaagtccttcagttacaagtcatccctgacatgccatcgtaaatgccacactggtgagaaaccttacaagtgtaatgaatgcggaaagtccttcagttacaagtcatcccttacatgccatcataggtgtcacactggtgagaaaccttacaagtgtaatgaatgtggaaagtccttcagttacaagtcatcccttagatgccatcgtagacttcatactggaataaaaccttacaagtgt

SEQ ID NO: 37816 - DNA, 381 bp, Homo sapiens
gactcactatagggcgaattgggccctctagatgcatgctcgagcggccgccagtgtgatggatatctgcagaattcgcccttagcgtggtcgcggccgaggtactgttaactagaatagttactactaagcatgatttcattcactgcagcaggcatacttgcctgttcctaaattcattctgggttgcgggcatgaggacaatcacagtggtttgctctgtgatgcctatttctttccaatgtttttagttttgttgcttaaaaattctggctcacacaaataagttgctgtgaatgctattaataacaacagtgaactctgtttagcaatggaaagtcttctttaatcttaatctaaaatggctataaacttataatc

SEQ ID NO: 37817 - DNA, 608 bp, Homo sapiens
tacgactcactatagggcgaattgggccctctagatgcatgctcgagcggccgccagtgtgatggatatctgcagaattcgcccttagcgtggtcgcggccgaggtacgcggggttccggcgccgtaactgctgccatcttctccgtgctatggctgcgttcggccgtcaggtccttgatgcaccgcctgatccccctcacctgggcctgtatggctaggcagactcctcatcttggagaacagagaaggacgacagcttctttgttgcgcaaactgactacagcctccaatggaggggtcattgaggagttatcttgtgttagatccaataactatgtgcacgaaccagagtgcaggaggaatcttgttcagtgcctccttgagaagcaggggactcctgtggtacctgcccgggcggccgctcgaaagggcgaattccagcacactggcggccgttactagtggatccgagctcggtaccaagcttggcgtaatcatggtcatagctgtttcctgtgtgaaattgatatccgctcacaattccacacaacatacgagccggaagcataaagtgtaaagcctggggtgcctaatgagtgagctaact

SEQ ID NO: 37818 - DNA, 133 bp, Homo sapiens
  misc_feature 123, 124: n = A,T,C or G
gctcgagcggccgccagtgtgttggatatctgcagaattcgcccttagtgtggtcgcggccgaggtacgcctgggaaaagtcattttcaaatcttattaccaatttgagaaagaagggagatnnttccaagat

SEQ ID NO: 37819 - DNA, 597 bp, Homo sapiens
tacgactactatagggcgaattgggccctctagatgcatgctcgagcggccgccagtgtgatggatatctgcagaattcgccctttcgagcggccgcccgggcaggtactgcataattatagtcaatgcttgcaataattttcagtttgtctcatcacgttagcagagcctattcatgcaatttagaaaggatttcaatacagcccaaaccaaaaggcttacggtcaacagagggttagccttccataaatgagaaatccaaaaaagaataatgccacgtatttcaggaatgtcggttagaggtttggccttcttgggaagtgtcacaatgctgagtctaaaactgcaacagttaccgtgtccaagtcatgcaactctaaaggaggatggacggtcacatttgtgtctttcagtatcaaagcacctttaagggcttccattttgagaaagtagtattttctcttccttctcttttagaacatatgataaaatattgcccttctatcctttaaccatgtatccatttttttttttttgatggggagtaaggggtacctcggccgcgaccacgcttagggcgaattccagcacactggc

SEQ ID NO: 37820 - DNA, 405 bp, Homo sapiens
agcggacggtaatgtgttggttgtcaattcaacctttccagcggacggccgggcaggtacagccagtatgtagccccctaaatcctccaggagtcatatcaccatgggctacgatggacaccatagttccagacaggaaggatttttattcctccaatgtagttcctgataaaactcatgaagttggatcttatttagctgcccaaatgtctccatcagaccagacgcttagctcatttgcttccattgttgctcaatatggcaaaggcctccctcaggaagtggaagaaattgtgagggaaacaattgttcaacccaaatcagagttcctcgaattcagtgctggcttagaaaaactactgaaggaagaaactgaaaccttcccctcaaaatatgaaagtgata

SEQ ID NO: 37821 - DNA, 285 bp, Homo sapiens
cgactcactataggcgaattgggccctctagatgcatgctcgagcggccgccagtgtgatggatatctgcagaattcgccctttcgagcggccgcccgggcaggtactgagtccgtgttgatagggttaagttcttaaacttggcgcaagatgaatttaactgtgatttctctaagttttagtgcctactgtttcaccagacacctacaatctatactgttttagaatctgcagtgtccagggtttgagcaagattctttagtgaatagaagcattaaggagaca

SEQ ID NO: 37822 - DNA, 276 bp, Homo sapiens
  misc_feature 27, 30, 31, 33, 38, 39, 40, 41, 42, 43, 48, 134: n = A,T,C or G
atacgactcatatagggcgaattgggnccnncnccttnnnnnnttttnagatgcatgctcgagcggccgccagtgtgatggatatctgcagaattcgccctttcgagcggccgcccgggcaggtacaaggctanagcattttaactttatactggaaaaaaaatcaaacaaaggggagggataaaggacttagtcatctttgcactggaaaacaaaatatgtaattaaattcccatagctgcatgtaacattgaattcttccaggttaaaaaaaaa

SEQ ID NO: 37823 - DNA, 431 bp, Homo sapiens
agggcgaattgggccctctagatgcatgctcgagcggccgccagtgtgatggatatctgcagaattcgccctttcgagcggccgcccgggcaggtacttagaaccatgcctagcacatcagaatccctcaaagaacatcagtataatcctataccatagcaagtggtgactggttaaggcgcgacaaaggtcagctggcagattacttgtgtgcaaacttgatacttttgttctaagtaggaactagtatacagttcctaggattggtacctcggccgcgaccacgctaagggcgaattccagcacactggcggccgttactagtggatccgagctcggtaccaagcttggcgtaatcatggtcatagctgtttcctgtgtgaaattgttatccgctcacaattccacacaacatacgagccggaagcata

SEQ ID NO: 37824 - DNA, 561 bp, Homo sapiens
ctactatagggcgaattgggccctctagatgcatgctcgagcggccgccagtgtgatggatatctgcagaattcgcccttagcgtggtcgcggccgaggtacgcgggggtgagcaaatcttggtggtggtggtggtggggcggcctgagaagatattatggctgctgccacggagcataatcgcccgagcagcggtgacaggaacctggagcgaagatgcagccccaacctctcccgagaggtgctctacgaaatctttcgctccctacacaccctggttggacagcttgacctcagagatgatgtggtgaaaattacaatcgattggaacaagctccagagcctctcggcattccagcctgcattgctctttagtgcacttgaacaacacattttatatttacagccttttttagcaaaacttcagtctccgattaaagaggagaatacaactgctgttgaagagataggaagagcagaaatggggaacaaaaatgaagtaaatgacaaattttccattggcgacctacaagaggaagaaaagcacaaagaaagtgattt

SEQ ID NO: 37825 - DNA, 471 bp, Homo sapiens
agggcgaattgggccctctagatgcatgctcgagcggccgccagtgtgatggatatctgcagaattcgccctttcgagcggccgcccgggcaggtacaaagacaccagtcttgcctccaaagcttggcgtaagaaagttcttttctctgacttggcccattcgatgcactctaaacacagctcgacctcccgccctgtagctgcttccatatcaagaaacagatcaagaagagatcggaccaggcgagctgctttagccttgctgatggaattcaagaagggtcgtactttaagagatcttctacagttcttcaagcctagacaacctaagaaactttactatcagcagcttaagatgaaaatcacagactttgagaacaggcgaagttttaaatgtatatggttaaacagccaatttagggaaggggaaataacactatatccagacaagcatgggtgtgtccgggacct

SEQ ID NO: 37826 - DNA, 422 bp, Homo sapiens
atgctcgagcggccgccagtgtgatggatatctgcagaattcgcccttagcgtggtcgcggccgaggtaccaaagccaaactctggctggccaagaggcaaaatccatgtttggtgaccagagctgtatatattgatattctcttcctattgacttgctgcctcaacagatctgcaaaggacaaccagccagttctggagagtcttggcttctgggaggaagtcagagggattatctcaggatcagagctgataacgggattcccttgggccttcaaggtgccaggcctgccccagtaccttgatggctgtttgtggtcatacactccgtggaccagtcttgagggatcacagggccaaccagctcagcaaacctctccagaggacagctggggctgcagccaggtagcatgaagggatacg

SEQ ID NO: 37827 - DNA, 560 bp, Homo sapiens
  misc_feature 157, 158, 166: n = A,T,C or G
ctatagggcgaattgggccctctagatgcatgctcgagcggccgccagtgtgatggatatctgcagaattcgccctttcgagcggccgcccgggcaggtactttttttttttttttttttttttttttttgggatggagtcttgctctgttgcccannctggaatncaccgggcatggagcgtggctcactgcaacctctacctccctgtttcaagcaattctcctgcctcaacctcccaagtagctgggactacatgcacttgccaccacaccgggctaatttttttgtatttttagtagagacggggtttcaccatgttggccaggctggtctcgaactcctgaccttaggtgatttgccggcctcggcctcccaaagtgctgggattacaggcgtgagccaccatgcctggccaaaaacccttgctttttaacatcgattgacacttcacaaaaattctccacattccactttttgacagtttacattaaagcctgtggtctgaatatttgttttacttacagggggaccctttgggcaacttatttgcaaacacat

SEQ ID NO: 37828 - DNA, 215 bp, Homo sapiens
tacgactcactatagggcgaattggtgccctctagatgcatgctcgagcggccgccagtgtgatggatatctgcagaattcgccctaaccgtggccgcggccaagtaccaaatctggaacctaaattttaaaaatgagtgtggctggatatatggagaatgttgggcccagaaggaaccgtagagatcagatattacaacagctttgttttgagg

SEQ ID NO: 37829 - DNA, 427 bp, Homo sapiens
gcgaattgggccctctagatgcatgctcgagcggccgccagtgtgatggatatctgcagaattcgccctttcgagcggccgcccgggcaggtacatacggaccttcagccagtccccgtagtggacgtagcccccgatgtaggcggcgtaggtgctaatggccaattggagtgcggcccccagcgcgaaccaacgcccgtttcacgccaaaggacattgaaactagcgcacagcacggctgcccccatgtcgaaatacaggtaaggcactgggatgtcgggcttccggcgtgcctcagccctctcagcgtacctcggccgcgaccaacgctaagggcgaattccagcacactggcggccgttactagtggatccgagctcggtaccaagcttggcgtaatcatggtcatagctgtttcctgtgtgaa

SEQ ID NO: 37830 - DNA, 178 bp, Homo sapiens
tatagggcgaattgggccctctagatgcatgctcgagcggccgccagtgtgatggatatctgcagaattcgccctttcgagcggccgcccgggcaggtaccactgcactccagcctgggtgacagagtgagactctgtcttcaaaaaaaaactttgcttgtatattatttttgcctta

SEQ ID NO: 37831 - DNA, 245 bp, Homo sapiens
tacactactatagggcgaattgggccctctagatgcatgctcgagcggccgccagtgtgatggatatctgcagaattcgcccttagcgtggtcgcggccgaggtacaggcacctgccaccatgcccggctaattttttatatatttttttagcagagacagtgtctcactgtgttagtcaggatggtctcgatctcctgacctcgtgatccgcccgcctcagcctcccaaagtgctgggattaca

SEQ ID NO: 37832 - DNA, 465 bp, Homo sapiens
ttgggccctctagatgcatgctcgagcggccgccagtgtgatggatatctgcagaattcgcccttagcgtggtcgcggccgaggtacctataatcccagctacttgggaggctgaggcaggagaatcgcttgaacctgggaggtggaggttgcagtgagctgagatcgtgctattgcactccagcctgtgcgacagagcaagacgccatctcaaaaacaaaaaaacaaaattcatgttactaaaagacaggtagccatatacagacggtatatgccctattttttttaactgactcttaatgaaactttaattttacttaattaagaaatggaatttatatacaaaaatattttccatttccggtattatgctaattgttgtatgaaataagtgcaattatacttctcttttgagatatccaagagtatattcttgctctgtatagagaatatcatctgatagtg

SEQ ID NO: 37833 - DNA, 460 bp, Homo sapiens
atacgactactatagggcgaattgggccctctagatgcatgctcgagcggccgccagtgtgatggatatctgcagaattcgcccttagcgtggtcgcggccgaggtacacaagtaactctgattatttgcaaatactaattaaaatatatcacaccaaagaactgccaagtttttatattgtggtctgtggtcctgtcataatctgtttcccagtgcaaaattaataatgctatgtgttcatccaactcagccactgcttttcacagggcatagagctctttgagagctcagctgagaagtgtaatgcatggttgtagctcaacaagtgaggatggaccaaacgctttttgtcagaagtcattcagtccttggtcctatctgctaagttaatgtccttttctgtgggttaagttacaaaaagtgaaatcaaattctcaaatctcatagactccgtaaggt

SEQ ID NO: 37834 - DNA, 558 bp, Homo sapiens
  misc_feature 368, 526: n = A,T,C or G
cgactactactcactatagggcgaattgggccctctagatgcatgctcgagcggccgccagtgtgatggatatctgcagaattcgccctttcgagcggccgcccgggcaggtactggagagctgttcgcacagatgtttagacctttctctctctctctcttttcttctttctcaacaactctttcacagaggcagcattttgaaaggttgaaatatttggcctttaccaaagagcttttttttccttaagcaaaatcctttcagaaagaaacaaatggggaagggcagattaagaatgcatatgtcccaatccacttctataggagtttaatcatattcacatgagtaaaatgatggaagaactctntaaggtaatcctttgggataaaggatcctgggaagttctctcaggtaaagaaagcttacagcagatttgtaatatatgtctggagagctatttataagaaatttaagaggattgttttgttttcctttattaaagatttaagcctttttactttgcanaaagaaaactacaaaagttttatagatataac

SEQ ID NO: 37835 - DNA, 450 bp, Homo sapiens
gggccctctagatgcatgctcgagcggccgccagtgtgatggatatctgcagaattcgcccttagcgtggtcgcggccgaggtacaaacgtggcatctgaatagaagcttatctagagaagtggagttagagtccctattttaatgaactacatatatttttcaatcaaaatgtgtaattatttaattatctagcctgctcagtaatcataactcttcaacttcttcaaagggcctttattcaatatgttaccactcatatggtcattacttggtaagtgttttatattttgaatttcttagatgctttcagtgtatgtgctagtgttttattaatattaaaaatttttgtttacttatatatcaagctgctgcaaatggactaccttattttaaaagttagaataaaatgctattactctctaaacagaactttagcatatctgtttga

SEQ ID NO: 37836 - DNA, 449 bp, Homo sapiens
gggcgaattgggccctctagatgcatgctcgagcggccgccagtgtgatggatatctgcagaattcgccctttcgagcggccgcccgggcaggtacaggaatcctgaaaacattcagttattctacaaatatgtatcgagaacttcctttaagggcctggggagaggggacaaggaactgggcagatacttggagtaggtattttatagtttaacacatgctgaagtatcagatttcccttaaagcctggtagaggtaattaagtaaaaagctttgccctgttggtatcaaaaaatgtaaatggctcttctcagtcaacagttacaaccaagaaccaaagacatctatgaaaatttcaaaactaaggaaatttgcaattccaggcaaggccatattactctgagtttccaataagacctgaaggtcacttactttgtgttaatattaaa

SEQ ID NO: 37837 - DNA, 465 bp, Homo sapiens
acactactatagggcgaattgggccctctagatgcatgctcgagcggccgccagtgtgatggatatctgcagaattcgccctttcgagcggccgcccgggcaggtacactgaatctcaaccaggcactgaggacctgcagccttctgattcgggagcaatggatgtatccacttgcaatgctggctgtgcccagctcagcaccaaacatagggaaaaagatgctctgtgtctcgatatgaagtcttctgcttctgtagatttgttcgtagactcgtcagactctcacagccctctacacttgacggaacagaccccgaagaagcctcctcctgagataaaccctgtagatggaagagagaatgccttgactgttgtccagaaagattcctctgaacttccaaccactaaatcgaattctattaatagcagttcagtggatagtttcactccgggatacctcactg

SEQ ID NO: 37838 - DNA, 462 bp, Homo sapiens
ggcgaattgggccctctagatgcatgctcgagcggccgccagtgtgatggatatctgcagaattcgcccttcggcggccgcccgggcaggtacagctgaaaaataagtgagggagaaaaaaccagagtatcaacaatttgcaaccactgatgaaataatgcatccaggcatgaaacattaatgtcagccaagcctacaaaattaaagacaaccagacattatgtgcttcttgataaaagaagtgaacatcaccttataatgtagtcttacccttactcacctaaaaaagaacctgaagctgaaactctagagccaacttgcaattataggggacagatgaacatgttaaattataccatgggatacaaaagcaaaattcaaactatgggaaaacgtgaaagacaaataaccttgtttcttaaacaataaattatgaagaataaaataacagatagagtggga

SEQ ID NO: 37839 - DNA, 463 bp, Homo sapiens
gaattgggcccttagatgcatgctgcgagcggccgccagtgtgatggatatctgcagaattcgcccttcgagcggccgcccgggcaggtacaaaaattagctgggtgtggtggcgggtgcctgtcatcccagctactcaggaggctgaggcaggagaactgcttgaacctgtgaggcggaggttgcagtgagctgagattgcgccactgcactccagcctgggcgacaagagcaagactccatctcaaaaaaaaaacaaagaacaaaaaacaaaaacaaaaaaacctgttctgaccttgaaacacacaaacacacactctctctctcatacacacacagagacccactgaaattcctccttttgattacagtatgttgagaacaggatgttctgcttattcaaatttatgacgccccttctgttttgtttccagttagacgtgggaaaaaccaattcaattat

SEQ ID NO: 37840 - DNA, 352 bp, Homo sapiens
atgctcgagcggccgccagtgtgttggatatctgcagtattcgcccttagcttggtcgcggccgaggtacaaacatgaccagctcttgcagctttcattaaaggagttcttccaccttcagattcatgttccagatctgcgcctgcctgaagtaagacatctgctacatcagtatgaccattttcacaggcatatgttagtgctgtatcccctgttgctgttgttgcatgaacgttagctcctgcagctaataagtatttaactaactccaaatgaccctcttgagcagcttccattaaaggggtagaacaccctagttctatatcggctcctgccttaattagaaagtctg

SEQ ID NO: 37841 - DNA, 466 bp, Homo sapiens
agggcgaattgggccctctagatgcatgctcgagcggccgccagtgtgatggatatctgcagaattcgccctttcgagcggccgcccgggcaggtaccagtccatggcccaggggtttggggatccctgacctaggccattccacttattatagtcatcaagttattctccagcatacattgcatatgaatattaaagcttgtggaacataaaagggttttcccacaatccttgaattcatagtttctctccagtttgtgttctaaaatgtttatcaaggactaagtggcaggcaagggctttcccacattccttacatcaatatggcttctctccactgggaatcctgacatacactttaaggcttgagaaataagtgaagattttcccacattccgtataaacataggttttctcctagtgggagttttgtggtatcagtcctatggattaaatgaagcctttc

SEQ ID NO: 37842 - DNA, 730 bp, Homo sapiens
  misc_feature 665: n = A,T,C or G
ctctagatgcatgctcgagcggccgccagtgtgatggatatctgcagatttcgccctttcgagcggcctcccgggcaggtttttcattagtaattgttttgttgtttcatttttttctaatgtctcccctctaccagctcacctgagataacagaatgaaaatggaaggacagccagatttctcctttgctctctgctcattctctctgaagtctaggttacccattttggggacccattataggcaataaacacagttcccaaagcatttggacagtttcttgttgtgttttagaatggttttcctttttcttagccttttcctgcaaaaggctcactcagtcccttgcttgctcagtggactgggctccccagggcctaggctgccttcttttccatgtcccacccatgagccctccactggacagctcagtaagcctggcccttcattctgcgctgtgttcttcctctgtgaaaatccaatacctcttacctcctctgcatgcaaagattctcaaggattgtcagacttcaaacgtaacagcagaaccaccagaaggtcctataaatgcagtagtgaccttctcaagctgtcaggtctttaaataggatttgggatttaatgctatgtatttttaaaggaaagaaataagagttgctagttntaaaaatgcatgtcttttagccaattcagaatctgcccccaaactttttaaaaagtcaagacaga

SEQ ID NO: 37843 - DNA, 363 bp, Homo sapiens
  misc_feature 134: n = A,T,C or G
tgtgatggatatctgcagaattcgcccttagcgtggtcgcggccgaggtacatccacgtctaaaagcattctataaataggccttgtttagctacacgagtctgcttagcagcccatggggagtgaggtttctntaaagacatactagtatcgctcaaggtcataaacttcctgagtcctcctattagtgttctcatccgcgtagtataacaaatgttttattacaactaaacagtgtaaggcctaataattaatgggttatcaaaaacctctcacaatatcaccttctatctccaactatcagtctgtgccacaatggtgagtgcgtgctctaaaaacattcatattgtatagatgtacctg

SEQ ID NO: 37844 - DNA, 452 bp, Homo sapiens
tatagggcgaattgggccctctagatgcatgctcgagcggccgccagtgtgatggatatctgcagaattcgccctttcgagcggccgccgggcaggtacttaagggcaacactacatagtaagcaaaatctgctctgaaccctttcacagaagagacacttcagaaaggaattttacatctcctgacagttttacaacattcatacctctgatgcacttcaagccccaacccatctctcattttctaacttctttaacagaaatgtgtgttcacaagttgtgtgtgcgtgcacatgtgcctctgtgtgtacaccagcaaggaccgctatttctattttgggaagcttgatggccagatctcctctgcctaccccagccaagaggggcaggtgctggtgggcatctatggccagtatcaactccttggcatcaagagcattggctttgaatgg

SEQ ID NO: 37845 - DNA, 506 bp, Homo sapiens
tacactactatagggcgaattgggccctctagatgcatgctcgagcggccgccagtgtgatggatatctgcagaattcgccctttcgagcggccgcccgggcaggtacagagacagaggaaggggggctccaaagccaagagagggaaccccacctgccacagataccagctaggtatatatacagaggctggaggaggcagtgtctgatttgcacaggctcaggggattggtttgactaggcatgtcattcacgtagcccgcaggaaaagctggctctcccaccctagccttttaatatgcaaatgcagggcaccatgatcttctgcacaggtggggatacttcggggtgtccatgtatccaggaatgtggggaaagggcaagaagcccacaggaatcgccatgtttgggtggacccactttctaatggctggcatttggatatcgggtaactggcctggctttaagaactggagctttacaagaaacttttccagacgtgcttt

SEQ ID NO: 37846 - DNA, 455 bp, Homo sapiens
ctatagggcgaattgggccctctagatgcatgctcgagcggccgccagtgtgatggatatctgcagaattcgccctttcgagcggtcgcccgggcaggtaccatgttgacaaaaatgccagatcaaatggatttgagaaataagcccaattcaaggctggctcagccctccacggggcctcccagggaaaggaattcctttatgttcttggaagcccttttctagaaaagccattccatccatacctttgtagagcagtgggctgggtgtggagggcagcgcggagggtatctgcaagagcctgtattttccgcctcccttgcccccactccttttatccttttaaaagtcctatcagccctgccttcgtcccttccgccctaagccctaagagtggggggaggtttaatacggccaatggatcttgtataaagtctacgtaagttttaatttac

SEQ ID NO: 37847 - DNA, 411 bp, Homo sapiens
gctcgagcggccgccagtgtgatggatatctgcagaattcgcccttttgagcggccgcccgggcaggtactactcgattgtcaacgtcaaggagtcgcaggtcgactggttctaggaataatgggggaagtatgtaggagttgaagattagtccgccgtagtcggtgtacagtttcccttctccagggtgacagatgagccttttccgaagttctcagctttctcttctatcgaaacttcccatgtcggttaaagtgtttgtagagatagcggatgcgtttattaaggttgtgcatgtcatcagcgaacattctacttccaaccattttcctctttcggatacaacgttgcaattcattccctttccaacctcgaagccatatgggccccctgatcagttctttggggtgc

SEQ ID NO: 37848 - DNA, 473 bp, Homo sapiens
tatagggcgaattgggccctctagatgcatgctcgagcggccgccagtgtgatggatatctgcagaattcgcccttagcgtggtcgcggccgaggtactaaagaaaacacatcattttaataaaaaccaaacctgcttaagagacataacagagttaagcaaaagtataaactactataataagcagttgcttaaattaatataagaggatttgttttcactggaaaaagcgttaaagccctttcttttttctggagctgaaacagtggcttgcgttctagttattcaatatttctacagtaatttttttaattattgtacctgcccgggcggccgttcgaaagggcgaattccagcacactggcggccgttactagtggatccgagctcggttccaagcttggcgtaatcatggtcatagctgtttcctgtgtgaaattgttatccgctcacaatttcacacaacatacgag

SEQ ID NO: 37849 - DNA, 244 bp, Homo sapiens
ctcactatagggcgaattgggccctctagatgcatgctcgagcggccgccagtgtgatggatatctgcagaattcgcccttagcgtggtcgcggtcgaggtacccattaatttgctcagatatagcaggcttaatggttctatattttcaaaagtttttaagaatggtttctaacgtaggagagggaaaacatccaccatcccttttcattaatttaaatggagggcagtaaaacattttttta

SEQ ID NO: 37850 - DNA, 404 bp, Homo sapiens
gcgaattgggccctctagatgcatgctcgagcggccgccagtgtgatggatatctgcagaattcgccctttccagcggccgcccgggcaggtactgctgcagatggacctgtaaatgaatacatgttgccatttgaggaggaaattggccagcatccatctcttgaagacatgcaggaagttgttgtgcataaaaaaaagaggcctgttttaagagattattggcagaaacatgctggaatggcaatgctctgtgaaaccattgaagaatgttgggatcacgacgcacaagccaggttatcacctggatgtgtaggtgaaagaattacccagatgcacagactaacaaatattattaccacagaggacattgtaacagtggtcacaatggtgacaaatgttgac

SEQ ID NO: 37851 - DNA, 439 bp, Homo sapiens
tatagggcgaattgggccctctagatgcatgctcgagcggccgccagtgtgatggatatctgcagaattcgcccttagcgtggtcgcggccgaggtactggagagctgttcacacagatgtttagacctttctctctctctcttttcttctttctcaacaactctttcacagaggcagtcattttgaaaggttgaaatatttggcctttaccaaagagctttttttttccttaagcaaaatcctttcagaaagaaacaaatggggaagggcagattaagaatgcatatgtcccaatccacttctataggagtttaatcatattcacatgagtaaaatgatggaagaactctttaaggtaatcctttgggataaaggatcctgggaagttctttcaggtaaagaaagcttacagcagatttgtaatatatgtctggagag

SEQ ID NO: 37852 - DNA, 475 bp, Homo sapiens
  misc_feature 190: n = A,T,C or G
agggcgaattgggccctctagatgcatgctcgagcggccgccagtgtgatggatatctgcagaattcgcccttagcgtggtcgcggccgaggtacagatgatgaagcttccagagcttatctgatctcttagacagaactcacataaacacacaaatacaagaggttattttcaagacacacacttgcangtaatctttctatagaaatggccacagcattataatattcaaaatatggaagattgacagtctgaggattttctagaggaaaaaaaaatcaagggacttgccaaaaggataactacataacagatatgacaatctacaggacaaaaagacaacatgtcaccaaatattgttcatacaacagcgttaatggaaaacagtaaaacaccttttagcagtgtgcatgttaagtcttttagtaagattatctgtaatgaggtttgaaagtaaatcacttaatagacaaag

SEQ ID NO: 37853 - DNA, 245 bp, Homo sapiens
  misc_feature 227: n = A,T,C or G
aatacgactcctatagggcgtattgggccctctagatgcatgctcgagcggccgccagtgtgatggatatctgcagaattcgcccttagcgtggtcgcggccgaggtacgcggggagccccaagcttaccacctgcacccggagagctgtgtcaccatgtgggtcccggttgtctttctcacccttgtccgtgacgtggattggcgttggcccctcattctgtcttnggattgtgggaggctggg

SEQ ID NO: 37854 - DNA, 442 bp, Homo sapiens
  misc_feature 104: n = A,T,C or G
gcaattgggccatcagagacatgctcgagcggccgccagtgtgatgttatctgcagaattcgcccttagcgtgggtgcggaccaggtactaatctgggcattgntctatgcacctgaaataaactatctcaattcatccttcaaataacccagtgaagtagatcatactatatcccactttatagatcatactggggatccccattttatggatggggaacctgaggctcagagatgagaaatgatcatccaatcatccacattcactcaactagtaaacaattgggctaaacttcagctccagctccatgcaattccaagtcctcgttgaaccactttgttattgagcttgctccaactgatctcctgtgtctctggccatcccatcgtttcagtagtgccccagtttgaaagtccacttcatcatcaggcattcagtgcc

SEQ ID NO: 37855 - DNA, 446 bp, Homo sapiens
agggcgaattgggccctctagatgcatgctcgagcggccgccagtgtgatggatatctgcagaattcgcccttagcgtggtcgcggccgaggtacgatcttggctcactgcaacctctccctcccgggttcaagtgattctcgtgcctcagcctcttgagtagctgggattacaggcgcgtgccactgcgtccggctaatttttgtatttttagtagagatggggtttcaccatgttggccagactgatctcaaactcctgacctcatgtggtccacccaccttggcctcccaaagtgctgggattacaggcgtgagccaccacgctcagcctacaagcaattttttaaaaactgacgcctattactgataaaattctctgtttaaaatcctatttactattttaaagataagtattagttttttttaaatacaataattctgtta

SEQ ID NO: 37856 - DNA, 485 bp, Homo sapiens
agggcgaattgggccctctagatgcatgctcgagcggccgccagtgtgatggatatctgcagaattcgcccttagcgtggtcgcggccgaggtacattattgcattagggagccacaaaattatgtagcatcattacaaatgaaaacaggttaaaaatgaagaagatacttatatagaaatacatggattcattgtcttcttgcagaatgcacaagaggtgcataaatgtgcaatttatgaagctctttttctgttagtatacgtttgcttaacaacacataccattgaggaagctacaaaattagttaaacaaaaatagcgaacaggtagtaattatagctatgttatatcgctttctatttcatttaaatatttccaaataaaatgtgaaataaagaaaatacattattttatcttttattctcttaccgaaaaaattcaaagctactttgctttctaacatttacacagcaactaaaaatgt

SEQ ID NO: 37857 - DNA, 451 bp, Homo sapiens
tagggcgaattgggcctactagatgcatgctcgagcggccgccagtgtgatggatatctgcagaattcgcccttcgttcggccgcacgggcaggtactactcgattgtcaacgtcaaggagtcgcaggtcgcctggttctaggaataatgggggaagtatgtaggagttgaagattagtccgccgtagtcggtgtacctcggccgcgaccacgctaagggcgaattccagcacactggcggccgttactagtggatccgagctcggtaccaagcttggcgtaatcatggtcatagctgtttcctgtgtgaaattgttatccgctcacaattccacacaacatacgagccggaagcataaagtgtaaagcctggggtgcctaatgagtgagctaactcacattaattgcgttgcgctcactgcccgctttccagtcgggaaacctgtcgtgc

SEQ ID NO: 37858 - DNA, 413 bp, Homo sapiens
actactatagggcgaattgggccctctagatgcatgctcgagcggccgccagtgtgatggatatctgcagaattcgcccttagcgtggtcgcggccgaggtacttcgaatttgagtttgaggcttaagaagctggatctcctgccgggcgtggtggctcatgcctgtaatcccaccactttttttttaaggcaggcggatcacctgaggtcaggagtttaagaccagcctgaccaacatggagaaacctcgtctctactataaatacaaaaattagccaggcatggtggcacacgcctatagtcccagctactcaggaggctgaggcaggagaattacttgaacccaggaggtcaaggttgcagtgagctgagatcacttcattgcactccatcctgagccacaagagcaaaa

SEQ ID NO: 37859 - DNA, 689 bp, Homo sapiens
atggcccttagatgcatgctcgagcggccgccagtgtgatggatatctgcagaattcgcccttagcgtggtcgcggctcttgtacatgctatcagcgtgacttattactgttagtgttaatcttgataacctagccgagatagtgtttatcagatttctccactacaaagttattttccccctttccatatgtaatttttggaaggaagtcactattcagctcacactagagaagtaggaagttctgctccatatccttgagggcagagttcataaattatttggaattcttcttcatgggagattcatctattctaccccatttattaatgtattcaattttctggcactacaagaatatatatatatttttgtaatcgactttaaaataattaggaaaatgatagaacattttaatataagagcaagatatggtaaattgatgaatattattagacattatcagtaacaagagctttgtatcttaagttgttttgagttcaatttcttgttcacatcttttagcttggttgagctaaaaaatcattaaccattgattttttttgtaaccttgcatataatatgtacctgcccgggcggccgctcgaaagggcgaattccagcacactggcggccgttactagtggatccgagctcggtaccaaagctggcgtaatcatggtcatagc

SEQ ID NO: 37860 - DNA, 594 bp, Homo sapiens
gactcactatagggcgaattgggccctctagatgcatgctcgagcggccgccagtgtgatggatatctgcagaattcgcccttagcgtggtcgcggccgaggtacttctttgctgatgacctacctcttcataagccaagtgaaacaagttgacgaactgcctaggacttccacgtgttgctcacatacatgatgatttctgtcacgctcttgtgttcagacacactgacattaccatgtatgtcagacctccttatgatcgcatgtcctgacagttaagctgattgcaaacagactattaaatatgaatggagcaaacgctgtatgtcatggatatgttctggagaaattcttacccatctggatggggcagggcccttgactcacctgaatcatgaccaggcaaacattttatctgtcctttctgcaggaatccgttctgtgtcatgctaggagaatgggttcagtatatggggccatcaggcagtataccctctgaatgtttttcattgttgtatttgcttagagtaactaaacaattgtatcttttaatttatcttttaattcaaagaggaaaccttggcttctgataac

SEQ ID NO: 37861 - DNA, 205 bp, Homo sapiens
  misc_feature 55: n = A,T,C or G
tgtgatggatatctgcagaattcgcccttagcgtggtcgcggccgacgtactctnttttttttttttcttttttttgatgtcaaatgtttatttctatgccatagttgcctcagcacaatttgtaaaagaaaggaatccaaaaatgaagattttttagtcaggatattttctctgcagttataagaaagaaaataaacaccatga

SEQ ID NO: 37862 - DNA, 463 bp, Homo sapiens
gcgaatggcccttagatgctgctcgagcggcgcgtgtgatggatatctgcagaattcgcccttagcgtggtcgcggccgagtactcctgggaactgggtggacatatcatattgattccaagggtctggtgagagtagagaacttttaaatttctttagccagacggtcttttttttaagttatcagactccaagaaccatagttactgaaaagggagtcctgatacatctaatattggtagcatgtaacagtgtttgacaaagagtaagtaagcagtattcttgggagtcagtgttatgtgtttcagcagagtattattttgtatatgtatgccattttctccctgcaaagcagctcaacaagagaaaaagctctagttatagggcttaaattgatttctatttcaaataatttcctaagagattctagagtagaactgaagagtattctattggaaaagtg

SEQ ID NO: 37863 - DNA, 477 bp, Homo sapiens
actactatagggcgaattgggccctctagatgcatgctcgagcggccgccagtgtgatggatatctgcagaattcgccctttcgagcggccgcccgggcaggtacaacaatgttattaagctgcaaatctatagcaagactttgaaagtaaccaaatgtttagaaattaagcatcacatttctaagttattcatgcatcaaaaaagtaattacaatgaatattaaaatatattttgaatttaataaaaatgaaagtaaaaatactgcttgttaaaagatgggaggcttaggcaaacctcagcttggagataaatgcatatgcttgtttaaaaaattaaagcttgaaaattaataatctaattgtcaatctcaaaaatttaaaatgtgatgtcaaattaaatccaaagaattagaaaagagaagatacataagaagcatgagaaaaggaaacaatcataaaataaatgaaatcagcaa

SEQ ID NO: 37864 - DNA, 474 bp, Homo sapiens
atagggcgaattgggccctctagatgcatgctcgagcggccgccagtgtgatggatatctgcagaattcgcccttaccgtggtcgcggcccgaggtccattcaggacaaatggattacccctaaatgaaactgtaataatttcaggggaaactcaatctggtttttacctttaaacagtgaattttacatgaatgaatgggttcttcactttttttttagtatgagaaaattatacagtgcttaattttcagagattctttccatatgttactaaaaaatgttttgtttcacctaacatactgagttttttttaactttctaaattattgaatttccatcatgcattcatccaaaattaaggcagactgtttggattcttccagtgggccagatgagcctaaattaaatcacaaaagcagatgcttttgtatgatctccaaattgccaactttaaggaaatattctcttgaaat

SEQ ID NO: 37865 - DNA, 274 bp, Homo sapiens
gcgaattgggccctctagatgcatgctcgagcggccgccagtgtgatggatatctgcagaattcgcccttagcgtggtcgcggccgaggtacaataaaggaatggggaagggggaaatgaaagaatagagaaaactatacggtagtagtcaggatgtggtggaaccaaattgcagttttctaattgagaatggtaatcttgggtctttaaagaacagagtttctggagtaaaggaagcagggttcccttttcagttagacaacctcccgtctgc

SEQ ID NO: 37866 - DNA, 434 bp, Homo sapiens
agggcgaattgggccctctagatgcatgctcgagcggccgccagtgtgatggatatctgcagaattcgcccttagcgtggtcgcggccgaggtacaacagcaagctcatgctgtccccaagtgcttgcacattctaacagctgcagagtatatgaccaggtggaaagtccaacagatgccccactcacaagatagggcccttcaattcagtccttctggctccctttcactcatagtaactggttgctcttcctattggtcatagataaatgacacctgcacaattctccgagtgctttcaagcaacttcgggaggcagtgactaagaccctttccttgctcccagcttcctatgtcccagggctgcctgtggcacctggactgctgctgccccccgcgtactacagcagtcaaagagatctccactagagatc

SEQ ID NO: 37867 - DNA, 398 bp, Homo sapiens
acgactcactatagggcgaattgggccctctagatgcatgctcgagcggccgccagtgtgatggatatctgcagaattcgcccttagcgtggtcgcggccgaggtactgaatctgaagggatcagccccaataactctgcctggaatgggccccagctctcttcttcaaacaataactttcaacagactgtctctgataaaaatatgcctgacagtgagaaccctacgtctgtattctctcggatctcagaccattcagagactcctaatatggagttatcctgcagaaatggtggttcacacaagtcaagttgtgaaatgagatctctggttgtttccacctcatcaaacaaacaggatgttcttaacaaggattctgggaagatgaaaggccatga

SEQ ID NO: 37868 - DNA, 399 bp, Homo sapiens
cactactaagggcgaattgggccctctagatgcatgctcgagcggccgccagtgtgatggatatctgcagaattcgccctttcgagcggccgcccgggcaggtactaatgaaaaatacctaaactgtggggaataagaattaaatctatttcaagcacatgcaacttggaactcgcaaaaaaaaaaaaaaaagaaagaaagaaagaaagaaaaaagagtttgggagggcccttaactaaaatgtgcttaagacagcttcatgagagagctgccttctttcaaatttgaattttgaacaaggcaaaataacaatttaggtgatataatttccctgcagcatgggagttagttaaacttcccccaagcaaaaatgatcttaataatcatttatttattaat

SEQ ID NO: 37869 - DNA, 455 bp, Homo sapiens
tacactactatagggcgaattgggccctctagatgcatgctcgagcggccgccagtgtgatggatatctgcagaattcgccctttcgagcggccgcccgggcaggtacaggtccttctgagcagggccgaggagctgccactcctcccaagtgaactccacagccacatcctccagggtcagtgattcctgggacttgatcattttcttttgttactgggaaatagccagtaagtaggatgctgtgtctgtagtctctccttgagctgccctcaatttctggctagaaatcttggtctctggtgaattacatccctgcaaaggatggtatccaggtcctggaacctcctcctcacctcacttgaagtgtcttgctcctgaagtcaggacctgtgggtttgaaatgcaccaaaaaacaaagcaatatttacaagatggataaatgtggctgggtga

SEQ ID NO: 37870 - DNA, 401 bp, Homo sapiens
tacgactactatagggcgaattgggccctctagatgcatgctcgagcggccgccagtgtgatggatatctgcagaattccagcacactggcggccgttactagtggattccagcttggtaccaaacttggcgttatcatgggcataagtggtttcttgtgtgaaattggtttccgttaacattttcccacaacatacgagccggaagcataaagtgtaaagcctggggtgcctaatgagtgagctaactcacattaattgcgttgcgctcactgcccgctttccagtcgggaaacctgtcgtgccagctgcattaatgaatcggccaacgcgcggggagaggcggtttgcgtattgggcgctctttcgcttcctcgctcactgactctctgcgctcggtcg

SEQ ID NO: 37871 - DNA, 480 bp, Homo sapiens
cactactatagggcgaattgggccctctagatgcatgctcgagcggccgccagtgtgatggatatctgcagaattcgccctttcgagcggccgcccgggcaggtactttgatggcttcactcaccagcacatctggtggcaacacccccgttgactcaacagagactggggaccaaagagacactttagtctaggcagggcttgcctgtaaaacttactcataaacttcacatctagactggaaggaagctgcagcaccaaagagcactgcccactcatctcaccacttcatactcacagatataatgatctcgaacccgggcaagcctcgcaaccttctttagcttctcattccggaagatttctctgctgaaggtatccagccgggggttggcaactctggccacctttttaccttggacttcccgcacctcaataacaccaggtgagaagcacctgctcaactcctcagctgcctcc

SEQ ID NO: 37872 - DNA, 702 bp, Homo sapiens
  misc_feature 370, 372, 384: n = A,T,C or G
actatagggcgaattgtgccctctagatgcatgctcgagcggccgccagtgtgatggatatctgcagaattcgccctttgagcggccgccggggcaggtacccaaatatcaaaggcagagaccccatggggctccaaagagctgcagtctccttcccaaggttttctggatataaatttgcatggtatagtcataatagcttttgagctttttatatgcatttggcaccaagactgggatccacaactttgtagacactgcgatgaagttaacatattagctatactataaatagtgtttgtaactacacacacacacacacacacacacacaaatacatacatatattctgtaaaaacaaaaaaaactntntaagatccttgngtatgtgtttgctttactccatttcagaagaaaattacttttcttctaacaaaattattttatagcttctccatttttaaaacttgtgagagcattgagaagagaactctgactgtgttaacagaagagagttgaattggagtctctgttgtgttaaaatgacctctcgttactccacagtagttatttgagccagtgactgagtcgcgttgaggagttctgaacccggacctctgacgttgttgggaggtggctgttacccacacccagacctcttgagtaaggacagaaacgttatcattggggatataatgagat

SEQ ID NO: 37873 - DNA, 477 bp, Homo sapiens
cactactatagggcgaattgggccctctagatgcatgctcgagcggccgccagtgtgatggatatctgcagaattcgccctttcgagcggccgcccgggcaggtacgcgtatatatccctctagtaatcacaacattttaggatttagggatacccgcttcctctttttcttgcaagttttaaatttccaaccttaagtgaatttgtggaccaaatttcaaaggaactttttgtgtagtcagttcttgcacaatgtgtttggtaaacaaactcaaaatggattcttaggagcattttagtgtttattaaataactgaccatttgctgtagaaagatgagaaaacttaagctttgttttactacaacttgtacctcattagtaattgttttgttgtttcatttttttctaatgtctcccctctaccagctcacctgagataacagaatgaaaatggaaggacagccagatttctcctt

SEQ ID NO: 37874 - DNA, 411 bp, Homo sapiens
ttgggccctctagatgcatgctcgagcggccgccagtgtgatggatatctgcagaattcgccctttcgagcggccgcccgggcaggtactttttttttttttttttttttgcttattacggaaaaacacaccacataattcaactagcaaagaagactgcttcagggcgtgtaaaatgaaaggcttccaggcagttatctgattaaagaacactaagaaagggacaaggctagaagtcgcaggatgtctacactatagcaggcgctatttgggttggctggaggagctgtggaaaacatggaaagattggtgctggagatcgccatggctattcctcattgttattacagagtgaggttctctgtgtgcccactggtttgaaaaccgttatacaattatgatagaatagta

SEQ ID NO: 37875 - DNA, 533 bp, Homo sapiens
  misc_feature 71, 147: n = A,T,C or G
ggcctctagatcatgctcacgcgcatgtatgatttcaaatcccctacgggtccggcgagtaccgggggcanaaaataaggtattgtcccggacaaagcttatcatactgataacaacttgatcagatgtttcctcagcccactattnttcttccttcaattgctgaaacaaagctccagaaggctggaacatacctttgtcttcttgagaaaattttccctgatgttattaagatacattggcaagaaaagaagagcaacacgattctgggatcccaggaggggaacaccatgaagactaacgacacatacatgaaatgtagctggttaacggtgccagataagtcactggacaaagaacacagatgtatctgcagacatgagaataataaatacggagttgatcaagatattatcttttctccaataaagacagatgtcatcacaatggatcccaaagacaattgttcaaatgatgcaaatgatacactactgctgcagctcacaaacacctctgcatattacatgtacaaa

SEQ ID NO: 37876 - DNA, 563 bp, Homo sapiens
atgcatgctcgagcggccgccagtgtgatggatatctgcagaattcgcccttagcgtggtcgcggccgaggtactccgcctgggcaacaagagcgaaactccatctcaaaaaaaaaaaggaagatgaagctgaccatatagaacttattaagatattttgtaaagaacaaagattttcaagaggatgaaattttaaattgagagaatattttgaaactttactatttagaaacatagttgcctatttaatgaagctgaaaagaacgtgtatcatctggaaactctggtcatggtctccattttgagatgaacttcgtataaccaacattacacctctggctttgttgccaatatctaacacatgaaggaaacacagaagacgctgcactgtaactgcttcccatcactatgacatggaacaaataaaaatttgggatgtgaagaaaatgggtaagatgctttccaattttttgtggacttatcataccctcaagacaactgtatttaattcaaagtttatcaagcataataatcacttatcaaaataaaggaaaaaaaaaaaa

SEQ ID NO: 37877 - DNA, 369 bp, Homo sapiens
acactactatagggcgaattgggccctctagatgcatgctcgagcggccgccagtgtgatggatatctgcagaattcgcccttagcgtggtcgcggccgaggtacagtggtgcagtcatagctcaccacagcctcaaactcccgggctcaagcgatcctcccaccttggcctcccaaagtgctgggactataggcatgggccaccacacctggccaggactttataaagattatacaactcttctccaggacattttaacaccaaaaagaagaagctttgcagaacttactatgcagaggacagtccttttgattatatggtagctttagagccacttttaattttcctttttacatgggggctaaaaa

SEQ ID NO: 37878 - DNA, 517 bp, Homo sapiens
  misc_feature 302: n = A,T,C or G
tctagatgcatgctcgagcggccgccagtgtgatggatatctgcagaattcgccctttcgagcggccgcccgggcaggtactctatgttggctgttccgcagtgtaatgactggttaataaaagggccactcagcctggacaatatagtgaggcctcgtttctgaaaaaaattagccaagcatggtgacacgcacctgtggtcctagctacttgggaggctgaggcaggaggatcacttgagcccaggacacagaggttgcagtgagccaagattgtgccactgaaatctactctaacctgngtgacagaaagggaccttgtctcaaaaacaataataataatattaaaggagccacccgtttaatccttttcttgtctggtctcatccaaagagtaagccaaaataatcaaggtcacaaaggacttatgaccaaggtgtaactctgcaaatatctttaactggtcatggcttctttgttgaatcccttcccacttattagaagactcagatgcttc

SEQ ID NO: 37879 - DNA, 434 bp, Homo sapiens
ctactatagggcgaattgggccctctagatgcatgctcgagcggccgccagtgtgatggatatctgcagaattcgccctttcgagcggccgcccgggcaggtactttttttttattttttacattttttgatgtccgtttgtattgaataatttgctacatttgtaaaatgtaagaggtatataatatatgtatatttctacgaaaaaacataatttttttcttttcaagattttttcttaaaaagatgagagaaacatattttttcaggaaaaacaaactttaaaaaaaaaagaggagaaataaaaccttttctcccctttccccatcctctatctatccctctttcccaggaacaaatcaaaaggtggattatcttctgaagaatggaaactgttagtccagaatgatgtctttttctcaatgcagtgagtt

SEQ ID NO: 37880 - DNA, 435 bp, Homo sapiens
ttgggccctcagatgcatgctcgagcggccgccagtgtgatggatatctgcagaattcgcccttagcgtggttttcggccgaggtacttttttttttttttttttttttttttttttgcctagggccaggtttattccctcacatgggtggttcacatacacagcacagaggcacgggcaccatgggagagggcagcatttttgcctttttaggggatcttggcctcacggtgtaagaagggagaggatggttttttttctgccctcactagggcctagggaacccaggagcaaatcccaccacgccttccatcttttagccaaggagaaaccgccttggtgacgtttagttccaaccatttattttaagtgggagaagggtattggccctggtcccaaccattacagggtgaagaatataaacagtaaaggaag

SEQ ID NO: 37881 - DNA, 448 bp, Homo sapiens
gcgaattgggccctctagatgcatgctcgagcggccgccagtgtgatggatatctgcagaattcgcccttagcgtggtcgcggccgaggtaccagtgctttcgtttttgttgttttttgagacagagtctcgctctgtcgctcaggctggagtgcattggcgcgatttcagttcactgcaacctccacctcccaggttcgagcatttcttctgcctcagcctcccgagtagctgggattacaggcacccaccaccacgcctggctgattttttgtagagacagggtttcacttcaattccatgttagagagctccgtgcctgtgtatacatgcctttatggtaagcccgcttaagctacaggatcaacaatgtctggcacctaagcaaaaagttccgaagccctcagcttttaccttcttaccctttcccttctcttttgaatccatt

SEQ ID NO: 37882 - DNA, 426 bp, Homo sapiens
agggcgaattgggccctctagatgcatgctcgagcggccgccagtgtgatggatatctgcagaattcgccctttcgagcggccgcccgggcaggtacttttttttttcctttggactttgaagctagtgcattggaaaaatgcaccctttccctcctttggaatgctgtattaatgtaatataataattactgggttttgtaacttgttcctggtaatgtccttcccggactctttttaaatgtcttccccctaagttttatacttgattgtattattagtctgtttttaaaatgttttgcccggtttttctcttcaatatttgtgtatataaaccgatcttcgtgatacttgacttactttttaagaattagagacagtaactccaaaaataattgtccttttttcttttcttttctttttttta

SEQ ID NO: 37883 - DNA, 461 bp, Homo sapiens
ctagggcgaaaatggccctatagatccatgctcgagcggccgccagtgtgatggatatctgtagaattcgcccttttgagcggccgcccgggcaggtactaggtcttccttaagcagcaagaaaatgtggggggttttacagaagaaaacaagcaatctgggctatagcagaagagcactaatcaacttaagtccaccttccatggtggttcagaaaccagactaccttaacgattttacccacgaaatcccaaatatccagactgactcctatgaaagtatggcaaaaaccacaccaactggtggccttccaagggacccccaagaactcatggttgataaccctttgaatcagctctcgactctagcagggcagttgtccagtctgccacccgaaaaccaaaaccctgcatcccctgatgtagttccctgccctgatgaaaagcctttcatgattcagc

SEQ ID NO: 37884 - DNA, 453 bp, Homo sapiens
tatagggcgaattgggccctctagatgcatgctcgagcggccgccagtgtgatggatatctgcagaattcgcccttagcgtggtcgcggcccagggtctgcgagccggtttttccaattcgattgaatataatcctctgaggagttagggtagtcataattgatgacaaatttcacatcttccacatctagccctctggaggccacatctgtagcaatcagaataggagctttttccatgtttgaattcatttagaaacccagtcacgctcttgttgacctcttgtcaccatggatacccatggcaggccacccatctctcctcatttttctggtaagctcatcacatcttcttttggtttccacaaaaacaatggttttattctccttttcactcatgatctcttccattagacgaataagtttttcatccttttctacgtcatgacacaca

SEQ ID NO: 37885 - DNA, 541 bp, Homo sapiens
ccctctagatgcatgctcgagcggccgccagtgtgatggatatctgcagaattcgcccttagcgtggtcgcggccgttgtacgcggggaagtcagagcgatgtgctgtgaaatctactaccgtttgctggttttgaaaatggagaaaaagagtgaggaactgagaaacatggatggccttgggaacgtggaaaagggtcactgaaatgggacgacatgaactcaaggagactatttatgaccatgtcatttgcaacatgaagaaagcttatctggagtgaaagtaaatgagaccaacagagatgagagacccggagaaatcctggttacactgcttgaatcctacacatactaacaaaaggccacatgaggacgcagtgagaagctggaagtctacaacccagaagagagccctcaacagaacctaaccatgctggtacctgcccgggcggccgctcgaaagggcgaattccagcacactggcggccgttactagtggatccgagctcggtaccaagcttggcgtaatcatggtcatagct

SEQ ID NO: 37886 - DNA, 182 bp, Homo sapiens
ctatagggcgaattgggccctctagatgcatgctcgagcggccgccagtgtgatggatatctgcagaattcgccctttcgagcggccgcccgggcaggtactagggatcatgtgtttaaaaaaagaaaggctacgatgactgggcaagaagaaagatgggaaactgaataaagcagttgatc

SEQ ID NO: 37887 - DNA, 461 bp, Homo sapiens
agggcgaattgggccctctagatgcatgctcgagcggccgccagtgtgatggatatctgcagaattcgccctttcgagcggccgcccgggcaggtacatcttccatacactttactaccttggagtaaagtagtaagaatacagctttttccttaacctttaccagctaactcagtgcttaggggccttggaatgcctgctgtccagcaggtgtcacaggcctgactgggaggcatggccattatcaacagtgtatgaaggtcacatatggctccctgaagtgattacatacttggaccacgtcacctcagccccttgcgaaattgcatttaatgttacacccttggcttttgtagaaacaggcaacaagacactatcatataaaactttgtacctcggccgcgaccacgctaagggcgaattccagcacactggcggccgttactagtggatccgagctc

SEQ ID NO: 37888 - DNA, 683 bp, Homo sapiens
  misc_feature 580: n = A,T,C or G
ctcactatagggcgaatcgagccctctagatgcatgctcgagcggccgccagtgtgatggatatctgcagaattcgccctttcgagcggccgcccgggcaggtaccccacaaataatacagacaccccatcctatctgtgtcctcagagaaattgagtgatatgtctccaggcatggccagtattccccaggacacagagaggacaaaattacaccatttaagaaacactctggtctacacctgtgtctgctgatttcttttcctagcaaccctggacctcacacctaaggacaaaggtcagtagaactggggaggcctgagtcttggcctggtcatttccaaggttccaagtttactacaatagggagttgataggggtgctcaggggttggccacgatggtgtccttgatccacttccggtaatgcaccaccttggtgtacgcggggaaggacacacttggactaaaatggttattgctttatcataatttggggatctctatcagagatgatttaggccagagtttctcaccctcggcactatcagcattttaaattagattcttctctgtggcggnggccgtcctgcgtacctcggccgcgaccacgctaagggcgaattccagcacactggcggccgttactagtggatccgagctcggtaccaagcttggcgtaatc

SEQ ID NO: 37889 - DNA, 329 bp, Homo sapiens
tagatgcatgctcgagcggccgccagtgtgatggatatctgcagaattcgcccttagcttggtcgcggccgaggtacctggtgtatttgaatatagactagagagctttcattttccagagagcatggggataaatgagtgatctgcaaattgctctctggttaagaaaacaaagctgaggttattatgaaccccaggagaaataaaaattcaaaaactacactgcgtatctgaactgcgaacaatactacccatataaagttagtcataattatgtaattactgaatgttgattctataagaaataattctatggcattgggaggatg

SEQ ID NO: 37890 - DNA, 440 bp, Homo sapiens
attgggccctcagatgcatgctcgagcggccgccagtgtgatggatatctgcagaattcgcccttagcgtggtttcggccgaggtactttttttttttttttttttttttttttgtttaaatatgtttaaattatcacactgctggcactcctcatttgcatgaagctctgcaccatacttactaattgtagtaaagttaccccccaacccacgaaaaaaaacctactctggaagaaaattttcactgaaatataaccaaacttctttaagtggattgtgacaagattataaatgatttgaaaaataacatttaaaatttggccatcaactttaaaaaatggtttgcctatacaaatttttgtaatttttaaaagataatttattctaccctcatatgggcctcagaattaaagcataatgaaccggaagaaaaaggaaa

SEQ ID NO: 37891 - DNA, 449 bp, Homo sapiens
gcgaattgggccctctagatgcatgctcgagcggccgccagtgtgatggatatctgcagaattcgcccttagcgtggtcgcggccgaggtacaaagcagactgcccgcaaatcgaccggtggtaaagcacccaggaagcaactggctacaaaagccgctcgcaagagtgcgccctctactggaggggtgaagaaacctcatcgttacaggcctggtactatatgggttagcatgctggcaagaggaggacagggtgccaagaagagtgctattggtcagcgcattgtggcaactctaccatatatcaagcaagaagttcccatcattattgtgttcagagcattaggttttgtgtccgacagagatattttagaacatattatttatggatttgaagatccagagatgatggaaatggttaaaccttctctcgatgaagcttttgtcat

SEQ ID NO: 37892 - DNA, 291 bp, Homo sapiens
gggcgaattgggccctctagatgcatgctcgagcggccgccagtgtgatggatatctgcagaattcgcccttagcgtggtcgcggccgaggtacttttttttttttttttttggtggggggcacaccaaccatccaaaaaagttgcttctgtttttactgtagttcaattacaggagttgggtttttccactttttaaagggcttggcttttatttttaacttctgatttttttctaatttacctaaatctttattttacttaaataatgttaaaagtgttatgcttcatc

SEQ ID NO: 37893 - DNA, 478 bp, Homo sapiens
cactactatagggcgaattgggccctctagatgcatgctcgagcggccgccagtgtgatggatatctgcagaattcgccctttcgagcggccgcccgggcaggtacgcggggaacgccgaggcgcttctgcatctgtgggccgagcattcttcaggtcatctgaaccttctgagaaaacatggtcaacgtcttgaaaggagtgcttatagaatgtgatcctgccatgaagcagtttctgctgtactccccaggaactggggacctacgggatatcggggctggcaaaggcaagtattatgctgttaactacccgctccgagacgggattgatgacgagtcctatgaggccattttcaagccggtcatgtccaaagtaatggagatgttccagcctagtgcggtggtcttacagtgtggctcagactccctatctggggatcggttaggttgcttcaatctaactatcaaaggacacgc

SEQ ID NO: 37894 - DNA, 212 bp, Homo sapiens
gccaactaattatttcacttttacatccaaacatcactttggcttcgaagccgccgcctgatactgacattttgtagatgtgggttgactatttctgtatgtctccatctattgatgagggtcttaatatataaaaaaaaatattaaaaaaaaagttaccttggctcgcgaccacgctaaggggcgaattccagcacacttggcggccgtta

SEQ ID NO: 37895 - DNA, 470 bp, Homo sapiens
ctactatagggcgaattgggccctctagatgcatgctcgagcggccgccagtgtgatggatatctgcagaattcgcccttgagcggccgcccgggcaggtactttgaatatggagtagtttacagctattttttttcttactggtaatcttaactaatatgattcccttattagagagcctctcactcccccaccccgaaaaatgtctactattcatgacagtaaccaattattctggacaaattgcttctttttaatttgagctatctgccatggactttctaaaatggaaacacagcctgagtgtatcttagggagagtttgattgaaaaaatccaaatcactgtccatatagatcatggatataaagagatacctgatttttattaaaaagatactttttcaaatttaagagttaatcttggaaatttggaacaagtaaaggggcaagtaaaccttttgatgaaata

SEQ ID NO: 37896 - DNA, 474 bp, Homo sapiens
actactatagggcgaattgggccctctagatgcatgctcgagcggccgccagtgtgatggatatctgcagaattcgcccttagcgtggtcgcggccgaggtacgcggggtcagtgaatggataatctaatgtgcttctagtaggcacagggctcccaggccaggcctcattctcctctggcctctaatagtcaatgattgtgtagccatgcctatcagtaaaaagatttttgagcataacaaaaaaaagaaaaaaaaaaaacgtactggaaacttcaatgtgttagctgttagaatcgctgttctggcatccatttgcgttactcaggcatttatgatgtggaagttcattaattttcagcttccaaggtggagggaacattctgcttttcaggcaccagctgtgaagaagaaaccaaccgtaactaaaggcagatcttttaaaaaaggaacagaaaatggtgtgaatggaaca

SEQ ID NO: 37897 - DNA, 546 bp, Homo sapiens
  misc_feature 109, 110: n = A,T,C or G
cgactcactatagggcgaattgggccctctagatgcatgctcgagcggccgccagtgtgatggatatctgcagaattcgcccttagcgtggtcgcggccgaggtacttnntttttttttttttttttttttttttttttaattccaaaataacatttttattatataaaaatgtaaaaatccagcaaaaccagaaatacgaatatatttttctgggctttcacatttgttgatttttattcgcgatctttttcaatacaatttacaccctcatccccatttccagtctgattatacaagtgctaagtggcagaaaggtctggaataaatacatcaaaaagaagaggcaaagctgtgaaactaagttgcatgcaacaggttctatgagggtgggggaagtgtctgagaagtaaaagagagtaagacaatgtaactggaagattttagctaaaggtctttcagtcatctttgtctttggctccatgtttcaagatgcgtgtgaactcgatggtaatgaaattcccctttttgtcaataggggcttttt

SEQ ID NO: 37898 - DNA, 369 bp, Homo sapiens
ctatagggcgaattgggccctctagatgcatgctcgagcggccgccagtgtgatggatatctgcagaattcgccctttcgagcggccgcccgggcaggtacactctgagaggtaaaatgctctgggaaatggaacaagaatcgagtggatgctgactctgtgtgcccacctcctcaactgattgatactggttgaccttgggcaagtcacttctttcaatgcctcagttccccatctgtcaaatggggttaataatactgacctacctcacaggggtgttgttgtgaggcattgtaaatcaaagttaatagaatacttcaagggcctctgtggagggatgtcttgagccagagtttaagcctgacacac

SEQ ID NO: 37899 - DNA, 473 bp, Homo sapiens
ttagggcgaattgggccctctagatgcatgctcgagcggccgccagtgtgatggatatctgcagaattcgccctttcgcgcggccgcccgggcaggtaccttatcagttaattggactcttttgatatgttgagaatctgtttacacaagttaactccttgaagaagggggtgggtaaggagtccttaatgtcttacaaatcaagggggccagatggagttcgtccggctttctcagctaagcgagagttttagtcatgtggaaacaaggctaggtgattaagagagcaaaagggagagtctaaaaacagggttagtaaaaacaatgttgggcattacattcaccacccatgttttcggggaatcaaattgttgattcctcagttattaacaagggtgtcatattgagtcttaagatacgtaagtttgacagaagctatgcgttgttttataaaattaagaaacgaatttaat

SEQ ID NO: 37900 - DNA, 442 bp, Homo sapiens
cactactatagggcgaattgggccctctagatgcatgctcgagcggccgccagtgtgatggatatctgcagaattcgccctttcgagcggccgcccgggcaggtacttttttttttttttttttttggttttttttttttttttttttttttttttaaatttttttttttttttttaattttatttttatatttctattaattttttttacattttttttacatttatttttaaaaaaaaacctttttaaaacaaatttttattttaatttaaaaaaaaattttccaaaaaataaaagtctatatttgttaaaaaaaagtccccccgaaaaaaaataattatttttttctaaaaaaaaaacccccattaaaaaaaaatttttaaaaaaaacaaacccctttttaaaaaatattaaaaaattctttttaaaaaaaaaaaaaat

SEQ ID NO: 37901 - DNA, 335 bp, Homo sapiens
agggcgaattgggccctctagatgcatgctcgagcggccgccagtgtgatggatatctgcagaattcgccctttcgagcggccgcccgggcaggtacatttattgcaaattatattaaactaaaatgaggggaaatcaaaatatggactgtttactacttgcaaatcaataattttaattttctcactctgataaaaatcagaaagcaacatttataaaattgctaccacatcacttttcatagcagggaaccgaaatctgtacacaataaatagaaaatagggatgcatagtgctggagacattcaaccaacttatcttcatctgttgcctact

SEQ ID NO: 37902 - DNA, 359 bp, Homo sapiens
  misc_feature 336: n = A,T,C or G
tgctcgagcggccgccagtgtgatggatatctgtagaattcgcccttcgagcttccgcccgggtctttacagatgtcaattctcaaattaatctacaaatttaaggtaatcctattcaaatcccaagatagtttttggtggtggctgtttttgagacaaggtctcgctctgttgcccaggctagagtgcagtggtatgaccacagctcactgcatcctcgacctcccaggctcaagcaatcctcccacttcagcctctgaagtctcttatatggtgtccaagaaatggggacaaatctcacaaggggactaggctcgggagggctggaatattcanggaagtttctttttttttttttt

SEQ ID NO: 37903 - DNA, 166 bp, Homo sapiens
aatacactactatagggcgaattgggccctctagatgcatgctcgagcggccgccagtgtgatggatatctgcagaattcgcccttagcgtggtcgcggccgaggtacagtgaaaagagccaaggctgtgtgaccccctcatcacttaaccaggcgtatgggcctg

SEQ ID NO: 37904 - DNA, 470 bp, Homo sapiens
atagggcgaattgggccctctagatgcatgctcgagcggccgccagtgtgatggatatctgcagaattcgccctttcgagcggccgcccgggcaggtaccttaatgaatgcattttatttatctcaatttttatttgcttcaaaatagaattggataagtttaaaatgttcctcttacatttgtgaatgtgtctatgagagaggggccatttctcacatattttaattaacaactaaataaacagacgttgttttaaaggaattaacacttaaatcccaaccatcctcatatagaataaaatatcaacctaaatctttactatagatagtataattctattatgtacctcggccgcgaccacgctaagggcgaattccagcacactggcggccgttactagtggatccgagctcggtaccaagcttggcgtaatcatggtcatagctgtttcctgtgtgaaattgttatc

SEQ ID NO: 37905 - DNA, 100 bp, Homo sapiens
  misc_feature 42: n = A,T,C or G
tatagggcgaattgggccctctagatgcatgctcgagccggnccgcaatgggaatgaatatcttgcaaaattcgccctttcaagcggccgcccggccagg

SEQ ID NO: 37906 - DNA, 361 bp, Homo sapiens
acgactcactatagggcgaattgggccctctagatgcatgctcgagcggccgccagtgtgatggatatctgcagaattcgccctttcgagcggccgcccgggcaggtacgcgggattctcaaacttagttggcctctttttcttctgtcagaggaccattcttagtggcactggggaaatcttggcacccagaagaattcaactgcgctcactgcaaaaaatacaatggccttacattggatttgtagaggagaaaggagccctgtattgtgagctgtgctatgagaaattctttgcccctgaatgtggtcgatgccaaaggaagatcctttggagaagtcatcaatgcgttgaaacaaac

SEQ ID NO: 37907 - DNA, 301 bp, Homo sapiens
ccctgtgcatgcatgctcgagcggccgccagtgtgatggatatctgcagaattcgcccttagcgtggtcgcggccgaggtacatttaatttgagttccaactgttaagcatatttctcagacttaaatttgattatgtccccatcaaaaagaatctccatcttctgaaggtctgttagttaatttgaggataatttgttaaagggcaagatgtcatattactgaggcttcaagttagtcagcagatgagtgccagtccaaccttttctggtatgttattggtagaaatattgagttctaat

SEQ ID NO: 37908 - DNA, 179 bp, Homo sapiens
atagggcgaattgggccctctagatgcatgctcgagcggccgccagtgtgatggatatctgcagaattcgcccttagcgtggtcgcggccgaggtaccccctcttccagcacccaagccagtattgagatcgattctctctatgaaggaatcgacttctattcctacattacccgtgcc

SEQ ID NO: 37909 - DNA, 473 bp, Homo sapiens
tacgactactatagggcgaattgggccctctagatgcatgctcgagcggccgccagtgtgatggatatctgcagaattcgcccttagcgtggtcgcggccgaggtactgcaataatcacagcgtttatccgtgccttgatgtcaaaagttaagagagggtggagaccagaccgaactattgttttctgttcttggggaggaacagcttttggcaatattggctcatatgaatggggagaggatttcaagaaggttcttcaaaaaatgttgtggcttatattaaccctccccagtccattaagggggaactctagtctgtttccggtagcataaccatcttttaagcacctggtagtaaagaaaaataatttcaactgtacctgcccgggcggccgctcgaaagggcgaattccagcacactggcggccgttactagtggatccgagctcggtaccaagcttggcgtaatcatg

SEQ ID NO: 37910 - DNA, 174 bp, Homo sapiens
atagggcgaattgggccctctagatgcatgctcgagcggccgccagtgtgatggatatctgcagaattcgccctttcgagcggccgcccgggcaggtacaatgaggaagactacggtgagaaataagaaaggctgctgactttaccatctgaggccacacatctgctgaaatgg

SEQ ID NO: 37911 - DNA, 620 bp, Homo sapiens
cgactactatagggcgaattgggccctctagatgcatgctcgagcggccgccagtgtgatggatatctgcagaattcgcccttagcgtggtcgcggccgaggtacccagtgcatatactctggagaggttctcaaagctggacagtaagtcctctggctcaggaactctgcccctaaagctgggaggaaagctggttgctcctaaacatggcttcctttctagaggctcgggccataaaaatcttatgtctttgggaaaatatccacagtttagctgtggtccacaaagtgactttgtttctttgatcctagtgttacaattagaatgagggttctggagcaagatatattacaccagaaagcatttttcctggctagagaaaccagtatgtttttttttcatttatacccatttacaacacaaataattagcttcttcagtatcataatagatactctaggaaatacttgaagaaaggcaggtccctgaaagtacctgcccgggcggccgctcgaaagggcgaattccagcacactggcggccgatactagtggatccgagctcggtaccaagcttggcgtaatcatggtcatagctgtttcctgtgtgaaattgttat

SEQ ID NO: 37912 - DNA, 447 bp, Homo sapiens
agggcgaattgggccctctagatgcatgctcgagcggccgccagtgtgatggatatctgcagaattcgccctttcgagcggccgcccgggcaggtacgcgggagaagcttggaccgcatcctagccgccgactcacacaaggcaggtgggtgaggaaatccagagttgccatggagaaaattccagtgtcagcattcttgctccttgtggccctctcctacactctggccagagataccacagtcaaacctggagccaaaaaggacacaaaggactctcgacccaaactgccccagaccctctccagaggttggggtgaccaactcatctggactcagacatatgaagaagctctatataaatccaagacaagcaacaaacccttgatgattattcatcacttggatgagtgcccacacagtcaagctttaaagaaagtgtttgctg

SEQ ID NO: 37913 - DNA, 375 bp, Homo sapiens
aattgggccctctagatgcatgctcgagcggccgccagtgtgatggatatctgcagaattcgcccttagcgtggtcgcggccgaggtacatttgtaaaccatttactgtctgggcaatagtgactccgtttaataaaagcttccgtagtgcattggtatggattaaatgcataaaatattcttagactcgatgctgtataaaatattatgggaaaaaaaagaaaatacgttattttgcctctaaacttttattgaagttttatttggcaaaaaaaaaattgaatcttggtcaacatttaaaccaaaggaaaaggggaaaaaccaaagttatttggtttgcatggcttagccattctgttatctctgtaaatactg

SEQ ID NO: 37914 - DNA, 427 bp, Homo sapiens
tgggctctctagatgcatgctcgagcggccgccagtgtgatggatatctgcatatattcgcccttagtgtggtcgcggccgaggtacaaataaatgagtttgcagtgaattgggccttcaaattacctcaagtgacagatagtaagaaaagcttcttgagcaggtggaggtcactgaatcccctactatgcacttatcaagattttacttactttaatttactggaaattgattttttaaaaaatgactacactgtaacaagggaagggatctgggtttttttgttgttttattcttgttttttttaagtagttcaaattctgaaactgtgatttaaaaattttttacagtcaagcattctgattttgaacataacttccttccctttctgcgtaacaaaggtctctctgttatctcttaaaatttt

SEQ ID NO: 37915 - DNA, 494 bp, Homo sapiens
agggcgaattgggccctctagatgcatgctcgagcggccgccagtgtgatggatatctgcagaattcgcccttagcgtggtcgcggccgaggtactattcggccagcaacggggagcctgatgaagacgcttatggtaagctcccttccatggcagtatccccaagaagtcgaaacagttacattctttctacagattgtagtatttgattatttttaataaatgtagaatatttgactttaaaatttaaatttccctcaacctacctttatcaacctattagtagtagtaattaacttatctattaactaaccaatggttaatttctgtacctgcccgggcggccgctcgaaagggcgaattccagcacactggcggccgttactagtggatccgagctcggtaccaagcttggcgtaatcatggtcatagctgtttcctgtgtgaaattgttatccgctcacaattccacacaacatacgagccggaagcat

SEQ ID NO: 37916 - DNA, 168 bp, Homo sapiens
atagggcgaattggagctccaccgcggtggcggccgcccgggctggtaccagagactcctatttatttataccagtaagggccctcccactgcctttgtctccagttaggtcagctgcatcatcagctttaaaagcccccaaatattgctgagctagcttttttaaaa

SEQ ID NO: 37917 - DNA, 257 bp, Homo sapiens
atacggatagaatacgactcactatagggcgaattgggccctctagatgcatgctcgagcggccgccagtgtgatggatatctgcagaattcgccctttcgagcggccgcccgggcaggtacttttttttttttttcctttttttttcctttttttttttttttttttttttttttttttttttttttttttttttttttttttttttttttttggggaaaaaaaaaaatacaccctttattccgggtaaaaaaaag

SEQ ID NO: 37918 - DNA, 68 bp, Homo sapiens
  misc_feature 41, 62: n = A,T,C or G
tacgactactatagggcgaattgggccctctagatgcatgnctcgagcgggccgccagtgtngatgga

SEQ ID NO: 37919 - DNA, 459 bp, Homo sapiens; identical to SEQ ID NO: 36046

SEQ ID NO: 37920 - DNA, 210 bp, Homo sapiens
tagatgcatgctcgagcggccgccagtgtgatggatatctgcagaattcgccctttcgagctgtcgcccgggcaggtaccgggatcgcaattacttgtatcatagatacgggatttctttgtaaagcatcctctacctctcagctgctgaaagctagacctttggtattttccatgctataattcttatgggatgggtgaaaatggttgt

SEQ ID NO: 37921 - DNA, 462 bp, Homo sapiens
gggcgaattggagctccaccgcggtggcggccgaggtacagattcctctggacagggtccagcagccccagctcctcctcagtgaagaccacagccacatccttgaaggtcagtccctccttgaatgtggtcatttttcctcctgtttctgggaatttgcagagtcctgagttatgccatttgagagaaggcagaatcgtgcctggaacagtggagctttgctttcagtagccaagaagtcagtccgcgcagtcctttttcaggcgtggaatgtgccgtgacaatcgccccccccgcgtacctgcccgggcggccgctcggctctagaactagtggatcccccgggctgcaggaattcgatatcaagcttatcgataccgtcgacctcgagggggggcccggtacccagcttttgttccctttagtgagggttaattgcgcgcttggcgtaatcatggtcat

SEQ ID NO: 37922 - DNA, 447 bp, Homo sapiens
  misc_feature 341: n = A,T,C or G
actactatagggcgaattgggccctctagatgcatgctcgagcggccgccagtgtgatggatatctgcagaattcgccctttcgagcggccgcccgggcaggtacgcggggggagaatccggttggggtaggagctaaatctcaggaccacttgctctatatatgagtgccaagataatctagagcagggagaggcagagaggcaggcagcctgctgggctcttcctgctgttgaaaacttacccggcccttacagaggaaatcttcctcctctcttctgccctgaatgttttcccaaacatgaaggtgataagcttattcattttggtgggatttatagngagagttccaaagtttttcaagtgcctcctctccagtcaactgccagtgggacttctatgccccttggtcagaatgcaatggctgtacctcggccgcgaccacgct

SEQ ID NO: 37923 - DNA, 650 bp, Homo sapiens
  misc_feature 496: n = A,T,C or G
acgactcactatagggcgaattgggccctctagatgcatgctcgagcggccgccagtgtgatggatatctgcagaattcgccctttcgagcggccgcccgggcaggtacataaatgggacgcgtctggatgaccgaatcattcgcacagactgggacgcaggctttaaggagggcaggcaatacggccgtggcgatctgggggccaggttcgggatgagtatcggcaggactacgatgctgggagaggaggctatggaaaactggcacagaaccagtgagtggtgagagctctgtcagtgacaaacactcctttggcctgttgaatttgctgaagaacatcacctaaagtctgcacacgagcccatttttaccaagatttgatcagtgtctttactgagctggaagcctctgaaagttattaaaggacagaatccaaaagaatgcctttaattcttgtctgagaatcttggccatgtgtcagattatcagaacaantttgttaccaggtcagaaattgtgttctttgacaacagattggatctgtaatgttgattagtctttagccataaccactacacttttagaaagacagaaaaatgtaagaatttgtttttaccataatgagtcttaagtaggttcatgatctaca

SEQ ID NO: 37924 - DNA, 560 bp, Homo sapiens
ccctctagatgcatgctcgagcggccgccagtgtgatggatatctgcagaattcgcccttagcgtggtcgcggccgaggtaccttttggctaaagaccagacgaagattcccatcaagcgctcggacatgctgaaggacatcatcaaagaatacactgatgtgtactgaaaggagaagtaactcctgatcatcttatcagaatgagtccagaagaactagcttctaaagagttagctgcttggagacgaagagaaaacagacataccatagaaatgattgagaaagagcagagagaagtggaacgacggtcaatcaccaaaataactcataaaggtgaaatagaaattgagagtgatgccccaatgaaagaacaggaagcagccatggagattcaggaaccagccgccaataagtcattggagaagccagaaggatctgaaaaacaaaaagaggagggtgactctatgtctaaagataccactagtcaacacagacagcatctttttgatctcaactgcaaaatctgcataggtcgaatgggaccacctgtagatgatct

SEQ ID NO: 37925 - DNA, 450 bp, Homo sapiens
actactatagggcgaattgggccctctagatgcatgctcgagcggccgccagtgtgatggatatctgcagaattcgccctttcgagcggccgcccgggcaggtaccttttattcctaaaagaaattacttggccaggtgcagtggctcacgcctataatcctaatgctttgggaggctgaggtggaagccaaggagtttcaggctgcagtgagctatgatcacaccactgtgttccagcctgggagacaaagcaagatcctgtctcttttaaaacaaaaaacaaacaaaccaaaaaaaaaacaaaaaaaaacctaagaaatgtaattaatcattaagtagctgcaaattgaactgttctattttgatacttcctaagagtgtccagtgtaatcagatcattttataatgggttattgaccctaggtgtcctttagaaccacctggaaagg

SEQ ID NO: 37926 - DNA, 428 bp, Homo sapiens
attgggccctctagatgcatgctcgagcggccgccagtgtgatggatatctgcagaattcgcccttagcgtggtcgcggccgaggtaccttgtgatgagtgttaataggtgtttttattatacaaagctgaatgtcatttctcgtttgtagctttctgtcactcattccatcttccttcagacatcaccacgtttctctaaagtcagaaaacattccgttttggtctttttcaaaaaggtcccaaatgctgcactctacacatgaaggccctctcacacagacgtgacgtcctgccagaaagagaatgaatgacagaaaaaaaaaagagagacaagctctaggaacaatgccgattcattccacgcagcagtattgggggtggttcgggggaggggttgtttcggattatctttttttcttttcttta

SEQ ID NO: 37927 - DNA, 369 bp, Homo sapiens
agggcgaattgggccctctagatgcatgctcgagcggccgccagtgtgatggatatctgcagaattcgcccttagcgtggtcgcggccgaggtactttttattcttttttttttttagagacagggtctcactctgtcacccaggctggacagcagtggcgcactcatggctccctgtaacctcaacctttaaaactccaacaaccctcctgcgacagggaggcagtcaatggtgaatgctggcctcgctgattactcacctggagacctttctgaggatcagatatctcatctagaaaatgggacaactgccataccactgaagaaaataccgaatacagcctcacacatcagcatgtatggttgctg

SEQ ID NO: 37928 - DNA, 428 bp, Homo sapiens
  misc_feature 342: n = A,T,C or G
ggcgaattgggccttctatatgcatgctcgagcggccgccagtgtgatggatatctgcagaattcgccctttcgagcggccgcccgggcaggtacttttttttttttttttttttgtatttttagtagagacggggtttcaccatgttggccaggatgatcttgatctcttgacctcatgatccgcccgtcttggcctcccaaagtgctgggatcacaggcgtgagccaccacacctggccctctatttattctctttaaagagagagaaaactatgagaggccaaaattatttaattaaatctttaccttagcacaagggaaaaaaatggaatttgcctanatatgggtgatgaaagcatacacaatgaatagaaacaatcacattttagtaaaaggcaaaaatttgagacttataagctattatgg

SEQ ID NO: 37929 - DNA, 444 bp, Homo sapiens
acgactactatagggcgaattgggccctctagatgcatgctcgagcggccgccagtgtgatggatatctgcagaattcgcccttagcgtggtcgcggccgaggtacatgggactacaggcacgccccaccatgcccagctcatttttgtatttttagtagagacagggtttcaccatgttggccaggatgatcttgatctcttgacctcatgatccgcccctcttggcctcccaaagtgctgggatcacaggcgtgagccaccacacctggccctctatttattctctttaaagagagagaaaactatgagaggccaaaattatttaattaaatctttaccttagcacaagggaaaaaatggaatttgcctaatataggtgatgaagcatacacaatgaacagaaacaatcacattttagtaaaaggcaaaaatttgagactta

SEQ ID NO: 37930 - DNA, 436 bp, Homo sapiens
ctactatagggcgaattgggccctctagatgcatgctcgagcggccgccagtgtgatggatatctgcagaattcgccctttcgagcggccgcccgggcaggtacccaagcactcactcttgggtgaactaatgcttctggctgcctagcaagtgaagatctgttgagaaactgagaacgctccaagagagaagctgctctcccctccttgaagaagccgcggacacgggaaacccacggcgggcaagggcccagctgtgtgctcctttcctgtcatggcatctgctgatttgaaactccatgacgaacacgttgaactaaacatttttatttaaatttgtatcatgttcatagttgctctcttgttgagagagtcatctgtcctgtttgttaggggtattttttcttgttaaaatgtatctcctgttgaatactca

SEQ ID NO: 37931 - DNA, 201 bp, Homo sapiens
atagggcgaattgggccctctagatgcatgctcgagcggccgccagtgtgatggatatctgcagaattcgccctttcgagcggccgcccgggcaggtacttttttttggtttttttttttgtatgttggaacgtgccccagaatgaggcagttggcaaacttctcaggacaatgaatccttcccgtttttctttttatgcc

SEQ ID NO: 37932 - DNA, 323 bp, Homo sapiens
tacgactaactatagggcgaattgggccctctagatgcatgctcgagcggccgccagtgtgatggatatctgcagaattcgccctttcgagcggccgcccgggcaggtactgcaaggactaacagaaacaggaaaaatcctactaaaaatatttgttgatgggaaatcattgtgaaagcaaacctccaaatattcatttgtaagccgtaagaggataagcacaaccatatgggaggagataaccagtctctcccttcatatatattcttttttatttcttgttataccttcccaaaaacagagacattcaacagtagttagaa

SEQ ID NO: 37933 - DNA, 438 bp, Homo sapiens
gggccctctagatgcatgctcgagcggccgccagtgtgatggatatctgcagaattcgcccttagcgtggtcgcggccgaggtactcacagcttatgcatacaggaatcccaaaattggatactgccaggcaatgaatattttgacttcagtgctgcttctatatgcaaaagaggaagaagctttttggcttctggttgctgtatgtgaacgaatgttgcctgattattttaatcgtcgaattattggtgccttggtggatcaggcagtctttgaagaacttatcagggatcaccttcctcagctgacagaacacatgactgatatgacattcttttcctcagtttctctctcttggtttctcacactttttattagtgtgctacctattgaaagtgcagtgaatgtggtggactgtttcttttatgatggaataaag

SEQ ID NO: 37934 - DNA, 446 bp, Homo sapiens
gctcgagcggccgccagtgtgatggatatctgcagaattcgcccttagcgtggtcgcggccgaggtactattagtatcattttacagatgaaattgagacctaaaacagagcagcatatttgggttaacagaaatagagctccactgagaattaggagacctgaatttcttgtcttgacctgcaagctgtgggaaagtctttaactcctctattgctattattaaataccagtaacaacttctcggcttacttcacaaagctcttgtgatgatcaaatgaaataatgtgaaaccggtttataaacctagagtattaatgttattccgtggaaaattacataaacacaaatatctttggaaaggtaatttaaacaaagttgtagaaaagataaaataacattatgctaagtcctttcatgttttttcattgtccttatttatattag

SEQ ID NO: 37935 - DNA, 454 bp, Homo sapiens
agggcgaattgggccctctagatgcatgctcgagcggccgccagtgtgatggatatctgcagaattcgcccttagcgtggtcgcggccgaggtactttttattgcatggtgtgaactaagttattgctgcataaatttgtaatatatcctgtttgtatttttttccaagtgtataatgttggtgtggagttttcatgacagaatattccacatttttgtaaatctgtacctgcccgggcggccgctcgaaagggcgaattccagcacactggcggccgttactagtggatccgagctcggtaccaagcttggcgtaatcatggtcatagctgtttcctgtgtgaaattgttatccgctcacaattccacacaacatacgagccggaagcataaagtgtaaagcctggggtgcctaatgagtgagctaactcacattaattgcgttgcgctcact

SEQ ID NO: 37936 - DNA, 456 bp, Homo sapiens
agggcgaattgggccctctagatgcatgctcgagcggccgccagtgtgatggatatctgcagaattcgcccttagcgtggtcgcggccgaggtacagagcctagagcaggaagtggctcaagaagaaggaacgagccaggccctgagagaggaggcccagcgaagggattcagccctgcagcagctgcgcacagccgtgaaggagctttcagtgcaaaaccaggacttgattgagaagaatctgacactccaggaacacctgcgccaggcccaaccagggtctccaccttcaccagacacggcccagctggcacttgagctgcaccaggagttggccagttgccttcaagatctgcaggctgtctgtagcattgtgacccagagggcccagggccatgaccccaatctctccctgctcctgggcattcactcacagcacccagagactcagctaga

SEQ ID NO: 37937 - DNA, 388 bp, Homo sapiens
ctcactatagggcgtattgggccctctagatgcatgctcgagcggccgccagtgtgatggatatctgcagaattcgccctttcgagcggccgcccgggcaggtacatggataggtcccttgtaagccgaaggttgagaggcaagctgaacatgagctaggtgagatcactcaagggttataagatagtggctactgtggggttgagagtggaacagtgtcccggcgggatcctgggacatacaaaggacactaaaaaaaaaaaaaaaaaaaaaaaagtacctcggccgcgaccacgctaagggcgaattccagcacactggcggccgttactagtggatccgagctcggtaccaagcttggcgtaatcatggtcatagctgtttcctg

SEQ ID NO: 37938 - DNA, 640 bp, Homo sapiens
actatagggcgaattgggccctctagatgcatgctcgagcggccgccagtgtgatggatatctgcagaattcgccctttcgagcggccgcccgggcaggtacctaatgttttcattgtgtcattgaaactatagctgactggtatgtatactaagtgttcgttgatctagaccagatataagtcattgacttttctgaaacttagttgtgtcagagatgaaccacctgctcactgaaccgtcttagtaaccagtgatgaagcatataattctaatgttggcaataggacattgctaacagtgcgtttaactgcaatattttaactacagtaatttttctgtttatttctctatccactcagtaaaatttgtggttgaattccaccttcgctgccatagttttttaccacattcctaatggttttcaacctctatactgtagtagaaaattcatctaactactgaatttaattttagcataatactggatcaaattgtttgaattttcattcctgtcatttttgatttttaaaaaatgaaacaaaactaaacaacaaaaccctaggaaaagaatggcttctttccaactagtcaattaaaacgtccagtatcttccccaaataaagccttaagtttctttt

SEQ ID NO: 37939 - DNA, 441 bp, Homo sapiens
cgactactatagggcgaattgggccctctagatgcatgctcgagcggccgccagtgtgatggatatctgcagaattcgccctttcgagcggccgcccgggcaggtacctttctctccatatgctcttacgggcttggctaacagagagccaatataaaactcatcagagagctaccattttaagtggaaatggtagcaacggattatttttaaatggacacctctttaaatttatgcctgaggttgtaattttttgaatttttgtaatcagaccttgacgatgaccgtgagcagtaagatataaataactcccacatgcttagcgttccaataatggaacactacacatacatggctagggttcaaagaaacttgctctgttacagggattacctagaaagactcttctgcagttcaatttgtaaaatttagcagcaatag

SEQ ID NO: 37940 - DNA, 163 bp, Homo sapiens
ccctctagatgcatgctcgagcggccgccagtgtgatggatatctgcagaattcgccctttcgagcggccgcccgggcaggtacagtcatggatgggcacactgttggggtgtcctggtgcacccccagtgggtgctcacagctgcccatgcctaagaagata

SEQ ID NO: 37941 - DNA, 447 bp, Homo sapiens
gggccctctagatgcatgctcgagcggccgccagtgtgatggatatctgcagaattcgccctttcgagcggccgcccgggcaggtaccgtgtgactgtgccgctgatgggggctgtgtccgacctgtgcgaggctctctccaggctgtctggcattgctgcagaaaatatggtggtcgcagatgtgtataatcaccgattccacaaaattttccaaatggatgaaggtttaaaccacatcatgcctcgggatgacattttcgtgtacgcgggatgttaatggagagaaaaagcacagtattgtagagacaccaatattagctaatgtattttggagtgttttccattttacagtttatattccagcactcaaaactcagggccaagttttaacaaaagaggtatgtagtcacagtaaatactaagatggcatttctatctcagaggg

SEQ ID NO: 37942 - DNA, 459 bp, Homo sapiens
tacgactcactatagggcgaattgggccctctagatgcatgctcgagcggccgccagtgtgatggatatctgcagaattcgcccttagcgtggtcgcggccgaggtacccttgagacctggaaccagagccacaggccccttttgtgggttcctctgtgctctgaatgggagccagaattcactaggaggtcatcaaccgatggtcctcacaagcctcttctgaagatggaaggccttttgcccgttgaggtagaggggaaggaaatctcctcttttgtactttcctttaggatttactttttgaggaatggagataatacatgtaaatctttcagagtggtttttaatagacaatacataatggctatcattaaccacaatggttcaggtatgtgtgttttcttgtggacccatcagggttttccaagattcctgcctgtacctgcccgggcggccgc

SEQ ID NO: 37943 - DNA, 449 bp, Homo sapiens
agggcgaattgggccctctagatgcatgctcgagcggccgccagtgtgatggatatctgcagaattcgcccttagcgtggtcgcggccgaggtacattttcaaagcctcggattgtttatcttgcaaggagagaaggggcctcttctccacagatgcagctcaaattagcaaaactgaactgtagagtttcaagcctttttcccttccttaaaatgctgatagatttctagaccagactttgatatttattggcttcttggtcttgctgtttaaacacacccattgccctttctttcttaggccctgtaagcaaagctggagtagcgtcttgggaaaaggccaactgaccaccctaattttgtcgttccaagtctgcagagcgcacatattaagtagttgttaactgacatctttaggctccgtgagtgaaatgcagcaagcctgcccc

SEQ ID NO: 37944 - DNA, 432 bp, Homo sapiens
agtgtgatggatatctgcagaattcgcccttagcgtggtcgcggccgaggtacttaaaaaagcatttattactagaagactgaatgagattaacttaaaaaaattaataatatttcagttagataacttgaaaacaagggccccaaatggtaatctttagataatttggaaagtagggtttatcgattgacatgacatatcagcctcactaacacccaagcataacaccgtcttttcaaaataatcagtaattcatatgtaaatagcaacacaagctagtaatttccttactaaaagtgatatgcttgtgccctctggtggtaacatttagcatattcccctgatattgcatatattgtgaaatataaaaaagtatatttgtatttgagaatatcatcaaaatttgagataacaaatgtgggttgctttttt

SEQ ID NO: 37945 - DNA, 427 bp, Homo sapiens
ggagtcacgcgtaagacgtgttttgcgacccggcgccctctagatgcatgctcgagcggccgccagtgtgatggatatctgcagaattcgcccttagcgtggtcgcggccgaggtacacctttccagtttcgagcttcttctccagttgaagagctgcttactatggaagatgaaggaaattctgacatgttagtggtgaccacaaaagcaggccttcttgagttgaaaattgagaaaaccatgaaagaaaaagaagagctgttaaagttaattgccgttctggaaaaagaaacagcacaacttcgagaacaagttgggagaatggaaagagaacttaaccatgagaaagaaagatgtgaccaactgcaagcagaacaaaagggtcttactgaagtaacacaaagcttaaaaatggaaaatgaagag

SEQ ID NO: 37946 - DNA, 460 bp, Homo sapiens
ggccatgtagatgcatgctcgagcggccgccagtgtgatggatatctgcagaattcgcccttagcgtggtcgcggccgaggtaccacaacctctgcctcctgggttcaagtgatcctcctacctcagcctcctgagtagctgggattacaggcacctgccaccacacctggttaattttttgtattgttagtagagatggggtttcactatgttggtcagggtggtctcgaactcctgattacaagtgattcacctgccttggcctcccgagccttagcccttttgattccctgacatcaaatgctactcctcttggatagttatactgtgagaagttggtgacgggcaaaacgggagcccaggccagtgtcagaaactcacccagagtcgcaaggacaaagctgttgtgtgggttcttccctgtgagaatcttaaggatggaaatggtgagcacaaacc

SEQ ID NO: 37947 - DNA, 429 bp, Homo sapiens
gcgaattgggccctctagatgcatgctcgagcggccgccagtgtgatggatatctgcagaattcgccctttcgagcggccgcccgggcaggtaccactgcactccagcctgggtgacagagtgagactctgtctccaaaaaaaaactttgcttgtatattatttttgccttacagtggatcattctagtttgaaaggaacattaaaattttttattaaaaatggtgtcatgccagtgagagatgttatattcttttctcatttcttccccacccaaaaataagctaccatatagcttataagtctcaaatttttgccttttactaaaatgtgattgtttctattcattgtgtatgcttcatcacctttattaggcaaatttccattttttttcccttgtgctaaggtaaagatttaattaaataatttt

SEQ ID NO: 37948 - DNA, 328 bp, Homo sapiens
ggcgaattgggccctctagatgcatgctcgagcggccgccagtgtgatggatatctgcagaattcgcccttagcgtggtcgcggccgaggtacgcggggctcattactcagttgtgagggggaaggtagactctttccagacctttgataaaggggctgctcaaaaaagccacgaccttgggccttttgataaatctatggcgttaagttaaggagggagcatatatataaaaaacctcatccctctttctaatctcttatgtcctgcgagtgtcacccattgagtaaacccaagtggatgtcaagcaggaaagtagctgggatgatg

SEQ ID NO: 37949 - DNA, 476 bp, Homo sapiens
ttgggccctctagatgcatgctcgagcggccgccagtgtgatggatatctgcagaattcgccctttcgagcggccgcccgggcaggtacatggcatactatgaaagcaaacactaaaccataccttcactgcccccatcttgttccaggcctgatagaccacgtccctacacatattcactattggaaaatcattttcagtcacagtgcatcaagtccagatcacagcggcgggctttgctctcacagtctgtggcatatgtctctcctgggatccacacagccgaccactgaacaacgatgaagggggctttcgtgggaaagttcttctcactatgcctttccacaggcgacgcagggtcacatctcaatacaatttccgtcctattctatgatacactattatccactcaagaatattagtgccagattcagaacttcctcacgagctggttccaagccctttggacctgaagg

SEQ ID NO: 37950 - DNA, 451 bp, Homo sapiens
tatagggcgaattgggccctctagatgcatgctcgagcggccgccagtgtgatggatatctgcagaattcgcccttagcgtggtcgcggccgaggtacagttagaaagtgtatggataaaaattcctggaagcaagtcttttttattgacggaataaacacaacattgatggtagtaggatagagttggtggcaatgtcctgtcactgcaattatgacattcaaatcagacctacataactgtggctgcttttgattctttcaactttgaattttgattatctgtacctgcccgggcggccgctcgaaagggcgaattccagcacactggcggccgttactagtggatccgagctcggtaccaagcttggcgtaatcatggtcatagctgtttcctgtgtgaaattgttattcgctcacaattccacacaacatactagccggaagcataa

SEQ ID NO: 37951 - DNA, 548 bp, Homo sapiens
actcactatagggcgaattgtgccctctagatgcatgctcgagcggccgccagtgtgatggatatctgcagaattcgccctttcgagcggccgcccgggcaggtacttttttttttttttttttttttttcttagtggggagaaacttttatttccaggacacgtgtgcagaagcaacaagtcaaaattaaccattctatctgaaagagaagaaacatgtactactaattctacaatgcctttctctttagtcagtattaaaaatcttttttaaagtattggtatgaaaacaaatttttgttgccctgataatggaattttaaaactacccacagtttaagagaaaacataacttggtaaaaaaggtagccaataaaaccacaatttgaaattgataccattttctactcacaatggatgatgaaaaatttcacctttaaatgggtcagaagttgtctttgacatttaccatgaaaaaactacataaaatggctccctggtgaggctacagacacggccctggtgatgggcgttgcaaagttttcact

SEQ ID NO: 37952 - DNA, 444 bp, Homo sapiens
tacgactactatagggcgaattgggccctctagatgcatgctcgagcggccgccagtgtgatggatatctgcagaattcgccctttcgagcggccgcccgggcaggtacagaaatttaagctcacatgtatttgacaaatatagtttagtagactagctctatgtgcttttcactttcctctgattttctctccctgattcattattatctgtgcagctcacagtttttttttgtatacagctcacagttctcaaattttcgttacccatgggcttctgttgtcccatgttctctccagttaagatctaatttaaaattcattggattgaaatttattgaatataattcagcttttgtaactaggtagacttttcttatagtttagttttaatatagtttagggtattactggctttttcccaggtgacacactaaggactgtt

SEQ ID NO: 37953 - DNA, 340 bp, Homo sapiens
atagggcgaattgggccctctagatgcatgctcgagcggccgccagtgtgatggatatctgcagaattcgccctttcgagcggccgcccgggcaggtactttttttttttttttttttttggttttttttttttttttttttttttttttttttttttttttaaaaaaaggggcccacggggggaaaaaacacttatgggggggcacaagacccccccctgacccaaaaaaccaaaaagtttttttgggggaataaaaaagggggggggtttataaaaagggtatttttcaaaaaaaaaaaaattttctaaagggggcaaaaagggaaaaaaaaaaaaaa

SEQ ID NO: 37954 - DNA, 458 bp, Homo sapiens
gggcgaattgggccctctagatgcatgctcgagcggccgccagtgtgatggatatctgcagaattcgcccttagcgtggtcgcggccgaggtacacccaaggattctgttctgcaactccatcctcctgtgtcactgaatatcaactctgaaagagcaaacctaacaggagaaaggacaaccaggatgaggatgtcaccaactgaattaaacttaagtccagaagcctcctgttggccttggaatatggccaaggctctctctgtccctgtaaaagagaggggcaaatagtctccaagagaacgccctcatgctcagcacatatttgcatgggagggggagatgggtgggaggagatgaaaattcagcttttcttattcctttttattccttttaaaatggtatgccaacttatgtatttacagggtggcccaaatagaacaagatgcactcgctgtg

SEQ ID NO: 37955 - DNA, 277 bp, Homo sapiens
gtatacgactcactatagggcgaattgggccctctagatgcatgctcgagcggccgccagtgtgatggatatctgcagaattcgcccttagcgtggtcgcggccgaggtactttagagtacgagacagatcccactgatcataatcatttcaagagcgagaatcagatgaagtactttgaccaccgcagtaaaacatacaagtgaagtgcaagagaacaggtcatatggattatattctgctgctcacagcttttgacacactcaaacatctatgac

SEQ ID NO: 37956 - DNA, 434 bp, Homo sapiens
gcgaattgggccctctagatgcatgctcgagcggccgccagtgtgatggatatctgcagaattcgcccttagcgtggtcgcggccgaggtacaaaacacaaccgaggagcgtatacagttgaaaacatttttgttttgattggaaggcaaattattttatattagtattaaaaatcaaacccctaatgtttctttcaaatgaatcttccaaagtggattatattaagcaggtattagatttaggaaaacctttccatttcttaaagtattatcaagtgtcaagatcagcaagtgtccttaagtcaaacaggttttttttgttgctgtttttgctttgtttccttttttagaaagttctagaaaataggaaaacgaaaaatttcattggaatgagtagtgcatttaattatttttttaaaaaactttttaagtta

SEQ ID NO: 37957 - DNA, 316 bp, Homo sapiens
gcgaattgggccctctagatgcatgctcgagcggccgccagtgtgatggatatctgcagaattcgccctttcgagcggccgcccgggcaggtacatactgttaactataatagttactactaagcatgatttcattcactgcagcaggcatacttgcctgttcctaaattcattctgggttgcgggcattaggacaattacagtggttttgctctgtgatgcctatttttttccaatgatttttagttattgttgctttaaaaattttggcatcacacaaataaagttgcatgtgaaatgctatttatataacaac

SEQ ID NO: 37958 - DNA, 392 bp, Homo sapiens
gggccctctagatgcatgctcgagcggccgccagtgtgatggatatctgcagaattcgcccttagcgtggtcgcggccgaggtacttttttttttttttttttttgagatggagtctcgctctgttgcccaggctggagtgcagtggtgcgatctcagctcactgtattctctgcctcccgggttcaagcaattctctgcctcagcctcccaagtaattgggattacaggcacctgccaccatgcctggctaattttttgtatttttagtatagacgggggtttcactattttggctaggctggtcttgaactcctgacctcttgatccacccgccttggcctcccaaagtgctgggattacatgcatgagccaccgtacctggccttccct

SEQ ID NO: 37959 - DNA, 446 bp, Homo sapiens
agggcgaattgggccctctagatgcatgctcgagcggccgccagtgtgatggatatctgcagaattcgcccttagcgtggtcgcggccgaggtacatactatgttcatgatagtgtgatttttttcacatttaagcaggaatgcaatataaaaatgtgaatctcttagttctcagccatgtgcttattatatttccttttagaatggggtatctgtataacacacgcacacacacctaagagtctctatttcacaattatatttttgtaaatagtatatgcatttttaatacattggaggctttattttgaactaatttcttagggaatagttatattttctattacacaagtttaaaaatattattaacttgtattttcttaatatacaatctatcttttccacaaatatgagtgggaaataaatcagcacatttgaaagaaagt

SEQ ID NO: 37960 - DNA, 471 bp, Homo sapiens
agggcgaattgggccctctagatgcatgctcgagcggccgccagtgtgatggatatctgcagaattcgcccttagcgtggtcgcggccgaggtacatttcaaaatataaaaatatattacaaatctgctgaattatttacaagcaatgttctattatctctatgcaacatttgtttaatacaatactaacaagttacacatatttccatttctgtaagttaaaaaaaatcgatatggcttcttgcttaccaagcaagaaagtgattttattttccttttcaagaccaactttggtgcataaaagattcagtttgaagatacttgtaaaaaaaatacaatttttcttacattaagaaaaaacaactcaaaaaccaaatgatttcctcagaaaaaaaattagagtcatataggttaaatgaaaatatgaagattattcaaataatttgaaaggtttttcaaaaaccgttaaca

SEQ ID NO: 37961 - DNA, 344 bp, Homo sapiens
tagggcgaattgggccctctagatgcatgctcgagcggccgccagtgtgatggatatctgcagaattcgccctttcgagcggccgcccgggcaggtactttttttttatacctggaaccagagccacaggccccttttgtgggttcctctgtgctctgaatgggagccagaattcactaggaggtcatcaaccgatggtccttacaagcctcttctgaagatggaaggccttttgcccgttgaggtagaggggaaggaaatctcctcttttgtactttcctttatgatttacttttttaggaatggagataatacatgtaaattttttaaaagtggtttttaat

SEQ ID NO: 37962 - DNA, 404 bp, Homo sapiens
gcgaattgggccctctagatgcatgctcgagcggccgccagtgtgatggatatctgcagaattcgcccttagcgtggtcgcggccgaggtactaattcaatcaaaatatttaaaacatttttaatatggaaactgaggctttttcactctaagaatctgcctccaaattcaagctgaagatttggatacactgtgattctgaataaacagtcaagaaacacaacatcaaacaataaaagcttttagccaaatgtacctgcccgggcggccgctcgaaagggcgaattccagcacactggcggccgctactagtggatccgagctcggtaccaagcttggcgtaatcatggtcatagctggtttcctgtgtgaaattgttatccggtcacaatttccacacaaca

SEQ ID NO: 37963 - DNA, 259 bp, Homo sapiens
  misc_feature 69: n = A,T,C or G
agcggccgccagtgtgatttatatctgcagaatacgccctttcgagttgccgcccgggcaggtactttntttttttttttttttttttttttaaaagaatgagaaaaccatttttatattgatataaaatgatctccaggatatattaaatgggggaaaaaaaaaacatgccagagacagtcttatatagtatgcttgccatactttcagaaaagggaaaaataacttttttgctcatatatgcacttttttaaaaaat

SEQ ID NO: 37964 - DNA, 399 bp, Homo sapiens; identical to SEQ ID NO: 37868

SEQ ID NO: 37965 - DNA, 453 bp, Homo sapiens
tacgactactatagggcgaattgggccctctagatgcatgctcgagcggccgccagtgtgatggatatctgcagaattcgccctttcgagcggccgcccgggcaggtactttttttttttttttttttttttttttttttttttttaattttttttttttttttttttttttttttttttaaacccgcaatttttaccaatttttttttttcaaaacagttcccatgtaaaaaatgggaaatggttttcgctgcccccccccccagttgggaaccttcccagcccatgttttcaatttggggggggagggttaacaattgccttaaccccccttctgaacataggaatttttcttttaaaaagattaaaaatttgattgccagggccttttaaaattgccctcgcccttgaaaaccgggggaaaataaaaaggggccttttaaagtttttaaa

SEQ ID NO: 37966 - DNA, 451 bp, Homo sapiens
tatagggcgaattgggccctctagatgcatgctcgagcggccgccagtgtgatggatatctgcagaattcgccctttcgagcggccgcccgggcaggtacgtgggacctgccacaggaagaactgggagatcaatacatggccactgccaaacactggtcctctcctcagggccacatccccaaaccagaccctcctacctcccagccaggcaggtagaaacttctgcagcattgtagagcaatctagccctcctctcttagtcccacattcaaaatgttcccaggtttagcccattcactgtgtaggctcttccctcccatgcccctggccctggttcaggtcctcaggaccatgcagccagaccacagcagtcacttcttatccaggatttaagcagcccagctccacagaccatgttaatccctgggttatacggtctctactcctat

SEQ ID NO: 37967 - DNA, 432 bp, Homo sapiens
attgggccctctagatgcatgctcgagcggccgccagtgtgatggatatctgcagaattcgcccttagcgtggtcgcggccgaggtacccatcacgggtgtttgtgggagataccttctgttactttgctggcatgacctttgccgtggtgggcatcttgggacacttcagcaagaccatgctactattcttcaatgccccaggtgttcaacttcctctactcactgcctcagctcctgcatatcatcccctgccctcgccaccgcatacccagactcaatatcaagacaggcaaactggagatgagctattccaagttcaagaccaagagcctctctttcttgggcacctttattttaaaggtggcagagaagcctccagctggtgacagtacctgcccgggcggccgctcgaaagggcgaattccagcac

SEQ ID NO: 37968 - DNA, 318 bp, Homo sapiens
gactcactatagggcgaattggagctccaccgcggtggcggccgaggtacgcgggtggccctgggaatcaattcctcaggaattgccctcaagaactctgcttcttgctttgcagagtgccatggtcatgtcattctgaggtcacataacacataaaattagtttctatgagtgtataccatttaaagaatttttttttcagtaaaaggggaatttacaatgttgggaggagagattaagttatagggagctggattttcaaaactgtggttccaagatttcaaaaaattctattgatagtggccattttaattcatt

SEQ ID NO: 37969 - DNA, 294 bp, Homo sapiens
actatagggcgaattgggccctctagatgcatgctcgagcggccgccagtgtgatggatatctgcagaattcgccctttcgagcggccgcccgggcaggtactctcagagaacaggagatatgtgtgcatgccttagaaaaagcccttgagtaggtaaggaaggaagaaacctatggcagacaggattgctgcagccaagggggcttcaagcagaaatgaaagagatggcttgtgaagctgcccgtgtcgtgtgggagtcgcatggcttctgcgagaaaagtgatttaggcaga

SEQ ID NO: 37970 - DNA, 431 bp, Homo sapiens
gcgaattgggccctctagatgcatgctcgagcggccgccagtgtgatggatatctgcagaattcgccctttcgagcggccgcccgggcaggtacttctgaccttgggtttgtttttgttttgttttgtttttcctgttaggatttatttggggacttttggtagtttaaactctttaaccttttccttgccgtgtatgaggaaagctaaagctgttatcaacttcttattctacgatactaacacgggttttcagtgtttgtttgtttttattattattattaattttgcgtgatgcgaataccctctcccatcaatatttggattatggtgctatatattggtaatgatcctttaatattgggaagggattttaaaaatactgtgatttaactgggtttcttcctttgattttcatattttaaataaagc

SEQ ID NO: 37971 - DNA, 443 bp, Homo sapiens
agggcgaattgggccctctagatgcatgctcgagcggccgccagtgtgatggatatctgcagaattcgcccttagcgtggtcgcggccgaggtacaagtgtcacagaaagtgaggttgcacgagccagaaatcttctgaaaacaaacatgttgttgcagcttgatggttcaactccaatttgggaagatattggtaggcaaatgttatgctataatagaaggattcccatccctgagcttgaagcaagaattgatgctgtgaatgctgagacaattcgagaagtatgtactcttaaaaatctgttaagagagtggatctcattttaagggttcttaccacaataaaattaaatttttgaaataaatcagtcatatttgagtgaaatgaaacctttccgagtagtttcagacaattgataatacctagtttacagttcctgtag

SEQ ID NO: 37972 - DNA, 480 bp, Homo sapiens
ctactatagggcgaattgggccctctagatgcatgctcgagcggccgccagtgtgatggatatctgcagaattcgccctttcgagcggccgcccgggcaggtacaaatgcagaaatgcagtaactgcctttaaaagaaatgccaaagaaatgttatcttttaacaaaacatgtatttatattacagcagttttactacagggacacgggtataaaaaaagaaaattagcacactacatataaatatgtataagaaaaatacctcttacttaaatttgtatgaaaacaggactgctccaaatatttttaaaaaaatttctccaataggtgatatgtaagtgtttaaaactcagctaagtgctttgcttttatttaaaagtttatttctaaaaggggagaagtaaaataaaaatattaagtattaggttcttaatttagagcattgggcgagggtctaagaagattcaatctgtaaaaagtt

SEQ ID NO: 37973 - DNA, 328 bp, Homo sapiens
actactatagggcgaattgggccctctagatgcatgctcgagcggccgccagtgtgatggatatctgcagaattcgcccttagcgtggtcgcggccgaggtacttcggtcggtgtcagcagctcgtggcattgaacattgcaatgtggagcccaaaccacataaaatggggtgaaattggccaactttctattaacttatgttggcaatattgccaccaacagtctgctggcccttctaataaaagaaaattgaaaggtttctcactaaactgaattaagtatgtggagtcaagagactcccagagcctgagcgtatcctgcccgggc

SEQ ID NO: 37974 - DNA, 389 bp, Homo sapiens
tacgactcactatagggcgaattgggccctctagatgcatgctcgagcggccgccagtgtgatggatatctgcagaattcgcccttagcgtggtcgcggccgaggtactactgcttattttcctcctggagccactttaaataacaaagagaaaaacagtattttgtttctcaactcattggatgctaaagaaatatatttggaagtaatacataatcttccagattttgaactactttcgggaaacacactagaggatcgtttggctcatcatcggtggctgttattttttcattttggaaaaaatgaaaattcaaatgatcctgagctgaaaaaactaaaaactctacttaaaaatgatcatattcaagttggcaggttcgactgtt

SEQ ID NO: 37975 - DNA, 469 bp, Homo sapiens
agggcgaattgggccctctagatgcatgctcgagcggccgccagtgtgatggatatctgcagaattcgccctttcgagcggccgcccgggcaggtaccagcggtggggataatttggggtcatcttagagttcttccattacacgggaattctcagctcaccaaatctgggattccgcatctggccattccttaagctgaaggcctggcatatttttgagtgtccatttggatcagctaataaacccagggtttgtctactggctggaggagtaagaactataaggctaattgaaatgaatctacttaaaatagtgacctgatttttctaataattactggaaggtaagggttgattgagactttaaaataaaaccaaaaattattctaaatttttcatattttatataagaaagttttgatttttactgcaaccattttctaactcttaaaataaagaaaggataatt

SEQ ID NO: 37976 - DNA, 440 bp, Homo sapiens
tagggcgaattgggccctctagatgcatgctcgagcggccgccagtgtgatggatatctgcagaattcgcccttagcgtggtcgcggccgaggtacttttttttttttttttcttttttttttttactttacgttctgggatacatgtgcagaatgtgtgggtttggtacacaggtatacgtgtgccatagtggtttgctgcacctatcaacccatcatctaggttttaagtcccacatgcattaggtatttgtcctaatgctctccctcccctgttctcccaccccccgaatcacttattttaaaagtcagcaataaaaataaattgaaactaaatcaaataaattgatactatatagaacaaaataattacaacgtaatatagtagtaaaagaaaataataataattaagagaataaaagccactttggtgataaaag

SEQ ID NO: 37977 - DNA, 449 bp, Homo sapiens
gctcgagcggccgccagtgtgatggatatctgcagaattcgccctttcgagcggccgcccgggcaggtacgaattctacctagcaatataggtttcttatcaacataccttttttcctcactggtttcaaactgacaaaggtgtagggagaaaataattgaatggtttctgaaggccacactagccctttagccaagagttctgcttctgaattacatagaacatcttggtccacagacaatggaatggatttttggagagagtgtcaatttagggctaaagaaatacagggtgagaatgaagccctcaacaaaagctccaaaagggcacagaaactggtaagtgacctaaatatggagagacaggtgaggagaaaatacatagtaaatgctggctcgttattgcattttattctctcccttctctcatccattcatcttcttaagact

SEQ ID NO: 37978 - DNA, 447 bp, Homo sapiens
actatagggcgaattgggccctctagatgcatgctcgagcggccgccagtgtgatggatatctgcagaattcgcccttagcgtggtcgcggccgaggtactttttttttttttttttttttttttgggaactagggtttattttagcaaagaaaacacgtaagagccacactggtagtcccaggagaggcccagcagcaaatgctgagaaaagccagtggctttttgcacagcctgcccatggtggaggggagcacctgagctggctcctgggcccacagctgtgcctgggaatagtccaggctgtgcctgcagaggagctgctccaagcagaccctgaggaagggcacatatcccaaatgctgcttgcttcaaacaggcaccctcggtgctgcctcctttgaggctggcagattccttcctggatatgcagggtcaaaagcggagg

SEQ ID NO: 37979 - DNA, 60 bp, Homo sapiens
acgactattagggcgaattgggccctctagatgcatagctcgagcaggccgccagtgtga

SEQ ID NO: 37980 - DNA, 445 bp, Homo sapiens
ccctctagacgtatgcgcgagcgcccgccagtgtgatggatatctgtagaattcgcccttttcgtggtcgcggcttgaggtaccaacaaaggctactttagaggtatcctctatcataaaaaagaaaccaaatcaagctaaaaaaggccttggggccaaaaagggaagtttgggagctcataaactgccaaacacatgctttaatgaaattgaaaaacaagctcaagctgcggataaaatgaaggagcaggaagacctggccaaggtggtatctaaagaagaatcaattgtttcatcattacgattagcctataaggatcttgaaattcaaatgaagaaagacgaaaagatgaacattagtggcaaaaaaatgttgactcagacagactcggcatgggatttggaaattgcagaagtgttatttcacattcagtgacttcagata

SEQ ID NO: 37981 - DNA, 460 bp, Homo sapiens
cgactcactatagggcgaattgggccctctagatgcatgctcgagcggccgccagtgtgatggatatctgcagaattcgcccttagcgtggtcgcggccgaggtacttttttttttttttttttttttttttggttaaattctcctttcctctacctgcattcccaagtaacggaaaggagtagaggtttgaatcttatcagatgttattgtcagtcccgcgttggcaacctctgtctgcagaaatgtgtaacggtcaattaatttgtctctcgtttctgcagcacacaaaatatcaacatagtgaacgatgtaacagtctgaaaacttgtctttaactggttgcagagcttgagctgacaaatagttgaaactattaagctttccttgaggcaaaacttccactgaaacctgggggctggttctttattatttaggctggtatggtaaaagcaaatttt

SEQ ID NO: 37982 - DNA, 466 bp, Homo sapiens
ggcgaattgggccctctagatgcatgctcgagcggccgccagtgtgatggatatctgcagaattcgccctttcgagcggccgcccgggcaggtacatgcctgtaatcccagctacactggaggctgagtcaggagaatcacttgaacgtgggaggcagaggttgcagtgagtggagatcgcaccactgccctccagcctaggtgacagaatgagactctatctcaaaaaaaaaaaaaatgatatcagttggtggatgctcctataggtagccaaacacattgattacctgttagattttaggatagaaatcaaggtagagcacgtcagcaagagcctctttgtctcactccatcatttaaaaccagtatattcagtagttgaagaaagagctctccctgagtcagttgcaaaacgtctatatttttagatgccactacttttttcttaaatattcattttgagact

SEQ ID NO: 37983 - DNA, 238 bp, Homo sapiens
actacttattatagggcgaattgggccctctagatgcatgctcgagcggccgccagtgtgatggatatctgcagaattcgcccttagcgtggtcgcggccgaagtacgcgtgtgggttcagggaaatgggattgacttggccttcaggctcctttggtcataattttaaaatatgggagtagaaaacaacaaaataatggaatggtcctctttaaaaacaatgaaaagagctatttat

SEQ ID NO: 37984 - DNA, 491 bp, Homo sapiens
agggcgaattgggccctctagatgcatgctcgagcggccgccagtgtgatggatatctgcagaattcgcccttagcgtggtcgcggccgaggtacaaataagcagtgtgcctaacaagcaacacagtaatgttgacatgcttaattcacaaatgctaatttcattataaattgttttgctaaaatacactttgaaactatttttctgtattccaagagctgagatcttagattttatgtagtattaagtgaaaaaatacgaaaataataaacattgaagaaaaaaaaaaaaaaaaaaaaaaaaaaaaggtccagggaaggcctttcgggcagggcacatggttcactgccccatgacgtgataccttgaagcacaccattacggacaagtgggcccccagaatcacccgagcaggtgcttttgccccctgtccagcgtccagcacacagcatgaacttggtcaccttctgggggtgaacttgcgcacacac

SEQ ID NO: 37985 - DNA, 473 bp, Homo sapiens
actactatagggcgaattgggccctctagatgcatgctcgagcggccgccagtgtgatggatatctgcagaattcgccctttcgagcggccgcccgggcaggtacatcttaccatggctgccggaaagagagagagtgagtagggaactgccacacacttttaaaccgtcagatctcatcagatcttgtgagaactctatcacaaaacagcattagggagctgacgctaaaccattcaaaaccatccccatgatgtaatcacctcccaccaggccccactttcaacaagtggggattacaattcaacgtgggatttgggtggggacacagagccaaaccatatcaatacctatcaaacagctacaagtttatactccctgtggcacattttctacagaaacatggcaaggcctggaaatgtctttggctatcaaagttatacaagccccctgcataaagttaatacaagttaa

SEQ ID NO: 37986 - DNA, 293 bp, Homo sapiens
ctatagggcgaattgggccctctagatgcatgctcgagcggccgccagtgtgatggatatctgcagaattcgccctttcgagcggccgcccgggcaggtacaaggctaagcattttaactttatactggaaaaaaaatcaaacaaaggggagggataaaggacttagttcatctttgcactggaaaacaaaatatgtaattaaaaattcccataacttgcatggtaacatttgaattctttccaaggttaaaaaaaaaaaagataatccctggtggatatttaaatggaaatg

SEQ ID NO: 37987 - DNA, 478 bp, Homo sapiens
acactacttagggcgaattgggccctttagaagcctgcctcaaccggccgccagggtgatggatatctgcagaattcgcccttagcgtggtcgcggccgaggtaccagagttaggccaccaggggcactcaaaacttgtttctttctatgctattggacagacagaaaaacacaaagaggatagaaatccagagaggtggaaggaccagccaaataaactgtgtacatgagaatccttttttgacaagccttggaaagctgacactgtctctttttcctccctctatacgaaggatgtatttaaatgaatgctggtcagtgggacattttgtcaactatgggtattgggtgcttaactgtctaatattgccctgtgaatgttgtatacgattgtaaggcttatgtcactaaagatttttattctgattttttcataatcaaaggtcatatgatactgtatagacaagctttggagtga

SEQ ID NO: 37988 - DNA, 112 bp, Homo sapiens
gcgaattgggccctctagatgcatgctcgagcggccgccagtgtgatggatatctgcagaattcgccctttcgagcggccgcccgggcaggtaccactgcactccagacctg

SEQ ID NO: 37989 - DNA, 165 bp, Homo sapiens
agggcgaattgggccctctagatgcatgctcgagcggccgccagtgtgatggatatctgcagaattcgcccttagcgtggtcgcggccgaggtacaaggttttgaaaaatctatacacctgtgtaaccaccaccacctgtgttaccaccaccgccagaaccaaaa

SEQ ID NO: 37990 - DNA, 307 bp, Homo sapiens
tatagggcttattgggccctctagatgcatgctcgagcggccgtcagtgtgatggatatctgcagaattcgttttttgagcggccgcccgggcaggtactgtgtgcaaccttaaaatatatattagtaaaaatctttcattttatatcccttgtgttctatatacctattattaatacgtccttatcttccttttccccctggacatcataatttacttccgtcttaaggactctaagaggtctgccgtatgtgcttcaccttgacacagaacaccgggcgctgcagcctccatcagtactgaggct

SEQ ID NO: 37991 - DNA, 446 bp, Homo sapiens
gctcgagcggccgccagtgtgatggatatctgcagaattcgcccttagcgtggtcgcggccgaggtacttaacatgtttactctaaaatttcagttgcaaaacttttttttaagtccttatcaggataaaaattaccttataaaaataaatctccccacctctgacatctaaattctccatccctgtaagttactaaattttttttaaaccttaaaaatttacctttaacgtatttcaatagtattttaatacacggactataataacaaaccagctggtatattattttgtccttttccattataattttcattcttgtaattagcaaccaagttaatgattgcattcaggattatctagactgtttttacaaaaaaccccacgaattaggagcctaacagctttctatttttttaattaaaaaaactgattctttttaattttt

SEQ ID NO: 37992 - DNA, 450 bp, Homo sapiens
ctactatagggcgaattgggccctctagatgcatgctcgagcggccgccagtgtgatggatatctgcagaattcgcccttagcgtggtcgcggccgaggtacacacatgagaactgaaatggcccaaacccagaaagaaagcccaactagatcctcagaagacgcttctagggacaataaccgatgaggaaaagatggcctccttgtgccaccgtctgttatgatttctctccattgcagcagaaagccgttcttctaagcagacagcaggtgatgatggcaaaatagaccacactcttgaggagcaggaggaagtacctgcccgggcggccgctcgaaagggcgaattccagcacactggcggccgttactagtggatccgagctcggtaccaagcttggcgtaatcatggtcatagctgtttcctgtgtgaaattgttatccgctcac

SEQ ID NO: 37993 - DNA, 452 bp, Homo sapiens
ctatagggcgaattgggccctctagatgcatgctcgagcggccgccagtgtgatggatatctgcagaattcgcccttagcgtggtcgcggccgaggtacaccagggaggtgggtgtggacagaggcactgggcagctgctgggaagcgaggcacaagtctgtgcccctactcccagggctgcctggaggaagcagctctaactttcatcagcggggacaaaaatgaacttaaactaaaaaaattattggccgggcgcagtggctcaccagaagcattttcttttcaaagtgtgtgcacagagtgaggaggccagcctgggcaacatagtgagttgagacctgtctctacaaaaaaataattacgaaaattagccaggtgtgctggtgtgcacctgtagacgcagctacagactgaggcgggaggatcacttgagtcaaggaagttgaggctg

SEQ ID NO: 37994 - DNA, 454 bp, Homo sapiens
actactatagggcgaattgggccctctagatgcatgctcgagcggccgccagtgtgatggatatctgcagaattcgcccttagcgtggtcgcggccgaggtacttttacttgactggcagtgcaatagatttgtttacaccagtatcaccacaaacacgtgagtgatgtattgcaatacatatgtcatcactaggctatgacatcactaggcgatagaaatttttcagctccattacaatcttatgggaccactatcatatatgtagtctaccactgactgaaatgtcattatgtggcatacataatgtagagttttcaagggtacgcggggccttttttcttttttccggcgttcaagatgtcgaagcgaggacgtggtgggtcctctggtgcgaaattccggatttccttgggtcttccggtaggagctgtaatcaattgtgctgacaacac

SEQ ID NO: 37995 - DNA, 445 bp, Homo sapiens
agggcgaattgggccctctagatgcatgctcgagcggccgccagtgtgatggatatctgcagaattcgccctttcgagcggccgcccgggcaggtacaaacagatgatacgcttaactttttggacacctgtgatttgcatactgagcatataaagccatctttacgcacgtccatcggtgaaagaaaacggtctctttggcactaattaagttttctccagtggaacaaagattgagaaccacaatagcatgtagtcttggagaactacctaatttaaaggaagaagacattttgaataagagccttgatgcaaaagaaccaccgtctgacttgacaagatgaagacgtacctcggccgcgaccacgctaagggcgaattccagcacactggcggccgttactagtggatccgagctcggtaccaagcttggcgtaatcatggt

SEQ ID NO: 37996 - DNA, 452 bp, Homo sapiens
ctactatagggcgaattgggccctctagatgcatgctcgagcggccgccagtgtgatggatatctgcagaattcgccctttcgagcggccgcccgggcaggtacttccagctgtggatcattaactttggcctgttgaccaaaccactctgcacggcatcacgtgggtccatcctagaacatttggacccagcttgcccattaactcccacttctaaaaactgaaagatgcccttttaatgtcccagcactaggactacccaattccattaaaccctttaccctgtatgttcattgtaatcaaggccttgcccttggatttctctgccaaacccgtggcaacactccagaagccattgcatacttctgaaaactggactctatcatccaaggctggcctccatgcttgaaagttctggatgcagctacattgctggcctcagaggcacaaaa

SEQ ID NO: 37997 - DNA, 428 bp, Homo sapiens
ggcgaattgtgccctctagatgcatgctcgagcggccgccagtgtgatggatatctgcagaattcgcccttagcgtggtcgcggccgaggtacacaagtggccaagataaagtagaaaaatgcacagaaaagcaagtaagattatgtcaactacgaagataaaatatgttgcttcaacagcaactggatgatgttcacaacaaagctgacaatcaagaaaaaacagtaactgatattcaagccaaatgtgatgctacagcacaaaatcttcaagctgagtgcataaagcaccgtcttttgctagaagaacaagaggatgatcaataaagttaatcatttgaaagaaaaacaatgtcaatatgaaagagagaaagcagaaagagaagtagttgtgagacaacttcaacaaaaacagggtgacgtcctaa

SEQ ID NO: 37998 - DNA, 388 bp, Homo sapiens
gcgaattgggccttctagatgcatgctcgagcggccgccagtgtgatggatatctgcagaattcgcccttagcgtggtcgcggccgaggtacatcaaactcatttaaaatgctgttagaaattgctgactggcaagactgtcactgacaaaaacaccagtttaggacagattccatgggaaacaaacttgaataactgaaagctaaaatagagcttaatggtagagaaagtttcagaaacaaggacagaagatcacagaaaagacaaggaaggactcctattgttttttctgatttttgaagaagctctttgtgcttaccctatttattcctaaacaaaaaaggcaatgagttaaaaattttccaatgtaattacaaaagggttattc

SEQ ID NO: 37999 - DNA, 469 bp, Homo sapiens
actatagggcgaattgggccctctagatgcatgctcgagcggccgccagtgtgatggatatctgcagaattcgcccttagcgtggtcgcggccgaggtactttttttttttttttttttttttttttctttaaaagaacatttttattactttcaagtttatacagtaatctggcacaagctattgccagcattcctgccaagtacttagattttaactttttttttttggcgagtggagattttaatatcataaatcggtggggggccacacctttcactgccaggcccgggggcctcctatcttaatattgcctggaaggctgcctgcaaccagggcttcccccatcccctaggaaggatccagccccagcctgaaaagggaggcaacagcagctaaaggggtgggaggtggaggaaacaaaaccatgtgctgcaggcgcatgtgtgtatgtacctgcccgggcggc

SEQ ID NO: 38000 - DNA, 258 bp, Homo sapiens
tatagggcgaattgggccctctagatgcatgctcgagcggccgccagtgtgatggatatctgcagaaatacgccctttctagcggtcgcccgggcaggtactgtgcctttaactttagacaactttttattttgatgtacctgtttggcttcagttaattgccttcaaagataatcaaatttgtttttggaccaaaaataaaatttaacttgaaacttgggcctaaaatcaaaccttggcacacaggtgtgatacaac

SEQ ID NO: 38001 - DNA, 422 bp, Homo sapiens
gcgaattgggccctctagatgcatgctcgagcggccgccagtgtgatggatatctgcagaattcgccctttcgagcggccgcccgggcaggtacttccccgcagctcctcattgctcacatagtaggcaatggcgttgctctcaaacacacagaatccatcatcaccctcaaatgctgggaccttgccggcaggaaatttgcggagaaattcaggggtgcggttggtttggccaaaatggaagtggggtggtgcggagagcacgcggacctgagccccgctgtacattattcaggtagctgagggaggggacaggaacctgaatcttcaacagaagcaaacaaactgggatggagggcccagcctcatgaaggtgaccagaaggacccggtgctgcaggctgtgtgggtagctgagcagagc

SEQ ID NO: 38002 - DNA, 479 bp, Homo sapiens
atacgactactatagggcgaattgggccctctagatgcatgctcgagcggccgccagtgtgatggatatctgcagaattcgccctttcgagcggccgcccgggcaggtacttggtattgtattttttataaataagatttttatgtaaagcttagaatttgatttacagggaccttgctgcagtaaataccatctcaattttgtgccactggttcagctgttagcacagtaaaaaaatcatttgtatcaaaggggcaaatgctttattaaggtagtaaaagggaacattacttctgcttttaggaagttactgcaagcacaagcatttgtgcttttaagcaaattaaagtagtaaaagaaaaacttaagtgaaacctttgccatcttcatgttttataatataaagcttacccaacaccagttaagtcatggttaacctaaatgcctcatgccccagttcagcaaaaggaggaaaatgt

SEQ ID NO: 38003 - DNA, 366 bp, Homo sapiens
actactatagggcgaattgggccctctagatgcatgctcgagcggccgccagtgtgatggatatctgcagaattcgccctttcgagcggccgcccgggcaggtactttttttctttctttttttttttattatggttagctgtctcttaaaaagcaagaaaagaaagagaagactgagaaatagaagatctctttgaaaataaaataagactgctaaaagtatttggtatacagtctggaaaataaagttgagggaatctctccagataaagagcaaaaagaaatagatagaaaaatataaagaaagaaaaaagacatagacaatcaatatgtaatgttaggagttcctggaagagagaacagaga

SEQ ID NO: 38004 - DNA, 451 bp, Homo sapiens
tatagggcgaattgggccctctagatgcatgctcgagcggccgccagtgtgatggatatctgcagaattcgcccttagcgtggtcgcggccgaggtacccctgctgctttgcaggcaaggctctccctgcccccccgacccttcatcaccaagtgccaagaggatacggggcaatccggtcccatttgactttgagcattccaggcacaatgccaaagtcttctggagggaaggaatcatcagatagttccacgtctaatgcagcacttgagccaacattgtagatgttgtactattcattaattgtatattttaaatctaatttggctacgtatggattatatatagtttacgttacaaataaagccaagtttcaatatgtttgttgatataatattccctcaattatatctggtaatgatatttaaaacagcagggttttaatttcatt

SEQ ID NO: 38005 - DNA, 451 bp, Homo sapiens
acgactcactatagggcgaattgggccctctagatgcatgctcgagcggccgccagtgtgatggatatctgcagaattcgccctttcgagcggccgcccgggcaggtacatgccagaaaaaaataccgctttcacaaaactcgctcccacgtgacccacggaacacccaaagtcaaaaggagtccaaaggtcagaaagaaaagttatctgagtagactgatgctcgcaaacaggcttccattctctgcagcgaagagcctcataaattccccttcacaaggggctttttcatccttaggagacctgagtcctcaagaaaacccttttctggaagtatccgctccttcagaacattttatagaaaagaataatacaaaacacacaactgcaagaaatgcctttgaagaaaatgattttatggaaaacactaacatgccagaaggaaccatct

SEQ ID NO: 38006 - DNA, 667 bp, Homo sapiens
cactatagggcgaattgagccctgtagatgcatgctcgagcggccgccagtgtgatggatatctgcagaattcgccctttgagcggccgcccgggcaggtacacagctggcaccagagcatgacagagagccctgtgagccaaaaagtatagttttggaacttaaccttggatgagagcccagggacaggtccctggaaaccaaagaaaaatcgcatttcaaccctttgagtgcctcattccactgaatatttaaattttcctcttaaatggtaaactgacttattgcaatcccaagacccatcaatatcagtatttttttcctccctatacagtgccctgcccacccttatctgcacccacctcccctgaaaaagagagaaaaaaaaacctggttttgctttccatgtataattcaacaacgcaaaatgggaccatgtcagaatctgtatgatcctattctgtgttagctccaatcagccagctgagagccatcctaaatattaataggatgagagagtaactcctaactgtgcataaattacagccttaagaaagaaagccacccggtctctggggacatgttttgggagggtgtggctgcctcatatagcctacctttgctttaatcagcattttatcagtcaactctgggattaatgagcata

SEQ ID NO: 38007 - DNA, 429 bp, Homo sapiens
ggcgaattgggccttctatatgcatgctcgagcggccgccagtgtgatggatatctgcagaattcgccctttcgtgcggccgcccgggcaggtacaaacattggcttcttagtgccattagcacttttaccaggaaatgcaaaagatgcaaccacataatgttttcacttttgttttatgctgttcttcaatcgctctttttgtttatttgtttgtttgctttcattaaccaaactcaggggaatgtcatgatgtcaccaaggccaatgggtagagaaataaagaccagccatccataattgaatctgtaaagtcagtgaacttagccttttcaggttcaaaattacacaaacacaaggattttcttatctttcacctttcaaaggttttctttttattttgccacctgttttccaaataagaagtggg

SEQ ID NO: 38008 - DNA, 315 bp, Homo sapiens
gctcgagcggccgccagtgtgatggatatctgcagaattcgccctttcgagcggccgcccgggcaggtacgcggggggcgccactagagaagggcgagcggcgcggcagagtgcggcgcagcgcagctcctgaggttttggttatgaacaggattcggattcacgtcttgccaaccaatcgggggaggatcactccagtgcccaggtctcaggaacctctgtcttgtgcattcactcatcgtccatgctctcacccttgtttggaggggcaggagttttgcattaaacatattcttgaagacaaaaatgcaccct

SEQ ID NO: 38009 - DNA, 458 bp, Homo sapiens; identical to SEQ ID NO: 34104

SEQ ID NO: 38010 - DNA, 174 bp, Homo sapiens
cgaattgggccctctagatgcatgctcgagcggccgccagtgtgatggatatctgcagaattcgcccttagcgtggtcgcggccgaggtacaaatgcatttttatgtagaagattaatatataaaataggacaaaaaagaactattcttaggggttggggtattggggagatgt

SEQ ID NO: 38011 - DNA, 264 bp, Homo sapiens
gcgaattgggccctctagatgcatgctcgagcggccgccagtgtgatggatatctgcagaattcgcccttagcgtggtcgcggccgaggtacgcggggtattagtcacgcatgtatggggaaatagtctcgggtatgctgttgtgaaattgaaactgtaaaagtagatggttgaaagtacgcgggaatgccccaactaaatactaccgtttggcccaccataattacccccatactccttacactattttctcatcacccaact

SEQ ID NO: 38012 - DNA, 647 bp, Homo sapiens
tacgactcatatagggcgaattgggccctctagatgcatgctcgagcggccgccagtgtgatggatatctgcagaattcgcccttagcgtggtcgcggccgaggtacaacaatgttattaagctgcaaatctatagcaagactttgaaagtaaccaaatgtttagaaattaagcatcacatttctaagttattcatgcatcaaaaaagtaattacaatgaatattaaaatatattttgaatttaataaaaatgaaagtaaaaatactgcttgttaaaagatgggaggcttaggcaaacctcagcttggagataaatgcatatgcttgtttaaaaaattaaagcttgaaaattaataatctaattgtcaatctcaaaaatttaaaatgtgatgtcaaattaaatccaaagaattagaaaagagaagatacataagaagcatgagaaaaggaaacaatcataaaataaatgaaatcagcaaaagccaaagttactttgaaaagactgataaaaatataccatgattatgcgtgaaattaaaaaaaaaaaagagtacctgcccgggcggccgctcgaaagggcgaattccagcacactggcggccgttactagtggatccgagctcggtaccaagcttggcgtaatcatg

SEQ ID NO: 38013 - DNA, 397 bp, Homo sapiens
ctatagggcgatgtgggccctcacgatgcatgctcgagcggccgccagtgtgatgggtggctgtggaattcgaccctagcgtggtcgcggccgaggtacttttttttttttttttttttttttttaaggacaagtctataaaacatctttatttatttgttacatatgatgtttaaatataactttgctttcaagcttcaaactttttttaaactttttttaaaagaagacttttggctcaccttaacaaaaactgacctaggaagaaacatttttagcaaaatgttattataaaattcactagaaaatacggtcctcttgttgccaaaatgttacataaaatccttattaaaaatacacacgttacaaaagaaaaattatgaatatgctatacata

SEQ ID NO: 38014 - DNA, 453 bp, Homo sapiens
gactcactatagggcgaattgggccctctagatgcatgctcgagcggccgccagtgtgatggatatctgcagaattcgcccttagcgtggtcgcggccgaggtacgctagatagcctccaggccagaaagagagagtagcgcgagcacagctaaggccacggagcgagacatctcggcccgaatgctgtcagcttcaggaatccccgcgtacagagttaacaagttttgagttttttatataggaaaagcctagtcaattcagatgctttctagaaaaattaacattaaaaaacaaatagaaatccatgactaaagggggaaaataactttcaaaagttaccaaaattcgaatcattatcagagaccattataaatttcaaacagtagatttaccacacatattgcattttcaaattctaatgtagcaaaacgtaaccacataatttggctac

SEQ ID NO: 38015 - DNA, 354 bp, Homo sapiens
gatggcggagcaagagcaaagaaaaatccctttggttccagaaaatctcctgaaaaagaggaaggcttatcaagccctcaaagccacccaggcaaagcaggcacttttggcaaagaaggagcagaagaaaggaaaagggctcaggtttaagcgactggaatcattcctacatgattcctggcggcagaaacgtgacaaggtgcgtctcagacgactagaagtgaaacctcatgccttggaattgccagataaacattccttggcctttgttgtacgcggggcctttcggccggaaccgccatcttccagtaattcgccaaaatgacgaacacaaagggaaagaggagaggcacc

SEQ ID NO: 38016 - DNA, 304 bp, Homo sapiens
  misc_feature 11: n = A,T,C or G
atcaaacatgnctctgtgtagttccagcaaatcaagctgagctttgaaaaagttcgtcttagttatgtgaaggtgatttattcgaaataaaaaaactattaaaaaaaaggtgcctgcccgggcggccgctcaaaagggcgaatcccagcacactggcggccgttactagtggatccgagctcggacccaagcttggcgaaatcatggacatagctgtttcctgcgtgaaattgttatccgctcacaatgccacacaacatacgagccggaagcataaagtgtaaagcctggggtgcctaatgag

SEQ ID NO: 38017 - DNA, 642 bp, Homo sapiens
ccctctagatgcatgctcgagcggccgccagtgtgatggatatctgcagaattcgcccttagcgtggtcgcggccgaggtactgtaatcttgtccactcccactgctgttaaatttgcgggaatcatgccataggtccaccacagtcagctgaaaccagcagttcaggacaagtggaacagccagcaagacccagatcatccaactcagccgatcctgagatgagaccaagctgctgctgaggacgacagccctgctctggtcactctggaggctgaccagtctatgcacagctgaagctggaggggacgacaagcccagctctagtcacacaccagaagctgactagtctacgcacggccgaagcttgaggactcgtcaagcaagtaaatgtggttagaaatcttaagactagtagctttccttgtaatactaactgttttattattgttctgtcgttgtgctcaacctcctctgccaggcaaggccctcttctgtccttgctggatatgaacatgctgtacctgcccgggcggccgctcgaaagggcgaattccagcacactggcggccgttactagtggatccgagctcggtaccaagcttggcgtaatcatggtcatagctgtttcctgtgtgaaatt

SEQ ID NO: 38018 - DNA, 439 bp, Homo sapiens
aattgggccctctagatgcatgctcgagcggccgccagtgtgatggatatctgcagaattcgcccttagcgtggtcgcggccgaggtactattctcagcccattctcgtgaaggaaatcatagaacctccaaagattcgcatcccaagacacctgaagcaaacctatatccgcagagttggagaagctgtcaatctggttatacctttccagggaaaaccaagaccagaattaacttggaagaaggatggtgcagaaattgataagaatcaaataaacattcgcaactctgagactgatacaatcatatttattagaaaagcagagaggagccactctgggaaatatgatctgcaagtcaaagtggacaaattccggggagaccggatcaattgacctccagatcatttgaccgtccaggtccaccccaaattgtgaag

SEQ ID NO: 38019 - DNA, 484 bp, Homo sapiens
ctactatagggcgaattgggccctctagatgcatgctcgagcggccgccagtgtgatggatatctgcagaattcgccctttcgagcggccgcccgggcaggtacagatttttttttaaccactcaatcccaaatggaggcctacaaagaacatcgtaataacacatggaagcaaaccctgggtttttaagagcaaattctgtcccccctcactcccccaagtgacaagatactaatgaagaaagttcttcaccatagtgtttgttttaactaaactcattggagtctagttccaaatttggtagggtcatcatctctacattccttaggatttctctccctatcaagctggcccagatacaagtacttctgactaaactggaattatgagtgaggaagagtgtttactaaataaatgactggggcaagcaaaattgaggaggaaattagaaactgtttgacaaactttaagagctacttgaaat

SEQ ID NO: 38020 - DNA, 453 bp, Homo sapiens
tacgactactatagggcgaattgggccctctagatgcatgctcgagcggccgccagtgtgatggatatctgcagaattcgcccttagcgtggtcgcggccgaggtactggaaggcctggaccagccgcagagcctcatccacggagcgtcccacaggcaaatcattaacagtgatctggcgaaggaccccgcgtacctgcccgggcggccgctcgaaagggcgaattccagcacactggcggccgttactagtggatccgagctcggtaccaagcttggcgtaatcatggtcatagctgtttcctgtgtgaaattgttatccgctcacaattccacacaacatacgagccggaagcataaagtgtaaagcctggggtgcctaatgagtgagctaactcacattaattgcgttgcgctcactgcccgctttccagtcgggaaacctgtcgtgcc

SEQ ID NO: 38021 - DNA, 469 bp, Homo sapiens
acactactatagggcgaattgggccctctagatgcatgctcgagcggccgccagtgtgatggatatctgcagaattcgcccttagcgtcgcggccgaggtacttttttttttccttttttttaagagtataaggtttacacaatcattctcataatgtgacgcaagccagcaaggccaaaaatgctagagaaaataacgggatctcttccttgtaaacttgtactgcagccgcctcaatatccccttccccttcatcgtcttcgcttacttctacatggtggtgaagaagtgcctcaagtgttgctgcaaggagaaaaacatggagtcttctgtctgctgtttcaaaaatgaagacaatgagactctggcatgggagggtgtgatgaaggaaaactaccttgtcaagatcaacacaaaagccaacgacacctcagaggaaatgaggcatcgatttagacaactggatac

SEQ ID NO: 38022 - DNA, 526 bp, Homo sapiens
cgactactatagggcgaattgtgccctctagatgcatgctcgagcggccgccagtgtgatggatatctgcagaattcgccctttcgagcggccgcccgggcaggtaccagccacttgtcctagccaaatgtccaaaacacgcccttgggccccgccacgttacaatccacagattgtctgtctgagtcgtttaaggcatttcctggtgcttgtgttccatgaataaaaggacaaagtcagaagatcactgatgtcttactgtcaacagagatattttaaaagagagaagcaggaaaagatcttccttttttgatctacaacttatatagttttctgattatgcacataatagatatgccttccagatgcataaggcaaacatctggaaagaaatatacccaaatcttagcaggggttatctttgggagtggagtacctcggccgcgaccacgctaagggcgaattccagcacactggcggccgttactagtggatccgagctcggtaccaagcttggcgtaatcat

SEQ ID NO: 38023 - DNA, 443 bp, Homo sapiens
ctactatagggcgaattgggccctctagatgcatgctcgagcgggccgccagtgtgatggatatctgcagaattcgcccttagcgtggtcgcggccgaggtactgttcaaaaaggaatgccccacaagtgttaccatggcaaaactggaagagtctacaatgttacccagcatgctgttggcattgttgtaaacaaacaagttaagggcaagattcttgccaagagaattaatgtgcgtattgagcacattaagcactctaagagccgagatagcttcctgaaacgtgtgaaggaaaatgatcagaaaaagaaagaagccaaagagaaaggttctgctgccgaagttgccccagttccatggggttcgtgtctttggcatcaacaaatactgagggatgggtttttgggacaagctccatgggcatggggaaggcactgaaac

SEQ ID NO: 38024 - DNA, 444 bp, Homo sapiens
ctactatagggcgaattgggccctctagatgcatgctcgagcggccgccagtgtgatggatatctgcagaattcgcccttagcgtggtcgcggccgaggtactgaagccaccacagagatgctggtaattcaaactgtgaaagcacgtggcgcagaggaaactgacacagaacagcacaccaactggtgcttttatgcaacaccactgaccccaagatggtcactccattgatttttccgcattgtttacatccaggatgcatgctgtccagtgcaatagcgtctatgactataaaacaactaaaagctgcacttaagatgggagagccaaactcagatcttttttctccttctcttcaaagatcaaaagaagaataaaccaaaaaagattaaaaaaaagaataaaccaaccagtagctgccgagaatacagtgaaagaggaaa

SEQ ID NO: 38025 - DNA, 361 bp, Homo sapiens
actactatagggcgaattgggccctctagatgcatgctcgagcggccgccagtgtgatggatatctgcagaattcgcccttagcgtggtcgcggccgaggtacttttttttttaaccccccaggggggtagttgggagtgagactataggccataaagaatgggactgcattggaccaaaataaatgggaaaatcgtggtttgaaaagaagcttttgggaagtgatgagtcattttgcaccaggtaataggggaaaattgtgtgacctccagcaaacacatgaatggttatttcctggagccggaagcacttgggggtcgtggtaattcccagtgttttctgtgtcctagttttacccttt

SEQ ID NO: 38026 - DNA, 571 bp, Homo sapiens
actattgactatagggcgaattgtgccctctagatgcatgctcgagcggccgccagtgtgatggatatctgcagaattcgcccttagcgtggtcgcggccgaggtacacatgagagaaaaatctttccaatgtaatgagagtggcaaatcctttaattatagctaactcttaaggaaatatcagataatcatttaggatagaaacaatataaatgtgaggtatgtgacaaggtctttaatcagaattgattccttgtatgccataatagatgtcacactggtaagaaaccttacaattgttatgagtgtggtgagaccttcagtcagacgtcatcctttacatgctgtcgtagacttcatactggagggaaaccttacaagtgtagtgagcataacaagacctttggttgaaattcagcccttgtaattcataaggcaattcatactggagagaatccttgcaggtgtaatgaatgtggcaaggtttttaatcagaaagcacaccttgcacgtcatcatagacttcatactaaagagaagccttacaaatgtgaagaatgtgaaaaagttt

SEQ ID NO: 38027 - DNA, 478 bp, Homo sapiens
actactatagggcgaattgggccctctagatgcatgctcgagcggccgccagtgtgatggatatctgcagaattcgcccttcgagcggccgcccgggcaggtactagctccagttaggcatataaatgacaattagaagggacagaagttatggttatgtcagcagcctccagtgagctaggatataaactaagtcttttcaagctgaacaaatatatacacattcaacccatttaagtgaagagacacatttaagtccacaaaagcaaacttaactacctactatataacttactttttattgaaagtatcttgcattcatgatggatgctttctgggttttaccacatattttaatgttaaaagttaaattattctttacatgcaagtagtgtgaataattttctccacatgggaacactaattataaaaagatgacatcccacatgggttaagtgtctttttaattgaaaagcta

SEQ ID NO: 38028 - DNA, 456 bp, Homo sapiens
gactcactatagggcgaattgggccctctagatgcatgctcgagcggccgccagtgtgatggatatctgcagaattcgccctttcgagcggccgcccgggcaggtacactctacttgtgcagtagcaaagtctatgattatgtaagaaagattcttaagctgcctcattcttccatcctcagaacgtggttatccaaatgccaacccagtccaggtttcaacagcaacattttttcttttcttcaacgaagagtagagaatggagatcagctctatcaatactgttcattgttaataaaaagtatacctctcaagcaacagcttcagtgggatcctagcagtcacagtttgcaggggttttatggacttttggtcttggaaaacttgatgctgatgaaacgccacttgcttcagaaactgttttgttatgggcgtgggtatttttggccattggag

SEQ ID NO: 38029 - DNA, 465 bp, Homo sapiens
attgggccctctagatgcatgctcgagcggccgccagtgtgatggatatctgcagaattcgcccttagcgtggtcgcggccgaggtaccaaacctggaactttaagtatcattttttagctcattaactatatagaagattactaagaccagtaagggagccattttcttcccctcctctatttttattacttatctctctcctctttactcttaaaattggcaatcttctgacaacccaagctaataaaataatatagctatatataattcaaataactaaagaacttttgagtccatatatgcaggatttttgaatacctcactacatttgctcttataccctcactgtcctggtatcataaatattattaagggaagataacctataaggggaaagcaattccaacctgggataaaaaagtgattacaaataattatcttgttgatagtaagggcttatggt

SEQ ID NO: 38030 - DNA, 531 bp, Homo sapiens
ggcgaattgagccctctagatgcatgctcgagcggccgccagtgtgatggatatctgcagaattcgcccttagcgtggtcgcggccgaggtacttttttttttttttttttttttttttttctttttttttttttttttttttttttttttttttttttttttagggacggatacatttattagtttctaacaaaaaggcttacatggtgggcagagtaaaaatactaacagaaatttgtttattttgaaaccaattttagtcaggaagactttttcacagaaaatgagctgaatttttaaatcccaaatttttcacaccatttttgtgatttttttacacctaaatttttcacaccctcctttttggtcacagacttttccgggaagattaaattgataacgtttaatttgaggcattcaaaaatgtccaccctaaaactgaaagtgaaattgcttttaaaaaaaaattggtttgatgaaaaaattgatcttatcctgtttaaaacaaatttggtttatttatttttact

SEQ ID NO: 38031 - DNA, 332 bp, Homo sapiens
attgggccctctagatgcatgctcgagcggccgccagtgtgatggatatctgcagaattcgccctttcgagcggccgccgggcaggtactttttttttttttttttttttttttactttacgttctgggatacatgtgcagaatgtgtaggtttgttacacaggtatacgtgtgccatagtggtttgctgcacctataaacccatcatctaggttttaagtcccacatgcattaggtatttgtcctaatgctctccctcccctgttttcccaccccccgaatcacttattttaaaagtcagcaataaaaataaattgaaactaaaataaata

SEQ ID NO: 38032 - DNA, 371 bp, Homo sapiens
agggcgattgggcctctagatgcatgctcgagcggccgccaagtgtggtgggttttcttggcaaaattcgcccttatcttggtcgcggccgaggtacaagtcctcgtagaaattgaagaggtcggagataaaactggccagaatttctttcttgtcgtcaggggcgtggaccaacaggtgtttattgatgtcctcaggattcagctcataatccacgcgccctagtctttacggggcctgggggtcccgatcattgagggctccatctccctttagttgggacgcactgactgttcaacattcttgcacaagacctaggacgtctggttcatacataaatgctggaacccgcatggcgaggctgacatcct

SEQ ID NO: 38033 - DNA, 456 bp, Homo sapiens
actactatagggcgaattgggccctctagatgcatgctcgagcggccgccagtgtgatggatatctgcagaattcgccctttcgagcggccgcccgggcaggtacaggactgggaaccaggtagttctgatttctgtttctggccttgattccatctgcaaattttggcaagtcatttgacgtctcggtatcagaatcatcatctttgttgtcaaaatattttaaatctggctgtctcatagaacagacactgtaacaatgatcagagaaaattccattgaatccatctgcaattctgcttattccagaggaatctgaataacgaaagggtgtagagtcttcctttttctttttttaggatactcattcatatcttttcaatttggtataattcttactactggagtgaggaaaaatgaattacaataagtttctgtagacagtaaaaaatgcctc

SEQ ID NO: 38034 - DNA, 79 bp, Homo sapiens
actactatagggcgaattgggccctctagatgcatgctcgagcggccgccagtgtgatggatatctgcagaattcgccc

SEQ ID NO: 38035 - DNA, 460 bp, Homo sapiens
tatagggcgaattgggccctctagatgcatgctcgagcggccgccagtgtgatggatatctgcagaattcgccctttcgagcggccgcccgggcaggtacccccattcacccacaaaatgcagcccaccacccagtcccccaattccagagagaaacacatcactagattgacgagggcttttagagactgctcctataattgaggaatcagcagcataggctttatctccctacttcctcccccaccctaccgcgttcaatttgtgtatctcagatatttgatttcttgagcatgtattggtcagaaagaaaaagaaagaaaaccattctctatttttccatgggtatgatctggcttaaaacaatatggaatattttcctgacagacttgaaaactaggatcttcctcagatgtctgtaaataactctggtatccaactgggtgtattctagtgtgga

SEQ ID NO: 38036 - DNA, 439 bp, Homo sapiens
gcatgctcgagcggccgccagtgtgatggatatctgcagaattcgccctttcgagcggccgcccgggcaggtacaatgtaagggttttagggagcaacagtatttaactggaagaaagaattgcatatttaatgtagtctaatatatacacatttgaccaacatgccaacaagggtgtttaattcacatatacatcattatacaatttaatcactgtagaaataaaattattacagccttttttctatagagaaaatttgtatagatgtccgccactccataggtttatttccagaatgaatgagccctacttcattagtaacaacttggtcagatagaatttcctttttttaatggattagggctgaattcttagatccttatttcttttcactagaaatgctgccaaacatcactactcatcattcaggaattcgct

SEQ ID NO: 38037 - DNA, 460 bp, Homo sapiens
actactatagggcgaattgggccctctagatgcatgctcgagcggccgccagtgtgatggatatctgcagaattcgccctttcgagcggccgcccgggcaggtacatttcagtcatttagatttttttcagagtgaacatgacagccattaattttattagtctaaaaaaatgacttattctactctaaaattgtgctagaatttgaaattattttagcatatcctgtccgtctaggtccctctatatcaagggatttcatttttagacattcctttccacccacccccgtgccccccttggatgtaacaaggaaaaaggaatgtctcttctgtttaaaaaaaaaaaaattctgagaaacctgattgcagaaatgagtgcttaaaatttataataattaaccaacataatgaaatgtggtttttaaagattgagaactaaatttgtaaaggaatctaagt

SEQ ID NO: 38038 - DNA, 318 bp, Homo sapiens
ctactatagggcgaattgggccctctagatgcatgctcgagcggccgccagtgtgatggatatctgcagaattcgccctttcgagcggccgcccgggcaggtacaaagctataaaggaacgtttttagagaaagcactgaagacacacattttgctgacctaaaagattttaaaatgaattagaataatttacatcatataaagaggtatttagtctttaagtggagaaagttgctagtcacatgtaagaaaaacaagtattatgggccttcctaagacaaatggaataaattccatcacttttggcttttttataaa

SEQ ID NO: 38039 - DNA, 669 bp, Homo sapiens
tacgactcactatagggcgaattgggccctctagatgcatgctcgagcggccgccagtgtgatggatatctgcagaattcgccctttcgagcggccgcccgggcaggtacttttacaaatggagcccttgggaggtgggttaggtaaaagaagctttttacttaacgttgtcttatttccagtctaattttacgctgtagcagaaccagatggctgaggaaattctggaactatggatcttgaccccaaggatatattattttattccaagaaagatcaggtaggcgaaaagatgacaggatacagagtcaatccataaactaaatatttataactgttctgaattatacagagtctaaaaatatgtgtcagctacttcattcctgtaaacactcttgctgtgttataaatatggcaagaaataaacatgaccaatatcaatagacttcttgaggctactataagttttgagaaataaggttcaaaaaataagaatgctaacacttaagcacagactagagcttgcttgggtttcttcctgcattacaaggtaaaaatttgttaatgtttgtttttattcagcttgggaaagctttgtgccatgaatacgtcgcatttaataacaaagcacacacggcatatagaaataactttaattaaaaaacttac

SEQ ID NO: 38040 - DNA, 225 bp, Homo sapiens
ctactatagggcgaattgggccctctagatgcatgctcgagcggccgccagtgtgatggatatctgcagaattcgccctttcgagcggccgcccgggcaggtacgtctactgtaaaacccatccgaggcacaagcagagacagatgtagaccctttccctccagagtcacgcacatactcgtcatcgcatcacttgggagaatggttgtatcttatggaaggaat

SEQ ID NO: 38041 - DNA, 214 bp, Homo sapiens
ctactatagggcgaattgggccctctagatgcatgctcgagcggccgccagtgtgatggatatctgcagaattcgcccttagcgtggtcgcggccgaggtacttttttttttttttttttttttttttaaaagccaaattggacgagagttttattattccaaaatccagttaagtgtttaatcaaatacaattaaacatttaaaataaaaatc

SEQ ID NO: 38042 - DNA, 132 bp, Homo sapiens
tgtgatggatatctgcagaattcgcccttagcgtggtcgcggccgaggtacatttagttctaggaacataattttcactttcaatccagggatttagtgaacttagtcatatgagaatacaactttcaaaat

SEQ ID NO: 38043 - DNA, 442 bp, Homo sapiens
ggccctctagatgcatgctcgagcggccgccagtgtgatggatatctgcagaattcgcccttagcgtggtcgcggccgaggtactgaacccgggactagaaggaaaataaatgatctatatgttgtgtggaaaaaaaaaaaaaaaaaaaaaaaaataaaaaaaaaaaaaaaaaggaaaaaaaaaaaaaaaaaaaaaacccaaaaaaaaaaaaaaaaaaaaaaaaggtactccctccaaacatccgtatattggcctgggcccttgtaaaaccaagcttaagggctaggttaagctgccttgagcggacttaccgttattttttccctcgggctgattaaaatattgaaaccatggattatgcacctaaaaagtatgttggcacccatgatttaaggaacttgggtaaaagggatgtacccaacggggtgataaattttaaaa

SEQ ID NO: 38044 - DNA, 289 bp, Homo sapiens
cgaatcgggccctgtagatgcatgctcgagcggccgccagtgtgatggatatctgcagaattcgcccttagcgtggtcgcggccgaggtacatttacctacgttaatgaaagttgacacactgttctgagagttttcacagcatatggaccctgtctttactatttaattttcttatcaaccctttaattaggcaaagatattattagtactcatttgtattcactgtcactttttctcatgttctaattataaatgaccaagatcaagattgttcacaagggtaaatg

SEQ ID NO: 38045 - DNA, 436 bp, Homo sapiens
agggcgaattgggccctctagatgcatgctcgagcggccgccagtgtgatggatatctgcagaattcgcccttagcgtggtcgcggccgaggtactaatctgggcattgttctaggcacctgaaataaattatctcaattcatccttcaaataacccagtgaagtagatcatactatatcccactttatagatcatactgggtatcccattttatggatggggaacctgaggctcagagatgagaaatgatcatccaatcatccacattcactcaactagtaaacaattgggctaaacttcagctccagctccatgcaattccaagtcctcgttgaaccactttgttattgagcttgctccaactgatctcctgtgtctctggccatcccatcgtttcagtagtgccccagtttgaaagtccacttcatcatcagg

SEQ ID NO: 38046 - DNA, 249 bp, Homo sapiens
gcgaattgggccctctagatgcatgctcgagcggccgccagtgtgatggatatctgcagaattcgccctttcgagcggccgcccgggcaggtacttttttttttttttttttttttttagtagagacggggtttcaccatcttggccaggctagtcttgaactcctgacctcgtgatccacccacctcggccttccaaagtgctggaattacaggtgtgagccactgcgcctggcctaggattttcaaa

SEQ ID NO: 38047 - DNA, 453 bp, Homo sapiens
agggcgaattgggccctctagatgcatgctcgagccgcccgccgtggtgatggatatctgcaaaattcgcccttagcgtggtcgcggccgaggtaccacattctctacaacatcaggatacatggaaggatattataccttccattttctttactttaaagacaagatctttaatgttgccattccccgattccatatggcatgtccaacattcagggtgtctatagcccgattgttttggtaatttgtgcctttcaaggaatttgtccattccatctaaatgttgaatttattggtataaagttattgacagtattcccttgatatccttttaatggctacaaaagccatagtcacttgtcctcttttgttcttaatattgttaatttatatcttctcttttgttcattgctttagttagggggtttgtaatttttattgatcatttaaagg

SEQ ID NO: 38048 - DNA, 450 bp, Homo sapiens
gcgaattgggccctctagatgcatgctcgagcggccgccagtgtgatggatatctgcagaattcgccctttcgagcggccgcccgggcaggtacttatttagacccagagttctgctgccctaaacatcttcctactactatttctttttttccaccacacttgttttgaaagctgcttaaaaatcagaaatattaaacagattaaaaacaagagaaaaacggtctatttcaaatagggttctttttcctactccaaaagaactctcaggagataaggtcttcaaataagacttcacggtttgccagatcctaaggattattcacagcctgtgaaattccaatccatttgccttcaccattccaacctatttgtcttcacttctctttttaaagttggaaacacttggaaaaagtaaaatttcacaaaattcagcaattaaaaaatcagc

SEQ ID NO: 38049 - DNA, 415 bp, Homo sapiens
gggcgaattgggccttctatatgcatgctcgagcggccgccagtgtgatggatatctgcagaattcgccctttcgagcggccgcctgggcaggtactttttttttttttttttttttttttccgcttttttttaaattttactttacgttctgggatacatgtgcagaatgtgtaggtttgttacacaggtttacgtgtgccatagtggtttgctgcacctatcaacccatcatctaggttttaagtcccacatgcattaggtatttgtcctaatgctctccctcccctgttctcccaccccccgaatcacttattttaaaagtcagcaataaaaataaattgaaactaaatcaaataaattggtactttagagaacaaaatttttacaacgtaatataaggggtaaagaaaatt

SEQ ID NO: 38050 - DNA, 176 bp, Homo sapiens
tacgactactatagggcgaattgggccctctagatgcatgctcgagcggccgccagtgtgatggatatctgcagaattcgccctttcgaggccgggccgcccgggccaggtacttttttttttttttttttttattgggtaaatgtggtgggcaagtgagccccattgtgttgtgg

SEQ ID NO: 38051 - DNA, 456 bp, Homo sapiens
tatagggcgaattgggccctctagatgcatgctcgagcggccgccagtgtgatggatatctgcagaattcgcccttagcgtggtcgcggccgaggtacactgaggaaagagattaacaattttctccacatcaagatgcttgttttgaaggattgattccatctctctgaatagttctttctccagtttcctcatgttgtccaacattattttggctttttcctcattattatttactacttccaatgcctgctgatgtttttggtagagtgggtgtcttctgtcaggcttaaaatgtgatttctttttaactagatcttcaagttcaaatgttggtgaactggtatccaatagttgtgaaatatgtggcacaaatatgaaaggcttaaaaacagatctctcaggatcaggagtccctgtaaagaagtgaatgcaaggaaggctggagtcttgagg

SEQ ID NO: 38052 - DNA, 470 bp, Homo sapiens
agggcgaattgggccctctagatgcatgctcgagcggccgccagtgtgatggatatctgcagaattcgccctttcgagcggccgcccgggcaggtacataatatttaaactatccaaatatccagcatacatttccatgtggctgccatcggctgttgatgccatgaatgaaatggctggttagaaagccaaaggtcttcttttttcaattcctaatgaataagtaaaatgccagatctctttggtctcaaagcaaattgctctgatcagatcaaatatctatgtaatgaaaagagacttacttaaatttgggattctgcttaaactttaagttgaatttgactgtagtcattcattctttttatatatctctgtcaggtatgacattaattaccaggtggtattatactctactttgagtttggacatcactttcagttaaatttctgttgttattgtggctttttttt

SEQ ID NO: 38053 - DNA, 354 bp, Homo sapiens
cgactcactatagggcgaattgggccctctagatgcatgctcgagcggccgccagtgtgatggatatctgcagaattcgcccttagcgtggtcgcggccgaggtactaacttgtagcaaccacgtgtccgtgcagtgccacaggagctagagcagtgacaatgctggtggcaacagggcagtgtagcaggtgctttattgttaacccttttcaaccttttcattttaattgttcacaactcggaggtggaattctgttaggagacaggactgccccaggtaccacttccgcccccgctaacttcaatgcaagctgaccccttactcctgaattactctgcagcctgcatttcct

SEQ ID NO: 38054 - DNA, 242 bp, Homo sapiens
atagggcgaattgggccctctagatgcatgctcgagcggccgccagtgtgatggatatctgcagaattcgccctttcgagcggccgcccgggtaggtactcttcacattcacttactccttagcaaagattgctcttgaatggaaaggttgcagaaagagccaaagccaatttggaagaagtgagaagcttacaaggtttgaggaatggtgaagttcagcgaaggatctagcctccttagat

SEQ ID NO: 38055 - DNA, 243 bp, Homo sapiens
gctcgagcggccgccagtgtgatggatatctgcagaattcgcccttagcgtggtcgcggccgaggtacatatatgtatattataccaatagctagtaatttcaaaaaaaacattgacttgagtgttagataaccattctctaaattcagtttttgatgtttcaagaaacccaaaagcctgttctttttacctacagaccccttgtgcacgtggcaaatcacctctgaaaggcaaaaactaact

SEQ ID NO: 38056 - DNA, 453 bp, Homo sapiens
actactatagggcgaattgggccctctagatgcatgctcgagcggccgccagtgtgatggatatctgcagaattcgcccttagcgtggtcgcggccgaggtactaatatataatctcttcactttctctgatctacaaatggatagaatgcctagttatcttcatgcagataaattcttcacaattcaattaccaaagcacgcaacaaacaaaaaaaaccttggcagtaatacacagatgaatctctttaacagtttctattctttagcagtctttgatgatttcagaatttgcagctttagctcttttatcatcatttctaacttctgtcttgcttcccgttcctgtctgagttcatcttggagttcttgcctatcggcctcagcatggtccaatctctgcctcagttctgccaactgtcctgcatattcagcctctttgtctttttctaaa

SEQ ID NO: 38057 - DNA, 462 bp, Homo sapiens
tacgactactatagggcgaattgggccctctagatgcatgctcgagcggccgccagtgtgatggatatctgcagaattcgcccttagcgtggtcgcggccgaggtacttcaaatttgtttatataaaagcatattaaagctcactttaaaatagtgtccatcttttcttttaaacgggcatagactcatttgcagtcatgtacaccagcatcattgtagtagagtgtaaaccttttcccatgcccagtcttcaaatttctaatgttttgcagtgttaaaatgttttgcaaatacatgccaataacacagatcaaataatatctcctcatgagaaatttatgatcttttaagtttctatacatgtattcttataagacgacccaggatctactatattagaatagatgaagcaggtagcttcttttttctcaaatgtaattcagcaaaataatacagtacctg

SEQ ID NO: 38058 - DNA, 426 bp, Homo sapiens
actatagggcgaattgggccctctagatgcatgctcgagcggccgccagtgtgatggatatctgcagaattcgccctttcgagcggccgcccgggcaggtaccagggcggcgcgtggtctacgccgagtgacagagacgctcaggctgtgttctcaggatgaccgagtgggagacagcaacaccagcggtggcagagaccccagacatcaagctctttgggaagtggagcaccgatgatgtgcagatcaatgacatttccctgcaggattacattgcagtgaaggagaagtatgccaagtacgcgggggggcatcacggacctaccaatatgtgatgtcacccctggtggcccaactgtgtcattggagaaactccagctgggcccagagattctgcagcgggaaaatccaaggcttatttatgcc

SEQ ID NO: 38059 - DNA, 471 bp, Homo sapiens
agggcgaattgggccctctagatgcatgctcgagcggccgccagtgtgatggatatctgcagaattcgccctttcgagcggccgcccgggcaggtactgttttgtccaaaaagagaaggttgaccaaatcgaaatggcggcttagatggaagtgttcctacattactagaagacgccgaaaaagcactaggctgctgcccactgaaaggattagttgggttcatcttctgctccaattattagaaggtaattaagtattatgtgtactttttttttttttttcttttggagatggtctggctctgtcacccaggctggagtgcagtggtgcaatcatagctcaccacagcctcaaactaggggtcacttctaagggatgctgggggttgggcggaaggggtgaggaggtaggattgagtaacttgctgtcactgcttgtacctcggccgggaccacgctaagggcgaattc

SEQ ID NO: 38060 - DNA, 398 bp, Homo sapiens
  misc_feature 200, 375: n = A,T,C or G
tactactcactatatggcgaattgagccctctagatgcatgctcgagcggccgccagtgtgatggatatctgcagaattcgcccttagcgtggtcgcggccgaggtaccacgagtccacagtgaagtccactccaggttatctgcataggtagcccaggcacctttcctcttttcctttaggtgcctccccttacccacnaacctcttatttcatctcaaacacagctattacaacatgttttatttcactggaaaattctgtaaagaactaaatctggttcccttgaagaaaacatttagcacagcttaaataaaagttgagaaggagggtaagagtgcattgccccattctagctctggtgctaccttacctncgactctaaggccctgtgggatg

SEQ ID NO: 38061 - DNA, 391 bp, Homo sapiens
ctactatagggcgaattgggccctctagatgcatgctcgagcggccgccagtgtgatggatatctgcagaattcgcccttagcgtggtcgcggccggggtaccccagctgatgatgttccacaaaagagcaaaacatacacaatctggttccactctacagaaatcctggaactggactacaaagggaatagacagggtgtggcaggagggggttcctcacggttggagtgcgaggttagggacaggaatagaaggtaggtaataaacattcatgtggtattaacttagggcagatgtgtcaatgtatttccaagtttagcataatataggtataaaaattaaataaaaagtttatatgtgtgtgtatatatgggttaatacacaacacat

SEQ ID NO: 38062 - DNA, 450 bp, Homo sapiens
agggcgaattgggccctctagatgcatgctcgagcggccgccagtgtgatggatatctgcagaattcgcccttagcgtggtcgcggccgaggtacttgcttgtcacttggaggaaccacatccttgagacagcctgctgtcttgtatgtcttcagtaggaaacttctgacacacgcattcaagggagttcctgcccctgagaagtgttcccatagctttccagtcgcaggttactttcacactacgtcagcttctctggtgagatcagggatgttacatattacttgaaaatgatttcataggaagtgaggatggggcaagaaaggaggtagaagctgaattttgcttaacttcagaaggaaatctgatacttgccttggctagttctgatcaactaaagagcctgtgtctgtacctgcccgggcggccgctcgaaagggcgaattccag

SEQ ID NO: 38063 - DNA, 247 bp, Homo sapiens
gatacgatactaactatagggcgaattgggccctctagatgcatgctcgagcggccgccagtgtgatggatatctgcagaattcgccctttcgagcggccgcccgggcaggtaccaacggtggggataattcggggtcatcttagagttcttccatcacacgggaattctcagctcaccaaatctgggattccgcatctggccattccttaagctgaaggcctggcaatatttttgagtgtccattt

SEQ ID NO: 38064 - DNA, 403 bp, Homo sapiens
tacactactatagggcgaattgggccctctagatgcatgctcgagcggccgccagtgtgatggatatgtgcagaattcacccttagcttggtcgcggccgccgggccatgggctttctacctctccctttctttctacctggaggttacagtaagtcagccatcatgtgactatgaagcagcaagcatttgccaaggcaggttaagcagaaagataaaaggaacctggggctccgatatcatagaggcaacggcattattgtcagctgtatgaggagaaagataaagtcttccattgattcaagctactgtgttgccctttttatttcaaatagctaaatattatttctaactgatataccatcagaaacttacctggacaactttctattaatgactgaaaa

SEQ ID NO: 38065 - DNA, 445 bp, Homo sapiens
ctacttagggcgaattgggccctctagatgcatgctcgagcggccgccagtgtgatggatatctgcagaattcgcccttagcgtggtcgcggccgaggtactaaaagttgatggtttatgctaattttaagtgtaatatattttagaattttgtcacatgcattattaatatgatttcatattcatggccttaggaagattaatttaaacaataacaacaagaacaacaacaacaacaaaattcaacaaaaaatttcccccatgtgccaagagcaaattttgaggtccatttatccagataaagtgttttgttatctgaaccaagaacatgaactttatctttatagtgaccaccgactcccatctttagtatcattgatttttaatttgaattaaagcatttttttttgctttgttaagatgaggcaggccttcttgcttgaca

SEQ ID NO: 38066 - DNA, 485 bp, Homo sapiens
actcactatagggcgaattgtgccctctagatgcatgctcgagcggccgccagtgtgatggatatctgcagaattcgccctttcgagcggccgcccgggcaggtactttttttttttttttttttttttgagacggagtctcgctctgtcacccaggctggagtgcagtggcgtgatcttggctcactgcaacctctgcctcctgggttcacaccattctcctgcctcagcctcccaagtagctgggactacaggcacccgcaaccacacccggctaattttttttgtatttttagtagagatggggtttcaccatgttagccaggattgtctccatctcctgacctcgtgatccacccgccttggcctcccaaagagctgggattactggtgtgagccaccgtgcccggcctggacatctggttttaactagatggaagggaagaacattatgaatctttaaaatacggctgttgccatttttc

SEQ ID NO: 38067 - DNA, 741 bp, Homo sapiens
ctatagggcgaattgggccctctagatgcatgctcgagcggccgccagtgtgatggatatctgcagaattcgcccttggcgtggtcgcggccgaggtacttggcattggggcaaaactcagttacccacctgaatgccataatggttttcaaggtcaggttattatatgtgtctaaaaaatcttgtcggattatgtcaccataaagaaggtgttcatcctctaaggacaatgccaacattttgtcttccttttcagcctcttggcctaataagaaaaatgtaagaacctcatatccccaccaagactttttttcaccccaagtaactctaatggcctgcctggctttcacatctgaagggtgggaggtcaccagaatgaccagaaatggattttgatgagagcagtttgaatgctctcgaagtgtgaagtgaaagtcttgtctgtaaatcggctcatactcatagaagtacaagtttctgtatgtataaagtcatgctcgatttcaggagagcagctgatcacaatttgcttcatgaatcaaggtgtggaaatggttatatatggattgatttagaaagtggttaccagtacctgcccgggcggccgctcgaaagggcgaattccagcacactggcggccgttactagtggatccgagctcggtaccaagcttggcgtaatcatggtcatagctgtttcctgtgtgaaattgttatccgctcacaattccacacaacatac

SEQ ID NO: 38068 - DNA, 298 bp, Homo sapiens
attgggccctctagatgcatgctcgagcggccgccagtgtgatggatatctgcagaattcgcccttagcgtggtcgcggccgaggtactttttgctttagcagatagatagggcatccaatacaactgaaacaacctgataacaaattaattttatttttcaataaaaaggaatgctctggttttttaactggctccttgaggaagccagaagatggcatctgctctttaaacaggcttctcttatctgatttgagacacaaaatccactaagattcctttcttacagtgggaagtag

SEQ ID NO: 38069 - DNA, 417 bp, Homo sapiens
ggcgaattgggccctctagatgcatgctcgagcggccgccagtgtgatggatatctgcagaattcgcccttagcgtggtcgcggccgaggtacagggatgtgatgactgtagctgagatgacaggcaggtgccaccacacctggctaatttttgtagtttagtagagaagggatttcaccctgttggtcaggctggtctcgaactcctgacctcaggtgatccacccgactcagactcccaaagtgctgggattacaggtgtgagccatcatggccgcctgactctttctgatgcctgagtggctaccttgagtcctgcctggggacccatgcacctgctgttctctttccttcaaggctttacttacaacttcctgttctactctaaaaccttcctgtgacgggctcagtcagatc

SEQ ID NO: 38070 - DNA, 486 bp, Homo sapiens
cactactataagttgggccctctagatgcatgctcgagcggccgccagtgtgatggatatctgcagaattcgcccttagcgtggtcgcggccgaggtactaactcatccagtatctgattctgtcttttcctctatccatctgtcttccatctttgcatccatcattcaacgaaatttacagcctatgcagatgttctgtggtcttaaacatgttgtattcagttcagcatggctggcgaggtctcaggaaacttacaatcatggaggaaggggaagcgaacacgtccttcttcatatggcggcagcaagaagcagttcttattaatgcccacctctttgccttggccatgcttcctcccctcccagccgttgttctcccccacgagaatatcttctcttttctgcttcttagtggttctattctcagtatctgaaactctcattttctgtgaagttttcccaggtggttaccccgcgtaccatgc

SEQ ID NO: 38071 - DNA, 132 bp, Homo sapiens
ctcactatagggcgaattgggccctctagatgcatgctcgagcggccgccagtgtgatggatatctgcagaaattcgccctttcgagccggccgcccgggcaggtacaaccatgcttgccctgttcaaaccc

SEQ ID NO: 38072 - DNA, 438 bp, Homo sapiens
agggcgaattgggccctctagatgcatgctcgagcggccgccagtgtgatggatatctgcagaattcgcccttagcgtggtcgcggccgaggtactttttttttttttttaaatgcttaagagttttaatcagtccgccataaaaagctcctccccattctccatcttgggggctcagatcttggcttcgggttgagatggagggacagggatttcaggctgggagaggagagtaaatatgaatgcggctgagggaccagagctgggatcggaagaaaacacaggtgaaaaggagcagaaagagactgctaaccccagtccctgagccaagtcagaaatccaagtccttttatagcatccaggagccaaatgtagtgaaatccacacatcatatcgttcttatctgcaaagtgctgtcatctggcgctgaaagcacca

SEQ ID NO: 38073 - DNA, 456 bp, Homo sapiens
agggcgaattgggccctctagatgcatgctcgagcggccgccagtgtgatggatatctgcagaattcgccctttcgagcggccgcccgggcaggtactggtctgtggcctgctaggatccagggtgcacagcaggaggtgaatgtaggatgagcaaacattactgcctgagctcaactttctgtcagatcagcagtggcattagatcttataggaccatgaactttattgtgaactgcacatgcaagggatctaggttgcacactccttatgagaatctaatgcctgatgatctgaactggaacagtttaatccccaactccagtccgtgggaaaaatgtcttccacgaaactggtccctggtgccaaaaagttaggggaccactgatttagattatgtcacatgtcccatccactcattaacattaaggctttcatccctgggacctcaagataa

SEQ ID NO: 38074 - DNA, 422 bp, Homo sapiens
cactactatagggcgaattgggccctctagatgcatgctcgagcggccgccagtgtgatggatatctgcagaattcgccctttcgagcggccgcccgggcaggtacagccaagggtctacggtattagcaaacacttttatgggtgcaagtgaacatatttttcagtaattggaaggatattttttgcaggtgtcttagtttgggttcccacagcagcagacttgagacaggattagattgcaagtagtttatttggaggtgatcccagaaaacacttgtagggagtagagaagtaagacagaagagggaaggaagccaatacaaggggatttcaaaaagttcatggagtcacaaccagttataaacaccactgcactcggaccagcccccgcgtacctcggccgcgaccacgctaagggcg

SEQ ID NO: 38075 - DNA, 720 bp, Homo sapiens
  misc_feature 535, 548: n = A,T,C or G
acgactcactatagggcgaattgggccctctagatgcatgctcgagcggccgccagtgtgatggatatctgcagaattcgcccttagcgtggtcgcggccgaggtactcagaaagggattagaaaataattacaaaaatattttgccacatattaacatgaaactacaatcactggccgtaaaatatagtcaatgcaatcaagctgaaaagaaaaggtggaaatctccaggttatctgcccaggtggcaggaaatcgacagccccgagaacgcaagtgctgctgtgccgccaggcccagggctatgatccaaagtgacgggcagactaccggcctgcaccaccccactcaggctgcacacaagacagccagcttaggatctccgtgggctgctacctatgtcacagagggctgattaagggcttgcagtgttcccaaatagggcctccaatgagaggagtggaagctgcattacaagaaattcactggggctgcacttgactcttcaacttggcgagtctcatgaggcactcgtnccttcactgcctnctggcagctaagtgctccgggtcatcagggaccttcatgcacatgtcctggttaaccttctcagcagtggccctggaaaactctggaatgggtccaaaagtctgtaggacgtgttttatgccttcgctgtatctgtcgcagtagcttaacataccttctgcatcgagatgca

SEQ ID NO: 38076 - DNA, 161 bp, Homo sapiens
atacgactcactataggcgaattgggccctctagatgcatgctcgagcggccgccagtgtgatggatatctgcagaattcgcccttaaccgtggtcccggccgaggtccactggccctcaaccctgggtgacaaagggggactccgtctccaaaaaaaaac

SEQ ID NO: 38077 - DNA, 672 bp, Homo sapiens
  misc_feature 113, 114: n = A,T,C or G
atacgactactatagggcgaatcgtgccctctagatgcatgctcgagcggccgccagtgtgatggatatctgcagaattcgccctttcgagcggccgcccgggcaggtacttnnttttttttttttttttttttttgcccagaggtcctttatttttttttttaacacctattatgccatgaattcatagggaataggttccagcagctcaggctccttcccattggttctcacaaagtgtgcttctctgggtggagcaggctggcgctttagttgaacccaggtacgcggggcttgagcaggattagataaggctgttctttaaatgtctgaaatggaacagatttcaaaaaaaaaccccacaatctagggtgggaacaaggaaggaaagatgtgaataggctgatgggcaaaaaaccaatttacccatcagttccagccttctctcaaggagaggcaaagaaaggagatacagtggagacatctggaaagttttctccactggaaaactgctactatctgtttttatatttctggtaaaatatatgaggctacagaactaaaaattaaaacctctttgtgccccttggtcctggaacatttatgttccttttaaagaaacaaaaatcaaactttacagaaagatttgatgtatgtaatacatatagcagc

SEQ ID NO: 38078 - DNA, 457 bp, Homo sapiens
ccctctagatgcatgctcgagcggccgccagtgtgatggatatctgcagaattcgcccttagcgtggtcgcggccgaggtacagaactgaaattcaaatatcgaggatagcaagaaaagctggcaacttctatgtatctgcagaacccaagttggcgtttgtcatcaggatcggaggttatcaattgggtgagcccaaaggtctgaaaggtgttgcaacttctttgccttcatcaaatcttcaatagaaactttgtgaagctcagcagggcttcaataatgtgctgaggtttgtagaaccatatattgcatgggcatacccaaatcttgagtcagtaaataaactaatctacaaatgtggttatagcaaaatgaataagaagctacttgctccaacagataataccttgattgctcgaactctgggaaatatggcctcatctgcatggaggatctga

SEQ ID NO: 38079 - DNA, 56 bp, Homo sapiens
  misc_feature 13, 18, 20, 22, 23, 24, 25: n = A,T,C or G
caaaggggacagngggancnannnnggaccgaaaagaagaaacaaagacacaggca

SEQ ID NO: 38080 - DNA, 488 bp, Homo sapiens
ggcgaattgggcccttttaaatccttgctcgagcggccgccagtgtgatggatatctgcagaattcgcccttagcgtggtcgttgccgaggtacatgggactacaggcacgccccaccatgcccagctcatttttgtatttttagtagagacagggtttcaccatgttggccaggatgatcttgatctcttgaccttatgatccgccccttttggccttccaaagtgcttgggatcacaggcttgggccaccacacctggccctctatttattctctttaaagagaagagaaaactatgagaggccaaaattatttaattaaatctttaccttagcccaagggaaaaaatggaatttgcctaatataggtgatgaagcatacacaatgaacagaaacaatcacattttattaaaaggcaaaattttgagacttataagctatatggtagcttatttttgggtggggaagaaatgataaaagaatataa

SEQ ID NO: 38081 - DNA, 425 bp, Homo sapiens
ggcgaattgggccctctagatgcatgctcgagcggccgccagtgtgatggatatctgcagaattcgccctttcgagcggccgcccgggcaggtccgggcaggtacttttttttttttttttttttttttttatttttttttttttttttttttttttttttttttttttttttttttttttttttttttttttttttttttttttttttttttttttttttttttttttttttttaaaaaaaaataaaaatttttttttttttggggttttttgagaaaaatttatattttggggggttgtttgggaaaatttaaatcccccgccctaaaattaataatttttcggggggggaattctcccttttttttttttttatcccattccaattaaaaaaaaaaccttctttttttgtttaataattttt

SEQ ID NO: 38082 - DNA, 466 bp, Homo sapiens
agggcgaattgggccctctagatgcatgctcgagcggccgccagtgtgatggatatctgcagaattcgccctttcgagcggccgcccggccaggtaccgaaaactttcttctctcaaatgggtttcggccataactccgggattcttctggatatgtatcctcctttcgatgagtatctcgaccttcacggtccctgtagtcatgggcatcacgagtggaccgagaatctctgggatcacggctctctttggtatctctgctataatctctcatctcccttgagtcccgcatgtctctggagtctcttagttcccttcggtccctagtatctctggcatctctccgatcccgaccatctcgaggttctctgtcatctctgtggtctctagaagagctctgatcctgttcatattctcgttcttctcttgagtccttttctctgtctcgtttgtccctagtatcttc

SEQ ID NO: 38083 - DNA, 430 bp, Homo sapiens
ggcgaattgggccctctagatgcatgctcgagcggccgccagtgtgatggatatctgcagaattcgccctttcgagcggccgcccgggcaggtactttaaacctatctggaagaagaaatcaataggctgcaatgtcatgttctacttttcccatagtgttactgaggtttccaggaagggagggagcacttttgttttcattttagaaagaagatgaaagtgaaaacagaatagccagattactgaaaccaaatgtcatcttaagaagcgaccttgtcagcttagctaaatagtaattccttccagtcatattcctcaatccttatctgcttcataggttatattatcaatgacaaaaaggactgtaactccgacatggacaatggctacagaaaacactaatttttgattttaaaattattcttgatg

SEQ ID NO: 38084 - DNA, 445 bp, Homo sapiens
ttgggccctcagatgcatgctcgagcggccgccagtgtgatggatatctgcagaattcgccctttcgagcggtcgcccgggcaggtacaccaaggtggtgcattaccggaagtggatcaaggacaccatcgtggccaacccctgagcacccctatcaactccctattgtagtaaacttggaaccttggaaatgacccggcccaagacttaggcctccccagttctactgacctttgtccttaggtgtgaggtccagggttgctaggaaaagaaatcagcagacacaggtgtagaccagagtgtttcttaaatggtgtaattttgtcctctctgtgtcctggggaatactggccatgcctggagacatatcactcaatttctctgaggacacagataggatggggtggcctgtgttatttgtggggtacattaaaaatgacagggg

SEQ ID NO: 38085 - DNA, 193 bp, Homo sapiens
gactacactatagggcgaattgggccctctagatgcatgctcgagcggccgccagtgtgatggatatctgcagaattcgcccttagcgtggtcgcggccgacgtactatatgccatggatgtgaatttcccatagaagctggtgacaatgttcctggaagctctgggcttacacctggcatgacaacttgctt

SEQ ID NO: 38086 - DNA, 426 bp, Homo sapiens
actactatagggcgaattgggccctctagatgcatgctcgagcggccgccagtgtgatggatatctgcagaattcgcccttagcgtggtcgcggccgaggtaccattagtaaagttgctgtgcagaattacctcagtcctattctaagcttacagttcagttgattttattgtcttcacctaagtatatacaattcacatatgggagaaaaacactaaatcaagatggttattttcactgttttgcttaagattcatatttaaatataaatcaagaagttaatccacagtttgagagatacttatattagaaattttaaatgttaaatacataattgtaaatatggtgtatgtacctgcccgggcggccgctcgaaagggcgaattccagcacactggcggccgttactagtggatccgagctcgg

SEQ ID NO: 38087 - DNA, 333 bp, Homo sapiens
agggcgaattgggccctctagatgcatgctcgagcggccgccagtgtgatggatatctgcagaattcgccctttcgagcggccgcccgggcaggtacctttaaaaatacataatttagtttgcaagctatattaatgctactttctattttccttgttactttatagcaattcattttaccctcacaaagtcaatttagaaccttatcattaactgggatgtgtagcgatatttttgggcctctgggtttcatgtgtcaatacaaggaatatttatttaaaatagatttatttagaggaggcacagtgttgttgatctgtgtgacaccaccca

SEQ ID NO: 38088 - DNA, 443 bp, Homo sapiens
gcggccgccagtgtgatttatatctgcagaattcgcccttagcgatgtcgcggccgagatttcaatttaaagtgagagggagatatgcaactcttcctttcacttggacacttgcaacaagcttgatcaacgctcagcctgcagcccaggatatgcgttgaccaacacaaatttcgtaaactttcttaaaacattatgagtttttttctgattttgttttttagcttaacagctatcattagtgatagtatattttatatgtggcccaagacaattcttcttccaatgtggcctaaggaagtcaaaagattgaacacccatgacttagaggctattatagggttattaattggcctaatttcaatttttttctgaggaaatagagaagcccaaggagagtgagagagatgagagagcagttggcaaagcagttggaatgcaca

SEQ ID NO: 38089 - DNA, 408 bp, Homo sapiens
gggcgaattgggccctctagatgcatgctcgagcggccgccagtgtgatggatatctgcagaattcgcccttagcgtggtcgcggccgaggtactgcacatgatcagaaaacagctctggaaaatgacagccttcatttctctgaacatactgccttatgggacagatcaatgaaagagtttctagccaaagccaaagaagactttttgaaaaaatgggagaatccaactcagaataatgccggacttgaagattttgaaaggaaaaaaacccttggaacaggttcatttggaagagtcatgttggtaaaacacaaagccactgaacagtattatgccatgaagatcttatataagcagaaggttgttaaactgaagcaaatagagcatactttgaatgagaaaagaa

SEQ ID NO: 38090 - DNA, 498 bp, Homo sapiens
  misc_feature 135: n = A,T,C or G
gctcgagcggccgccagtgtgatggatatctgtataattcgcccttagcgttttcgcgtacgttgtcacaaacagctggattggtacagcttggtgtttaccttacttgaacaaggttcgaacagttggctgccntgatgggctgcaacacagtgattggtataagagtaggttacagcctgtttacacatgcagttaggttacaattcactgtgtgttgagaaacctttaggccaaacttaaaatttgtaaggaggcagctttaggcttaacttgatttaaaagttattagatgttccatcagtcgtttcgccaataggtaataggtttttttggttttgttttctgtgctattaaaatagtatataaaacttgtcatcattgattctgatttatcatgttacagttcagtctctaattgaactgagcctatttttttccgtaaaatccaacctattcatccatttatacagattttttaaaatctaatattttata

SEQ ID NO: 38091 - DNA, 481 bp, Homo sapiens
gggcgaattgggccctctagatgcatgctcgagcggccgccagtgtgatggatatctgcagaattcgcccttagcgtggtcgcggccgaggtactactactccctaacccaaaccaggtgattctagtgaagactgtcaataaacggagcatgtgatcaagcagggcccatcagaatccttccctaagatttttataaaaagctggacctattctttttccatttgagtggcaaatatttgaagatatgaggtctaaagctgtgatggcttattctccatccctgtgtaaattctggtctatagtaagcgaaaacaaggccattaggcagagggcagcagagacataaggtgagaaagagtgtggtctctggttttctagaccctgattctggtttggaggcttggctgatcacctcttcctttgattctgatagaaagctcaatgtatctttctaataaaacccccctttgctttgcttg

SEQ ID NO: 38092 - DNA, 379 bp, Homo sapiens
agggcgaattgggccctctagatgcatgctcgagcggccgccagtgtgatggatatctgcagaattcgcccttagcgtggtcgcggccgaggtacctctctgtctcagaaactgaacaactgggagaacagtcgacagggcctctccaaccatcttcaggtgactaaagcagcatatgaagtataggtttgtgtcacttcttctcttccacagaagaaacatctccagacactgatcacaggctacccagggttgtcttctgggttgctagagcctggtaatatctctgccttgctgcaagtcacttatgctctcgtagtcgttctcctttgggacaagaccgtggtggccattggtccccagggtggccttttcttcc

SEQ ID NO: 38093 - DNA, 684 bp, Homo sapiens
  misc_feature 9: n = A,T,C or G
gcgaattgngccctctagatgcatgctcgagcggccgccagtgtgatggatatctgcagaattcgccctttcgagcggccgcccgggcaggtacataaacagcgccagctgtggtttcttctggactggtgtggctgtcaaaaggaatctgaattcaaggcagttgtaaagtaagtaaataaataacatcagcaaaagcaaataaaaagcaacccctaaaaaaacagcgaccaaaaaatatttttgttaggacacgttaggtcttcattaagaggaacttgcaaaacttgattattcactttctgagtttgaacagagcctggtctctgggaaacaatccaaggataagatgaaacctgacgcttgccttatcagactttgctgggaacacagttttaaggaaaaagcaatgagaaaagtctacttaccaaagtcacaaacttcaactccttggctagtacctcggccgcgaccacgctaagggcgaattccagcacactggcggccgttactagtggatccgagctcggtaccaagcttggcgtaatcatggtcatagctgtttcctgtgtgaaattgttatccgctcacaattccacacaacatacgagccggaagcataaagtgtaaagcctgtggtgcctaatgagtgagctaactcacattaattgcgttgcgctcact

SEQ ID NO: 38094 - DNA, 240 bp, Homo sapiens
  misc_feature 196: n = A,T,C or G
ccctctagatgcatgctcgagcggccgccagtgtgatggatatctgcagaattcgccctttcgagcggccgcccgggcaggtacaaagaaacagacctgctaatacttttcaaggacgattactttgccaaaaaaaatgaagaaagaaaacaaataaagtggaagctaaataagagctaacaggagcaagaagcanaacaaaagttagaagaagatgctgaaatgaaatctctagaagaa

SEQ ID NO: 38095 - DNA, 400 bp, Homo sapiens
gactactatagggcgaattgggccctctagatgcatgctcgagcggccgccagtgtgatggatatctgcagaattcgcccttagcgtggtcgcggccgaggtactctatttcagatttcctcaaagctgggcagttgttagcgagaatgaccaatttcgctttgccttgtctgatcatcttcagagtctgcttgtactgccttgccagcacaaatggaagatctaaccaaaacagttctgcctttgaatattgacagtggctcagatcctttccttcctttacctgcagaaagtagttcaatgtctctcttcccttcaccagcagatagtgggactaattctgttttttcccaactggaaaataatacaaatcattattcctcacagattgaaggaaaca

SEQ ID NO: 38096 - DNA, 177 bp, Homo sapiens
tatagggcgaattgggctttctagatgcatgctcgagcggccgccagtgtgatggatatctgcagaattcgcccttagcgtggtcgcggccgaggtactaaaacgctgtcaaaaacagcccgcctggaatgtgtggtgtctggaataacaatttctgcaacatctgtatattggtat

SEQ ID NO: 38097 - DNA, 432 bp, Homo sapiens
  misc_feature 251, 269, 270, 280, 286, 287, 302, 303, 318, 319, 348, 349,382, 383, 419: n = A,T,C or G
actactatagggcgaattgggccctctagatgcatgctcgagcggccgccagtgtgatggatatctgcagaattcgccctttcgagcggccgcccgggcaggtactcctcacttggtatatagccaagctccacctccaccaatgacctctgctccaccaccaataacccctccccctggacatattattgcccagataccacccttatataaatcatccctcctccaggaacctcccccacctcaacatngtgtggtccacctgtaannctgcaccccnctcctnncaccattataatccnntaactcattaccccnnagttcactgaagaatcaaggggaactctnngagccctccatttacaccccaaccagggggaanntgagtcctggttattatggccccctgcaccaagagngtgccaaccacca

SEQ ID NO: 38098 - DNA, 173 bp, Homo sapiens
tgagatgcatgctcgagcggccgccagtgtgatggatatctgcagaattcgcccttagcgtggtcgcggccgaggtactcgtcaataggctcggtcatatataccacctcgaagccccgtttccgcactcgctccacaaaagctgagttggccacctgctctttgctctcacc

SEQ ID NO: 38099 - DNA, 196 bp, Homo sapiens
  misc_feature 10: n = A,T,C or G
tatagggcgnattgggccctctagatgcatgctcgagcggccgccagtgtgatggatatctgcagaattcgcccttagcgtggtcgcggccgaggtacttttttttttttttttttttttttttttattttttttttttttttttttttttttttttttttttttttttttttttttttttttttttttttttttt

SEQ ID NO: 38100 - DNA, 340 bp, Homo sapiens
atatggcgaattgggccctctagatgcatgctcgagcggccgccagtgtgatggatatctgcagaattcgcccttagcgtggtcgcggccgaggtacagcgtcatataggctttgcctttaatgatctcttacggttagaaaacacaataaaaacaaactgttcggctactggacaggttgcatattaccagatcattacttagcagatgtcatcttgcacaattgagtccctttatgaaatttcataaataaaagaattcgttctcttctttgtggtctttaaataaaagagttcaaagaattggttcaagagttcttgtaaaatgtttatttttaaat

SEQ ID NO: 38101 - DNA, 394 bp, Homo sapiens
gatatctggcgaaattcgccctttcgagcggccgcccgggcaggtactgaggctgtatacagccacagcctctccccatcccctccagccttatctgtcatcaccatcaacccctcccatgcacctaaacaaaatctaacttgtaattccttgaacatgtcaggcatacattattccttctgcctgagaagctcttccttgtctcttaaatctagaatgatgtaaagttttgaataagttgactatcttacttcatgcaaagaagggacacatatgagattcaatcatcacatgagacagcaaatactaaaagtgtaatttgattataagagtttagataaatatatgaaatgcaagagccacagagggaatgtttatggggcacgtttgtaag

SEQ ID NO: 38102 - DNA, 176 bp, Homo sapiens
tacactactatagggcgaattgggccctctagatgcatgctcgagcggccgccagtgtgatggatatctgcagaattcgccctttcgagcggccgcccgggcaggtactggagctatactgacatcagtaatagtgacacccctggatgttgttaaaattagactccaagcccaaa

SEQ ID NO: 38103 - DNA, 68 bp, Homo sapiens
actatagggcgaattgggccctctagatgcatgctcgagcggccgccagtgtgatggatatctgcaga

SEQ ID NO: 38104 - DNA, 696 bp, Homo sapiens
  misc_feature 173: n = A,T,C or G
gactactatagggcgaattgggccctctagatgcatgctcgagcggccgccagtgtgatggatatctgcagaattcgccctttcgagcggccgcccgggcaggtaccaccggaactggtgcttggagcggaagggaagtgagatcagtcgattagtcaccaacaccatcatcncattgccagagaggtcgagagcagacatcatggaatcagacagcttgctggcgattttatctgcacgtttctgcatcttcttcttatttttcagggcagatgccagagcctggccctgttgcagggggtccgtctccatgatcctctgcagcactgagcggcggtccactgagcagacatccaccatactgttgctcttagggcggtggtccgcattgcgtttagcccaccccatctgatgacggttcggattggtgcaatacccagtgagatctccaatcttatacacggtggttttattttcaatggcatctgctattttcgtcatcggagaatggagcaacttgatctccatttcaagtgggtccgtgtcacccaacagctcatcagattctccggtggccaagcattccatggtgtcttcattggcctgctcagtatcctcgatgtcaaagacctcggtcatttccttaacgatctcagcactgagatgggtgggcagagtgtgagtggctggtggtgg

SEQ ID NO: 38105 - DNA, 468 bp, Homo sapiens
  misc_feature 231: n = A,T,C or G
ctactatagggcgaattgggccctctagatgcatgctcgagcggccgccagtgtgatgggttttttgcaaaattcgccctttcaagcggccgcccggccaggtacccaaagttttataaatcaaaagccctaatgataaccatttttagaattcaatcatcactgtagaatcagagtctgtaattcttttctttgattagaaggggtaggacaactgtaatactgttcctncatgtttccatgcatacaatgttatgtgttactctacacttgtaaatgcagtattcaaattcacttgagccgtgggcctggaagttagagactagctttttaccttattactttcaatgattttatctgagttaagctgataaatctcttcgcggctgaatccaaattcttcaagtatctcctcagtgtgttctcctatgaaaggatcccttttgaaagaagggatggctggggtgt

SEQ ID NO: 38106 - DNA, 476 bp, Homo sapiens
agggctgaattgggccctctagatgcatgctcgagcggccgccagtgtgatggatatctgcagaattcgccctttcgagcggccgcccgggcaggtactcagaagtcagagttgagagacagaggcaccccggacagagacgtgaggcactgaataaatagatcagaatgactgaaaaagccccagagccacatgtggaggaggatgacgatgatgagctggacagcaagctcaattataagcctccaccacagaagtccctgaaagagctgcaggaaatggacaaaggtgatgagagtctaattaagtacgcggggcgtatgtgaagcagctatgagtgctgtgatttggttttaaaaatttttacacttcttgttgaaatatatatgcatataaatatatctatatctatatctatatctaaaacacccctggaccattaacgtaaattaaatgtcttaagagatttggagccc

SEQ ID NO: 38107 - DNA, 454 bp, Homo sapiens
atagggcgaattgggccctctagatgcatgctcgagcggccgccagtgtgatggatatctgcagaattcgccctttcgagcggccgcccgggcaggtacagtgcatattggcggcgcacgcctcattacgattcgcctgcttgcttctcctgttcaatcgtttctttggaaggcagtggatttttctctcgcgtctctgtcttcttcagtttcgacttatcgaatttctcgatctcagccatatcgggtttgtcagacatggttgcggaggaaaagcgaagcgaggcgcacgagtacgcggggcttccttctcgcctaacgccgccaacatggtgttcaggcgcttcgtggaggttggccgggtggcctatgtctcctttggacctcatgccggaaaattggtcgcgattgtagatgttattgatcagaacagggctttggtcgatggaccttg

SEQ ID NO: 38108 - DNA, 345 bp, Homo sapiens
gggcgaactgggctctctagatgcatgctcgagcggccgccagtgtgatggatatctgcagaattcgcccttagcttggtcgcggccgaggtgctttttttttttttttttttatgtaacacacaacggcaagggagtttaattcagaatatacagttttccaactcagtaagaaaataaacaattccattttaaaatgggcaaaacatctgaatagacaatcattaaagaaggtatataaacagccataaacatttcttcatatgctcaatattattagttattaaacaaaaacccattagaatggctaaaattctaaagttcagcaatgtcaaagagttattg

SEQ ID NO: 38109 - DNA, 455 bp, Homo sapiens
actactatagggcgaattgggccctctagatgcatgctcgagcggccgccagtgtgatggatatctgcagaattcgccctttcgagcggccgcccgggcaggtactcctagaagaaataacaaatttgtcatcccaggtggaagaaaactggacccatttgcaatcactcttcaatcaaagcatgtgtattttaaattatctcaaaagtgctttgttgtaaaaataaatttgtgactaaacaaagactttcatattaaatgggttcaattgaactcatttcttattttccaagtgtcaatgtgaaaagaaaataaatgctagcactactgactagtcagtatatctccactttaaatgctaaatactttcttgaaataaaatcgcacctcccggccaggcatgatggataatgcctgtaattccagcactttcagaggccaaagcgggaggattg

SEQ ID NO: 38110 - DNA, 484 bp, Homo sapiens
tagggcgaattgggccctctagatgcatgctcgagcggccgccagtgtgatggatatctgcagaattcgcccttagcgtggtcgcggccgaggtacatgctgtatgattccatttttataacatgctactaatgacaaaactaaagatgaaaagatttctgattgccaagggttagggctgaggagaggttgtgactataaacaaggagcatgagggagtttgcattgatgcaacattctgaatctcgattacggtggtggtgacatgaatcaatatatgtgttaagatttcttaaagctacatataaaaaacaaacaaaaatgcatgcatgttaaaactggtgatttccaaataaattctgtagttaacagtattgtaacaatttcactttcctgtatttggtaatgaactatgcttatgtaagttgttatctttggaagaagctgggttaagggcaagaactctggaatattttggtaagat

SEQ ID NO: 38111 - DNA, 293 bp, Homo sapiens
tgggagtctaccactcactatagggcgaattgggccctctagatgcatgctcgagcggccgccagtgtgatggatatctgcagaattcgcccttagcgtggtcgcggccgaggtactcccgattgaagcccccattcgtataataattacatcacaagacgtcttgcactcatgagctgtccccacattaggcttaaaaacagatgcaatttcccggaccgtctaaaaccaaacccacttttcactcgctaacacgaccggcgggtattactaacggtacaaatgcctctgaa

SEQ ID NO: 38112 - DNA, 623 bp, Homo sapiens
cgactactatagggcgaattgggccctctagatgcatgctcgagcggccgccagtgtgatggatatctgcagaattcgcccttagcgtggtcgcggccgaggtacgattagctgtcaccaagatgtgatcctctccatgtccttcaacaccaacggcagcctgttggccaccacctgcaaagaccgcaagattcgggttattgacccccgagcagggaccgtcctccaggaggccagctacaaagggcaccgggccagcaaagtgctgtttctggggaacctgaagaagctgatgtccacaggcacatcccgatggaacaaccggcaggtggccttgtgggaccaggataacctctctgtgcctctgatggagggggacctggacggctcctcgggcgtgctgtttcccttctatgacgcggacaccagcatgctctacgtggtggggaagggagatggcaacatccgctactacgaggtgagcgccgacaagcctcacctgagctacctgactgagtacccttatttgatttaaaagcatgaatatatgagatttactagcagtattaagtatttgatagagctacgtgatttttgggaagaaatttgttatatggtatgta

SEQ ID NO: 38113 - DNA, 181 bp, Homo sapiens
ctcactataggcgaattgggccctctagatgcatgctcgagcggccgccagtgtgatggatatctgcagaattcgcccttagcgtggtcgcggccgaggtactttttttttttttttttttttttttttgtagagttggggatcttgccttgctaaccaggctggtctcaaacttgtggct

SEQ ID NO: 38114 - DNA, 241 bp, Homo sapiens
agggcgaattgggccctctagatgcatgctcgagcggccgccagtgtgatggatatctgcagaattcgcccttagcgtggtcgcggccgaggtactatttgttttccctcatcatgaatttgagccgtgatgcttatgagattcgcctactgatggagcaagagtcttctgcttgtagccggcgactgaaaggttctggaggaggagtccccagaggaagtgaaactgggggacttggggg

SEQ ID NO: 38115 - DNA, 191 bp, Homo sapiens
cactatagggcgaattgggccctctagatgcatgctcgagcggccgccagtgtgatggatatctgcagaattcgccctttcgagcggccgcccgggcaggtacatattattagcatagaattcatcatttttcagcaagataggaccacttctcttaaagtctttactgatttcccggcacttctggaaaa

SEQ ID NO: 38116 - DNA, 491 bp, Homo sapiens
actactatagggcgaattgggccctctagatgcatgctcgagcggccgccagtgtgatggatatctgcagaattcgccctttcgagcggccgcccgggcaggtacagtcaacatttatctggagttgtctgttcatgcttctcaatcttatcatttcctcaggcgtagggatcgcagtggtgcagctgactcttctgagccgtctctgcatcaggtcatgctccataccattaacttcagacttcaaccgctctagctcctctttctcaagtttcagttgctttgctaacctctccatccttgctcgttgatgtaacagcaaggcttgtgtgtaggcatagtcatctgatccagaactagaacttctctgatatttatggcttcccttttctcccccagagcctggtatcactgaaatgggctgaataggttctggtgctgcagagcgctcttcttggtccactaaatttaaaagattttcagtcgttgct

SEQ ID NO: 38117 - DNA, 439 bp, Homo sapiens
tatagggcgaattgggccctctagatgcatgctcgagcggccgccagtgtgatggatatctgcagaattcgccctttcgagcggccgcccgggcaggtactgcataattatagtcaatgcttgcaataattttcagtttgtctcatcacgttagcagagcctattcatgcaatttagaaaggatttcaatacagcccaaaccaaaaggcttacggtcaacagagggttagccttccataaatgagaaatccaaaaaagaataatgccacgtatttcaggaatgtcggttagaggtttggccttcttgggaagtgtcacaatgctgagtctaaaactgcaacagttaccgtgtccaagtcatgcaactctaaaggaggatggacggtcacatttgtgtctttcagtatcaaagcacctttaagggcttccattttgagaa

SEQ ID NO: 38118 - DNA, 408 bp, Homo sapiens
actactatagggcgaattgggccctctagatgcatgctcgagcggccgccagtgtgatggatatctgcagaattcgcccttagcgtggtcgcggcccaggtacaaggctaagccattttaactttatactgaaaaaaaaataaaacaaaggggagggataaaggacttagtcatctttgcactggaaaacaaaatatgtaattaaattcccatagctgcatgtaacattgaattcttccaggttaaaaaaaaagttaatcctgtgatattaatggaatgacattttgagggtcttgagaatgggcacaaaagtggggaaatgaaatttagtatgggcaaagacactgaggatgatgttgattagaataatcactccgtaatgatcatgctgtgtgctagtaagtataa

SEQ ID NO: 38119 - DNA, 485 bp, Homo sapiens
tttagggtttattcatacactactatagggcgaattgggccctctagatgcatgctcgagcggccgccagtgtgatggatatctgcagaattcgcccttagcgtggtcgcggccgaggtacatttatccctgacatccactagaacataatggtagctttacaaggggtgtcacaggagattaaggctattgaacaccttactgatgaccctctgcagagacagtgggtgcctctgggcactaccctatgctgggctctaataatcataggtaacgtaacaggaatatttatagtaggttgttgttctctgtattgttgttgtgacctatgagttcagggtgctgccctatgtgcatggatccccactaaaagaactccctcattccagggggtggaatgtaaggcctgtgtgccaagcctgtttatcaaactcgtgtgcccaaaacttatgtataaagccttgtgtgtgtatataaagcctatg

SEQ ID NO: 38120 - DNA, 479 bp, Homo sapiens
atacgactacttagggcgaattgggccctctagatgcatgctcgagcggccgccagtgtgatggatatctgcagaattcgcccttagcgtggtcgcggccgaggtacgcggggaggggtagagtgagaagcaccagcaggcagtaacagccaacccttagccattgctaagggcagagaactggtggagcctttctcttactcccaggacttcagcacctaagacagctccaaaacaaaccagaacagtcagctccgggggagcacgactgggcgagaggcacagaaatggacaccagaaataaggcccagctccttgtgctcctgactcttctcagtgcgctcttctcacagacttcggcatggcctctttacagggcaccttctgctctcaggttgggtgacagaataccctttgagggagcaaatgaacctgatcaagtttcattaaaagaagacattgacatgctgcaaaatgca

SEQ ID NO: 38121 - DNA, 311 bp, Homo sapiens
gagcggccgccagtgtgatttatatctgcagaattcgccctttcgagctgtcgcccgggcaggtactgtggagggctgtgagcccgcaaacaacaagtgtctgttaagagctaccgatgggaagaagaagatcagcactgtggtgagcttcaaaggaattgattaagtttcagatggcttattcaaaccttcttagagctaacatggatgggttgaggaagagagactaaaagaacaaaactaagaagaccaaagcagcagcagcagtagcagcagcagcacctgccgcagcagcaacagcatcaacaaca

SEQ ID NO: 38122 - DNA, 659 bp, Homo sapiens
cgactcactatagggcgaattgggccctctagatgcatgctcgagcggccgccagtgtgatggatatctgcagaattcgcccttagcgtggtcgcggccgaggtactatcagcacagaaaaacagtgagaaccatcctaaatttcagcaaggatttgagaaagatccaaatttcacataatgatgaatcttcgcacctctctgccctatgattttccgtaattttcgatcatctatgcattgttcaaatttatacctgcagactattcatttaattttactccttacaattataatagactaagacagatatagaagctacttatttatactagaaattaatttaatagatgaaaaatattgagcaatatttggaatataaaatttacaaagcatattataatacctaaataatacttaacctaatatagtgcaattttacaatatttatttagcttgctgtctaaaattctggtttctttgaactttttgatcaagaacttttatcaacccttctttgcttattgcacaatgcgagtgaaatccaaggggatatccctccatttttattcagtctttcctatacctattctttatagaggaagaattacatgccagctctatagatacgtatgtatccaagacatggatacttttaat

SEQ ID NO: 38123 - DNA, 446 bp, Homo sapiens
ctactatagggcgaattgggccctctagatgcatgctcgagcggccgccagtgtgatggatatctgcagaattcgccctttcgagcggccgcccgggcaggtacgcgggggcccttgttcactagaaggagccccctgaccccttcttccaaaaatactttttgtctttgtcttcgtttctgcattcatcccccttcgttcactcccataacaaccaacagcgacaactggcacctaggacagggacgtgagtgaaggtctgctggagcagagaaactgacactgacaagaagaacgagaatgagaaaccctgcgacgagtctgctgacagctgatataagtctgcaaaatcagctggaccaccaaacggcaattgagagctgcacaacctgcaattacctttattcaattaatgcaaaaacaaaaatggggagatgttacaggct

SEQ ID NO: 38124 - DNA, 452 bp, Homo sapiens
agggcgaattgggccctctagatgcatgctcgagcggccgccagtgtgatggatatctgcagaattcgccctttcgagcggccgcccgggcaggtactttttttttttttttttttttttcgagatggagtctcgctctgtctcccaggcatgcccggctaatttttttttttttttttttttttggaatttttagtagaggcggggtttcaccatgttagccaggatggtctcgatctcctcacctcgtgatccacccgcctgggcctcccaaagtgctgaaattacaggcgtgagccactgctaatgatctttttcttactgactccaaagagctttttatatgttaggataaatagccttttaggctttttaagtcaaaagttctttccactgtttccacagagatgatttcctgctaaaacggattcgttgtgcaaaagccctaccat

SEQ ID NO: 38125 - DNA, 393 bp, Homo sapiens
ccctctagatgcatgctcgagcggccgccagtgtgatggatatctgcagaattcgccctttcgagcggccgcccgggcaggtacatgaaatttggagggacactattcactatatcacacaagcaacataatgcctcttttgacacagtaagattttaaaaaaaagactctcaaactttaattcagcttgataaaattagaattcttcttctggggaattttctttttgagacaggatctcattctgtcaagccggagtgcagtggcgtgatcacacctcactgcagcctcaagcaatactcccacctcagcctactgactagctgggactacaggtgcactaccacacctggctaagttttaaaatttttgtagagatagggtcttgccatg

SEQ ID NO: 38126 - DNA, 400 bp, Homo sapiens
attgggccctctatatatgcatgctagagcggccgccagtgtgatggatatctgcagaattcgcccttagcgtggtcgcggccgaagcactcttttttttttttttttttttttgagtggttaataacttgtttatttttaagtttataaagagttgacattacatttaaacaacaatttaattaggacaatttttaattgttgacatatcatcaaaaacatatgccttttataaaaagtctagattcatagcaggatgccattttaggtgaactatgttttcaacttatgaaataggacgcagagagaaatactatgttttattaagaactttttgcttatagaagacaattaaaacatatttaagaaaaatatataatacaaaaaataaaaaaggaaa

SEQ ID NO: 38127 - DNA, 472 bp, Homo sapiens
ggcgaattgggccctctagatgcatgctcgagcggccgccagtgtgatggatatctgcagaattcgccctttcgagcggccgcccgggcaggtaccgaggtgaatgtcttctcctcggctacagcctccaccccaaatacaacccaccagttaagagggataacactaaacaatgctgtttagtgtcatgtgcacccatctacatgaccagaaaaatactgtgcatatgcaaaaaaatttactaattgttaatgcctggccagatgttcttgtgaagagcaaggcaggggaaaaacatgttatcaagtgaatactctatccaaactccaagagaaacatctccagtttttcttcagagtcaatttgatcttcaactgagggtccctccattcttggcagtgagaggaacagtgaataatgaaaacaggtgttcagaaacctatgcagtatactccctgggtaaggaaggtga

SEQ ID NO: 38128 - DNA, 441 bp, Homo sapiens
actatagggcgaattgggctctctagatgcatgctcgagcggccgccagtgtgatggatatctgcagaattcgccctttcgagcggccgcccgggcaggtactcttttgtgacactgtttggctccagtatagttcggaatctggagtttgctgttgaatgggaaagtgggattttgtgctgctgttttaagcagggtcgggccaggttaatatgtgatgatctcatgcggtgccgtttttgaccccagtgttttgggagtatagggagttttggcctttaaaaatcaaactgccacagaaactcattttatttaaaatttgtttcacagccttccctggattacctatcaaggctaacaaagttcagccatgtggacatgtttgcagacagttgagactgtattactatctcatggctagagttccaaggtaaaagcttt

SEQ ID NO: 38129 - DNA, 188 bp, Homo sapiens
tgctcgagcggccgccagtgtgatggatatctgcagaattcgcccttagcgtggtcgcggccgaggtacatgggactacaggcacgccccaccatgcccagctcatttttgtatttttagtatagacagggtttcaccatgttggccaggatgatctcgatctcttgacctcatgatccgcccctctt

SEQ ID NO: 38130 - DNA, 435 bp, Homo sapiens
ggagctccaccgcggtggcggccgcccgggcaggtactaaagatgatgatttgggggtgggatgcctggaggggctggcaccattcaaaaaagtattggaaaacattagccaagaaaaaggctccttgtccctcctaatccatatccagatacccccaaccagagatcttaaaagggatgaccagccatatgccaacatgccaggattccaaaggcatgcctcaactaattagggtattccctacagcagactggggtagaggggctccatcctggctatatccagagaggcttaacttgcctaggccaggggatggaatctagatgaagactgtccacaaacagtggctttcaagcctgggctaaataaataatattttgcttcattacatggccaaaggagaggaggagaatgaaaaagatgatattactacc

SEQ ID NO: 38131 - DNA, 440 bp, Homo sapiens
actatagggcgaattgggccctctagatgcatgctcgagcggccgccagtgtgatggatatctgcagaattcgccctttcgagcggccgcccgggcaggtacaactccaaaaggagacattggagaagaaccaagctgggtctataaggaattgcacatgagatggcacacatatttatgctgtctgaaggtcacgatcatgttaccatatcaagctgaaaatgtcaccactatctggagatttcgacgtgttttcctctctgaatctgttatgaacacgttggttggctggattcagtaataaatatgtaaggcctttctttttaaaaaaaaaaaaaaaaaaaagaaaaaaaaaaaaaaaaaaaaaaggtccgcggggcttctcgcctaacgctgccaacatggtgttcgggcgcttcgtggaggttggccgggtggcc

SEQ ID NO: 38132 - DNA, 252 bp, Homo sapiens
ggcgaattgggccctctagatgcatgctcgagcggccgccagtgtgatggatatctgcagaattcgcccttagcgtggtcgcggccgaggtacttttttttttttttttttttttatgatgttagttctttatttcaataaaagtggatagagatctttcattatcagggacagggcttacctgtaaggacgaaagtaatcttccgggaaatattcatacaggcttgacatcatttttattggatggctgat

SEQ ID NO: 38133 - DNA, 175 bp, Homo sapiens
tatatggcgaattgggccctctagatgcatgctcgagcggccgccagtgtgatggatatctgcagaattcgccctttcgagcggccgcccgggcaggtacctgtgaaccaagtgtttgggcaggatgagatgatcgacgtcatcggggtgaccaagggcaaaggctacaaagggg

SEQ ID NO: 38134 - DNA, 470 bp, Homo sapiens
tatagggcgaattggagctccaccgcggtggcggccgcccgggcaggtacgcggggagatcagtgatagcactagatactcattggagcatgaaccctgttgtgaactgctcatctgagggatctaggttgtgtgcttcatatgagaatctaatgcctgatgatatgtcactgtctcactttgcccccagatgagaccatctagttgcagaaaaataagctcagagtttccacggattctacattatgatttgatcttcaacaaagctgacactggggaaaggacacactcttcaataaatggtgctgggaaaattggatagccacatccagaaaaatgaaactgggccactatctcactatatacaagaatcaactcaaagtagattaaaaacttaaacagaagacctgaaactataaaaatacttgaagaaaacctagggaaaaatttcctggccttttgtctaggca

SEQ ID NO: 38135 - DNA, 503 bp, Homo sapiens
cgaattgggccctctagatgcatgctcgagcggccgccagtgtgatggatatctgcagaattcgcccttagcctggtcgcggccgaggtaccttagtagaatacagagctttggtaattacatgaataaaattaagaaaatagccatatacaatcaaatacactatggcatttttatttgaatatgatgagtatattttgcttcggaaataatataggaaggaaatgtaaaatagtgagtagtatggtatcagttaattccagactgagcttctttgtcaacttcagtttctctctcagtttaatgatttaataatagtccaggtttttgtgtgattttctttatactgcaaattaataatgattcactttatagtttgggagacagaatcaggtcttgaataaaataattgtaaagagtgctaaatgggcaccattattcgaatcagataccttttatattctctttccataaatacgtagatttttgtcaattaaattttt

SEQ ID NO: 38136 - DNA, 452 bp, Homo sapiens
actactatagggcgaattgggccctctagatgcatgctcgagcggccgccagtgtgatggatatctgcagaattcgcccttagcgtggtcgcggccgaggtacgcggggtaggctgtgggtcaaaagtgccggtcaaaatggaagtgaatccccctaaacaggagcacctgccggcgctaaaaggtcctgtttccctctgatttggcaagagagacaatcttgcaataataaattaacattctagctctgaggagttcaactaagaaattttctcatcactaagagtaactggattactgcagaatgactacagaagtaatattacattatcgaccatgtgagagtgatcccacacaactgccaaaaattgcagaaaaagcaattcaagactttcctactcgtccgctatcaagatttataccttggtttccatatgatgggtccaagcttt

SEQ ID NO: 38137 - DNA, 558 bp, Homo sapiens
gactcactatagggcgaattgggccctctagatgcatgctcgagcggccgccagtgtgatggatatctgcagaattcgccctttcgagcggccgcccgggcaggtactgaacaatgtggcagaatttgtgtgcaaatataaactattataaaatctgtttcaagtatgcagttttcttttgttagaaattgtagagaatagagagtggtaattcagatttggtcaacgattctagtcacatattttcctccaaaagtattccttccaaaaataatctatacatgttcaaattaggtagcataaagataaaagtgaaatttagtagtataggcctgaacctttttttgtttaaaagagtgcttttgaaataagcatccaccccaaatgttggttgtatttatactgtgataaaaataggtgagagatcatatggtctaatattgtattgatggaagtataggtagtatagtagtgattgttcttcaagcatgcagtaaagatcactttttttttttttttttgagatggagtcttgctctgtcgcccaggctggagtgc

SEQ ID NO: 38138 - DNA, 445 bp, Homo sapiens
gggccctctagatgcatgctcgagcggccgccagtgtgatggatatctgcagaattcgccctttcaagcggccgcccgggcaggtacttttattttttttttttttttttttgctttttttttttttttttttggctctaaagggggtagagggggtgctatagggaaatgaaccaaaatgcaaccaagggctggggatggctttctttgttttaccacattctttcactggaaaccaaggagtctaaaagtttaaaacctggtctttcaggaggacagagaatattttattgtatagttgttttgcctgatttaaaaccttttaaatacttataccaatggtttatgggcctaaattgactgtgtctgaggccctgcaattgttaaaagtgggcctatttgttgagtgagtttcttttcttttctttttttttccattttgaaa

SEQ ID NO: 38139 - DNA, 421 bp, Homo sapiens
aattgggctctctagatacatgctcgagcggccgccagtgtgttggatatctgcagtattcgcccttagtttggtcgcggccgaggtactatgcttattacctgggtgacaaaataatctgtatatcaaactcccttgacacaaaatttacttatagaacaaacctgcacatgtactgcactttcccctcaattgatatagagtaagtcaatgttctttctcaggcaccgacgatctgtgacctgtagccctttttactttgaacaacctaaataagcattcatgtaaagttttcattacattttgccactcattctcactcgcacccactcgccatcttgacctcatttgggcattttctgtgattccaaatgaaatcttcacattttctttcccgatttaatgcagcagcagatcccat

SEQ ID NO: 38140 - DNA, 444 bp, Homo sapiens
agggcgaattgggccctctagatgcatgctcgagcggccgccagtgtgatggatatctgcagaattcgccctttcgagcggccgcccgggcaggtacaaatgcagaaatgcagtaactgcctttaaaagaaatgccaaagaaatgttatcttttaacaaaacatgtatttatattacagcagttttactacagggaccccaggtttaaaaaaaagaaaattagcacactacatataaatatgtataagaaaaatacctcttacttaaatttgtatgaaaacaggactgctccaaatatttttaaaaaaatttctccaataggtgaattgtaaagtgtttaaaactcagctaagtgctttgcttttatttaaaaagtttatttctaaaaggggaggaagtaaaataaaaatattaagatttagggttcttaatttagagcattgg

SEQ ID NO: 38141 - DNA, 474 bp, Homo sapiens
actactatagggcgaattgggccctctagatgcatgctcgagcggccgccagtgtgatggatatctgcagaattcgccctttcgagcggccgcccgggcaggtacccaccctcttcaggggtccgtgtggtcttctcaataatttcataggaatagtcaccatcttcaggggtcttggtagttttcccaatggtctcataggagtagccactgtcacttggagattttgtggttctctctatcttctcatagtaatagccacccacatctgaggtccgggtggtcttctcataagactcatagtcataatcttcttcatctggggacctggttgtttcctcaggcttttgataggcatagctaaagtcaccaggtgtcttccctccactgtccttctccaggccagctgtggacaaatctctattcaaggctagatggtgttgcattgtatcgaataacactgaggcacggaag

SEQ ID NO: 38142 - DNA, 268 bp, Homo sapiens
tacgactcactatagggcgaattgggccctctagatgcatgctcgagcggccgccagtgtgatggatatctgcagaattcgccctttcgagcggccgcccgggcaggtacgcggggattccattctctgaacatcttctgacacactgacagtgctgagcagagcaagaaaacgggcaatgctgtgagagccatggaaagactgtcctctatggcaatgatctcagggctaaggggcagaaatccttaacaggggcaccaaccaaccc

SEQ ID NO: 38143 - DNA, 476 bp, Homo sapiens
actatagggcgaattgggccctctagatgcatgctcgagcggccgccagtgtgatggatatctgcagaattcgccctttcgagcggccgcccgggcaggtacattgtttattatggttctagccatggaggaacaactgaagccccttcctgtcaaagggggagagagaaataattagctgttttagtaacagtacgaaagacttgaaacaaggggttataatgagaagaaactaacagacaatattcagtgtgagatttttcaagttctttatgaagaagccacagcatcctacaaggaagaaatcgtgcatcagctgcccagtaataaaccagaagagctagagaataatgtagatcagatcttgaaatggattgagcagtggatcaaagatcataactcttgacttataaggctagctacttaataatcactcttgttgatatctctgccgacatcatagaaattgttcaagt

SEQ ID NO: 38144 - DNA, 462 bp, Homo sapiens
ctactatagggcgaattgggccctctagatgcatgctcgagcggccgccagtgtgatggatatctgcagaattcgcccttagcgtggtcgcggccgaggtacattttagaaagtgaaatgctgtggacatttaaggtggagccactgtgagagtctagggggatagatggtagtcgtctcagaatgaaacgaatacacccctctcagagccctttccaaggatcccctccttctttcagctccttccctccacctcaatacacactcctgtcccaggaacctaacctcatctagaaataccagggccagcatgccttacacctagaggtttggttggcttcagagaaacttctggaggctaaaagcagccaagaagaatcagccactacatgctgggcctggatgaacagagcagtgagctgtggtggggctggggctggggcccaggaggagcaggcagga

SEQ ID NO: 38145 - DNA, 379 bp, Homo sapiens
tacgactcactatagggcgaattgggccctctagatgcatgctcgagcggccgccagtgtgatggatatctgcagaattcgcccttagcgtggtcgcggccgaggtacaatgcctggaatgtagcagggactaaatacagtgaacaaatgggcaaacctttaattcccaggggatctgctacatattgccttgactggtagatcatttctccaggagaaaggaagaaaccaaaagacaaaaacaatctttttaaacctcacaggattttcttagaaaaaagttttaatttatatatctagtgcaattctctttgtaaaatatatttcattaaaaaatccaaagcaaaagcccctgcatttctttattttaaaagacaaa

SEQ ID NO: 38146 - DNA, 517 bp, Homo sapiens
  misc_feature 380: n = A,T,C or G
gactcactatagggcgaattgggccctctagatgcatgctcgagcggccgccagtgtgatggatatctgcagaattcgccctttcgagcggccgcccgggcaggtacgcggggtcgccactagatttcagcgcctttggactctcctgttttcactttcccttgttgactcccgtgtggccctcgtgggagcctgttttggctgcagcggtgtctggggtgatgtggaccccggagctggcaattctgaggggattccccactgaggctgagcggcagcaatggaaacaggagggggtcgtcggttcagagagtggatctttcctacaattgctgctggaagggaactatgaagccatattcttaaattcaatgactcanaatatttttaattcaacaacaaccgctgaagaaaagattgatagctacctggagaagcaggtagtaacattcctggattactcaacagatttggacacaacggaaagacaacagttgatatttctacttggtgtgag

SEQ ID NO: 38147 - DNA, 411 bp, Homo sapiens
ctagatgcatgctcgagcggccgccagtgtgatggatatctgcagaattcgcccttagcgtcgtcgcggccgacgtactcgggacacatcaatgcagagtccgtctgtgaatttacaacacccaacacccatgagttcagtccttaagaaggaaaattgagcaagtttttaattggttggacattgcataaaagaggtccatatccaggctaactctagaaattttattctcaaacttatttggcctcgttttcttctgtaagaggaccattcttagtggcactggggaaatcttggcacccagaagaattcaactgtgctcactgcaaaaatacattggcctacattggattttgtaaaggtaagaggagccctcgtttgtgagctgtgctatgtgaaattcttatgccc

SEQ ID NO: 38148 - DNA, 444 bp, Homo sapiens
acgactactatagggcgaattgggccctctagatgcatgctcgagcggccgccagtgtgatggatatctgcagaattcgccctttcgagcggccgcccgggcaggtactttttttgtattttttttttttttttttagtttgaaatgtgtaagctttgatttaaaccaagtttacttcagtatgttaatgatgtagttaaaaatatttattgaaaggtgaattcgagtattttaatgttatacctgccattttttttcttaaagcatattctttgcatctaactgccagtgccattgtcaaaacttattttttaaatcgttgtactgatttccgaaatcaaacacccatgcttgtcccctaggaaaaagaaaacaaaaaacaaaaacaaaaacaaaacacgagtaatactgaatttaagtaaatgtatacctccaaaatactgg

SEQ ID NO: 38149 - DNA, 677 bp, Homo sapiens
  misc_feature 222, 348, 513, 592: n = A,T,C or G
ccctctagatgcatgctcgagcggccgccagtgtgatggatatctgcagaattcgccctttcgagcggccgcccgggcaggtacagagaattcctagatagccctcacccagtttcagtttctctaacgttatcatcttacattaccctgctatatttgcaagattaagaatcaacactactgttaaaaatactccagattctattcagacttcatcagttntttcattactgatctttttctgttccaggatctgatccaagaagcacattgcatttggctcacatgtctccttagtctcatgtggtctgtgattgtttctcaggattcccttattttccatgattnttacagttttgaggaatactctaaaataccccagggatattttgtagaatgtccttcaacttgagtttgctggatgttttagctcataattagattgggattatgaatttttagaaagattatctagaacaaatctgaatgacttatcactggtgacgttaattntgatcacttggtgaagacgtcatttgtcatttttctcccctgtaaagttactatgtttccctttccatactccactctntggaagtgagtcactgattttagtgaagactcacaagggagaggactgagttctacctccttgagtggagggaatttacctatat

SEQ ID NO: 38150 - DNA, 386 bp, Homo sapiens
  misc_feature 311: n = A,T,C or G
ctactatagggcgaattgggccctctagatgcatgctcgagcggccgccagtgtgatggatatctgcagaattcgcccttagcgtggtcgcggccgaggtacagctgaggtctgccttgatggtaaagttaatacagaatttggaagctgactatttttaacttgcaatgatgtatgtggtataaagttttgtttttgaatggtagaatctggtaaaaagctttgtggtgagtaacggtatagctttggaggtggtctgtaatctggggtaagtcagtcccttagatatacactgtttgtgtccaatcaancctgttgctctgaaaaagactggtttaagtccctgatttccttggtaagctacaggaagttcgtgtagaattaga

SEQ ID NO: 38151 - DNA, 561 bp, Homo sapiens
attgtgccctctagatgcatgctcgagcggccgccagtgtgatggatatctgcagaattcgccctttcgagcggccgcccgggcaggtactttttttttttttttttttttttttttaacttaattagaaagtaggctgggcacggtggctcatgcctataatcccagcacttggggaggccgaggatctcctctctggtggatcacttgagggcaggagttaggagaccatcctggccaacatgatgaaaccctgtctctactaaaaatacaaaaagtagctgggcgtggtggcatactcttacaatcccagctacttgggaggctgaggcaggagaatcacttgaacctaggaagcagaggttgcagtgggccaagatcacaccactatactctagcctgggcgacagaggtggggaaaaaagtaggacccctgtcctatattcaggtttttctcacatatatgaacccatctaaattctacgttgttaaaggtagcttaggttaattggtctatacttatttaagaccaatttggggtgagatggattttttttaaaa

SEQ ID NO: 38152 - DNA, 617 bp, Homo sapiens
tacgactcactatagggcgaattgggccctctagatgcatgctcgagcggccgccagtgtgatggatatctgcagaattcgcccttagcgtggtcgcggccgaggtactacaccacttttcctcaccaacccccatcctattcttgagttgctggatacacttgctctctggaagtgtgtccttacccttctgcagagtgaggagcaagctgttagagatgcagccacggaaaccgtggcaactgccatgtcacaagaaaatacctgccagtcaacagagtttgccttctgccaggtggatgcctccatcgctctggccctggccctggccgtcctgtgtgatctgctccagcagtgggaccagttggcccctggactgcccatcctgctgggatggctgttgggagagagtgatgacctcgtggcctgtgtggagagcatacatcaggtggaagaagactacctgtttgaaaaagcagaagtcaacttttgggccgagaccctgatctttgtgaaatacctctgcaagcacctcttctgtctcctctcaaagtccggctggcgtcccccaagccctgagatgctctgtcaccttcaaaggatggtgtcagagcagt

SEQ ID NO: 38153 - DNA, 407 bp, Homo sapiens
ctcgagcgggcgacggatatatgcagaattcgccctttcgagcggccgcccgggcaggtactcttgaagtcacaacaaaataatgatgagcttttcacatcacctttatggtttcaatccctagctcaaagcttcctggaatcttttattttttgtaaactttttttttcttttgttaaaataaataaaacattcaatgtttttctccttttctctcttattacttctttcctttggcattttcaatttgaaatgctttcctttggttgttggttttattctccccctacccctccccttttcttattattcagaatataaacctgcaaagctctgctctgttttggttttgaaagtttaagcttttctgcttctgtgagagcacaggcttttgtcccttttgattc

SEQ ID NO: 38154 - DNA, 455 bp, Homo sapiens
atagggcgaattgggccctctagatgcatgctcgagcggccgccagtgtgatggatatctgcagaattcgcccttagcgtggtcgcggccgaggtactgttaatttttttttttttttttttgtaaataacaaacaccactttgttatgaagaccttacaaacctcttcttaagacattcttactctgatccaggcaaaaacacttcaaggtttgtaaatgaccctttcctgacataaatccttttttattaaaatgcaaaatgttcttcagaataaaactgtgtaataatttttatacttgggagtgctccttgcacaaagctgtcatttgccagtgagagccttcgacagggcaggtacatttccacaaatctaagaattgccctataaacatagcaggattttgagggcttgaaaattttccattattctggacatgaatttctaaaatgcc

SEQ ID NO: 38155 - DNA, 186 bp, Homo sapiens
tgggcactctagatgcatgctcgagcggccgagcgtgtgatggatatctgcagaattcgcccttagcgtggtcgcggccgaggtacttttttctttgtttttcttgctctccaaaccacagtataacagctctttatttctgtgagttctcctaggaaatcatcaaatccgagggttgtctggagg

SEQ ID NO: 38156 - DNA, 642 bp, Homo sapiens
ctatagggcgaattgggccctctagatgcatgctcgagcggccgccagtgtgatggatatctgcagaattcgccctttcgagcggccgcccgggcaggtacaatgtaagggttttagggagcaacagtatttaactggaagaaagaattgcatatttaatgtagtctaatatatacacatttgtttaacatgtaaacaaaagtgttaaattcacatatacaacattatacaatttaatcactcttggaataaaatttttatagccttttttctattgggaaaatttgtttagatgtgtgccactccataggtttatttccaaaatgaatgagcccaactccatttgtaaaaacttgtcagttagaattcctttttttagtggattagggctgaattcttagatccttatttcttttcactttaaatgctgccaaagatcactactcatcattcaggaattcgctgtctagcctatctgtagtttcctgaagattgaaaattatgtagactgctatttaaaaatatatttttctaagtgtgaggtttaagatgctgtattgaccctatgagtttttaatgtgttaattatctttatagcataatagatcgctttaggttcctggaatcccatttggtctgaca

SEQ ID NO: 38157 - DNA, 337 bp, Homo sapiens
ccctgtagatgcatgctcgagcggccgccagtgtgatggataatctgcataattcgaccttaccctttttagcggccacccgggcaggtacagcattaaaaaagatttaatagatgggttcaaaagccaaaggcatgtatctcttgaacctaccctaataaccatacttcacaagatacattataagtccctaacacctaacctaacgcacacaaaacccacgcctgtttaccttctgcaagtcgcatcggtccgcaatcccacatattaaagcaaggtttccctttatacgcggagttttagccaggtaagctattgtatgattaaaagcaaactt

SEQ ID NO: 38158 - DNA, 446 bp, Homo sapiens
agggcgaattgggccctctagatgcatgctcgagcggccgccagtgtgatggatatctgcagaattcgcccttagcgtggtcgcggccgaggtactttttttttttttttttttttcaggtatcttaactttatttagctctctgtagaattaacatctttgcaaatatattattcaaccaagcatttgccataaagataagcatcaactttcccattggacaagtgatagtgttcaagctactcgacttgtgaaaaacaaaaaaccaccatgacttctcaacaaatacattttaaaatgaaatatgctcaggctgataaacaaacaagatattaaaatggagactgacattgaactacatagtcgacttgaaaaacacaagaagacaatgctcctataaaatgatatattattggctttacaaagacatactggtttatgtttac

SEQ ID NO: 38159 - DNA, 461 bp, Homo sapiens
ctactatagggcgaatttggccctctagatgcatgctcgagcggccgccagtgtgatggatatctgtagaattcgccctttagagcggccgcccgggcaggtacttttttttttttttttttttttttggttctggtctacgtaaacacccccatcttctcaagctttaccttctaacttctgcaccaccagaaattaaattgatgggcttttaaaataaattggttaccaataatttcctcattttttcagtgctattttatccaatttttggctttatatttttctatcttctatacttctccaatacttgtcttagcttgtttttcattttctatctgaaactcttgacaatcccgcgtacattatatgtatactcagataattattgagctgttgaaaaatcaaagtatcagagaaatttgagaagatgagactaaggatcattcatctctgaactc

SEQ ID NO: 38160 - DNA, 282 bp, Homo sapiens
actactatagggcgaattgggccctctagatgcatgctcgagcggccgccagtgtgatggatatctgcagaattcgccctttgcggccgcccgggcaggtacagcattggaaatggatctgtctttggtaaagatcagcctataattcttgtgctgttggatatcacccccatgatgggtgtcctgaacggtgtcctaatggaactgcaagactgtgcccttcccctcctgaaagatgtcatcgcaacagaataaagaagacgttggccttcataagacctg

SEQ ID NO: 38161 - DNA, 437 bp, Homo sapiens
  misc_feature 399, 417: n = A,T,C or G
cactatagggcgaattgtgccctctagatgcatgctcgagcggccgccagtgtgatggatatctgcagaattcgccctttcgagcggccgcccgggcaggtacctatatacatagattcaaacatcatttcctagatctgtccactaagagaatgtagaagcaatgacattcaaaaaccaagaagcacacctcacatccagatcttggtttctaaaaaccatatccaccaagcaaaccagggcttcttggaaaaatggctaatttcagggctgggataaggaagtgtaagaaaagtcaaaaacatcttgtttcagaaagtaagaaaagtattataaacttatgggcatttgtcccataatccatgtgaagggtcctactggccaaatctcgagcatcanaataatgatacaacccangagacagataaaccacagcc

SEQ ID NO: 38162 - DNA, 450 bp, Homo sapiens
actatagggcgaattgggccctctagatgcatgctcgagcggccgccagtgtgatggatatctgcagaattcgccctttcgagcggccgcccgggcaggtacttttttttttttttttttttttgggttataaaagcccttttataaagccatttttaaacaaaacaaaaaaaaagtttacaaaagaaaaaaagatacagaaaaaggaataacttgcttcatatgtcccaaaaagagaaaaaaataaaggggacaatgccaacatgctcaacaataaaggcttctttttcttatttttttaatacaaaatacaagcaaaggatacacatacttaaaacagagctcaggagcagacacgcagtcctggaaacccttcaataaaagcaaagcaggagtttggtttttctttgtctatgcagatacatacagagactgggatatgtaaaaatt

SEQ ID NO: 38163 - DNA, 499 bp, Homo sapiens
  misc_feature 284: n = A,T,C or G
cactatagggcgaatcgtgccctctagatgcatgctcgagcggccgccagtgtgatggatatctgcagaattcgcccttagcgtggtcgcggccgaggtactccagcctatgcaacagagcaagaccctgtctctaaaaaggttgtatttttttttaattaaaatttaaaaaatcagcctagacaaaggaaacagcaaaggaaaggaacctgtggagcagacaggagtttggcatattccagggggaaaaagaaggccaggagtgtgaatggagcatagtgaanaaaaaaataaaaaatttaaaagtacgcggggggttggacattgcataaaagaggtccatatccaggctaactctagaaattttattctcaaacttagttggcctctttttcttctgtcagaggaccattcttagtggcactggggaaatcttggcacccagaagaattcaactgcgctcactgcaaaaatacaatggcctacattggatttgtag

SEQ ID NO: 38164 - DNA, 378 bp, Homo sapiens
ctatagggcgaattgggccttctagatgcatgctcgagcggccgccagtgtgatggatatctgcagaattcgccctttcgagcggccgcccgggcaggtacattccgtttcctgtgacttaacgaaggaacattccacaacaccttcctttccattcattgcatccacaagggagaagacaaagcgggcgccggcatacgccatggagagggtggcagagcctgctccggctttagccttgaccacctccgtgccggcctcctggatccgcccagtgagtgctgccagctggtcctggggaaagtccaccttgggggtgcactgaaagatcggggggatgatgggtttcccagcatggcccccaatgacagggacgtt

SEQ ID NO: 38165 - DNA, 263 bp, Homo sapiens
cactatagggcgaatcggaccctctagatgcatactcgagcggccgccagtgtgatggatatctgcagaattcgccctttcgagcggccgcccgggcaggtactttgatgggctggagagcagggtggcagcctgttctgcacagaaccaagaattacagaaaaaagtccaggagctggagaggcacaacatcttccttggtagcttcagctccgccaaggcctgcagaacgcttaattgcctcaaaccttcccaacaaaagc

SEQ ID NO: 38166 - DNA, 179 bp, Homo sapiens
tgcgaattgggccctctagatgcatgctcgagcggccgccagtgtgatggatatctgcagaattcgcccttagcgtggtcgcggccgaggtacagggaaggcctttcgggcagggcacatggttcactgccccatgacgtgataccttgaagcacaccattacagacaagtgggccccc

SEQ ID NO: 38167 - DNA, 409 bp, Homo sapiens
agggcgaattgggccctctagatgcatgctcgagcggccgccagtgtgatggatatctgcataattcgcccttagcgtcgtgtcgcgggcgaggtacatgccacagtgtgcctctctctctttgacccattatttcagacttaaaaacaagcatgttttcaaatggcactatgagctggcaatgatgtatcaccaacgaaaatttatagtgttcaaggaaactgtgatgctcttggcattctggtaacataaaaaaagggtgacttcacacaagcagctggaaatggacaaccacaatatgcataaatttaactcctaccatcagctacacactgcttgacatatattgttagaagcacctagcattggtgggttctcttaagcaaaatacttgcattaggtctcagct

SEQ ID NO: 38168 - DNA, 105 bp, Homo sapiens
actatagggcgaattgggccctctagatgcatgctcgagcggccgccagtgtgatggatatctgcagaattcgcccttagcgtggtcgcggccgaagtactgact

SEQ ID NO: 38169 - DNA, 193 bp, Homo sapiens
ctatagggcgaattgggccctctagatgcatgctcgagcggccgccagtgtgatggatatctgcagaattcgccctttcgagcggccgcccgggcaggcaccctaacctgacaggaattaactactgattttttgtggggcagaaagcaaaacctggagttgtgacttttatcctaatggttttttaagcaag

SEQ ID NO: 38170 - DNA, 448 bp, Homo sapiens
atacgactactatagggcgaattgggccctctagatgcatgctcgagcggccgccagtgtgatggatatctgcagaattcgcccttagcgtggtcgcggccgaggtacaaatctaggcaataaaccgttcacctgggatcagttcagatgagacagtaaacagataatccaaaagacaaaaaattataagaattaatacctgcaaagaggattttccctggaaattcttttcttggtgtttccttctacaatataattttaattctgctttgtaattccagtgaaaatgtcttctattgtagttcctgctacattactatgcttactttatctgacattggctctcatctggggttctgaaaagaagctcctctagctatttcaacttattgtccctaacatttaaaacataaagataggttgagggtgaagtcttgcttttacttca

SEQ ID NO: 38171 - DNA, 362 bp, Homo sapiens
tagggcgaattgggccctctagatgcatgctcgagcggccgccagtgtgatggatatctgcagaattcgccctttcgagcggccgcccgggcaggtacgcgggggggccgcgctggtcccgccccactgtgatcgtgagactgcatacccgctaataaaatccaccccaacaatcgctgtgtgccgttttagtgcgctcgccgtcggctctacctgcgtgctttagctccttctcgcctgatccttctgtctctcccaaccccggacacccggctttgactggttatatcttcggtgttcttttcctctcttcttctttcgcggttcagcatgcaggaaaaagacaccttcttacaaggttt

SEQ ID NO: 38172 - DNA, 310 bp, Homo sapiens
atagggccctctagatgctagctcgagcggccgccagtgtgatggatatctgcagaattcgcccttagcgtggtcgcggcctgaggtaccgctgtaagactgccaagaagtcagaggaggagattgactttcttcgttccaatcccaaaatctggaatgttcatagtgtcctcaatgtccttcattccctggtagaacaaattccacatcaaacccgacagttggaggtatacacacagcggaggttgaccctgagaagtgtgagctggggagtattggtgcggcacttcccttctacaaaaattgcttg

SEQ ID NO: 38173 - DNA, 429 bp, Homo sapiens
tgcatgctcgagcggccgccagtgtgatggatatctgcagaattcgcccttagcgtggtcgcggccgacgtactgtgggagactgagcaaacactcttttggcaacttagtagaacagcttcttaaaggctttgcatgcttgctgctttaagctgctttttttttttcttttcttccctttagtgatttcagtagtttatattggaaagaaaaacaattacaacatgtgcccttacaaataccaaaagcactgtaaggatatttgtcttgacagtgtttattgatttgaagtcatattaggaaatatttagacaatgaaaattatcaagagataatttacctttcaattatgataaatagatgtgattggttgccatttgtgttcttttgcagaactctgattagaaaagtgttcaatttgtatttaag

SEQ ID NO: 38174 - DNA, 455 bp, Homo sapiens
  misc_feature 438: n = A,T,C or G
agggcgaattgggccctctagatgcatgctcgagcggccgccagtgtgatggatatctgcagaattcgccctttcgagcggccgcccgggcaggtacctagggagggcatggaagctcagtgttcttcccacacaccttgccttatgcatctctttcatctggctgatccttagttgtgttcttttacaagaatctagtaaataaacttttcctacattctatgagtcattctagctaatgctgaaactcaaagaggggattgtaggaaccttggatttatagccagttggtcagaagcaccagtgaaaacatggacatgagattggtgtccaaaactgacacaattggtgtcagttgtagaactgagcccttaacctgaagcatctatgttgatctgattccaggtagatagcttcaaaatttaattacaggcactntagtgggtgtccacaga

SEQ ID NO: 38175 - DNA, 431 bp, Homo sapiens
attgggccctctagatgcatgctcgagcggccgccagtgtgatggatatctgcagaattcgccctttcgagcggttcgcccgggcaggtactggagagctgttcacacagatgtttagacctttctctctctctctcttttcttctttctcaacaactctttcacagaggcagtcattttgaaaggttgaaatattttggcctttaccaaagagcttttttttccttaagcaaaatcctttcagaaagaaacaaatggggaagggcagattaagaatgcatatgtcccaatccacttctataggagtttaatcatattcacatgagtaaaatgatggaagaactctttaaggtaatcctttgggataaaggatcctggggaagttctctcaggtaaagaaagcttacagcagatttgtaataatatgtctg

SEQ ID NO: 38176 - DNA, 75 bp, Homo sapiens
atagggcgaattggagctccaccgcggtggcggctcgtgactgccacggaacgccgttatcagatggctgagatc

SEQ ID NO: 38177 - DNA, 425 bp, Homo sapiens
actactatagggcgaattgggccctctagatgcatgctcgagcggccgccagtgtgatggatatctgcagaattcgcccttagcgtggtcgcggccgaggtactaggccatgaactggggcactggaagttgggacatacagtcaaaaatatcattattagccagatgaattctttcctgtgtttttttttatttgctgtattaattggtcgaaaggagctttttgctgcattgggtttttatgatagccaacccactcttattggactattgatcatcttccagtttattttttcaccttacaatgaggttctttctttttgcctaacagtcctaaaccgcagatttgagtttcaggctgatgcatttgcccagaaacttgggaaggctaaagacttatattctgctttaattaaacttaacaa

SEQ ID NO: 38178 - DNA, 435 bp, Homo sapiens
ggcgaattgggccctctagatgcatgctcgagcggccgccagtgtgatggatatctgcagaattcgccctttcgagcggccgcccgggcaggtacaggacatctgcagtttataaagaattctgtttctgccaccagcagtttgacctgtagtcacacaggattttatgataataacagagatgaaaatggacttttattttctctctgtttggtgctctaagtgggtttgtagccacttttctgttactttatgattcttatttcaacaggaatggccagtaaaagttgttttatttttcctgttaaggtttataacctttttacatttttgacctgtattagattagaatttcattatgcattccttttagtcgaggcgcttcatagttttctggagatagtcaatttttagttttttattatacatttgaat

SEQ ID NO: 38179 - DNA, 448 bp, Homo sapiens
agggcgaattgggccctctagatgcatgctcgagcggccgccagtgtgatggatatctgcagaattcgcccttagcgtggtcgcggccgaggtacattacaccatgttgtccaacaagcatagctctcagggttacatggtttgttaaagtggttaaaaaccccaatcaaaggcccgtggaagttcttaagcaggggtaggttatgccagaaaaaaagtagtggctattcagctaattttctcacatttactcagtctttcccgtctgtaaaataaaaatgaatctaagttccagagaaaacaaatgggggcagtgtgagccaaggaagtgaataataataagcagaagagaaaggcagcctctgctcattggtagtcccaggaggtcggccttctgcagttgccaagcaacgagtgtaaacagcacaagatcatggccgctaactac

SEQ ID NO: 38180 - DNA, 444 bp, Homo sapiens
actatagggcgaattgggccctctagatgcatgctcgagcggccgccagtgtgatggatatctgcagaattcgcccttagcgtggtcgcggccgaggtacgcgggctttcagttctgcttgctgtccgcaccgctgcgttacccggaaccgccgggccgaacagcatgacgtccgctttggagaactgcatcaaccgaactgttgccgttattacatcagatgggagaatgattgtgggaacactgaaaggttttgaccagaccattaatttgattttggatgaaagccatgaacgagtattcagctcttcacagggggtagaacaagtggtaccagattaaataaactctggggattcatcccaattcgaactctgtaattctctgaatgaactctctcttcaattaaagccaaattattaacattttaactcaagtttaaat

SEQ ID NO: 38181 - DNA, 461 bp, Homo sapiens
actatagggcgaattgggccctctagatgcatgctcgagcggccgccagtgtgatggatatctgcagaattcgccctttcgagcggccgcccgggcaggtacgatcttggctcactgcaacctctccctcccgggttcaagtgattctcgtgcctcagcctcttgagtagctgggattacaggcgcgtgccactgcgtccggctaatttttgtatttttagtagagatggggtttcaccgtgttggccaggctgatctcaaactcctgacctcatgtggtccacccaccttggcctcccaaagtgctgggattacaggcgtgagccaccgcgctcagcctacaagcaattttttaaaaactgacacctattactgataaaattctctgtttaaaatcctatttactattttaaagaaaaagtattagttttttttttaaatacaataattctgttattgat

SEQ ID NO: 38182 - DNA, 476 bp, Homo sapiens
tttgataaacttactatatggcgaattgggccctctagatgcatgctcgagcggccgccagtgtgatggatatctgcagaattcgccctttcgagcggccgcccgggcaggaactttttttttttttttttttttttttttagtagagacagggtttcaccatgttggccaggatgatcttgatctcttgacctcatgaaccgcccgtcttggccctccaaagtgctgggatcacagggcgtgagccaccacacctggccctgtatttattctctttcaagagagagaaaactattaaaggcccaaattatttaattaaatctttaccttaccacaagggaaaaaaatggaatttgcctaatataggtgatgaagcatacacaatgaatagaaacaatcacattttagtaaaaggcaaaaatttgaaacttataagctatatggtagcttatttttgggtggggaaaaaatgagaa

SEQ ID NO: 38183 - DNA, 442 bp, Homo sapiens
ggggccctctagatgcatgctcgagcggccgccagtgtgatggatatctgcagaattcgcccttagcgtggtcgcggccgaggtacgctaaaaggtataaataaaaattccagttcatcctcctttataaagactggtaagccgctctaattctttacagttgtccatgctcaaggcatcttgctttctttcccgggtaccaatggccttcaacctgggggaccgagtgagacttcgtcttcaaaaaaaaactttgcttggatattaattttggccttacaggggatcattttagtaggaagggccattagaatttttaatcaaatggggtctggccagtaggagatgtaatattcttttctcatttcttccccacccaaaaataagctcccatatagcttataagtttcaaatttttgccttttactaaaatgggatggtt

SEQ ID NO: 38184 - DNA, 446 bp, Homo sapiens
atacgactactatagggcgaattgggccctctagatgcatgctcgagcggccgccagtgtgatggatatctgcagaattcgccctttcgagcggccgcccgggcaggtacatgttcccactcgagtgggctactaggaaaaggctttccgaaccgggaacccatttgacacaggtaactcgtgacttgtctattagtctttcctcattaaaaagtttgctagtttcttttttgattgggtctataagctggacttggcctgcggaaaagcccactaggagagagacactttctgctgtggctgttaggtggttgaagtcatgacaagtaggctgtgttcctttgtatatccttttatctattggtttactcaagtcagcagccttgcggacccccttgtagatatagaagtacctcggccgcgaccacgctaagggcgaattccag

SEQ ID NO: 38185 - DNA, 448 bp, Homo sapiens
tatagggcgaattgggccctctagatgcatgctcgagcggccgccagtgtgatggatatctgcagaattcgcccttagcgtggtcgcggccgaggtacctgctgctcaagcctctcgcgggcccagtccagcttctcggccacagtgcctccgttcacctggatctccatcaggtgggccttcttctggcgcagaggaaggcaggcgcatctgggtgtgggcaatgacacggatgacttggcagtactctcagaggagcagtggaaccagacagatatgtcattctgggaggtcaccgggactcatgggtgtttggtggtattggcccttaaagtggagcagctggtgttcatgaaattgtgaggagctttggaacactggaaaagggagggtggagacctataagaacaattttgtttgcaagctgggttgcaaaaaaatttggtct

SEQ ID NO: 38186 - DNA, 477 bp, Homo sapiens
ctatagggcgaattgggccctctagatgcatgctcgagcggccgccagtgtgatggatatctgcagaattcgccctttcgagcggccgcccgggcaggtactgcttccaactgtctacgttccagtgcagaatctttgctaaaaaaaaatttggcaatagtgtgcacaggaaaactgaatcaaacctggaacatcactgctttcttgaaatggaactgacaagcaattaactggagaataagcgaggggaatggagcagtagtattctttaacttaatttgccatttaagagagcacttggaatctgaagaaagtctatccctaccaaggaaacggagtcaaattgcaattaagattaactttggttatggaagcaagaatcatgcttctcatcatcaattgcatctctttggtagccaataattccatctgtaatcatggcagcaacttaagtattgccaatgttttcaaatgtgt

SEQ ID NO: 38187 - DNA, 452 bp, Homo sapiens
agggcgaattgggccctctagatgcatgctcgagcggccgccagtgtgatggatatctgcagaattcgcccttagcgtggtcgcggccgaggtacgcgggaccctgggaggaagccgactaggcgaattcacttactgaccggcctgggctgctctgagacatggaggaagccagtgaaggtggaggaaatgatcgtgtgcggaacctgcaaagtgaggtggagggagttaagaatattatgacccaaaatgtggagcggatcctggcccggggggaaaacttggaacatctccgcaataagacagaggatctggaagccacatctgagcacttcaagacgacatcgcagaaggtggctcggaaattctggtggaagaacgtgaagatgattgtccttatctgcgtgattgtttttatcatcatcctcttcattgtgctctttgccactggt

SEQ ID NO: 38188 - DNA, 391 bp, Homo sapiens
gaattgggctctctagatgcatgctcgagcggccgccagtgtgatggatatctgcagaattcgcccttattgtggtcgcggccgaggtacacaataactattcaataaatattagctctataataaacaagggattaaaataataaaaaaaaaacaaacaggagaacccaaaatgaagggaaaaacttagagctaatttcctagagtatgtatttaaatggaaagtcggagctcacagagagcagtcaggaattctgcattttctggatctatcttttgtgccttctcatagtacgcgggcaggattattggaaatttgttataatgaatgaaacattttgtcatataagattcatatttacttcttatacatttgataaagtaaggcatg

SEQ ID NO: 38189 - DNA, 438 bp, Homo sapiens
atagggcgaattgggccctttcatgaccggtcgagcgggtcgatggatatatgcataattcgcccttagcgtggtcgcggccgacgtactttttaactctctcgttaagagatgaccagagctggggatgcgggcacctgtcttccaggccctcttgctgtgtggccgcaggctggtggttcagcctcttaactcggacatgaggaaactgaaaaacagagtagcagctcagactgccagagatcgaaagaaggctcgaatgagtgagctggaacagcaagtggtagatttagaagaagagaaccaaaaacttttgctagaaaatcagcttttacgagagaaaactcatggccttgtagttgagaaccaggagttaagacagcgcttggggatggatgccccgggttgctgaaaaagaggcggaagccaacgggaatg

SEQ ID NO: 38190 - DNA, 460 bp, Homo sapiens
gcgaattgggccctctagatgcatgctcgagcggccgccagtgtgatggatatctgcagaattcgcccttagcgtggtcgcggccgaggtacatcataaataatacattaaagtaggtcagcctcttacaatgtgtataccttcagacttctaccaaaatcgtaaaactgattttttgactaaatatcaaaggtaagagaatgaaggcttcatttattcagtcatgagacggaatcatatgtgcagtcttagaggtttctaggtatttgtcttatgtctcagttttcatatctcttcgtccccatttaaaaaaaaaataggtgaagagtcatgaaacatttaaaaagaaagtttaaaagcaactgttaaaggctttaaaagattagtatgcagttgtttctctctttctagtcaactctgttatattctataagcaaaacacattttcagaaatgaaaaa

SEQ ID NO: 38191 - DNA, 207 bp, Homo sapiens
acgactcactatagggcgaattgggccctctagatgcatgctcgagcggccgccagtgtgatggatatctgcagaattcgcccttagcgtggtcgcggccgaggtactacccattttaattacacagttaacagaagcacgggtaagtgacatactcatactttaagcaataagaattagaagaaactcatataagcttggggcctt

SEQ ID NO: 38192 - DNA, 472 bp, Homo sapiens
atatagggcgaattgggccctctagatgcatgctcgagcggccgccagtgtgatggatatctgcagaattcgccctttcgagcggccgcccgggcaggtactgaacaatgccaagcacatgaggagaaaggcatagaggaactgagtgatccctctgggcccaaatcctatagtataacagagaaacactatgcacaggaggatcccaggaatgttatttgtagcagctgttgatcatagtagtttaggagatatgtctttgttacccagctcagatcctaagtttcaagggacttggagtggttgagttcagcagtaacctgcaaacaacacagaaataaagcttattccgtatttgtagtccactctcaagtgctaatgaatatattgcaagcacagacactttaaaaacagaagaagtattgctgtttacagatcagactgatgatttggctaaagaggaaccaacttt

SEQ ID NO: 38193 - DNA, 475 bp, Homo sapiens
tacgactactatagggcgaattgggccctctagatgcatgctcgagcggccgccagtgtgatggatatctgcagaattcgccctttcgagcggccgcccgggcaggtacaaatctttggcctttctcttgacattttcgtatgtcaaaaagcaaaaaaccttcatgtatttcaatctagtgattactttttgcaccataatttgttttttacaccacaaaaggaggcactttcagtatctgtaaaaggtatttaatcctaaaacatacttacctagagaataattaaaacagaattcaatacaatctagtatctattaggaaattaagagttatcacttctaaaagtcatttgaaagtcaatgatgttatctggtcaatggcaggaaatgggaactggaacaaatataagaacttatgggatttcctacacggagacaaaaaaagatattcctttatgttggttaaaagtggcag

SEQ ID NO: 38194 - DNA, 562 bp, Homo sapiens
atacgactcactatagggcgaattgggccctctagatgcatgctcgagcggccgccagtgtgatggatatctgcagaattcgcccttagcgtggtcgcggccgaggtactctttttttttttttttttttttctttttttattttttttttttttttttttttttttttttttttttttttttttttttttttttttttttttttcaaactttttaaaaaattaaaactaacgccgggaaaaaaagggaaaaaagggggagggtgacaaaaaaggaaaacagggccaaaaggggtgggggcccccaaaaaccccattatttgggtttaaagccccaaacccaaggggttttgggccaaaagcccccccccccgggttcccccccccccgaaataattttttaaaaaagcccccaaaaaaaaaaattggacacgaaacaaaaaaaggggttcctaagaaaaaaaaaatattacccccctcttttgttggaaaaaaaaaattttgttattaaaaaaaataacccccctttggggaaaaaaaaaaaaaaaaaagttgaaaaaaaa

SEQ ID NO: 38195 - DNA, 495 bp, Homo sapiens
ctactatagggcgaattgggccctctagatgcatgctcgagcggccgccagtgtgatggatatctgcagaattcgcccttagcgtggtcgcggccgaggtactatacccttcccctaaacttctttcattgatgatacacagaattcctctatttttgcttgaaaatagtcctttagattggagtagccttttcttagatccctctatggttccatgagatgaggtgatacctgcaaagcacttttaaagatatttttttaggctaatgtccaagatacagcattgaggaggcagctatgtctaatgagggctctcttgtttgctagagatgagagaaatgtatactaatcattttaatttgtacctgcccgggcggccgctcgaaagggcgaattccagcacactggcggccggtactagtggatccgagctcggtaccaagcttggcgtaatcatggtcatagctgtttcctgtgtgaaattgttatccgctc

SEQ ID NO: 38196 - DNA, 438 bp, Homo sapiens
gaattgggctctctagatgcatgctcgagcggccgccagtgtgttggatatctgcattattcgcccttagtttggtcgcggccgaggtaccaagcttatgagtggatgggagtgttacttttctttaaatgaaaaatgctgaccaaagcctaatcggaaaaaaaggaaaaattaaaaataaaaacaaactgaaggatatatgccaagataaaccaaaattaatgcagtgatcacagcacagttcttaaacaaaagtggcatacaatctaaaaatatctctttttctagaaatactattatgtaatctagttcaattatggaagcttttctgtcctgactctaaactgtctcctttattggatactctaattgcagtggcttacattcatttttttttttgagaagggactcccttccttctgtagctcctttaatatt

SEQ ID NO: 38197 - DNA, 435 bp, Homo sapiens
atagggcgaattgggccctctagatgcatgctcgagcggccgccagtgtgatggatatctgcagaattcgcccttagcgtggtcgcggccgaggtacatttttattttgtttagaagacaactttgattcaatctttcaagaactgttccattcttggtttcttcttagggggataaaaagttaccagttaatttgttttgagatatttaagcattctttgagttatagaattgtgatgcagggatttgtgaatgagacatttacatgtgaaaggtgacttcactagttacctgcttgagcagagtaaagtgtgtatatgtacacctcattgggatcaatgaaaagcttcaagaaatcttcaggctcactctcttgaaggccacagccacggtccccaccggacttccagccttgcagtccctgttcctgtagcc

SEQ ID NO: 38198 - DNA, 586 bp, Homo sapiens
ctatagggcgaattgggccctctagatgcatgctcgagcggccgccagtgtgatggatatctgcagaattcgccctttcgagcggccgcccgggcaggacgcgggggatcgaaggggacttgagactcaccggccgcacgccatgagggccctgtgggtgctgggcctctgtgcgtcctgctgaccttcgggtcggtcagagctgacgatgaagttgatgtggatggtacccgatagaacatggcatcatcaccaactgggacgacatggaaaagatctggcaccactctttctacaatgagcttcgtgttgcccctgaagagcatcccaccctgctcgcggaggcacccctgaaccccagggccaaccgggagaaaatgactcaaattatgtttgagactttcaatgtcccagccatgtatgcggctatccaggcggtgctgtctctctatgcctctggacgcacaactggcatcgtgctggactctggagatggtgtcacccacaatgtccccatctatgagggctatgccttgccccatgccatcatgcgtctggatcttgctggccgagatctcactgacta

SEQ ID NO: 38199 - DNA, 455 bp, Homo sapiens
ccctctagatgcatgctcgagcggccgccagtgtgatggatatctgcagaattcgccctttcgagcggccgcccgggcaggtacatttaatatgattcaatataatctgcagtctcatgtatggcttatcaataatgccatcatcactgtatgtcaaacaacctcactgcttactagaaatgctaaacactggaaaaaatggaattttatacatttgttttcttaaattttgacagatattcttcagaaagttaaaactgccttccacaaaattttgtgtgtatatggcacaaggtgacagccaaaaagtgtgattccatcgaaaaggcactgttaacaatactcaaaataatctgacaagtctacatcaatgtctgagtaaagaataggtaaatagacaaacccctataaaagatagtattattgcttaaatatactatagctatttaaaaaga

SEQ ID NO: 38200 - DNA, 173 bp, Homo sapiens
ctactatagggcgaattgggccctctagatgcatgctcgagcggccgccagtgtgatggatatctgcagaattcgccctttcgagcggccgcccgggcaggtactttttttttttttttttttttttttgggcctttataagagaatttttattgttaattatttaccttaat

SEQ ID NO: 38201 - DNA, 413 bp, Homo sapiens
ctagatgcctgctcgagcggccgccagtttgttggatatctgtagaattcgcctcgtgcttggccgcggccgaggtacacataggtataaacaacataaaactgacttggaagcgattcctcagcagtgccccattgatctgccctgccaagtgactggctgccagtgcagggcttacctttatgtccccttgaatggtagccagcccattcgctgcaggtgcaaacactttgctgatcagcacagtgctgcgcctggctttacatgcaatacatgttccaagtgttcaggattccatagctgcttcacttgtgcttgtggtcagcctgcatatgcccatgacacagtagtggaaactaagcaagaaagattggctcaggaaaaaccagtgggacaggacattccttatgcat

SEQ ID NO: 38202 - DNA, 466 bp, Homo sapiens
taatacgactcactatagggcgaattgggccctctagatgcatgctcgagcggccgccagtgtgatggatatctgcagaattcgcccttagcgtggtcgcggccgaggtacatagtgtcgcgaactcaaatcggcatttagatagatccagtggtttaaacggcacgtttttgcttataaaaaaagtgcaaaaaagatgtggtttacaagttaaagctacagaatccctttttgctgtaattgcaccagttttaaagcctctggacagagcagtatttcgtttaaaactttgtttttcttaaaagcttacagtgtttggctaattctcctcccctttttacaagacgggggccggagggtggacactggtggcaggttaagggatactgtcactttaagaagcctgcagattgaagtgtaaacatggagaaattaggggctgattttttaaactgtgtgagatatt

SEQ ID NO: 38203 - DNA, 434 bp, Homo sapiens
gcgaattgggccctctagatgcatgctcgagcggccgccagtgtgatggatatctgcagaattcgcccttagcgtggtcgcggccgaggtactagaaattataaatagtagttatagagactttaaattctgttgtattcctttgaagagcattgttacttgaagaggggttaatctgactggattcaaacagcaatacctacctcccctacagtggacacagttgaaatcctcattcggtgaacacacacacgcatgtattgtatatagttgtgcatttctgtgtaactatatatattttatccagattttctcgttacctgtgagagtgttcaacaagctactctagcattactgaaagttagaaccttagttttgtttgcttattggatttgaatacataatgcctttgttttctttttgtaacatttttc

SEQ ID NO: 38204 - DNA, 176 bp, Homo sapiens
tatagggcgaattgggccctctagatgcatgctcgagcggccgccagtgtgatggatatctgcagaattcgccctttcgagcggccgcccgggcaggacactgttacatctttacagtcttgtatgttatagaatacaaaataagttgatggttttggtttggtgtgagctttttt

SEQ ID NO: 38205 - DNA, 168 bp, Homo sapiens
ccctctagatgcatgctcgagcggccgccagtgtgatggatatctgcagaattcgcccttagcgtggtcgcggccgaggtacctcattagtaattgttttgtcgtttcattaatttataatgttttttttttaccagctcacctgagataacagaatgaaaatggaag

SEQ ID NO: 38206 - DNA, 457 bp, Homo sapiens
actatagggcgaattgggccctctagatgcatgctcgagcggccgccagtgtgatggatatctgcagaattcgcccttagcgtggtcgcggccgaggtaccacaatttataaagaaaccaatgatctcaggagatatttttggtctgtcttccctgaaataagaattgtgttttggaaatctaaagggtgttctgttccaaaatcttaagttattagttatttccacatcaaatagcaaacactacaatacagccagggaaagaggatcttccaaacaaacaaaaaaggtatgttttctagattgctccactactaaatgagaactttttttttgaggcataattataaatcaagttcttgatcaattttacaaatctttcccggtgacaagctcatatttccaataaaaagtgctcttttgctttcctaaggccacactaaatctccctggggtca

SEQ ID NO: 38207 - DNA, 447 bp, Homo sapiens
tagggcgaattgggccctctagatgcatgctcgagcggccgccagtgtgatggatatctgcagaattcgccctttcgagcggccgccccgggcaggtacttttttttttcttttttttttaaaaacagctttattgaaatataatttacatgatttattggagtaaatttacatataatttacatacacataattcactcaattcaataatgtttagtacaggttcaaatattatcttttttttcccaccaacctcttttccaggaaaatgcaaagctactctttagccaaattttaaaacaggggatatttattttgggaatcattaatacccatctgccccttttttggtccattggacatattgaaatgaatgattaatacttatcacttcatggtgtacctcggccgcgaccacgctaagggcgaattccagcacactggcgg

SEQ ID NO: 38208 - DNA, 201 bp, Homo sapiens
ctactatagggcgaattgggccctctagatgcatgctcgagcggccgccagtgtgatggatatctgcagaattcgccctttcgagcggccgcccgggcaggtacttttttttttttttttttttttttttccttttttttttttttttttttttttttttttttttttttttttttttttttttttttttttttttttaaa

SEQ ID NO: 38209 - DNA, 452 bp, Homo sapiens
tacactactatagggcgaattgggccctctagatgcatgctcgagcggccgccagtgtgatggatatctgcagaattcgcccttagcgtggtcgcggccgaggtactgtatttctcatgctggatttcaaaaaaaaaaaaaagtatcaaaaacaaaaaaaactaaagggtggtgttttattggattgtgacaggttgagtaataaggaattaagtcgtcgccatttcattaaaactgagagatgatgtaatgcatatataagagttttctgaagggttttttttgggcttttaaacagcttatttttgttattgtttagtttttttatttaattttattttggaaagatatgattgtattatgtgcaacttagttgcttacattataactacaaaatatttttgggttcctggtgaaaacataagaagaaaaacgactctttaatgtgtttg

SEQ ID NO: 38210 - DNA, 473 bp, Homo sapiens
actatagggcgaattgggccctctagatgcatgctcgagcggccgccagtgtgatggatatctgcagaattcgccctttcgagcggccgcccgggcaggtacatacaaaatctgaaactgacactgtcagttctatactttgcacacgtgaagtgtcagaatattttcctcagtagtacctcggccgcgaccacgctaagggcgaattccagcacactggcggccgttactagtggatccgagctcggtaccaagcttggcgtaatcatggtcatagctgtttcctgtgtgaaattgttatccgctcacaattccacacaacatacgagccggaagcataaagtgtaaagcctggggtgcctaatgagtgagctaactcacattaattgcgttgcgctcactgcccgctttccagtcgggaaacctgtcgtgccagctgcattaatgaatcggccaacgcgcggggagaggcg

SEQ ID NO: 38211 - DNA, 596 bp, Homo sapiens
ctatagggcgaatcgtgccctctagatgcatgctcgagcggccgccagtgtgatggatatctgcagaattcgccctttcgagcggccgcccgggcaggtacagacataaaacaggaagggttctaaatatatttgctggtcatttgaaactcaatggcacttgttatatgagcaaaagccttcaacaccagttttctggccaagtttccctagaattttgccagccaaattaacttcctgatgttaactatttgattacaatatctcagttcccgacctaaactaatattgtctgttttcacatagctcttaaaaacatttctaaatctgacagcaaaggacagcacagtgatacctgggtgtgatatatatcagtccactcaatttataaagcactttgggataaaaggtgctcccattaaaaatgtagctactattgacagataaaactgaaaaagagtgaatggatgactcaattatttttaaaggaagcattaaccactaaccagataatataccaacaaattacccagcagcactaagtataccatgtaagattcagttccagaacacagctacatttctgtgtccatcac

SEQ ID NO: 38212 - DNA, 425 bp, Homo sapiens
  misc_feature 317: n = A,T,C or G
gaattgggctttctagatgcatgctcgagcggccgccagtgtgttggatatctgcagtattcgccctttctttcggccgcccgggcagatacaaagaactctcaaaccggatagtaagaaaacaaacagcccaagtgaaaagcaggcaaaagacttgaatagacgcttcaccaaagagcatacacgcgtggcaaacaagcacacgaaaagacgttcagccgccgatggcttggttataatttataacttacttatttttatctaataattgtagattcagtgtatttcttcaaaaaatgtttaattaaatgcatgtntaatggtgagtgaatcccttgggtgactttcgtgtttagggtcgtattagggcattttgttggatcaaacggatcattttaaccctgactttcccttattcccataaa

SEQ ID NO: 38213 - DNA, 179 bp, Homo sapiens
actactcactataaggcgaattggagctccaccgcggtggcggccgaggtacgcgggggagagtagtggttctcccagcacccagcacgcagctggagatctgagaacggacagactgcctcctcaagtgggtcccagaccctcgagtagcctaactgggaggcacccccaagtagggg

SEQ ID NO: 38214 - DNA, 444 bp, Homo sapiens
gcgaattgggccctctagatgcatgctcgagcggccgccagtgtgatggatatctgcagaattcgccctttcgagcggccgcccgggcaggtacttccccctcatctccttgggtaatggcaccgggctggggcagggcacctgcccttccacttcacagatgcactcccgcaggcagtacgcgggatctgtaaaaggtttctccctactgtcaaaaaaatatgcatgtatagtaattaggacttcattcctccatgttttcttcccttatcttactgtcattgtcctaaaaccttattttagaaaattgatcaagtaacatgttgcatgtggcttactctggatatatctaagcccttctgcacatctaaatttagatggagttggtcaaatgagggaacatctgggttatgcctttttttaaagtagttttctttaggaact

SEQ ID NO: 38215 - DNA, 151 bp, Homo sapiens
ggcgaattgggccctctagatgcatgctcgagcggccgccagtggtgatggatatctgcagaattcgccctttcgagcggccgccccggcaggtacagtcatggatgggcaacaactgtgggggtgttctggtgcacccccagtgggtgct

SEQ ID NO: 38216 - DNA, 450 bp, Homo sapiens
gactactatagggcgaattgggccctctagatgcatgctcgagcggccgccagtgtgatggatatctgcagaattcgcccttagctggtcgcggccgaggtaccttctctccttccctggctctgaacatcattcagaacaggaacatggggaagccagcccagcctgccctgagccgggaggagctggaagcactcttcctcccctatgacctgaagcggctggagatgtattcacggaatatggtggactatcacctcatcatggacatgatcccggccacctctcgcatctatttcctgaaccagctgggggacctggccctgtctgcggctcagtcggctcttctcttggggattggcctgcagcataagtctgtggaccagctggaaaaggagattgagctgccctcgggccagttgatgggacttttcaaccggatcatccgca

SEQ ID NO: 38217 - DNA, 432 bp, Homo sapiens
ggcgaattgggccctctagatgcatgctcgagcggccgccagtgtgatggatatctgcagaattcgccctttcgagcggccgcccgggcaggtacgcggggagagcacatccggtgttagaagcgctggataggccttgttagaggcgggttaggaagagtggagactgctgcacggactctggaaccatggacatatttgatcgaaagatcaactttgatgcgcttttaaaattttctcatataaccccgtcaacgcagcagcacctgaagaaggtctatgcaagttttgccctttgtatgttttgtggcggctgcaggggcctatgttcatatggtcactcattttatttaggctggcctgctgtctgccttgggctccctgatattgatgatttggctgatggcaacacctcatagccatgaaactgaa

SEQ ID NO: 38218 - DNA, 370 bp, Homo sapiens
gagcggccgccagtgtgattgatatctgcagaattcgcccttagcgatgtcgcggccgaggtacggtagcagccttcagctgtctggaagccctcccaagtcaggccctcttggatcatggtagctgccagcccgtagaccacacccacccagacttcatcagactgcacactggatttatcagggacaccatggggctgcatcccattcacagcccccatggcccctcctgcaaaggcctggacgttcagctcaaagatagtttggagagcacggaccacatgttgggtaggaaacacctcagtgtctccttctcttaggccacaggccttcaggaaccactgtccaacacactggtcagacataacac

SEQ ID NO: 38219 - DNA, 378 bp, Homo sapiens
  misc_feature 42, 55: n = A,T,C or G
ctcgagcggccgccagtgtgatggatatctgcagaattcgcncctacgagcggcncgccgggcaggtactttatttatattatattagtatttgtatatatatgtatatatttttatttaaatgatgttttaatttttttgataggggatttttagatatgtgtttaattaataataaaaagctaaatggagttaaagaggaaaagaaatttagaaatgaaaaaaagaaacggaactttaggagagggaaaagaaaaaaaaaaatgatctcacaaaaaaagagtaattaaaaggggggaagatggggatgaaattgggagaaaagcaaaggggggggaaaaataaaaaggctttaaaaggaaagagaaagaaaaggat

SEQ ID NO: 38220 - DNA, 461 bp, Homo sapiens
cactacttagggcgaattgggccctctagatgcatgctcgagcggccgccagtgtgatggatatctgcagaattcgccctttcagcggccgcccgggcaggtacacttaaaaatggttaaaatggtaaatgtttaaaatggcaaatatgtatttatatattttaccacaatagagaaaatcaagtctttaaaaatgatagcccctatgtttttatgcttacctaaataaaccatatttaatatttggcatataagctaatttgatagagcacgaattgctatgtttataataagcatgttggactgaatttcatcatttattagaatgtgcatataagaaagatacttgtatttgtaggcctctgaaaaacatctaggtaggtagagagccttgactcaccttgccgaaggtcctgaagaatggaaaaaagaaaaatgaatcttcatatcggtttttcacc

SEQ ID NO: 38221 - DNA, 445 bp, Homo sapiens
ctactatagggcgaattgggccctctagatgcatgctcgagcggccgccagtgtgatggatatctgcagaattcgccctttcgagcggccgcccgggcaggtaccacaaggagccactgggtttctcatttgcatggctacattggggaccatgctgttcagtgcaatcagtaatatagggagaggagcagggaggtgaaagaaagagaagataatgagttggattttgaacctcttgagctttaaatatctaacgttcatctaaagcaatatagcccataggcagcatctattggaaattaataaaaataagggtctaggcattcaggttagtggtggggatgggaagtaaaagacttgagagttcgttgaaatttcttgtggggagaagtccaaagcaacagtagcagagagaggatttggtaagcgaatgtgtttggagaaa

SEQ ID NO: 38222 - DNA, 444 bp, Homo sapiens
  misc_feature 188: n = A,T,C or G
gggcgaattgggccctctagatgcatgctcgagcggccgccagtgtgatggatatctgcagaattcgccctttcgagcggccgcccgggcaggtactttaaagaaaaactatttttactagtttatctgaatggtctgtggactttatttagaaactgtttttcagtttagttttttggacatatccnttgctcagtgtattttgttacttctctagtaaaggtagaagtgaagcagatgccattgtaggttttaccagcatttaaatatattatgaattgcttagcaatgaaatgcaagtatgcatcttttacttaaagatactatttatgtattcagctgcagagatgaaatagcattttatgtgttaattgttttggctataaaatttaagtccttacagcatttggggattatacacttggatttcaaaattgataaaac

SEQ ID NO: 38223 - DNA, 424 bp, Homo sapiens
tatagggcgaattgggccctctagatgcatgctcgagcggccgccagtgtgatggatatctgcagaattcgccctttcgagcggccgcccgggcaggtacgcgggggatcctgaactgggttaggtgccgctgttgctgctcgtgttgaatctagaaccgtagccagacatgggactggaggacgagcaaaagatgcttaccgaatccggagatcctgaggaggaggaagaggaagaggaggaattagtggatcccctaacaacagtgagagagcaatgcgagcagttggagagatgtgtaaaggcccgggagcggctagagctctgtgatgagacgtgtatcctctcgatcacatacagaagaggattgcacggaggagctctttgacttcttgcatgcgagggaccatttgcgtggcccaca

SEQ ID NO: 38224 - DNA, 405 bp, Homo sapiens
gactcactatagggcgaattgggccctctagatgcatgctcgagcggccgccagtgtgatggatatctgcagaattcgcccttagcgtggtcgcggccgaggtacaccaaaaagagaactttgtgatccgttggtaagatagtatccacaagtaagcacttgtgttcactgttttttgttccacactagaatacacccagttggataccagagttatttacagacatctgaggaagatcctagttttcaagtctgtcaggaaaatattccatattgttttaagccagatcatacccatggaaaaatagagaatggttttctttctttttctttctgaccaatacatgctcaagaaatcaaatatctgagatacacaaattgaacgcggtagggtgggggaggaag

SEQ ID NO: 38225 - DNA, 557 bp, Homo sapiens
  misc_feature 354: n = A,T,C or G
agggcgaattgagccctctagatgcatgctcgagcggccgccagtgtgatggatatctgcagaattcgccctttcgagcggccgcccgggcaggtacatgaacctccaaggaagatagagcgatttactcttctccaatcagtgcatatttacaagaagcacagagttcagtatgaaatgagaacactttacagatgtttagagttagaacatctaactggaagcacagcagatgtctacttggaatatattcagcgaaacttacctgaaggggttgccatggaagtaacaaagacacaattagaacagttaccagaacacatcaaggagccaatctgggaaacactatcagangaaaaaaaaaaaaaaaaaaaaaaaaaaggtacgtggggacaaccttagccaaaccatttacccaaataaagtataggcgatagaaattgaaacctggcgcaatagatatagtacttttttttttttttttttgctcatagataaggacaaggggttggttaaatctttactcacagtaatttaccaagaacttcaaatactgg

SEQ ID NO: 38226 - DNA, 284 bp, Homo sapiens
ctcgagcggccgccagtgtgatggatatctgcagaattcgccctttcgagcggccgcccgggcaggtacttttttttttttttttttttttttatcttcgctgttgctttttcacatacattttaaagtgagagatattattttaaaattttagagggtgagcatcaaatatcattggggtttctgcaatcagtataaattatgcaggagggccacttaaatgggatcatttacaactgctcacattacattttggttttatttaaacaagtgctaatttaacc

SEQ ID NO: 38227 - DNA, 483 bp, Homo sapiens
agggcgaattgggccctctagatgcatgctcgagcggccgccagtgtgatggatatctgcagaattcgcccttagcgtggtcgcggccgaggtactaatgtgaggaaacaaacatgttcaggccccgaacatttccggtgctgactcggccttaaacgtttgtgccataatggaaaatatctatctatctgttctcaaatcctgtttttctcatagtgtaaactcacatttgatgtgtttttatgaaggaaagtaaccaagaaacctctaggaattagtgaaaaaagaacttttttgaggtgtgttactatactgctgtaagttatttattatataaagtattgtaaatagaatagtgttgaagatatgaaatatggctatttttaatggtgacaattatgacttttagtcactattaaattggggttacctatatcagtacctgcccgggcggccgctcgaaagggcgaattccagcacact

SEQ ID NO: 38228 - DNA, 325 bp, Homo sapiens
agggcgaattgggccctctagatgcatgctcgagcggccgccagtgtgatggatatctgcagaattcgcccttagcgtggtcgcggccgagggactttttttttttttttttttttttttttttctcgatgtctgatatattatttttattataaaaacatagaataattttcatacataattcagacatgatcttagccaggaaaaattaaataacacagcacagcatggatgagggaaaagtatgcacagtccgtgtcagggttagaaaaccctgaaagaggtaccttgctggctcagctacatacataaggccttaagcctt

SEQ ID NO: 38229 - DNA, 430 bp, Homo sapiens
tacactactatagggcgaattgggccctctagatgcatgctcgagcggccgccagtgtgatggatatctgcagaattcgcccttagcgtggtcgcggccgaggtaccagagatggcaccttttttctaggtaaggtgtaggaattcctcaatggtcttgcttcgtaaaatttaacatatcagaactggggaaagagaaaggagggggttatttttttgcagcattttccagtcacatatcagggttatactgaactgcaacaaagatcaacttttaaaaattagccttcttaaaatacaaaatgatttaagtattttaaagataatttatttgccttgctcttgccttctaacattagccatttcatggagaggctaaaacttatactccaaaaaatgtggaagcacattttaatgggagtaaaattaaa

SEQ ID NO: 38230 - DNA, 470 bp, Homo sapiens
atacgactactatagggcgaattgggccctctagatgcatgctcgagcggccgccagtgtgatggatatctgcagaattcgccctttcgagcggccgcccgggcaggtactcaggatagatttggttggcatcaaaaaccacaaagatctttgggttccaggtatcatccacacagctgtcatataaattcacatagctcccgtctttggaaggaggtcgcatgtatttggagtctccgtttatgtaatctccaattagcactcgagcaagaaacatagatttatatgttctaaacagatgccgctgttgcaagctgacaccatgaatttggaatgtgttcccatgctttatgtcatctttgcagaaacgactggaataagcagcatctctagcaaaataggttccttttccaaagacagcaccatgtataccatttattctccaatcaaagttatgaatgcagattgct

SEQ ID NO: 38231 - DNA, 471 bp, Homo sapiens
atacgactactatagggcgaattgggccctctagatgcatgctcgagcggccgccagtgtgatggatatctgcagaattcgccctttcgagcggccgcccgggcaggtacagagggacagattctgatggtgctgggaatcatccaaggttttaaagaccattgctaccatcccatgtgctctcaggtgcattcgaaaactgggcatggcacatttagtagccaagctaataacactaaggcaacgtgtgtttagaggctgagtgctctttaagccacttaacaagtacatttttgttgtagattattttaaacataatgctatagtaatattttgaagatttgagctgttatttccatttgtttttacactgtgactaaatgattaggttttagttttagactctaaatggaacctgaattaataggaaataaacacggtacctcggccgcgaccacgctaagggcgaat

SEQ ID NO: 38232 - DNA, 435 bp, Homo sapiens
tacactactatagggcgaattgggccctctagatgcatgctcgagcggccgccagtgtgatggatatctgcagaattcgcccttagcgtggtcgcggccgaggtaccctgcgctggctccgtgaaccttagggacaacaccgggacacccgcgaggccggaaaatggactcagtggcttttgaggatgtgtctgtgagcttcagccaggaggagtgggctctgctggctccttcacagaagaaactctacagagatgtgatgcaggaaacattcaagaacctggcatctataggggaaaaatgggaagacccgaatgttgaagatcaacacaaaaaccaaggacgaaatctaagaaaccatacgggagagagactctgtgaaggtaaagaaggtagtcaatgtgcagaaactttcagtcccatcttcagtgtgac

SEQ ID NO: 38233 - DNA, 385 bp, Homo sapiens
  misc_feature 197: n = A,T,C or G
gactcactatagggcgaattgggccctctagatgcatgctcgagcggccgccagtgtgatggatatctgcagaattcgccctttcgagcggccgcccgggcaggtaccagagtcaaggtgccagggtcctgggagcaacaaatgcattcccattgatttattgttgaaaaaccctctgatcagcctaccccaaggcncctgccctaccctgccttgcctcacctacatacgttcagtttgtaattctttttccttttgctgcacaataactgcttccgtttacctttttcacgggagactctggcttggaaatctccaaaatgcatactttatctgtgttgtgggtttgtttagtatctcttcaagactcacttgctgacttcct

SEQ ID NO: 38234 - DNA, 342 bp, Homo sapiens
ctactatagggcgaattgggccctctagatgcatgctcaggcggccgccagtgtgatggatatctgcagaattcgccctttcgagcggccgcccgggcaggtacagattatggaaaatatgaaggactaacaaagaattacacggattatttatcccgactatatgaaagagaaatcaaagatttctttgaagttgcaaagatcaagatgactggcacaactaaagaaagcaagaagtttgctacactgcctcgaaaagaaagtgctgtcaaacaggaaccagagagtcttcatggaagttcggggaaattaactggatctacttctagtctaaataagctc

SEQ ID NO: 38235 - DNA, 545 bp, Homo sapiens
actatagggcgaattgggccctctagatgcatgctcgagcggccgccagtgtgatggatatctgcagaattcgccctttcgagcggccgcccgggcaggtacactggaggctggagcctgcagatggcatggctctgcggctcaccttgctgcagttggtggtggtgacagagactgcagcctgactgtagtgaatttggaaattatctgtctggaagctctgagtttatcttgggacctcaagaggagaggatcacccaactcacagcaatcaaactccaaatggtgctataaactgaaccacacatggacacgtcagtcttccgaggacccttagatcaaccccaggaggagccctagctgctgttccccattcgacgcccctttccagcaggaagtagccagaagacatcgtcgcccaaacctctaacagcagttagtgcggcatctccacagggggggatgttgtaggagttattgataaattattttaggcagatagagaggaaaaggggtccttaggaagtttttgtttttaaagcacg

SEQ ID NO: 38236 - DNA, 479 bp, Homo sapiens
atagggcgaattgggccctctagatgcatgctcgagcggccgccagtgtgatggatatctgcagaattcgccctttcgagcggccgcccgggcaggtacgcggggaatacagcaatgaagaattacaggaccaaattaagaatgcaaccaggttgccaagaactgagtgatgtgtccacatcccgggagagagaagccaccagaagctggaagagctaaatcagactgctccctagagcttcagaaggagccagaactgatgactccaagatcttagcccagtgaaactgatctggacttctgaactatgagagattccattcctgttgtttgaagctaccacattattgagaacttgttacagtagcccgaggacactaacacaaatggggctccgggaaaatccagactaaaggtgttgtgttggtttgcaatctccttgcttaactttctgatactagacataaatagattggtga

SEQ ID NO: 38237 - DNA, 221 bp, Homo sapiens
acgactcactatagggcgaattgggccctctagatgcatgctcgagcggccgccagtgtgatggatatctgcagaattcgccctttcgagcggccgcccgggcaggtactttttttttttttttttttttttggctctttgtaaattctttattgccaggagtgaaccctaaagtggctcacaagagtgccctatttctttcaattaactacaaggacaaa

SEQ ID NO: 38238 - DNA, 458 bp, Homo sapiens
acactactatagggcgaattgggccctctagatgcatgctcgagcggccgccagtgtgatggatatctgcagaattcgccctttcgagcggccgcccgggcaggtactcttagtctgctctgaaagggctaatgtctagtgtaatggcaaaattaccaatctgttctccaaagtgttccagcagatatatttctactagacaaacataattgtgaattgactgttagtgaggctgtttcttctctaatgatcacataatatccaaattatatcaacttcattatttccctctttccttttcctaacccattccctttatttcttgtttctcttgaagactacttcaaattacctatttgtcttcattactgcccccaaaactctaataattgtgacccctaactgttcatttctcttcctttctccaccccattctgaacatccttctttaagtttta

SEQ ID NO: 38239 - DNA, 444 bp, Homo sapiens
ctactatagggcgaattgggccctctagatgcatgctcgagcggccgccagtgtgatggatatctgcagaattcgcccttagcgtggtcgcggccgaggtaccagtgtataaaatgaaacttttcaagccatcttaacaacagttaagtgagcaaaccaccaactctgaactctcaagctgtgttttaaaatacaaagcagcccgcagcaagttctctcttgtccaggcattctgtatgtaaggccaggaggcttctgcttctttcctgggttttgcttgctaggcacagctggaagggcagagggccacagccgagctgaactcgctgtcaaatttgaacttcctagaaaaatcactgcagaggaaaccacatcaacctactgaagatttcagatcttcagaaatgtcacggaaagtccgctgaggctgagcaggccatgggg

SEQ ID NO: 38240 - DNA, 453 bp, Homo sapiens
ctatagggcgaattggtccctctagatgcatgctcgagcggccgccagtgtgatggatatctgcagaattcgcccttatcgtggtcgcggccgaggtacaaaagttctaagattcaaatacaatgcaaagtttataataatcacacaaaaagtgttccttttagccaccatttagcttcacacaacgaagactggaaaatacgtggtttatttagatcttcaatataaatttgtacctgcccgggcggccgctcgaaagggcgaattccagcacactggcggccgttactagtggatccgagctcggtaccaagcttggcgtaatcatggtcatagctgtttcctgtgtgaaattgttatccgctcacaattccacacaacatacgagccggaagcataaagtgtaaagcctggggtgcctaatgagtgagctaactcacattaattgcgttg

SEQ ID NO: 38241 - DNA, 453 bp, Homo sapiens
tatagggcgaattgggccctctagatgcatgctcgagcggccgccagtgtgatggatatctgcagaattcgcccttagcgtggtcgcggccgaggtacagtccactggagtcttcataacatcaaccctctaggtgagatctgtaatagctagttaattatctgggaatttttaaacatttggatattgcaaataatgtgaataaaatacttgaattttaaataattaaattgtttcttcaaatgttttagcgtttatgaagaaataatgcaccaagattttggatttctaacatttctggctgtatgagagagtaaagggtggcactttattaacttgggggcaatgtagacatatgttgaagctggttctggaagtgcaccctggaaatttttatctgagttccttgtcaatcctacacaattgcatgcaatgagaacttcatgattgtag

SEQ ID NO: 38242 - DNA, 457 bp, Homo sapiens
tatagggcgaattgggccctctagatgcatgctcgagcggccgccagtgtgatggatatctgcagaattcgcccttagcgtggtcgcggccgaggtacatactgttaactagaatagttactactaagcatgatttcattcactgcagcaggcatacttgcctgttcctaaattcattctgggttgcgggcatgaggacaatcacagtggtttgctctgtgatgcctatttctttccaatgtttttagttttgttgcttaaaaattctggctcacacaaataagttgctgtgaatgctattaataacaacagtgaactctgtttagcaatggaaagtcttctttaatcttaatctaaaatggctataaacttataatcattcttcaatgtattaaagtattagagattagctttcttctttgagtatcaactttaatatggattcaggattttggag

SEQ ID NO: 38243 - DNA, 461 bp, Homo sapiens
cgactactatagggcgaattgggccctctagatgcatgctcgagcggccgccagtgtgatggatatctgcagaattcgccctttcgagcggccgcccgggcaggtacagcggagaagaggaattcatgaagcataatagtccacagcagaataagaattgcttgaacaattttgacctttcagaatacagacagattctcagtgatgtggctatacgaatatatcatcaatttattatcataatggaaaagaatatccaaccgataatagttccgggaatgctggagtatgagagcctgcagggcatttccggcctgaagcccacaggcttccggaagcgctcctctagcatagacgacacggacggctacaccatgacctccgtcctgcaacagctgagctacttttacaccaccatgtgccagaacggcctggaccccgagcttgtgaggcaggcggtg

SEQ ID NO: 38244 - DNA, 371 bp, Homo sapiens
atacgactcactatagggcgaattggagctccaccgcggtggcggccgaggtactgcattcttgcttaatagtattaaccataaaggaggtcaggtttatagggtttggtttacctattaaaccatcattgactatggaaatacttacgctctagaactagtggatcccccgggctgcaggaattcgatatcaagcttatcgataccgtcgacctcgagggggggcccggtacccagcttttgttccctttagtgagggttaattgcgcgcttggcgtaatcatggtcatagctgtttcctgtgtgaaattgttatccgctcacaattccacacaacatacgagccgggagcataaagtgtaaagcctggg

SEQ ID NO: 38245 - DNA, 426 bp, Homo sapiens
actcactatagggcgaattgttagctccaccgcggtggcggccgaggtacagaaaatgaggatgtatccaccccctcccaaaccagtgatttggaagtttctttacagtatcagtagtaacatggacaaacttgttattttttccctgctatacttaaaaataagggaaataaaactgtacctgcccgggcggccgctgctctagaactagtggatcccccgggctgcaggaattcgatatcaagcttatcgataccgtcgacctcgagggggggcccggtacccagcttttgttccctttagtgagggttaattgcgcgcttggcgtaatcatggtcatagctgtttcctgtgtgaaattgttatccgctcacaattccacacaacatacgagccgggagcataaagtgtaaagcctggggtgcc

SEQ ID NO: 38246 - DNA, 397 bp, Homo sapiens
actcactatagggcgaattggagctccaccgcggtggcggccgaggtacatcttaaatgatatcttatttctacatggaaagaagttatagaatcttcatagagttctatgagaaaaaatatacttgctatctataaaaaagagaaaaaagaaaaaaaatgagaaaaaagtaagaaaaaaaaaatcctgtcctaggcttttactcttgatcttcaaaggcacgcagggtttaatggttccttgggttattattttgcagttttgttttttattttgccttaagtaatgatagaagatatatatggccggacagctctagaactagtggatcccccgggctgcaggaattcgatatcaagcttatcgataccgtcgacctcgagggggggcccggtac

SEQ ID NO: 38247 - DNA, 291 bp, Homo sapiens
ctactatagggcgaattggagctccaccggggtgggcggccgaggtacttttcattttggctcaccgtggattttctcataggaagtttggtcagaatgaattgaatattgtaagtcagccactgggacccgaggatttctgggaccccgcagttgggaggaggaagtagtccagccttccaggtggcgtgagaggcaatgactcgttacctgccgcccatcaccttggaggccttccctggccttgagtagaaaagtcggggatcggggcaagagaggctgaatacctgc

SEQ ID NO: 38248 - DNA, 459 bp, Homo sapiens
ctactatagggcgaattggagctccaccgcggtggcggccgaggtacagatgaggaagactgaggcctgcatcagtgaagcaacctatccaagactacatagagaaggcagtaaatggcagggttagtctcagaacaggggagggtctgttccccccgcagtgggcagtcctaattctgaacttcacctatctgggggtgatagaggggaacaagaggaagcctgctgaagagaaaacctaaacatctgttttgtctacgtatgacttcctctgcttgtgggagagaaggaaggaaaggaacacattgttgtcagccccacaaccccaacagaattaaaccctggagcaggttgaacagcagaggcttccctcagatcaaggagccaggagcagatgatctatctctgtggccacacagagagatgtcaccttatgcaatttgcatatcatattcaatt

SEQ ID NO: 38249 - DNA, 377 bp, Homo sapiens
ctcactataggtgcgattggagctccaccgcggtggcggccgaggtacctggaaaacaagcaggcgctaagtttgaatcttgaaacttcctagctttcagccacttcctcagctctataaattcagacttgtggctctcattcactcctcttgattcagaacttccgcagagttttcgtcttctgatccggcttgttctcccttttcctttctgcatgctaaaactgtagtttcttttttctgaaatacagttctaggcgccggcggccgcttccaagatggaggctgcagtgggcgggcccaaggcacgtggaaataccaaacagccccagatgaaggcaagttaaaggaaccggccaaaactgcagagggagagg

SEQ ID NO: 38250 - DNA, 252 bp, Homo sapiens
cactactatagggcgaattggagctccaccgcggtggcggccgcccgggcaggtacgcgggggggtccttccggcgtcgccggagtgaattgatccgggagttgaagagggctgcaaggtgggaagtgaagtcagtgcctcagttgctgatcagagtgttttttgggtccaaattttttcttcaccaaaaaagagaaagatatattgcagttgaatgaagattcctctgcattttagcactagctttttcaa

SEQ ID NO: 38251 - DNA, 433 bp, Homo sapiens
ctactatagggcgaattggagctccaccgcggtggcggccgaggtacagtagtgcactcttggctcactgtagcctcgacctccggggctcaagtgatcctcctgccttagccccacaagtagtgggactataggcacacagcaccatgcccatctaagtttttgtattttatgtagagacaaggtttcaccatgttgcccaggctgatcttgaactcctgagctcaagtgatctgcccaccttggactcccaaaatgctgggattataggcgtaaaccaccatgcctggccttaaatcaactttagagtcaacatctcttatcactggagcttctggagaaactccatcacgtggtgctctctttcctgatgtgttgtgcccaaatagcttgttctcatcagatgacttatttgctatgatatatatacttt

SEQ ID NO: 38252 - DNA, 403 bp, Homo sapiens
  misc_feature 276, 277, 278, 301, 309, 341, 343, 344: n = A,T,C or G
actactatagggcgaattggagctccaccgcggtggcggccgaggtaccagtggaggaaggccttccggcgggacatggcagtgaactgctccgagatgcgcttgaagagctcctggatggctgtgctattgccaatgaaggtgactgccatcttgaggccacgaggtgggatgtcacagacggctgtcttgacattgttggggatccattccacaaagtagctgctgttcttgttctgcacgttaagcatctgctcatcgacctccttcatggannncatccgaccacggaagaacagcnagccacgngtgaggggtatcggcccgctctagaaactagntnnggatccccacgggcctgcagggaatttcgatatcaaagcttattcgatacccgtcgacc

SEQ ID NO: 38253 - DNA, 420 bp, Homo sapiens
agggcgaattggagctcctctcgcggtggcggccgaggtacaaagagtagctgccccttctcagggcagatgatgctttgagaacatactttggccattacccccagctttgaggaaaatgggctttggatgattattttatgttttagggacccccaacctcaggcaattcctacctcttcacctgaccctgcccccacttgccataaaacttagctaagttttgttttgtttttcagcgttaatgtaaaggggcagcagtgccaaaatataatcagagataaagcttaggtcaaagttcatagagttcccatgaactatatgactggccacacaggatcttttgtatttaaggattctgagattttgcttgagcaggattagataagggctgttctttaaatgtctgaaatggaacag

SEQ ID NO: 38254 - DNA, 362 bp, Homo sapiens
gcgaatggagctgaccacggtggccgccgaggtaccttttagctatatttgcagattctctgggattttaaggaactgagattcagcaaagttgactaaattttatatttcttgtcctctaaatattttgataatttctggattgatgcagtgatgtttttgttccttccgatttataaatgaaacacctttttttagtgtttctaaacctaaaatctacttggtttgaaatcaagtggttggaacactgtttgacttttatttgaagcatgttgttgattgaaaatttcattgaggaagtttttaatcagtgtgatcaagttgattctgtaatgagcacagcacctaatattttgaggagc

SEQ ID NO: 38255 - DNA, 426 bp, Homo sapiens
  misc_feature 303: n = A,T,C or G
tatagggcgaattggagctccaccgcggtggcggccgcccgggcaggtacgatatgcctttatcctacactgtatatatactctttatgcagaagtatatctaactgaaaagtataaaaatataatggtggaaaacaaatgaattaaaaaatgtatcacggccgctctagaactagtggatcccccgggctgcaggaattcgatatcaagcttatcgataccgtcgacctcgagggggggcccggtacccagcttttgttccctttagtgagggttaattgcgcgcttggcgtaatcatggtncatagctgtttcctgtgtgaaattgttatccgctcacaattccacacaacatacgagccgggagcataaagtgtaaagcctggggtgcctaatgagtgagctaactcacattaattgcgttgc

SEQ ID NO: 38256 - DNA, 432 bp, Homo sapiens
agggcgaattggagctccaccgcggtggcggccgcccgggcaggtacctctggaagggtaacatcttaaagctgaatcaactttaacctggagggctaacatatttagcaatacttgcatcccagacatacaacattaaaagatacactaaattctgaaggtagctatgctgcaaaatagtttaaaattaaacaattgtacctcggccgctctagaactagtggatcccccgggctgcaggaattcgatatcaagcttatcgataccgtcgacctcgagggggggcccggtacccagcttttgttccctttagtgagggttaattgcgcgcttggcgtaatcatggtcatagctgtttcctgtgtgaaattgttatccgctcacaattccacacaacatacaacccgggagcataaagtgtaaagcctgggg

SEQ ID NO: 38257 - DNA, 495 bp, Homo sapiens
ctactatagggcgaattgtgagctccaccgcggtggcggccgaggtacgcttaaaactggtgaaaatgtttagggatttaattttgagattggtaatgtgctcaaagttaagtcacttgactttggtatacacttgggtgggctgaggggcaagagccttctttgctgtttaagtcattacaagttaggatcctgggtaaatggcaaactttctgaagctcgaatttaaagtctgttgggaggccgaggcgggcggatcacgaggtcaagacatgttgaccaagctggtctcaaactcctggcctcaagtgatccgcccaccttgacctctcaaagtgctgggattacaggcatgagccatcacgcccggccacgctgttggttcttaatgacacagcttaactttattgtgaaaagattgcagcaacaaatgagattttacctgtatttgttaaaaatgcttatccttgtctaagactggcaacataagcagtt

SEQ ID NO: 38258 - DNA, 395 bp, Homo sapiens
gcgtatacgactcactatagggcgaattggagctccacgcggtggcggccgaggtactcttcatacctcgttggatgtggaaatgcctactgtcccaatcaaaaagttctaaaatactactatgtttgccaatattgtcctgctggtaattgggctaatagactatatgtcccttatgaacaaggagcaccttgtgccagttgcccagataactgtgacgatggactatgcaccaatggttgcaagtacatggctctcttctaccccgagagagtgagggcggtggccagtttgaatactcccttcataccagcaaatcccaacatgtcccctttggagagtatcaaagccaacccagtatttgattaccagccctacttccaagaaccaggagc

SEQ ID NO: 38259 - DNA, 401 bp, Homo sapiens
cactactatagggcgaattggagctccaccgcggtggcggccgaagtactttttttttttttttttttttttttccacaaaaggaaattttatttcttgcctttaaacaaaataagatgctctcagagctttttttttttttttttttttcccccctggaaaggaagtttcattttgttgcccaggcaggtctcaaactcctggcctcaaatgatcctcccacctaaacctcccagggggctgggattacaggggtgagccaccacccccggcccaaagaacttttttttactgcaaaaaacatttttataactttagaacttttctaaaatcctactttgtcagctgaccaatttagaaaagtgcaaaggcaagtgcctttccagaaccgggtggtgact

SEQ ID NO: 38260 - DNA, 356 bp, Homo sapiens
  misc_feature 325: n = A,T,C or G
ctactatagggcgaattggagctccaccgcggtggcggccgaggtactttttttttttttttttttttccgtctccccaaagctttatctgtcttgactttttaaaaaagtttgggggcagattctgaattggctaaaagacatgcatttttaaaactagcaactcttatttctttcctttaaaaatacatagcattaaatcccaaatcctatttaaagacctgacagcttgagaaggtcactactgcatttataggaccttctggtggttctgctgttacgtttgaagttctgacaattccttgagaattctttgcatgcaganggaggtaaggaggtatttggaatttttcaca

SEQ ID NO: 38261 - DNA, 408 bp, Homo sapiens
gactactatatggcgaattggagctccaccgcggtggcggccgcccgggcaggtactttattttgtttttttttttttttttaggggggggagttgaaacctaattttgtggcgtagcagctatgcagcttgaaatccaagtagcactaaattttattatttcgtatttgtacctcggccgctctagaactagtggatcccccgggctgcaggaattccatatcaagcttatcgataccgtcgacctcgagggggggcccggtacccagcttttgttccctttagtgagggttaattgcgcgcttggcgtaatcatggtcatagctgcttcctgtgtgaaattggtatccgctcacaattccacacaacatacgagccgggagcataaagtgtaaagcctggggtgcc

SEQ ID NO: 38262 - DNA, 280 bp, Homo sapiens
actactatagggcgaattggagctccaccgcggtggcggctctcccaccctagccttttaatatgcaaatgcagggcaccatgatcttctacacaggtggggatacttcggggtgtccatgtatccaggaatgtggggaaagggcaagaagtccacaggaatcgccatgtttgggtggacccactttctagtggctggcatttggatatcgggtaactggcctggctttaagagctggagctttacaagaaacttttccagacgtgctttaaaaaacaaa

SEQ ID NO: 38263 - DNA, 398 bp, Homo sapiens
gtaatacgactcactatagggcgaattggagctccaccgcggtggcggccgcccgggcaggtactcatgaggtagtcccggaaatccttgcttcggacatagtccgccgctttccgcaccaacgcgcccgccatggctgtgccgacaccagaccccgagtggtccctgcctctgctgccgcttcccagagccaatgacacccccgcgtacttccctgcagtctccagaatccaggcttcattcctatcagctatcaggaaactgttgtgatagctaaataccattctaccctctgtgcaatttccaccctggccatatttttctagtaagtcaacaatgacattgagggctttttcagctgtatcagctctttcaaggccaagtctgacaaggtccat

SEQ ID NO: 38264 - DNA, 165 bp, Homo sapiens
actatagggcgaattggagctccaccgcggtggcggccgcccgggcagtactgtcctgactcaattctttcattctttcctctactttgttcaaaatactgtcgatctcttctttgccttgcgcatcaccatcataactctgaaggtccagcaacaccaatccat

SEQ ID NO: 38265 - DNA, 426 bp, Homo sapiens
tatagggcgaattggagctccaccgcggtggcggccgcccgggcaggtacgcgggggactccaggagctgcagcagagcaggtaacagctcttgcacctgtttctcttgcacctgacgtgtagctgctcctacccacctctcctggctgagccttgcctgatacagcagcccggaggcaccacttgcttcccgagtctcaccctcccaggcagctcctacactcaactgcttctctaggaaaggtctcacctccagcctggagcagtcgggattacaggtacctcggccgctctagaactagtggatcccccgggctgcaggaattcgatatcaagcttatcgataccgtcgaccttgagggggggcccggtacccagcttttgttccctttagtgagggttaattgcgcgcttggcgtaatcatg

SEQ ID NO: 38266 - DNA, 399 bp, Homo sapiens
actactatagggcgaattggagctccaccgcggtggcggccgaggtacaccaaggtggtgcattaccggaagtggatcaaggacaccatcgtggccaacccctgagcacccctatcaaccccctattgtagtaaacttggaaccttggaaatgaccaggccaagactcaagcctccccagttctactgacctttgtccttaggtgtgaggtccagggttgctaggaaaagaaatcagcagacacaggtgtagaccagagtgtttcttaaatggtgtaattttgtcctctctgtgtcctggggaatactggccatgcctggagacatatcactcaatttctctgaggacacagataggatggggtgtctgtgttatttgtggggtacctgcccgggcggc

SEQ ID NO: 38267 - DNA, 418 bp, Homo sapiens
tacgactactatagggcgaattggagctccaccgcggtggcggccgaggtacttttttttttttttttttttttttggatgggtttaaaaattatcctggatccaggaaagtgatgccttttcttattctccttttatcatcaaaacaaacagccaatatgtctctagaaacattgcgttctaaactggaagtgctgacaagccttcatcccaaaccctgagtggcagattttcatgaaaatcagcttctgggccagttaagtcttcatgaagttatcttttcataactcagccctcattcccctctgggtcagtagcagtggaaaccaggaaaacccaaggggccagattttccttcctcaaatgaaggcacttccagggaagaagggggaggttcctggcaccctggccttgccaa

SEQ ID NO: 38268 - DNA, 555 bp, Homo sapiens
  misc_feature 58, 59, 60, 61: n = A,T,C or G
gactactatagggcgaattggagctccaccgcggtggcggccgcccgggcaggtactnnnnttttttttttttttttttttttttttagcagtaaaaactgaattatgatttattaattagtaaaacactacacagcatcaaaaataaactcagccacatgcaacaatacagagaatcttaaagacatagtattgagcaaaataatcagtacctcggccgctctagaactagtggatcccccgggctgcaggaattcgatatcaagcttatcgataccgtcgacctcgagggggggcccggtacccagcttttgttccctttagtgagggttaattgcgcgcttggcgtaatcatggtcatagctgtttcctgtgtgaaattgttatccgctcacaattccacacaacatacgagccgggagcataaagtgtaaagcctggggtgcctaatgagtgagctaactcacattaattgcgttgcgctcactgcccgctttccagtcgggaaacctgtcgggccagctgcattaatgaatcggccaacgcgcggggaga

SEQ ID NO: 38269 - DNA, 423 bp, Homo sapiens
atagggcgaattggagcttcaccgcggtggcggccgaggtaccatttgtgtctctttattataagtgagaaaaatgaattttatattatcaaggggactaaagtcacacggcttgtgggcactgtgccaagatttaaaattaaatttgatggttgaatacagttacttaatgacaatgttatatttgcttactgtgtaacatctgccatttatttcctcagctgtacctgcccgggcggccgctctagaactagtggatcccccgggctgcaggaattcgatatcaagcttatcgataccgtcgacctcgagggggggcccggtacccagcttttgttccctttagtgagggttaattgcgcgcttggcgtaatcatggtcataagctgtttcctgtgtgaaattgttatccgctcacaattc

SEQ ID NO: 38270 - DNA, 438 bp, Homo sapiens
acgactactatagggcgaattggagctccaccgcggtggcggccgaggtactggaaatttgaggttgctctaggtgacctgcaccatatacacacagagccccaaggactgccagcgttgatgtgtggagcagtgacagcatgtctgcaggcactgtgctttctgccagggcagcctgaaatcaccgcagagaagcgttagacctctgtggcttggctgagtccaccaagtcaaacttcccatgggtgagggtgacatggggccccctgcatcgttgtaaagcggtgtcctcaccacctgttagcacttccagtctgtgtgaagacagtcctgcaaggtctgcagcctgagatcagaccacatagtttagacggccacctcagaccacaaggcggccaccccagcaagttgtcaggctggtgttgttggttgctgggg

SEQ ID NO: 38271 - DNA, 452 bp, Homo sapiens
tacactactatagggcgaattggagctccaccgcggtggcggccgaggtacattagggtcaaaaggtaaaagtaacaaattctgccatattgtaaatttccagtgcaggctttaatttttttttttcattagtagcactgaaaaaatattactgcatgggtatgttctagttcagtttataaagttttaaaggcttatttgaggcatacctcactgttacgcacactggtaatttaaccatgcccctaagtattccttttctcctgcatttgatgcagcccaacaaagcttttgttttgaaataaatttgactaccctgtccatagctacagtagattatttgtggtttaaggctcctggtgtctcaggttccaaaggaaaagcttacatatttttcccttagtttgaatatatgattggttgggttaaaagataatgatctgtgtagtatt

SEQ ID NO: 38272 - DNA, 387 bp, Homo sapiens
cgtaatacgactcactatagggcgaattggagctccaccgcggtggcggccgaggtacacttcggtctagccagaaaaaaagcagaaacaagaagccaaggctaaggcttgctgccctggccaggaggaggggtgcagctctcatgttgaggagagctgtttctggcaggagttaggaggaactgctaccacttcaaaagcctgtagaggggaagctatttaattaagggattgaaagggaaggaggagccacactcataagtagtaaagtttccccccgcgtacctgcccgggcggccgctctagaactagtggatcccccgggctgcaggaattcgatatcaagcttatcgataccgtcgacctcgagggggggcccggtacccc

SEQ ID NO: 38273 - DNA, 454 bp, Homo sapiens
ctactatagggcgaattggagctccaccgcggtggcggccgaggtactacactattatttaaaaaaaaaaatcacaaaaagaaaaatgttatcactacaagtaggaattagaagagagaaattctggcagtctgtctagaggttaaaacatttcatgcatttgtgagttgctgttggagagttgttttttatttgtccaccggaatctgggcacattccggggcttacctttcactttcgcactgtgcgtgagatcggttgaggcagttataagtgagagcatgctggacaccttgactttacagtgacgtggaacagaaaaagcattcacctcatcattgaaagagttggagccgagaataaaaggtagttagaaggctagtgggaaggggagcggaggcaaggaaatagcaactaacaggccctagacagcatccggcaacagagaggaaaa

SEQ ID NO: 38274 - DNA, 428 bp, Homo sapiens
cgactcactatagggcgatttggagctccaccgcggtggcggccgcccgggcatgtacttcccggttcccttgcgtctgatgttcttatgccagaggggatagaaagcccaacagaaactcaagatagaagaaggagaatctgcgagtgtctgtctcctgtcaagcttccctaatacagccctggtagaacttcatcaacagtggaaggcatttgcaaagccaccagacattacattccagagccttgagaaaaactgatgaaaaaaaagtcatgaaaaaaagtcattcgcacaagtgacaccatggtgtgaagtcaaggagcacagactctggagtcagagggcttgagtcaacctgagcatcttcagctttgactgtgaagacacagctttgactctctgtgttgcagagatggtagtgcccactc

SEQ ID NO: 38275 - DNA, 267 bp, Homo sapiens
  misc_feature 46: n = A,T,C or G
cactcactatagggcgaattggagctccaccgcggtggcggctggngggaaccggtataacctcactcaaaggcggtaatccggtaatccacagaatcaggggataacgcaggaaagaacatgtgagcaaaaggccagcaaaaggccaggaaccgtaaaaaggccgcgttgctggcgtttttccataggctccgcccccctgacgagcatcacaaaaatccgacgctcaagatcagaggtggcgaaaccccgacaggacctataaag

SEQ ID NO: 38276 - DNA, 142 bp, Homo sapiens
ggagctccaccgggggggcggccgcccgggcaggtacaaaataccctttgcctccaaatgcagtcatgacttgctcataatgtgaatttggcagcaaacacattggagggaccactgcagtagcatcttgaaattttaacat

SEQ ID NO: 38277 - DNA, 353 bp, Homo sapiens
gcgaattggagctccaccgcggtggcggccgaggtactcacagtctttcccttgaagagaagattgaaaaagtctactgttcataaaccatgctaacattttccttttagctagttttgaaagtaaggaacaatacctgggaaataataaaacagaaggttaccattgtcagccagttggctatactgtggttagttctttcagaaattgtaaatatcttgtagcatattctgaaataatagagtaagttcttctcagagatgttaatatcatgtttttcatgttctaattagaatactttattacttacaaactcagaaatacgaacagaaatacggcagacgaacatatta

SEQ ID NO: 38278 - DNA, 425 bp, Homo sapiens
tacgactcactatagggcgaattggagctccaccgcggtggcggccgaggtacaaaatttagctttaggtcactaaagcatgtttacccttttgaaaaaacatgtattgctaggtcagccatcctacttcactggaaataacgttaaacttgtagactgttcaaatggccaatcaaaatgactaagaaacattatcgtgtgtttttttgtttgtttgttttttcatcctttctctttccttttcgttcaaaaattcagttccccatcctagaccagactcctctgtcctctgccagggtataagaaaagttagcattctgtcactatagaacatagaagaggaattagcatgttattgaataaagaatcaggaagataattctaattgggtatagaaaaatttatacaccataaacatctgtata

SEQ ID NO: 38279 - DNA, 441 bp, Homo sapiens
ctcctatagggcgtttggagctccaccgcggtggcggccgaaaggccccgcgtacaggtgttttctgtggctcttttcttcattgcagcttgaagatagacggcagtgtctgtttgaactgagacacatgagacccgggacaggagtatgatagggaaacgttcctgcctatccaggatgtgaagctggcgcaaccgcctaccacctctggagagacctcggcacatttcaccagttttccctgctaccctcatcagtactggtgctgctgcttgtcactggagtacctcggccgctctagaactagtggatcccccgggctgcaggaattcgatatcaagcttatcgataccgtcgacctcgagggggggcccggtacccagcttttgttccctttagtgagggttaattgcgcgcttggcgtaatcatggtcatagctg

SEQ ID NO: 38280 - DNA, 164 bp, Homo sapiens
actcactatagggcgaattggagctccaccgcggtggcggccgaggtactgacaccagctggaggctctctgccacctttaaaataaaggtgcccaagaaagagaggctcttggtcttgaacttggaatagcctcattctccagtttgctctgtctttgatatt

SEQ ID NO: 38281 - DNA, 393 bp, Homo sapiens
gcgtatacgactcacttagggcgaattggagctccaccgcggtggcggccgaggtacacatcagaattacttaagagagtttgttaaaaatggagattctggagccccactctgtgagtcgagcggccgcccgggcaggtacatgggactacaggcacgccccaccatgcccagctcatttttgtatttttagtagagacagggtttcaccatgttggccaggatgatcttgatctcttgacctcatgatccgcccctcttggcctcccaaagtgctgggatcacaggcgtgagccaccacacctggccctctatttattctctttaaagagagagaaaactatgagaggccaaaattatttaattaaatctttaccttagcacaagggaaaa

SEQ ID NO: 38282 - DNA, 429 bp, Homo sapiens
cactactatagggcgaattggagctccaccgcggtggcggccgaggtacgcggggattaaggaagcccaggagttttacaaggacacctacaacaagctgaaaaccaaggatgagccccagcgggaaacgctgaaagccatccactatgcgttgaactgctgtggtttggctgggggcgtggaacagtttatctcagacatctgccccaagaaggacgtaccagcccgggcggccgctctagaactagtggatcccccgggctgcaggaattcgatatcaagcttatcgataccgtcgacctcgagggggggcccggtacccagcttttgttccctttagtgagggttaattgcgcgcttggcgtaatcatggtcatagctgtttcctgtgtgaaattgttatccgctcacaattccacacaacatacg

SEQ ID NO: 38283 - DNA, 386 bp, Homo sapiens
  misc_feature 96: n = A,T,C or G
ctcactatagggcgaattggagctccaccgcggtggcggccgaggtacgcgggatggcacatgcagcgcaagtaggtctacaagacgctacttccnctatcatagaaagagcttatcacctttcatgatcacgccctcattaatcattttcctttattctgcttcctagtcctgtatgcccttttcctaacactcacaacaaaactaactaatactaacatctcagacgctcatgaaatagaaaccgtctgaactatcctgcccgccatcatcctagtcctcatcgccctccatccctacgcatcctttacataacagacaaggtcaacgatccctcctttaccatcaattcaattgaccaccaatggtacctgcccgggcggccg

SEQ ID NO: 38284 - DNA, 480 bp, Homo sapiens
atagggcgaattggagctccaccgcggtggcggccgcccgggcaggtactcggggagtgtcagttccgaaggctgattgaaaaagagcaacagatccagggagcattcacctgccctgtctccaaacagagccaccaaggaggagcaggggagcgacggccgctctagaactagtggatcccccgggctgcaggaattcgatatcaagcttatcgataccgtcgacctcgagggggggcccggtacccagcttttgttccctttagtgagggttaattgcgcgcttggcgtaatcatggtcatagctgtttcctgtgtgaaattgttatccgctcacaattccacacaacatacgagccgggagcataaagtgtaaagcctggggtgcctaatgagtgagctaactcacattaattgcgttgcgctcactgcccgctttccagtcgggaaacctgtcgtgccagctgcattaatgaatcg

SEQ ID NO: 38285 - DNA, 366 bp, Homo sapiens
cgaattggatctccaccgcggtggcggccgaggtactccatcctgggcgacataaggagacctatctcaaattataatgaagggggaagggatgaagagagggacaaagggaagtttgtaagacaaggaaagaaaaaaatgtggaaaaaatctatccagcaaaagggtattaacactcataaagactgtcttatgtagcattgaacatttgtcttatgatgtgttaatggagagtccaccaatctttcaaatactacatatagacaatgtcatttctaagttgaaaggggagttgatacaacagagtgattaaaatgattagtacctgcccgggcggccgttctaaaactagtggatcccccgggc

SEQ ID NO: 38286 - DNA, 457 bp, Homo sapiens
actactatagggcgaattggagctccaccgcggtggcggccgcccgggcaggtacaatagtggtcctgaggtgacgtatatcctcagcttacaaagataacaggattaagagattaaagtaagacaggtgtaagaaattataaaggtattaattttggaaactgataaatgtccaagaaatcttcacaatttatgtttcctgatgcagcaccagctggtccctccattcggggtccctgacttcccacaacagccaggctttcttgggcagaggttcctgtggctttccacagtgcattgagcccctggttaatcgagaatggagaatggcgatgacttttaccaaacatactgcctgcaaacatattgttaacaaggtacctcggccgctctagaactagtggatcccccgggctgcaggaattcgatatcaagcttatcgataccgtcgacctcg

SEQ ID NO: 38287 - DNA, 626 bp, Homo sapiens
gcgaattggatctccaccgcggtggcggccgcccgggcaggtacgcgggggcgcgacggttcgtgcgtgcgtgcgggcggctgcgtcgggctgcaggagaagatggcggtctccacaggagttaaagttcctcgtaattttcgcttgttggaagaacttgaagaaggacaaaaaggagtaggcgacggtacctcggccgctctagaactagtggatcccccgggctgcaggaattcgatatcaagcttatcgataccgtcgacctcgagggggggcccggtacccagcttttgttccctttagtgagggttaattgcgcgcttggcgtaatcatggtcatagctgtttcctgtgtgaaattgttatccgctcacaattccacacaacatacgagccgggagcataaagtgtaaagcctggggtgcctaatgagtgagctaactcacattaattgcgttgcgctcactgcccgctttccagtcgggaaacctgtcgtgccagctgcattaatgaatcggccaacgcgcggggagaggcggtttgcgtattgggcgctcttccgcttcctcgctcactgactcgctgcgctcggtcgttcggctgcggcgagcggtatcagctcactc

SEQ ID NO: 38288 - DNA, 380 bp, Homo sapiens
cctccaccgcgggggccgttgcgctcactgcccgctttccagtcgggaaacctgtcgtgccagctgcattaatgaatcggccaacgcgcggggagaggcggtttgcgtattgggcgctcttccgcttcctcgctcactgactcgctgcgctcggtcgttcggctggggcgagcggtatcagctcactcaaaggcggtaatacggttatccacagaatcaggggataacgcaggaaagaacatgtgagcaaaaggccagcaaaaggccaggaaccgtaaaaaggccgcgttgctgggcgttttttccatagggctccgcccccctgacgagcatcacaaaaatcgacgcttcaagttcaagaggtggcgaaaacccgacag

SEQ ID NO: 38289 - DNA, 363 bp, Homo sapiens
actactatagggcgaattggagctccaccgcggtggcggccgaggtaccaccagaggacacggataatcttcatatctgattctcctgcggtgcgtgtgccctgacagaagaagttgtatttgccttcccatactcctgttactaactcacagaacatatacagagacagcagtgtgagtccaaggttatacaccactaaaatcccctggcaagagaatggctgtttattcctcatgtattttggtcccagccatacaattagtaaatatatgacagagcagataaatgtgggtatataattgtccagaagaaaccatccttttactctagtatctcgagggcctagcccgcgtacctgcccg

SEQ ID NO: 38290 - DNA, 457 bp, Homo sapiens
tacactactatagggcgaattggagctccaccgcggtggcggccgaggtactttttttttttttttttttttggttaaattgtccaccaggtagctgatttgagacaaggccggcgagagcgagtcaagattcattgctggttggggcggaagcaggcggccgctctagaactagtggatcccccgggctgcaggaattcgatatcaagcttatcgataccgtcgacctcgagggggggcccggtacccagcttttgttccctttagtgagggttaattgcgcgcttggcgtaatcatggtcatagctgtttcctgtgtgaaattgttatccgctcacaattccacacaacatacgagccgggagcataaagtgtaaagcctggggtgcctaatgagtgagctaactcacattaattgcgttgcgctcactgcccgctttccagtcgggaaacctgt

SEQ ID NO: 38291 - DNA, 448 bp, Homo sapiens
ctactatagggcgaattggagctccaccgcggtggcggccgcccgggcaggtccgggcaggtactccaaagattcaggtttactcacgtcatccagcagagaatggaaagtcaaatttcctgaattgctatgtgtctgggtttcatccatccgacattgaagttgacttactgaagaatggagagagaattgaaaaagtggagcattcagacttgtctttcagtaaggactggtctttctatctcttgtacgcgggggcttttgcaaggctgtggtcggtggtcatcagtgctcttgacccaggtccagcgagccttttccctggtgttgcagctgttgttgtactttttttttttttttttttttttttttagatacaatgtttttaaaacaagcaaattttattaaaggaaaattttgcaggtttaaggtttgcaggtgaaatttt

SEQ ID NO: 38292 - DNA, 428 bp, Homo sapiens
ggcgaattggagctccaccgcggtggcggccgaggtacacatactctttaaataaatgactgcattgttgtatttgagctctcctttttgttgttgttggttggcgagtggtttccatcaagtcatcatgggaaaataatcaagttccatattcacaggttaggataggatgtaataattctcagaagaacccttctagtatgatatttgcttatcaaaatgtctcagaaacaaaatatttgaaaatactgtcacatttattgtatttctctctgttcttatgccgtgcatgtagaatgtacctgcccgggcggccgctcgatcaagttatcagatctctatacctaggtcatactcatgaagcaaaaatgctgcacaccactgaaaataataacgtttaagatgtctatcaagattcatgaaaacca

SEQ ID NO: 38293 - DNA, 416 bp, Homo sapiens
ggcggccgaggtacgcgggttctacttgatatcttgttctttaaatttttttcacatatggtttgcctgatacaactgatttttataactgaaatttaaggaatctaacagctaaaactcagtaagtgcatatatctccttataacataaacccgttgctactctcagcaccctctcctcaattttttttcctgtagcatgtgatgcctgattaaactcattttcatttgcttttatttctaatatgggaacaatgagagtgaactctaaatataggttgtagtaataaaacatcattagcctaattattagaaaatgctaattaagtacctgcccgggcggccgctcgagcaggtacttttttctttctttttttttattatggttagctgtcacatacaacttttttttttttg

SEQ ID NO: 38294 - DNA, 382 bp, Homo sapiens
ggcgaattggagctccacgcggtggcggccgaggtacaacaccgaacacataacatcatagccatctgcaaagatttcttttaaaaactgctcccgtaactcactctcataatttgctacaaggagcaccttgtaatcaggatggaggatggtatggctcacgcatgctgaatgccttcctgaaagagacacaggatggaaggcaacacccacagatggctttgatgtgtctgcgatgcccctgtatttcaaggagggtatcactgttcattgggattgcacaaaagcaggccagaaaaacctgggtcaccaaatagacttccttctgacccactgacccactcttctcctaggcctgataaaagggagaagaggagagaaa

SEQ ID NO: 38295 - DNA, 272 bp, Homo sapiens
aaggggcgggttatgtgcaaaaacatgtcactacttagacattatatggccatccggctgattctagggatgttaatcatccccatttcagcagatgtgtggcctcagatggtaaaggcagcagcctttcttatttctcacccctgccattgagatgtctgaagactttctttgctgcactgagtacctcggccgctctagaactagtggatcccccgggctgcaggaattcgatatcaagcttatcgataccggcacacctaagggggggc

SEQ ID NO: 38296 - DNA, 402 bp, Homo sapiens
cgactactatagggcgaattggagctccaccgcggtggcggccgaggtacatatcggccatcatctccacctccagctccgcagccagctgttgggccctgagaggatccatctcagcctagcaccgtggaagggatctccttctggcctcctaatccgctgcctgggacggatcacaatgcccacggagaccccaacttctgacaaatactataacgttacccgcctcccgagaggctccagcggaagcccccgcgtacctgcccgggcgggctctagaactagtggatcccccgggctgcaggaattcgatatcaagcttatcgataccgtcgacctcgagggggggcccggtacccagcttttgttccctttagtgagggttaattgcgcgcttggcgt

SEQ ID NO: 38297 - DNA, 170 bp, Homo sapiens
gcgcgtatacgactcactatagggcgaattggagctccaccgcggtggcggccgaggtactagaaaaaattgtaatcctcttactataactgtccatgacgctaattcagctcaatggtattatggcatgtcatggggattaagactttatatcccaggagctctagaac

SEQ ID NO: 38298 - DNA, 404 bp, Homo sapiens
gaacctccaccgcggtggcggccgaggtacagagacacactttaactggggaatggggtccccacacagtgatcgccccacgggagggtgacagaatatgccaggaattgtcttggacatgggccccagtcaccacaatcagatggcttatttgaaacaaacaaacaaaaaaaacccttgattacgacacaccaaagctgttccaatttgtaaaaaactgtagttattacattgcaatgaaatctctttaccaaatcttgggccagtgattttacctgcccgcgttcctgcccgggcggccgctttagaactagtggatcccccgggctgcaggaattcgatatcaagcttatcgataccgtcgacctcgagggggggcccggtacccagcttttgttcccttt

SEQ ID NO: 38299 - DNA, 624 bp, Homo sapiens
tcactatatggcgaattggagctccaccgcggtggcggccgtctctagcagtatttaaaggacaaggaaccaaagaatatgaaattcatcatggaaagaagattctatatgatatacttgcctttgccaaagaaagtgtgaattctcatgttaccacgcttggacctcaaaattttctgcaatgacaaagaaccatggcttgttgatttctttgccccctggtgtccaccatgtcgagctttactaccagagttacgaagagcatcaaatcttctttatggtcagcttaagtttggtacctcggccgctctagaactagtggatcccccgggctgcaggaattcgatatcaagcttatcgataccgtcgacctcgagggggggcccggtacccagcttttgttccctttagtgagggttaattgcgcgcttggcgtaatcatggtcatagctgtttcctgtgtgaaattgttatccgctcacaattccacacaacatacgagccgggagcataaagtgtaaagcctggggtgcctaatgagtgagctaactcacattaattgcgttgcgctcactgcccgctttccagtcgggaaacctgtcgtgccagctgcattaatgaatc

SEQ ID NO: 38300 - DNA, 453 bp, Homo sapiens
agggcgaattggagctccaccgcggtggcggccgaggtacaaaaaatatgtcctgctcctataacttacaatgcacagaaaaatatctacaaaaagggaagtatttatccatttagctttctaataaattggtgagaaagtttagcccattccacatttctttctaaataaaggctaaagagttaagggtaatttacttttatgcctgtcaccctgacatacattttttaaaatatttgcttgattatatgtaacttaagataaagttaatgtcttatttttacatcacagtacctgcccgggcggccgctctagaactagtggatcccccgggctgcaggaattcgatatcaagcttatcgataccgtcgacctcgagggggggcccggtacccagcttttgttccctttagtgagggttaattgcgcgcttggcgtaatcatggtcatagc

SEQ ID NO: 38301 - DNA, 405 bp, Homo sapiens
atacgactcactatagggcgaattggagctccaccgcggtggcggccgaggtaccaacactttttcttaattggctccttcccctacagaaacacttaggtagcgagctgcaggaaacctgcctttgtccctgtgttgtgcactatgtcttgccacactttagacaaaacaaagctcctttagagaaaccctgcctggagggaagaaaagtgtcccggctgtcattgccatgggagtctggagtttctgagagggcagcccaggtcaccagagtttccagatttagtacctgcccgggcggccgctctagaactagtggatcccccgggctgcaggaattcgatatcaagcttatctataccgtcgacctcgagggggggccccggtacccagcttttgttccct

SEQ ID NO: 38302 - DNA, 429 bp, Homo sapiens
actactatagggcgaattggagctccaccgcggtggcggccgaggtacggccaacgccaagtaggggattgcgttccctccagtcgcagagtttccctcttgtcgcccaggctggagtgaagtggcacgatctcggcttactgcaagctccgcctcccgggttcacgccattctcctgcctcagcctcccgagtagctgggactacagaccctatcagatttggatatgtccttcatatttgattggatttacagtggtttcagcagtgtgctacagtttttaggattatataagaaaactggtaaactggtatttcttggattggataatgcaggaaaaacaacattgctacacatgctaaaagatgacagacttggacaacatgtcccaacattacatcccacttccgaagaactgaccattgctgg

SEQ ID NO: 38303 - DNA, 459 bp, Homo sapiens
cgactactatagggctaattggagctccaccgcggtggcggccgaggtaccctttaaacagcccaagaattgttatatatgacagctgctatcagttttcaaattttacaatattagggttgttaactatttcattctgaattaagctaacatttgttaccaagcaatgcatttatttggaaggataccagttaccagtcatcaaaagcttttgtatgttgaaaatgtaattttaatagttaattcttcatcttacataggagcacaataaaatacaccacaatctgaagaaactccagaattacgagaataagagtgaagaaaattcaaatgggctacaatatccattaccttaaactgcaagagacaaggttgcaacccgaaggttaacatttatgtatttatgactggctacatttatgacttaaaaataacaagaatcaggaattagatatggag

SEQ ID NO: 38304 - DNA, 399 bp, Homo sapiens
  misc_feature 39: n = A,T,C or G
gcggccgaggtacatctttatctctgaaaactaagcgcngcatattagaacctgaataaacaggccttcctaagtttctcccagtttattgccattagacgatacctttttcaccccctagtatttctctacaactccctgttcttcatcagacctactataaaaaaactaagattaaactgtttcttcaggtgttcatttcctaatgaaggctctcatgtcacaaagaacttaaatatgtttgtttgtatacttttcttttgttactctgtcttttgttgtaggggcttaatccatgaacctaggatacatgaggaaatatttttcctcctctacaatagtatctatgattgtagtttaatatctgattattttaatttactgaaatacttccatatt

SEQ ID NO: 38305 - DNA, 330 bp, Homo sapiens
atagggcgaattggagctccaccgcggtggcggccgaggtaccctgaggcctgccagttcctgccttaatgcatatgtagtcgtaattgagttctgacacggccttgggtgtttctgtcctaaatagctgacattgcatcttcaagactgtgtgagtaatcctgatatttttttttaagctcagtaaattaattacatgccctgtgagggagtgattgcaagtagaaaatactgaactatcatatgattcatttttaaggtgctatactatgtgtatcatgttcaagactaatgaattttaaagcttttaagaactgacagggttattcc

SEQ ID NO: 38306 - DNA, 464 bp, Homo sapiens
ctacgactcactatagggcgaattggagctccaccgcggtggcggccgaggtactgcaactgtaggtaaactgaaaaaaaataagaaagaaagagttggatgaaaatgtgaaagcccaagtttagatgtgcattaagtattaaatagcacagtatcttcttcatggagccttttttcctcccccatcccctgcagctgccttttttttgggggcagggtgggggttgatgttgaactttaagagtttaaaagtttagcttattgagtagttgtcatttaaaatataattgcgaatatcagaaaactcatactggaaaactaaattttttttttctcttgagacggagtctcgctctgttgcccaggctggagtgcagtggcgcgatctcggctcactgcaagctccacctcccgggttcacgccatcctcctgcctcaacctcctgagtagctgggactacagg

SEQ ID NO: 38307 - DNA, 464 bp, Homo sapiens
taatacactactatagggcgaattggagctccaccgcggtggcggccgaggtactttttttttttttttttttttttttctttttttttttttttttttgatgtttcaaaaattatttttattgttacattccaaagaggacagaggaagaaaaaagccagttatccaataatggttagacctttcagaagaggctcccacaaccccagccctagttcaaagctgaacacattggagctgaaacaggtgcctttaaccacgaccggaaatgctgacaaatgtgtatatattatcaatccagggaggcttgggttaaaaataaaatttttttattgcaagggtccaaggccttaggatttgtccttaaaggtacctgcccgggcggccggtctagaactaggggatcccccgggctgcaggaattcgaaatcaagcttttcgataccgtcgacctaaaggggggg

SEQ ID NO: 38308 - DNA, 455 bp, Homo sapiens
ctactatagggcgaattggagctccaccgcggtggcggccgaggtacagagaatgacccaagaagggtaggagttcattccttaccttcataaagtaggctatccgccaagaatgaaaatgtcaactcaaagctatgggctgttttaagcaaggtggaagataatataagaagcatggtcctttcttcagacttactgccttgacagcacagaattcatcttatttccctcatctcccaagttatttgtatttccctgagatcagctcagaaacaactctctttaggctctctacaatgcggtagagcatgattagaagagataaaccttcaaacaatagtgttgtccaagacactaccctcacttatcccaggggaacccacggaatttcttcatttgtattaactcctgacatggcatggaagaagaatttttatcaaatacccttggcatct

SEQ ID NO: 38309 - DNA, 401 bp, Homo sapiens
tacgactactatagggcgaattggagctccaccgcggtggcggccgaggtacgcgggggcccacagctgtgtccggaagcagcaagcgtgcctgggcagagacccccagagtgtaaagaggtcctgggacgggctttgcacgttccacaagagtgtctcgctgtgtcgtctagactggagtgcagtggtgtgatcatggctcaactcctaggctcaagcgatcctcctgcctcagcctccggagtagctgctgggactgcaggaacgtgccaccatgcctggctcaaacacaaagttttttcataaaactcacttggcggcaaaattctaccttacctgaagttatttacggggtttttaatttccactttgaataaatattcacatcaaaaaaaaaaaat

SEQ ID NO: 38310 - DNA, 154 bp, Homo sapiens
gcgaattgtagctccaccgcggcggcggccgaggtactttctatgagaagcgtatggccacagaagttgctgctgacgctctgggtgaagaatggaagggttatgtggtccgaatcagtggtgggaacgacaaacaaggtttccccatgaagca

SEQ ID NO: 38311 - DNA, 353 bp, Homo sapiens
gctccaccgcggtggcggccgcccgggcaggtacgcgggggaatagaccacgatgttacatccgcaaaggatggtgattactggagattgcttatacctggaaactataaacttacagcctcagctccaggctatctgacaataacaaagaaagtggcagttccttacagccctgctgctggggttgattttgaactggagtcattttctgaaaggaaagaagaggagaaggaagaattgatggaatggtggaaaatgatgtcagaaactttaaatttttaaaaaggtttctagttagctgctttaaatctatctatataatgtagtaatgatgtaatgtggtcttttttttt

SEQ ID NO: 38312 - DNA, 681 bp, Homo sapiens
  misc_feature 524: n = A,T,C or G
taatacgactcactatagggcgaattggagctccaccgcggtggcggccgaggtacagcgaacccaaagaggacctgctcgtagcaaccagcgaccagctccattcagcagcgcacgtgcctcttccgccagcccggctcagcttggggagcttggttgttggagacgtgagccttgccgaagatcccggccgctctagaactagtggatcccccgggctgcaggaattcgatatcaagcttatcgataccgtcgacctcgagggggggcccggtacccagcttttgttccctttagtgagggttaattgcgcgcttggcgtaatcatggtcatagctgtttcctgtgtgaaattgttatccgctcacaattccacacaacatacgagccgggagcataaagtgtaaagcctggggtgcctaatgagtgagctaactcacattaattgcgttgcgctcactgcccgctttccagtcgggaaacctgtcgtgccagctgcattaatgaatcggccaacgcgcggngagaggcggtttgcgtattgggcgctcttccgcttcctcgctcactgactcgctgcgctcggtcgttcggctgcggcgagcggtatcagctcactcaaaggcggtaatacggttatccacagaatcaggggataacgcaggaaagaacatgtgagca

SEQ ID NO: 38313 - DNA, 387 bp, Homo sapiens
gcgaattggagctccaccgcggtggcggccgcccgggcaggtacgcggggtttctgtcataatgcaggcatgaagggtggagtgaagtcaggtcataagtttcatgtttgcttttgttttgttttgttttgtttttaatgtatgtagcagatgtacagtcttgggatccgggatgggagaccccactttagaaagggtcgtcactcctttaatcctctactcaacaatgtacctcggccgctctagaactagtggatcccccgggctgcaggaattcgatatcaagcttatcgataccgtcgacctctagggggggcccggtacccagcttttgttccctttagtgagggttaattgcgcgcttggcgtaatcatggtcatagcttg

SEQ ID NO: 38314 - DNA, 441 bp, Homo sapiens
gcgaattgtagctccaccgcggtggcggccgcactgaagggaaggaagcaggtgcagtgcatcaccctatttactatcctaagcattaggcaccttccaaaaaatatgcccaaatcctcagaggggcagtttacatgaaataaaagtacctcggccgctctagaactagtggatcccccgggctgcaggaattcgatatcaagcttatcgataccgtcgacctcgagggggggcccggtacccagcttttgttccctttagtgagggttaattgcgcgcttggcgtaatcatggtcatagctgtttcctgtgtgaaattgttatccgctcacaattccacacaacatacgagccgggagcataaagtgtaaagcctggggtgcctaatgagtgagctaactcacattaattgcgttgcgctcactgcccgctttccagtcg

SEQ ID NO: 38315 - DNA, 238 bp, Homo sapiens
tattgggcgaattgtagctccacctcggtggcggccgcccgggcaggtacttttttttttttttttttttaaccctttaggtatctgatcgctttgccaattttgcgttactgggcaggctaagagatcttcttttaattcagcctgcttaagacgggaactgataactgtagtgtatcctctgccttctttcttatctattggaggaagctcagatggtgtcgcaagaaggatctga

SEQ ID NO: 38316 - DNA, 198 bp, Homo sapiens
gcgcgtatacgactcactatagggcgaattggagctccaccgcggtggcggccagcaaaaggccaggaaccgtaaaaaggccgcgttgctggcgtttttccataggctccgcccccctgacgagcatcacaaaaatcgacgctcaagtcagaggtggcttaaacccgacagtgactataaagaataccatggcgtttc

SEQ ID NO: 38317 - DNA, 429 bp, Homo sapiens
gcgcgtatacgactcactataggcgaattggagctccaccgcggtggcggccgaggtacagatacatggccccatcaatccactgccactgctgcctcttctgtgggtcgtgcaggccaatccatatcggctggcttctctgatagccacttatgtaagcagtggtaacaacgcagaggacttttcttttggttttgttttgttttgttttgttttgtttttggttttacagagaagagatttttattacaaagaaaaaaattccagtgaattgtgcagaaatgctggtttttacaccatcctaaagaaaaactttacaagggtgttttggagtagaaaaaaggttataaagttggaatcttaaattgtaaaattaaccattgagtgtcaaagttctaaaagcagaactcattttgtgcaatgaacata

SEQ ID NO: 38318 - DNA, 401 bp, Homo sapiens
ggagctccaccgcggtggcggccgaggtactgggcagggcttgggagataagacaggacatctgaagctaaacatggatcccctctgaaagctacaatcaaagtgtcatccacaaaatcttatctcaagccttgactagagaaggacccacttccaagaccacagagttgaatgaattcagtccttgcagcccgttgaactgagggcctccccaacatgctcacctgcttcatcgaagcctgcgagagagagagtccactagcaagaggacattgcagtcttatctaatgcaatcactgaagtgacatcctgtcaccttggtcaccttttctattctattcattataaatgagtcccaagtcctgccacactcaagtggaggggattacacagggctggag

SEQ ID NO: 38319 - DNA, 437 bp, Homo sapiens
ctatagggcgaattttagctccaccgcggtggcggccgaggtaccttgcagcaaaagacaaaaagcaaaaagccagtagacctgcaattcacagctattcctgaggggtgcacattgcagcccactcttgagctccccagtgttctgagcaggggacagggcatacttctagtgatttgctcagtttaatcccttcatccaagaaaacagaccttccccaaccacacctgcagggttacttcagacaaccagcttctcattttagagccccagttcctagaattggagaaaggaagttcccctttaagccctaggtcctgcccactagagcagatacgcaacattaaagagtgcaaattcaagtcagtttttcatatttagcaaacatccattgcacccttataaggtcctcgactttaagaaatttatatgaaatc

SEQ ID NO: 38320 - DNA, 405 bp, Homo sapiens
ctactatagggcgaattggagctccaccgcggtggcggccgcccgggcaggtacaaaacagccagagacaatatataaactacagtatctgaaccttggcactgccaatattttggaccggataatactttgctataggaagctgcccagtgcatcctgggatgtttaggggaatccttggcttctacccacaagatgccagcattcaatactgatagctgcccctcccccagttgtgacagtcaaaaatgtctccagacatggccaggtgtacctcggccgctctagaactagtggatcccccgggctgcaggaattcgatatcaagcttatcgataccgtcgacctcgagggggggcccggtacccagcttttgttccctttagtgagggttaattgcgcgct

SEQ ID NO: 38321 - DNA, 399 bp, Homo sapiens
gcggccgaggtacatttctcagatttcatttttttgtataacatacatagcaagccagacttaaaaaaaaaattattgttatattttccccacatccaatctgggaacatttgctttcatccactctagaactagtggatcccccgggctgcaggaattcgatatcaagcttatcgataccgtcgacctcgagggggggcccggtacccagcttttgttccctttagtgagggttaattgcgcgcttggcgtaatcatggtcatagctgtttcctgtgtgaaattgttatccgctcacaattccacacaacatacgagccgggagcataaagtgtaaagcctggggtgcctaatgagtgagctaactcacattaattgcgttgcgctcactgcccgctt

SEQ ID NO: 38322 - DNA, 392 bp, Homo sapiens
actactatagggcgaattggagctccaccgcggtggcggccgcccgggcaggtacctatatttttaaactggtgaaactgacccaaatatgtaataaataccatagtagctcagacccaaggagatatttttctaaaatcagttttcgttaaagtacctcggccgctctagaactagtggatcccccgggctgcaggaattcgatatcaagcttatcgataccgtcgacctcgagggggggcccggtacccagcttttgttccctttagtgagggttaattgcgcgcttggcgtaatcatggtcatagctgtttcctgtgtgaaattgttatccgctcacaattccacacaacatacgagccgggagcataaagtgtaaagcctggggtgcc

SEQ ID NO: 38323 - DNA, 450 bp, Homo sapiens
ctatagggcgaattggagctccaccgcggtggcggccgcccgggcaggtactctgacaagttttaacagagaaaaacacattttcatttgtcaaaatctttacagaacatatccaaaaccagaattacagcacacagacacccagtaacaagagcacctcaatctcaggtgagggaatttgtgtgaaagatagagcgcttgctccaggttccaatgcaggaaactgcccttctctcacaaggatggtgaagaccaaggaacagttctcttcttccaacagctcaggtcccattagggggccactggtcaatcacttgggtaggcttttggccccaagtttgggccttccctgtggtaaatctcagtcagttccattgagtttttatgctttccacattcatctgtcttgaactagtaaagtacctcggccgctctagaactagtggatcc

SEQ ID NO: 38324 - DNA, 425 bp, Homo sapiens
ctactatagggcgaattggagctccaccgcggtggcggccgcccgggcaggtacgcggggtggagtctcatgacctctcagaataaggtgtcacctccctgaaattgcatatatgtatatagacatgcacacgtgtgcatttgtttgtatacatatatttgtccttcgtatagcaagttttttgctcatcagcagagagcaacagatgttttattgagtgaagccttaaaaagcacacaccacacacagctaactgccaaaatacattgaccgtagtagctgttcaactcctagtacctcggccgctctagaactagtggatcccccgggctgcaggaattcgatatcaagcttatcgataccgtcgacctcgagggggggcccggtacccagcttttgttccctttagtgagggttaattgcgc

SEQ ID NO: 38325 - DNA, 367 bp, Homo sapiens
atagggcgatattggagctccaccgcggtggcggccgcccgggcaggtacatattcaaatgtattcagaaagtcaaaagattacctatcgttctacaataaaatacatggaaatagcttgctatttttatatacatttccaaaatattaagataactttctgtaagagtcaatgattctgttcgactaaatagctgtcctttccaacacattgctacttttttaaatactgtatcataagttcagcctgtcatactttttgcattgatcgttatgaataccagaccatttgtaagtgtggttgaagagcaaaatgctaattgacatctctagtaaatactgctacaggattcatgaacttgaataat

SEQ ID NO: 38326 - DNA, 217 bp, Homo sapiens
atagggcgaattggagcttcaccgcggtggcggctgcaggaattcgatatcaagcttatcgataccgtcgacctcgagggggggcccggtacccagcttttgttccctttagtgagggttaattgcgcgcttggcgtaatcatggtcatagctgtattcctgtgtgaaattgttataccgctcacaatttccacacaactatacgaagccgtggagc

SEQ ID NO: 38327 - DNA, 407 bp, Homo sapiens
  misc_feature 346: n = A,T,C or G
atagggcgaattggagctccaccgcggtggcggccgcccgggcaggtacgcgggggcactcactgaaaataacttcgatgacaccattgcagaaggaataaccttcatcaagttttatgctccatggtgtggtcattgtaagactctggctcctacttgggaggaactctctaaaaaggaattccctggtctggcgggggtcaagatcgccgaagtagactgcactgctgaacggaatatctgcagcaagtattcggtacctcggccgctctagaactagtggatcccccgggctgcaggaattcgatatcaagcttatcgataccgtcgacctcgagggggggcnccggtacccagcttttgttccctttagtgagggttaattgcgcgcttggcgtaatcatggt

SEQ ID NO: 38328 - DNA, 437 bp, Homo sapiens
aatactactactatagggtgaattggagctccaccgcggtggcggccgcccggtcaggtactctgatgtggctgctctgatttctcacattcaaggttctcactgtgaagtcttctacaagtgtcctatttgtccaatggcgtttaagtctgccccaagcacacattcccacgcctacacacagcatcctggcatcaagataggagaaccaaaaataatatataagtgttccatgtgcgacactgtgttcaccctgcaaaccttgctgtatcgccactttgaccaacacattgaaaaccagaaggtgtctgttttcaagtgtccagactgttctcttttatatgcacagaagcaacttatgatggaccatatcaagtctatgcatggaacattgaaaagtattgaagggcctccaaacttgggtataaacttgcctt

SEQ ID NO: 38329 - DNA, 312 bp, Homo sapiens
  misc_feature 255, 293: n = A,T,C or G
ctactatagggcgaattggagctccaccgcggtggcggccgcccgggcaggtactttttgctttagcagatagatagggcatccaatacaactgaaacaacctgataacaaattaattttatttttcaataaaaaggaatgctctggttttttaactggctccttgaggaagccagaagatggcatctgctctttaaacaggcttctcttatctgatttgagacacaaatccaccaagattctttcttacagtgngaagtagtgcacccacccctcagtaaatcacgagggcnctcctaggaagaaaagcct

SEQ ID NO: 38330 - DNA, 425 bp, Homo sapiens
cgactcactatagggcgatttggagctccaccgcggtggcggccgcgaacagtgctccagaactcagagagttttccagacgggtggagatcgcgttccctgcccgccgaggtcccatcgcttccctgctgggaagacaaatgaggcgctttagccgtctccacggccagcccctccctcataacccgagattctttgtgggctcttagtccatagctgcctttgaggtggtgtagaccttgctaaccaggacggcccagtaggcagagctcatttttattcctgtctgcaatcgtgcaaaaacgcctcttatggaaaagccagagcgccaggagtcagcaaaacacactaaagattgggcagtcactggggagaacactcagcccgcctgcacccaggtgaaatatacagccttgttgctcaca

SEQ ID NO: 38331 - DNA, 253 bp, Homo sapiens
gctccaccgcggtggtgtgtgaaattgttatccgctcacaattccacacaacatacgagccgggagcataaagtgtaaagcctggggtgcctaatgagtgagctaactcacattaattgcgttgcgctcactgcccgctttccagtcgggaaacctgtcgtgccagctgcattaatgaatcggccaacgcgcggggagaggcggtttgcgtattgggcgctcttccgcttcctcgctcactgactcgctgcgc

SEQ ID NO: 38332 - DNA, 390 bp, Homo sapiens
tatagggcgaattggagctccaccgcggtggcggccgcccgggcaggtacatggtaaagattcttcagacttctattgatgctaaaactggacaagagcaatctttcccatccttagggtcttgtaatagcaggggggctctgggagctttgatggcatgtctgcgaatagctagagctcatggacatcttcagtctgcaactgatacctgggagaacctcgtgtctgatgcaagaataaagcaaggcttaattcatcagcattgccaagtaaggatagatacattaggcttgctttgtgaaagtaatcggagcacagaaattgtttccatggaagaaatgcagtggattcagttctttattacatacaatcttaacagccagtctccag

SEQ ID NO: 38333 - DNA, 404 bp, Homo sapiens
tatagggcgaattggagctccaccgcggtggcggccgaggtacagtcctttaaggctgcccagttcattctattagatgactaaggaaaactagaaaaagaatacagttcacccttgtcaaggtcaaatgtgaaagacagaagtttatttaatgtagaggtaaatgaaggtgagctgttttcagcatcttagtttgaccatgaaaatgtctatagaattatgtgtagttgttccgtacctgcccgggcggccgctctagaactagtggatcccccgggctgcaggaattcgatatcaagcttatcgataccgtcgacctcgagggggggcccggtacccagcttttgttccctttagtgagggttaattgcgcgcttggcgtaatcatggtataagctgtttcc

SEQ ID NO: 38334 - DNA, 466 bp, Homo sapiens
ctatagggcgaattggagctccaccgcggtggcggccgaggtaccactgccacccagggctacaaacatgtcccttttcacaaagcggaccaagttttcaagcgggcacatgggcttgggagaacgcttgtggtggtcttgacagaaagaggtgtggaatgtgacatcgacgccattgtaaagaatccggacggaatgttcactgggcttttctctgtcttgccaaagctcaaagatcaacctggctgcaaaccttgggaacctggcttctgaaaggcccaaggcactgagaactggtgacagagtgacatcatgagcagagtagagggcaaagagctcttctttcctgccctcggtggcacgctgcatccggccgctctagaactagtggatcccccgggctgcaggaattcgatatcaagcttatcgataccgtcgacctcgagggggggcccggtacccagct

SEQ ID NO: 38335 - DNA, 179 bp, Homo sapiens
cgaattggtgctccaccgcggtggcggccgcccgggcaggtacagcctccctcctggctgctttcacggctgttgttcagtgcctgcggcttttccaggtgcacggtgcaagctgttggtggatctaccattctggggtctggaggacggtggccctcctctcaccagctccactaggc

SEQ ID NO: 38336 - DNA, 484 bp, Homo sapiens
ctactatagggcgaattggagctccaccgcggtggcagccgcccgcccggccaggtccccagggccgggcccaggggttcacacctgtaatcccaacactttgggaggctgaggcgggtggatcacaaggtcaggagatcgagaccatcctggccaacatggtgaaactctgtctctactaaaaaatacagaaaattagccagtcatggtggcacgttcctctagtcccagctactcgggaggctgaggcagaagaattacttcaacatgggatgtggaggttgcagtgagccgagatcgcgccactgcactccagcctggtgacagagcgagaccccatctcaaaaaaaaaaaaaagttgtatgtgacagctaaccataattaaaaaaaaagaaagaaaaaagagagagaaagtagggacaacactaaatcattagtaatttgagcacatttcctccaaggcatatgctatttttcaacttgg

SEQ ID NO: 38337 - DNA, 398 bp, Homo sapiens
ctactatagggcgaattggagctccaccgcggtggcggccgcccgggcaggtactggatttaactacctttggcttaattccaatcattgttaaagtaaaaacaattcaaagaatcacctaattaatttcagtaagatcaagctccatcttatttgtcagtgtagatcaactcatgttaattgatagaataaagccttgtggtcactttctgaaattcacaaagttaaacgtgatgtgctcatcagaaacaatttctgtgtcctgtttttattcccttcaatgcaaaatacatgatgatttcagaaacaaagcatttgactttctgtctgtggaggtggagtaggttgaaggcccagcctgtaactgtcctttttctttcccttaggcaaatgggtga

SEQ ID NO: 38338 - DNA, 407 bp, Homo sapiens
cctaacactactatagggcgaattggagctccaccgcggtggcggccgcccgggcaggtacagctttgccactcaaatataccttattgtggcattcagggagccagggtccagagctgcagggctgcggtccctggctcacttccacataggccatcacataacctgtcataaaggcatcaaaaccagcccggtgcaatccatccccaggcactgggttaggactggcttggctccctggcacttctgaggtagctctatcagctatttcaggccttgctgccttaatccccatctctaagtcatttttgttgccttgcttggagtgaggcaggttcctagtttcatcggcagccacctcctgctcggtttcttcaggcttgatgctatccccacagacctgctta

SEQ ID NO: 38339 - DNA, 436 bp, Homo sapiens
actactatagggcgaattggagctccaccgcggtggcggccgaggtactaatttttttttttttttttgtatttttggtggagacgggggtttcgccaggttggccgggatggtctcgatctcctgacctcgtgatctgccctcctcggcctcccagagtgctgggattacgggcatgagccactgcacccggccccaagctgagtaagctcttactcagctgagggtatcgagcggccgcccgggcaggtacatttatgttttattcagtaagagaatagaattttcatttgtttttctttaaatcctttactaattatataatttgaaagcaaaaagaagggcctatattaaatgctgaaagtgaaaagtgatgacattattagcagacactgcttaaaggagaccatttgtagcagttggcttaacctcaact

SEQ ID NO: 38340 - DNA, 427 bp, Homo sapiens
gcgaattggagctccaccgcggtggcggccgcccgggcaggtactattaactttaaggaaaaggacatgagattttaagtcagaaaggaaaaatgctgactaaggcccaaatgctcaactccaagctttcattcacctaaaaaaatgcaatcaaatctcctcatttgaaagagttcttttttttttcctttttctccagttttggaggagaactggaagggagtaaaaagacctgtccacagcacaaacttccactctggctgtgaaggactagccaattgctaaatgtttcatcacggaggtgctcgatcatattatataaaacactgcaacctccttttcattacatccttcatatattatggatccatcatacattttaaacaaattagatgaaaacagctagaaaaagtaaacagaagttttt

SEQ ID NO: 38341 - DNA, 398 bp, Homo sapiens
actactatagggcgaattggagctccaccgcggtggcgtgcctaatgagtgagctaactcacattaattgcgttgcgctcactgcccgctttccagtcgggaaacctgtcgtgccagctgcattaatgaatcggccaacgcgcggggagaggcggtttgcgtattgggcgctcttccgcttcctcgctcactgacttgttgcgctcggtcgttcggctgcggcgagcgggatcagctcactcaaaggcggtaatacggttatccacagaatcaggggataacgcaggaaagaacatgtgagcaaaaggccagcaaaaggccaggaaccgtaaaaaggccgcgttgctggcgtttttccataagctccgcccccctgacgagcattacaaaaatcgacg

SEQ ID NO: 38342 - DNA, 421 bp, Homo sapiens
cgtaatacactactatagggcgaattggagctccaccgcggtggcggccgaggtactatatactaggaattgaaaattctgtgtaactggctataaacgttttattaaagttatttacatttaatggcaatatttacagagaaacattgtgtaaatcttaaaattttttaaaaacaattcttaaatacaaatctgttaaggaaaaaaaaaaagatggtaagcataaaaaagttcttttatgcccaaagtccaatttgaggcagtttacattatggctaaatctttcagtctcaagactcagccaaggttgtgaggttgcatttgatcatgcatttgaaacaagttcataggtgattgctcaggacattttctgttagaaggaattcgttttccttacttttccttacgcacaagagtttcc

SEQ ID NO: 38343 - DNA, 464 bp, Homo sapiens
ctatagggcgaattggagctccaccgcggtggcggccgaggtacagggtattaaacaaataccaaggggaacagttaacttcaatacaaggccaaaatcagcaacaagttctacaatccagtgctgatatcagatacaagcttcaaggacaatttcttttcgaaggcttattccagtttcgtgaggctagcatgaggtgtgtgcatttgccaggggcaaatttctattctcaattaacccatgcagcaaatgctacgcatctgcccgcgtacatagagacttatgtccacaagccactaggtttacattatcttgctacacagcaatagaaaactagtatagtgtcttctctggtaatgtcagtttctaaagtaacaaacctgatgcagtttgacttttcaggcagtcattatccctgctaaatactagttttatgtttactcaaacatgtatttctatgtagt

SEQ ID NO: 38344 - DNA, 450 bp, Homo sapiens
cactcctatagggcatatggagctccaccgcggtggcggccgaggtactatttatggtggtggggctttcttactatttcacaaataaatttaatcatttcaaaggcattctatttggtttagaagttgattcccaggagtgccatatttcagctactgtatttcctttttcttgtaatgtaagcagctcagataccatgtgctatcatttttgtatcaagttttttgcacaggatgtgaccactgtcagatcactgttcttttctttctttttgtgattgaaaagcctatactacaatttgaagtaaatttttgtttttcttagcggaaaacataataaaaaattaaaagtacctgcccgggcggccgctctagaactagtggatcccccgggctgcaggaaattcgatttcaagcttatcgataccggtcgacctttgagggggggcc

SEQ ID NO: 38345 - DNA, 347 bp, Homo sapiens
cgcggtggccgccgaggtactgatgagtatcaaaaatgatagatgctttttctcgttttctcaaacatgagccccagcaggaagaccatcgtcacacaggagacgatgtccgcgtgattctgcaggacgaattcgtggctcagcactggggggctcttggtgcttttcttgcgaatcgccatggtggggccgccgcccgcgcctccccgcgtacctgcccgggcggccgctcgagcatctctataacatgatcatccgacgctactcagatgaaagtgggaacatggattttgacaacttcatcagctgcttggtcaggctggacgccatgttccgtgccttcaaat

SEQ ID NO: 38346 - DNA, 364 bp, Homo sapiens
tatagggcatttggagcaccatcgcggtggcggccgtcaggttcttgattggcaccttctgatccccctctcctgggcctgtatggctaggcagactcctcatcttggagaacagagaaggacgacagcttctttgttgcgcaaactgactgcagcctccaatggaggggtcattgaggagttatcttgtgttagatccaataactatgtgcaggaaccagagtgcaggaggaatcttgttcagtgcctccttgagaagcaggggaactcctgtggaacctcggccgttttaaaactagggaatcccccggcctgcagaaattcaatttaaacctaatgaatcccgccaacctcaagggggggc

SEQ ID NO: 38347 - DNA, 540 bp, Homo sapiens
gaggtacatctacctaaaggattattatgtggaataatatttactaatgaagttatgcatgatttaaagactacaataaaaccaaacatgcttataacattaagaaaaacaataaagatacatgattgaaaccaagttgaaaaatagcatatgccttggaggaaatgtgctcaaattactaatgatttagtgttgtccctactttctctctcttttttctttcttttttttttattatggttagctgtcacatacaacttttttttttttgagatggggtctcgctctgtcaccaggctggagtgcaggctctagaactagtggatcccccgggctgcaggaattcgatatcaagcttatcgataccgtcgacctcgagggggggcccggtacccagcttttgttccctttagtgagggttaattgcgcgcttggcgtaatcatggtcatagctgtttcctgtgtgaaattgttatccgctcacaattccacacaacatacgagccgggagcataaagtgtaaagcctggggtgcctaat

SEQ ID NO: 38348 - DNA, 461 bp, Homo sapiens
tatagggcgaattggagctccaccgcggtggcggccgaggtacgcggggatgttggatcaggacatcccgatggcgcagccgctattaaaggttcgtttgttcaacgattagagtcctacgtgatctgagttcagaccggagtaatccaggtcggtttctatctacttcaaattcctccctgtacggtcctatacgaagttgttctgtctctgcatcataaatgctaatcattggtcctcctgctaaagttcgcgcagcacgaagctgctcctccggaccccgatcttgaaaggaggctctgtaaatctctgcagtcttaatgttgacagcaatgccatatattactggaaagtggttttcgttttcttcccggtcatttaattctgtcacacataatgtcactaagtgaatgtcatcttcttgcctgtcaaattcactaagaagttggtgaatgagtttt

SEQ ID NO: 38349 - DNA, 387 bp, Homo sapiens
ctatagggcgaattggagctccaccgcggtggcggccgcccgggcaggtactccaaaataattttgcacctggctgttttacacttcaagaatagctttcttggctgggcatggtgacttacgcccgtaatttcttaaagggatcagaagccctgctctgaagttaggcagtcacctctgtgacctcaacaacatctctacattttgctttctttatctgtaaacctaggtttatcagatcttcttcctggcgacgctgtgacaattaaatgaactgctgctcatgggaatggctgggtgacttcggtagctggcatgctgtcagtacctcggccgctctagaactagtggatcccccgggctgcaggaatttcgaatatcaaagct

SEQ ID NO: 38350 - DNA, 307 bp, Homo sapiens
gcgtaagactattttgcaaattggagctccaccgcggtggcggccgctctacaactagtggatcccccgggctgcaggaattcgatatcaagcttatcgataccgtcgacctcgagggggggcccggtacccagcttttgttccctttagtgagggttaattgcgcgcttggcgtaatcatggtcatagctgtttcctgtgtgaaattgttatccgctcacaattccacacaacatacgagccgggagcataaagtgtaaagcctggggtgcctaatgagtgagtctaacttcacatttaatttgcg

SEQ ID NO: 38351 - DNA, 422 bp, Homo sapiens
tacgactcctatagggcgaattggagctccaccgcggtggcggccgaggtacttttttttttttttttttttttttttttttaccttttcaggatttattgggtcagggaagggcctggcccaaaaatttttcctgaggggtccctggtaccccggggctttaatggcttcctcttcgggttttcttttccttcggtaacccctcccggcttttgttagccttccgccggccggttttaaacttgtggatcccccgggcttcaggaattccattttaagcttattgattcccgccaccttgagggggggcccggttcccaacttttgttccctttagtgagggttaattgcccccttggcgtaatcatgggcataactgtttcctgtgtgaaattgtttttcccttacaattccccacaaca

SEQ ID NO: 38352 - DNA, 419 bp, Homo sapiens
agggcgaattggagctccaccgcggtggcggccgaggtacagagataagatacaaagataaaaatgttggtatcagttgattttgaagcaggtaattactgtgccacctcacagtgctcaaaaatagttcagtcctgaatagtttattcagcccatcaaataagcattgggttgttctaacttcctcaacatcctcccccctccttactttttgaaccaacccccatctcactgagataattatctgcttgtaatcaaaacgggttctccccaaccccagtacctgcccgggcggccgctctagaactagtggatcccccgggctgcaggaattcgatatcaagcttattgataccgtcgacctcgagggggggcccggtacccagcttttgttccctttagtgagggttaattgcgcg

SEQ ID NO: 38353 - DNA, 425 bp, Homo sapiens
atagggcgaattggagctccaccgcggtggcgggctggaccaggtgaatgtaaagcccttctcctcccacacacaatggactcacccagtattaccctccactaccacttttgaccctcataacagcaccctggcgggggggcagattgatgttatcaccatttaccagatgaggaaactgaggcctgatgggcagtgatttgtacactgcgacataggactcagtgaagagcctagccagctgacggtcagctgactggtgcactctttccctcaccttctctctcaagggcacagctacactctttctccaccattattaacactcacagggcacaggtagagcgtccccagacctgtgcaatattctacacgaaaacatttggaatgtgagcaatgtctgaacaggggcttgccaggcacat

SEQ ID NO: 38354 - DNA, 239 bp, Homo sapiens
ctcactatagggcgaattggagctccaccgcggtggcggccgaggtactttttttttttttttttttttttttttcgtgttgctgaccttcacttttatttaaatatagtgatcttttaagagaataaacaaaaaatactttacacagcaaatattttacataaatgtaaacaatgcattgtctaacttcattaatttaagcaaaaaaaaacttttttaggcacaaaggattttttaaa

SEQ ID NO: 38355 - DNA, 454 bp, Homo sapiens
tatagggcgatttggagcaccaccgcggtggcggccgcccggttaggtactggttgttttggaggaacctatggcttgctcattaagtcctactgattttcactatcccctgaatttccccacttatttttgtctttcactatcgcaggccttagaagaggtctacctgcctccagtcttacctagtccagtctaccccctggagttagaatggccatcctgaagtgaaaagtaatgtcacattactcccttcagtgatttcttgtagaagtgccaatccctgaatgtcaccaagatcttaatcttcacatctttaatcttatctctttgactcctctttacaccggagaacggctccagctgttctagctctctttcagatctttgaaccttcccaccttagggtctataaggttccctctgcccaaattgttctactctcccttcttcttca

SEQ ID NO: 38356 - DNA, 340 bp, Homo sapiens
  misc_feature 7: n = A,T,C or G
gaccttnattcgttaagacgtcaggtttcagatatgaactttcagcttaagcgcttgccgggagcaaagggacagaaaagctgagatgaacagtgcctggcagcaatcacagccgggcaagggtgctccgagcctcgcatcccccggccgctctagaactagtggatcccccgggctgcaggaattcgatatcaagcttatcgataccgtcgacctcgagggggggcccggtacccagcttttgttccctttagtgagggttaattgcgcgcttggcgtaatcatgggcatagctgtttcctgtgtgaaattgttatccgcttccaatttcacaacaaca

SEQ ID NO: 38357 - DNA, 463 bp, Homo sapiens
tacactactatagggcgaattggagctccaccgcggtggcggccgcccgggcaggtacgcgggaggcccaggtgtgtaggccacagcagccgcagtcctgaaaggctgcaacacccagacctccaggagagaccaggcccaggatgcctcgcctgttcttgttccacctgctagaattctgtttactactgaaccaattttccagagcagtcgcggccaaatggaaggacgatgttattaaattatgcggccgctctagaactagtggatcccccgggctgcaggaattcgatatcaagcttatcgataccgtcgacctcgagggggggcccggtacccagcttttgttccctttagtgagggttaattgcgcgcttggcgtaatcatggtcatagctgtttcctgtgtgaaattgttatccgctcacaattccacacaacatacgagccgggagcataaagt

SEQ ID NO: 38358 - DNA, 464 bp, Homo sapiens
tacactactatagggcgaattggagctccaccgcggtggcggccgaggtacataatccatgtaatatgggcttgtcaaaacctgctagactagcaaagttaggatcaatgtgtaagggattccagtctccactgaggcggtacaccaaggtggtgcattaccggaagtggatcaaggacaccatcgcagccaacccctgagtgcccgctctagaactagtggatcccccgggctgcaggaattcgatatcaagcttatcgataccgtcgacctcgagggggggcccggtacccagcttttgttccctttagtgagggttaattgcgcgcttggcgtaatcatggtcatagctgtttcctgtgtgaaattgttatccgctcacaattccacacaacatacgagccgggagcataaagtgtaaagcctggggtgcctaatgagtgagctaactcacattaattgcg

SEQ ID NO: 38359 - DNA, 390 bp, Homo sapiens
ctatagggcgaattggagctccaccgcggtggcggccgaggtactttttacaatgaagggatatggcagcatggatactgggtagctggctaggctctaaatacctgatgactcaacgctttgcacaaaccagtcttgctgattattaaaatttgtccctgggcaaaattaaagcaatgcatgttagggcttcaaatgcaaaggattcactgtagttgattctttcaagaatagaaatcgaccataactttgctttataatccatgtgatacaccacattataacagatcccgcgtacctgcccgggcggccgctctagaactagtggatcccccgggctgcaggaattcgatatcaagcttatcgataccggtcgaccttcgaaggggg

SEQ ID NO: 38360 - DNA, 432 bp, Homo sapiens
  misc_feature 254, 261, 283, 284, 301, 303, 304, 318, 319, 328, 329, 361,362, 373, 375, 376, 386, 421, 422: n = A,T,C or G
actactatagggcgaattggagctccaccgcggtggcggccgcccgggcaggtactgacttcaagcaatttgagaccaatgatcaatgcagaccttatcataggatccttattgagcgtcaagagaaatcagatacaaacttcaaggagtttgttattaaaaagctgcagaagaattgccagtgcagtccagccaaagccaaaaatatgattttaggtttccttcctgttttgcagtggctcccaaaatacgancctaaangaaaaacatttttagggggatnngtgatgtcagggcttgnannttgtgggcattatnntattggtgnnccccagtccattttgcttatttcccttgctgnngctggccaagnannacctgtctanttggtctgccacctcggccgcttcttagaactagnntggattcccc

SEQ ID NO: 38361 - DNA, 401 bp, Homo sapiens
attggagctccaccgcggtggcggccggcgggaggctgacgagagccgggaggcgttagcgaaggaagagaaaaaccgaagacgaagccactacagcccccgcgtacaggtgaaacaaattctcatcttgaatgatcagatgcaaaatcatttctgaaccctagagcagaagttagaaataacaaaatggccgtttcaaccttgactggccaaaaataactaataaacttttttgttttaagtcaggcaagtgattttctacatttagcagtttgaaagtccagtgttaatgcaatatttctagtgagaaatgcttgttattaaaagcatgggagtgatagtgtgaaatggtggtgagtgcttctatcatattactgtaggtacctcggccgctctagaac

SEQ ID NO: 38362 - DNA, 437 bp, Homo sapiens
actactatagggcgaattggagctccaccgcggtggcggccgaggtaccagatggaaaatgtttttggtgatctggctgctgcttaaagccagttttccctaagaactccaaaggctaaagtctactaggggcagagtgtgaggatagatttctaatcagagaaaagtggcctccaggagctttcatttatgtcttctccagaccaggttttcctgttatcttcctttaatcccctttcaaccaacaggtgaagttcttccagcccacagaggtagtaatatcatcttttctatctcctcctctcctttggccatgtaatgaagcaaaatattatttatttagcccaggcttgagagccactgtttgtggacagtcttcatctagattccataccctggcctaggcgaggtaaggctctctggttattgccaggatg

SEQ ID NO: 38363 - DNA, 416 bp, Homo sapiens
gcgaattggatctccaccgcggtggcgcgtggtcgcggccgaggtacagtagtgcactcttggctcactgtatcctcgacctccggggctcaagtgatcctcctgccttagccccacaagtagtgggactataggcacacagcaccatgcccatctaagtttttgtattttatgtagagacaaggtttcaccatgttgcccaggctgatcttgagctcctgagctcaagtgatctgcccaccttggactcccaaaatgctgggattataggcgtaaaccaccatgcctggccttaaatcaactttagagtcaacatctcttatcactggagcttctggagaaactccatcacgtggtgctctctttcctgatgtgttgtgcccaaatagcttgttctcatcagatgacttatttgc

SEQ ID NO: 38364 - DNA, 429 bp, Homo sapiens
tacactactatagggcgaattggagctccaccgcggtggcggccgcccgggcaggtacatcagttgctttcaacattttcagattgttacatgttttcatatttttattccagatttatcctttgttgtgactgtagtggaaactaatttaattcttcactgtgatatcttttttgttttgaaaatatagccagtttttctaattatacaaaaaaaagaaaataaataatacagaagaaaatatatatttatggcccaaaccccaagaataattactgatacgattttggcatgttttcttccagtgtttctcattgcatacatatataaaaatatttaaacttcttaattataaaaaaaaaaaaaaaaaaaaaaaaaaggtccctcggccgctctagaactagtggatcccccgggctgcaggaattc

SEQ ID NO: 38365 - DNA, 435 bp, Homo sapiens
actactatagggcgaattggagctccaccgcggtggcggccgcccgggcaggtaccctggaatatgacggtgatcacaagcctgcaacaggaactctgccccagtttcctcctcccctctgctccagctctggggcgctgctttccatggaccaacgttactccaccggcgctcccagggatcaccaatgacaccaccatacagcaggggatcagcggtcttattgacagcctcaatgcctgagacatcagtgttaagatctttgaagattttgcccagtcccggtattggattcttgttgccctgggggtggctctggtcttgagcctactgtttatcttgcttctgcgcctggtggctgggcccctggtgctggtgctgatcctgggagtgctgggcgtgctggcatacggcatctactactgctgggaggag

SEQ ID NO: 38366 - DNA, 472 bp, Homo sapiens
actactatagggcgaattggagctccaccgcggtggcggccgccggggcaggtacataagtggctatcagagaagccagccgatatggattggcctgcacgacccacagaagaggcagcagtggcagtggattgatggggccatgtatctgtacctcggccgctctagaactagtggatcccccgggctgcaggaaattcgatatcaagcttatcgataccgtcgacctcgagggggggcccggtacccagcttttgttccctttagtgagggttaattgcgcgcttggcgtaatcatggtcatagctgtttcctgtgtgaaattgttatccgctcacaattccacacaacatacgagccgggagcataaagtgtaaagcctggggtgcctaatgagtgagctaactcacattaattgcgttgcgctcactgcccgctttccagtcgggaaacctgtcgtgccagctgcatt

SEQ ID NO: 38367 - DNA, 96 bp, Homo sapiens
aatacgactactatagggcgaattggagctccaccgcgggtggcggccgcccgggcaggtaccaaagagggcataataatcagtctcacagtaggg

SEQ ID NO: 38368 - DNA, 364 bp, Homo sapiens
tatagggcgaattggagctccccgcggtggcggccgaggtacacaagtaactctgattatttgcaaatactaattaaaatatatcacaccaaagaactgccaagtttttatattgtggtctgtggtcctgtcataatctgttttcccagtgcaaaattaataatgctatgtgttcatccaactcagccactgcttttcacagggcatagagctctttgagagctcagctgagaagtgtaatgcatggttgtagctcaacaagtgaaggatagaccaaacgctttttgtcagaagtcattcagtccttggtcctatctgctaagttaatgtccttttctgtgggttaagttacaaaaagtgaaat

SEQ ID NO: 38369 - DNA, 398 bp, Homo sapiens
ctactatagggcgaattggagctccaccgcggtggcggccgcccgggcaggtacgcggggaaaaaattcatactggagagaaaccctatgagaaccctaaccctaacgcttcagttgtcccagttctttcatgagcatgaaaggagtcacatagagaaaccccatgaaagtaagaaatttgggaaagccttcagtcctttctgtttctttcaactacgtgaaaggattcacagtggagaaagaccctgtaagataattggctttaaattacgagagacttgtgataggacagtaaaacctagagttggagttggatctctggattgtgttatgtcagtgttggtaggttaggaactagatttcccagaatccattccatttgtgattccatgatacaa

SEQ ID NO: 38370 - DNA, 423 bp, Homo sapiens
gctccaccgccgtggcggccgcatattttaataacatcttcctttcatttggtcgcgtttgctctggaaaattggttcagtagtaaacagaattctagcaggtggaacaagaacaggcgaggcatcctgggcctggtctctcctggaggtctgggtgttgcagcctttcaggactgcggctgctgtggcctacacaccccgcgtacctcggccgctctagaactagtggatcccccgggctgcaggaattcgatatcaagcttatcgataccgtcgacctcgagggggggcccggtacccagcttttgttccctttagtgagggttaattgcgcgcttggcgtaatcatggtcatagctgtttcctgtgtgaaattgttatccgctcacaattccacacaacatacgagccgggagcataaag

SEQ ID NO: 38371 - DNA, 367 bp, Homo sapiens
  misc_feature 341: n = A,T,C or G
ctactatagggcgaattggagctccaccgcggtggcggccgcacgtggaatgacccgtctgtgcagcaggacatcaagttcttgccgttcaaggtggttgaaaagaaaactaaaccatacattcaagttgatattggaggtgggcaaacaaagacatttgctcctgaagaaatttctgccatggttctcactaaaatgaaagaaaccgctgaggcttatttgggaaagaaggttacccatgcagttgttactgtacctcggccgctctagaactagtggatcccccgggctgcaggaattcgatatcaagcttatcgataccgtcgacctcgagggggggncccggtacccagcttttgttcccttt

SEQ ID NO: 38372 - DNA, 456 bp, Homo sapiens
actactatagggcgaattggagctccaccgcggtggcggcccaaattctttcagtggctacctacatacaattccaaacacatacaggaaggtagaaatatctgaaaatgtatgtgtaagtattcttatttaatgaaagactgtacttttttttttttttttttttttttttattaagcactacataacacattgcatgctacataatacactgtaaccttctagcaggggtagatggccataactgagttatttttttcatcaatcaggaaaatgcttccttaatcaatgttctccaaaccctttgacacatagtaacgatcaactccagagatgcgcctatctctttccatcagactccagtgatacccaaaatgagcaacccttttttccttgcccccgttagtgaacctgtggatgtaccttggccgctctagaactagtgggatcccccgg

SEQ ID NO: 38373 - DNA, 409 bp, Homo sapiens
gagctccaccgcggtggcggccgaggtactggaggtaacaggcccacggttgaataccatggatccctccggtctcccgttccatggtcacacacacctggagggcacccacacggtttgtccatctccttatcgagcggccgcccgggcaggtactttgtttttttttttttttttttttgggacggagtcttgctctgtcacccaggctggagtgcagtggcacaatctcagctcactgcaagctctgcctcccaggttcaggtcattctcctgcctcagcctcccgagtagctgcccgccaccacggccgctctagaactagtggatcccccgggctgcaggaattcgatatcaagcttatcgatcccgtcgacctcgagggggggcccggtacccagcttttgtt

SEQ ID NO: 38374 - DNA, 357 bp, Homo sapiens
catctgaggccacacatctgctgaaattttgataattaacatccctagaaacagctagatgacaatataatgtctaagtagtgacatgtttttgcacatttccagcccttttaaatatccacacacacaggaagcacaaaaggaagcacagagatccctgggagaaatgcccggccgctctagaactagtggatcccccgggctgcaggaattcgatatcaagcttatcgataccgtcgaccttgagggggggcccggtacccagcttttgttccctttagtgagggttaattgcgcgcttggcgtaatcatggtcatagctgttttctgtgtgaaaatgttatccgctcacaattt

SEQ ID NO: 38375 - DNA, 435 bp, Homo sapiens
ctactatagggcgaattggagctccaccgcggtggcggccgcccgggcaggtacctgatttttcatgacccttacagacacacagagacacatacacattgatcttaaaatttttctcagtcactgatatgcaaaggaccacactgtctctgcttccaggagtattttagaaatgttccacaatttactgaagacatagagatgatgctgctgcttaggtgccttttagcaagctatgcaaacaatcctgataaaacaagatacatagagagtcgatctggcttctgagaatttaccaagtgaacagagtacctcggccgctctagaactagtggatcccccgggctgcaggaattcgatatcaagcttatcgataccgtcgacctcgagggggggcccggtacccagcttttgttccctttagtgagggttaat

SEQ ID NO: 38376 - DNA, 458 bp, Homo sapiens
gcgaattggagctccaccgcggtggcggccgcccgggcaggtactctatacccaggcaaaggcaagcaagcagccttgaacaagtcattcaactcattgaagctgatgtatccattgccatcagtatcaactttggcaaaagcttctctgagctccatcatttcctcatcggacactgatcctctggccattttttattgctttaggtaacaggtctcagcagcacgaaaagctctgtctagatgcattctcctcactggccccaggcagatgcgctctccccgcgtacctcggccgctctagaactagtggatcccccgggctgcaggaattcgatatcaagcttatcgataccgtcgacctcgagggggggcccggtacccagcttttgttccctttagtgagggttaattgcgcgcttggcgtaatcatggtcatagctgtttcctgtgtgaaat

SEQ ID NO: 38377 - DNA, 287 bp, Homo sapiens
gcagattggagctccaccgcggtggcggccgcccgggcaggtacagataaagatgatgtctttttgttattgtctgtctgttttgtatgtgtctgagataagggatagagaggaaacatccgtcaggctaatttaactacattttattttaaaaatagagaaacataacctctagatgggacagcagaggacagttagtagaggccacaaactgttatgggctgctgtgttttgttctaaaatcaatatggttggagcatgtatatcttaggtggtcatttcacatc

SEQ ID NO: 38378 - DNA, 374 bp, Homo sapiens
attggagctccaccgcggtggcggccgcccgggcaggtactggagccacccgcgaaaattcggccagggttctcgctcttgtcgtgtctgttcaaaccggcacggtctgatccggaaatatggtctcaatatgtgccgccagtgtttccgtcagtacagttatggctatcctagcactgacctctaaaacaattggaatcacgcttaagtaatttggaggatgtgaagaaattggaaccctgtgcactgttggtgggaatgtaaaatggtgcagccactttggaaaacactgtagagattcctcaaaaaatgagagctaacgtgatccagcagttccacttccagaaagaattaaaagcgggatctcagagttt

SEQ ID NO: 38379 - DNA, 419 bp, Homo sapiens
aattggagctccaccgcggtggcggccgaggtacatattgtcaacaaggctgatatcgccatggtgatctgtgacacaccccaaaaggcattggtgctgatagggaatgtagagaaaggcttcaccccgagcctgaaggtgatcatccttatggacccctttgatgatgacctgaagcaaagaggggagaagagtggaattgagatcttatccctatatgatgctgagaacctaggcaaagagcacttcagaaaacctgtgcctcctagcccagaagacctgagcgtcatctgcttcaccagtgggaccacaggtgaccccaaaggagccatgataacccatcaaaatattgtttcaaatgctgctgcctttctcaaatgtgtggagcatgcttatgagcccactcctgatgatgtggc

SEQ ID NO: 38380 - DNA, 407 bp, Homo sapiens
gcctatcactactatagggcgaattggagctccaccgcggtggcgccgctctagaactagtggatcccccgggctgcaggaattcgatatcaagcttatcgataccgtcgacctcgagggggggcccggtacccagcttttgttccctttagtgagggttaattgcgcgcttggcgtaatcatggtcatagctgtttcctgtgtgaaattgttatccgctcacaattccacacaacatacgagccgggagcataaagtgtaaagcctggggtgcctaatgagtgagctaactcacattaattgcgttgcgctcactgcccgctttccagtcgggaaacctgtcgtgccagctgcattaatgaatcggccaacgcgcggggagaggcggtttgcgtattgggcgctct

SEQ ID NO: 38381 - DNA, 349 bp, Homo sapiens
tatagggcgaattggagctccaccgcggtggcggccgcccgggcaggtactggaaatcagtttgctgaaattaatcaacgattcttgaagttgaagaaaaggaggttccagccttggcaagaggagtgtggcccttcctggaatccctctggacacaccctcctagcatcctctaggaaagatgcggcagctcaaagggaagcccaagaaggagacctccaaggacaagaaggagcggaagcaagccatgctggaggcccggcagcagatcactacagtggtacctcggccgctctagaactaggtggatcccccgggctgcaggaatttcgatatcaaagcttatcga

SEQ ID NO: 38382 - DNA, 380 bp, Homo sapiens
tacgactcactatagggcgaattggagctccaccgcggtggcggccgaggtactcttgatgaaagaccgtgaaaccaacaaatcaagaggatttgcttttgtcacctttgaaagcccagcagacgctaaggatgcagccagagacatgaatggaaagtcattagatggaaaagccatcaaggtggaacaagccaccaaaccatcatttgaaagtggtagacgtggaccgcctccacctccaagaagtagaggccctccaagaggtcttagaggtggaagaggaggaagtgctctagaactagttggatcccccgggctgcaggaattcgatatcaagcttatcgattaccgtcgaccttgaggggggggcccggtaccca

SEQ ID NO: 38383 - DNA, 443 bp, Homo sapiens
gctccaccgccgtggcggccgcccgggcaggtacacttctagctactggttcctattatgggtttgccagaatatggactaaagatggtaaccttgctagcaccttagggcagcataaaggccctatatttgcattaaaatggaataagaaaggaaatttcatcctaagtgctggagtagacaagactacaattatttgggacgcacatactggtgaagccaagcaacagtttccttttcattcagcaccagcattggatgttgattggcagagcaacaacacctttgcttcttgtagtacctcggccgctctagaactagtggatcccccgggctgcaggaattcgatatcaagcttatcgataccgtcgacctcgagggggggcccggtacccagcttttgttccctttatgagggttaattgcgcgcttggcgtaatcat

SEQ ID NO: 38384 - DNA, 390 bp, Homo sapiens
  misc_feature 64: n = A,T,C or G
gagcggccgcccgggcagttacaaaggcgcaatctcacctcactcttatctacgcctcccaggntcaagcgatttttctgtctcagcctcccgagtagctgggattacaggcacccactaccatgcccagctaatctttgtaattttagtagagacggggtttcaccatgttggtcagtccggtctcgaacttctgacctgaggtgatctgcccaccttggcctcacaaagtgctgagattacaggcttgagccaccacgcctggcctagttagcattttaaagaaacacaaagccataacaaaaaccatcattgtttgtattccacactgttaatgaatgtaaagaggttagaaatgtagtgtttgattaatgatggttatttttactg

SEQ ID NO: 38385 - DNA, 443 bp, Homo sapiens
ctactatagggcgaattggagctccaccgcggtggcggccgaggtacttattcttcagggttactgagtcggcacctatgacagctaagagagctttcttaaagactgcctcagtgtcttcttggcttttggcaccttcactccactctgcccaggaaatccacaatggcagacaaacctggggtttcaggtgcacaaaggcttcttcaaaaagcatggctatgtcagggctctttgactcgatcagcacctgcagcttcagctgccacattgtcccagagtctctaaacaattcagttccagctactgccacttccagagcttccctcaggaagttataacacagcaacgaaacactcaactgcttgtattggcattctgacagaagcttcagttcatgtgccttcctgaatacagtcatggttctttccaacctcttccct

SEQ ID NO: 38386 - DNA, 464 bp, Homo sapiens
tatacggcgaattggatctccaccgcggtggcggccgaggtactgttcatccagcttctttaatactgtatctgcagtctcattcccaggctgtttcatgaaggaatctacatcttccacaaacacggcctcaggaatccccaggtggagccgccgcccattccctgtggccatttctcctttgccacaactgtccttaacggccgctctagaactagtggatcccccgggctgcaggaattcgatatcaagcttatcgataccgtcgacctcgagggggggcccggtacccagcttttgttccctttagtgagggttaattgcgcgcttggcgtaatcatggtcatagctgtttcctgtgtgaaattgttatccgctcacaattccacacaacatacgagccgggagcataaagtgtaaagcctggggtgcctaatgagtgagctaactcacattaattgcgt

SEQ ID NO: 38387 - DNA, 369 bp, Homo sapiens
tatagggcgaattggagctccaccgcggtggcggccgaggtactaggaaggcagacggctcgggacttgcccagcatcctcaagctggcaccataccagcgtgactagagccacctcccttggctccttgtccactgccctttgcatctcatgcgggtctccagaagaccccgctcctgctgtgcaaggctccacgcataccttaaacactgctgtggtgttgggtggccacgtgacccacacaggccttttctagttcaccagttttctgcaaggatgctggttagggagtgtctgcaggaggagcaagtctgaaaccaaatctaggaaacataggaaacgagccaggcacagggctggtgggccatc

SEQ ID NO: 38388 - DNA, 401 bp, Homo sapiens
tatagggcgaattggagctccaccgcggtggcggccgaggtacttcccacttttcataacgagttggagcctagagttgatcgactccagcgactttttcgtcttctttgcggccaccatcttcctgccttaggagcgggacggcccccaaccaacagcagccgctaagatggccggggaacgagaaaggaaagacttcccacaatgcaaagctcttcacggcccccgcgtacctgcccgggcggccgctctagaactagtggatcccccgggctgcaggaattcgatatcaagcttatcgataccgtcgacctcgagggggggcccggtacccagcttttgttccctttagtgagggttaattgcgcgcttggcgtaatcatggtcataggctgtttcct

SEQ ID NO: 38389 - DNA, 384 bp, Homo sapiens
  misc_feature 262, 263, 308: n = A,T,C or G
ctactatagggcgaattggagctccaccgcggtggcggccgaggtactctgctctcattaggatcaatagtgcagaacgggaagttttctgctgaagcctgactattggttaacacattgaagaaagtagatttcccaacatttggcaatccaacaataccaattttcagtgaggttccaaatcttccaatgattgggggtggtttaattccatcacctccctttttagggggcatcgtgctcggcctgggcgatgacacgnngggtcccagcggcagcgagagaaagggtcctgccggcagctcccnccgcgtaccttggcccgggcgggccgctctagaactaggtggattccccccgggcctgcaaggaatttcgatatca

SEQ ID NO: 38390 - DNA, 126 bp, Homo sapiens
gggcgaattggagctccaccgcggtggcggccgaggtacttttttttttttttttttttttttttaagaggaaaacccggtaatgatgtcggggttgagggataggaggagaatgggggataggtg

SEQ ID NO: 38391 - DNA, 401 bp, Homo sapiens
  misc_feature 290, 305: n = A,T,C or G
actactatagggcgaattggagctccaccgcggtggcggcgctctagaactagtggatcccccgggctgcaggaattcgatatcaagcttatcgataccgtcgacctcgagggggggcccggtacccagcttttgttccctttagtgagggttaattgcgcgcttggcgtaatcatggtcatagctgtttcctgtgtgaaattgttatccgctcacaattccacacaacatacgagccgggagcataaagtgtaaagcctggggtgcctaatgagtgagctaactcacanttaattgcgttgcgnctcactgcccgctttccagtcgggaaaccttgtcgtgccagctgcattaatgaatcggccaacgcgcggggagaggcggtttgcgtattgggcgct

SEQ ID NO: 38392 - DNA, 400 bp, Homo sapiens
tatagggcgaattggagctccaccgcggtggcggccgaggtactggctgacaaagtgagacccctgtctaaaaaaaagataaagagagttacctgaatctggaatccttaatcttggttttccttaaactttctataagtccagcatctgaaatattttgtcaattatcacattaatgtgttcattttgtaagtaagagtacctgcccggacctgcccgggcggccgctctagaactagtggatcccccgggctgcaggaattcgatatcaagcttatcgataccgtcgacctcgagggggggcccggtacccagcttttgttccctttagtgagggttaattgcgcgcttggcgtaatcatggtcatagctgtttcctgtgtgaaattgttatccgctc

SEQ ID NO: 38393 - DNA, 381 bp, Homo sapiens
atacgactactatagggcgaattggagctccaccgcggtggcggccgaggtaccttgatggctgtttgtggtcatacactccgtggaccagtcttgagggatcacagggccaaccagctcagcaaacctctccagaggacagctggggctgcagccaggtagcatgaggggatacggctcgtgctgcgtctcattccgatagtacctgcccgggcggccggctctagaactagtggatcccccgggctgcaggaattcgatatcaagcttatcgataccgtcgacctcgagggggggcccggtacccagcttttgttccctttagtgagggttaattgcgcgcttggcgtaatcatggtcatagctgtttcctgtgtgaat

SEQ ID NO: 38394 - DNA, 273 bp, Homo sapiens
agggcgaattggagctccaccgcggtggcggccgaggtacatttttattatccttataccagttataacttcattcatggtcctgatcctggcatccgtgaaagttgcagttttactcctcagtgatgagaacaacttcccaaaacagctttgcaagggcaggagaatgattagaactgccgctctagaactagtggatcccccgggctgcaggaattcgatatcaagcttatcgataccgtacgaccttctaggggggggccccgggtaccc

SEQ ID NO: 38395 - DNA, 317 bp, Homo sapiens
tatagggcgatttggagctccaccgcggtggcccgcccgggcaggtacagggtcctttttaataaaactggttttgacttgatccaagtgtttaacaattggggctgttaagtctgaccatacatcactgtgatagaatgtgggcttttttcaagggtgaagatacaagtcttaaccacagtgtaacttacagttttcctttaaaaaaaaaaagtaaaacctggcagctatagaatacactatgtgcatttataattagctattttatatatttgtagtattcaaccattttttaaaattaaaatgttttttacatt

SEQ ID NO: 38396 - DNA, 194 bp, Homo sapiens
tatagggcgaattggagctccaccgcggtggcggccgaggtacataaggttcaaagtttcctttcctttttttatttattttatattttgcaatgttttttttccataatatttaagtttttcgatgtttagatatttttcttcggggaagcgcaagtttcttttcatggtcccctgatcaatttttaaacagg

SEQ ID NO: 38397 - DNA, 414 bp, Homo sapiens
tatagggcgaattggagctccaccgcggtggcggccgaggtacatcagaaagaattcctgaaaatttataatagaatgaattttattaatgcagaaaaataccccagggtgttaaaatatatgaagtgtgggatatattcttatagtttgtaaaatgtagtcaaccaatactgtcttctaaattgataatttaatttataaaattacttaaacattaggtaattatatttgttaggatttgaaattatttgtagttaaattgtcatgctgtttgaaataattgatacttgtctacgtaatacattttactgtatgttttgaagatggttataatttcactttcaaaatttaaaaaatcaattttaaatgttttaaaaacatatagcttagggatttttttaaaaaggttttctt

SEQ ID NO: 38398 - DNA, 481 bp, Homo sapiens
actactatagggcgaattggagctccaccgcggtgggcggccgaggtacctcgtaactctcgattctgttcctttattacatcatccacggttttcttcttgaagagggacgccatggttaaagactgcgcccgggcggccgctctagaactagtggatcccccgggctgcaggaattcgatatcaagcttatcgataccgtcgacctcgagggggggcccggtacccagcttttgttccctttagtgagggttaattgcgcgcttggcgtaatcatggtcatagctgtttcctgtgtgaaattgttatccgctcacaattccacacaacatacgagccgggagcataaagtgtaaagcctggggtgcctaatgagtgagctaactcacattaattgcgttgcgctcactgcccgctttccagtcgggaaacctgtcgtgccagctgcattaatgaatcggccaacgcgcggggagaggcg

SEQ ID NO: 38399 - DNA, 409 bp, Homo sapiens
agggcgaattggagctccaccgcggtggcggccgaggtacatttcttcaatcacaaaatttttcaccaatctatttatgtctagtatcagaaagttaagcaaggagattgcaaaccaacacaacacctttagtctggattttcccggagccccatttgtgttagtgtcctcgggctactgtaacaagttctcaataatgtggtagcttcaaacaacaggaatggaatctctcatagttcagaagtccagatcagtttcactgggctaagatcttggagtcatcagttctggctccttctgaagctctagggagcagtctgatttagctcttccagcttctggtggcttctctctcccgggatgtggacacatcactcagttcttggcaacctggttgcattcttaatta

SEQ ID NO: 38400 - DNA, 369 bp, Homo sapiens
actactatagggcgaattggagctccaccgcggtggcggccgaggtaccaagtatttcctgcattgttgctaaaattgttttattgtagctccacattctggtgtagtttaaaatgcctttgggggcagtttgaagcagttcttcatgccacttagtttgaaaataaaattctagatttgcaaatgattttcttagaaaacttcacaaaataaaagatcttgttttttttccatagcacagtaatgaatgtggttatcaatcacatacttttttggattatattgtagcaaaaagttgattaccttaccaagattattaatagcaatgtatgtgttataatacaacttagtacctgcccgggcggccgt

SEQ ID NO: 38401 - DNA, 394 bp, Homo sapiens
  misc_feature 267, 268, 287, 294, 299, 300, 312, 313, 329, 330: n = A,T,C or G
ctactatagggcgaattggagctccaccgcggtggcggccgaggtacaggtctacaaaatgttttcaaggagaaaagcagcatatccttaagtgaagtattatatttttcaataaccctgtagtggcttgatgcagggaaccctgggggactttcagcgaagagctgtgctcttttctgactagattagagcgtttggagtggaagacgtcaaatgtgtagtgagatggaggttttacattgttcttctactggctgtgatgaagtnngccagaatggtctctttangaacaangagtnntagattcccccnntttcttcttattgccnnccttccgttttgactttccccttttattttaatttgctgttcttaattaggggggccaagtctg

SEQ ID NO: 38402 - DNA, 394 bp, Homo sapiens
actactatagggcgaattggagctccaccgcggtggcggccgaggtacccaagcacacatgtgtgaagggctatagccaaagtatttttactagcctgtatgaaatcactagtccttatttttaaaggtctatggtttcttggaagtagtttgattgttgagagagacctttgatctgcagtgtaaatctaccagtcatgggccagaagggcaaaagcccagctttctctttggaaagactcaggctgtggtttgttgatggccaggttttcctcaggctccaacaactgtgcttataccaagcagatcctcatcctccatataatcatctttgttattcgggggggtttaattacattacaagtggccaaaacccctgttctcagtgaagaac

SEQ ID NO: 38403 - DNA, 477 bp, Homo sapiens
cgactactatagggcgatttggagctccaccgcggtggcggccgaggtaccgtgatgtaatgctggacaccttcaggctttttgtctctgtgggacattggttaccgaagccgaatgtcatctccctgctggagcaagaggcagagctgtgggcggtggagtctagacttccccaaggcgtgtacctgcccgggcggccgctctagaactagtggatcccccgggctgcaggaattcgatatcaagcttatcgataccgtcgacctcgagggggggcccggtacccagcttttgttccctttagtgagggttaattgcgcgcttggcgtaatcatggtcatagctgtttcctgtgtgaaattgttatccgctcacaattccacacaacatacgagccgggagcataaagtgtaaagcctggggtgcctaatgagtgagctaactcacattaattgcgttgcgctcactgcccgcttt

SEQ ID NO: 38404 - DNA, 258 bp, Homo sapiens
cactatagggcgaattggagctccaccgcggtggcggccgagtagcagccaggaaggagagactgggatggttttttatctgttgctttcttaaatcaagggccgccgggccggagatgggtggagggaccggggatttgggaactcgaaaacgagctgagggaagggagccctgtggaaatagaactggagtctgggtagtgtcgtttcctagagaatggtcctccgaagtaactttctcggtaaaaaggtcttcac

SEQ ID NO: 38405 - DNA, 421 bp, Homo sapiens
ctatagggcgaattgttgctccaccgcggtggcaaagacaaggaagcaggactgtgagcgccggcggccgggggaggaataggaaccaccggccgttctaaacctaggggatcccccgggctgcaggaattcaatatcaagcttatcgataccgtcgacctcgagggggggcccggtacccagcttttgttccctttagtgagggttaattgcgcgcttggcgtaatcatggtcatagctgtttcctgtgtgaaattgttatccgctcacaattccacacaacatacgagccgggagcataaagtgtaaagcctggggtgcctaatgagtgagctaactcacattaatttgcgttgcgctcactgcccgcttttccagtcgggaaaccctgtcgtgccagctgcattaatgaatcggccaa

SEQ ID NO: 38406 - DNA, 439 bp, Homo sapiens
gcggccgaggaactctgctcctccgatctggaggattccatgggaagggagtcgttggtcttttcaaatctcagaactcccctcaggccgctcctacctcctctttagaatcttccagtagcatagaacaagagaaatacttgcaagccttactgaatgctgtttctgtccatcagaaactcataggcgacagcactcttactgtcaggccagcctttgctctatcttcaggtgtgtgggcaagtcttcgctctagcactcgcttgatcagctctccaacatccttgattgatgttggcgcccggctggcaggcaaggatcactcggactgcttcagtaacagcagctacctacaaaaccagctcttgaaacggcaagcagccctttacatattaggtgaaaagtcgcaactaaggaacttcaaggtagaattcgcttt

SEQ ID NO: 38407 - DNA, 416 bp, Homo sapiens
actactatagggcgaattggagctccaccgcggtggcggccgcccgggcaggtacccagctgacctatgaacccacaatctgtagtatccatgctacagatgaagaccacaaagccatgaagtcgtccactggaggccttgggcagctatgcaaataggccacaagtgaagaaagctatattctgcattcatgctgtcccttgggccacgcagtttagctatgctgtccttcaaggtagcaggacccaggctggagtgcagtgaaactttgtctccaaaaaaaaaaaaaacaaaaaaaaaagtacctcggccgctctagaactagtggatcccccgggctgcaggaattcgatatcaagcttatcgataccgtcgacctcgagggggggcccggtacccagcttttgttcccttta

SEQ ID NO: 38408 - DNA, 384 bp, Homo sapiens
actactatagggcgaattggagctccaccgcggtggcggccgcccgggcaggtacagttaaaaagttatacatagaaacttataatacagttctgtaaagctgaaagaactgtcaggaaaaagggagggtgttactttttttgattgatcattaaggaagttagaggaattaaaacccaataaaaaggtttaaaacattaaggaacatttttcaggtataaattttataaatacaaaacaaattcacaaattactctcaatactaaataaatatctagttaataaacttggacttaatacctgcagtcagcactggtacctcggccgctctaaaactagtggatcccccgggctgcaggaattcgatatcaagcttatcgatac

SEQ ID NO: 38409 - DNA, 363 bp, Homo sapiens
gtggcggccgcccgggcaggtacgcgggattgaaaatttatttcagagcggagaaacttaagctaaagtctgttatacagaattgaaagccttcgtatcttgaacctcccaacatttttcttatggctgttgaaaagtatagagctaaattgatttaattacactttcctttgtacctcggccgctctagaactagtggatcccccgggctgcaggaattcgatatcaagcttatcgataccgtcgacctcgagggggggcccggtacccagcttttgttccctttagtgagggttaattgcgcgcttggcgtaatcatggtcatagctgtttcctgtgtgaaattgttatccgctcacaatt

SEQ ID NO: 38410 - DNA, 172 bp, Homo sapiens
gcgaattggagctccaccgcggtggcggccgaggtacttttttttttttttttttttttttttgggagaaggggtcagggagcaccttacctctagtggacaagggccctgagctttacacagccctccgtatttattatgcaaaagagatatgagggtgggggggggtgga

SEQ ID NO: 38411 - DNA, 500 bp, Homo sapiens
ccgaggtacaataaattctattattccattaaaatcctacatttattcccaggatttttaatttcacctccctacatctatactccactccctcagtaaataagtgaaaattgttaacccatgtgcccattcctgagtagggcagatcttcacaagaggcccatgacaagaattctagggtccagattgaactttaatataggcctttgtctgtgtagaccagtttgtcttgtaaactgtcttacttatgtgtgtaaacattttacattcacatgaaaagttattttcctttatataattggattcagaatcataagggacaggactgaaattattctacagtaaccagtaagaataagattcggccgctctagaactagtggatcccccgggctgcaggaattcgatatcaagcttatcgataccgtcgacctcgagggggggcccggtacccagcttttgttccctttagtgagggttaattgcgcgcttggcgtaat

SEQ ID NO: 38412 - DNA, 428 bp, Homo sapiens
  misc_feature 335: n = A,T,C or G
ctcactatagggcgatattggagctccaccgcggtggcggccgaggtactttccaagaatgtcaccatctctaaataggaaataatccttgtcatctagaactactttggtgcctccatattctgggagaagaactttatctccaactttcacgctaactggttgaatctctccacccctttcctttagaacccgatccaacagcgactactgttgcttgcaatacttttccttcccgcgtacctgcccgggcggccgctctagaactagtggatcccccgggctgcaggaattcgatatcaagcttatcgataccgtcgacctcgagggggggncccggtacccagcttttgttccctttagtgagggttaattgcgcgcttggcgtaatcatggtcatagctgtttcctgtgtgaaattgttatcc

SEQ ID NO: 38413 - DNA, 436 bp, Homo sapiens
  misc_feature 322: n = A,T,C or G
tactatagggcgaattgtagctccaccgcggtggcggccgaggtactaaatcttaagcaaattaaattcatgatattactaaaactttttaaatagtgcaatgacttatcaagttatagtggctgcattaagaacaaattattgtgtgaaatacctgtataaacacaaaatacaattaaatatttctttacaaaaagctgagcattacgcataatagtggaatgtctttcattaggtgtattttttaaagattaacaaaagtaacatttcctaaaatgtatacatgtgccatatttttgcaaacatgcctgagaatgtattntaaaacatttctgtagtaagagtttgcaagaacttcacaaacctgcaaataaaatgcatcttttaaaaaggtgaaaatggcatctccaacactgcaacaattacaaaagtacct

SEQ ID NO: 38414 - DNA, 375 bp, Homo sapiens
actactatagggcgaattggagctccaccgcggtggcggccgcccgggcaggtactttttttttttttttttttttttttttcgtaagggctatcgtagttttctggggtagaaaatgtagcccatttcttgccacctcatgggctacaccttgacctaacgtctttacgtgggtacctcggccgctctaaaactagtggatcccccgggctgcaggaattcgatatcaagcttatcgataccgtcgacctcgagggggggcccggtacccagcttttgttccctttagggagggttaattgcgcgcttggcgtaatcatggtcatagctgtttcctgtgtgaaattgttatccgctcacaattccacacaacat

SEQ ID NO: 38415 - DNA, 133 bp, Homo sapiens
ggcggccgaggtacagatctgggaactaaatattaaaaatgaagtgtgtctggatatatggagaatgttgggcccagaaggaaccgtagagatcagatattacaacagctttgttttgagggttagaaatatg

SEQ ID NO: 38416 - DNA, 436 bp, Homo sapiens
actatacggcgaattggatctccaccgcggtggcggccgaggtacagaccttttgcatgggtgagtggatgaaatggagatcagagtgagtgctgtgaacggtgtgaaatagaagccaacttctagtatgctgtcttcatctctgcaataaactaaacgtaaataatgtaactttgtataatttagtagtatgtacctgcccggacctgcccgggcggccgctctagaactagtggatcccccgggctgcaggaattcgatatcaagcttatcgataccgtcgacctcgagggggggcccggtacccagcttttgttccctttagtgagggttaattgcgcgcttggcgtaatcatggtcatagctgtttcctgtgtgaaattgttatccgctcacaattccacacaacatacgagccgggagcataaagtgtaaa

SEQ ID NO: 38417 - DNA, 450 bp, Homo sapiens
ctactatagggcgaattggagctccaccgcggtggcggccgcccgggcaggtacattgaccatctctggtgacacagttgaaggtgaacaaaagaaagaatcttcagttagatcagtttcttcagattctcatcaagatgatgaaataagctcaatggaacaaagcacagaagacagcatgcaagatgatacaaaacctaaaccaaaaaaaacaaaaaaggaagactaaggcagttgcaaataataatgaaaaaaaaaaaaaaaaaaaaaaaaggtacctcggccgctctagaactagtggatcccccgggctgcaggaattcgatatcaagcttatcgataccgtcgacctcgagggggggcccggtacccagcttttgttccctttagtgagggttaattgcgcgcttggcgtaatcatggtcatagctgtttcctgtgtgaaattgt

SEQ ID NO: 38418 - DNA, 399 bp, Homo sapiens
gcgtaatacgactcactatagggcgaattggagctccaccgcggtgggtatcagttatcttagaaatgctatctaaactagaatgacatttgttcagtatgatatgttctttccctaactccattctaattgcttaaaaactatcaagtgaagttacaaaagttaaaccactaaatgtggcatcttttcttacacaaagtatcttctcttagaaatgcggtatttaattaagtaaaccttcttggtgaccccagttataatcaaaagaggccacgaaactacagactactgacgaaaagtgtcagtgcagacactttccatcaatcaacaggcagtccaagggacgcaagagaacacaagtctgggtaacatgaatttggtaagaaagcaggctaaacc

SEQ ID NO: 38419 - DNA, 383 bp, Homo sapiens
ctatagggcgaattggagctccaccgcggtggcggccgaggtacttaatatggtgtcttgttcactatacttaaaaatgcaccactcataaatatttaattcagcaagccacaaccaagacttgattttatcaacaaaaacccctaaatataaacggcaaaaaagattgattttatttattccagttttttttaaaacttaaaagatattccattgccgaattaagaagaagataagtgttatatggaaagaagggcattcaagcacactaaagaaacctgaggtaagcataatctgtacctgcccgggcggccgctctagaactagtggatcccccgggctgcaggaattcgatatcaagcttatcgataccgtcgacctcg

SEQ ID NO: 38420 - DNA, 439 bp, Homo sapiens
ctatacgggcgaattggagctccaccgcggtggagcggccgcccgggcaggtacgccatatatggtgccacctatatgcacagctttgtggtaaacgcgctgagggaactgaaaataataataaaaaataccctgctgtgtatggccatttaccaacacacacatatatattgagggtctactacggaacaaaaaggaatggggcagtggccggacgtgggaatgataaaggaaaaagaaatggccacaatgtgtctggtttgagtaacatgacagaaattagggggatacactgatgttcttcaggcatctcaaacacacctaaaacaacatgcatgccttagcccttctctactccttctccccacccctcccacatatccttaaacccagacattctccgtcttttctacagtcacaatagcttatgcaggcatta

SEQ ID NO: 38421 - DNA, 402 bp, Homo sapiens
ctactatagggcgaattggagctccaccgcggtggcggccgctctagaactagtggatcccccgggctgcaggaattcgatatcaagcttatcgataccgtcgacctcgagggggggcccggtacccagcttttgttccctttagtgagggttaattgcgcgcttggcgtaatcatggtcatagctgtttcctgtgtgaaattgttatccgctcacaattccacacaacatacgagccgggagcataaagtgtaaagcctggggtgcctaatgagtgagctaactcacattaattgcgttgcgctcactgcccgctttccagtcgggaaacctgtcgtgccagctgcattaatgaatcgggcaacgcgcggggagaggcggtttgcgtattgggcgctcttc

SEQ ID NO: 38422 - DNA, 390 bp, Homo sapiens
  misc_feature 371: n = A,T,C or G
cggccgcccgggcaggtacattgtcagtgtttactttgtcaaggatgatttggaaagtgtccctatctctgataccatcatcccagctgttcctcctcccactgacctgcgattcaccaacattggtccagacaccatgcgtgtcacctgggctccacccccatccattgatttaaccaacttcctggtgcgttactcacctgtgaaaaatgaggaagatgttgcagagttgtcaatttctccttcagacaatgcagtggtcttaacaaatctcctgcctggtacctcggccgctctagaactagtggatcccccgggctgcaggaattcgatatcaagcttatcgataccgtcgacctcgagggggggcnccggtacccagcttttgtt

SEQ ID NO: 38423 - DNA, 491 bp, Homo sapiens
ccgaggtactttccaaatagctggaggttcttttcctgtttttaaagcctccttttttgtctctatgtcttctatctttaccacaaattcatcacgctctctgtattggccttctcctccgctttctgtgtcctcctcatctgtaaaaccttctatggcaacagtgtcctgtccttttgcaaactggtctgaaggaagaccatcaagttcaatgggctttgaggattctgaagagtttatattttccagaatatttactgcatatgaagtagagtggagaggttcttgcttaactgcacccacagtggttgaggaagtagtagcagtacaaaagagttatcagaacagaccttactgttatgctttgaaagaccagcttagaagtctgcccttttgctggagtctgggaacttagatttcaagagagtccctaccacctaactggtaagaggagctcactgtgcctaaactgtttatgtacctgcccgggc

SEQ ID NO: 38424 - DNA, 332 bp, Homo sapiens
tatacactactatagggcgaattggagctccaccgcggtggcggcatgcaaatgtgggtgaccttcgtctcgggcttcctgcttttccgaagccttccccgacataccttcggactagtgcagagcaaactcttccccttctacttccacatctccatggactgtgccttcatcaacctctgcattcgagcggccgcccgggcaggtactttttttttttttttttttttttttttttttgggctttggtgagggaggtaggtggtagtttgtgtttaatatttttagttgggtgatgaggaatagtgtaaggagtatggggataaggggtg

SEQ ID NO: 38425 - DNA, 434 bp, Homo sapiens
agggcgaattggagctccaccgcggtggcggccgaggtacttggatcaaatggctacattaattggtcagggaagattatgaataataacattgtgtggaaatgacccagataaaatcactgttcctttcaacaagcaacaggttagacaagcctttatcaattctggtgcatggcagattggtcttgccgattttgtgggaattattgacaatcgttaccccaaaacaaaaatcttccagtttttaaaattgactacttggattttacctaaagttaccaaacataagcctttaaaaaatgctctggcagtgtttactgatggttccagcaatggaaaagtggcttacaccgggccaaaagaatgagtcatcaaaactcagtatcacttgactcaaagagcagagttggttgccgtcattacagtgttaacaa

SEQ ID NO: 38426 - DNA, 414 bp, Homo sapiens
gcgtaatacgactcactatagggcgaattggagctccaccgcggtggcggccgaggtacacaaagctgaaataaacaaacattttttcataaagctgactcaaagaccctaggagacttttgtagaaagtgaaatagtaaaggcactacataattctttctcctaactctacttactaaaaaaatccaccaattaaacttggcacaaaagagtttaattatcataaagtgcatcacttggctaaatatattaaaaagaaaatcagccataatacagtataacaacatcttcacacaaatagaaataaaaatgcaatgtcaggagtcaagccagttaggaactttgcagtatatatggctttttattttcttttttgtataagcccctatttatttcgaatctatattttcgaaa

SEQ ID NO: 38427 - DNA, 308 bp, Homo sapiens
ctcactatagggcgaattggagctccaccgcggtggcggccgaggtactcagtaagtgtttaatgaagaagagacagatggaaagagatgggcgaggaaggctgatgttacaaatataaactttgtcagcactttcaaaacaatagcaaatacacttaaatacatacaaagtttattaaaaataggttgcaactgaaatacagtagaaatggaaaactacagcagttttgatgttttctcatagtaattgcagttctgaaaaggcactttttacaccatattccacattttgaacctcactggcccaa

SEQ ID NO: 38428 - DNA, 427 bp, Homo sapiens
  misc_feature 86: n = A,T,C or G
agggcaattggagctccccgggggcggcgcgctcccctgctcctcttggggctctgtggagacagggcaggtgaatgctccctggnatctgttgctctttttccttcagccttcgggctgacactgactcacttaattcataaagaaatatccccgcgttctgccgggcggccggttaaactagggatcccccgggctgcaggaattcgatatcaagcttatcgataccgtcgacctcgagggggggcccggtacccagcttttgttccctttagtgagggttaattgcgcgcttggcgtaatcatggtcatagctgtttcctgtgtgaaattgttatccgctcacaattccacacaacatacgagccgggagcataaagtgtaaagcctggggtgcctaatgagtgagctaactcacattaattgc

SEQ ID NO: 38429 - DNA, 278 bp, Homo sapiens
atagggcgaattggagctccaccgcggtggcggccgagtacaaccgaataaacccctaaactttttggacacctgtgatttgcatactgagcatataaagccatctttacgcacgtccatcggtgaaagaaaacggtctctttcaccactaattaagtttactccaggggaacaaagattgagaaccacaatggcatgcagtcttggagaactacctaatgtaaaggaagtccagcggccgcccgggcaggtacacaagtctgcagccactgaaatca

SEQ ID NO: 38430 - DNA, 345 bp, Homo sapiens
atagggcgaattggagctccaccgcggtggcggccgaggtactttttttttttttttttttttttttttttggcagctgggccaccgggggtgacatcacgtattggtaggtccatgatgcccccctgagccacaaaaccagcaagtttttattagggattttaaaaggggagggggtgtttgaacagggagtaggtcacaaaaatcacatgcttaaaagggcataaggcagagcaaagatgacatgcttttgaagaaacaggaccagagcaaaatcagaaactcctgataagggtctatgttaaacggtgcatgtattgtcgggaaaaacattttaacaaaaaa

SEQ ID NO: 38431 - DNA, 436 bp, Homo sapiens
cgactcactatagggcgaattggagctccaccgcggtggcggccgaggtactagggtgtgtaaacaagtccacctgaatagagacttctcccacaggatcgtccacaccagacccttgggtggtctgcgagcgcacaaaggtcttgatgagagtgtcagtagtctgtgtgtacaaatacgaaataataaaatttagtgctacttggatttcaagctgcatagttgctacgccacaaaattaggtttcaactcccccaccaaaaaaaaaaaaaaaaaaaaggtacctgcccgggcggccgctctagaactagtggatcccccgggctgcaggaattcgatatcaagcttatcgataccgtcgacctcgagggggggcccggtacccagcttttgttccctttagtgagggttaattgcgcgcttggcgtaatcatgg

SEQ ID NO: 38432 - DNA, 426 bp, Homo sapiens
  misc_feature 397: n = A,T,C or G
tacgactcactatagggcgaattggagctccaccgcggtggcggccgaggtaccagctgagttcagatgtttcacatcaagaatacccaagatcatcttggaaccaaaatacctcagacataccagaaactacttaccgtgaaaatgaggtggactggctaacagaattggcaaatatcgcgaccagtccacaaagtccactgatgcagtgctcattttacaatagatcatctcctgtacctgcccgggcggccgctctagaactagtggatcccccgggctgcaggcaatttcgatatcagagcttattcgatacacgtcgacactcgaggggggggtcgccggatacccagcttttggttcccttttagtggagggggttaattgacgcgcttgngcgtaatcatgggtcataggctgtttcct

SEQ ID NO: 38433 - DNA, 250 bp, Homo sapiens
tatagggcgtattggagctccaccgcggtggcggccgaggtacgcgggggcgtttgagtcgcttcggcacccgtagttgtgaactttgacagcggctggtccccggaagttggacgcatgcgccgtttctctgcatggtgtgcgttctcgatctagctgcggccgctctagaactagtggatcccccgggctgcaggaattcgatatcaagcttatcgataccgtccaccttgagggggggcccggtacc

SEQ ID NO: 38434 - DNA, 446 bp, Homo sapiens
atacgactactatagggcgaattggagctccaccgcggtggcggccgtcgccaccaacgcgctctcccaaccctcggagtcagttccaaaaccaaaccaaaaaggaggagagcagacaaggcttcagcctgcgactgagaacagggaggcggcgcgccttggggaacgagggcccgaggccatacgcgctaatacaggccagtgtcggcgtaaactttctccgttaccggcccggccgctctagaactagtggatcccccgggctgcaggaattcgatatcaagcttatcgataccgtcgacctcgagggggggcccggtacccagcttttgttccctttagtgagggttaattgcgcgcttggcgtaatcatggtcatagctgtttcctgtgtgaaattgttatccgctcacaattccacacaacatacgagccgggagcataaa

SEQ ID NO: 38435 - DNA, 219 bp, Homo sapiens
tatagggcgaattgtagctccaccgcggtggcggccgaggtacatgtttataggtgggaccaattttgcctattgttaatggggccaactcaccctatgcagcacagcccaccagctacgactatgatgccccactgagtgaggctggggacctcactgagaagtattttgctctgcgaaacatcatccagaaatttgaaaaagtacctgcccgggcgg

SEQ ID NO: 38436 - DNA, 397 bp, Homo sapiens
tataccactcactatagggtcgattggagctccaccgcggtggcggccgaggtacattgttacttatgtgactgaatcgtctacttacaacgctgtaagtaaggtctctagacgcttcactctttgctggagtgttctcagtgttgatacagaagttccatcttccactactggatctgcatcactttctggattctcttgtttagtgaagacttcagcctgtggttacagctgaggaagtggccacagtagctgccctggcgtctggggttttaccccactcatcttcagctggcttcttgatgtcctggaagagagcgcggccgctctagaactagtggatcccccgggctgcaggaattcgatatcaagcttatcgataccgtcgacctcgagg

SEQ ID NO: 38437 - DNA, 176 bp, Homo sapiens
gcgaattggagctccaccgcggtggcggccgcccgggcaggtacgtagttgtctttcgtaagttaaaatgataattgggccgaaacttactgccttacctaaaaggcagcgcagtcaggatattggtaggtcgggggcggctttggaaacccttaagtttacaagcatgcgcggac

SEQ ID NO: 38438 - DNA, 455 bp, Homo sapiens
ctactatagggcgaattggagctccaccgcggtggcggccgcccgggcaggtacctacatattaagttgaatggactgttctatttaaaaaataaacaactagacaattaactagtttattaacctatcacaattgaatttttttttaattttcagtcttaacacattttttaaaatgtattaaagtaatacattgtagtagtaggattatatactccttggctgagaattccaagtacctcggccgctctagaactagtggatcccccgggctgcaggaattcgatatcaagcttatcgataccgtcgacctcgagggggggcccggtacccagcttttgttccctttagtgagggttaattgcgcgcttggcgtaatcatggtcatagctgtttcctgtgtgaaattgttatccgctcacaattccacacaacatacgagccgggagcataaa

SEQ ID NO: 38439 - DNA, 384 bp, Homo sapiens
cccgggcaggtactattattcagtagtagactgtgattctccggaatttgctagtaaaatttatgaggattgtgatggcctggaatttgaaagtagttgttctttcatagatctaaggtttataccagatgatattacttttgatgatgagcctaaggatgtagcctcagaagtgaatttaacagcatataaaccaaaatatttcacttctgctgcaatgggaacatcaacggtggaaatcacttgggatgagactgatcatgaaagaattacaatgctcaacaggaagtttaaaaaggaagagcttttggacatggattttcaagcctacttagcttcctctagtgaagatgaagaggagaccgaagaggagctacaaggtga

SEQ ID NO: 38440 - DNA, 405 bp, Homo sapiens
attggagctccaccgcggtggcggccgaggtaccggtaggtaatgctgtagttgtctgacggctcatttctgaaataaatacataaggaggcaggagaaaaataattataaccatgacttactttataaataatgtttacatgccataagtccttttaaagtttcatacaaaatttactgagcaaaagaggaagaaaaataggattaaaaaaacaaaaaaaaaaaacaaatatgtgcctgcccgggcggccgatctagaactagtggatcccccgggctgcaggaattcgatatcaagcttatcgataccgtcgacctcgagggggggcccggtacccagcttttgttccctttagtgagggttaattgcgcgcttggcgtaatcaatggtcatagctgtttcct

SEQ ID NO: 38441 - DNA, 372 bp, Homo sapiens
agggcgaattggagctccaccgcggtggcggccgaggtactttattttggagccaaaaaattgattctggggggtgggggcagcgtagaagtggtatatccaagtatatcagctactgtagttgtcacagtcttgtgaactttgaatgaaattccactttggtcaaaatggggagaagtggaaatttatttggatttagagcaggtctttttttttcttcattgtaatctgcaaaatgtagaaataaattacttaaggcagtatcctttatacagttgtataaactgtattttgaaccaaaacatataggttactacttaatgcttacctaatttcattttagtattttaggtgctgttatgttttttcatg

SEQ ID NO: 38442 - DNA, 402 bp, Homo sapiens
ctactatagggcgaattggagctccaccgcggtggcggccgcccgggcaggtacagctggtgtttagtttttttttaatctaaatttaattaccttattggatatttgatatttggttatttaatcacagtcatctttaacagcttacactgattggtgttttatctcctgtgatcctttgatggctttttttgcctaccatttcacagaggtttagacagcagtagtagctccctaggagagtttactgatgaaacagcctctgcaagattttaaaagttttgttcttttatagactgatttagaaaaacaaatgattagttaaaaaaagaaaatatacatttgttggtaactaatgttattttttaaaacctggacctttctggaagggcagcatataaa

SEQ ID NO: 38443 - DNA, 446 bp, Homo sapiens
tacactactatagggcgaattggagctccaccgcggtggcggccgaggtacacatgtataccacgcacccactcacacatacacacacgcactttggaccaacatcatttccaggttcaggaaatagaggatcataatttctgtgacaactcatttttgcaggtacgttagtgttcgcgattttaaaggcaaagtgctaattgatattagagaatattggatggatcctgaaggtgaaatgaaaccaggaagaaaaggtatttctttaaatccagaacaatggagccagctgaaggaacagatttctgacattgatgatgcagtaagaaaactgtaaaattcgagccatataaataaaacctgtcctgcccgggcggccgctctagaactagtggatcccccgggctgcaggaattcgatatcaagcttatcgataccggcgacct

SEQ ID NO: 38444 - DNA, 473 bp, Homo sapiens
  misc_feature 70, 326: n = A,T,C or G
ccgaggtactactcaaaccacttctaagggtatggccaacgcttagtttgaatgttagggaacacaccangtaatgttaaagattcaccatttttccccttggaattaattctaataaaatcttccacagggtaaataaaaataaatttctctccccttttactcttcattatttttagtctcaaaagcctcatatactgttccaatgaaacaagaattgactctgaaccaaaaccaaaaagaagggaagaaaatccagagtattctatgatgccctgttaagtattagcgtgtggcttccacaagaaagttgtcaaactgtgcanattcaaaggagtgagttccaattgcagcccagccattctttggaaaattcacagggatgtctgtccacaaagacttgtcattcagcatgccagaggcgaaatgacccttaatagttaacgtgagtgtataccattttttgctgtaac

SEQ ID NO: 38445 - DNA, 437 bp, Homo sapiens
tacgactcactatagggcgaattggagctccaccgcggtggcggccgaggtactaactcatccagtatctgattctgtcttttcctctatccatctgtcttccatctttgcatccatcattcaacgaaatttacagcctatgcagatgttctgtggtcttaaacatgttgtattccttattaatgcccacctctttgccttggccatgcttcctcccctcccagccgttgttctcccccacgagaatatcttctcttttctgcttcttagtggttctattctcagtatctgaaactctcattttcccccgcgtacctgcccgggcggccgctctagaactagtggatcccccgggctgcaggaattcgatatcaagcttatcgataccgtcgacctcgagggggggcccggtacccagcttttgttccctttagtga

SEQ ID NO: 38446 - DNA, 436 bp, Homo sapiens
tacactactatagggcgaattggagctccaccgcggtggcggccgcccgggcaggtacaattgtgggcataaactgtttcagattttttatttgaaggttttaagtggtttgatcatttcttgtgatgttttgagagtaatgcatacagaaatataataaaatgtgttgaaacaaaaaaaaaaaaaaaaaaaaagtccctcggccgctctagaactagtggatcccccgggctgcaggaattcgatatcaagcttatcgataccgtcgacctcgagggggggcccggtacccagcttttgttccctttagtgagggttaattgcgcgcttggcgtaatcatggtcatagctgtttcctgtgtgaaattgttatccgctcacaattccacacaacatacgagccgggagcataaagtgtaaagcctggggtgcctaa

SEQ ID NO: 38447 - DNA, 414 bp, Homo sapiens
tatagggcgaattggagctccaccgcggtggcggccgaggtaccctaaaacttaaagtataataaaaaaaaaaaaagaaaaaaaaagattttcaacctgaatatacccagccaactaataggtaagtgtgagggcacactgtagacatgtttagatgttaggatcagaatgcttactgttcatgcatcttttaaaaaaattgcttcagggaaataaaaaaagaatacaagaaagaggacaccatgggttgtaaaagaagggaaagatgtgaaaatttcagaaaataaaagtatgttttataaaattaatgcctctcctttgaagaaataaaaccaggtattgttgacaggattgccactagtgattgaaactggttaggaagacctttcactttgcattttatactcttctgta

SEQ ID NO: 38448 - DNA, 345 bp, Homo sapiens
agctccccgcggtggcggccgcccgggcaggtaccttgtgatgaatgttaataggtgtttttattatacaaagctgaatgtcatttctcgtttgtggctttctgtcactcattccatcttccttcagacatcaccacgtttctctaaagtcagaaaacattccgttttggtctttttcaaaaaggtcccaaatgctgcactctacacatgaaggccctctcacacagacgtgacgtcctgccagaaagagaatgaatgacagaaaaaaaaagagagacaaactctaggaacaatgccgattcattccacgcagcagtattgggggtggttcgggggaggggtgtt

SEQ ID NO: 38449 - DNA, 452 bp, Homo sapiens
actactatagggcgaattggagctccaccgcggtggcggccgaggtacacagtatttttttatatctatgttttctgttctctggcgcaagatattctgcacctgggtgctttcaggccttgaccaaatagcatgaatagtaggaaatgagaactttccctctgtcagatctcccgcgtacaattaagtatattataaaaattgtaaaactactactttgttttagttagaacaaagctcaaaactactttagttaacttggtcatctgattttatattgccttatccaaagatggggaaagtaagtcctgaccaggtgttcccacatatgcctgttacagataactacattaggaattcattcttagcttcttcatctttgtgtggatgtgtatactttacgcatctttccttttgagtagagaaattatgtgtgtcatgtggtcttctga

SEQ ID NO: 38450 - DNA, 426 bp, Homo sapiens
tatagggcgaattggagctccaccgcggtggcggccgaggtactttttttttttttttttttttttttttcagagaaacgaatgcattttattttaggtaacaaaagtagagtcaagtattttttcaaagttcatatacaggcacagtctcagtgaactggcgtcagggcctcgtacctgcccgggcggccgctctagaactagtggatcccccgggctgcaggaattcgatatcaagcttatcgataccgtcgacctcgagggggggcccggtacccagcttttgttccctttagtgagggttaattgcgcgcttggcgtaatcatgggcatagctgtttcctgtgtgaaattgttatccgctcacaattccacacaacatacgagccgggagcataaagtgtaaagcctggggtgcctaatgag

SEQ ID NO: 38451 - DNA, 353 bp, Homo sapiens
aaaccgagaggagaagatgactacggcatggatgaaaatgaagcagaatctgagacagacaagcaagcagccctggcagggaatgacagaaacatagatgtttttaatgttgaagatcagaaaagagacaccataaatttacttgatcagcgtgaaaagcggaatcatacactctgaattgaactggaatcacatatttcacaacagggccgaagagatgactataaaatgttcatgagggactgaatactgaaaactgtgaaatgtaccttggccgctctaaaactagtggatcccccgggctgcaggaattcgatatcaagcttatcgataccggcgacctcgaagggggg

SEQ ID NO: 38452 - DNA, 398 bp, Homo sapiens
gagctccaccgcggtggcggccgcccgggcaggtactccagcttgtatgacagaatgtgaccttagttttatctaagcatgaatatatatgccaccataagttgaccccttgtcgacttcacacctacacatctccttacgccatactttatctctaaagacaatagcaaagtaataattttgcctaatgtgataaaactcttctgcatacaaccaaaaaatgcactaagcccttccccagaagtggatgtaaaattctccagtgtttacacttctccttggtattccataacttaaataccataatgtaaaattaacaatacttaatacaatgatataaagtcaatatgccttaagttatgtaataaaggaatatgagagaaaaggcaaaaaaaaaa

SEQ ID NO: 38453 - DNA, 167 bp, Homo sapiens
acactactatagggcgaattggagctccaccgcggtggcggccgaggtactcacgcagcattcgtgccagctcctccttggcctgctgcagggcagcctccagctctacgcgcttgctgtgggcatctttaagggcattctcacctcgctgctctgcatcagcccac

SEQ ID NO: 38454 - DNA, 422 bp, Homo sapiens
ctactatagggcgaattggagctccaccgcggtggcctctagaactagtggatcccccgggctgcaggaattcgatatcaagcttatcgataccgtcgacctcgagggggggcccggtacccagcttttgttccctttagtgagggttaattgcgcgcttggcgtaatcatggtcatagctgtttcctgtgtgaaattgttatccgctcacaattccacacaacatacgagccgggagcataaagtgtaaagcctggggtgcctaatgagtgagctaactcacattaattgcgttgcgctcactgcccgctttccagtcgggaaacctgtcgtgccagctgcattaatgaatcggccaacgcgcggggagaggcggtttgcgtattgggcgctcttccgcttcctcgctcactgactcgctg

SEQ ID NO: 38455 - DNA, 392 bp, Homo sapiens
gcgaattgtagcttcaccgcggtggcggccggacttcaaacgcaagtttgcagacttctttgaagatgataccatatcagagtatatttaccactgcaacgcacagaatcccagtggtgagacagcattcaaagccatgatggagtcctttggctgggcccggcgccctatgctggagcgaattcacttgattcgaaaagatgtgcctatcactatgatctacgggtccgacacctggatagataccagtacctcggccgctctagaactagtggatcccccgggctgcaggaattcgatattcaagcttatcgataccgtcgacctcgagggggggccccggacccagcttttgttccctttagtgagggttaattgcgcgcttggcgtaa

SEQ ID NO: 38456 - DNA, 437 bp, Homo sapiens
atacactactatagggcgaattggagctccaccgcggtggcggccgaggtacacatgagcaaaggagctgagggccagctcacaaagggatatttgatcctcagtcaagagagaagctaaaagcgcatgctgcaggagtaacctaatggatttatttggacgctctagaactagtggatcccccgggctgcaggaattcgatatcaagcttatcgataccgtcgacctcgagggggggcccggtacccagcttttgttccctttagtgagggttaattgcgcgcttggcgtaatcatggtcatagctgtttcctgtgtgaaattgttatccgctcacaattccacacaacatacgagccgggagcataaagtgtaaagcctggggtgcctaatgagtgagctaactcacattaattgcgttgcgctcactgcccgct

SEQ ID NO: 38457 - DNA, 538 bp, Homo sapiens
gactactatagggcgaattggagctccaccgcggtggcggccgcccgggcaggtactccatgttggttggtagtattttaaatctgaagcattttcagagtctaaggcaattcagactgcacagctgtcaactcaggagtcccattaaactgactctaaaaattcctaaaagaaggatgatttattataagcaaatggctaacctggcttttttggtaatagaattttaaatgaaaataaaattatacaagatacacattgtttggatttttaaaaactctattaaatgtttaagtggttgtgaatatgaggaataattaaatgttaaccccagctgattagtgaacatataagaaaatggggggaactgatcccaaaagatcttctcttctaaagagaacttcacttgaggggcaaacactagaagatacaattgttattgtaaaacaaacactaatgagagtccgtcaaataatttaaaagaaaatagaacgcatttgcaactttcaaatgcatttgatgcccaacaatttcatca

SEQ ID NO: 38458 - DNA, 445 bp, Homo sapiens
ctactatagggcgaattggagctccaccgcggtggcggccgaggtactatttcacaggcatctaaaattatgctaactttcaaaaacaaggaggtcatttttcagaaattctgagcctgtcagagaaactaaatggtatttcatcagttgtctctactggcacattacttctactaaaatgacatgaagcatggtgagcgaaacttgaaataaatgcatctggagtccggccgaggtactttttttttttttttttttttttttgggatcattctagatttaagagacaaggaagagcttctcaggcagaaggaataatgtatgcctgacatgttcaaggaattacaagttagattttgtttaggtgcatgggaggggttgatggtgatgacagataaggctggagggatggggagaggctgtggctgtatacagcctcagtacc

SEQ ID NO: 38459 - DNA, 430 bp, Homo sapiens
ggcggccggtggccgcgcttaggtagcgcaacttccgcacaagtctgtttaaaagtgtgcgacggggaccctaaggccgccattgtcctgtccttttcccccgcgtacaaggtgctgaaacaggtccatcccgacactggcatctcttccaaggccatgggcatcatgaattctttcgttaacgacatatttgagcgcatcgcgggcgaggcttcccgcctggcgcattacaacaagcgctcgaccatcacctccagggagatccagacggccgctctagaactagtggatcccccgggctgcaggaattcgatatcaagcttatcgataccgtcgacctcgagggggggcccggtacccagcttttgttccctttagtgagggttaattgcgcgcttggcgtaatcatggtcatagctgtttcctgtgt

SEQ ID NO: 38460 - DNA, 401 bp, Homo sapiens
actactatagggcgaattggagctccaccgcggtggcggccgaggtaccactaaacttagatctatggacagctttataaattatccaggtgcacctattacccaagtcaagaattaaattagcataaaaggggtttgttatcggtcccaaaatacttgtgatggttcaaatagaccaagaagtggaggattagaagtaaagccggccgctctagaactagtggatcccccgggctgcaggaattcgatatcaagcttatcgataccgtcgacctcgagggggggcccggtacccagcttttgttccctttagtgagggttaattgcgcgcttggcgtaatcatggtcatagctgtttcctgtgtgaaattgttatccgctcacaattccacacaacatac

SEQ ID NO: 38461 - DNA, 416 bp, Homo sapiens
gctccaccgcggtggcggccgcccgggcaggtactactgcttattttcctcctggagccactttaaataacaaagagaaaaacagtatgttgtttctcaactcattggatgctaaagaaatatatttggaagtaatacataatcttccagattttgaactactttcggcaaacacactagaggatcgtttggctcatcatcggtggctgttattttttcattttggaaaaaatgaaaattcaaatgatcctgagctgaaaaaactaaaaactctacttaaaaatgatcatattcaagttggcaggtttgactgttcctctgcaccagacatctgtagtaatctgtatgtttttcagccgtctctagcagtatttaaaggacaaggaacccaagaatatgaaattcatcatggaaag

SEQ ID NO: 38462 - DNA, 410 bp, Homo sapiens
ggcgaattggaacctcaaccgcgggggcggccgcccggccaggtaccttaacatctgttgagaaaatacaaataaatatgatgctaataaatggccactgataactcagtagccatctgaatagtcatgcggtttaagaatacatccttgtataatctgacatacaaatttgtcatttcctgcacatgcacaccattgttaaaaaaaaaaaataaaaaaaagtacctcggccgctctagaactagtggatcccccgggctgcaggaattcgatatcaagcttatcgataccgtcgacctcgagggggggcccggtacccagcttttgttccctttagtgagggttaattgcgcgcttggcgtaatcatggtcatagctgtttcctgtgtgaaattgttatccgctcacaa

SEQ ID NO: 38463 - DNA, 621 bp, Homo sapiens
  misc_feature 61, 545: n = A,T,C or G
cgactactatatggcgaattggagctccaccgcggtggcggccgcccggcaggtacgcggngcttgaaggaatcccttaagtgcacgtctcccgttttcttttcacatcaatgcagagtccctctgtgaatttacaacacccaacacccatgagccactgcgcctggcctcagaatgcattcttacacatctatcctagacatttataagcactctaatggataacaatccaagaataaatgattgtaaaagatgatgccgaagagttgatgtcaatctttttttcctaagaaaaaaagtccgcgagtattaaatatttagatcaatgtttataaaatgattactttgtatatctcattattcctattttggaataaaaactgaccttctttaatcatatacttgtcttttgtaaatagcagcttttgtgtcattctccccactttattagttaatttaaattggaaaaaaccctcaaactaatattcttgtctgttccagtcttataaataaaacttataatgcatgtaaaaaaaaaaaaaagnaaaaaaaagtacctcggccgctctagaactagtggatcccccgggctgcaggaattcgatatcaagcttatcgata

SEQ ID NO: 38464 - DNA, 416 bp, Homo sapiens
ggagctccaccgcggtggcggccgcccgtgcaggtactggtccctcataatgcagctggaagggttagtgttatatgtgtgttccagttgcttctttcctttgaagaaactgagagacaaagtttacatcatactgattttgcaccacaccaagtagagaatttgtggtagatgtctgtaatctctttgagactactcaatctgaaactgaggcgataacttctgaatgtttccaagtttgaaaatcacctattcttgctggacgcggtggctcatgcctgtaatcccagcactttgggaggctgaggcgggcggatcacctgaggtcgggagttcgagaccagcctgaccaacatggagaaaccccgtctctagtgaaaatacaaaattagacgggcgtggtggtgcatgcttgt

SEQ ID NO: 38465 - DNA, 176 bp, Homo sapiens
tacgactcactatagggcgaattggagctccaccgcggtggcggccgcccgggcaggtacgcgggggactgcagcccgcactcgcagccctggcaggcggcactggtcatggaaaacgaattgttctgctcgggcgtcctggtgcatccgcagtgggtgctgtcagccgcacactt

SEQ ID NO: 38466 - DNA, 499 bp, Homo sapiens
atagggcgaattggagctccaccgcggtggcggccgcccgggcaggtacgcgggattctagaagaaaattttcatataagaaaatgatttatggccaaagttacagaacattcatcttttagacttagccttagaatatcattggaaattacttggcttgaatttggttcgtttttatctttatggattatgtacctcggccgctctagaactagtggatcccccgggctgcaggaattcgatatcaagcttatcgataccgtcgacctcgagggggggcccggtacccagcttttgttccctttagtgagggttaattgcgcgcttggcgtaatcatggtcatagctgtttcctgtgtgaaattgttatccgctcacaattccacacaacatacgagccgggagcataaagtgtaaagcctggggtgcctaatgagtgagctaactcacattaattgcgttgcgctcactgcccgctttccagtcgggaaacctgtcg

SEQ ID NO: 38467 - DNA, 442 bp, Homo sapiens
ggcgaattggagctccaccgcggtggcggccgaggtactttactccctatagagaaaccattgccatcattgtagcaagtgctggaatgtcccttttttcctatgcaactttttttaaccctttaatgaacttatctgttgagtacctgcccgggcggccgctctagaactagtggatcccccgggctgcaggaattcgatatcaagcttatcgataccgtcgacctcgagggggggcccggtacccagcttttgttccctttagtgagggttaattgcgcgcttggcgtaatcatggtcatagctgtttcctgtgtgaaattgttatccgctcacaattccacacaacatacgagccgggagcataaagtgtaaagcctggggtgcctaatgagtgagctaactcacattaattgcgttgcgctcactgcccgctttccag

SEQ ID NO: 38468 - DNA, 209 bp, Homo sapiens
tacgactcactatagggcgaattggagctccaccgcggtggctgccttcatgctcccggtctcaacgccccccaactccatcgccttcgcctctggacacttgctggtcaaagacatggtgcggacaggcctcctgatgaacctgatgggtgtcctgctgctcagtttggctatgaatacctgggcacagaccatcttccagctgggca

SEQ ID NO: 38469 - DNA, 427 bp, Homo sapiens
cgtaatacgactactatagggcgaattggagctccaccgcggtggcggccgaggtacatggagaataggcatatagccactaggctacatgaacacgtcacgtttgtattttgtgttggcctatgtataagccaatctagcatgtttgagggcatgtgtgagagtaggtaagggagctgtaagttacattcaggtgggaatttagggctttctgcacaaaaaattctaatttctctgtccttttgctatgttgcatctcccagtgttgacaggttagtctgcatgattaataactgagcagctgtagagccatgccagtaagtctccaattcctgaacgtggccacatttgtcttttgatgtgactttcaaccacaagccacaaagtaagtctttcactaggctccgttgacttcagtctttatata

SEQ ID NO: 38470 - DNA, 577 bp, Homo sapiens
ctatagggcgaattggagtctccaccgcggtggcggccgcccgggcaggtacagtagtgcactcttggctcactgtagcctttacctccggggctcaagtgatcctcctgccttagccccacaagtagtgggactataggcacacagcaccatgcccatctaaggttttgtattttatgtagtcgagcggccgcccgggcaggtaccttgtctccttccctggctctgagcatcattcagaacaggaacatggggaagccagcccagcctgccctgagccgggaggagctggaagcactcttgctcccctatgacctgaagcggctggagatgtattcacggaatatggcggactatcacctcatcatggacatgatcccggccatctctcgcatctatttcctgaaccagctgggggacctggccctgtatgcggctcagtcggctctgctctaggggattggcctgcagcataagtctgtggaccagctagaaaaggagattgagctgacctcgggccagttgatgggacttttcaaccggatcatccgcaaagttgtgaagctatctaatgaag

SEQ ID NO: 38471 - DNA, 275 bp, Homo sapiens
tcactataggtgtgaattggagctccaccgcggtggcggccgaggttctcgggaaccaaatagctctgcacaaattgatattgttatctccaacaaagccgcaggggctgggttagataaagcgggaagagctggtattcccactagagtaattaatccataactgtataaaaatcgggtagaatttgacagtgcaattgacctagtccttgaagagttcttcattagacatagtctgtcttgcaggattcatgagaaattttttctggcccctt

SEQ ID NO: 38472 - DNA, 298 bp, Homo sapiens
aattggaacctccaccgcggtggcggccgaggtacccttggatgtcctgtgcttcctcaatatcgtggtgaggtgcaggcactaaggagtggggtgactttaggcctacatgggagcagaggacaaactgagcagcacgagagggagggaagaactgacagtgccctgggatccagtcctgtatgcatctgctaaatatcattacacaagtgtagtagcctttgcactggttgccttcaaagaattaggaatgttgttctgtcagagggcgggtgaatgaaaacacttgtcaagtgtg

SEQ ID NO: 38473 - DNA, 434 bp, Homo sapiens
tcactataggtcgaattggagctccaccgcggtggcggccgggccgtggaggcctatgttggccctaggattttcttggtttgctccttggattccccttcccactccagcaccccagccagcctggtacaccgactacggcggactaatcttcaactcctacatacttcccccattattcctagaaccaggcgacctgcgactccttgacgttgacaatcgagtagtacctcggccgctctagaactagtggatcccccgggctgcaggaattcgatatcaagcttatcgataccgtcgacctcgagggggggcccggtacccagcttttgttccctttagtgagggttaattgcgcgcttggcgtaatcatggtcatagctgtttcctgtgtgaaattgttatccgctcacaattccacacaacatacgagc

SEQ ID NO: 38474 - DNA, 130 bp, Homo sapiens
gctccaccgcggtggcggccgaggtacttagatactggagttcagaagatgtgatttttgttgcttttcagaaaaaggaacgtggttagggagtgtttttttcccacgccttttccaagtaactattgca

SEQ ID NO: 38475 - DNA, 445 bp, Homo sapiens
  misc_feature 306: n = A,T,C or G
actactatagggcgaattggagctccaccgcggtggcggccgaggtacctcctcctgctcctcaagagtgtggtctattttgccatcatcacctgctgtctgcttagaagaacggctttctgctgcaatggagagaaatcataacagacggtggcacaaggaggccatcttttcctcatcggttattgtccctagaagcgtcttctgaggatctagttgggctttctttctgggtttgggccatttcagttctcatgtgtgtacctgcccgggcggccgctcgatggtcgcggccgagggactttnttttttttttttttcttttttttttttgtaacactcaccagtctgttctgtagtcaatcattgattgacttgtctgtgaacttgcaggaactgtttcatagtttcattagcacagagtaaacatgtttgccatgcaagg

SEQ ID NO: 38476 - DNA, 415 bp, Homo sapiens
actactatagggcgaattggagctccaccgcggtggcggccgcccgggcaggtactgctgactggctacctgctggacgccagtgcattgaacactaccgccggccccggcgctattgtgtcttctcccacgaggagctcatctgcaagatggctgccttcccagagacgttggatctcaatctagcagtagctgtgcacaaggagatgttcattatggttcaggaggagcgacgtctacgaaaggcccttttggagaagctttccttacaaggttgagtccacatcagggctcagtgttggctgaggtggggtgtccacaaccctactcctagtctttacagtatatgtgggttgaacacccccagggcgtcacggaggctgagcgagaggcttttgagctgctcccagatgat

SEQ ID NO: 38477 - DNA, 391 bp, Homo sapiens
ggccgaggtactaccagctttcacatcaaatttttaacgtggacgtgtggaaaagctattggacttaagttggacagagtcatgtaaaccaacagcaactgaaccactatttaagaaagtcagtccatgggaaacatctacttctagcttttttcctattttggctccggccgctctagaactagtggatcccccgggctgcaggaattcgatatcaagcttatcgataccgtcgacctcgagggggggcccggtacccagcttttgttccctttagtgagggttaattgcgcgcttggcgtaatcatggtcatagctgtttcctgtgtgaaattgttatccgctcacaattccacacaacatacgagccgggagcataaagtgtaaagcc

SEQ ID NO: 38478 - DNA, 390 bp, Homo sapiens
ctataaggcgaatcggagctccaccgcggtggcggccgtcgctcccctgctcctccttggtggctctctcagaggactccagagttgtatccccaggccgtcttgtttgttctccccgcgtacctgcccgggcggccgctctagaactagtggatcccccgggctgcaggaattcgatatcaagcttatcgataccgtcgacctcgagggggggcccggtacccagcttttgttccctttagtgagggttaattgcgcgcttggcgtaatcatggtcatagctgtttcctgtgtgaaattgttatccgctcacaattccacacaacatacgagccgggagcataaagtgtaaagcctggggtgcctaatgagtgagctaacctacattaa

SEQ ID NO: 38479 - DNA, 414 bp, Homo sapiens
cgccgtggcggccgaggtacgcttgggcattgctaatttctcatgcaatgtgtggtttcactctaggaggacaagttagaacatttgggaaaaaatgttataattgtggtcaaatcggtcatctgaaaaggagttgcccaggcttaaataaacagaatataataaatcaagctattacagcaaaaaataaaaagccatctggcctgtgtccaaaatgtggaaaagcaaaacattgggccaatcaatgtcattctaaatttgataaagatgggcaaccattgtctgggaacaggaagaggggccagcctcaggccccccaacaaactggggcattcccagttaaactgtttgttcctcagggttttcaaggacaacaacccctacagaaaataccaccacttcagggagtcagcc

SEQ ID NO: 38480 - DNA, 473 bp, Homo sapiens; identical to SEQ ID NO: 33357

SEQ ID NO: 38481 - DNA, 441 bp, Homo sapiens
tactatagggcgaattggagctccaccgcggtggcggccgtcgctcccctgctcctccttggtggctctctcagaggactccagagttgtatccccaggccgtcttcccgcgtacctgcccgggcggccgctctagaactagtggatcccccgggctgcaggaattcgatatcaagcttatcgataccgtcgacctcgagggggggcccggtacccagcttttgttccctttagtgagggttaattgcgcgcttggcgtaatcatggtcatagctgtttcctgtgtgaaattgttatccgctcacaattccacacaacatacgagccgggagcataaagtgtaaagcctggggtgcctaatgagtgagctaactcacattaattgcgttgcgctcactgcccgctttccagtcgggaaacctgtcgtgccagctgcattaa

SEQ ID NO: 38482 - DNA, 400 bp, Homo sapiens
ggcgaattggagctccaccgcggtggccggccgcccgggcaggtacatattattttgcagtatagatgaatattactaatcagtctgattattctcagagggtgctgctctttaatgaaaatgaaaattatagctaatgttttttcctcaaactctgctttctgtaaccaatcagtgttttaatgtttgtgtgttcttcataaaattttaaatacaattcgttattctgtttccaatgttagtatgtatgtaaacatgatagtacctcattagtaattgttttgttgtttcatttttttctaatgtctcccctctaccagctcacctgagataacagaatgaaaatggaaggacagccagatttctcctttgctctctgctcattctctctgaagtctag

SEQ ID NO: 38483 - DNA, 427 bp, Homo sapiens
gactcactatagggcgatttggagctccaccgcggtggcggccgaggtactttttctttccttagactttggcttactggtattatttaattaaaaggtagaggagaagtaaatttgctgtaataattttgctgtaaataaaacaaagagtttattttattagataaagaatgtgaagtaagcatgaagagacaggctttgggagaaataccagaaagggatttttcaaagatggcattgtttaatctccgtgtggccctcggttgtgcaatcacagatgagccagaagagggccagccccctacttgtttgggctccgaaactcttaccaaacatcaatttttattcttgggatagaaaaatagtatgtgctatctctaatacgctacttcgatatttattaaagaagtatttttaatgtagtgtc

SEQ ID NO: 38484 - DNA, 400 bp, Homo sapiens
actactatagggcgaattggagctccaccgcggtggcggccgaggtactttcaacgaaggagctgctaggcttacagcaggctgaggggagactgaagagagactgcattgacaggctaaaaaggcgaccacgaaactaccctacagcaaagtacctgcccgggcggccgctctagaactagtggatcccccgggctgcaggaattcgatatcaagcttatcgataccgtcgacctcgagggggggcccggtacccagcttttgttccctttagtgagggttaattgcgcgcttggcgtaatcatggtcatagctgtttcctgtgtgaaattgttatccgctcacaattccacacaacatacgagccgggagcataaagtgtaaagcctggggtgcctaa

SEQ ID NO: 38485 - DNA, 160 bp, Homo sapiens
ggcgaatatgagctccaccgccgaggcgggcaggtaccactgcactccagcctgggtgacagagtgagtactctgtctccaaaaaaaaactaagcttgtatattatttttgccttacagaggatcatatctagtaaggaacaggacaaacaaagaatttt

SEQ ID NO: 38486 - DNA, 410 bp, Homo sapiens
tcactatagggcgaattggagctccaccgcggtggcggccgaggtacgcggggtgagctggatgattgcccagagtgtgacggcagtcgcagggctggtgtcctacccctttgacactgttcgtcgtagaatgatgatgcagtccggccgctctagaactagtggatcccccgggctgcaggaattcgatatcaagcttatcgataccgtcgacctcgagggggggcccggtacccagcttttgttccctttagtgagggttaattgcgcgcttggcgtaatcatggtcatagctgtttcctgtgtgaaattgttatccgctcacaattccacacaacatacgagccgggagcataaagtgtaaagcctggggtgcctaatgagtgagctaactcacattaattgcgttg

SEQ ID NO: 38487 - DNA, 364 bp, Homo sapiens
cgcgggggcggccgaggtacaggaaagcccaaaatgttgacaaagcctccagggcaataatggttgttaagaactttcaaagcaaacaaaactcctgagaaacctacagcacagctccttttgaagtcaggttcatccatacattcggcaacagcaaattgcaggagcaggtataccactccagtaagtacctgcccgggcggacgctcgagctctagaactagtggattccccgggctgcaggaattcgatatcaagcttatcgataccgtcgacctcgagggggggcccggtacccagcttttgttccctttagtgagggtataattgcgcgcttggcgtaattatgggatcacgctgtttc

SEQ ID NO: 38488 - DNA, 352 bp, Homo sapiens
ctatagggcgaattggagctccaccgcggtggcggccgaggtacaaattaagagttatatggttttacaagtatatgttaaccccttggcgctggcggtcacggtgcgtctcattgccggcaatggaagtgtgccgggaaatcccaactcccggcgtcaagggattaaaagcaataaaaacaataatttcactaaaattcttttgtgtaacacttggtcttttttcccccctcccaatgttttagtcattgagaaggtcaaaacgaaattcagactctacggagttggcagcacagatgaatgaaagtgttgacgtcatggatgtcatcgctatttgctgtccaaagtacct

SEQ ID NO: 38489 - DNA, 402 bp, Homo sapiens
actactatagggcgaattggagctccaccgcggtggcggccgaggtacagcctgctgtattatctccaaactcatgaacatggaatccatgcaggccttcagtcagtcctttaatgcttccccacaccttcactggtccattactttccttctgctcgaaattgatgatgccctgcactgggccgtcgcccttcagcacgcacacggccttcgtcgccataactcgctaggccacgccgaggtcctggttccgaggactgcaacggaaaccccaccccgcgtacctgcccgggcggccgctctagaactagtggatcccccgggctgcaggaattcgatatcaagcttatcgataccgtcgacctcgagggggggcccggtacccagcttttgttcccttta

SEQ ID NO: 38490 - DNA, 385 bp, Homo sapiens
ctactatagggcgaattggagctccaccgcggtggcggccgaggtacaagtttatcagtaacataccaagagggagccttctctaccaatgctcattctgttctgcctggtggcaaataaaacattgtcttttcaagaaacactctctctagtttattgcttctatttaaatacatatagtgatatttaaaaagactaaaagaaaataatctcatctgaaacttttcacaatagattgacttctcagaaactaattcactctcttcaatcccgcgtacctgcccgggcggccgctctagaactagtggatcccccgggctgcaggaattcgatatcaagcttatcgataccgtcgacctcgagggggggtcccggtacccaggct

SEQ ID NO: 38491 - DNA, 419 bp, Homo sapiens
  misc_feature 412: n = A,T,C or G
agggcgaattggagctccttcgcggtggcggccgcccgggcaggtacacagggtaaagagcacaaaaattcaactgatacagaacaacaactgaaagtcacaattatccaatgtagtttgcaattacttttcagtttcttaaacagctcccctcaactttttttttttaacagtcttgcttattttttcagctgaaacagcatcaagttttcaaagaattaagagcctcggggaggggacccgctttcaagatactgaaggtgacatcaagagtctcctcctaacaggaccaactctatctaaaagttgcttacgagtcccgcgtacctcggccgctctagaactagtggatcccccgggctgcaggaattcgatatcaagcttatcgataccgtcgacctcgagggggggncccggtc

SEQ ID NO: 38492 - DNA, 375 bp, Homo sapiens
tacgactcactatagggcgaattggagctccaccgcggtggcggccgaggtacctgaatggggtttgattctgaaatctttctacctgttgcaccgatattcaaataaaaatgatagacacagaaaggtttggtaactttgggttttgtaaaatcagcaaaggcagtgtttcaaaaagtgcaaaaaaaaagattctgttataaagtgattttctaagtatttcctaactttatttttcaaaatgatgttatgaacaccaaatttaaagatttttaacatgtcagagagaagagagttaaaatttaaaaatgcatcttgggagagaaatttgtctatgtttctagtgcctttcttgtcttgattgtatggtcagta

SEQ ID NO: 38493 - DNA, 398 bp, Homo sapiens
ggcgaattggagctccaccgcggtggcggccggcggccccgcgactgcccccgcgtacgcgggggccgaaagagccgtggccttggaaagggccacaagttccaccacactattggtggctctcgccgggcagcttggagaaggcgcaatactctccagctccaccgttaccgctaatataagtaaagtttgtaaaattcatacttaataaacaatttaggaccacggacttaaaaaaaaataaaaaaaagttcctcggccgctctagaactaggggatcccccgggctgcaggaattctatattaagcttatggataccgtcgacctcgagggggggcccggtacccagcttttgttccctttagtgagggttaattgcgcgcttggcgtaatcatg

SEQ ID NO: 38494 - DNA, 306 bp, Homo sapiens
ggcggccgcccgggcaggttctggaaacgtaactaaacagcgaacctgtatcttcacctgactcagtgctgggggcctctaccatctactgtgcttgtgtcatgatgctttttctctgaagtggtgtgggaagtacctcggccgctctagaactagtggatcccccgggctgcaggaattcgatatcaagcttatcgataccgtcgacctcgagggggggcccggtacccagcttttgttccctttagtgagggttaattgcgcgcttggcgtaatcatggtcatagctgtttcctgtgtgaaatt

SEQ ID NO: 38495 - DNA, 454 bp, Homo sapiens
cactatagggcgaattggagctccaccgcggtggcggccgaggtactaactcatccagtatctgattctgtcttttcctctatccatctgtcttccatctttgcatccatcattcaacgaaatttacagcctatgcagatgttctgtggtcttaaacatgttgtattcagttcagcatggctggcgaggtctcaggaaacttacaatcatggaggaaggggaagcgaacacgtccttcttcatatggcggcagcaagaagcagttcttattaatgcccacctctttgccttggccatgcttcctcccctcccagccgttgttctcccccacgagaatatcttctcttttctccccgcgtacctgcccgggcggccgctctagaactagtggatcccccgggctgcaggaattcgatatcaagcttatcgataccgtcgacctcgagggggggcc

SEQ ID NO: 38496 - DNA, 452 bp, Homo sapiens
ctactatagggcgaattggagctccaccgcggtggcggccgtccctcttaatcatggcctcagttccgaaaaccaacaaaatagaaccgcggtcctattccattattcctagctgcggtatccaggcggctcgggcccactttgaacactctaatttcccgcgtacctcggccgctctagaactagtggatcccccgggctgcaggaattcgatatcaagcttatcgataccgtcgacctcgagggggggcccggtacccagcttttgttccctttagtgagggttaattgcgcgcttggcgtaatcatggtcatagctgtttcctgtgtgaaattgttatccgctcacaattccacacaacatacgagccgggagcataaagtgtaaagcctggggtgcctaatgagtgagctaactcacattaattgcgttgcgctcactgcccgctttc

SEQ ID NO: 38497 - DNA, 423 bp, Homo sapiens
ctactatagggcgaattggagctccaccgcggtggcggccgaggtaccatgttatggaaagccaagtttcaagaattaaaaatgcagagtcagtcacaatcctgggtgctgtggggaaggctataaggcattcgaacaaatttttttttttttttgagacagggtcttgctctgtcacacaggctagagtgcaatggcgcaatctcggctcactgcaacctctgcctcccaggcttaagcaatccctcccacctcagcctcccaagtagccggaatcacaggcagaagccaccgcgaccgctctagaactagtggatcccccgggctgcaggaattcgatatcaagcttatcgataccgtcgacctcgagggggggcccggtacccagcttttgttccctttagtgagggttaattgcgcgct

SEQ ID NO: 38498 - DNA, 412 bp, Homo sapiens
cgactactatagggcgaattggagctccaccgcggtggcggccgaggtactcatcttcaattttctgatctttccatttttttcctacagaagccaggttcctgaaggtttcctgcatcacatctctgtagagattcttctgggaaggatccagcaaagcccactcctcctgggtgaagttcacatctacatcctcaaagacgctctagaactagtggatcccccgggctgcaggaattcgatatcaagcttatcgataccgtcgacctcgagggggggcccggtacccagcttttgttccctttagtgagggttaattgcgcgcttggcgtaatcatggtcatagctgtttcctgtgtgaaattgttatccgctcacaaattccacacaaacattacggagccggggagca

SEQ ID NO: 38499 - DNA, 283 bp, Homo sapiens
tatagggcgaattggagctccaccgcggtggcggccgaggtacctgctctcaaattgaaaaaaacaaaaaaccaaaaagtattattaagattaatgtagtctgtttctttttcctctttgactgtggctactaggaaatttaaaatggcatacgtagcttgcattcatagtccacattccatttccactggacagtgctggcctggagctggagccaagtccgggagacataatgaccatcagtgccatggagcaaagtgccacctcttttcgagaaaaagtg

SEQ ID NO: 38500 - DNA, 406 bp, Homo sapiens
tacgactactatagggcgaattggagctccaccgcggtggcggccggaaccgccatcttccagtaattcgccaaaatgacgaacacaaagggaaagaggagaggcacccgatatatgttctctaggccttttagaaaacatggagttgttcctttggccacatatatgcgaatctataagaaaggtgatattgtagacatcaagggaatgggtacctcggccgctctagaactagtggatcccccgggctgcaggaattcgatatcaagcttatcgataccgtcgacctcgagggggggcccggtacccagcttttgttccctttagtgagggttaattgcgcgcttggcgtaatcatggtcatagctgtttcctgtgtgaaattgttatccgctcacaattccac

SEQ ID NO: 38501 - DNA, 385 bp, Homo sapiens
gcgccgggcggtctatttcaagattttaaaggcagcatgtctacaaggtggagctgcaggaagcttcggggacttgacagactgagtccagagcaagccctcgcccgtgggatcttagcaggaacctgggggtgaagaggaacagtgcagtccctgagaggcagctgagagtacctcggccgctctagaactagtggatcccccgggctgcaggaattcgatatcaagcttatcgataccgtcgacctcgagggggggcccggtacccagcttttgttccctttagtgagggttaattgcgcgcttggcgtaatcatggtcatagctgtttcctgtgtgaaattgttatccgctcacaattccacacaacatacgagccgggagc

SEQ ID NO: 38502 - DNA, 441 bp, Homo sapiens
tacgactactatagggcgaattggagctccaccgcggtggcggccgaggtacagaaggtgaaacagaacagaagaagatcataaagaaaagggaaaacaggaagagagatgtgatggcttcagcggccttggcagcagagccatctcccctacctggttctctcataagaggccagaggaagagcgcttcgagcttcttcaaggaacttagagaagagcggcattgtgctccttctgggacccccacaggaccagagatccttgctgctgcagttcctccctcttccctaaagaacaatagggaacaagtagaagtggtagaatttcacagcaataaaaaaagaaaattgacgccagatcataacaagaacacaaagcaggctaatcctagtgttttggagagagatgtggatacacaagaatttaacctagaaaaagctc

SEQ ID NO: 38503 - DNA, 439 bp, Homo sapiens
tacgactcactatagggcgaattggagctccaccgcggtggcggccgaggtacttttttttttttttttttttttttttttttgtataatatgttatttatttgatattctggagaaatccaaacacacaaagtgattctgtatttgcgagaaatttaaggagatgatgaaaatgggtaaaaaataaatttaaaagggtgatgaaagtattatgtataatattataatggtaaatatgtgatatgaatttgttgaaatcaacagaatatacagcataaagggttaattccaattcacaaaaatataaataggagattaggaattccaggatagaatgcagacaatatagaaaatatctaatgtcattacaaatgtatgaaatcagaagaggtgccaagtgacctcagaaatagtgtagtcaataaaagaataaagaaag

SEQ ID NO: 38504 - DNA, 435 bp, Homo sapiens
gcgaattggagctccaccgcggtggcggccgaggtacgcgggggaagaaggaagcggagcaggtgctgcagaagtttgttcaaaacaagtggctgattgagaaggaaggggagttcaccctgcacggccgctctagaactagtggatcccccgggctgcaggaattcgatatcaagcttatcgataccgtcgacctcgagggggggcccggtacccagcttttgttccctttagtgagggttaattgcgcgcttggcgtaatcatggtcatagctgtttcctgtgtgaaattgttatccgctcacaattccacacaacatacgagccgggagcataaagtgtaaagcctggggtgcctaatgagtgagctaactcacattaattgcgttgcgctcactgcccgctttccagtcgggaaacctgtcgtgccagctg

SEQ ID NO: 38505 - DNA, 291 bp, Homo sapiens
tggagctccaccgcggtggcggaaaactgctactatctgtttttatatttctgttaaaatatatgaggctacagaactaaaaattaaaacctctttgtgtcccttggtcctggaacatttatgctccttttaaagaaacaaaaatcaaactttacagaaagatttgatgtatgtaatacatatagcagctcttgaagtatatatatcatagcaaataagtcatctgatgagaacaagctatttggacacaacacatcaagaaagagagcaccacgtgatggagtttctcca

SEQ ID NO: 38506 - DNA, 270 bp, Homo sapiens
ggcgaattgtagctccaccgcggtggcggccgaggtacttttttttttttttttttttctttttgatggagaacattcttaattttattttctttaattttataaaatacactttgtaagataagtttctaaaagtttatcctttatgtgtgttaaaattgcaattctatatcaaaaatgaaggaaacacttttaggtgattaactctctttgggggggtatatatggggatggatgcatgggaggttttcagggaagggttggtttttt

SEQ ID NO: 38507 - DNA, 455 bp, Homo sapiens
ctatagggcgaattggatgctccaccgcggtggcggccgcccggccaggtacgcgggggattttaaaaagttatccagatttccagaaaatctaagctggcagttcataggaatatcagagacgactaaggctttattatcaggcattttgcgggggcagtgtgctatgaaacaacccagtttgtggagaaaaataatgatgctttacatatgtgtcttgaatccttaatatgtgaatccagagataagtttataccggaattatttgaatcatccacagctcatacaaaaacaagaaaaaaatagttcctcggccgctctagaactagtggatcccccgggctgcaggaattcgatttcaagcttatcgataccgtcgacctcgagggggggcccggtacccaccttttgttccctttactgagggttaattgcgcgcttggcgtaatcatggt

SEQ ID NO: 38508 - DNA, 350 bp, Homo sapiens
attggagctccaccgcggtggcggccgaggtacatttggtggaactgagaaatggcataacaccaaatttaatatatgtcagatgttactatgattatcattcaatctcatagttttgtcatggcccaatttatcctcacttgtgcctcaacaaattgaactgttaacaaaggaatctctggtcctgggtaatggctgagcaccactgagcatttccattccagttggcttcttgggtttgctagctgcatcactagtcatcttaaataaatgaagttttaacatttctccagtgatttttttatctcacctttgaagatactatgttatgtgattaaataaagaacttg

SEQ ID NO: 38509 - DNA, 254 bp, Homo sapiens
  misc_feature 230: n = A,T,C or G
tacgactactatagggcgaattggagctccaccgcggtggcggccgaggtactgattttaaaaactaataacttaaaactgccacacgcaaaaaagaaaaccaaagtggtccacaaaacattctcctttccttctgaaggttttacgatgcattgttatcattaaccagtcttttactactaaacttaaatggccaattgaaacaaacagttctgagaccgttcttccanctcactgattaagagtgtgggtgg

SEQ ID NO: 38510 - DNA, 368 bp, Homo sapiens
gcgaattggagctccaccgcggtggcggccgaggtacttagtcatttgggttgaatcgtgttgaactaacctggcggtatagacaaaatttggaagtttggctctcagaaagtcttgacttcctcttatctctaacgaattggcatggcccctcattcatattttcgccccccctcggctgggtgaaatactgtttatcctttagtacctgcccgggcggccgctgtagaactagtggatcccccgggctgcaggaattcgagatcaagcttatcgataccgtcgacctcgagggggggcccggtacccagcttttgttccctttagtgagggctaattgcgcgcttggcgtaatcatggtcatagct

SEQ ID NO: 38511 - DNA, 416 bp, Homo sapiens
agggcgaattggagctccaccgcggtggcggccgaggtaccagagtttccttccttgaaacaagccatggtagctacctccatccctgcacagcaactcgtgctagcgaagggggcagtgaacaggggccaggtcacaaggaccatgaccctcggggaccacagggccaggatgtcatttttaaaaccatgaaaatccatgccaaatataacagcagattataaggccaacaaagacttctatgtactgtgaagtcaaaggcccaacattacagagcgcacctttgcctgaaatacaaaactaagttaactagcaagttacaggaaatagccttcagtaaattccacaagccaagtggctactgcattgtccgctctagaactagtggatcccccgggctgcaggaattcgatatc

SEQ ID NO: 38512 - DNA, 434 bp, Homo sapiens
ctatagggcgaattggagctccaccgcggtggcggccgaggtacttttttttttttttttttttttttggggaagaagggatcaggggacaccttgcctctagtggacaagggccctgagctttacacaaccctccatatttattaggcaaaagagatagtgagaaggcgggtggaagaaggggtcagctactcagtccagagtagggtttgcaagatggcattctctagatgtcccagtagataacctcaaggagctcagcaccaggaagcgattgccctcagcaaaccttctggcagcggaagcagtcatgagtttgcccacatcgtgcattcatgataaagtttgctgtttgatcatatagcctccagtggaatgctgagttggtcacatcccatgggccttcgactcccaacagcccagcaccataccca

SEQ ID NO: 38513 - DNA, 328 bp, Homo sapiens
actactactatagggcgaattggagctccaccgcggtggcggccgaggtacattctggctcggatacagaatcactgctgcagggctcactatttggagatgcatttctttgagaggtagtgtcaactgctataggtgttagctcaccctcaccgaatgcatcacttataaacatgccttcatggattaaataagccacctctgtgtccagtgaattatcttttgcagcattcttctgttgtgaaatctcttccaattctctagtcctttggtttttgtcaagaactgagagaacaacactgtgaatgatatttaatgttgccttcac

SEQ ID NO: 38514 - DNA, 437 bp, Homo sapiens
actactatagggcgaattggagctccaccgcggtggcggccgaggtactttttttttttttttttttttttttttggaatgtttttctcatcctttaatttctggttttatgatcaaatgttccgaagacactgcttctttttgctcaaaatagttgacattgtcattgcttctagtttttcagctcctactatgcttactatgtccatgggtgccattgacgtctttggctatttatcatctctgggtggcgcaggccaaggacgcccatggacagcgcccccgcgtacctgcccgggcggccgctctagaactagtggatcccccgggctgcaggaattcgatatcaagcttatcgataccgtcgacctcgagggggggcccggtacccagcttttgttccctttagtgagggttaattgcgcgcttggcgtaat

SEQ ID NO: 38515 - DNA, 390 bp, Homo sapiens
atacactactatagggcgaattggagctccaccgcggtggcggccgcccgggcaggtacaccaaaaagagaactttgtgatccgttggtaaggtagtatccacaagtaagcacttgtgttcactgttttttgttccacactagaatacacccagttggataccagagttatttacagacatctgaggaagatcctagttttcaagtctgtcaggaaaatattccatattgttttaagccagatcatacccatggaaaaatagagaatggttttctttctttttctttctgaccaatacatgctcaagaaatcaaatatctgagatacacaaattgaacgcggtagggtggggaagggaagtaggggagataaagcctatgctggctgatt

SEQ ID NO: 38516 - DNA, 472 bp, Homo sapiens
ctactatagggcgaattggagctccaccgcggtggctgatccagttcaccagtaggttggacagcatataatttgcatcattttgtcccttgtaaatcaagatgttctgcagattattcctttaacggccgctctagaactagtggatcccccgggctgcaggaattcgatatcaagcttatcgataccgtcgacctcaagggggggcccggtacccagcttttgttccctttagtgagggttaattgcgcgcttggcgtaatcatggtcatagctgtttcctgtgtgaaattgttatccgctcacaattccacacaacatacgagccgggagcataaagtgtaaagcctggggtgcctaatgagtgagctaactcacattaattgcgttgcgctcactgcccgctttccagtcgggaaacctgtcgtgccagctgcattaatgaatcggccaacgcgcggggagaggcggt

SEQ ID NO: 38517 - DNA, 197 bp, Homo sapiens
  misc_feature 92, 93: n = A,T,C or G
ctactatagggcgaattggagctccaccgcggtggcggcccgaggtacacaagtaactctgattatttgcaaatactaattaaaatattatnncacaccaaagaactgccaagtttttattattgtggtctgtggtcctgtcataatctgttttcccaggtgcaaaaattaataatgctatgtgttcatccaactca

SEQ ID NO: 38518 - DNA, 394 bp, Homo sapiens
ctactatagggcgaattggagctccaccgcggtggcggccgcccgggcaggtaccattaaaatttctaacccatattagccctttatcttccatccatgaaggcataagtttgcccatgtataaggttggcagcaaaatcctccacaaataaaagtataccctatgggtgcacgcgggaccaccccttttccaattctattgttcacagaagcataagcaagaaaaaattaagaggttatgagtctcatgacggcagagaagtcttgatctgtgatcttgggaaagctgtccatgactatggtgctgtctgcttctggagaaaaacgtctctctgttcagctttaccttaaagtctccaatagatatacagttccaagagtcttagaggtgccc

SEQ ID NO: 38519 - DNA, 409 bp, Homo sapiens
  misc_feature 284, 285, 309, 310, 341, 342, 370, 371, 372, 387, 389, 390: n = A,T,C or G
actactatagggcgaattggagctccaccgcggtggcggccggggtctctctttgatgaagtaagaaagacagcacgcttaaaccgtagaccaagaaatcaggagagttcaagtgatgagcagacgcctagtcgggatgatgatagccagtccaggagtccaagtagatctcgaagtaaatctgaaaccaaatcaagacacagaacaaggtctgtctcctatagtcactcaagaagtcgatcgagaagttccacatcatcttatcgatcaagaagctactctanngaagtcggagcagagggatgggtnnacctcggccggctctaggaaactagtggganntcccccgggctgcagggaatttcgatannncaagcttatcgatancnncgtcgacctcgaggggggg

SEQ ID NO: 38520 - DNA, 403 bp, Homo sapiens
gcgaattggagctccaccgcggtggcggccgcccgggcaggtactttttttttttttttttttttttttattcatccagcttttcatatttattggcataaagctatttacagtattggtattctcttaaaattaaataactatatcttctttttgtgcacactcttaacaatccaggaatagagacatccttaaactgacatgcagaatagacgaaagaaatctccaacagacgtgacactaaatggtaaagacataaaaacctttgcaattaaaaataggaacaaacattgtaatcctagacaatgtaattagaccagaaaaaaaaatgcagaaaatagacaagaaagatgcaaagcaaatatacgcatgaatgatatgaaacatcacctaaaaaattaaa

SEQ ID NO: 38521 - DNA, 272 bp, Homo sapiens
ggcgaattggagctccaccgcggtggcggccgcccgggcaggtactatagttgtcctatggtgcccctatgggtgatgggttccaagaaccccctaggatactaaagtccatgatgttcaagtcccttatagaaaatggtgtagtatttgcatataacctgtgcacatcctaccatacactttaaatcatctctagattacctataatagctaatacaatgtaaatgctttgtaaatagtttgttatactatatttggtttaatggacaaaa

SEQ ID NO: 38522 - DNA, 434 bp, Homo sapiens
actactatagggcgaattggagctccaccgcggtggcggccgttaaacatgtgtcactgggcaggcggtgcctctaatactggtgatgctagaggtgatgtttttggtaaacagcccgcgtacattgcacatacccttggatccccacagtttggtcctcctcccagctacccctttatagtatgacgagttaacaagttggtgacctgcacaaagcgagacacagctatttaatctcttgccagatatcgcccctcttggtgcgatgctgtacctcggccgctctagaactagtggatcccccgggctgcaggaattcgatatcaagcttatcgataccgtcgacctcgagggggggcccggtacccagcttttgttccctttagtgagggttaattgcgcgcttggcgtaatcatggtcatagctgtttcct

SEQ ID NO: 38523 - DNA, 414 bp, Homo sapiens
ttggagctccaccgcggtggcggccgaggtactcattcttcttagagggccttcaaagaattcaaaggggactgagtgctgagttccctaagctgtggtcactgcagccatttcagcactagagggtgccataatcccaagtatgcaataaatcttgcagactcctagatacccagcctagatagatgtgggaaagagaagacaatgttctgggttcccaggcaaagtcccttactctcttctctctcattccccgaagtataagaagtccctctatatataccaggctgcctgtaattgggggagacgtgacacagggactcctgtgtccatcacagctggcatcacagtaatgctagtctaaacccatggactctatgaccagcacagtaccgtggtgacgtggttcccaaa

SEQ ID NO: 38524 - DNA, 410 bp, Homo sapiens
ggtggcggccggcgcgcagccgctggccggtggtgaccagcgagccgtcgtccagccgctcgatgcggcccgagaccgctccagcgccacaggtcggcattcggcagcccggtgagctcgctctggacgaagggctggcggcggttcacctggatgcggttcaccgcgcgccagcccaggccgggcacgcggttgtggatgtagtcggccgctctataactagtggatcccccgggctgcccgaattcgatatcaagcttatggataccgtcgacctagagggggggcccggtacccagcttttgttccctttagtgagggttaattgcgcgcttggcgtaatcatggtcatagctgtttcctgtgtgaaattgttatccgctcacaattccacacaacatacgagccgg

SEQ ID NO: 38525 - DNA, 432 bp, Homo sapiens
cgactactatagggcgaattggagctccaccgcggtggcggccgaggtacacaagcccaggtaagcataccaagcaagccccctcacaccttttgtctgaaaaaaagcttgacttctttgcagcaatgtctcgcccattccagcagcagtatctcagttaacttggttccttttcctccaggctcaaaacaaaatcaaactcttcctgggtcaggggctggattgataatctctggcgagtgaagagaaccatattttttaaggggccaccagtagctttgtgagcccgcgtaccactggcatcgtgatggactccggtgacggggtcacccacactgtgcccatctacgaggggtatgccctcccccatgccatcctgcgtctggacctggctggccgggacctgactgactacctcatgaagatcctcac

SEQ ID NO: 38526 - DNA, 467 bp, Homo sapiens
actactatagggcgaattggagctccaccgcggtggcggccgacgtacagttgctgttgtgtgatcaaacatgtctctgtgtagctccagcaaatcaagctgagctttgaaaaagtttgtcttaattttgtgaaggtgatttattcttaagaaaaaaaagaacgaaaaagaaaaaaagataagaagaaggagtaaagggactactcctccttgccaaatgtgctaaatatcattttaggagaagaaagcgggtttattgtatttcccttaagattgtgagggggtgtggatacagtagaatgagccaacagcttctttataataaatatggtctgcaataaattatttcactagctctaaaacctttccctagattttagtagggagttggtttctgctaatatctttgggtgctgtggtggtaaatgctatattatgaacggtggcatgtatttacagttagagta

SEQ ID NO: 38527 - DNA, 401 bp, Homo sapiens
gcagattggagctccaccgcggtggcggccgaggtactgtggcatggcgcagtgggtgacagatggccacatagcggtcaaaagccatggccagcagcactgtggattccatgccagataaggagtggatggcaaacatctgtagcagacaagcatcaaactggatggtagtggaattgaaccagaagatggccagcattttgggcatggatgaggtggagatgaggatgccaatgcctgaaagcatgcaaagaaatatatacatgggctcatgcaggctgtgctcagtccgcacaatgtagatgattgtcaagttacctagcacagcaataaggtagagggagcacaatgggaaggccaaccagaactgagcctcttctaaaccggggaggcctattagg

SEQ ID NO: 38528 - DNA, 153 bp, Homo sapiens
tcactatagggcgaattggagctccaccgtggtggccggtcgcccgggcaggtacatataccaactgtcagtctgtggtaacgtaaccttagacgctgcctgaccacaaagtttggaaattatatttaaccaaaagaaaataaataaatacag

SEQ ID NO: 38529 - DNA, 358 bp, Homo sapiens
attggagctccaccgcggtggcggccgaggtactttttttttttttttttttttggtgtgtgggtccttgttttgtatttactgaagaaaccggattattgatttgtagagtttacccaagtccaaattttgctgattatgccatgatatggcttaatatttttttctctttattttctataaactggtaacgagagctggaagcttgccttgatgaggttagggttggttattcttggcaagataactctagagatgagggtgttttttcgtcaggaggcacttgacatctggttgactcctgttgtttttggctgctatagatgcttattggccaaatctgtccattttttaggga

SEQ ID NO: 38530 - DNA, 381 bp, Homo sapiens
  misc_feature 291: n = A,T,C or G
actactatagggcgaattggagctccaccgcggtggcggccgaggtactaactattctttattgctgtaactgttaaaagtttaattcctgagatttttggagtcggtaaaagttcttaaagtgagcagaggaaagaaatgtctttcccagataggaggctgaactgtgaatcaacagtgtcaatcagttcccgcgtacctgcccgggcggccgctctagaactagtggatcccccgggctgcaggaattcgatatcaagcttatcgataccgtcgacctcgagggggggncccggtacccagcttttgttccctttagtgagggttaattgcgcgcttggcgtaatcatggtcattagctgttttcctgtgtgaaattgt

SEQ ID NO: 38531 - DNA, 136 bp, Homo sapiens
gaattggagctccaccgcggtggcggccgcccgggcaggtacctgaagaccagctagagaaccaaaaacctttacaattggatgtaattatggtaaaaccttataaactctgtaacaatcaagaagaaaacgatgc

SEQ ID NO: 38532 - DNA, 420 bp, Homo sapiens
atagggcgaattggagctccaccgcggtggcggccgaggtacgcggggcatcaggaacaaaagcgtgatcttgctgggtcggcacagcctgtttcatcctgaagacacaggccaggtatttcaggtcagccacagcttcccacacccgctctacgatatgagcctcctgaagaatcgattcctcaggccaggtgatgactccagccacgacctcatgctgctccgcctgtcagaacctgccgagctcacggatgctgtggaaggtcatggacctgcccacccagggagccagcactggggaccacctgctacgccttaagctggggcagtcattgaaccagaggagttcttgaccccaaagaaacttcagtgtgtggacctccatgttatttccaatgacgtgtgtgcccaagttcaccc

SEQ ID NO: 38533 - DNA, 147 bp, Homo sapiens
ccgcccgggcaggcacttagactgaaataagttaattcagaaatgtcattttcccgacgctgcccattccactgaagttctgttatctttcgtcatgtcaataatttccatattcctcttttataataaactaatgaatactaatga

SEQ ID NO: 38534 - DNA, 411 bp, Homo sapiens
tatagggcgaattggagctccaccgcggtggcggccgaggtacatataggctgttctagccacagtggtagatttatgattcacatccgaaagtgtgccttagttatcaatttaacatttctctagtattcatatcccttttcttaccatatacctcagtgtatccttcctgtgtcaagccttataaatcatgttattaagtgcccctcatgtaaatcagtaaaatcacaaaggtctatttaatgaaaacgatttaccaatgttgttttttttttaacaagaaaaaaaataaaagcacattgtcattttttttcctcggataacaaacattaaaaaaatgaagtacctgcccgggcggccgctctagaactagtggatcccccgggctgcaggaattcgatttcaagctta

SEQ ID NO: 38535 - DNA, 298 bp, Homo sapiens
cgactcacttagggcgaattggagctccaccgcggtggcggccgtcactttcttgcgcccgctctcctgcgccagcttgaaggcatactcggcaatgcgcagggacttggccttggtgatgatcttcaggctctccaccactcccgccacactcttcatgctccaggctgctgtacctcggccgctctagaactagaggatcccccgggctgcaagaattctatatcaagctaatcgataccgtcgacctcgagggggggccccggtacccagcttttgttccctttagtgagggtta

SEQ ID NO: 38536 - DNA, 419 bp, Homo sapiens
actactatagggcgaattggagctccaccgcggtggcggccggatagggacccagaactccatttgacagatgaggaaacggcgaggcagacaggtgacctgacttccccacaatcgctgcaggacaggaagaaactgatgttctaatcatgtcagataaagatgatattgagactccactgctaactgaagcagcccccatccttgaagatggaaactgtgagccagccaagaattctgagtctgttgaccaaggtgccaaaccagagagtaaatcagaacctgtagtttccactcggaaaagaccagagaccaaaccttccagtgaccttgagacttcaaaagttctccctattcaggataatgtttccaaagatgtacctcggccgctctagaactagtggatcccccgggctgca

SEQ ID NO: 38537 - DNA, 448 bp, Homo sapiens
tacgactactatagggcgaattggagctccaccgcggtggcggccgaggtaccgaggtcattttgcttcctatagactgccaccttttggcaaaagctgttctaactccatctcagcatttacaattccatacctggtggtcagaggaggcccgcctgcaggctcagctaaatcgggctgatggcattccaattactcaggctcagctcacaggctccgataattactctgatactactgctcatttaggctttgatgctctcaccacggaacaagtaacaaaggtgtgtatgagagcttgggataaattacgcaccccaggccaagcttctgtttcttttactattgttaaacagggtcacaatgaattatatcttgattttttagctaaattacaagatgctgttgaaaaatctgtctctgatgagcacactcaaggtattcttct

SEQ ID NO: 38538 - DNA, 259 bp, Homo sapiens
tactatagggcgaattggagctccaccgcggtggcggccgaggtacagagtgacactgaacagatcacaaagcacgagaaacattagttctctccctccccagcgtctccttcgtctccctggttttccgatgtccacagagtgagattgtccctaagtaactgcatgatcagagtgctgtctttataagactcttcattcagcgtatccaattcagcaattgcttcatcaaatggcctaaaacaaagtagccgttttt

SEQ ID NO: 38539 - DNA, 405 bp, Homo sapiens
tccaccgcggtggcggccgaggttctaaattaacagtttgtagttaacatttagaactaaaatttaaccgcattatatcactgtatatatttctcatgatttttgctaattagagcatttacttaaccagtaataaactacacacacacacacacacacacacgtatacgtgtgtgtgtgtatatacttggctctgacacaactctggtgcttaattaggatatgttctattatgtattttgaatgtttatcctgctagtgcgatgaacttttgttggaaaagcagaattagaaggaacagtttttcaatcagtttcatttggtaattacaggaaaaccttgagttgccctaatttaatttttccaattaatacatttagactttaaattgcatccgtaattctt

SEQ ID NO: 38540 - DNA, 398 bp, Homo sapiens
tatagggcgaattggagctccaccgcggtggcggccgggctgaacttctcgtagagcatcgcctcggtcacgtcggggtggagtaggcaacatattcattaaaaatctggacaaatccattgataataaagcactgtatgatacattttctgcttttggtaacaccctttcatgtaaggtggtttgtgatgaaaatggttccaagggctatggatttgtacctcggccgctctagaactagtggatcccccgggctgcaggaattcgatatcaagcttatcgataccgtcgacctcgagggggggcccggtacccagcttttgttccctttagtgagggttaattgcgcgcttggcgtaatcatggtcatagctgtttcctgtgtgaaattgttatcc

SEQ ID NO: 38541 - DNA, 372 bp, Homo sapiens
  misc_feature 272, 278, 279, 294, 295, 309, 334, 335: n = A,T,C or G
ctatagggcgaattggagctccaccgcggtggcggccgaggtacccttcataaggaaaaatgaagtaatgcctataagtagcaggcctttgtgcctcagtgtgaagagaaatcaagagatgctaaaagctttacaatggaagtggcctcatggatgaatccggggtatgagcccaggagaacgtgctgcttttggtaacttatccctttttctcttaagaaagcaggtacctgcccgggcggccgctctagaactagttggatcccccgggnctgcannggaattcgatattcnnaagcttatcgatanccgttcgaccttcgaggggggggcnnccgcgtacccagcttttttgtttcccttttagtggag

SEQ ID NO: 38542 - DNA, 245 bp, Homo sapiens
cactatagggcgaattggagctccaccgcggtggcggccgaggtacactggttgatatgaagattgaatttggtgttgatgtaaccaccaaagaaattgttcttgctgatgttattgacaatgattcctggagactctggccatcaggagatcgaagccaaccagaaagacaaacagttcttgtcgggacctcaaagaagtaactcctgaagggcttccaaatggttataagaaaaactttgagt

SEQ ID NO: 38543 - DNA, 434 bp, Homo sapiens
aatacgactcactatagggtgaattggagctccaccgcggtggcggccgcccgggcaggtacgcggggaggtagagtgagaagcaccagcaggcagtaacagccaacccttagccattgctaagggcagagaactggtggagcctttctcttactcccaggacttcagcacctaagacagctccaaaacaaaccagaacagtcagctccgggggagcacgactgggcgagaggcacagaaatggacaccagaaataaggcccagctccttgtgctcctgactcttctcagtgtgctcttctcacagacttcggcatggcctctttacagggcaccttctgctctcaggttgggtgacagaataccctttgagggagcaaatgaacctgatcaagtttcattaaaagaagacattgacatgttgcaaaatgcatt

SEQ ID NO: 38544 - DNA, 330 bp, Homo sapiens
  misc_feature 27: n = A,T,C or G
gccgaggtactttttattgttggtcgncttgatactagctaaacaggcggtttcagcctcatcacactcacacagttgacttctgtatgagtcctgttttgcacaggtgattctgctccccgagttgctaacttgtagctcagaaatttggcgccacatccacgtttctccagacgtttgtagcaacagtcatgagtgacacagcagcgatccgttgcatccttgggggatcctctgccacccacgccacagtggcagccggagaagccataactgagtgcggcttactttcctgtcgtcaactagatcattctgtggaaattcaccaaa

SEQ ID NO: 38545 - DNA, 424 bp, Homo sapiens
tatagggcgaattggagctcctctcgcggtggcggccgggccatcctggagatggaacaatacatccgggagacgtacagtatggatgtggacagggaaaacagcaagtgcacacagtgggacaggccacaggacaggctgggagtgaataaagagttcacactgcttccctgctttccccagtgactgaaggctctaggccacctcctcctcagcctccttctcgaactcgccctcctcctcggctgtggcatcctggtacctcggccgctctagaactagtggattcccccgggctgcaggaattcgatatcaagcttatcgataccgtcgacctcgagggggggctccggtacccagcttttgttccctttagtgagggttaattggcgcgcttggcgttaatcatggtcatagcctgttt

SEQ ID NO: 38546 - DNA, 185 bp, Homo sapiens
actatagggcgatttggatctaaaccccggtggcggccgcccgggcatgtacttttttttttttttttcttttttttttttagcccatttcaaatttattaaaaaacacataggttacgagtcagagctttggctaggaatgatttggaaaagaactgaaggcataattccacaggacattcaca

SEQ ID NO: 38547 - DNA, 438 bp, Homo sapiens
tactatagggcgaattggagctccaccgcggtggcggccggagcaggtccctttctagagataggagaagagagagatcgctgtctcgggagagaaatcacaagccgtcccgatccttctctaggtctcgtagtcgatctaggtcaaatgaaaggaaatagaagacagtttgcaagagaagtggtgtacctcgggccgctctagaactagtggatcccccgggctgcaggaattcgatatcaagcttatcgataccgtcgacctcgagggggggcccggtacccagcttttgttccctttagtgagggttaattgcgcgcttggcgtaatcatggtcatagctgtttcctgtgtgaaattgttatccgctcacaattccacacaacatacgagccgggagcataaagtgtaaagcctggggtgccctatgagtgagct

SEQ ID NO: 38548 - DNA, 397 bp, Homo sapiens
tagggcgaattggagctccaccgcggtggcggccgaggtacagatgaggaagactgaggcctgcatcagtgaagcaacctatccaagactacatagagaaggcagtaaatggcagggttagtctcagaacaggggagggtctgttccccccgcagtgggcagtcctaattctgaacttcacctatctgggggtgatagaggggaacaagaggaagcctgcggaagagaaaacctaaacatctgttttgtctacgtatgacttcctctgcttgtgggagagaaggaaggaaaggaacacattgttgtcagccccacaaccccaacagaatttaaccctggagcaggttgaacagcagaggctttccctcagatcaaggagccaggagcagatgatcta

SEQ ID NO: 38549 - DNA, 416 bp, Homo sapiens
cactactatagggcgaattggagctccaccgcggtggcggccgaggtacaggttcttctgagcagtgtccaggagctgccactcctcccagctgaattccacagccacatcctccagggtcagtgattcctgggtcttgatcattttcttctgtgctcagaaaatagtggataacatggactatacgtctttgtctcttctgcatttgccatgaagtttttgaagttttcctagtcagaaatattagtgtccacttaaagttgtccccagaaattatgatatccaaggccagcaacctccttcttcttccttcattgcttcacttgagttattttgcttctgggagccaggacctgaggaccgagcccgaacctctccagacaccactggcagcgacaaaacgccgcatccacgtc

SEQ ID NO: 38550 - DNA, 259 bp, Homo sapiens
  misc_feature 56: n = A,T,C or G
acgactcactatagggcgaattggagctccaccgcggtggcggccgaggtactttnttttttttttttttttttttttttttctttacaaacaagtttcttttattgtttccacacattcataataactttagaacagaaagattgttttaatttgctgtcctacttcggggacctgatgaataccctgggaacagtccccagtttgagtaaaatcagttgaagcccttactgtataaggtccaaaattttaagaaaaa

SEQ ID NO: 38551 - DNA, 373 bp, Homo sapiens
ctatagggcgaattggagctccaccgcggtggcggccgagctgcagatgatcagcatcaggaccgatttcttctcactgtggttcttcctaagttttacccacttaggacaaatttcttttaggtatgaggaaagactgtgagtcaaatcattggccttgaggaaacaggagtctggcaggttcagttcttctaattcaatcaccaagcgtctgctgctataatagtccttcatcagcttctgtaggtcttcaggcaaccctggttttggttctgattttgcaagaacatcagtaattttcttctttcttcttttcctggtcttggtggtattctcttttctttcctttggttgtatcaaaaaacatttcttt

SEQ ID NO: 38552 - DNA, 399 bp, Homo sapiens
tacgactactatagggcgaattggagctccaccgcggtggcggccgaggtacaaaaggtcccaggaagtactgtggtttgttgattcattcaacagaaagcccaaatgacaatgctattagtggtcaggagtaaactaacctggacaggctcatgaaaatgaacccctggatgcatcctgagaacgtaccaggtccccaggatgatcgtcccggtgcggacatggcaacagccgcagcaccgggtgctgtagaaccggtcactgcggttccgcttgaaactcatggacaccatcgtaacaggcgggcctccttcttggccgggcccctgacaaacgttctccacccacagccaaactcaaacggctgtttcacggcctccaaaacccaacgacgcgtct

SEQ ID NO: 38553 - DNA, 378 bp, Homo sapiens
atagggcgaattggagctccaccgcggtggcggccgcccgggcaggtaccaatggacactgacaaaacaataaacaaatctccaacaaaagcctgttctctctagccaaaaatccaagacagtcttgagaagactagtaagacagaaaacttttagacaataacagctctactccagccagccacaacaacaataacaaaaaaactgtggctctaccccacccatggcaaaagccaagtggggaagccaagctttccactcatgcctgactgtgacaaggcactcacccttccttccagggtaacgtctgggaaagctgagtaaggaattggtagtttcattctcactgggtggtaaggagtccaccttactgttagc

SEQ ID NO: 38554 - DNA, 157 bp, Homo sapiens
atagggcgaatcgaagctccaccgcggcggcgggcgccatcttgggtcatcgatgagcctcgccctgtgcctggtcccgcttgtgagggaaggacattagaaaatgaattgatgtgttccttaaaggatggccaggaaaacagatcctgttgtggat

SEQ ID NO: 38555 - DNA, 372 bp, Homo sapiens
actactatagggcgaattggagctccaccgcggtggcggccgaggtactgcattcttgcttaatagtattaaccataaaggaggtcaggtttatagggtttggtttacctattaaaccatcattgactatggaaatacttacgctctagaactagtggatcccccgggctgcaggaattcgatatcaagcttatcgataccgtcgacctcgagggggggcccggtacccagcttttgttccctttagtgagggttaattgcgcgcttggcgtaatcatggtcataggctgtttcctgtgtgaaattgttatccgctcacaattccacacaacatacgagccggggagcataaagtgtaaaagcctgggggtg

SEQ ID NO: 38556 - DNA, 426 bp, Homo sapiens
acgactcctatagggcgaattggagctccaccgcggtggcggccgcccgggcaggtacgcggggacctccttatggaagaagatgacatggccttggcaaatgtagtcatgcaggaagctcagaagaagctcatctcacaagttcagaagaggaatttcatagaaaatattattccaattatcatctccctgaagactgtgctggagaaaaataagatcccagctttgcgggaactcatgcactatctcagggaggtgatgcaggattaccgagatgagctcaaggacttctttgcagttgacaaacagctggcatcagagcttgagtatgacatgaagaagtacctcggccgctctagaactagtggatcccccgggctgcaggaattcgatatcaagcttatcgataccgtcgacctcgagggg

SEQ ID NO: 38557 - DNA, 461 bp, Homo sapiens
atactactgactatagggcgaattgtagctccaccgcggtggcggccgcccgggcaggtacgcgggggggtaaagctcctcggcctcttcgtgctgcgcctccgcggctgccctgcgccagaattcggttccctcaaaattataaaagcaggaaagctcaagacaaagaaatccaacaaggctagtgatttcagtgatatggagaattggccaacaccaagtgaattagcgaacactggatttcagagcgtcctcagccaaggaaataaaaagccacaaaatagaaaagaaaaagaagagaaggttgaaaagagaagtaacagtgacagcaaggaaaaccgggaaacaaaattaaatggtcctggtgaaagcgtcagtgaggatgaggctcaatcaagtaatcaacgtaggagagctaataagcacaagtgggtaccttggccgctctagaactagtggag

SEQ ID NO: 38558 - DNA, 434 bp, Homo sapiens
actactatagggcgaattggagctccaccgcggtggcggccgcctgggcaggtacttaagcaaatactgagtagtgttttaaattcagaaatagagcttctattatgaacacatgagaatgatttttttctcttaatcattattaaggaaatattttaatttcatggtcatataatggtgataagtaatacctgattgtttccttttctgttctagaaactcagaggagatacgtgttttatttgtgatagtaaattcctaaatgaacattaggcaagtggtatcattatcaggccagctgcagcctcttgccttgacctgcattcctagaatttctttgttgctgtaattcttgattaagtgaccttgactttcattttgtaattttgctaatcatcagcaaattcacttgcatgacgttactgccaaatatg

SEQ ID NO: 38559 - DNA, 477 bp, Homo sapiens
cactactatagggcgaattggagctccaccgcggtggcggccgaggtacacaaaaagttttcttgtatataagtgaatttctagcaacacctgcttacacacacacacacacacaaatgaacatccgttttctgaaatgcttgggatcagaagtgtttcagatttctttttttttttgtattttggattatttgcattatatacttactggttgagcactccaaatctgaaaatctgaaatcttccagtggccatttcctttgagcatcagtcatgttggtgggtcagaaagttttggactttggagcatttgaatttctggattagggataccgctctagaactagtggatcccccgggctgcaggaattcgatatcaagcttatcgataccgtcgacctcgagggggggcccggtacccagcttttgttccctttagtgagggttaattgcgcgcttggcgtaatcatggtcata

SEQ ID NO: 38560 - DNA, 405 bp, Homo sapiens
ttagggcgaattggagctccaccgcggtggcggccgaggtacccaggaatctgcattctcgacaagcgtccgcgccgacggggctagtgaagtttgagaacaattgcttcctacccagccgctccgctatcacctaggtagcacggccgctgcggctgaggctgtgactccccgcgtacctgcccgggcggccgctctagaactagtggatcccccgggctgcaggaattcgatatcaagcttatcgataccgtcgacctcgagggggggcccggtacccagcttttgttccctttagtgagggttaattgcgcgcttggcgtaatcatggtcatagctgtttcctgtgtgaaattgttatccgctcacaattccacacaacatacgagccgggagcataaagtg

SEQ ID NO: 38561 - DNA, 381 bp, Homo sapiens
tactatagggcgaattggagctccaccgcggtggcggccgcccgggcaggtactttaaaaatatagactttctagcaacttataaatttctattataataataaattgatactttgagccaagaaaacaatataaccaaaaattcatttgttccctttgtttaggggtggtttacatttaatgcataattttgcttttataaaagatgattgttacaatcaggtatacaactacttggttatgtctaagttctgtctcttaaaatatgttcttttagagaattcatttaatcatcttattcttttcttcaattttctccaaacagtggtaagaagtacctcggccgctctagaactagtggatcccccgggctgcaggaat

SEQ ID NO: 38562 - DNA, 337 bp, Homo sapiens
acgactactatagggcgaattggagctccaccgcggtggcggccgaggtacagagactgattaactgggtgagaaaggcaagtaacaatttagttaaaaacctgctggcccaaggtcagttgattcattccttattccagaatagttaagttcctgaaagtccttaaccactctgctcccttactgttctccatgtttgagggtatcagaagccccctgtgaggttcacgctgtgtatagactaggtagcagatttcccttctgttcctcttaaaacagcttattttaaaagaaatatcctgaggcaattaacaaagcaaacacaagcagctttctt

SEQ ID NO: 38563 - DNA, 391 bp, Homo sapiens
gactactatagggcgaattggagctccaccgcggtggcggccgcccgggcaggtacatctctgggtctccaggcagcagccgtcgccgcatccccggcagcagctccaggcaaagtgacaggaaaagacgatttctctctgattcacaatcctgaaaatgtgatctcccttaaaaagaggacagcgctgctgtgagtttgacgaagtggacatcacctgcagtcagtccagagctgcccagtcttgaatataatcatggccaaaccttatgaatttaactggcagaaggaagttccctcctttttgcaagaaggaacagcttttgacagatacgaggaggaatcctttgtgtttgaacccaactgcctcttcaaagtggatgagtttggct

SEQ ID NO: 38564 - DNA, 434 bp, Homo sapiens
gtaatacactactatagggcgaattggagctccaccgcggtggcggccgcccgggcaggtactgcagccgcctcaatatccccttccccttcatcgtcttcgcttacttctacatggtggtgaagaagtgcttcaagtgttgctgcaaggagaaaaacatggagtcttctgtctgctgtttcaaaaatgaagacaatgagactctggcatgggagggtgtcatgaaggaaaactaccttgtcaagatcaacacaaaagccaacgacacctcagaggaaatgaggcatcgatttagacaactggatacaaagcttaatgatctcaaagggtcttctgaaagagattactaataaaatcaaataaaactgtatgaactctaatggagaaaaatctaattatagcaagatcatattaaggaatgctgatgaacaatt

SEQ ID NO: 38565 - DNA, 471 bp, Homo sapiens
  misc_feature 396, 425, 426: n = A,T,C or G
ggcgaattgtagctccaccgccgtggcggccgaggtactggtacatattcttagacgaccaattatagtttatggagtaaaatattacaagagtttccggggagaaactttaggatatactcggtttcaaggtgtttatctgcctttgttgtgggaacagagtttttgttggaaaagtccgattgctctgggttatacgaggggccacttctctgctttggttgccatggaaaatgatggctatggcaaccgaggtgctggtgctaatctcaataccgatgatgatgtcaccatcacatttttgcctctggttgacagtgaaaggaagctactccatgtgcacttcctttctgctcaggagctaggtaatgaggaacagcaagaaaaactgctcanggagtggctggactgctgtgtgacgaggnngggagttctggttgccatgcagaagagttctcggcggcgaaatca

SEQ ID NO: 38566 - DNA, 536 bp, Homo sapiens
cgactactatagggcgaattggagctccaccgcggtggcggccgaggtactttttttttctttttctttttttttttttagtttttgagatcgtgtctcactcctgttgcgcatgcctgtaatcccagctactcaggaggctggggcaggataattgcttgaacccgggaggtggaggttgcatgagccgagatcatgccactgcgctccagcctgggcaacagagtgagactttgtctcagaaaaaaagaaaaaaaaagatctggcggatgaaaataaccagaatgaaaatagctagaaaactcagcaagcaggaagctccctttctcacccttttgttcccttgccgatagaatcagtcactattagaaaaaatgaaagacgctctgtttaaaacaatgatgacagcagtacctgcccgggcggccgctctagaactagtggatcccccgggctgcaggaattcgatatcaagcttatcgataccgtcgacctcgagggggggcccggtacccagcttttgttccctttaatga

SEQ ID NO: 38567 - DNA, 585 bp, Homo sapiens
ggcgaattgggccctctagatgcatgctcgagcggccgccagtgtgatggatatctgcagaattcgcccttagcgtggtcgcggccgaggtacattacaatggagaaagcactaggccactgttagaaagttttaatctgtcactgaaataccagcagactttagcctgattcctctcctgcaacacaacagggctgtgctagaagatgattagtttatcctccaactctgagagtcaatcattcatatttttatcaaaggccaccgaggaaaaaagcattccttttttcttcataacagcatttttataactacatcatgtatcagttttatctgacattttcaatttaattcagcaatacttcacagtgaacatgcagcatctctttatatgaaacagatactcaaaaaatataagcagggtaataatttttaaaaatcatataaaagttaatgtgaagagactcagaaaataaatcatttgagcagattctttaagtcctcaaaacaaaaggcaggtgtaatttatttttttaactttttgtagagatgggatcttgcttgctatgttgcccaggctgggct

SEQ ID NO: 38568 - DNA, 396 bp, Homo sapiens
tggagctccaccgcggtggcggccgcccggtcaggtactttatattttttcttgttttttgcttgggaaacattcaaagagcttattttatttatttcaaagatgtatacatgttgaaattaaaatttaaattaagaaaatttataaactgagtcaaaagaaaagtatagtgagcgcagttggttaagtgtgtcggttaatgccaccatagttctgcatgccctggaagtgtcaggcataaacaactctaaagtattcggcatgcagccaggtgtggcaactcatgctgtcattccaggacgttgagaggctaaggcaggtgggttgcttgagctcagaactttcagaccaagcaaggccacatggtggaaccccgtctttatgaaaaatatgaaa

SEQ ID NO: 38569 - DNA, 546 bp, Homo sapiens
gactatatggcgaattggagctccaccgcggtggcggccgcccgggcaggtaccacagtatgctttattttgcaggtattaattggttctctaaatcgatacatccaaaacttcagttagcagcaagcatcagttcttccaaagcagcttatgtgaaaaacaattgtttacattcaccagttcaaagtcgtactttactttttttttttcattactcttaagagagactacattggcaaatgggaaaatgacaccaatcatttgattacagaaaatggttttataaatcctcctcttgaaattatgttcaggcccagcttggtagcttatgcctgcaatcccagcactgtgggaggccaaggcagaaggatcgcttgagcccatgagttcgacaccagcctgggcaacatagtaagaccccatgtctgtttttttctaaaaaaaagaaattctgttcaaaagtatttcagaccaaaaggaggtcgcaaaaactgttcatataattactctatgagaaaaaaatccctgtatggaaaggggcactga

SEQ ID NO: 38570 - DNA, 569 bp, Homo sapiens
  misc_feature 393, 394, 395, 396, 398, 401, 402, 404, 405, 406, 407, 408: n = A,T,C or G
acgactcactatagggcgaattggagctccaccgcggtggcggccgaggtacactcggcctggctgttggagttgcttgtggcatgtgcctgggctggagccttcgagtatgctttgggatgctccccaaaagcaagacgagcaagacacacacagatactgaaagtgaagcaagcatcttgggagacagggggagtaccaggcagtgacagccaccctggaggagaagaggaaagagaaagccaagatccactaccggaagaagaaacagctcatgaggctacggaaacaggccgagaagaacgtggagaagaaaattgacaaatacacagaggtcctcaagacccacggactcctggtctgagcccaataaagactgttaattcctcacannnnanaannannnnnaaaaaaagtacctgcccgggcggccgctctagaactagtggatcccccgggctgcaggaattcgatatcaagcttatcgataccgtcgacctcgagggggggcccggtacccagcttttgttccctttagtgagggttaattgcgcgcttggcgtaatcat

SEQ ID NO: 38571 - DNA, 387 bp, Homo sapiens
actcactatagggcgaattggagctccaccgcggtggcggccgaggtaccttttcttcccatcaaaaatgcattaacaagatcatgcttatagttagtcagcacaagaaaaaaacgacaatttatactgaactatttaagtcttgcagtagagtgctcacaactccgagctgtatctgttaaccttttcaatagcattcattatgtgacattgtcaccaattcccgcgtacgcgggatttatggcagtattcataattagcctgaaatgcattctgtaggtaatctctgagtttctggaatattttcttagactttttggatgtgcagcagcttacatgtctgaagttacttgaaggcatcacttttaagaaagcttacagttgggc

SEQ ID NO: 38572 - DNA, 200 bp, Homo sapiens
ggcgaattggagctccaccgcggtggcggccgaggtacgcgggctatcaaagtatactgtgatttctctactggcgaaacctgtatccgggcccaacctgaaaacatcccacccaagaactggtataggagctccaaggacaagaaacacgtctggctaggagaaactatcaatgctggcagccagtttgaatataatgt

SEQ ID NO: 38573 - DNA, 413 bp, Homo sapiens
atacactactatagggcgaattggagctccaccgcggtggcggccgtattgcctgccctccttaaagcctgcgtcccagtctgtgcgaatgattcggtcatccagacgcgtcccatttatgtacctcggccgctctagaactagtggatcccccgggctgcaggaattcgatatcaagcttatcgataccgtcgacctcgagggggggcccggtacccagcttttgttccctttagtgagggttaattgcgcgcttggcgtaatcatggtcatagctgtttcctgtgtgaaattgttatccgctcacaattccacacaacatacgagccgggagcataaagtgtaaagcctggggtgcctaatgagtgagctaactcacattaattgcgttgcgctcactgcccgctttccag

SEQ ID NO: 38574 - DNA, 208 bp, Homo sapiens
ctactatagggcgaattggagctccaccgcggtggcggccgaggtaccactgcactccagcctgggtgacagagtgagactctgtctccaaaaaaaactttgcttgtatattatttttgccttacagtggatcattctagtaggaaaggacaataagattttttatcaaaatgtgttcatggccagttaaggagaatgtttatatttc

SEQ ID NO: 38575 - DNA, 613 bp, Homo sapiens
tacgactcactatagggcgaattggagctccaccgcggtggcggccgcccgggcaggtacagttgtttggcctacctgatgctatctctaaactacttttaaaatgaagacatttgggtgtttcatgtcagtgaattatcttttctcttggacttaacaaacatactgttcccatacatagtactgagggccagcatcatcaggaaagctccaggcttcacatctgatacagtattgtcaggagcccacttaaaaaataaattacaaaaaggctgttttgggagtaagcagttgaactgttttttccccctcaggtgcaacagagattgagcagactacaaatcggtccgtgcactggctgccttgggggcatatttaggcatcagttcatttatcttccggatgtagtcagacttttctgcacagcctttgcatgtctccccccagtcatccagaatcttcttcagctctttaactcggagcttcttcaggtccactgtgctcaggtccccgtacctcggccgctctagaactagtggatcccccgggctgcaggaattcgatatcaagcttatcgataccgtcgacctcgagggggggcccggtacccagc

SEQ ID NO: 38576 - DNA, 557 bp, Homo sapiens
cgactcactatagggcgaattggagctccaccgcggtggcggccgaggtacataaaagattttggaaatcgtgggaaaaaattataccagctataagctatttaaatactgttgatagttatcagagggaaatcaaaatcatataaacagcatactcaaaaaaatgagacaaaagtcaagagtatcatatttttgttcactgataaactaaaagccaatttctcggtatttctcatgtatacttcatttattttattaataagcaaagccctgtaaggggagcctttgcctagtcctccgactctgattcatcttcatcttgactaatctggaagtaacgaagttcgtaggtctccttgtcagatgcaaccactcgaagccaatcacgaagattgttcttcttaaggtatttcttggtaaggtatttcaaataccttttagagaactgtttctcagaaacaactgtgattttattcttgaagcgttcaatgtgaacaacattcccgagatttccagttttgccattgactttaaccttctcccgtagaaattgctca

SEQ ID NO: 38577 - DNA, 626 bp, Homo sapiens
  misc_feature 549: n = A,T,C or G
gtatacgactactatagggcgaattggagctccaccgcggtggcggccgaggtactacttcagccaatctgtgaatgtaaaaactacactgttgccttgctaggatccaccctcctataatatggaacaaatatctggatgaaatccaccctaggagacggagtcaaactaaacttgtggtttttcatttaactttgactacagcatggccccatggcatccacaccaagagggtgttgtgatgaggtgccggtgtgcaaagggaactttagtttttccactggttcttatctgctagccttttacatacatgtgtaccacagtgtgtgagaggggaacccccatcaagtgtggccagcccatccggctgacacatgccaacactggccgaaacctccatagtcaccacttcacttcacctctttctggaaaccaggaagtgagtgcttttggtgaggaaggtgaaggtgattatctggatgactggacagtgctctgtaatggaccctactgggtgagagatggtgaggtgcggttcaaacactcttncactgaggtacctgcccgggcggccgctctaaaactagtggatcccccgggctgcaagaattcgatatcaagcttat

SEQ ID NO: 38578 - DNA, 517 bp, Homo sapiens
  misc_feature 225, 451, 466: n = A,T,C or G
cgcgtaatacgactcactatagggcgaattggagctccaccgcggtggcggccgcccgggcaggtacttggagggttagacctacttctgtgtcaggtagcacccaaatcctaacatctattttggagacctgtctgtgcctcttcatgctcacaccattgttctgatagatgatgccagtggaacttccaagaagcattccacctgatcttcaccaccctcttntgatcctcttttaaatctgtgtgtggaaggcaactgcaatatagaggatttggaaggttgtctgtttcttgtgtctggggaaatgataaaaaaaaaaaaaaagagagagatgtgaaaaggaaaaagatggaccaggtgatttttccaatcttcaaaatttaaatttcttggttctcataaacataggaagagtcactgaaaggtggcaccaatggatattttgtanaataacccacaactntagagctggaaaggacttgaagaagcaattaatccaacttcctcacttttt

SEQ ID NO: 38579 - DNA, 454 bp, Homo sapiens
actactatagggcgaattggagctccaccgcggtggcggccgcccgggcaggtacccacaaaaaaataagaaaagaatttaaatatcaaaaaaaggataaatatttaacctatgggaacaatattaacttatctgccggttaaagctactggcaaaagagattactagagatgctattccactatgttactaaatagcatactgctaccttcatttagctacacccttgagtaacatgggataggttaaagttgatagcataataatgcttcattaaatgcacaatagtcttaacatggtaacaaataaaatcaaatttacacataatttaaaaattttgaaatatactgcattttataacataaaagctcaatcactaaaatgatttacaattttattataaattcacttttaactaaaaaatattttctatcactgtaatacagaggcatat

SEQ ID NO: 38580 - DNA, 460 bp, Homo sapiens
gcgtaatacactactatagggcgaattggagctccaccgcggtggccggccgcccgggcaggtacagagcgttcagtttactcaggctgaatgttttctgacatatatctccagtatgaatttgtttatgtaaggaagagtttttcaggaagagaaagtagagaagaaaagaatgatgtaactaaatcaaaaaagaaggaaaagagaggaagtgagaaaaggggtgaggaaagagaaaggagtaagaatggggatggcaaagggcagagtaagagaaaagatggaatgagtgtatggaaaattgagaagtagagatggagagaaatggtgtggaaacatttactttttgagttgtagccctcacactacatcagtttgcttgcctgggctctctggggtcaggaaaggtgctgacttccatggaatggggcagcagggcctgctgtatttggtttgttag

SEQ ID NO: 38581 - DNA, 435 bp, Homo sapiens
tacactactatagggcgaattggagctccaccgcggtggcggccgaggtacattgtctgaatccatgtagcaaccctgtaaggtgggtgttttatgcccattttacagatgaggaaactgaggctcacaaaagtttagcagagtgaggatttggaaccagtttttgctggacccaaaatccatgtacctgcccggacctgcccgggcggccgctctagaactagtggatcccccgggctgcaggaattcgatatcaagcttatcgataccgtcgacctcgagggggggcccggtacccagcttttgttccctttagtgagggttaattgcgcgcttggcgtaatcatggtatagctgtttcctgtgtgaaattgttatccgctcacaattccacacaacatacgagccgggagcataaagtgtaaagcctggggc

SEQ ID NO: 38582 - DNA, 659 bp, Homo sapiens
tacgactcactatagggcgaattggagctccaccgcggtggcggccgagaaccaaggacgtaaggataagcatctaagcccaagtcacttgagtgtattttatcaaaggttatgctaaaaactgtcacccataaaagtgcaaaataaaagattaatgcatgtcaaaaatagagttcttgcaacattgtccaaaagcagcaaacatagttgaacaaggctgtgcatgcactgtcactagctataaagtaatgcttatgacagattttgagtaaatgacatatacttgagatcagttatttgcaaaaatttttttaaaaaaggaaatgtcttacaaaagatatatagcatgaagtcacattacactgaagaacacttatctgtattaaatgtaaattttatgtcatctagaaaactatcattttgcttttactgaacactaccagttacagcagtgcatagtgttcattcaaataaaactttatagtttcttttaagcccctaccatacacttttgcaaaacaagctctagaactagtggatcccccgggctgcaggaattcgatatcaagcttatcgataccgtcgacctcgagggggggcccggtacccagcttttgttccctttagtgagggttaattgcgcgcttggcgtaatcatg

SEQ ID NO: 38583 - DNA, 426 bp, Homo sapiens
actactatagggcgaattggagctccaccgcggtggcggccgaggtacactgagttttaactggacaccaagcaggcaaggctggaaggttttgctctctttgtgctaaaggttttgaaaaccttgaaggagaatcattttgacaagaagtacttttaagcattaggttcactaaataccacatctgcctatttactcaaattatttcctttacttatggctttttgcattatccagttttcctgacagcttgtatagattattgcctgaatttctctaaaacaaccaagctttcatttaagtgtcaaaaattattttatttctttacagtaattttaatttggatttcagtccttgcttatgttttgggagacccagccatctaccaaagcctaaaggcacagaatgcttattctcgtcactgtc

SEQ ID NO: 38584 - DNA, 551 bp, Homo sapiens
gtatacgactcactatagggcgaattggagctccaccgcggtggcggccgcccgggcaggtacactatctggcctttgtcagggatgttttcagtttattcattttttttcccctttgaatgggtcatattttcctcattctttgtatgccttatgatttttgtcaaaaactggacatttaaatcttataaagcagcaacatctgttagagtctcccttttgtttttttgttttgttttgttttgtttttaatattgatgtagggtgtctccatgctaagaatcagcctgaggtgtaagcttaaggtcttctcaggtgttttctgagcctgtgcctttccatgggtataccttctacattcccccatatgcagttgcttttcaatatactagtcctcaaatatttcgctctcaaaggggaaaaagagaacttcagtgggggaaaacagactctggctccttaaatcccctaaaagccactttagccagtggggggttgcaattggctgaagtagctttcaggggatttaagtggaccacctctgtgatcag

SEQ ID NO: 38585 - DNA, 416 bp, Homo sapiens
aatacgactcactatagggcgaattggagctccaccgcggtggcggccgcccgggcaggtacttttttttttttttttttttttttttcttttttttttttttttttttttttttttttttttttttttttttttttttggcgaaaaaaaatcttacctttttattggggggaaaaaataaccagatttccctccccaacagggcgtcacaagaaatggggcaataaagggaaaaaggccaaccctaaaggcatctaggccctttctcataattctaaacaaaaaaaaagggcccccaggtttggaaatcttcacaaaccctacagaggggcaaaaaagctacaaacatttaaatttacaagtttcaagttcttaaaaaaaaaaccccccaaaaaaaaaaaggtccctgggccgct

SEQ ID NO: 38586 - DNA, 607 bp, Homo sapiens
  misc_feature 476, 537: n = A,T,C or G
cgcgcgtaatacgactcactatagggcgaattggagctccaccgcggtggcggccgaggtacgcggggagaagaggaagatttctgaagagtgcagctgcctgaaccgagccctgtcgaacagctgagaattgcactgcaaccatgagtgagaacaataagaattccttggagagcacctacggcaactaaaatgccatttcacctggaacttgatggagggagaaaactccttggatgattttgtagacaaagtattttaccggactgagtttcagaattgtgaattcaaagccacaatgtgcaacctactggcctatctaaagcacctcaaagggcaaaacgaggcagccctggaatgcttacgtaaagctgaagagttaatccagcaagagcatgctgaccaggcagaaatcaaaagtctggtcacctggggaaactatgcctgggtctactatcacatgggccgactctcanacgttcagatttatgtagacaaggtgaaacatgtctgtgagaagttttccagtccctatanaattgaaagtccaaagcttgactgtgaggaagggtggacactgttaaagtgtggaggaaaccaaaatgaa

SEQ ID NO: 38587 - DNA, 399 bp, Homo sapiens
atatagggcgaattggagctccaccgcggtggcggtgttcttctcctgcgtctccgttttcttcagcttggccttatcgaagctggcgatttcccccatgtctggtttgtctgccattttcttaaaacaatccgtgcagtctcgttccgagcccgagatcctggtgctcccactcgcgttgctgcagcaagaaaacccccgcgtacctcggccgctctagaactagtggatcccccgggctgcaggaattcgatatcaagcttatcgataccgtcgacctcgagggggggcccggtacccagcttttgttccctttagtgagggttaattgcgcgcttggcgtaatcatggtcatagctgtttcctgtgtgaaattgttatccgctcacaattccacac

SEQ ID NO: 38588 - DNA, 646 bp, Homo sapiens
  misc_feature 204, 620: n = A,T,C or G
gggcgcgcgtatacgactcactatagggcgaattggagctccaccgcggtggcgtttccattaaaattttaagtttgccttaaaacaaaaaaaaacttggaaagcaaagctcccaaaccagctaagttagaaactgctcagtttctgaatgaaaatgacactgctttttatttttactctactgaattgaaagaacagaaaaangaacttacagttggtattagagaactattaggccatctatacagacacctgagaaccaattcttctctcccgcgtacctcggccgctctagaactagtggatcccccgggctgcaggaattcgatatcaagcttatcgataccgtcgacctcgagggggggcccggtacccagcttttgttccctttagtgagggttaattgcgcgcttggcgtaatcatggtcatagctgtttcctgtgtgaaattgttatccgctcacaattccacacaacatacgagccgggagcataaagtgtaaagcctggggtgcctaatgagtgagctaactcacattaattgcgttgcgctcactgcccgctttccagtcgggaaacctgtcgtgccagctgcattaatgaatcggccaacgcgcggngagaggcggtttgcgtattgggcgct

SEQ ID NO: 38589 - DNA, 431 bp, Homo sapiens
  misc_feature 25, 29, 45: n = A,T,C or G
ggcggccgcccggacaggtactttntttntttatttttcttcttntcactaatttggaagagtctgatttattggataggatcgattttaaccacctataaatgttttcttatttctggtataaagtaacataataattgcaatacatttttcctgtaatagaatttaagtgtaatccttttttcccagaggctcaaaagatctatgaatatgtcggttttttactaagaagataatggcagaaatcgtaactgactggcaatgctatttctaggtggatgcctaacatctatatttctctttaaactgaacaatgctggcactggaagacttggtgataccctgagcgaatagtaacattaagtgcagtcaccaccacgaaccttttcccttttccctgctctcactatatgcaggcgctggtctaagta

SEQ ID NO: 38590 - DNA, 664 bp, Homo sapiens
ggcgaattgggccctctagatgcatgctcgagcggccgccagtgtgatggatatctgcagaattcgcccttagcgtggtcgcggccgaggtacctccttctatcaaaagtagacattcatttgaaagcgggagaataccatcatttttcacaaaatgaactgctacttttcgcctttttgatttttagtggtccagatttttgaatcatataatgatgtattttgtagcttgacatctggggttttagttgcaccatcctgaaaaattatatccaaatcgccctcatgtggaacttcttgcagcaaatgacatttagggcaatgaagtttaacagactgaaatagtcttctgggcttatatgacctcaattttgctcggatgcggtattgttgaggagctttttgtttcaaaatggcacatagtggtgtcctctccaaatactgatgatctgtaagtattgtagcagatagctgttgacatctttctacctcgtataatgatactgatccagagcttggaaagctgtcgtcaggttctgattgacagataacatctgaatgctgattggctgtcaaatttgcagattctaaatcctttttcagttgatccacatcagagttactttctggtaagaccctgattccccgaccgtaactggtacct

SEQ ID NO: 38591 - DNA, 470 bp, Homo sapiens
gcgcgtaatacgactcactatagggcgaattggagctccaccgcggtggcggccgcccggggcaggtaccgtgttttaagcttagttcagtctcaagtgtttgcagccacatctgaagaccaataaagcaactgctggtttatcctttgggagctgacagaatttcttctccaatacatacacagtaaatcataagcctgaattacctgtgaagttgctttcagatcatatcgttggtccactcttacagaaggatcactttaaaatatctctgcatttgtatccttgcaatgccacaactaaaagacagttatctcataggtccttgattaaattaagaggctttttattgaacacaagaaatgatacttttcaggcactgggcagaatacttgctagaaaggcattttttaactgtgctaaaattgagctgagtgcgtggctggagacaccacacaacacggaccctt

SEQ ID NO: 38592 - DNA, 533 bp, Homo sapiens
  misc_feature 384: n = A,T,C or G
gtaatacgactcactatagggcgaattggagctccaccgcggtggcggccgaggtaccgtggtgacgtggttcccaaagatgtcaatgctgccattgccaccatcaaaaccaagcgcagcatccagtttgtggattggtgccccactggcttcaaggttggcatcaactaccagcctcccactgtggtgcctggtggagacctggccaaggtacatgtaggtaaaataaaaacagaacaaaaacccctttccactcagggtcagagtatattacatgagcgagagagacagacgtggagaactcacaaatgctataaccaacaggatctagtttttccacgtgatggagttccaagcttttttttgttttgttttgtttcgcanaataaaaacaatacacattccaagagaaatgaatgcatctgttgacacgtctctatttctcatttacatatgtacctgcccgggcggccgctctagaactagtggatcccccgggctgcaggaattcgatatcaagcttatcgataccg

SEQ ID NO: 38593 - DNA, 642 bp, Homo sapiens
  misc_feature 190, 191, 289: n = A,T,C or G
ctactatagggcgaattggagctccaccgcggtggcggccgagtcatgtggttagcaggagtttaggatgagagaaatttagtggaccgagaaatagtctaaatatcagttttaatttgtgaaagaaaaataaaaacctgggaccccaattcactatgcctaaaggaaaaaaattaagctaaaagctgannatcatgcaagaaaagctgttttttccttttggttcttaagccagagcacttacagataaaaaggggtgaaatatctccccaggtagctacctctatgnttcacctgaacttatgtaaagttctgatttactgagcatgagaagaacacataattgactattcctgtacctgcccgggcggccgctctagaactagtggatcccccgggctgcaggaattcgatatcaagcttatcgataccgtcgacctcgagggggggcccggtacccagcttttgttccctttagtgagggttaattgcgcgcttggcgtaatcatggtcatagctgtttcctgtgtgaaattgttatccgctcacaattccacacaacatacgagccgggagcataaagtgtaaagcctggggtgcctaatgagtgagctaactcacattaattgcgttgcgctcact

SEQ ID NO: 38594 - DNA, 513 bp, Homo sapiens
gactactatagggcgaattggagctccaccgcggtggcggccgcccgggctggtacatagtttgtatctttaccttacggagtctatgagatttgagaatttgatttcactttttgtaacttaacccacagaaaaggacattaacttagcagataggaccaaggactgaatgacttctgacaaaaagcgtttggtctatccttcacttgttgagctacaaccatgcattacacttctcagctgagctctcaaagagctctatgccctgtgaaaagcagtggctgagttggatgaacacatagcattattaattttgcactgggaaaacagattatgacaggaccacagaccacaatataaaaacttggcagttctttggtgtgatatattttaattagtatttgcaaataatcagagttacttgtgtacctcggccgctctagaactagtggatcccccgggctgcaggaattcgatatcaagcttatcgataccgtcgacctcgaggggggg

SEQ ID NO: 38595 - DNA, 482 bp, Homo sapiens
acgactcactatagggcgaattgcgccctctagatgcatgctcgagcggccgccagtgtgatggatatctgcagaattcgcccttagcgtggtcgcggccgaggtactttcttttttttttttttttttgaggtggagtctccctctgttgcccaggctggagtgcagtggcatgatctcggctcactgcaaccctccacctcctgaattaaagtgattctcctgcctcagcctcccgagtagctgggattacaggcacgcaccactacacccagataatttttgtatttttagtagagacgtgatttcaccatgttggccaggctggtctcgaactcctgacctcagctgatctgcccgccttggcctcccaaagtgctgggattacaggcgtgatccactgcacctggcctcaggtatgtttttctatctacacacaaaaagtttattttccttcctcttatttgatatcagaagaatga

SEQ ID NO: 38596 - DNA, 635 bp, Homo sapiens
agcgcgcgtaatacgactcactatagggcgaattggagctccaccgcggtggcggccgcccgggcaggactgttcaaaaaggaatgccccacaagtgttaccatggcaaaactggaagagtctacaatgttacccagcatgctgttggcattgttgtaaacaaacaagttaagggcaagattcttgccaagagaattaatgtgcgtattgagcacattaagcactctaagagccgagatagcttcctgaaacgtgtgaaggaaaatgatcagaaaaagaaagaagccaaagagaaaggtactgttgttgagaagcttacattttagggagaggctggtcaaatctctactctctggtaacagcattaacaagagtctttcttttggaaacagactcagaagttatggacatcagccacttcagacttctttaggccagtatccttgaggtgactgaccagcctcctcatggattggagtttcccatcattgttttaattgctggaaatgttggcctaattctgcttccttgtaactttctgctttttagtacctcggccgctctagaactagtggatcccccgggctgcaggaattcgatatcaagcttatcgataccgtcgacctcgagggggg

SEQ ID NO: 38597 - DNA, 436 bp, Homo sapiens
gcgtaatacgactcactatagggcgaattggagctccaccgcggtggcggccgaggtacctgtgcacatttcaagatagcagcactcagtccatgccctattatccatcttaaaagttcacacattattgtttactgaataatatttctactgtctttacccccaaacattgcaaaacctgcaatggaacaatgctgtgagttataatgtagaaatttttttttttttttttttaaaaaatcaagtacttcattttcttaatattctgaattcaaggtattaaaactttattcctaaggcatacctatgaagcaaaaatgctggacaccaatgaaaataataaccgtataaatggctattaagaatcatgaaaaccaacccggcgccagggcttgcaccttgaattccaacacttttgggggcttaagccggtgga

SEQ ID NO: 38598 - DNA, 334 bp, Homo sapiens
actactatagggcgaattggagctccaccgcggtggcggccgaggacttggatcatgcatgttatctcacctgaaatctgcctagaggaattctattctaattaaacatacacacatacgtttttctaagttcatgataaacgcaatgcttttgaacttcctattaatgactttattcactatttacatttggctcactgctagaagacagttacaagcataaaaaatggacccaaggacaaacatttacttggtagggaaataacacaaagaagcatatcaatcgatgtctttgtcagtcattctgtgaccaaccaggagcggggatggcttt

SEQ ID NO: 38599 - DNA, 636 bp, Homo sapiens
  misc_feature 499: n = A,T,C or G
gtatacgactactatagggcgaattggagctccaccgcggtggcggccgaggtaccaactgggtttggcaggaagcacttttgactccttagttttagttgttaaatgatgtggaactttaaacagttcaggaggtggagttagtgtggttggaaaggcaggcagtgaggtgtggaataaagaacaagggctttgataacttcattcctcatgttgttcctggataagtcatttcatctttcttagtcttaaatttcccaactgtaaatgtggaaatgctctagaactagtggatcccccgggctgcaggaattcgatatcaagcttatcgataccgtcgacctcgagggggggcccggtacccagcttttgttccctttagtgagggttaattgcgcgcttggcttaatcatggtcatagctgtttcctgtgtgaaattgttatccgctcacaattccacacaacatacgagccgggagcataaagtgtaaagcctgnggtgcctaatgagtgagctaactcacattaattgcgttgcgctcactgcccgctttccagtcgggaaacctgtcgtgccagctgcattaatgaatcggccaacgcgcggggagaggcggtttgcgtattgggcgctc

SEQ ID NO: 38600 - DNA, 487 bp, Homo sapiens
atacgactcactatagggcgaattggagctccaccgcggtggcggccgagggaccaatttctaatcattgcttcattttcttcataccacggaaaaagacccaacaaatggtgcccatctggaaggatgaaggcctcctggcaatgttctcttcaacctatgatgtaggttaacaagagtggaccagtgttctgtttctgaatgattatggagaaacaaaggtacctcggccgctctagaactagtggatcccccgggctgcaggaattcgatatcaagcttatcgataccgtcgacctcgagggggggcccggtacccagcttttgttccctttagtgaaggttaaattgcgcgcttggcgtaatcatggtcatagctgtttcctgtgtgaaattgttatccgctcacaattccacacaacatacgagccgggagcataaagtgtaaaaccctggggtgcctaatgagtgagctaactcacattaa

SEQ ID NO: 38601 - DNA, 459 bp, Homo sapiens
actactatagggcgaattggagctccaccgcggtggcggccgaggtacatttgtaaaccatttactgtctgggcaatagtgactccgtttaataaaagcttccgtagtacattggtatggattaaatgcataaaatattcttagactcgatgctgtataaaatattatgggaaaaaaagaaaatacgttattttgcctctaaacttttattgaagttttatttggcaggaaaaaaattgaatcttggtcaacatttaaaccaaagtaaaaggggaaaaaccaaagttatttgttttgcatggctaagccattctgttatctctgtaaatactgtgatttcttttttattttctctttagaattttgttaaagaaaattctaaaatttttaaacacctgctttccacaataaatcacaaacactaaaataaaattacttccatataaatattattttctc

SEQ ID NO: 38602 - DNA, 569 bp, Homo sapiens
gcgcgcgtaatacgactcactatagggcgaattggagctccaccgcggtggcggccgaggtactccttgactgcaggaggctggaagacatcctagtagctccactcagaacatttacttcaagaagcctttttccagtttccaactcatgaataaagataatattttgttaattctattccagaaaacttttttgcaagttgttttatttacaatgccaacttttaaaaggtcactaaagttaactggacaataaactaggcagacattgctttacaaaaaaagagggaaagtcatttttgatattgaaggtcttgcgaatctcctcaggagttttccccttgatcatattggcaacagtcctgcatgtaacatcaagcaaacctttgatgtctaagtagtttgcagccagaatgagttcaaaaagtgttccttggtcaactttcaggaattcttggtcccaaacagggatatcatctggtcgcttttctttgttctcatcatcttcaagaagaggaagggtcatcctggggtgggtgcacccacgaaatgaccttttttaatattgc

SEQ ID NO: 38603 - DNA, 496 bp, Homo sapiens
cgcgcgtaatacgactcactatagggcgaattggagctccaccgcggtggcggccgaggtacttttttttttttttttttttgctttagattttgttttcttacattctggagaaccgaagctcagctcagccctcttccttattttgctcccaaagcctcccccaaatcatcactccctgccccccttaggctagaggtgagcatgtccctcacaattgcacatgtcaagccatcagcaaggcgcatcacacaaaaggcaccaagacgtgaaactttttaaaccaaaaggacgaagaaaaaacactttcaaaaaaaaaaaaaaaaagtactaaaagaaacaaattatttataattggggtgacaatataaaggaacaaaagatggggcaatagttgcttcctagctggagctgtaagtccatgttacagaaactcactatttaaaaagttttaaaagatttatgaaccttgtcctacaattcgctgaatacttat

SEQ ID NO: 38604 - DNA, 385 bp, Homo sapiens
ggcgattggagctcaccgcggtggcggccgaggtactttttttttttttttttttttttttggttttttttttttttttttttttttttttttttttttttttttttttttttttttcctgggaaaaccttttttggccgggaggaaccccaaagggggccaaaaaaaggcccctttttttttaaataacccccagggccaaccccttttaaaagtggaaaaaaggccccattttatttccccaaattttaaagcccccccccccataaaggggaaaagggtccctttggggatttcccccgccaaaaatttgggaaaaagctgggggaatttgggaaaaaaaaaaaaaaaagaaattttttttttaaaaacccttgggggcccc

SEQ ID NO: 38605 - DNA, 438 bp, Homo sapiens
  misc_feature 80: n = A,T,C or G
gctccaccgcggtggcggccgggtcagtgtggcagtggaggccgtcagattactgatacttatccttaagtgagtcctgngaagaggggaggccagtgtctcagacctttgcccttccagggtcatctccctccacctgtcacagctgactcttccatctgtgcaggttgactgaggtcattcctgagttgcagtatgttgagagggtaatatttctgtcttctctaactccccatactcccttgtcttccactctccacttaggagttttttgtgagttatgtccttgttgcttttgcctctttttctttctagccttgattgtgccagaagacaatgtccctattcacacactctttctgcttttctgtgggcaggaacatggaaggggtgctgatggacgcggactgtgagagcgtctaccccattgtgtaggcc

SEQ ID NO: 38606 - DNA, 432 bp, Homo sapiens
ctatagggcgaattggagctccaccgcggtggcggccgcccggccaggtacaaatcagcccaccccactaggaactatgttaaaataaaattcaagaaagaatttaagggagattacagagatactgcgacaccaggaaaacttagaactttgtgtgaaatagactggccagcattataggtgggttggccatcagaaggaagcctggacaggacccttgtttcaaaggtatgacacaaggtaactccgatgcctaggcacccacaccagtttctatacatagaaagcttcagttgctatttatacccccttgccctgccaacgtagtctatagaacagcatgctaagtgggtggcttaggcaaggaaagaccattccagagaaaaaaaggccatctataccaattgtaagttagttcatactaaacagggc

SEQ ID NO: 38607 - DNA, 352 bp, Homo sapiens
cgcggtggcggccgaccggccaggtacagccagtgtggggatgtgatgagggccctgggccagaaccctaccaacgccgaggtgctcaaggtcctggggaaccccaagagtgatgagatgaatgtgaaggtgctggactttgagcactattctgcccatgctgcagacagtggccaagaacaaggaccagggcacctatgaggattatgtcgaaggacttcgggtgtttgacaaggaaggaaatggcaccgtcatgggtgctgaaatccggcatgttcttgtcacactgggtgagaagatgacagaggaagaagtccagatgctggtggcagggcatgaggacagcaatggt

SEQ ID NO: 38608 - DNA, 450 bp, Homo sapiens
ctactatagggcgaattggagctccaccgcggtggcggccgaggtacattattggaggactcaaatctgtatgtgacatgtcccaactactgtccgctaactagttatccaaattgtaaagctacagaagcccagttgaggggtaagtgtgcctggctcacacagcctgcaccctgtcacctcggcaatgagccagtgtggggcactggggacttctaacccttggattgctcttttagacctgtgcataccttctaattgtaaaatatatttcagaccgtgagtacctgcccgggcggccgctctagaactagtggatcccccgggctgcaggaattcgatatcaagcttatcgataccgtcgacctcgagggggggcccggtacccagcttttgttccctttagtgagggttaattgcgcgcttggcgtaatcatggtcatagctgtt

SEQ ID NO: 38609 - DNA, 547 bp, Homo sapiens
gcgaattggagctccaccgcggtggcggccgaggtacacattgctttgtttcttatatccagagtctagtcctcaactctaaccaaagtaaaggaaactggaaagacacacgctttttcagtcattaatagaaagtcgtccagcgtaagtttctgatggtatatcattagaaataatatttagctatttgtaataaaaagctgaaaacagtagcttgaatcaatggaagactttatctttctcctcatacagctgacaataatgttgttgcctttatgatatcaaagccccaagttccttttatctttctgcttaacctgccttggcaaatgcttgctgcttcatagtcacatgatggctgacttactgtaaccttcacgtagaaagaaaggaataggtaaagagataaaggtacctgcccgggcggccgctctacaactagtggatccccctggctgcaagaattctatatcaagcttatcgataccgtctacctcgaaggggggcccggtacccaccttttgctccctttagtgagggttaattg

SEQ ID NO: 38610 - DNA, 401 bp, Homo sapiens
agctccaccgcggcggcggccgaagtactcagttgcccattctttttctgttactcatttaacttttttaatggggctcaaaattctgtgacaaatttttggtcaagttgtttccattaaaaagtacgcgggatacccacagaagccagtgccagttgacgctgaaagaatcaggcaaaaaagtgagaatgaccttcaaactaaatatttaaaatagaacatactccccaatttagtctagacacaatttcatttccagcatttttataaactaccaaattagtgaaccaaaaatagaaattagatttgtgcaaacatggagaaatctactgaattggctcccagattttaaattttatgtcatagaaatattgactcaaaccatattttttatgatggat

SEQ ID NO: 38611 - DNA, 660 bp, Homo sapiens
gtaatacgactactatagggcgaattggagctccaccgcggtggcggccgaggtacttgaatgtttataaagtttacgaggtctactatgcaatttccgatcccaattctctggatcactggagttaccatcatagggatgaggccgtcctgccatcccactccaagcttcctcacactactgctctgaaagcacgcatgtagcacccataactctcgaacctgtagtcccccttcagtgcccacacaagattggggcaaaggccggggccagtgacacctccacttcctcctcagccagatccctccccccgcgtacagctatctgaggcagcccttcagaagaaaacctgtggtgccgagtgcagtcaattgatggcctcagctgcagcatctctgggacctgcctcaagatgagagctaaaaacgtggctcccagtcagtgcctgagcgtggcaggggtcctagggcctggccatttctatgcaatgtgagactcctccaactgtccatctgtccttgggagctcctgttgggctagctgcaactctcagggctgctcatcacccgaggctggctcttcttttcctccatcctctcacactgccagagttacaccatgggctgaaggctttctgtgtcttactttgctctctcccct

SEQ ID NO: 38612 - DNA, 422 bp, Homo sapiens
ctactatagggcgaattggagctccaccgcggtggcggccggcgcgcgggccccgcgtactcagtagggactgagcactaaatgcttattttaaaagaaatgtaaagagcagaaagcaattcaggctaccctgccttttgtgctggctagtacctcggccgctctagaactagtggatcccccgggctgcaggaattcgatatcaagcttatcgataccgtcgacctcgagggggggcccggtacccagcttttgttccctttagtgagggttaattgcgcgcttggcgtaatcatggtcatagctgtttcctgtgtgaaattgttatccgctcacaattccacacaacatacgagccgggagcataaagtgtaaagcctggggtgcctaatgagtgagctaactcacattaattgcgttgc

SEQ ID NO: 38613 - DNA, 667 bp, Homo sapiens
gcgaattggagctccaccgcggtggcggccgaggtacttgcggcccggcagctctctgaactgatgtaagacacggtcagtctgatgagctccaatggtgacttccgggagaaagataggaatgcttgtgtaattcagcacctcaaacttatcctgaaccagtaatcgcaggtggataaagtgcgattgtcctgcttgagccacggccctttatcgaacttcaggtattcaatgtcctctaccaccttttttgaatcttgagcttcccttgcagaatattgtaaaacctcacatttttcactcatctcagggagaaaggttttcttataggcattctcaatgtcctgtagatatcgagcggccgcccgggcaggtactgcataattatagtcaatgcttgcaataattttcagtttgtctcatcacgttagcagagcctattcatgcaatttagaaaggatttcaatacagcccaaaccaaaaggcttacggtcaacagagggttagccttccataaatgagaaatccaaaaaagaataatgccacgtatttcaggaatgtcggttagaggtttggccttcttgggaagtgtcacaatgctgagtctaaaactgcaacagttaccgtgtccaagtcatgcaactctaaaggaggatggacggtcaca

SEQ ID NO: 38614 - DNA, 462 bp, Homo sapiens
actactatagggcgaattggagctccaccgcggtggcggccgaggtacaggctcactgaacacgagagagctcgcaaaggagagaaaccatacgggtgcagtgaatgtgggaaagccttccccaggaaatctgagcttactgaacatcaaaggattcacacgggaattaagccccatcaatgcagcgaatgtgggagagctttctccagaaaatcactactcggtgtacctgcccgggcggccgctctagaactagtggatcccccgggctgcaggaattcgatatcaagcttatcgataccgtcgacctcgagggggggcccggtacccagcttttgttccctttagtgagggttaattgcgcgcttggcgtaatcatggtcatagcttgttcctgtgtgaaattgttatccgcttcacaattccacacaacatacgagccgggagcataaagtgtaaagc

SEQ ID NO: 38615 - DNA, 412 bp, Homo sapiens
  misc_feature 6: n = A,T,C or G
ctatanggcgaattggagctccaccgcggtggcggccgaggtactcattttatgtatgttacccttcagtaagttctccccattttagttttctaggactgaaaggattcttttctacattatacatgtgtgttgtcatatttggcttttgctatatactttaacttcattgtaaatttttgtattgtatagtttctttggtgtatcttaaaacctatttttgaaaaacaaacttggcttgataatcatttgggcagcttgggtaagtactttttgttgttgtttcttttttttgtttttgtttttgttttttttttgcgttcgtggggttgtaaaagaaaagaaagcagaatgttttatcatggtttttgctccagcggctttaggacaaattaaaagtcaactctggtgc

SEQ ID NO: 38616 - DNA, 436 bp, Homo sapiens
ctcactatagggcgaattggagctccaccgcggtggcggccgcccgggcaggtacacttctgtttctttcagctgtattatttatacacccaggttttctgttaaggatgtaatcattcattcaagaaagaacaattggcaagaaataattaaattaccttaaaaagaattaagaggcacttcagccagataacacctcccaacaacatgaaatttagttagtgcttagtgaaattccttaaatatatatgtatatggttttcttcaacattatttaatataactactgcttttatattttttaatggtgtttgcaaccacctgtacctcggccgctctagaactagtggatcccccgggctgcaggaattcgatatcaagcttattgataccgacgaccttgagggggggcccggtacccagcttttgttccctt

SEQ ID NO: 38617 - DNA, 438 bp, Homo sapiens
gtaatacactactatagggcgaattggagctccaccgcggtggcggccgcccggccaggtactccagccagggcaagagagcgagaccctgtctcaataaataaataaataaataaataaataaataaataaaaacaaagttgattaagaaaggaagtataggccaggcacagtggctcacaccttgtaattccttgcattttggaaggctgaggcaggaggatcactttaggcctggtgtgttcaagaccagcctggtcaacatagtgagacactgtctctaccaaaaaaaggaaggaagggacacatatcaaactgaaacaaaattagaaatgtaattatgttctaagtgcctccaagttcaaaacttattggaatgttgagagtgtggttacgaaatacgttaggaggacaaaaggaatgtgtaagtctttaatg

SEQ ID NO: 38618 - DNA, 403 bp, Homo sapiens
cgtaatacgactcacttagggcgaattggagctccaccgcggtggcggccgaggtacaagcatggcgctggtatctgcttggcttcctggtgaggcctcaggtaggattcagtcatggtgaaaggtgcagcagtggcaggcacatcacatggtgaaagtgggaacaagagagggtggaggtgccacacacttttaaacaaccaggtcaggtgtgaactcactcatcgccaagaagacggcactaagccattcatgagggatccgtcctgtccccatgatcaaaacacctcccaccaggccccacctctgacactggggatcacatttcaacatgagatttggaggggacaaatatccaaaacatatcaatatgtttcactatggaaactttacaagttcagtc

SEQ ID NO: 38619 - DNA, 457 bp, Homo sapiens
tacgactactatagggcgaattggagctccaccgcggtggcggccgaggtacctaaaaaaaaaaaaaagtttaaaagttttgctttagagattccaaagaatatatttagacttataaaagcacttatctgataagattctatttgcttttctttattcatagagaccacaaacagatcgcagatccaggtttctcaaactggagcatctgcttaattttcccataaaatcagtcttattctttctgacagctctgagactcctccggccacgactaggtgctgtcctggaggaaacggtggaggacggccgctctagaactagtggatcccccgggctgcaggaattcgatatcaagcttatcgataccgtcgacctcgagggggggcccggtacccagcttttgttccctttagtgagggttaattgcgcgcttggcgtaatcatggtcatagct

SEQ ID NO: 38620 - DNA, 500 bp, Homo sapiens
gcgaattggagctccaccgcggtggcggccgaggtacttgtgagcttctttccttccattcatgactgaagatctgctcaaatgcaccaacactaccaagtaactaatgtaaaaaagaaaaataacaagtatcatcatctaaaaaacatatgaatctttttcttccccttcttcacaataaaatataaagaacaattataaaatatcatcagaataaataccatcaaacctacaactccctttctctttataataattatactttaaatataacattatcttttatatatatattcctatattttcaatatatctttttccttcagtaaacctaatattcaaaaacaaaaaattaaaatcctacaaaaaaattcctacccaaacaaccattctaaaactaataaatcccccaacctccaaaaattcaatattaaacttatcaataccatcaacctcaaaaaaaaaacccatttcccaacttttatttcccttttataaaa

SEQ ID NO: 38621 - DNA, 671 bp, Homo sapiens
gcgcgaatacgactactatagggcgaattggagctccaccgcggtggcggccgccgggcaggtacgcggggaatgccagatgatctatcattgtctcactttgcccccagataagaccatctagttgcagaaaaataagctcagagcttccactgattctacattatggatatgtgccgccgaagcaagcacaaagccctacttttacacatgcctagtgatgcttcatagacaaggcttggctctgttgagtccaactaacctacctgagattctgagatttctcttcaatggcttcctgtgagctagagtttgaaaatatcttaaaatcttgagctagagatggaagtagcttggacgattttcattatcatgtaaatcgggtcactcaaggggccaaccacagctgggagccactgctcaggggaaggttcatatgggactttctactgcccaaggttctatacaggatataaaggtgcctcacagtatagatctggtagcaaagaagaagaaacaaacactgatctctttctgccacccctctgaccctttggaactcctctgaccctaaaagaccaacaacggcctcaaaggatctcttaccatgaaggtctcagctaattcttggctaagatgtgggttccacattagggttctgaatatggggg

SEQ ID NO: 38622 - DNA, 422 bp, Homo sapiens
ctactatagggcgaattggagctccaccgcggtggcggccgaggtacccatgtccataaaggcagcaacaaagctgcttgtctattgaagattactactgcaaattggactgcattcaatgctagttgtaaaaacaccagcttttcagaagttggtatctgtacagtggcgtgatctctgctcactgcaacctccgcctcctgggttcaaacaattctgcctcagcctccggagtagctgggattacaggcgcgcgccactatgcccggctaatttttgtgtttttagtaaagacggggtttcaccatgtcggccaggctgttctcgaactcctgacctcgggatccctccgtctcggcttcccaaagtgctgggattacgggcgtgagccaccgtgcccggccgctctagaactagtggat

SEQ ID NO: 38623 - DNA, 384 bp, Homo sapiens
actatagggcgaattggagctccaccgcggtggcggccgcccgggctggtacatgacgtaaaccttgtccccttctcagcgggtggacttaaaaattaaaaatagttaagtgttccttttaaagaacaaaataaggcacatgaggttttggaatagaattttttctttttcttttttttttttgatggtttcttccagaatacatacaaaaaaatacccattctcttcgatggtatacaccttaaaaatcattgcaatttgaaatcagagctgacaacattgtgactttttttttcattttttttgtgaacaaacatgcatgtaaatttgtgtttcaatcatacattaaataacgtacctgggccgctctagaactagtggatc

SEQ ID NO: 38624 - DNA, 392 bp, Homo sapiens
ctactatagggcgaattggagctccaccgcggtggcggccgaggtactttgttatatgctgaaatggttttaaatgaagcaaatggttgtaaataatgaatgacagaacatctattttgggacattatggcttaaaatgctatttacttgtaacttcacaaataaacacagctgtattgttttgaaaagcaatgaaaggcatgcacctctactagcagatttagcacttttgaccaagttagacaccaactttctttaaaaatatgcttcatgcactgtacctgcccgggcggccgctctagaactagtggatcccccgggctgcaggaattcgatatcaagcttatcgataccgtcgacctcgagggggggccccggacccaacttttgtt

SEQ ID NO: 38625 - DNA, 448 bp, Homo sapiens
ctactatagggcgaattggagctccaccgcggtggcggccggcagccggcagctttgcagcggtgtgttctaggtcagtggcttcaaagactccagttggattcattggactgggcaacatggggaatccaatggcaaaaaatctcatgaaacatggctatccacttattatttatgatgtgttccctgatgcctgcaaagagtttcaagatgcaggtgaacaggtagtatcttccccagcagatgttgctgaaaaagctgacagaattattacaatgctgcccaccagtatcaatgcaatagaagcttattccggagcaaatgggattctaaaaaaagtgaagaagggctcattattaatagattccagcactattgatcctgcagtttcaaaagaattggccaaagaagttgagaaaatgggagcaggtttcatggatgcccctgt

SEQ ID NO: 38626 - DNA, 400 bp, Homo sapiens
gactcactatagggcgaattggagctccaccgcggtggcggccgcccgggcaggtacacagagttgtggcttttattttcaattaatttttttccttgtgggcagtgtgcatggtataataagcctgagcagaggcttaagttgtatgtgtgcagagtttgtaaaggaatcaattggaagatgcagaagaccgaggtttgctttcaaggtatttttcaggctgtgtgggtaaaatttgcctcaaatttctatcaaacaggaatgtaaaatagataaaatcctatgtatttgaattgtcagagctagggagtgcaaatgttttggcaatgtattcaaaatgctggcctgggcaccaaagagaaaatagccttttacagttacatagtaagatgcgattagt

SEQ ID NO: 38627 - DNA, 456 bp, Homo sapiens
actactatagggcgaattggagctccaccgcggtggcggccgaggtacttttatttcatgtaaactgcccctctgaggatttgggcatattttttggaaggtgcctaatgcttaggatagtctctagggtgatgcactacacctgcttccttcccttcagtgcggccgctctagaactagtggatcccccgggctgcaggaattcgatatcaagcttatcgataccgtcgacctcgagggggggcccggtacccagcttttgttccctttagtgagggttaattgcgcgcttggcgtaatcatggtcatagctgtttcctgtgtgaaattgttatccgctcacaattccacacaacatacgagccgggagcataaagtgtaaagcctggggtgcctaatgagtgagctaactcacattaattgcgttgcgctcactgcccgctttccagtcgggaa

SEQ ID NO: 38628 - DNA, 258 bp, Homo sapiens
gcgcgtatacgactcactatagggcgattgagctcaccgcgtggcggccgaggtactttattttttttttttttttttttttttttttctttttttttttttttttaaaatcttcaaaatatttttttttctactttcaaacttaaaaaatacaccaatttaaccccccccatataaaaaaacacatccacccctaaccctccattacaaaaaaaaaatccctacccggaccctccctctaaaactaatgaacccccc

SEQ ID NO: 38629 - DNA, 263 bp, Homo sapiens
tatacgactcactatagggcgaattggagctccaccgcggtggcggccgaggtacttttttttttttttttttttgacgtatgtggtcccactatcaaaattataggaagcagttaatggggctttgagaaaagcatagtcccatgtacagtctacaatactcttcagtctccctaactcatgccctgcccctataaaggggaaatatgttcacagattttacctttgagaaaaaaaaaccaaagccactttaagaaaaaaaa

SEQ ID NO: 38630 - DNA, 555 bp, Homo sapiens
ctagagcgatggatatctgcagaattcgcccttagcgtggtcgcggccgaggtaccaaatataaaatgctgcaagattttgaatgaatggtgagagtgtaagaaaatgggctgtatttcaatgctcctgtggcaggatgtcaatcaagaacttggagccaaagaaaaagaaatcccttcctagcacaaagcttggctgttcagtgaatagcgtttaaataaccgtaaaataaaaatcctgtttatgatttttattgattaggggcctacttaattaaggttaccaagtggaatgcaaatgttatctgccatattttaaaaatatcagcggaaatacaagtgggaacgttgaaggagagagagaaaggtaaatggaatggtgatagtgtccttataaagtggacagttgagccaggcacagtggctcacacctgtaatcccagcactttggtaggccgaggcggggggatcacctgaggtcaggagttcaagaccagcctggccaacttggtgaaactccgtctctaccaaaatacaaaaatcagccgggtgtgat

SEQ ID NO: 38631 - DNA, 516 bp, Homo sapiens
cgactactatagggcgaattggagctccaccgcggtggcggccgcccgggcaggtaccccagctgatgatgttccacaaaagagcaaaacatacacaatctggttccactctacagaaatcctggaactggactacaaagggaatagacagggtgtggcaggagggggttcctacggttggagtgcgaggttagggacaggaatagaaggtaggtaataaacattcatgtggtattaacttagggcagatgtgtcaatatatttccaagtttagcataatataggtataaaaattaaataaaaagtttatatgtgtgtgtatatatgggttaatacacaacacatacctcctagagtcattacctgagaggttctacaagaaaagacagcaaattaacaaaaaatacacccagaatcaagatttgagttttggttcctttcatagcagaatggtatgcaacatttcttggaaaaatggctaatcctagggcttggaaagagaatataggagtaaag

SEQ ID NO: 38632 - DNA, 429 bp, Homo sapiens
atacgactactatagggcgaattggagctccaccgcggtggcggccgaggtactgttcctgttggccgagtggagactggtgttctcaaacccggtatggtggtcacctttgctccagtcaacgttacaacggaagtaaaatctgtcgaaatgcaccatgaagctttgagtgaagctcttcctggggacaatgtgggcttcaatgtcaagaatgtgtctgtcaaggatgttcgtcgtggcaacgttgctggtgacagcaaaaatgatcgagcggccgcccgggcaggtaccagctttggaacgagatgctatactaataagcaagtgtaaaaaaaaaaaaaagaggaagaaaatcttaagtgattgatgctgttttcttttaaaaaaaaaaataaaattcattttctttgggttagagctagagagaag

SEQ ID NO: 38633 - DNA, 417 bp, Homo sapiens
acgactactatagggcgaattggagctccaccgcggtggcggccgggtacctgacagttccaaacagctttattcagcttagaagagacacatgaagatctgaatacagagtagcaataatctgagcctgcttctcacacgcagggcattttactcgcccacactgaggagcctcttggagcgtctccctctcagcgtcccaggaagtgcgttcccagcgaggtacctgcccgggcggccgctctagaactagtggatcccccgggctgcaggaattcgatatcaagcttatcgataccgtcgacctcgagggggggcccggtacccagcttttgttccctttagtgagggttaattgcgcgcttggcgtaatcatggtcatagctgtttcctgtgtgaaattgttatccgctcact

SEQ ID NO: 38634 - DNA, 573 bp, Homo sapiens
  misc_feature 47: n = A,T,C or G
gcgaattggagctccaccgcggtggcggccgcccggcggtacgcggngtgctaaggcttgagtgcgttgagcccaactgcagatctaagagaatgctggctattaaaagatgcaagcattttgaactgggaggagataagaagagaaagggccaagtgatccagttctaagtgtcatcttttattatgaagacaataaaatcttgagtttatgtccaaaaaaaaaaaaaaaaaaaaaaaaaaggtacctcggccgctctagaactagtggatcccccgggctgcaggaattcgatatcaagcttatcgataccgtcgacctcgagggggggcccggtacccagcttttgttccctttagtgagggttaattgcgcgcttggcgtaatcatggtcatagctgtttcctgtgtgaaattgttatccgctcacaattccacacaacatacgagccgggagcataaagtgtaaagcctggggtgcctaatgagtgagctaactcacattaattgcgttgcgctcactgcccgctttccagtcgggaaacctgtcgtgccagctgcattaatgaatcg

SEQ ID NO: 38635 - DNA, 448 bp, Homo sapiens
cgactactatagggcgaattggagctccaccgcggtggcggccgaggtacgcgggaagacggcctggggatacaactctggagtcctctgagagagccaccaaggaggagcaggggagcgacggccgctctagaactagtggatcccccgggctgcaggaattcgatatcaagcttatcgataccgtcgacctcgagggggggcccggtacccagcttttgttccctttagtgagggttaattgcgcgcttggcgtaatcatggtcatagctgtttcctgtgtgaaattgttatccgctcacaattccacacaacatacgagccgggagcataaagtgtaaagcctggggtgcctaatgagtgagctaactcacattaattgcgttgcgctcactgcccgctttccagtcgggaaacctgtcgtgccagctgcattaatgaatcggcc

SEQ ID NO: 38636 - DNA, 442 bp, Homo sapiens
gtaatacactactatagggcgaattggagctccaccgcggtggcggccgggggcattcgtattgcgccgctagaggtgaaattcttggaccggcgcaagacggaccagagcgaaagcatttgccaagaatgttttcattaatcaagaacgaaagtcggaggaaaaaagaaccaaaacttccaaggccctgctttttttcttaaaagtacctcggccgctctagaactagtggatcccccgggctgcaggaattcgatatcaagcttatcgataccgtcgacctcgagggggggcccggtacccagcttttgttccctttagtgagggttaattgcgcgcttggcgtaatcatggtcatagctgtttcctgtgtgaaattgttatccgctcacaattccacacaacatacgagccgggagcataaagtgtaaagcctggggtg

SEQ ID NO: 38637 - DNA, 125 bp, Homo sapiens
gctccaccgcggtggcggccgaggtacaattagagctgacttatggcagaaagcttttccacactcattacattcatagggtttctccactatacttcactcaccatgctcacactgcctccttg

SEQ ID NO: 38638 - DNA, 420 bp, Homo sapiens
gactactatagggcgaattggagctccaccgcggtggcggccgaggtacattattgcattagggagccacaaaattatgtagcatcattacaaatgaaaacaggttaaaaatgaagaagatacttatatagaaatacatggattcattgtcttcttgcagaatgcacaagaggtgcaaaaatgtgcaatttaggaagctctttttctgtttgtatacgtttgcttagcaacacaaaccagtgaggaagctacaaaataagttaaacaaaaatagcaaacaggtagtaattatagccatgttatatggctttctatttcatttaaatatctccaaataaaatgtgaaataaagaaaatacattattttatcttttattctcttacagtgaaaattcaaagctactttgcttcctaacattt

SEQ ID NO: 38639 - DNA, 628 bp, Homo sapiens
agctccaccgcggtggcggccgggtaccccttttgttatttaaaaaagttaagggagagaaatgttcataaatccctaattggtagaattagagagagctaaaaacagtgctaattatcaggcgacgtggaaacaactttgtgggcaagagagcattccttttttttttaactgtttacaaagagttcaattaaacttgttttaaattaaacacactaaacaaaattataagttttgtgattatgaaaatactgtttatcactacataaaatactgtttatggcactttatagattcaaaaaacctattaatgatacttcttttctggattaaagatagtggatgtttatatatatgtatgtgtatatacatacacacacacatatatatgtaaatgtatcatacagaaaataacataggcatatgatttggagaaacagggaaaaaaagttacaaagtgggagaagtccatcccactatacaactcattcccagatatagcaatagtctcttattcacctcctcagaaatttttgttgcatgtaatcccatatatattctatttcacattagtcattcttctatacactttatttcactaacaccttagaaacatgtacatatcagt

SEQ ID NO: 38640 - DNA, 564 bp, Homo sapiens
  misc_feature 173, 184, 197: n = A,T,C or G
acgactactatatggcgaattggagctccaccgcggtggcggccgcccgggcaggtacttttttttttttgagacggagtttcactcttgtcacccaggctggagtgcaatggcgcaattagggttcactgcaacctctgcctcccgggttcaagcagttctcctgcctcagncctcctgagtnagctgggattacnaggcatccaccaccgtgcccagctaatttttgtatttttagtagagacggggttttgccatgttggacaggttgatctcaaactcctgacctcaggtgatctaccctcctcggcctcccagagtgttgggattacaggcatgagccaccatgccaggctgctaattctcctttttagtgagttagggaactgagcctcagaaaacttaaacgatttctcagaaaacactcaagtgataaagtggccacattggaaaggagtttttatcttctcattgtcaagccagtgttcattgcacaatatcatgctacctcttgaatctttaaaatattcaattggcaaatgtttttcaatgtgaattactcat

SEQ ID NO: 38641 - DNA, 390 bp, Homo sapiens
ggcgaattggagctccaccgcggtggcggccgcccgggcaggtacaaacggagagttgtttatctttcagatgtttcacagaatccagtgtccccgggttggataagaaagatatgggaaaaattattttagttttggaaagatcctcttcagaaataccactatcttcctgaagtttgatggagaaccttgtgacctgtctttgaatataacctggtatctgaaaagcgctgattgttacaatgaaatctataacttcaaggcagaagaagtagagttgtatttggaaaaacttaaggaaaaaagaggcttgtctgggaaatatcaaacatcatcaaaattgttccagaactgcagtgaactctttaaaacacagaccttttctggaga

SEQ ID NO: 38642 - DNA, 320 bp, Homo sapiens
  misc_feature 45, 197, 198, 234, 235: n = A,T,C or G
ctgcaccgcggtggcggccgaggtaccacaacctctgcctcctgngttcaagtgatcctcctacctcagcctcctgagtagctgggattacaggcacctgccaccacacctggttaattttttgtattgttagtagagatggggtttcacttatgttggtcagggtgtgtctcgaacctcctgattaccaagtgatnntcacctgccttggcctctccgaagccttagctcctnntttgattccctgaccatcaaatgcctacttcttcttggataagttatacttgtggagaagttggtgacggggccaaaacgggagc

SEQ ID NO: 38643 - DNA, 387 bp, Homo sapiens
atacgactcactatagggcgaattggagctccaccgcggtggcggccgaggtacaacaaagactgatttctttttgaagcctctcccacatttattatatttatgtgttttctttccattgtgaattttcttatgaagtaaaagggatgacatctgattgaaggcttttccgcactttctgcactggcagacattcccaacaacatgaattttctgatgtatattgaaagactgacattgactcaaggccttcccacagtcaagaatttcctttccatcatgaattctcatatgtagaataagggttgttctttgattgaagctttccccacatttattgcattcatggcttttctttccactgtgaattctctgatgaagtaggat

SEQ ID NO: 38644 - DNA, 427 bp, Homo sapiens
tacactactatagggcgaattggagctccaccgcggtggcggccgggaaagggccaggaaagggagtcaagcaggagcgtctgtccgaacggaggctaggtaagaatatttcaccatgaaaatgttaaaagacataaaggaaggagctaaaccatatggacccaactctccttatatgagaacgttattagattccattgctcatggaaatagacttattccttatgattgggaaattttacctaaatcttccctttcaccctctcagtatctacagtttaaaacctggtggattgatggggtaccccggccgctctagaactagtggatcccccgggctgcaggaattcgatatcaagcttatcgataccgacgacctcgagggggggcccggtacccagcttttgttccctttagtgagggttaa

SEQ ID NO: 38645 - DNA, 528 bp, Homo sapiens
cgcgtaatacgactcactatagggcgaattggagctccaccgcggtggcggccgcacatggttcgaggccgaggctgcaatgagagctttagagcagccattgacaaatcctacgatggacctgaagaaatagaagctgacggtctgtctgataagagctctcactctggccaaggagctctgaattgtgagtctgccctcaggggaattcggagctagaggacatggaaaataaagccaggaaagtcaaaaaaaaaaaaaaaaaaaaaaaagtacctcggccgctctagaactagtggatcccccgggctgcaggaattcgatatcaagcttatcgataccgtcgacctcgagggggggcccggtacccagcttttgttccctttagtgagggttaattgcgcgcttggcgtaatcatggtcatagctgtttcctgtgtgaaattgttatccgctcacaattccacacaacatacgagccgggagcataaagtgtaaagcctggggtgcctaatgagtgagctaact

SEQ ID NO: 38646 - DNA, 394 bp, Homo sapiens
tatagggcgaattggagctccaccgcggtggcggccgaggtacttttttttttttttttttttttttctggtgagatggagtctcactctgtcacccaggctggagtgcagtgtcgcgaccttggctcactgcaacctccacctcccaggttcaagcaattctccccacctcagcctccaaagtagctggggattacaggcatgcgcaaccatgcccagctaatttttgtaattttagtagagatgggttttcgcttagtagagatggggtgtttgtcaggctggtcccgaactcctgacctcaggtgatccgcccacctgggcctcccaaagtgctggggttacaggcttaagccaccaagcccggccgttctagaacctagtggatcccccg

SEQ ID NO: 38647 - DNA, 427 bp, Homo sapiens
cgactcactatagggcgaattggagctccaccgcggtggcggccgctcttttttctgacgggacgacacatctgaggaagacagcggcgagttttctgaagagatgagtgctcagagccctcatgctgttgaggctaaagggaggcctggaacggtggggcgtttgactggaatggaccccagggactgtccaggtgcagcccctcctagtacctcggccgctctagaactagtggatcccccgggctgcaggaattcgatatcaagcttatcgataccgtcgacctcgagggggggcccggtacccagcttttgttccctttagtgagggttaattgcgcgcttggcgtaatcatggtcatagctgtttcctgtgtgaaattgttatccgctcacaattccccacaacatacgagccgggagcata

SEQ ID NO: 38648 - DNA, 430 bp, Homo sapiens
tacgactactatagggcgaattggagctccaccgcggtggcggccgccatgtttcttcacagtcccccccgcgtactgtgtgataggtaatgcccataaggtttttatcatgttttaaggtaacttgtgcatggaataggaaaagttaatcaaatgtaatcaattcgcttttgctttttaacaaaacttaaataaatgagctatttgaggacagttctggaaattcttgccttgatttttctccaagattttagatatgtagttcacatgtgaacattaatatatgaacaattattttatttattggcctctagttctctttcctctcatgatctgtctcttagtgaattgactttctgattcattgaaagcaaaatgctaagaagattttgtgcaagtgcaaaatgtttaatcttgggttcagtcaact

SEQ ID NO: 38649 - DNA, 284 bp, Homo sapiens
gacgtgttttgcgacccggcaccccgggggggcggccgcccgggcaggtaccactgcaccccaacctgcgtgacagagagagactccgtctccaaaaaaaaaactttgctcgtatattatatctgccttacagtggatcattctagtaagaaaggacaataatattttttatcaacatgtgtcatgcccctcacagatgttatattcttttctcattccttgcccacccaaaaataaactcccatatagcttataaggctcaaatttttgcctttcactaaaat

SEQ ID NO: 38650 - DNA, 348 bp, Homo sapiens
cactatagggcgaattggagctccaccgcggtggcggccgaggtacaccgactgtgcggatgaatacaccattgctgaagctgcagcagcatcatacaggtcctcctcagcatcagattcttctagagaggcctgaggttgggccttcacttccaggtttctgcttagccagctggttgctccaaggaagagccggcaatgttccccacagcttctaggattttctgagtgatttcctgcaggtctctttggtccttcttgttttccaggttgggagttcttgtttcaaagtcattcaccatgctgagaagcaaaaaatacccaggtggggcttgattcaactgtacc

SEQ ID NO: 38651 - DNA, 648 bp, Homo sapiens
cgcgcgtaatacgactcactatagggcgaattggagctccaccgcggtggcggccgaggtacgcgggggagaaaaactggtgacagagagaaacaaaaagcgcctggaaaaagagaagcatgaaaaaggtgctcagaaaacagattgtcaaaaaaacttgggaaccgtgggtgctgttgccttggactgcaaagggaatgtagcctacgcaacctccacaggcggtatcgttaataaaatggtcggccgctctagaactagtggatcccccgggctgcaggaattcgatatcaagcttatcgataccgtcgacctcgagggggggcccggtacccagcttttgttccctttagtgagggttaattgcgcgcttggcgtaatcatggtcatagctgtttcctgtgtgaaattgttatccgctcacaattccacacaacatacgagccgggagcataaagtgtaaagcctggggtgcctaatgagtgagctaactcacattaattgcgttgcgctcactgcccgctttccagtcgggaaacctgtcgtgccagctgcattaatgaatcggccaacgcgcggggagaggcggtttgcgtattgggcgctctttcgcttccttgctcactgactcgctgcgctcggtcgttc

SEQ ID NO: 38652 - DNA, 406 bp, Homo sapiens
tacgactcactatagggcgaattggagctccaccgcggtggcggccgcccgggcaggtactggcaaagggggccggcccaccagacggagcttgcaggccagctgcttttcaaaccttggagaaacaaacgaccacggacccatgttctgaggttcctcctgactccaaatatgatctttaacatgtttgtatttgctcatctcttgctgtaaagaatccaacgggaaggggcagagttcctctactcggatgatggcaaagtcatgcttcttggcccccagagattctctttgtttcaccagggagtagaaatgtttgccggagcagaacacgagggtcttaaccttttttggatccacagatgaatcaccaatgaccgggttaaatgttgttcctggtgccatt

SEQ ID NO: 38653 - DNA, 395 bp, Homo sapiens
gactcactatagggcgaattggagctccaccgcggtggcggccgaggtacagtatgtatcatgatttttcacacatcatgaatatttaccaattcaaaatcccaaagctatatgagtattctgataaccaagaatacactacaccaactcaaactgctaaaaaaaaaaaaaaaaagaaagtacagctgtctccagctctgtcaggcgcttttcaagtcctgcgactttggcagcttgagagaacttgtcctgctcaggccgagaatgtagttcataagtgacaaggctgctatctgggggggtcccagtggtttttccccctgatccccctttgctgttctttgttacttccagctgcagtagtaggcgcttagccagggcgccatcggggtcgg

SEQ ID NO: 38654 - DNA, 592 bp, Homo sapiens
acgactcactatagggcgaattggagctccaccgcggtggcggccgaggtactttttttttttttttttttttacttattttctgcagctgctttcacactacaactgcaaagttgagtagttgctacagaggctgcatggtccagaaagcctaaaatagttactatccggcccactccagaaaacttgccaacacctgttctgtaacaatgtattttaatttttttcctttgtaatgttaaagggaaccttcctttcaattgtgcacagaatgccaatatatgaaagtgtagcaccttctccttagtcaccctgttttcagattaaaaatatctctcttaccataatatcttagggcgcctcacttaggacttcatgatcaggcctaaatatcctagcaagaagtagtgatggtacctcggccgctctagaactagtggatcccccgggctgcaggaattcgatatcaagcttatcgataccgtcgacctcgagggggggcccggtacccagcttttgttccctttagtgagggttaattgcgcgcttggcgtaatcatggtcatagctgtttcctgtgtgaaattgttat

SEQ ID NO: 38655 - DNA, 606 bp, Homo sapiens
tagggcgaattggagctccaccgcggtggcggccgaggtactgttttttaaaacagttttaacagaaaattaaactgtatgtttgaaatcataagtaaaagtttgttgcgtgcataagagtagcctcttgattctcatagtggtaattttgtgtcatatcatttagatgttggaccatttcatttgtgcatgtgtatatgtgcccaaattcatcctctttgtttagaatctgcttacaaataaaactaatagaatctgaatacatttatcatatattcttccagggtttttcttaactgactatagagagtggctgtaagttctggggcaaagcttgattgtattttcagtgatgtatagttacattgtttcatgttaaaatcatcgtgcatggaaagtgaaatgtgcgtatgattttaaattattgtaatatgtacctgcccgggcggccgctctagaactagtggatcccccgggctgcaggaattcgatatcaagcttatcgataccggcgacctcgagggggggcccggtacccagcttttgttccctttagtgagggttaattgcgcgcttggcgtaatcatggtcatagctgtttcctgt

SEQ ID NO: 38656 - DNA, 417 bp, Homo sapiens
gcgaattggagctccaccgcggtggcggccgaggactgctcctcgaaggccacattcatcttccgcaagcgccgaagccccgcctcacgcgctttgttttggtccaagaactcttcagtgaagatgggaacatcgaaggtggagaagccatcgcagtccccacccttggtcattcaggagagtgttcatgagcccagagctcgagtcttctttcttgatcttcttctcctggatcttctccgtgcacatcttataggcttcagactgctggtacaggggctcaggtccaggtggcaggggatatgctacccaactcaactgagcgggccatcactattgctggcattccacaatccatcattgagtgtgtcaaacagatctgcgtggtcatgttggagtcccccccgaagggcgtga

SEQ ID NO: 38657 - DNA, 410 bp, Homo sapiens
gcgaattggagctccaccgcggtggcctgacctcgtgatccgcccgctttggcctcccaaagtgctgggattacaggcgtgagccaccgcacccggcctattgacattttttaaggtttcagattttcttttgtgtgtctagtaattcgtcttttattgtcaaagataatttgctaatttgacttagaaaaatgatttgtgggcatacaatattgtatgtggtacctcggccgctctagaactagtggatcccccgggctgcaggaattcgatatcaagcttatcgataccgtcgacctcgagggggggcccggtacccagcttttgttccctttagtgagggttaattgcgcgcttggcgtaatcatggtcatagctgtttcctgtgtgaaattgttatccgctcacaa

SEQ ID NO: 38658 - DNA, 439 bp, Homo sapiens
  misc_feature 215, 226, 227, 244, 245, 260, 261, 290, 291, 358, 359, 402: n = A,T,C or G
gcgtaatacgactcactatagggcgaattggagctccaccgcggtggcggccgaggtacacttggaagagggccaagtgggcaacttgagaggttaaactgcatggtttgagttttgatttgaggttttacgtgttggcatgcattcaggggcttgtgtcccttctcccctgattcttccctccgggtaggagggaagaaaatccacctgagccnagtggcctgcnncagcacttgagaaggcnntccgcaagcaccaanngtgtgtttaatgggaagttgtgcaccatnngctcagttgagggcattcttcctcttaccagatcgagtggtttctagaaggaagggtcatagactannatggtctaatagtctatgaacctttagtcatacctagtgcacnatgcctgagcaccactcactctgtgaacccccaaaat

SEQ ID NO: 38659 - DNA, 439 bp, Homo sapiens
tacgactcactatagggcgaattggagctccaccgcggtggcggccgaggtaccaaataagcaacagggagaaaattaggtaagaagtaagatacgaacgagaaacctgatttattgctcatccttcccttgcctccctaatggcaagcaaaactctgaacatctgaaaaggatgtagttctggacaaatcctgactacccagaggaaactcactgtgagattgctgttgatttgaagggtgctttcactaaggttatattttaaagtagaataacacatgctgagtgtaaactggctttggattggtcagctgcagtagtacctgcccgggcggccgctctagaactagtggatcccccgggctgcaggaattcgatatcaagcttatcgataccgtcgacctcgagggggggccccggtacccagcttttgttccct

SEQ ID NO: 38660 - DNA, 310 bp, Homo sapiens
actactatagggcgaattggagctccaccgcggtggcggccggtatcggttgtaacattaccggatactgccatgcctcaagatctccctgttttctggctgtatcaacggtctcatgcagtgcactatcttgtccactagctggtacagtgagctgagatctcgccactgcactcaagcctgggctacagagcgagactccctctccaaaaacctcacaaaaaaaaaaaaaaaaagtacctcggccgctctagaactagtggatcccccgggctgcaggaattcgatatcaagcttatcgataccgtcg

SEQ ID NO: 38661 - DNA, 341 bp, Homo sapiens
cgtaatacgactactatagggcgaattggagctccaccgcggtggcggccgaggtactttttttttttttttttttttcttatttagtggagaacttttaccttttcacttaatgcacttctctttggtgtatctgtattgccagcaacactactcttgctcttcagggccattaagtaaaataagagttactcaggctgggtgcagtggctcatgcctgtaatcccagcactctgggaggccgaggcgggcggatcatgaggtcaggagttcaaggccagcctggcgaacatggtgaaaccccatctttactaaaaatacaaaaatcagccgggcatgga

SEQ ID NO: 38662 - DNA, 620 bp, Homo sapiens
gtatacgactcactatagggcgaattggagctccaccgcggtggcggccgaggtacagaaagactgtatgtgtgtgccttgcacacacacccatacctctcagaaaaagtgtttgggtattctataaaaacctcgaaagaaccaatgaataaatttcatcaagcttgtccagactctggaacaaaatttctggaataagaatttgtattaaagtccttttttgcactaacagttggctcttgtagcctgcaggctgaggaagtctcttctctgtgcatcagcagagttactgaaagcctctgattgagaaaaaacctccgtctgcctaaatcacttttctcgcagaaaccatgcgactcccacacgacacgggcagcttcacaagccatctctttcatttctgcttgaagcccccttggctgcagcaatcctgtctgccataggtttctttcttccttacctactcaagggctttttctaaggcatgcacacatatctcctgttctctgagagtacctcggccggtctagaactagtggatcccccgggctgcaggaattcgatatcaagcttatcgattccggtcaccttcagggggggcccgggacccaacttttgtt

SEQ ID NO: 38663 - DNA, 654 bp, Homo sapiens
cgactcactatagggcgaattggagctccaccgcggtggcggccgaggtacaccatcccttccattggactggctttgttggaagaaaagctcagatatagcaatgagaaataccaaaagtttaaggcagtggaagaaagcctgcgtaaagagctggtggatatgctaggtgatgatggtgtgtcttatatccctcacatcccacagtggcacctaagcatcatgtccctctaacacggcctttcaactttgcttacacaggtgtcttcagtgccctgggtttgcctgtgacccaatgcccactgggactgaatgccaaaggactccctttaggcatccaggttgtggctggaccctttaatgatcatctgaccctggctgtggcccagtacctgcccgggcggccgctctagaactagtggatcccccgggctgcaggaattcgatatcaagcttatcgataccgtcgacctcgagggggggcccggtacccagcttttgttccctttagtgagggttaattgcgcgcttggcgtaatcatggtcatagctgtttcctgtgtgaaattgttatccgctcacaattccacacaacatacgagccgggagcataaagtgtaaagcctggggtgcctaatgagtgagctaactcac

SEQ ID NO: 38664 - DNA, 387 bp, Homo sapiens
atacgactcactatagggcgaattggagctccaccgcggtggcggccgcccgggcaggtactggaacagggataagttcttggataaggtgccaacatacctataaaagctgatttttgagtaaattattgattctaacatatgtaatggatttggtgtgataattttctgatctttaactataagtgactttttattctccaccagaaaagataaatgactgagaatgtaagtctgcgctctgattaacacaatggagaaacggaaaaactatctctgttaaaaactgattcctgtcattcttctgatatcaaataagaggaaggaaaataaactttttgtgtgtagatagaaaaacatacctgaggccaggtgcagtggatcacg

SEQ ID NO: 38665 - DNA, 504 bp, Homo sapiens
tacgactcactatagggcgaattggagctccaccgcggtggcggccgaggtactaattcccaaaatgccacaactacatggtgttcggatctttggaattaataagtattgaaatgttttgaaactgaaaaaaaattttacagctactgaatttcttataaggaaggagtggttagtaaactgcactgtttctctgataatgtgaaatgagaagtatttacattggagggccaatggctggtccttcaagtgctgttttgaagtgcagatttccattaaatggtgcctctgtttaatacacctggtaccagatctctatgccagttaggcacattcttgtaagtaactctcgatgttacatcaaacattatgatggcacactgggcttggatataatagccatctctcagtccaccgaatttctcctggccggctgtgtcccatacattgaacttaataggtcctctgttggtgtggaacactaggggatgaacctccacaccc

SEQ ID NO: 38666 - DNA, 594 bp, Homo sapiens
cgcgtaatacgactcactatagggcgaattggagctccaccgcggtggcggccgcccgggcaggtactatattcgtaaggattttttattaaccattacagattttacaaacagctagttatatggtaaacagattattatgcctttttgcaattctgaatatgattctagtatttgtgtagatgtatttggtacatttggtaataagaaaacagtctccaaatgattaacattttcccctgattcacaatgaaacaacggcattctgacgaagatgatccatacaccgaggggagtttaaaagacaaataagtattcagcgaattgtaggacaaggttcataaatcttttaaaactttttaaatagtgagtttctgtaacatggacttacagctccagctaggaagcaactattgccccatcttttgttcctttatattgtcaccccaattataaataatttgtttcttttagtacaaggaaggggtaggctatgtgttttgtcagggggttgagaatgaatgtgaggcgtattataccataaccacctagttttaagagtacctcggccgctctagaactagtggatccccc

SEQ ID NO: 38667 - DNA, 224 bp, Homo sapiens
cctatacgactactatagggcgaattggagctccaccgcggtggcggcccggtacccagcttttgttccctttagtgagggttaattgcgcgcttggcgtaatcatggtcatagctgtttcctgtgtgaaattgttatccgctcacaattccacacaacatacgagccgggagcataaagtgtaaagcctggggtgcctaatgagtgagctaacttcacattaa

SEQ ID NO: 38668 - DNA, 441 bp, Homo sapiens
ctactatagggcgaattggagctccaccgcggtggcggccgggatcttcggcaagactcacgtctccaacaaccaagctccccaagctgggccgggctggcggaagaggcacgtgcgctgctgaatggagctggtcgctggttgctacgagcaggtcctctttgggttcgctgtacctcggccgctctagaactagtggatcccccgggctgcaggaattcgatatcaagcttatcgataccgtcgacctcgagggggggcccggtacccagcttttgttccctttagtgagggttaattgcgcgcttggcgtaatcatggtcatagctgtttcctgtgtgaaattgttatccgctcacaattccacacaacatacgagccgggagcataaagtgtaaagcctggggtgcctaatgagtgagctaactcacattaattgcg

SEQ ID NO: 38669 - DNA, 471 bp, Homo sapiens
actatagggcgaattggagctccaccgcggtggcggccgcccggcaggtacttttttttttttttttttttggtgaataggattacataataataaagaaatgacaaaagaagaggacaaccaggtatttaaaaatcaggaacaggtcaggcacagtggctcacacctgtatcctacatttgaaggccaaggcaggcagatcacttgagcccaggagttagagaccagcctgagaaacagggcaaaaccctgtctctactaaaaatacacacatgaaaaaattatccgggagtggtggtgcatgcctgtagtcccagctatctgggaggctgaaatggaaggatcacctgagcctggggaggtcgaggctgccatgagctgtgattgctccactgcacttcagcctgggcgacagacagagtgagaccctggctccaaaagaaaaaaaaagtctggaataagtgagggaag

SEQ ID NO: 38670 - DNA, 603 bp, Homo sapiens
  misc_feature 137, 138, 401: n = A,T,C or G
gcgaattggagctccaccgcggtggcggccgcccgggcaggtacaaaggtcaagccaattttatgaaacagtcctacagagtaatatatgtgatgcagtgtaagaaggaaaatactcatctctaacattatggtaanntaacatttagcctcttaggagttggagcagggggatggtatacagatttgcagactatagaaagagtttcatttttttgtgaccccacagagtctcaaatttttatttcactacctgctagagcctactgtgaaatcactgctccatatttgccagtggaggaaatgggcatagagtagagaatagcttcatatgtttacacgtttgcatagactacacacatgtcatgcgtttatggcaggtagctggtatttattccccanagtaataatgttgaagtatgggtctcatcattcccatacacagaaacacaaaacactttgatcataaacttttttcttcagaagccaaactaacttgcagaataatagagccactggtttaatgtttcctcaagataggttttagtgtaagctagtattctgtgtgttcgtagaaatgattcaatacctgcagctggtgaat

SEQ ID NO: 38671 - DNA, 421 bp, Homo sapiens
ctactatagggcgaattggagctccaccgcggtggcggccgcccgggcaggtacactttgccaggttttatccctttgttaaagcaaatagaacagagagggaatatagctgccagtaaaaatcgtttcccccctcttaatctcccatccttcatctccatgaaaccgactattaagataacctttctctctctgtgcactagtggaaaaagtaaagttctatagaaactcacagttaagagggactctgaatacagcaggttaaggcttttagtgcaaatagaatgaattcccactaaggtcaaaaggtttcaattgggtacctcggccgctctagaactagtggatcccccgggctgcaggaattcgatatcaagcttatcgataccgtcgacctcgagggggggcccggtacccagct

SEQ ID NO: 38672 - DNA, 626 bp, Homo sapiens
  misc_feature 603: n = A,T,C or G
agctccaccgcggtggcggccgaggtactcgatcataaagagtctaaagctcgagtgaaggagtatgcacgaaacaaaaacatccattactatttcatggccctgaagaatgatgagataatagatgccactcaaaaaggaaattgctctcgttcatgaatcacagctgtgaaccaaattgtgaaacccaaaaatggactgtgaacggacaactgagggttgggttttttaccaccaaactggttccttcaggctcagagttaacgtttgactatcagttccagagatatggaaaagaagcccagaaatgtttctgcggatcagccaattgccggggttacctgggaggagaaaacagagtcagcatcagagcagcaggagggaaaatgaagaaggaacgatctcgtaagaaggattcagtggatggagagctagaagctctgatggaaaatggtgagggtctctctgataaaaaccaggtgctcagcttatcctcgctaatggttagaattgaaactttggagcagaaacttacctgtctggaactcatacagaacacacactcacagtcctgcctgaagtcctttctggaacgtcatgggnctgtctttgtgtggatctggatg

SEQ ID NO: 38673 - DNA, 381 bp, Homo sapiens
atacgcctcactatagggcgaattggagctccaccgcggtggcggccgcccgggcaggtacagcagtctttggctgcctataatcagaggaaagccgatttggttaacagatcaattgctcagatgagagaagccaccactttggcaaatggggtgctagcttcccttaatcttcagcagcaattgagatgtgtctggagacactgtacgcgggggtgttgaatgtaactttgaagtagggaatggccttttaaatctgagagagaacatttgaatccttttcagggatttgtgtaggggtgtgtttgtgtgtgtgtgtgaatgtgtgtgtgtgtagataagtgtatatacataaatacactcttctagagtggtttatac

SEQ ID NO: 38674 - DNA, 178 bp, Homo sapiens
ctactatagggcgaattggagctccaccgcggtggcggccgaggtacttaaattgtagcaggacaagccgcagacaaaacccctcagccagcgagtttaagaaagaagggctttattcggccgctctagaactagtggatcccccgggctgcaggaattcgatatcaagcttatcgat

SEQ ID NO: 38675 - DNA, 592 bp, Homo sapiens
acgactcactatagggcgaattggagctccaccgcggtggcggccgaggtaccaaggcatcaccatgtctcctttaatagaaagataatgaagaaggaaaccttctccaaacaactttgttcacttcactccttttaaaaatggggtgattgccgggcgcggtggcccacgcctgtaatcccacactttgggaggctgaggacagcagatcacctgaggtcaggagttcaagaccagcctagccaacatggtgaaaccccatctctactaaaaatacaaaaattagccgggcgtggtggtgggcgcctgtaatcccagctacctgagaggctgaggtaggagaatcgcttgaacctgggaggtggagtgagccgagatcgtgccattgcactccagcccaggcaacgagagtgaaactctgtttcaaaataaataagtaaataaatgccattgcactccagcccaggcaacaagagcaaaaccctgtttctaaataaataaaataaaataaaaatgaggtgattgcaggctgaaggtcttggtcactactgagttctaattctctcaagacaaatattcatatggtcaaaac

SEQ ID NO: 38676 - DNA, 430 bp, Homo sapiens
acgactcactatagggcgaattggagctccaccgcggtggcggccgaggtacgtatgtttatcttactcttcctataaactaaaataacattacagtttccgaatttagcatgggacatagtcagtgtttgaagtgccaacttcatcaagtaatgcatgctttattataaataaaattctagctttgaaaggcgttatgtgttgaacagtatgcttcaggggtaaatttaaaatagtctcttgaagccctagtcatggaagtaacttttattttaattgacattctcttattaaatgccctatccatcattaaaaggattattatcagtgggcaaaacatgaaataatatgatcgaatggcaatcttgctagttgcgctacctaacagtacctgcccgggcggccgctctagaactagtggatcccccgg

SEQ ID NO: 38677 - DNA, 436 bp, Homo sapiens
ctactatagggcgaattggagctccaccgcggtggcggccgaggtacatatggtatagaaaccatggagttaggcacttcctggattttttttttatgagaaaaatactgtatttaaaatgtaaaataaacttttaaaaagcaggcactaatatatatttcttccagcctttgattacaaatttgtccttgcacatgttaagatgaattatctcctaaaaatatcattgttcttgggagcagtgtatgttactttacatagcagcggttcctgtcatgtgttcatgtcagaatatttttggttttaaactttcttattgcctttggctgttgattagtacctcggccgctctagaactagtggatcccccgggctgcaggaattcgatatcaagcttatcgataccgtcgacctctagggggggcccggtacccag

SEQ ID NO: 38678 - DNA, 699 bp, Homo sapiens
  misc_feature 267, 290, 300, 316, 317, 344, 600: n = A,T,C or G
atacgactcactatagggcgaattggagctccaccgcggtggcggccgaggtacctgaagatccagctagaagacattaagaattatcaggaagcccttcgatacatcggcaagctgccttttgagcaggcagagagcaacatgaagcgctacggcaagatcctcatgcaccacataccagagcagacaactcaggttgctgaaggggactttgtaccacaggtctggaccaggagagaactgggcaacctggcaccccttctgacnagaacccactggtgctgccacanccctccagtnagtgaggatacctgannaaccgtatcaaacagcagtgagggacngggcctcccctcacgatgtcttggagaccatctttgtccgaaaagtgggggcttttgtcaacaaacccattaaccaggtgaccctgacgagtttggatataccctttgccatgtttgctcccaagaatttggagctggaggataccgatccaatggtgaatcctgcagattccccagagactgaatctcctctccagggcagcctgcactcagatggctccagcgggggcagcagtggcaatacccatgatgactntgttatgatagactttaaaccagctttttctaaagatgacattcttccgatggacctggggaccttctatcgggaggttcagaacccacctcagctgag

SEQ ID NO: 38679 - DNA, 617 bp, Homo sapiens
atacgactactatagggcgaattggagctccaccgcggtggcggccgcccggcaggtaccttcagcaaatgtatgcagcccaacaacagcacttgatgctgcatactgcagctcttcagcagcagcatttaagcagctcccagcttcagagccttgctgctgttcaggcaagtttgtccagtggaagaccatctacatctcccacaggaagtgtcacacagcagtcaagtatgtcccaaacgtctatcaacctctccacttctcctacacctgcacagttaataagccgttcccaggcttccagttctaccagcggcagtattacccaacagactatgttactagggagtacctcggccgctctagaactagtggatcccccgggctgcaggaattcgatatcaagcttatcgataccgtcgacctcgagggggggcccggtacccagcttttgttccctttagtgagggttaattgcgcgcttggcgtaatcatggtcatagctgtttcctgtgtgaaattgttatccgctcacaattccacacaacatacgagccgggagcataaagtgtaaagcctggggtgcctaatgagtgagctaactcacattaattgcg

SEQ ID NO: 38680 - DNA, 415 bp, Homo sapiens
acgactactatagggcgaattggagctccaccgcggtggcggccgaaatacaatttaattaaaatacttattttcttattagaaagctgcctctcaatggcacctactgctacatttacatagtaacccaaaattgcagttgcttagcagggagagaatcacagtgctggatattatttatactttttcttccaaaacgatttgaggaagtacctcggccgctctagaactagtggatcccccgggctgcaggaattcgatatcaagcttatcgataccgtcgacctcgagggggggctccggtacccagcttttgttccctttagtgagggttaattgcgcgcttggcgtaatcatggtataggctgtttcctgtgtgaaattgttatccgctcacaattccacacaacatacg

SEQ ID NO: 38681 - DNA, 455 bp, Homo sapiens
tacactactatagggcgaattggagctccaccgcggtggcggccgcccgggcaggtaccatgtatagggtggctgtcaaagcagaaagatacataaaagtatccagtagcacatactatactgcattgctaggtaaggttcttttcctgacatcctatgcaactatcaaaaatcatatgtctgcaaactgaaaatattagcagaaagaattaaagatgttacagtttcagtattgaaagttttggtcccaaaaggtgctttcgtaaagttatttctctttcatgcattgattgttgcttagctaatcttcatcttggtccagatcagggtcaacatccgtggtgagtctttatgcctattgctgttttctttgcttctgcttttaatttggttgctcgtaaaataggtttagtttttttataatcctgtttaccttgcgttgtgtctttgatgct

SEQ ID NO: 38682 - DNA, 439 bp, Homo sapiens
actactcactatatggcgaattggagctccaccgcggtggcggccgaggtacaccaaggagtctagtgatctacatgactacatgaaaagcttgaattatacctgtgatccaatctccagctcactgaatcagtggcggggaagggaaaaagagaaaggagggaaaagaaagatttcattaatagtcccttttcaaactccaaaataatctgcatttaagtgcatgcaatcaggtacctgcccgggcggccgctctagaactagtggatcccccgggctgcaggaattcgatatcaagcttatcgataccgtcgacctcgagggggggcccggtacccagcttttgttccctttagtgagggttaattgcgcgcttggcgtaatcatggtcatagctgtttcctgtgtgaaattgttatccgctcacaattccacacaa

SEQ ID NO: 38683 - DNA, 366 bp, Homo sapiens
gactcactatagggcgaattggagctccaccgcggtggcggccgcccgggcaggtacagatcccattacttctgctttcgtatctcctcaggcaaaagtggagggtgccttatgggccctcctcataggttgtctctgcatacacgaacctaacccaaatttgctttggtggccagaaaaactgagctatgtttgaacaaagatgtcgtgcaaactgtacatacaaaatctgaaactgacactgtcagttctatactttgcacacgtgaagtgtcagaatattttcctcagtagtacctcggccgctctagaactagtggatcccccgggctgcaggaattcgatatcaagcttatcgataccgtc

SEQ ID NO: 38684 - DNA, 614 bp, Homo sapiens
tacgactcactatagggcgaattggagctccaccgcggtggcggccgaggtactcatctgttttaaacaaaagtcaaaccgaaactattcttatctgtcaggtttacagttatgtagaaactacaatatagatgacaaaagatgcatctaaccatgtaactgtaatttatctttgatttatccaagcagaacatcattgtctaacaataaaccattattctactgaaatcagagacaatgataaagcttgtctcttaaaaaacatcaacttttcaactttgatcagatggagcaccaaagggattatatctgtcaaagcatctttgcaattttttccacataactagcataatttagttacctgatataaaataggaaaatatactcaatttttatttaaaagaaagctgaaaatatgacatccctcaatcttatataatatacaatatgctaataaatgccatacatgttaacaatacgtgaaatgctgctgagagttccacaatcagctaattcatgtcaccaggctaagtaaatctgacaatttcacctcaatatgtcaccctttgtacctgcccgggcggccgctctagaactagtggatcccccgggct

SEQ ID NO: 38685 - DNA, 541 bp, Homo sapiens
  misc_feature 420: n = A,T,C or G
agctccaccgcggtggcggccgaggtacttgtggaaactaatccctaaatatgaataggtttatattgattcatgggtaacaggtccataataaattattggaaactaggatgtctgaatatcaaggaagacagccatagtctcttacagtgcccctgttgtctgctcaaactgaattgggtgggaaaaggtatggtccaatataaaagttccatttttgccattattggcaaatcttgcctttgtttattttggtgccagtgttttctgcttaatcatttgctttgttggcatctgtgtttatttacttgtacctgcccgggcggccgctctagaactagtggatcccccgggctgcaggaattcgatatcaagcttatcgataccgtcgacctcgagggggggcccggtacccagctnttgttccctttagtgagggttaattgcgcgcttggcgtaatcatggtcatagctgtttcctgtgtgaaattgttatccgctcacaattccacacaacatacgagccgggagcataaagtgt

SEQ ID NO: 38686 - DNA, 683 bp, Homo sapiens
  misc_feature 367, 441, 607: n = A,T,C or G
atacgactactatagggcgaattggagctccaccgcggtggcggccgaggtaccacaatagcagggggatgccgatggagggaagggtcatgaccccaaaggctgcccagtccagaaaatgaggggagaatcgcctgtcaaactcccgctgagccaggattcctccctgtccaggtgcactggtagagccatcacaacgggcccatcctcctgggccaggtaagtaattgttgccgaggtgaagttgaaataaccagccttgagagggcgcaggaccacagtgtgggagacattgctagcaggggcaatccggtcccatttgacattgagcattccagacacaatgccaaagtcttctggagggaanggaatcatcagatagttccacgtctaatgcagcacttgagccaacattgtagatgttgtacctgcccgggcggncgctctagaactagtggatcccccgggctgcaggaattcgatatcaagcttatcgataccgtcgacctcgagggggggcccggtacccagcttttgttccctttagtgaggggtaattgcgcgcttggcgtaatcatggtcatagctgtttcctgtgtgaaattgntatccgctcacaattccacacaacatacgagccgggagcataaagtgtaaaagcctgggtgcctaatgagtgagct

SEQ ID NO: 38687 - DNA, 602 bp, Homo sapiens
gactactatagggcgaattggagctccaccgcggtggcggccgaggtactcggcgagtaaccatcattgaacatgctgtgtgccaaatcaaaacataacttcagcatatgtcagatcttgctagagatggtgaacgtagtagaaattggaaattttccagcagtatttttctttaaataagcactgtcaaagctgcagctcttcttttaaatcacaggttatttcattacacctagtcagtccttgttttatttgggctgtgctctttcaagcaactgactagatttcccttcaacagaatgtttgtgactcacttgtcttccccataaaaattaaccggaagaagtgcatttaaactgaaacatactttgtgctttacatgcaaaagagcattctaaagaaaatcctcctagcttcaacctacctaaatgcacaggctttataaaaaggcattcttattaggcctctataaagaagccttcataatgaacagcaccctaaaaaaaaactaggagcatattcaaaataaagactgtggcaaataaactattagagaaaataagtcaaagtggcggccagtggcaataagtacctgcccgggc

SEQ ID NO: 38688 - DNA, 436 bp, Homo sapiens
tatagggcgaattggagctccaccgcggtggcggccgaggtacagtggtgcaaactcagccctctgcaacatccacctcccgggttcaagcgattcccctgcctcagtctcctaagtagctggggctataggtgggtgccaccacacccggctaatttttttgtattttgctagagacggcgtttcaccatgttggccaggatggtctcgatcccctgacatgatccccccgcctcggcctcccaaagtgctgagattacagtcatgagccaccatgcccagccccaaaagacattttttaaagcaagtccttatttctgtacctgcccgggcggccgctctagaactagtggatcccccgggctgcaggaattcgatatcaagcttatcgataccgtcgacctcgagggggggcccggtacccagcttttgttcc

SEQ ID NO: 38689 - DNA, 427 bp, Homo sapiens
actactatagggcgaattggagctccaccgcggtggcggccgaggtacagaatttatcatggattattgactgctgagaaagggacagtggaatttagccataccaaggactatactggaaacagacttctgctgctgaatgtgccctgatgtgaccaggttgcacttggaagagatcctcgcgtcttcatgaggcacttaaagcttataaaagaactgcggctggaactcatctggtgctccccatgagagtgctctgcttgtagactggccagtgtccatgaaacaactgtaaatacctcgagcggccgcccgggcaggtacctccctctgcaggatatcatgtgtatggaatgtctttcccggaagctaaaggaagcagtgaccctatatctgcgagttgtgagagttgtagatctctgtgcag

SEQ ID NO: 38690 - DNA, 398 bp, Homo sapiens
actactatagggcgaattggagctccaccgcggtggcggccgcccgggcaggtacaagcagactctgaagatgatcagacaaggcaaagcgaaattggtcattctcgctaacaactgcccagctttgaggaaatctgaaatagagtacttaatatggtgtcttgttcactatacttaaaaatgcaccactcataaatatttaattcagcaagccacaaccaagacttgattttatcaacaaaaacccctaaatataaacggcaaaaaagatagatataattattccagtttttttaaaacttaaaagatattccattgccgaattaagaagaagataagtgttatatggaaagaagggcattcaagcacactaaagaaacctgaggtaagcataatct

SEQ ID NO: 38691 - DNA, 435 bp, Homo sapiens
actactatagggcgaattggagctccaccgcggtggcggccgcccgggcaggtacttctttagacgggggaataagacagccaggtgggagggggtctctggaaaactccatctggcctgtgcactagggtggaacctcaggaagttgatgacatttgtagctgggagcagcctggcccctcctcttcctgtgtggaacctgaaattccactggcttggcaggaagcgctctagcagggactccggctttgcagagcatccctgtttccccgtttttcccttttcacccaataaaaccctgcttcactcacccttcaaaccatctgcaagcctaaatttttgtggctgtgggacggacaaagatgcctttagctgactgaggaaaagtcctgcaacacaggtatcactgcacatttataatattgtttctctgtt

SEQ ID NO: 38692 - DNA, 560 bp, Homo sapiens
agggcgaattggagctccaccgcggtggcggccgaggtactacatatgcagaatctgatacaatgttaatagactgattaaaatcttgttaacactgtaatgacggcaaccaactctgctctttgagtcaagtgatactgagttttgatgactcattcttttggcccggtgtaagccacttttccattgctggaaccatcagtaaacactgccagagcattttttaaaggcttatgtttggtaactttaggtaaaatccaagtagtcaattttaaaaactggaagatttttgttttggggtaacgattgtcaataattcccacaaaatcggcaagaccaatctgccatgcaccagaattgataaaggcttgtctaacctgttgcttgttgaaaggaacagtgattttatctgggtcatttccacacaatgttattattcataatcttccctgaccaattaatgtaaccatttgatccaagtacctgcccgggcggccgctctagaactagtggatcccccgggctgcaggaattcgatatcaagcttatcgaatccgtcg

SEQ ID NO: 38693 - DNA, 228 bp, Homo sapiens
gactcactatagggcgaattgggccctctagatgcatgctcgagcggccgccagtgtgatggatatctgcagaattcggcttgaggatcctgtgcgcgattgcaattgatcggtaccagacaactagggagcacccctataccttattcaaggtagccaatcctaaactgttcactccagccctgcattgtccttttcccaaagaaaactcaagttaacgtgcagtgg

SEQ ID NO: 38694 - DNA, 326 bp, Homo sapiens
  misc_feature 9, 29, 184: n = A,T,C or G
gcgaattgngccctctagatgcatgctcngagcgccgccagtgtgatggatatctgcagaattcgccctttcgagcggccgcccgggcaggtacaagttaaaatgcacgggcccaagggggatttttttttcacctccttgagaatttttttttttaagcttatagtaaggatacattcaagcnttggttaaataaaataataataaaacatgcatcatttttcatttgccaaccaagcacagagttattttatactgactgtatattttaaagtatactctcagatatggcctcttacagtatttaagatatagcaaggacatgg

SEQ ID NO: 38695 - DNA, 427 bp, Homo sapiens
actactatagggcgaattggagctccaccgcggtggcggccgagttacttggataaagaccactataccctgattgatcaatctccagtagcagccatcttgccaaaagaaggtaaatttgatgaagtctatgaagcactaactcacgctcatcctaatcttactgtttacaaaaaagaagacgttccagaaaggtggcattacaaatacaacagtcgaattcaaccaatcatagcagtggctgatgaagggtggcacattttacagaataagtcagatgactttctgttaggcaaccacggttacgataatgcgttagcagatatgcatccaatatttttagcccatggtcctgccttcagaaagaatttctcaaaagaagccatgaactccacagatttgtacctgcccgggcggccgctctaga

SEQ ID NO: 38696 - DNA, 528 bp, Homo sapiens
ctatagggcgaattggagctccaccgcggtggcggccgaggtacatgttttcattggtgtagattaccacaaatgcaaggcaacatgtgtagatctcttgtcttattcctttgtctataatactgtattgtgtagtccaagctctcggtagtccagccactgtgaaacatgctcctttagattaacctcgtggacgctcttgttgtattgtctgaactgtagtgccctgtattttgcttctgtctgtgaattctgttgcttctggggcatttccttgtgatgcggaggaccaccacacagatgacagcaatctgaattgttccaatcacagctgcgattaagacatactgaaatcgtaccgcgggagcttctccttgccagtttctcccagcaggaccctcttcttgttttgaaagatggtcggctgcttttggtaggcacgctcagtctgaatgtccgccatcttcccgggcgctctaaaactagtggatcccccgggctgcaggaatttcgatatcaagcttatcg

SEQ ID NO: 38697 - DNA, 467 bp, Homo sapiens
gtatacgactcactatagggcgaattggagctccaccgcggtggcggccgtgcagggtgaactccccttccttctcaatcaggcacttgttttgaacaaacttctgcagcacctgctccgcttgcttcttactcatcttcttgcctttaaggtgatcaaccaggttcaatatgtttgtggaacccccgtacctaggccgctctagaactagtggatcccccgggctgcaggaattcgatatcaagcttatcgataccggcgacctcgagggggggcccggtacccagcttttgctccctttagcgagggttaattgcgcgctgggccgaatcatggacatagctgcctcctgtgtgaaatagttatccgctcacaattccacacaacataccagccgggagcataaaagtgtaagcctgtggtgcctaatgagtgagctaactcacattcattgcgttgcgctcact

SEQ ID NO: 38698 - DNA, 536 bp, Homo sapiens
actatagggcgaattggagctccaccgcggtggcggccgcccggcaggtaccatagagtaggttgaactggccagacctagacaatgaagaaaacacatactgtttacttaggagacattttcttagtcgtgtgtatagtcctaaatttccccaaactatgtgttcatttggattggttatataataacagtcgaatgatgaagaataaaagatgctgaaagatgcaaaaaaaaaaaaaaaaaaaaagtacctcggccgctctagaactagtggatcccccgggctgcaggaattcgatatcaagcttatcgataccgtcgacctcgagggggggcccggtacccagcttttgttccctttagtgagggttaattgcgcgcttggcgtaatcatggtcatagctgtttcctgtgtgaaattgttatccgctcacaattccacacaacatacgagccgggagcataaagtgtaaagcctggggtgcctaatgagtgagctaactcacattaattgcgttgcgctcactgcccgcttt

SEQ ID NO: 38699 - DNA, 416 bp, Homo sapiens
tatagggcgaattggagctccaccgcggtggcggccgcccgggcaggtactttatgctttgtttgccctctacacattaatggtaaaacacttatttttagaagcaccatggcaaccatttataatgatagagggcaaggtataattaacataataacgctgatgtttgtagctagggaataaatgtcattttagttttaggccggtcagtttgctcttttagtcctgtaacttcgaagcatacatgacccctagcaatcaaagtgaattagaaaaaaaggtgagaaaataacaaatgttttaaagtttcttacacaacaggtatagatataaaaagaatttcttcaaataatttcctaggtgtcactcagaagcatccttgctgtctgtaaaataatgttctgcagtccttcaaa

SEQ ID NO: 38700 - DNA, 395 bp, Homo sapiens
tagggcgaattggagctccaccgcggtggcggccgcccgggcaggtaccccgacgcggtgaagatctgcaatatctgtcacagcctcctcatccagggtcaaagctgcgaaacctgtgggatcaggatgcacttaccctgcgtggccaagtactggagagctgttcacacagatgtttagacctttctctctctctcttttcttctttctcaacaactctttcacagaggcagtcattttgaaaggttgaaatatttggcctttaccaaagagcttttttttttccttaagcaaaatcctttcagaaagaaacaaatggggaagggcagattaagaatgcatatgtcccaatccacttctataggagtttaatcatattcacatgagtaaaatga

SEQ ID NO: 38701 - DNA, 431 bp, Homo sapiens; identical to SEQ ID NO: 34857

SEQ ID NO: 38702 - DNA, 438 bp, Homo sapiens
actactatagggcgaattggagctccaccgcggtggcggccgaggtacatgctgaaggcccatttcggcttctgctccagcttccccctcgaagttacactcaaggcgatgatgaattctctaaagtctattgtcccatctccatttgcatcgaaggtgcggaagacatgctctgcaaatttggaagcatccccataagggaaaaagttcccatatattttcttaaactcttccattgacaaatgtccactggggcagtctctcaagaagcctttataccattcctggacctcatgctctgtaaagtctgtgctttccagcaagtcctgcatgacctccgggcgcagcttgctgttctgtttccccatcctggcggcaagaattcagtttctgactgtcagcaacgagtggtcccaggagaccaaagttgagataatt

SEQ ID NO: 38703 - DNA, 446 bp, Homo sapiens
tacgactactatagggcgaattggagctccaccgcggtggcggccgaggtacagagtcttttgcttcctcccacccctagggggaaaaactgctttgtgctttgggaagttgtctctgaaacccggggacagaggacgcaggacagactaggagggagccgggaggatgtcgagcggccgcccgggcaggtacccccactgggcagggtgaggaccaaaaatctgaaactcttatgaatctgacatattatatggaaattatatcttgtgaccgtcttcaagtgcatggacttaaaattcatgagagactaaatgtgagggagaagtggatttaaagaggccagaccttaaccaaagatgctgagatacagcattctgtcccccctgccctagaaactccataaatgctgtcacaaccctatcattgctgatgctttctgcatgtc

SEQ ID NO: 38704 - DNA, 302 bp, Homo sapiens
atacgactactatagggcgaattggagctccaccgcggtggcggccgcccggcaggtacttttttttttttttttttttctgctacagcaggagaagcgtgcgtgctacaggcatctgtcaccaaggccagagcaacttcccagtgtggcaactgcacagacagcttcaaaatgacattttagaaagtataaaattcttcaagaagaaaagaagtcttcatataagaaaaggcaagagaagcctacaaaagtaatataaagcattactctttgcaccccataaaattccattccctgatccc

SEQ ID NO: 38705 - DNA, 230 bp, Homo sapiens
ctatagggcgaattggagctccaccgcggtggcggccgaggtactttttttttttttttttttttcttaaataatcccaagattcaaccagaggcccaacacagtactgccacggctcatgctgtaatgaagaacacatggtctttgccgcctgagaagggccaacacttccaccgttccctgcgcagcccctcccacaaattcagtggggagcttttcaccagtcagac

SEQ ID NO: 38706 - DNA, 431 bp, Homo sapiens
gcgaattggagctccaccgcggtggcggccgaggtactctgggggctgctacacggcctacttccctcctgggatcatgactcaatatggaagggtgattcgtcaacccgtgggcaggattttctttgcgggcacagagactgccacaaagtggagcggctacatggaaggggcagttgaggctggagaacgagcagctagggaggtcttaaatggtctcgggaaggtgaccgagaaagacatctgggtacttctgagagctacgtttgctaggtgacattaaatcagatgtatcctgggcgccttgatgctgattttctatttgagtagacctagtgacataattgatataaaattcagctgctttgttcaagtacctgcccgggcggccgctctagaactagtggatcccccgggctgcaggaattcga

SEQ ID NO: 38707 - DNA, 665 bp, Homo sapiens
tactatagggcgaattgggccctctagatgcatgctcgagcggccgccagtgtgatggatatctgcagaattcgccctttcgagcggccgcccgggcaggtacacctgcagactctgtgatgttttaattgaatccattgcatttgcccataagcatatcaaggaaaagaggcacaagaaaaacattaagggagaagcaagaaggaagagttgctcactacgttacccccaccaacaccctcccagataaatgcagttggcattgccattgacaaagtggtacctcggccgcgaccacgctaagggcgaattccagcacactggcggccgttactagtggatccgagctcggtaccaagcttggcgtaatcatggtcatagctgtttcctgtgtgaaattgttatccgctcacaattccacacaacatacgagccggaagcataaagtgtaaagcctggggtgcctaatgagtgagctaactcacattaattgcgttgcgctcactgcccgctttccagtcgggaaacctgtcgtgccagctgcattaatgaatcggccaacgcgcggggagaggcggtttgcgtattgggcgctcttccgcttactcgctcactgactcgctgcgctcggtcgttcggctgcggcgagcggtatcagctcactc

SEQ ID NO: 38708 - DNA, 432 bp, Homo sapiens
acactactatagggcgaattggagctccaccgcggtggcggccgaggtactttttttttttttttttggccagagtcttgctttgtcgccaggctggagtgcagtggcgcaatctcagcttactgcaacctctgcctcgcaggttcaagtgattctcctgcgtcagcctcccgagcagctgggactacaggcatgtgccaccacgcccagctaatttttgtatttttagtagagacaggatttcaccatattggccaggctggtcttgaagtcctgaccttgtgatccaccagcctcagcctcccaaagtgctgggattatgggcgtgagtcacgacgcccggccgctctagaactagtggatcccccgggctgcaggaattcgatatcaagcttatcgataccgtcgacctcgagggggggcccggtaccc

SEQ ID NO: 38709 - DNA, 621 bp, Homo sapiens
gactcactatagggcgaattggagctccaccgcggtggcggccgcccgggcaggtacgtaacaggacatcaataaatattagttgaatggaagattaaatcaacaaaatgggtgatggatctctgcagtaagtggaagagttcttcatggcccccaaggttatatccatctagaacttcagcacgtaatttcatctggaaatagtgcctttgcggatataagttaggtaaaactgaagatgagatcatactggattaggatgggatctaagtccaatgaaaatgtcttcataaaaaacaggaaagaacccatagaaacacaaggaagaaggtcatgtgaagatggaggcagagattggagggatgcagccaccggcccatgaatgccagcagccacccagaagctggaaggaaatgagggattctctcctagaacctttagagagaacatggtcctgtgaacagcttgattttggacttgcccatagcttgtatactcttactttgggatacaattttatccaaacttggctaaacaagttctcagcctatggaaaatttaaaatggagaagattcaactcgattcttacagattcaaagcaagaaaatgatgggaacata

SEQ ID NO: 38710 - DNA, 436 bp, Homo sapiens
gactactatagggcgaattggagctccaccgcggtggcggccgaggtacttaagcactgcagatgctccagtaatatgcccataagttcctttccaatttcaattaccgggaaaatatacatatggacaatagatggatgccacaataaaaggctggcagcctaaccctcacatgaatttttccctacctctatttagggtgacagtggagggcctctggtttgctttgagaaggacaaatacattttacaaggagtcacttcttggggtcttggctgtgcacgccccaataagcctggtgtctatgttcgtgtttcaaggtttgttacttggattgagggagtgatgagaaataattaattggacgggagacagagtgacgcactgactcacctagaggctggaacgtgggtagggatttagcatgctggaaata

SEQ ID NO: 38711 - DNA, 364 bp, Homo sapiens
accgcggtggcggccgcccggtcaggtacaaccagaaccaacaattgtatttatctatagttattttaaaatagtaatcaatgctatgtatttgatgtatatgtatctaaattagaaatttcttttggctttgtgtattttttatgtgcgttaaagtatgtataactgaactctgttcctaaaaatgcattaaactatgaatgcatgtgttctatccaatggccaaagatgctcataaagaaacagtgaatatattcagttcatatcatcttggatgtaagttgtcttgtgtaatcttcaaatgtttggaataattgaaaaaaactagtgttgactaacatttctatcattcacttatgcaaaa

SEQ ID NO: 38712 - DNA, 478 bp, Homo sapiens
gactcactatagggcgaattggagctccaccgcggtggcggccgaggtacaaatggtcatgtggatcatgtgatgatcatccatcttatttgattgtattaatgcatcatgctaaacatgtagtacgcggggtcttccggtctttctggtctcggccgctctagaactagtggatcccccgggctgcagggaattcgatatcaagccttatcgataccgtcgacctcgagggggggcccggtacccagcttttgttccctttagtgagggttaattgcgcgcttggcgtaatcatggtcatagctgtttcctgtgtgaaattgttatccgctcacaattccacacaacatacgagccgggagcataaagtgtaaagcctggggtgcctaatgagtgagctaactcacattaattgcgttgcgctcactgcccgctttccagtcgggaaacctgtcgtgccagctgcattaatgaatcg

SEQ ID NO: 38713 - DNA, 399 bp, Homo sapiens
atacgactactatagggcgaattggagctccaccgcggtggcggccgaggtacccaacacaaactttttttaaattagtaatacttttgtttaaagttttaagtttgcattttgacttttttgtaaggatgtatgttgtgtgtttaacctttattaactaacgttaaaagctgtgatgtgtgcgtagaatattacgtatgcatgttcatgtctaaagaatggctgttgatgatataataaaaatcagctttcatttttccaaaaaaaaaaaaaaaaaaaaaaagtacttacccaggggccttcagtgagacccagtgctgtgagggcttcaggggtgacccaacacattcctagctgtggtggccatggggagatactcctactgcttgaagaaaggag

SEQ ID NO: 38714 - DNA, 441 bp, Homo sapiens
actactatagggcgaattggagctccaccgcggtggcggccgaggtactagagcggtgggtaaatgaccctcagcgtatggacaagcgaacactagcactcctggtgctagcccactcctctgatgtgctagagaatgtcttctcctctctgacagatgacaagtatgatgtggcaatgaatcgagccaaggacttagtagaactggaccctgaagtggaagggacaaagcctagtgccacagaaatgatctgggctgtgctgacagccttcaataaatcttaaagccggcaggtggatttctccttttcccctgctggctggtgactgtcagagaccccatcactgagttttgtgtgatgagatgttttcatcatttttgtttccttttcttgaatcagacttgtgatttggggagagcaacttcagggcttctccatag

SEQ ID NO: 38715 - DNA, 445 bp, Homo sapiens
cactactatagggcgaattggagctcccccgcggtggcggccgcccggccaggtactaccggaatgagacgcagcacgagccgtatcccctcatgctacctggctgcagccccagctgtcctctggagaggtttgctgagctggttggccctgtgatccctcaagactggtccacggagtgtatgaccacaaacagccatcaaggtacctcggccgctctagaactagtggatcccccgggctgcaggaattcgatatcaagcttatcgataccgtcgacctcgagggggggcccggtacccagcttttgttccctttagtgagggttaattgcgcgcttggcgtaatcatggtcataagctgtttcctgtgtgaaattgttatccgctcacaattccacacaacatacgagccgggagcataaagtgtaaagcctggggtgcct

SEQ ID NO: 38716 - DNA, 425 bp, Homo sapiens
cactactatagggcgaattggagctccaccgcggtggcggccgaggtacaatagtgcactcttggctcactgtagcctcgacctccggggctcaagtgatcctcctgccttagccccacaagtagtgggactataggcacacagcaccatgcccatctaagtttttgtattttatgtagagacaaggtttcaccatgttgcccaggctgatcttgagctcctgagctcaagtgatctgcccaccttggactcccaaaatgctgggattataggcgtaaaccaccatgcctggccttaaatcaactttagagtcaacatctcttatcactggagcttctggagaaactccatcacgtggtgctctctttcctgatgtgttgtgcccaaatagcttgttctcatcagatgacttatttgctatgata

SEQ ID NO: 38717 - DNA, 213 bp, Homo sapiens
cactactatagggcgaattggagctccaccgcggtggcggccgcccggcaggtacagctctaaaaaatgttggcaccgaatgcacttaagaaaagtgttaaggcttaatacaaatacagagacgagtcatttctcaatgcagcttagagggtgagaacaggatgctaggtttttaaattcttccaaatacagagcatgtgccccaatgttacc

SEQ ID NO: 38718 - DNA, 424 bp, Homo sapiens
ctactatagggcgaattggagctccaccgcggtggcggccgaggtactttttttttttttttttttttttttttgctgtaatagcttgatttattatattctgtttatttaagcctgggcaactccttttcagatgaccgatttgaccacaattataacattttttcccaaatgttctaacttgtcctcctagagggagccccctcattgcttgagccattatcattgccttatgcatagctcctccaatcccatcacaagccttcacatattctgtaattacatcaactcctcctcccgcggttcaaatgcctgtaacattacaacctcaaacgcaggttaaacaagcacaaaccccaagagaaaatcaagttgaaagggacagagtctttatcccggcaatgccaactcagatacagtatcc

SEQ ID NO: 38719 - DNA, 297 bp, Homo sapiens
  misc_feature 200, 201: n = A,T,C or G
tacgactcactatagggcgaattggagctccaccgcggtggcggccgggaggctccatgcgcggcgcggaagacgctgttatttctccggaggaaagcagagaaacatgtccatatatacgggatcctttaaatggccaagcagtccctgcaaatgggacttacgagtttggttatcagatgcactttatttgtaatganngggttattacttaattggtgaagaaattctatattgtgaacttaaaggatcagtagcaatttggagcggtaagcccccaatatgtgaaaaggtttt

SEQ ID NO: 38720 - DNA, 667 bp, Homo sapiens
  misc_feature 413, 544: n = A,T,C or G
agcgcgcgtaatacgactcactatagggcgaattggagctccaccgcggtggcggccgaggtactgcataattatagtcaatgctcgcaataattttcagtttgtctcatcacgttagcagagcctattcatgcaatttagaaaggatttcaatacagcccaaaccaaaaggcttacagtcaacagagggttagccttccataaatgagaaatccaaaaaagaataatgccacgtatttcaggaatgtcggttagaggtttggccttcttgggaagtgtcacaatgctgagtctaaaactgcaacagttaccgtgtccaagtcatgcaactctaaaggaggatggacggccacatttgtgtccttcagtatcaaagcacctttaagggcttccattttgagaaagtagtattntctcttccttctcttttagaacatatgataaaatattgcccttctatcctttaaccatgtatccatttttttttgatggggagtaaggggtacctgcccgggcggccgctgctctagaactagtggatccnccgggctgcaggaattcgatatcaagcttatcgataccgtcgacctcgagggggggcccggtacccagcttttgttccctttagtgagggttaattgcgcgcttggcgtaatcatggtcatag

SEQ ID NO: 38721 - DNA, 675 bp, Homo sapiens
gcgaattggagctccaccgcggtggcggcgtttttcataggctccgcccccctgacgagcatcacaaaaatcgacgctcaagtcagaggtggcgaaacccgacaggactataaagataccaggcgtttccccctggaagctccctcgtgcgctctcctgttccgaccctgcgcttaccggatacctgtccgcctttctcccttcgggaagcgtggcgctttctcatagctcacgctgtaggtatctcagttcggtgtaggtcgttcgctccaagctgggctgtgtgcacgaaccccccgttcagcccgaccgctgcgccttatccggtaactatcgtcttgagtccaacccggtaagacacgacttatcgccactggcagcagccactggtaacaggattagcagagcgaggtatgtaggcggtgctacagagttcttgaagtggtggcctaactacggctacactagaagaacagtatttggtatctgcgctctgctgaagccagttaccttcggaaaaagagttggtagctcttgatccggcaaacaaaccaccgctggtagcggtggtttttttgtttgcaagcagcagattacgcgcagaaaaaaaggatctcaagaagatcctttgatcttttctacggggtctgacgctcagtggaacgaaaactcacg

SEQ ID NO: 38722 - DNA, 452 bp, Homo sapiens
actactatagggcgaattggagctccaccgcggtggcggccgaggtaccttgggcgagtttctagaagaccattttcctctgcctgataaaagtgttaaaaagaaaaagaaaaacattcaagaatcatctgtaaacctgataacactgcatgaaatgttagagattcttataaatagattatttgatgttccacatgatccatatgtcaaaattagtgattccttttggccaccttatgttgagctgctgctgcgtaatggaattgccttgagacatccagaagatccaacccgaataagattagaagctttccatcagtaaaaggatgttttcttttttcacacagtaaaaattcttatcattcaaggatattggaaccacaggactatttggataaaaaacattatttgcaaattaatgcgcatagtacctgcccgggcggccgctctag

SEQ ID NO: 38723 - DNA, 566 bp, Homo sapiens
gactcactatagggcgaattggagctccaccgcggtggcggccgaggtacccttttttctattttttatgctaaaaaataatcataataaatttttgagtctgcaaagtttatcatacagtatactctctcattggaattattattttcatcttctgtttgctgtttgtaattccttctggctgtgatttgaataatagactttgtattaataagagagatatggaaggcagaagtgaagaaagcattagtcaggttttatagccaccatatgtggagacagatggatgcataggagcttcagggacacctgcttccaccacattgtcctgatcctttgctctgccaattgagagtattcttagaaccaccactaactgcttgactgccatattttccttccttccttccttctttctttccctttccctttcttttctttctttactttctttttccgagatggagtcttgctctgtcgcccaggctggagtgcagtggtcctgcccggcggccgctctagaactagtggatcccccgggctgcaggaattcgatatcaagctta

SEQ ID NO: 38724 - DNA, 644 bp, Homo sapiens
gcgctaatacgactcactatagggcgaattggagctccaccgcggtggcggccgaggtacaacaaagatgtgccttatcctcccccgctatcccctgctatagaggcaatccagaaagaaagaaacatcacaagggaaagatttctggtattaaattataaagacaaatttgagcctggcattctacagctgagtcagtggtttaaagaaggaaagctaaagattaaagagacggtaataaatgggttggaaaacatgggagctgcattccagtccatgatgacaggaggtaacattggaaagcagatagtttgcatttcagaagaaatctctttgtaattgctgtaaatgtcatcaaggcaatcatagatttcttttccattttgcatattttcaaagatatgttaaaaaatccttagactatacatagctcttgatttaaatgtgatcataggtgttatttttagttgcatagggtatttgatacaatcattaatggatcatacacaataggtttttaaaaattaataacttttagtaattacttttattaatttaaaatagaacacttgagaggcactttgtaaagatttgttaaactggaaacgttttacatgatctgatacaacccttaatgaatcata

SEQ ID NO: 38725 - DNA, 442 bp, Homo sapiens
tatagggcgaattggagctccaccgcggtggcggccgaggtacttgcttttaccagtgagttttatacatttagatgttttcttgttgcatgttaggatccttttctttcagaatgaagagctccctctagcgtttcttataggatagatccgctgatgatcaaccttgtcagtttcatttgtctgggaaagtctttatctctttcatgtttcatggatagtttcttggatatagtattcatgactgaaagtttttttcctgccagttgtggtggctcacacctgcaatcccagcaccttggaaagccaaggcaggaggaaaacttcagttcaggagttcaagaccagcctgggcaacactgggagaccttgtctctataaaaattgaaaattaaccaggcttggtagctcatacccgcagtcccaaccactcgggaggctg

SEQ ID NO: 38726 - DNA, 410 bp, Homo sapiens
atacgactcactatagggcgaattggagctccaccgcggtggcggccgcccgggcaggtcctggcaggtaccaagaaaaataaagaagaggctgcagaatatgctaaacttttggccaagagaatgaaggaggctaaggagaagcgccaggaacaaattgcgaagagacgcagactttcctctctgcgagcttctacttctaagtctgaatccagtcagaaataagattttttgagtaacaaataaataagatcagactctcaaaaaaaaaaaaagtacctcggccgctctagaactagtggatcccccgggctgcaggaattcgatatcaagcttatcgataccgtcgacctcgagggggggcccggtacccagcttttgttccctttagtgagggttaattgcgcgct

SEQ ID NO: 38727 - DNA, 648 bp, Homo sapiens
atacgactcactatagggcgaattggagctccaccgcggtggcggccgaggtactgcataattatagtcaatgcttgcaataattttcagtttgtctcatcacgttagcagagcctattcatgcaatttagaaaggatttcaatacagcccaaaccaaaaggcttacagtcaacagagggttagccttccataaatgagaaatccaaaaaagaataatgccacgtatttcaggaatgtcggttagaggtttggccttcttgggaagtgtcacaatgctgagtctaaaactgcaacagttaccgtgtccaagtcatgcaactctaaaggaggatggacggtcacatttgtgtccttcagtatcaaagcacctttaagggcttccattttgagaaagtagtattttctcttccttctcttttagaacatatgatgaaatattgcccttctatcctttaaccatgtatccattttttttttgatggggagtaaggggtacctgcccgggcggccgctctagaactagtggatcccccgggctgcaggaattcgatatcaagcttatcgataccgtcgacctcgagggggggcccggtacccagcttttgttccctttagtgagggttaattgcgcgcttggcgtaatcatg

SEQ ID NO: 38728 - DNA, 525 bp, Homo sapiens
gagctccaccgcggtggcggccgcccgggcaggtaccagcattcataccaccagctttcagcttgtagaggtggccgccaaggggaactcgtagttggcagtgccaactacaactactacaccaaccagctggaaactatacaaagagtatgaacaaagttcacaggagaaacaaggctctgcaacatatgaaaatatattctacttcattcataatgagacgcatgaaaattgtaactgtatcaataccatttctcacctagtagatgggcaaaaatccaaatgtttgagcacacattctgtgggtgaggctgtggaaacgtaggttcacatacattgctcttggatatgcagattaggaccgctcctgtggagaggcagttagggaatatctttcaaaattaaaaaatgcagagttaagttttgatccaggagtctcactcctgaaaatatgtgctatagatatgcctacaagcatttgagatgaaaaagaagcattgctatttgtttctcttgtttttcatg

SEQ ID NO: 38729 - DNA, 644 bp, Homo sapiens
cgtatacgactcactatagggcgaattggagctccaccgcggtggcggccgcataattaataacatcgtccttccatttggccgcgactgctctggaaaattggttcagtagtaaacagaattctagcaggtggaacaagaacaggcgaggcatcctgggcctggtctctcctggaggtctgggtgttgcaccttcaggactgcggctgctgtggcctacacacctgggcctgtgtcccgcgtacctcggccgctctagaactagtggatcccccgggctgcaggaattcgatatcaagcttatcgataccgtcgacctcgagggggggcccggtacccagcttttgttccctttagtgagggttaattgcgcgcttggcgtaatcatggtcatagctgtttcctgtgtgaaattgttatccgctcacaattccacacaacatacgagccgggagcataaagtgtaaagcctggggtgcctaatgagtgagctaactcacattaattgcgttgcgctcactgcccgctttccagtcgggaaacctgtcgtgccagctgcattaatgaatcggccaacgcgcggtgagaggcggtttgcgtattgggcgctcttccgcttcctcgctcactgactcgctgcgctc

SEQ ID NO: 38730 - DNA, 472 bp, Homo sapiens
gcgcgtatacgactactatagggcgaattggagctccaccgcggtggcggccggcttcttcgctttcttcggtgttttcttagcgctcttcttcggagttgcgccgccagccgccttcttgggcttcttggctgccccaactggcttcttaggtttggttccgcccgcctttttaaccttgggcttgcttccccggaggctgccttcttgttgagtttaaaggagccagaagcaccggtgcctttcgtttgcaccagagtgcccttgctcaccaggctcttgagaccaagtttgatcccgcgtacctcggccgaggtacgcggtgaaaaaattagagtgttcaaagcatgcccgagccgcctggataccgcagctaggagtaatggaataggaccgcggttctattttgttggttttcggaactgacgccatgattaagagggacggccgctctagaactagtggatccccc

SEQ ID NO: 38731 - DNA, 360 bp, Homo sapiens
  misc_feature 69: n = A,T,C or G
ggcgaattggagctccaccgcggtggcggcccgagtacttcagagtgaggaagtgtttcagttcctcantgacagaacctgtcatgcataacaaacataattgttcctgtaataaaatcaacaccaagagagaactgcccaaatccataactcttccacttcatctcatacttcatcaaacacctttaaatatactacccactataacttatactaaatattaactttaaattttttattttttttttttaattcaaactctcactatccctcgaactaaatacaataacccaatcttacctcactacaacctccacctcccaaattcaagcaattcttctacctcagcctcccaaatat

SEQ ID NO: 38732 - DNA, 398 bp, Homo sapiens
actactatagggcgaattggagctccaccgcggtggcggccgcccgggcaggtacaaaaactgtcagtgataattcccataaatgtttcacaaaacagaattttagcatttatttaattataaaaatttcccatgattcttcaaaaagttctgtatcttttccattatttgctttacaaagtctagtagggtttccctgttgagaatgtttccatagtctccaaaaaaagaattttgtttcaaatcgtatagttcaaaacaaactcttctatagaagaggtgaatttccaagatcagcatatttcttacagagagctgccagcttctcctctggagtcgaaagagtgtttagggcttgcatcaataataaaacttcttttcctaagactttttctttg

SEQ ID NO: 38733 - DNA, 428 bp, Homo sapiens
tactatagggcgaattggagctccaccgcggtggcggccgaggtacgcggggggatttccgctgagtgacccttacaagtccttcttgatcctgaactgggttaggtgccgctgttgctgctcgtgttgaatctagaaccgtagccagacatgggactggaggacgagcaaaagatgcttaccgaatccggagatcctgaggaggaggaagaggaagaggaggaattagtgataggactgaggctttcagtgcatactggcaaccttggaaggcaggaatgtgaaacttttccctactacttagcatcagaattgaatgggagaccgcattctgccatttctggcggcagtgtggctctgccagctggccttctgcacggatcccctaacaacagtgagagagcaatgcgagcagttggagaaatgtg

SEQ ID NO: 38734 - DNA, 425 bp, Homo sapiens
acgactactatagggcgaattggagctccaccgcggtggcggccgcccgggcaggtacagaattcttctttgcactcacgctcaatgttgccctgtcttatttcttcaaaaaacccattagctcttgggtagcgttttaatatggaattggctttttctcccgtgaggaaaaccctccccatgttttcttgtggtttctggcacgtccctggatgatgattccagcgggtcccgctccgctactcgccgttctgccccgcgtacctgcattaaattttcattttagaagagaatcttggttttggtaattcattttttttttaagatcattatgtgcaaaacaccaagtttttaaaataactcacagaatggccttagttttcaatgtctgatggtatatttgtgagttgtgttatctgtaatat

SEQ ID NO: 38735 - DNA, 631 bp, Homo sapiens
  misc_feature 177, 197, 391, 427, 458: n = A,T,C or G
ctatagggcgaattgggccctctagatgcatgctcgagcggccgccagtgtgatggatatctgcagaattcgcccttagcgtggtcgcggccgaggtacagaatttattatgaaatagcttaatggcaagtggtaatttagaagaattaagttatcagataggagatatattaaaantatttaaaaattggatatanttcttggaagcccttttacaccaagtaatttctattaatttgattgtaatgaaagtataatataccttgttactattatcagattaatttttgaaagtagaattccttaatcaagccaaggttatgctgctttataagaaattaatcaggtagtttaacactagagctcattagccaacctgtatgtagcacanaataatcatctctgataaatacctataaatatattntattcatacttttaaatattttacaattcanataaaaaccttatatgtagacaatctgggctaaatttccatgtatgttttgaaaaataatgttagcatgaatagattcatatttaaatatgattttaaatactcttaatagaggagacataagaaatatttacataaaagctaagtagcataatacagctcatggttattttc

SEQ ID NO: 38736 - DNA, 431 bp, Homo sapiens
tacactactatagggcgaattggagctccaccgcggtggcggccgaggtacagtagtgcactcttggctcactgtagcctcgacctccggggctcaagtgatcctcctgccttagccccacaagtagtgggactataggcacacagcaccatgcccatctaagtttttgtattttatgtagagacaaggtttcaccatgttgcccaggctgatcttgagctcctgagctcaagtgatctgcccaccttggactcccaaaatgctgggattataggcgtaaaccaccatgcctggccttaaatcaactttagagtcaacatctcttatcactggagcttctggagaaactccatcacgtggtgctctctttcctgatgtgttgtgcccaaatagcttgttctcatcagatgacttatttgctatgatatata

SEQ ID NO: 38737 - DNA, 551 bp, Homo sapiens
atacgactcactatatggcgaatgggagctccaccgcggtggcggccgccgggcaggtaccacatatctctatacagcctttctacttcctttcccagacggcctctggcagtggagggaggccagtcgctggaggacataggaataactgtggacactgtacattgatgggctggagagcagggtggcagcctgttctgcacagaaccaagaattacagaaaaaagtccaggagctggagaggcacaacatctccttggtagctcagctccgccagctgcagacgctaattgctcaaacttccaacaaagctgcccagaccagcacttgtgttttgattcttcttttttccctggctctcatcatcctgcccagcttcagtccattccagagtcgaccagaagctgggtctgaggattaccagcctcacggagtgacttccagaaatatcctgacccacaaggacgtaacagaaaatctggagacccaagtggtagagtccagactgagggagccacctggagccaaggatgcaaatggctcaacaagga

SEQ ID NO: 38738 - DNA, 606 bp, Homo sapiens
  misc_feature 392: n = A,T,C or G
cgcgtaatacgactcactatagggcgaattggagctccaccgcggtggcggccgcccgggcaggtacaaggttctgaagcaggtccaccctgacaccggcatttcgtccaaggccatgggcatcatgaattcgtttgtaaacgacattttcgagcgcatcgcaggtggagtggctgaaacttctcagcaggcgcatctacactagtgacctgaggagagaaaccctaaccccacaatggctgcatcttctctgaagacgagactgatgctcatctttgaaatgaagggcagtgtgtgcatttctccatgaaggtatccagaaacagccatgccagagctgctgtggggtggctgaactgctattccttttctagggtgggatccccactctntgtaaggaaggatattggggtcctgacactgggaactcatcttgtcagtgaggccttctttaactgctgtcttgcaattgagccaccccatctgtgtttcctgttcccatttaagacttttttttttattataatataaagatctgaaatgctatgttttccttattcattgcttattaactttactatgccatcctccacactaaaagttttt

SEQ ID NO: 38739 - DNA, 455 bp, Homo sapiens
tacgactcactatagggcgaattggagctccaccgcggtggcggccgaggtactgtaattctttcattgaggggctatgtgatggagacagactaactcattttgttatttgcattaaaattattttgggtctctgttcaaatgagtttggagaatgcttgacttgttggtctgtgtaaatgtgtatatatatatacctgaatacaggaacatcggagacctattcactcccacacactctgctatagtttgcgtgcttttgtggacacccctcatgaacaggctggcgctctaggacgctctgtgttcactgattcgagcggccgcccgggcaggtacactctagcattgtaactttttccccctgagaagtaattttaagatctatcagtctcaatttaaatgatctgttaatcagccagagttttagtttcataatatcgttccattgcctg

SEQ ID NO: 38740 - DNA, 560 bp, Homo sapiens
  misc_feature 413, 473: n = A,T,C or G
gcgcgtaatacgactcactatagggcgaattggagctccaccgcggtggcggccgaggtactcttgtttgttattacacttctatgtagattatataatattgcttgtggacataatttgatcaataatatataatgtcagtcactacagtgatccagaatcttattctggctatggaggaagcttaattattaagcaacatcttcctaaaaagcttctgaatttctgattcataagaaaaacaaaacaaatgaaaagagtatctctaactgaaataacactgaagttcgagcttgggccccctcctttgtgttcaacataattaactcttcaagatgaaacatttagtcacattaataagttaaacttggtacctcggccgctctagaactagtggatcccccgggctgcangaattcgatatcaagcttatcgataccgtcgacctcgagggggggcccggtacccagctnttgttccctttagtgagggttaattgcgcgcttggcgtaatcatggtcatagctgtttcctgtgtgaaattgttatccgctcacaat

SEQ ID NO: 38741 - DNA, 618 bp, Homo sapiens
agctgcaccgcggtggcggccgaggtaccaaagcagcttcttgtgcttgtcgacaggtttcttcctaaatgatacaaagccacagcccaccaagggtataataaacagacacaggataatcttccagttcttggtgtctcgggaaatctctccataccatgcttacaaagaaaattctggaccccaggctgggcgatgaaatgctggtctgtggcctccaccgccagctccagacagttgcttccaccccaagcttcacaggaatagaccagcagctgttctgccaagtcttcatcgctgctgtaacactcagtgaacagctcaacagcccgggtctcgtacctgcccgggcggccgcccgggcaggtacccctccaagccgggcaacccgggcggtgacgcaccagcggaggacatggccagatactactcagcgctgcgacactacatcaacctcatcaccaggcaaagatatggaaaacgatctagcccagagacactgatttcagacctcttgatgagagaaagcacagaaaatgttcccagaactcggcttgaagaccctgcaatgtggtgatgggaaatgagacttgctctcttgccttttcctattttcag

SEQ ID NO: 38742 - DNA, 515 bp, Homo sapiens
cactatagggcgaattggagctccaccgcggtggcggccgaggtacttagggtaagcattaacaatattattcaaaatgttatatagagttcaactgtatacaatagagcatttattaaagtgtgtccaaagcgcttataaataaagcatcttcgaggcaggcggctcacttgagttaggaggaaagcagactggccaacatggtgaaaccccgtctctactgtggtcccagctacttaggaggctaaggtgggaggatcacttgaggacaagaagttgaggctgcagtgagccaagtgtttgtgcaattgctctccagcctgggtgacagagtgagactctcaggaagccgcagtgttagttgcctctgatttttgacaagcatgggaagatgggggctgttcatacagggcaagcttcaagtgtccagtcaaataaaaacatccttgcacgtgctttacggaactaccagcaggtcaaataatgacagttctctgggaatggggcattgaaag

SEQ ID NO: 38743 - DNA, 268 bp, Homo sapiens
  misc_feature 25, 112, 261: n = A,T,C or G
tacgactcactatagggcgaattgngccctctagatgcatgctcgagcggccgccagtgtgatggatatctgcagaattcgcccttagcgtggtcgcggccgaggtactttntttttttttttttttttttttcttttttttttttttttttttttttttttttttttttttttttttttttatttttttttttatttttttttttttattttttttatttttttattttttttttgtttttttttatatttttatataanttttttt

SEQ ID NO: 38744 - DNA, 415 bp, Homo sapiens
tacgactcactatagggcgaatgggagctccaccgcggtggcggccgaggtaccaataaaagtaaaatatgaaattcttgttgtttcctcttcaccttgattcgactgaacaaatatagttacactgttaacattctgaaacttaacataacgaagtggaacaatgccatcttctttaatatcatcctctgtcagttccagagcttgagttggttcacttctttcccgcgtaccgtgtgactgtgccgctgatgggggctgtgtccgacctgtgcgaggctctctccaggctgtctggcattgctgcagaaaatatggtggtcgcagatgtgtataatcaccgattccacaaaattttccaaatggatgaaggtttaaaccacatcatgcctcgggatgacattttcgtgtacct

SEQ ID NO: 38745 - DNA, 536 bp, Homo sapiens
gtatacgactactatagggcgaattggagctccccgcggtggcggccgaggtactttttttttttttttttttttttttttttttttaattttatatttttataactgtttaatccacatgctttacatacccttagtttaaaaaaaatcaaatcaaaaaaaaatcaaaacaaaaacagtgaaaccaagaccctattccaaaggctgggcccttaacagcctggcacatacaagaggctctgaaagtagaagatgccaatggggagaacacgaccaagatgtgaacagagccatgacattccattcaacaaattgtatgtaactgaaggatcctttctgggactagctcattggctttacccttgaagacgttccaaacaaaaaaaacaaaagtacctgccccggcggccgctctagaactagaggatccccaagtctgggggaatccgatatgaagcttatcgataccgaccacctcgagggggggcccggtaccgaggtgccggtccctttactgagggttaattgcgcgcggg

SEQ ID NO: 38746 - DNA, 674 bp, Homo sapiens
cgcgtatacgactcactatagggcgaattggagctccaccgcggtggcggccgcccgggcaggtacgcgggtggtaaagagaggaatgaattcctgaggaagcataatatcgaaacttacttaattaagcagcctgaggacagtctgctgtccttgcctgaagatatcgtcaaggagtcagtgagctcctcagaccggagaaacagtggggccacattcactgaaggatcctggagccctgaactgccctttgataatatcgtggggaaacagaatgtaagtcctctcttcctccttctgcttggccgtgaatgcatgctcgtgtgcatctccaatccagacacctcagagaaaactgattcatctttaaccttttctccaatgaacaccgctctagaactagtggatcccccgggctgcaggaattcgatatcaagcttatcgataccgtcgacctcgagggggggcccggtacccagcttttgttccctatagtgagggttaattgcgcgcttggcgtaatcatggtcatagctgtttcctgtgtgaaattgttatccgctcacaattccacacaacatacgagccgggagcataaagtgtaaagcctggggtgcctaatgagtgagctaactcacattaaatgcgttgcgctcactgcccgctttccagtc

SEQ ID NO: 38747 - DNA, 679 bp, Homo sapiens
tacgactcactatagggcgaattggagctccaccgcggtggcggccgcccgggcaggtacccaaacctaagagctattatccctaaatttcaaaatctaaaaaaaaaccttagaacctcagatgatataattaacataaaagcccaggtttttgtataaatgaaaagggataaaaattcatacaaaatcattagtaacattcataagcacccgaaataaattatttagatgtttgcaagtcagctgcaaggtgttcttcctcctcaaatatcctctaaggatgagcttatagacagattaacttaacaacgaaacctaacattccaccagtaagaatcttgtttgtgtgtgaagctgctttttactaagttggaggtaagagcccaaagtagagttttacttaagaaaattggggcaaacattgattttagttctacagctataaaatgatgccattcaaaaagtgaacagtgggccgggcacagtggctcacgcctgtaatcccagcacactttgggaggccaaggcaggcgtatcacctgtggtcaggagttcaagaccagcctggccaaatgacgaaaccccgtctctactaaaaatgcaaaaattaggcaggtgcggtgacgggcgcctgtaatccaagctactcaggaggctgagacagggagaactgcttgaa

SEQ ID NO: 38748 - DNA, 633 bp, Homo sapiens
gctccaccgcggtggcggccgcccgggcaggtacatggagaataggcatatagccactaggctacatgaacacgtcacgtttgtattttgtgttggcctatgtataagccaatctagcatgtttgagggcatgtgtgagagtaggtaagggagctgtaagtacattcaggtgggaatttagggctttctgcacaaaaaattctaatttctctgtccttttgctatgttgcatctcccagtgttgacaggttagtctgcatgattaataactgagcagctgtagagccatgccagtaagtctccaattcctgaacgtggccacatttgtcttttgatgtgactttcaaccacaagccacaaagtaagtctttcactaggctccgttgacttcagtctttatataagggtttcaaggtattttgcagtcaagaatcaatggcacctcgcaactgtcttatgaagtaggtaaaacagctccatcttaaatacgggacaaaagttcgaggacttgaccaaggtcacacagggagggtcccaccaaggcagggagagagaaaggggatgctgtcagctaattctcatggtccactcttaaccaaaacatcatttaaaaaatggggctggctcggcacg

SEQ ID NO: 38749 - DNA, 436 bp, Homo sapiens
agggcgaattggagctccaccgcggtggcggccgaggtactctatttcagatttcctcaaagctgggcagttgttagcgagaatgaccaatttcgctttgccttgtctgatcatcttcagagtctgcttgtacccttggtaatgatcctacagatctccctcctcaccactctgtcatacttggatatatgtgccatctttctacatcgtgcctccatcatttctggagtctcagtctgttccactcgtgctactttatagcccttctgcaccagggaatctgaataacggccaaatgcaatttcaggaaagccagaatgggcccagttgcctttcatgaataccagccccagttcactgactccaataagagcatccatgtggtacctgcccgggcggccgctctagaactagtggatcccccgggctgcaggaa

SEQ ID NO: 38750 - DNA, 420 bp, Homo sapiens
ctactatagggcgaattggagctccaccgcggtggcggccgaggtacattttcactcctgctctaaaacttgcctcagtctctcactgtgccttatgcccctcagctgaattctttcttctgagcaggcaggaattgaggttgctgcagacgtgtatgcatttgccaccagtaacatactttggtgccacatgactaggatatgttctctagtgctaacatgttcgtttacagttcttaggactccctgatagaaaaaaacacaaaaaaaaacacaaaaaaacccaaccaaccaaacaaacaaacaaaaaaaaacacaggagtttctcccaaaaagaagtctgcagtgtcttttctgttttctctgaaggtatcccagggtgttagatttctgttgtttttcccttatgtggcaccgaag

SEQ ID NO: 38751 - DNA, 519 bp, Homo sapiens
gtaatacgactcactatagggcgaattggagctccaccgcggtggcggccgcccgggcaggtactttttttttttttttgtatttttctgatctctggaatcaggatgtgccttacaatgcatggcatctttttatttaatgaaatatgggatagctattctgtcaaaacccagattgagctgtagcaggttttcactgatcaaaatttcaggtggctttatcagactagaaatgagaactttttttggctgttaaatacagaagccatttctgtctctggatgtaaacatcccggctgcgtggaggaaagataacctgaaaactgctgcagttttttcccgtttgttttttggtaacgggagactagctaaaataggaatgttgttataatgctcttcctttccaaatgtcccgcgtacctcggccgctctagaactagtggatcccccgggctgcaggaattcgatatcaagcttatcgataccgtcgacctcgagggggggcccggtacccagctt

SEQ ID NO: 38752 - DNA, 446 bp, Homo sapiens
gcgaatggagctccaccgggggcggccgggtcacttaccctcgagtttcacctaggagaagagcaagaggtgatggggtgggaaaggcaaatctgtttagatgaatacacagaagagaccacacaggaatccttctcctgcagcctctcacagggtctctgagctgcaggaaagagggctcctttccaaccctcacccagaacaggaaactcttgcatagttctttaagagaaagagatggtaaggaagggatgggccaatcccagggccaaaatccaccacgaagaagtgggaaacgatgcaaagcagggccacagaaggatacatccttcccagatttgggaagcagcaagtacctgcccgggcggccgctctagaactagtggatcccccgggctgcaggaattcgatatcaagcttatcgataccgtcgacctcgagggggg

SEQ ID NO: 38753 - DNA, 415 bp, Homo sapiens
gactactatagggcgaattggagctccaccgcggtggcggccgaggtacctaggttctccctcccttcaccacatgctggaaactctctcaaagcaacaagctggggaagcaatagagactcacctcatttgttactagttaattaattaaaagtcactgtcctttattccctgacggccgctctacaactagtggatcccccgggctgcaagaattcgatatcaagcttatcgataccgtcgacctcgagggggggcccggtgcccagcttttgttccctttagtgaggggtaattgcgcgcttggcgtaatcatggtcatagctgttttctgtgcgaagttgatgttcgctcacagactcacacaacatactagccgggagcataaagagttaagcctggggtgcctaatgag

SEQ ID NO: 38754 - DNA, 376 bp, Homo sapiens
cgcgcgtaatacgactcactatagggcgaattggagctccaccgcggtggcggccgaggtacgcgggtggccagggggaaggaaaggtgagtgggaaggagcagaaagctgggaaaggggatgggtagaacaagactgagaaatccacatgcttcagaattcagagggttcagggaatggtttcggatagtagggctctccctgctcccttctctacaggaatctctggaaaactatcagaagacaaagtttgacaccttgatacccactctctgtgaatacctacccccttctggccacggtgccatacctgtttcttcctgtgactgtagagacagttctagacctttgtgatagaactaaaatgctctctgta

SEQ ID NO: 38755 - DNA, 672 bp, Homo sapiens
  misc_feature 561: n = A,T,C or G
tacgactcactatagggcgaattgggccctctagatgcatgctcgagcggccgccagtgtgatggatatctgcagaattcgcccttagcgtggtcgcggccgaggtacctcattagtaattgttttgttgtttcatttttttctaatgtctcccctctaccagctcacctgagataacagaatgaaaatggaaggacagccagatttctcctttgctctctgctcattctctctgaagtctaggttacccattttggggacccattataggcaataaacacagttcccaaagcatttggacagtttcttgttgtgttttagaatggttttcctttttcttagccttttcctgcaaaaggctcactcagtcccttgcttgctcagtggactgggctccccagggcctaggctgccttcttttccatgtcccacccatgagccctccactggacagctcagtaagcctggcccttcattctgcgctgtgttcttcctctgtgaaaatccaatacctcttacctcctctgcatgcaaagattctcaaggattgtcagacttcanacgtaacagcagaaccaccagaaggtcctataaatgcagtagtgaccttctcaagctggcaggtctttaaataggatttgggatttaatgctatgtatttttaaaggaaag

SEQ ID NO: 38756 - DNA, 596 bp, Homo sapiens
ctatacggcgaattggagttccaccgcggtggcggccgaggtacagttatggctatcctagcactgacctctaaaacaattggaatcacgcttaagtaatttggaggatgtgaagaaattggaaccctgtgcactgttggtgggaatgtaaaatggtgcagccactttggaaaacactgtagagattcctcaaaaaatgagagctaacgtgatccagcagttccacttccagaaagaattaaaagcgggatctcagagttttgtacctgcccgggcggccgctctagaactagtggatcccccgggctgcaggaattcgatatcaagcttatcgataccgtcgacctcgagggggggcccggtacccagcttttgttccctttagtgagggttaattgcgcgcttggcgtaatcatggtcatagctgtttcctgtgtgaaattgttatccgctcacaattccacacaacatacgagccgggagcataaagtgtaaagcctggggtgcctaatgagtgagctaactcacattaattgcgttgcgctcactgcccgctttccagtcgggaaacctgtcgtgccagctgcattaatgaa

SEQ ID NO: 38757 - DNA, 340 bp, Homo sapiens
tatacgactcactatagggcgaattggagctccaccgcggtggcggccgaggtacattttaatgttgcttcagtgattgtataatgtaaaattgtttctttttaataagaaactttgctattatttcttcaattgttgatcagaattttttaaagcagaatttgtcaaaagggtcatttttttgtctaccccttttacacttttcagattctcaaagtgtctcatctcaacttttaaaagaataaagaatatcttgctgggcatggtgattctcctgcttccacctccccacagtgctgggattacaggcatgagccaccacgcctggctctctgttctt

SEQ ID NO: 38758 - DNA, 598 bp, Homo sapiens
tacgactcactatagggcgaattggagctccaccgcggtggcggccgaggtacatctacctaaaggactattatgtggaataatacatactaatgaagtattacatgatttaaagactacaataaaaccaaacatgcttataacattaagaaaaacaataaagatacatgattgaaaccaagttgaaaaatagcatatgccttggaggaaatgtgctcaaattactaatgatttagtgttgtccctactttctctctcttttttctttctttttttttattatggttagctgtcacatacaactttttttttttttgagatggggtctcgctctgtcaccaggctggagtgcagtggcgcgatctcggctcactgcaacctccacatcccatgttgaagtaattcttctgcctcagcctcccgagtagctgggactagaggaacgtgccaccatgactggctaattttctgtattttttagtagagacagagtttcaccatgttggccaggatggtctcgatctcctgaccttgtgatccacccgccttagcctcccaaagtgttgggactacaggtgtgaaccactgtgcccggcct

SEQ ID NO: 38759 - DNA, 647 bp, Homo sapiens
cgtatacgactcactatagggcgaattggagctccaccgcggtggcggccgaggtactcttaaaactaggcggctatggtataatacgcctcacactcattctcaaccccctgacaaaacacatagcctaccccttccttgtaccaatgccaatcagaggaaggcagtttggttcaggctttggagttagaaacacctgaagttgaatctgggctctgttgcttccttctttcatgggctagagcacgactctttacctctctcttggcctcaatttcctcacctgtaaaatagatgaggaagctgctcacttattattgtctcgttctgaaagcttggaaagctacatcgaagatgagctcttcattcagctttgatttgacccgtacctgcccgggcggccgctctagaactagtggatcccccgggctgcaggaattcgatatcaagcttatcgataccgtcgacctcgagggggggcccggtacccagcttttgttccctttagtgagggttaattgcgcgcttggcgtaatcatggtcatagctgtttcctgtgtgaaattgttatccgctcacaagtccacacaacatacgagccgggagcataaagtgtaaagcctggggtgcctaatgagtgagctaac

SEQ ID NO: 38760 - DNA, 422 bp, Homo sapiens
gactactatagggcgaattggagctccaccgcggtggcggccgaggtacgcggggggaagaagaggaagaagaagaagcagaaggaatggagagcctggagaaagaggatgaaatgacggatgaagcagttggagactctgctgagaagcctccttctacttttgcctcacctgagactgctccagaagtggagaccagcagaactccaccagcctgtgaaaccacgaacccttcaatcaagaaaagacctttgatcaggaaaagacttctcgtctcatttctggggacacattcaggatttctccaaagcagtgagtaacattgaacccctcttgcttgctattctgttctatcttctcattagaaattggaagaaaacaccaggcacctgtcagccatttaaatgtgacaagcggccgct

SEQ ID NO: 38761 - DNA, 449 bp, Homo sapiens
tactatagggcgaattggagctccaccgcggtggcggccgaggtacagaggcctggaagatgagggagctgggtttaagccccatcaaccggcatcaactagccatgctaccttgggcaaaataaccgtagctaacacttagtgaccacttactgttgtgcgttctcatgttatcctgacagtaacacttatagggtaggtctgtcagaattttctgtccacaagcaacagaagcttacactgagaatttattggagggctttgagacagctcatgtaatggaaagctcttaagaactaggtttagaaggtgcagagaccagggcaacttcagggatccaggtagcaggaaggaatcggtagcctctttggtatggccactatggtggtagacactgtctaccttgtttgctgagtcttctggctttcttccactcttcctgctcttgg

SEQ ID NO: 38762 - DNA, 180 bp, Homo sapiens
gagctccaccgcggtggcggccgaggtacgcggtgtccgcggagcggacccagcaatgacggatgatatcacctcttcttctctggtgagagtctgaggatggagacttttttctcaccatgaatgtcaccccagaggtcaagagtcgtgggatgaagtttgctgaggacagctgctaaa

SEQ ID NO: 38763 - DNA, 426 bp, Homo sapiens
gtaatacactactatagggcgaattggagctccaccgcggtggcggccgcccgggcaggtactcggaatatcaggaattgttatactacaaagctatagctattaactagataggatagtgggacatattctgccataaaccactgatgttcaacattgtcatttataagactttactgtctcacatacacacgcgaacccttaacgtgtcgcccacttgcttggacattaggaaacgtagactttgtaacaataaaactttggtcctagaaagacacggttgtcctgggagtttgtagtgttaagttgcagcaacaactaccaaaagcaacaaaaccagcttaggataacacttttagacgcttgtacttaaagatgtctcactatgattaaaaccctcttcattaatgcagtgaaagcccacac

SEQ ID NO: 38764 - DNA, 418 bp, Homo sapiens
ctcactatagggcgaattggagctccaccgcggtggcggccgaggtacgagtcttagcagtagcctgggtagccacctgctgggcagaaaagcctgagcgggtagtaggggtccaagttggggttgctccttgggtggggttggagtggcgggaaatctgggccaacatctgtcctgcagaagctgatggctggacaatggttacaggaggggctaggccactattcctgaaattctctgccggccgctctagaactagtggatcccccgggctgcaggaattcgatatcaagcttatcgataccgtcgacctcgagggggggcccggtacccagcttttgttccctttagtgagggttaattgcgcgcttggcgtaatcatggtcatagctgtttcctgtgtgaaattgttatccgc

SEQ ID NO: 38765 - DNA, 446 bp, Homo sapiens
ctatagggcgaattggagctccaccgcggtggcggccgcacaaaaaccaatctacctgatgaaaactccgttcccttctcgccagaaacataaaatgcgatggagctacggccaccgctgccgagacaaaatggcgccccccgcgtacctcggccgctctagaactagtggatcccccgggctgcaggaattcgatatcaagcttatcgataccgtcgacctcgagggggggcccggtacccagcttttgttccctttagtgagggttaattgcgcgcttggcgtaatcatggtcatagctgtttcctgtgtgaaattgttatccgctcacaattccacacaacatacgagccgggagcataaagtgtaaagcctggggtgcctaatgagtgagctaactcacattaattgcgttgcgctcactgcccgctttccagtcgggaaac

SEQ ID NO: 38766 - DNA, 497 bp, Homo sapiens
  misc_feature 13, 317: n = A,T,C or G
cgactcactatanggcgaattggagctccaccgcggtggcggccgcccgggcaggtacccacaaagaagtgaagtctcatcttaaagaaattcaaagtgcatttgtttcagttctatcagaaaatgatgaacttagccaagatgttgcatcaaagggccttgggttggtttatgaactaggcaatgaacaagatcaacaggaattggtttctacacttgtggaaacacttatgactggcaaaagagttaaacatgaagtttctggagagacagtggtatttcaagggggagctcttggcaaaacaccaaatggtcanggcctttctacttacaaggaactttgttctctggcaagtgatcttaaccagccaaatctggtgtataaatttatgaatttaaccaaccatcatgcaatgtggaactctaagaaaggtgctgcttttggttttaatgtaatagctaccaaaactggaaagcaactggctccttttctacct

SEQ ID NO: 38767 - DNA, 644 bp, Homo sapiens
gactactatagggcgaattggagctccaccgcggtggcggccgaggtacacaatgtcctcagcagcatgtgtcttggagttactgtctccccattttagcttcaggctctgaggaccagcagcagcacattctagcctaggaggcaagggtggtaatggccgagtttttgctttaatgaactgactaaatggtccagctccaatttcatttatagcctgaattctgatccggtaggtggtttctggaaggagatctttcataacatgcatggtggtgttgcccacggtaatgctagtgtctcctagatcaatggtgtaagcaaggatttcagatccgttattgcacggctcttcccagttcagtacctgcccgggcggccgctctagaactagtggatcccccgggctgcaggaattcgatatcaagcttatcgataccgtcgacctcgagggggggcccggtacccagcttttgttccctttagtgagggttaattgcgcgcttggcgtaatcatggtcatagctgtttcctgtgtgaaattgttatccgctcacaattccacacaacatacgagccgggagcataaagtgtaaagcctggggtgcctaatgagtgagctaactcacattaattgcgttgcgc

SEQ ID NO: 38768 - DNA, 576 bp, Homo sapiens
gtaatacgactcactatagggcgaattggagctccaccgcggtggcggccgcccgggcaggtaccagaacaatggaaaaagtgaattaaggtaatgaacaaaacctttcacccacttaaacattttccagttttgagattcctcttcgtgtttgtggtgtcttccccttgttaccccttctgccctttttctctgactatggtaatttggtctttaggctcatatcagtctccccgagacattctgcagtcattatcacctttttgggtggattttattttgttttattttgtttttttttttaaaaaaataactttttaacattggtgcatatttgcttgggatagagcttgtgtaatttaccaatcgtattgattgtaagtgattgtgccctgcagaggtatatttaacaagacaaaaataatcttggttaataaaggagcccatgagatttgagtcaggttgtaagtgaaatcacttacacttttggatagaatttatactcctgctcttataaatcagtggtagacttaccattttttaaaagttttcttgcaattttttgtttttttattg

SEQ ID NO: 38769 - DNA, 610 bp, Homo sapiens
cgcgtaatacgactcactatagggcgaattggagctccaccgcggtggcggccgcccgggcaggtaccacccctgcagactccctgagatgccaaaaactgtgaatctgcttgctttctcaactgggaggctcatggtctggggctccccagtgaggattgtcaggcctctgagcccaagctaagccatcatatcccctgtgacctgcacgtatacatccagatggcctgaagcaactgaagatccacagaagaagtgaaaatagccagttcctgccttaactaatgacattccaccattgtaatttgttcctgccccaccctaactgatcaattgactttgtgacaatacaccctccctacccttgcgataatgtaatttgtgatattccctcacccttgtgaaggtacctcggccgctctagaactagtggatcccccgggctgcaggaattcgatatcaagcttatcgataccgtcgacctcgagggggggcccggtacccagcttttgttccctttagtgagggttaattgcgcgcttggcgtaatcatggtcatagctgtttcctgtgtgaaattgttatccgctcacaattccacacaacatac

SEQ ID NO: 38770 - DNA, 746 bp, Homo sapiens
agctgcagctccaccgcggtggcggccgcccgggcaggtacaaaccattccttccctatgtctcaatgcctgacattcagtgcctgacagaatcagcatttggcatgtccttggatatggcatcaatttgatgctttgaactgaaagttctcataatgcatctcaaagtatcttcttaaaaaatataaaaatgtaggccaacttgtgctctcttgtaaggcttgcaaagtggtaattaaataagcagactataactcacaagggaaaaaaagtgcatttttaaataaaagaaaaaaacggagacagttaaaaggacaaccaaaaagataagcagattatttttggttaatcttggggaaaatatgacacgatatttatggtttcttttcttttctggtccattttattttacttaatgtacctcggccgctctagaactagtggatcccccgggctgcaggaattcgatatcaagcttatcgataccgtcgacctcgagggggggcccggtacccagcttttgttccctttagtgagggttaattgcgcgcttggcgtaatcatggtcatagctgtttcctgtgtgaaattgttatccgctcacaattccacacaacatacgagccgggagcataaagtgtaaagcctggggtgcctaatgagtgagctaactcacattaattgcgttgcgctcacttgcccgctttcagtcgggaaacctgtcgtgccaactgcattaatgaatc

SEQ ID NO: 38771 - DNA, 419 bp, Homo sapiens
gcgaattggagctccaccgcggtggcggccgcccgggcaggtactccagccagggcaagagagcgagaccctgtctcaataaataaataaataaataaataaataaataaataaaaacaaagttgattaagaaaggaagtataggccaggcacagtggctcacacctgtaatccttgcattttggaaggctgaggcaggaggatcactttaggcctggtgtgttcaagaccagcctggtcaacatagtgagacactgtctctaccaaaaaaaggaaggaagggacacatatcaaactgaaacaaaattagaaatgtaattatgttctaagtgcctccaagttcaaaacttattggaatgttgagagtgtggttacgaaataccttaggaggacaaaaggaatgtggtaagtctttaatg

SEQ ID NO: 38772 - DNA, 451 bp, Homo sapiens
cgactactatagggcgaattggagctccaccgcggtggcgacacatttatcacaaaaattatgcttttaggacttcacatcatgtatttctgatcaggcatgatcctaacagcaattgtttaataaaaattttaaaaaccaaaaaccaaaaatgttttgaaagaaataagtaattagtatcccttccctaccctaaaactaatgaagtccattatggctttgatatcccttgtaaagaattaagtgaaagagtattgccacactttaagtatttctattttttccgttgcttttgattttgtgtctttgcagtacctcggccgctctagaactagtggatcccccgggctgcaggaattcgatatcaagcttatcgataccgtcgacctcgagggggggcccggtacccagcttttgttccctttagtgagggttaattgcgcgcttggcg

SEQ ID NO: 38773 - DNA, 429 bp, Homo sapiens
ctatagggcgaattggagctccaccgcggtggcggccgaggtactgatagtctgtctcgtttacgaagcccatctgttttggaagttagagaaaagggctatgaacgattaaaagaagaactcgcaaaagctcagagggaactgaagttaaaagatgaagaatgtgagaggctttcaaaagtgcgagatcaacttggacaggaattggaagaactcacagctagtctatttgaggaagctcataaaatggtgagagaagcaaatatcaagcaggcaacagcagaacaacagctaaaaagaagcacaaggaaaaattgatgtacctgcccgggcggccgctctagaactagtggatcccccgggctgcaggaattcgatatcaagcttatcgataccgtcgacctcgagggggggcccggtacccagctt

SEQ ID NO: 38774 - DNA, 392 bp, Homo sapiens
gactcactatagggcgaattggagctccaccgcggtggcggccgaggtacaattagtaaaatgatataccaaaaaaatttttttctcaatataacacaggatatttatctgaactcctacctcatgcatcagtcaatattataaattaaccagaaagagcctctccacttacattttcatcttgcatcttacattttaatgtccttaactctttcactaaaaaaggtcgtaaataatgcacacctaataacaaagaatctctcatctttgatgcagcaacaattagtcacacgctttcacatgtgaatacaataggaatgaagagcataacttgagttaaatgacattattcacttttcataaaacctaatttttttcaaaggatagtttga

SEQ ID NO: 38775 - DNA, 451 bp, Homo sapiens
ctatagggcgaattggagctccaccgcggtggcggccgaggtacttgcaaccattggtgcatagtccatcgtcacagttatctgggcaactggcacaaggtgctccttgttcataagggacatatagtctattagcccaattaccagcaggacaatattggcaaacatagtagtattttagaactttttgattgggacagtaggcatttccacatccaacgaggtatgaagagtactggatactatttccttctccatttcaagttgtttactcaattctgtggctctgagctctaaatctgtgttcagctgtctttgctgttgtagatcttgcaaagcctgctccttgcttgctttaacttcaagactatcagcttctagtttcttaatttgaccttctagctcttcggttttctgttctaaagagaggtatttctctttatattcttta

SEQ ID NO: 38776 - DNA, 397 bp, Homo sapiens
agggcgaattggagctccaccgcggtggcggccgaggtactcaacaacaggatacgtcccatggtgatgaaaataaaatgaatcttgtgttcaccgttgtattcctcacgacttaagttaaaaacctgatgaaaagtggttaatctccataatgggtgttaactccatcgttttccaacgttatagataacctaatgtgacctcaccccatttagttccagaggcagcagacccccacatactttttttttttttttttgctctttataaattctttattgccaataataaaccctaaaatgactcacaaaattaccctatttctttcaattaactacaaagacaaacacatctcaaattttaaataagtaaccagtataatttaccaaaattctaa

SEQ ID NO: 38777 - DNA, 491 bp, Homo sapiens
cgcgtatacgactactatagggcgaattggatctccaccgcggtggcggccgcccgggcaggtacctaacaaacccacaggtcctaaactaccaaacctgcattaaaaatttcggttggggcgacctcggagcagaacccaacctccgagcagtacgcgggatcgcttcctggtcctcgcctcctccgctgtctccctggagttcttgcaagtcggccaggatgtctcaggctgagtttgagaaagctgcagaggaggttaggcaccttaagaccaagccatcggatgaggagatgctgttcatctatggccactacaaacaagcaactgtgggcgacataaatacagaacggcccgggatgttggacttcacgggcaaggccaagtgggatgcctggaatgagctgaaagggacttccaaggaagatgccatgaaagcttacatcaacaaagtagaagagctaaagaaaaaatacgggatatgagagact

SEQ ID NO: 38778 - DNA, 217 bp, Homo sapiens
tacactactatagggcgaattggagctccaccgcggtggcggccgaggtacttacgttgcctcgtgtcaccaaaattggtgtggctgccgtggtgcggggggctgcactgatggcaccccttcctgtcttcatcaagcagctgcccttctgccgctccaatatcctttcccattcctactgcctacccccagatgtcattgaaagttggcctgtgat

SEQ ID NO: 38779 - DNA, 455 bp, Homo sapiens
tacgactcactatagggcgaattggagctccaccgcggtggcggccgcgctgccacctcagtgctgttgcaaatattctggtgaatgaacacagaatcagcatggctttcctttgctgagaaatcactgatgggaagtgagacttgttaaacttgaaagtgaatggacctgagtggaccctttgatcacatcagtaaacatgagcggtacctcggccgctctagaactagtggatcccccgggctgcaggaattcgatatcaagcttatcgataccgtcgacctcgagggggggcccggtacccagcttttgttccctttagtgagggttaattgcgcgcttggcgtaatcatggtcatagctgtttcctgtgtgaaattgttatccgctcacaattccacacaacatacgagccgggagcataaagtgtaaagcctggggtgcctaatgagtga

SEQ ID NO: 38780 - DNA, 358 bp, Homo sapiens
gactcactatagggcgaattggagctccaccgcggtggcggccgcccgggcaggtacaactaaggggaatgagaaggaggacgctgcaggaacaagtgggcttggggaattgaatagcagagagcaaaccaatcagtccctcaggaaagggaagaaaaagaagaggtggcaccatgaagaggagaagatgggggtcttggaggaaggaggaaaaggcaaggaggctgcaggcagtgtcaggacagaggaggtagagagcagggcatatgctgacccatgcagccgaagaaagaagaggcagcaacaggaggaggaggacttgaacctataagatagaggtgaggaaactgttttaggt

SEQ ID NO: 38781 - DNA, 462 bp, Homo sapiens
gtaatacactactatagggcgaattggagctccaccgcggtggcggccgaggtactgcatgaagagacttcattaaaactaagaaaacatttatttggggagaaattttaggcatttaagaacttgtatttttctattttaaaaagttaaattattccgtaatttggaagaagtttcgttgaatgtaggacataaccgtttgaagggttttcatttgaaaaattgatgtattttgtgccttaatattttgttcttttaataaaaatgctctgaatttgaaaaaaaaaaaaaaaaaaaaaaaaggtccaccaaggtggtgcattaccggaagtggatcaaggacaccatcgtggccaacccctgagcacccctatcaaccccctattgtagtaaacttggaaccttggaaatgaccaggccaagactcaagcctccccagttctactgacctttgtccttagg

SEQ ID NO: 38782 - DNA, 403 bp, Homo sapiens
gcgtatacgactcactatagggcgaattggagctccaccgcggtggcggccgaggtactccggtccgcgccccaaactcttggaggacccgtcgaccacaccggatgtgctgtttgcgcatgcgcaccctcgtgacctccccgcgtacagaaagctttaatgtctccccatgacctttatggcaaaaaccaaattccctcgaccagtctttggattactacacaatacattgtcaaagaaaatagcctggaatggtgaacagagcctgaggctcagttgggagtcctgacttctcatcagctgtgcatgagcaaatttggaggtgttccttaacttgtaaaatcgatttggatttttggtattttaagcatgatttcctttagttctttttttttttccagag

SEQ ID NO: 38783 - DNA, 586 bp, Homo sapiens
atacgactcactatagggcgaattggagctccaccgcggtggcggccgaggtacccccattcacccacaaaatgcagcccaccacccagtcccccaattccagagagaaacacatcactagattgacgagggcttttagagactgctcctataattgaggaatcagcagcataggctttatctccctactcctcccccaccctaccgcgttcaatttgtgtatctcagatatttgatttcttgagcatgtattggtcagaaagaaaaagaaagaaaaccattctctatttttccatgggtatgatctggcttaaaacaatatggaatattttcctgacagacttgaaaactaggatcttcctcagatgtctgtaaataactctggtatccaactgggtgtattctagtgtggaacaaaaaacagtgaacacaagtgcttacttgtggatactatcttaccaacggatcacaaagttctttttttggtgtacctgcccgcggccgctctaaaactagtggatcccccgggctgcaggaattcgatatcaagcttatcgataccgtccacctcgagggggggcccggt

SEQ ID NO: 38784 - DNA, 484 bp, Homo sapiens
acgactcactatagtggcgaattggagctccaccgcggtggcggccgcccgggcaggtactcataagcatcatttttgaaagaataattgttgcataggatgcaaaagccatgaatacttcatcatccattacctgggtgaggtcaaccattttttcaattttggtctggaatgggaggccgaggaggaggaagcagcaagcctgtcccgccgccgggtcgcgcgcaatgcccccgcgtacctcggccgctctagaactagtggatcccccgggctgcaggaattcgatatcaagcttatcgataccgtcgacctcgagggggggcccggtacccagcttttgttccctttagtgagggttaattgcgcgcttggcgtaatcatggtcatagctgtttcctgtgtgaaattgttatccgctcacaattccacacaacatacgagccgggagcataaagtgtaaagcctggggtgcctaatgagt

SEQ ID NO: 38785 - DNA, 219 bp, Homo sapiens
  misc_feature 155: n = A,T,C or G
agctccaccgcggtggcggccgcccgggcaggtacttttaaagttattaaaactgctcttttgaccataagtcacatagaattgtgattaggaaatcaatttacttattactctgtgcagggcacttgctagggtggtgagtgtaaaggaactanaatggaatctctcacttctaaactggacactggagttctcaaataaaaataataaaaaaaaaaa

SEQ ID NO: 38786 - DNA, 339 bp, Homo sapiens
gggcgaattggagctccaccgcggtggcggccgaggtacaagataataggccgggcgcggtagctcacacctgtaatcccagcactttggaggccaaggcgggcggatcacgaggtcaggagatcgagaccatcctggctaacacggtgaaactccgtctctactaaaaatacaaaaagaaatcagccgggcatggtggcgggcacctgtagtcccagctactcgggaggctgaggcaggagaatggcgtgaacccgggaggcagagcttgcagtgagccgagatcgtgccactgcactccagcctgggtgacagagcaagactctgtctttaaaaaaa

SEQ ID NO: 38787 - DNA, 677 bp, Homo sapiens
agctccaccgcggtggcggccggattgcctgaagtcagaagttcgagaccagcctgaccaacatggtgaaaccctgtccctacttaaaatacacaagagctgggcatggaggtggtgcgcgcctgtaatcctagctactcgggaggctgaggcctaagaatctcttgaacccaggaggcagaggttgtagtgagccgggatcacgccactgcactctagcctgggcgacagagagagagactgtctaaaaaaggaaaagaaaaaaatttatacgccaaaaaagatattctgagataacctgtagttaccactaactttgtgacaaaattataaaaatccacagccatctatgaatctgtaggcagacctgaagtttgaacgactggtgaagacatctgattttctttatagccaagttaggataacaaaatgcaaacaagtcattaatatttactatatgcaagatacagaaagatgaaggaaggagtaagaagttatccttcgtggaactattcaaagcaaaaatgcaaaataccagggaaagctttgaagaaccaagatttgagcaggttcttagaatatagattggattggatttgatttcaagaaagatgaacgtgtaaagcagaagtgggaagccaaaaacttttttccaaattagaattaagcattctttc

SEQ ID NO: 38788 - DNA, 464 bp, Homo sapiens
actactatagggcgaattggagctccaccgcggtggcggccgaggtacaattagcttcagagttgatattaatagaaattattccaaaattattcttgtcacaagtaactactatatcccacataaaaagggaaaaaatcccacccaatcacagaaaaggcatcctctgtatgtttccgcgtacccctgcccatggggctcaccatggtcagcacgcacagtgaaggaacctccagcagaagactcccaagcatactgttcatcatcgttatgctttgtgatcacaaccactttctctgccaccaagtaggcagaataaaagccaacaccaaactgcccaatcatggagatgtctgcaccagcctgaagagcctccatgaatgctttagtacctgcccgggcggccgctctagaactagtggatcccccgggctgcaggaattcgatatcaagcttatcgatac

SEQ ID NO: 38789 - DNA, 438 bp, Homo sapiens
ctactatagggcgaattggagctccaccgcggtggcggccgaggtactataatggtccccatcttaatttgaaagcgtttgagaatcttttaggacaagcactgacgaaggcactcgaagactccagcttcctgaaaagaagtggcatggacagtggctacggtgacatctggtgtcctgaacgtggagaatttcttgctcctccaaggcaccataagagagaagattcctttgaaagcttggactctttgggctcgaggtcattgacaagctgctcctctgatatcacgttgagaggggggcgtgaaggttttgaaagtgacacagattcggaatttacattcaagatgcaggattataataaagatgatatgttcgtatcgaaggatttcgggctgttgagccaaagactgcgttacccttcaatcgttttttacc

SEQ ID NO: 38790 - DNA, 415 bp, Homo sapiens
cgcgcgtaatacgactcactatagggcgaattggagctccaccgcggtggcggccgaggtacaggtggcataagccaggcagacatcagggaaagggcattccaagcagagggagaaagtgcacaggccctgagaggagatgagcctgaagtaagccagtgtcactagggccaacaaggcagcgagaaatgggagccggggcaaagcccctaaagggtgctgagcagagaagtggcataacctaaggtgcattccaaaagagctgccatggcgggaatcatctgtaaggagtaagatcagaagcagggagaccagttggaggcaactgcattaatccaggggacagggggtggtggctgggaccagggtgagagcacatgaagtggtgagaaatgatcctggatctgccttgaag

SEQ ID NO: 38791 - DNA, 334 bp, Homo sapiens
cgactactatagggcgaattggagctccaccgcggtggcggccgcccgggcaggtacgcggggataagagagctttgaagctttgctcgaaatgaacttggctctcaatttcctccttgagagttcaataaaataaaaactacaagtatgattatgattattataaaaaccagcaaacatttatcaaatacttactatgtgtcatgcttttccaagcattttacaggcatcatttcattgttgtctttcgacaacacttttcatgtcatctctactttatagatgaggaaactgaggtcctgagaagttaaataacttgtccaaacttgcccca

SEQ ID NO: 38792 - DNA, 535 bp, Homo sapiens
gagctccaccgcggtggcgctcattcttctctctatgcacacaagggcaaacttccttgataacatgcttttgcgaagtgcaggaaaattaaatgtgggcaccaagaaagaggatggtgagagtacctgcccgggcggccgctctagaactagtggatcccccggctgaggaattcgatatcaagcttatcgataccgtcgacctcgagggggggcccggtacccagcttttgttccctttagtgagggttaattgcgcgcttggcgtaatcatggtcatagctgtttcctgtgtgaaattgttatccgctcacaattccacacaacatacgagccgggagcataaagtgtaaagcctggggtgcctaatgagtgagctaactcacattaattgcgttgcgctcactgcccgctttccagtcgggaaacctgtcgtgccagctgcattaatgaatcggccaacgcgcggggagaggcggtttgcgtattgggcgctcttccgcttcctcgctcactgactcgctgcgctcggtcg

SEQ ID NO: 38793 - DNA, 425 bp, Homo sapiens
tacactactatagggcgaattggagctccaccgcggtggcggccgaggtacttttttttttttttttttttttggagacgggctcactctgtcagccacgccggagtgcagtgacatgatcttgactcatggcaggcttgacctcctgggctcaaggaccacctcccaagtagctgagaccacagggtttgccccatcacacctggccgatttttatttttttgtaaagatggggttgtccaggctggtctcaaactcctgagctcaagcaatgtgcccgccttggcttcccaaagtgctgggattataggcgtaaaccactgcacgcagcctaccctctgcctttttaagatgatgtatttatttaatttttgccatcattggtgctttaccttcctgcgaaggaaattccagagcctgtattt

SEQ ID NO: 38794 - DNA, 381 bp, Homo sapiens
ttggagctccccgcggtggcggccgaggtactccaccaccagcttatccatccatgtcaggggctcggggaacagcacagagccctcaaagaagcccaagtggcccccatgcagaggcagcacaaacatgacgttctctcgtttctctgaaagagattttggaatggttagaagactttcatgcaccaacggatcgtcagctgcattaaccagcatgagaggaacataaatcctgtgcaggtacgcgggtctgcatagattatttagtataatggtaagttaaaaaatgttaaaggaagattttattaagaatctgaatgtttattcattatattgttacaatttaacattaacatttatttgtggtatttgtgatttggt

SEQ ID NO: 38795 - DNA, 383 bp, Homo sapiens
gtaatacgactactatagggcgaattggagctccaccgcggtggcggccgaggtactaagacttttcagaaataactaaatctaactctaaaccacattatattattattggattatatttcattctcttaacagattggttcagaatcacctgcagggcttattaaaacacagattgctgggtctcacctccagaatttctgattcagtagggcctgagaatttacatttctaacaggttttccagtaatgctgacactgttggtccagacaccacacattgaaatccactactctaagatatggctaaattttggagaagcactacataaacatgtaactggtcccacccctgggaatcttttatatgaagctaaaacact

SEQ ID NO: 38796 - DNA, 311 bp, Homo sapiens
gcgtatacgactactatagggcgaattggagctccaccgcggtggcggccgaggtaccagtttttcaaagcctcacacattaatgaaggagcacagggaaagaccttctaaagactccatagaacataaaagtgccttcaaagaaccttccatggatcacaacaaatctttcaaagaatcctgtagaaaccaagaaataaaccactgaaagaagagaaaatagttcctaagatggccttcaaggaacctaaacccatgtcaaaagagccataaccagatcgtaacttactcaccatcaccagtggacaaga

SEQ ID NO: 38797 - DNA, 619 bp, Homo sapiens
cgtaatacgactactatagggcgaattggagctccaccgcggtggcggccgcccgggcaggtactttttgctctaggaacataattttcactttcaatccagggttttagtgaacttagtcatatgagaatacaactttcaaaattttcaccctaattaaattcagtaaatttaaatcacaaagtttatatataaaaatccaaagttgttgttatagattttgtttctttttaaccatttgtatgaaaaatatttttgtaaaataaaaagcagatccagaagaaaaacatttgaaatcaaatgtgtatcaaacatgcctacaatttctcagctagtatatgttaaatctaagtagatgccaaatctaagtagataatctgactcctctctacatagccctactcggtgtgtaatgcgtatttaataaatgctgtttgaacaattgcaggaggccttgcaactgtccctgaccaactgatgtttacaggttaatgtgagcttcaaacttttgcagttactatagagatcttcgtacctcggccgctctagaactagtggatcccccgggctgcaggaattcgatatcaagcttatcgataccgtcgacctcgaggggggg

SEQ ID NO: 38798 - DNA, 425 bp, Homo sapiens
atacgactcactatagggcgaattggagctccaccgcggtggcggccgcccgggcaggtacttttttttttttttttttttttttaattaaaaacagaaaaatgtgttagaaaacacagcacagagaaactgtggcttcagctcaacctgaccatgtcacagagtccatcactgtcagtcttgcattcatccctgtggtcaggctaattatcaagacagtcaacttctccctctgatgtttccttattccagaccagggtgtgaaagcggtggctgtcaagagtccctgaagatgtcccatcaatggaacgcatacagcagcaacaggatggtacctcggccgctctagaactagtggatcccccgggctgcaggaattcgatatcaagcttatcgataccgtcgacctcgagggggggcccggt

SEQ ID NO: 38799 - DNA, 416 bp, Homo sapiens
cgactactatagggcgaattggagctccaccgcggtggcagcggccgcccgggcaggtactagtccagactggttggtggaaaaacaatcttcccctaaaaaggtgcatagcccacctttttcgacagttaggaggtctaagccacggtggttctgcagagttactgctgctaaggagtctatttgggattggagagtaagggtggattttgctatgtcttgtaggctgtctgagagatcctttgagagtgtatgatagtaggacagggaaggggacaaacctgctattccagttcctgtggcattggtaactcctagtcctataagcaagggtattatctgcacagccctatgctgatggacttgggctctgacagggactggtaaggtttggtttccaggggcaatgtcaattt

SEQ ID NO: 38800 - DNA, 640 bp, Homo sapiens
acgactcactatagggcgaattggagctccaccgcggtggcggccggggcttacagtggcgggagttggaggcgataacgatttgtgttgtgagaggcgcaagctgcgatttctgctgaacttggaggcatttctacgacttttctctcagctgaggcttttcctccgaccctgatgctctcaattcggtgctccgccagccccagcttggcgtcctgagaaatggatggtcttcacaataccctcttcaatcccttctgactggttatcagtgcagtggtaatgatgaacacacttcttatggagaaacaggagtcccagttcctccttttggatgtacctcggccgctctagaactagtggatcccccgggctgcaggaattcgatatcaagcttatcgataccgtcgacctcgagggggggcccggtacccagcttttgttccctttagtgagggttaattgcgcgcttggcgtaatcatggtcatagctgtttcctgtgtgaaattgttatccgctcacaattccacacaacatacgagccgggagcataaagtgtaaagcctggggtgcctaatgagtgagctaactcacattaattgcgttgcgctcactgcccgctttccagtcgggaaacct

SEQ ID NO: 38801 - DNA, 612 bp, Homo sapiens
gactcactatagggcgaattggagctccaccgcggtggcggccgaggtacaagaccttctgagactggtccaaaaactgccactcctccctggtgaagcccacagccacatcttcgaatgacaatgacccctcccctgaagaactgccttgctctctcctcacagacattacaatcgtggcattttcatgtgtttcctgttatttcagctgggccttgcccatttcgttcaactcttaggggctagcaactctagtatgttctctctcttctgtctattctgggccttcccagaagtggtggtcaggtatcatctcaggtcaagctaccactggaaatgatgatcttccccagcctggaagctccttcttccattactgaaaatgtcttgttcctataggccagaacactcatcacagccatagggtctctctcccgtgtgagttctgtgatgtacctgcccgggcggccgctcgagcattaatgaatcggccaacgcgcggggagaggcggtttgcgtattgggcgctcttccgcttcctcgctcactgactcgctgcgctcggtcgttcggctgcggcgagcggtatcagctcactcaaaggcggtaata

SEQ ID NO: 38802 - DNA, 404 bp, Homo sapiens
gcgtatacgactcactatagggcgaattggagctccaccgcggtggcggccgcccgggcaggtactaccagggagtgttcatagagagtagtgtattttaagttcttagcattaaagaatgaattccaaaatatatgtagtcttggacacaaagggaaatctttagaaatttttatttaaccataaactataaaatggggagaatgatactcagcttacagtatcactatgagattatattagcaagatttcttagataactgtcattgtaaaccagccatgtgttttgattaacaggtagcagcatgtctaccagaaaaatggtttgaaaattctgccatgaggacatctattccacagctagaaaacttcattcagtttttattgcagtctgcacataaatt

SEQ ID NO: 38803 - DNA, 605 bp, Homo sapiens
agctccaccgcggtggcggccgaggtcagggtaaacaggaggatccttgctctcacggagcttacattctagcaggaggacaatattaatgtttataggaaaatgatgagtttatgacaaaggaagtagatagtgttttacaagagcatagagtagggaagtaatccagcacagggaggtcacagagacatccctaaggaagtggagtttaaactgagagaagcaagtgcttaaactgaaggatgtgttgaagaagaagggagagtagaacaatttgggcagagggaaccttatagaccctaaggtgggaaggttcaaagaactgaaagagagctagaacagctggagccgttctccggtgtaaagaggagtcaaagagataagattaaagatgtgaagattaagatcttggtggcattcagggattggcacttctacaagaaatcactgaagggagtaatgtgacattacttttcacttcaggatggccattctaactgcagggggtagactggactatgtaagactggaggcaggtagaactttttttaagcctgcgatagtgaaagacaaaaataagtggggaaattcaggtgatagtgaaa

SEQ ID NO: 38804 - DNA, 620 bp, Homo sapiens
cgactcactatagggcgaattggagctccaccgcggtggcggccgggatgtgagtcatcccttggtccagcacatccacgctgtatacgccacccaccctgctagtgacttagtagccgtcttggtgatcagatcaactatcccagcatcacagtgcctgtgcccaagcagtcctcactttgttacagtggccccagagagcaggagtagtgatgctggtgattcggatatgccaaagagaagccacaaagtgcttccttttaaatgaaaaggtgaaagttctcaacttaaaaaagaaaagaaaaaaatcatatactgaggttgctaagatctacatgacaataagatattttgggagagagatacgttcacataattttattacatatattgttacaattgttctattttgttagttactgttggtaatctcttactgtgcctaatttataaattaaactttagatatgcttgtacctcggccgctctagaactagtggatcccccgggctgcaggaattcgatatcaagcttatcgataccgtcgacctcgagggggggcccggtacccagcttttgttccctttagtgagggttaattgcgcgcttggcgtaatcat

SEQ ID NO: 38805 - DNA, 542 bp, Homo sapiens
agctccaccgcggtggcggccgcccgggcaggtactacttttgtggctgtgaatggtatcttttattgaactgaggcagcttttaaaagacttgcctgatcatttagagcactcccattgaggttaaattagacttgaatctgtaatgattctcgtaactgttcctggtgtgtgtccagcacaatgttgctgggcagagcagaggggcagaggctcaggtatgtacctcggccgctctagaactagtggatcccccgggctgcaggaattcgatatcaagcttatcgataccgtcgacctcgagggggggcccggtacccagcttttgttccctttagtgagggttaattgcgcgcttggcgtaatcatggtcatagctgtttcctgtgtgaaattgttatccgctcacaattccacacaacatacgagccgggagcataaagtgtaaagcctggggtgcctaatgagtgagctaactcacattaattgcgttgcgctcactgtccgctttccaatcgggaaacctgtcgtgccagctgcat

SEQ ID NO: 38806 - DNA, 642 bp, Homo sapiens
cgactactatagggcgaattggagctccaccgtggtggcggccgcccgggcaggtaccgggatgtgatgctggagacctacagccacctgctctcagtaggatatcaagttcctgaagcagaggtggtcatgttggagcaaggaaaggaaccatgggcactgcagggtgagaggcggtagagctgcccaggagagaaattatgggaccataatcaatgtagaaaaatcctcagttataaacaagtatcctctcaacctcaaaaaatgtatcctggggagaaagcttatgaatgcgccaaatttgaaaagatattcacccagaagtcacagctcaaagtacctcggccgctctagaactagtggatcccccgggctgcaggaattcgatatcaagcttatcgataccgtcgacctcgagggggggcccggtacccagcttttgttccctttagtgagggttaattgcgcgcttggcgtaatcatggtcatagctgtttcctgtgtgaaattgttatccgctcacaattccacacaacatacgagccgggagcataaagtgtaaagcctggggtgcctaatgagtgagctaactcacattaattgcgttgcgctcactgcccgctttccagtcgggaaacctgt

SEQ ID NO: 38807 - DNA, 249 bp, Homo sapiens
ctatagggcgaattggagctccaccgcggtggcggccgaggtacagggtaaacaggaggatccttgctctcacggagcttacattctagcaggaggacaatattaatgtttataggaaaatgatgagtttatgacaaaggaagtagatagtgttttacaagagcatagagtatggaaagcttaatccagcacagggaggtcacagatgacattccctaaggaagtggatgtttaaacctgagagaagca

SEQ ID NO: 38808 - DNA, 311 bp, Homo sapiens
aacaaaagctgggtaccgggccctccctcgaggtcgacggtatcgataagcttgatatcgaattcctgcagcccgggggatccactagatctagagcggccgaggtacaactatctggcccaaaggggtggtcaatcctgagtggataaataatagaatttagtcctatgatgtgtctcgatttttcttttcttttctaaccttcctatttttattaacccgggccttctgcgcccaaagactcagcctcattcaggaccatattatgtgcatacttctgctgcgtccaaggagtgttgatgaaaaagtgg

SEQ ID NO: 38809 - DNA, 493 bp, Homo sapiens
agctccaccgcggtggcggccgaggtactttgtttttttttttgctagaagagatttttttattgaagggcgagtctccggcatctgatggcagctacaactggatctcacggaacgcccgcttctccaccagcttcaccttgtacctgcccgggcggccgctctagaactagtggatcccccgggctgcaggaattcgatatcaagcttatcgataccgtcgacctcgagggggggcccggtacccagcttttgttccctttagtgagggttaattgcgcgcttggcgtaatcatggtcatagctgtttcctgtgtgaaattgttatccgctcacaattccacacaacatacgagccgggagcataaagtgtaaagcctggggtgcctaatgagtgagctaactcacattaattgcgttgcgctcactgcccgctttccagtcgggaaacctgtcgtgccagctgcattaatgaatcggccaacgcgcgggg

SEQ ID NO: 38810 - DNA, 497 bp, Homo sapiens
gactcactatagggcgaattggagctccaccgcggtggcggccgaggtacaccaaaaagagaactttgtgatccgttggtaagatagtatccacaagtaagcacttgtgttcactgttttttgttccacactagaatacacccagttggataccagagttatttacagacatctgaggaagatcctagttttcaagtctgtcaggaaaatattccatattgttttaagccagatcatacccatggaaaaatagagaatggttttctttctttttctttctgaccaatacatgctcaagaaatcaaatatctgagatacacaaattgaacgcggtagggtgggggaggaagtctggagataaagcctatgctgctgattcctcaattataggagcagtctctaaaagccctcgtcaatctagtgatgtgtttctctctggaattgggggactgggtggtgggctgcatattggggtgaatgggggtacctggccgggc

SEQ ID NO: 38811 - DNA, 609 bp, Homo sapiens
  misc_feature 167, 220, 221, 244, 245, 256, 257, 301, 302, 316, 317, 343,356, 367, 513: n = A,T,C or G
gcgaatcggagctccaccgcggtggcggccgaggtacgcgggagagtgttcaaagcaggcccgagccgcctggataccgcagctaggaataatggaataggaccgcggttctattttgttggttttcggaactgaggccatgattaagagggacggccgctctaganactagtggatcccccgggccttgcaggaattcgatatcaagccttatcgatannccgtcgacctcgaggggggggcnnccggtacccanngcttttgttccctttagtgagggggttaattgcgcgccttggcnngtaatcatggtcanntagctgtttccttggtgtgaaattgnttatccgctcacnaattccacacnaacatacgagccgggagcataaagtgtaaagcctggggtgcctaatgagtgagctaactcacattaattgcgttgcgctcactgcccgctttccagtcgggaaacctgtcgtgccagctgcattaatgaatcggccaacgcgcggngagaggcggtttgcgtattgggcgctcttccgcttcctcgctcactgactcgctgcgctcggtcgttcggctgcggcgagcggtatcagctcactc

SEQ ID NO: 38812 - DNA, 530 bp, Homo sapiens
agggcgaattggagctccaccgcggtggcggccgcccgggcaggtacttttctttcttttttttttttttttttgagacggagtcttgctctgtcacccaggctggagtgcagtggcgcaatctcagctcactgtaagctccacctcccgggttcacgccattctcctgctcagcctcttgagtagctgggactacaggtgcccaccaccacgcctggctacttttttttgtatttttattagagacggggtttcactgtgttggccaggatggtctcgatctcctgaccttgtgatctgcccgccttggcctcgtagctctttttgaccctcagggacagtcactgaattatgtcttgggagcccatgcttctgaggcaggcttagggagcaggagagcatacaggtgtagcagccttttccagctgatccccatgccctgctgcacctgggagggctggaacaagctattctcatattggggaaaagggctgatgggacctcagtcatgtggcagagaatctgaaaag

SEQ ID NO: 38813 - DNA, 500 bp, Homo sapiens
gactactatagggcgaattggagctccaccgcggtggcggccgaggtactttttttttttttggttatgaaaacttagggactaaaattaatataaaaattggcataatgttggattgaatctacattttggcagaagttaaacattcccacataatgtcaaaattatacatcatgcagtctgtttttttgtttgttttattttgttttgtttttgagtctggctctgtcacccaggctggagtgcagtggcgtgatctgcaacctctgccccccgggttcgagcgattctcctgcctcagcctcccgagtagctgggattacaggtgcgcgccaccacacttggctaatttttgtgttattagtagagacggggtttcggcatgttggctaggccggtctctcctgacctcagggtgatcagccaaccttggcctcacaaagtgctgggattacaggcgtgagccaccttgcccagcccacataatacagtttgaaatg

SEQ ID NO: 38814 - DNA, 530 bp, Homo sapiens
  misc_feature 494: n = A,T,C or G
tacgactcactatagggcgaattggagctccaccgcggtggcggccgcccgggcaggtacttgcaaccattggtgcatagtccatcgtcacagttatctgggcaactggcacaaggtgctccttgttcataagggacatatagtctattagcccaattaccagcaggacaatattgcaaacatatagtattttagaactttttgattgggacagtaggcatttccacatccaacgaggtatgaagagtacatgagaatccttttttgacaagccttggaaagctgacactgtctctttttcctccctctatacgaaggatgtatttaaatgaatgctggtcagtgggacattttgtcaactatgggtattgggtgcttaactgtctaatattgccatgtgaatgttgtatacgaatgtaaggcttatgtcactaaagatttttattctgattttttcataatcaaaggtcatatgatactgtatagacaagctntgtaatgaagtatagtagcaataatttctgtacctc

SEQ ID NO: 38815 - DNA, 199 bp, Homo sapiens
tacactactatagggcgaattggagctccaccgcggtggcggccgaggtactgtctgtatcaatactaacggggcatgataagcaaaattttaaactttggtagttaaacctttatgttgcctcccctctgggctgccagctgtggggatgtgcttctcccttaaggactttggcaagaataacaagtttcatttggaa

SEQ ID NO: 38816 - DNA, 436 bp, Homo sapiens
agggcgaattggagctccaccgcggtggcggccgccgggcaggtactttgcctacggcagcaacctgctgacagagaggatccacctccgaaacccctcggcggcgttcttctgtgtggcccgcctgcaggattttaagcttgactttggcaattcccaaggcaaaacaagtcaaacttggcatggagggatagccaccatttttcagagtcctggcgatgaagtgtggggagtagtatggaaaatgaacaaaagcaatttaaattctctggatgagcaagaaggggttaaaagtggaatgtatgttgtaatagaagttaaagttgcaactcaagaaggaaaagaaataacctgtcgaagttacctgatgacaaattacgaaagtgctcccccatccccacagtataaaaagattatttgcatgggtgcaaaagaa

SEQ ID NO: 38817 - DNA, 557 bp, Homo sapiens
agctccaccgcggtggcggccgaggtacttgaagatactccagtcagcagagggtcatgttgagcattctgcagacagaactgtttcaagtctgcagctgcctgggaaacttttacgcggttgaagtccggcctccaagccggagctgttgaaccactttcttatacggcacgctggaggagccagacatggtgcacgcgacggccctctagactagtgatcccccggctgcaggaattcgatatcaagcttatcgataccgtcgacctcgagggggggcccggtacccagctttgttcccttagtggggtaattgcgcgcttggcgtaatcatggtcatagctgtttcctgtgtgaaattgttatccgctcacaattccacacaacatacgagccgggagcataaagtgtaaagcctggggtgcctaatgagtgagctaactcacattaattgcgttgcgctcactgcccgctttccagtcgggaaacctgtcgtgccagctgcattaatgaatcggccaacgcgcggggagaggcggtttgcgtattgggcgctc

SEQ ID NO: 38818 - DNA, 431 bp, Homo sapiens
tcactatagggcgaattggagctccaccgcggtggcggccgaggtactttttttttttttttttgttgcaactcttctttaataactgattgatgcaaagaatcaacagatgttaaagccattgggttagattgttgaggaataggatatttgcatagtctcaacaggttccttcttaaaagtgaaaaaagtatcttagaatggaaagaaaaggcaaatatcactttaaccaaatgtcaccaataataggacaaactgacatgtgccttctgatgccatacaaatggaaagtacctgcccgggcggccgctctagaactagtggatcccccgggctgcaggaattcgatatcaagcttatcgataccgtcgacctcgagggggggcccggtacccagcttttgttccctttagtgagggttaattgcgcgc

SEQ ID NO: 38819 - DNA, 619 bp, Homo sapiens
gtcatacgactcactatagggcgaattggagctccaccgcggtggcggccgcccgggcaggtacagtatgatgtaggccaggaagatcttcaaaaccttaacgttaagctaaagatttttacaaatgtctattaaaaaaacatagtaacagtattttctctgtaatcctcaaggattacactcacctaccttattctggggattgacactgaactgatacacattggtagagccagatacattttttaaatactgtaatattgacagcaacaggagtcagagaaaccccatctccatgttgaagacagtttaaaacctgaaagccaagctacaagttaaatccttggaccagattgagaacttgtcctcctgtttggtgtgctttcctctgattgatccccactcttcacctattttatgtatatctaccctttcctaattggttttctacactgtcatgcccatctttgagtagtgtcttcacttcaaccttttttgcttactcataagctaattcagcacattctcctcatcctgtgcctataaagaccccagactcagtaagtagaggaagagacaacctgacttcggggaagacgacttgctctttctgtcccct

SEQ ID NO: 38820 - DNA, 478 bp, Homo sapiens
gtatacgactactatagggcgaattggagctccaccgcggtggcggccgagtttgatttcttgcagtcctgagcgatggagcccgggggtgcctggttattgtccgctttctctctcagatgcttggcttgtttttcaagagaacctttttcgatattcattgctccatcgattggatccagtccttgttcagaaaattgtttcaaggcacttaaggctgcctgaaagccttgaatccttgctaaatattccagttgttttgaaggttgtacctgcccgggcggccgctctagaactagtggatcccccgggctgcaggaattcgatatcaagcttatcgataccgtcgacctcgagggggggcccggtacccagcttttgttccctttagtgagggttaattgcgcgcttggcgtaatcatggtcatagctgtttcctgtgtgaaattgttatccgctcacaattccacacaacata

SEQ ID NO: 38821 - DNA, 166 bp, Homo sapiens
tggagctccaccgcggtggcggccgcccgggcaggtacagtagtgcactcttggctcactgtagcctcgacctccggggctcaagtgatcctgctgccttagccccacaagtagtgggactataggcacacagcaccatgcccatctaagtttttgtattttatgt

SEQ ID NO: 38822 - DNA, 445 bp, Homo sapiens
tacgactcactatagggcgaattggagctccaccgcggtggcggccgaggtacccttctgcatgcagtcagaaatgttcttttcaagaggacatttcctttaaaaagttcaagtttcttatcttacgataaagagatatttcctatacttattgtcctaaaattctatttggtcactcttacctcttttgtgaaaggccacatcttgctaaagtagcagctactgaactgaccagaaacaaactcaaacactgaatttgacaaaccaacctgctgaatataagcaactttttctaagatgaaatgtaaaaaagaaaaagaaaaaacaaaaagcaacaccttctagaaagccattcatcttatctcataaaattaattccccagagttatctcatgtagtagcagcattatcaaatagtgcaattcttcaaaattgatttcaaata

SEQ ID NO: 38823 - DNA, 424 bp, Homo sapiens
gcgtaatacgactcactatagggcgaattggagctccacgcggtggcggccgtcttgtgtcttctttactgtgactgggtcgtttttaagaaaggttatcagctttgtgtttggtttcccacagttgataaaaatctatcaaaaacattataatttgcaaggaaaaaggtttttcaatggctgcaggaaccagaaagaaatagcatttcttatctgtataaacacaaacatttaaagctagtcacactgcaggtaaatccaatatagtatgcaaaagttctataaaaatgaacaagagatacacgtttactttcattgctccaacagtcaaatgtaaatctgcatgagagttgcgctgcagcagtttgctggtccaatttaagagttcaaggtcctttttgtacctcggccgctctagaactag

SEQ ID NO: 38824 - DNA, 440 bp, Homo sapiens
cactactatagggcgaattggagctccaccgcggtggcggccgaggtacaccaaatgagatactatttggaaaggcaataaagggagtgtaaaagcctaggtagcttaaatacaggctctggaatttccttcgcaggaaggtgaagcaccaatgatggcaaaaattaaataaatacatcatcttaaaaggcagagggtaggctgcgtgcagtggtttacgcctataatcccagcactttgggaagccaaggcgggcacattgcttgagctcaggagtttgagaccagcctggacaaccccatctctacaaaaaaataaaaatcggccaggtgtgatggggcaaacctgtggtctcagctacttgggaggtggtccttgagcccaggaggtcaagcctgccatgagtcaagatcatgtcactgcactccagcgtggctgac

SEQ ID NO: 38825 - DNA, 639 bp, Homo sapiens
gtatacgactcactatagggcgaattggagctccaccgcggtggcggccgaggtactcactttcatcctgcgcgactgtcgtaagcgttcagtctgtcattgaattattccatcagcttctttgctagagtgggttttctggaatggttctgttttagagaactagttacagtgactccatgagcctcctcaaaagagttggccaaaatgttttctctccttcatcactgtctagtggtgctgtccctcgagtgagcattcacctgcctcgtgtcagagttcacacacgtgtgtgtcccccgcgtacctgcccgggcggccgctctagaactagtggatcccccgggctgcaggaattcgatatcaagcttatcgataccgtcgacctcgagggggggcccggtacccagcttttgttccctttagtgagggttaattgcgcgcttggcgtaatcatggtcatagctgtttcctgtgtgaaattgttatccgctcacaattccacacaacatacgagccgggagcataaagtgtaaagcctggggtgcctaatgagtgagctaactcacattaattgcgttgcgctcactgcccgctttccagtcgggaaacctgtcgtgccagctgcattaatgaatc

SEQ ID NO: 38826 - DNA, 582 bp, Homo sapiens
ttagggcgaattggagctccaccgcggtggcggccgcccgggcaggtacgaagtttgcgttcatcgtccacttcaatgagtttctggcagccagtggctgggaaggagatgttcagcttcatcttgaagcagctgaacgcctccgaggcgccacggaaaagagccccgcgtacagccatgagatctgcgtcattcagagaggaatgcggttcagcatagatgtctttgaggagaccaggggctacatcttggaggtctatggtgtccactttgagttacctgaccttggaccaattggggccaatggcttggccaatcctcgtgatttcttgatacccattgcctggtatgaggatcgccaagtacctcggccgctctagaactagtggatcccccgggctgcaggaattcgatatcaagcttatcgataccgtcgacctcgagggggggcccggtacccagcttttgttccctttagtgagggttaattgcgcgcttggcgtaatcatggtcatagctgtttcctgtgtgaaattgttatccgctcacaattcacacaacatacgagccgggagcataaag

SEQ ID NO: 38827 - DNA, 419 bp, Homo sapiens
cactactatagggcgaattggagctccaccgcggtggcggccgaggtacgcggggtgcccatctacgaggggtatgccctcccccatgccatcctgcgtctggacctggctggccgggacctgactgactacctcatgaagatcctcaccgagcgcggctacagcttcaccaccacggccgctctagaactagtggatcccccgggctgcaggaattcgatatcaagcttatcgataccgtcgacctcgagggggggcccggtacccagcttttgttccctttagtgagggttaattgcgcgcttggcgtaatcatggtcatagctgtttcctgtgtgaaattgttatccgctcacaattccacacaacatacgagccgggagcataaagtgtaaagcctggggtgcctaatgagtgag

SEQ ID NO: 38828 - DNA, 490 bp, Homo sapiens
actatagggcgaattggagctccaccgcggtggcggccgaggtactgttctcatcctcatccttgcccgtcgtctccatgctttcatcttcctgttcatccaggtcggtcatggtgccgcctttgactggggccgactctgagtctttctttgtgttgactgttttggaagtgtcacctcttctacattggggactggtgagggctcgtccatgtcctttgtcaggtcttcttgctcctcttctctgtggccacgctttgacttagtgtaaggtgttgagggacctttcttagcatttttcttctttgcttctggggttggtgaaggagagggggagcgcttcctcttcttatagtttccccccttcttgtcccgtcgatctgaatctgggctgttccccgcgtactctcagaggagcagtggaaccagacagatatgtcattctgggaggtcaccgggactcatgggtgtttggtggtattgaccctca

SEQ ID NO: 38829 - DNA, 421 bp, Homo sapiens
ctactatagggcgaattggagctccaccgcggtggcggccgcccgggcaggtacgagagcgcatcgcaaagaacctagtagagaaaggtattctaaccactgagaagcagaatttcctgctatttgacatgactactcatccagtgaccaatacaacagagaaacagcgactagtgaaaaaacttcaagatagtgtacatttaacaattggacatacagcactgtaaacaattcaaagtccattgagcttaccatgaaagaactgaaacgtatgtaggaactgtgtcctgctgcagacaagcagctgctctggctctggtgcggtgcggtgcggtgaggtgaggtgaggtgaggtgggcaggtgtggaagggagaattcctgaggccagtcacaattattgaagctaaattaatttcttac

SEQ ID NO: 38830 - DNA, 548 bp, Homo sapiens
actatacggcgaattggagctccaccgcggtggcggccgaggtacccccccgcagtgggcagtcctaattctgaacttcacctatctgggggtgatagaggggaacaagaggaagcctgctgaagagaaaacctaaacatctgttttgtctacgtatgacttcctctgcttgtgggagagaggaaggaaaggaacacattgttgtcagccccacaacccaacagaattaaaccctggagcaggttgaacagcagaggcttccctcagatcaaggagccaggagcagatgatctatctctgtggccacacagagagatgtcaccttatgcaatttgcatatcatattcaattcccccaactgctctttctaatttattcaactggggaccaggctggtctcatgccaacctaggagatgtacctgcccgggcggccgctcgaggaagggacagatgtagttggcaaccatggttagcatcggatgcccatcccaatggccatgaatgtgccaaaggtgccgccactctgcatcatggttttcccaatgc

SEQ ID NO: 38831 - DNA, 460 bp, Homo sapiens
ctactatagggcgaattggagctccaccgcggtggcggccgcccggcaggtacgcggggagggtagagtgagaagcaccagcaggcagtaacagccaacccttagccattgctaagggcagagaactggtggagcctttctcttactcccaggacttcagcacctaagacagctccaaaacaaaccagaacagtcagctccgggggagcacgactgggcgagaggcacagaaatggacaccagaaataaggcccagctccttgtgctcctgactcttctcagtgtgctcttctcacagacttcggcatggcctctttacagggcaccttctgctctcaggttgggtgacagaataccctttgagggagcaaatgaacctgatcaagtttcattaaaggaagacattgacatgttgcaaaatgcattatctgaaaatgacgcaccctattatgatgtatcc

SEQ ID NO: 38832 - DNA, 433 bp, Homo sapiens
tacgactcactatagggcgaattggagctccaccgcggtggcggccgaggtacacttcggtctagccagaaaaaaagcagaaacaagaagccaaggctaaggcttgctgccctggccaggaggaggggtgcagctctcatgttgaggagagctgtttctggcaggagttaggaggaactgctaccacttcaaaagcctgtagaggggaagctatttaattaagggattccccgcgtacctgcccgggcggccgctctagaactagtggatcccccgggctgcaggaattcgatatcaagcttatcgataccgtcgacctcgagggggggcccggtacccagcttttgttccctttagtgagggttaattgcgcgcttggcgtaatcatggtcatagctgtttcctgtgtgaaattgttatccgctcacaattc

SEQ ID NO: 38833 - DNA, 434 bp, Homo sapiens; identical to SEQ ID NO: 36954

SEQ ID NO: 38834 - DNA, 675 bp, Homo sapiens
  misc_feature 575: n = A,T,C or G
actatatggcgaatcggagctccaccgcggtggcggccgcccgggcaggtaccttggcctccaactggacacaactgcatttatagtttagcgaaaatacaaagttctgaaagtagccttaaaagaagtgccctttgctttgacatagcaatatcaaaagcaagtgggactgtgcaatccgagccatgagttttatgaaaactactttcctttcacatcatgttagagaatgccacacccatgatcatgtaacattattacaatcatgaaatattactacattcgtgattaacattacccaaaaggcacatcttcaaatgttgaattaagaaaatccaaaaatcaaaacagtagagaatacattaaaaatcaagcatttaatttgtaaaccttaatgaaataacagcctactccagtttcttcaaaggtttgtgagctttttataagagtggtcaggaagtgcagaaaaacaacatggaagacaggatttggaaacaaggccaaaatttaaaagacttaaccttttttttcttttaaatgagccacagaagtgcttttttataatgttgacgcanatcaacatttatattatagaaatgcactcagaagtaacagacacacaaggttaaaacctgattctttccactaagttctggaaatttattctaacataat

SEQ ID NO: 38835 - DNA, 615 bp, Homo sapiens
gactactatagggcgaattggagctccaccgcggtggcggccgaggtacgcgggatcgtaaaaccttcagaaggaaaggagaatgttttgtggaccactttggttttcttttttgcgtgtggcagttttaagttattagtttttaaaatcagtacagaaaggagggcagtaggccatcccccaggagaatgacagaagcaaaggacttgttactaagcagatttaagggtcagtgggggaaggctatcaacccattgtcagatcagcatcaggctgttatcaagtctgttggtgctaaaaagtaaaagatgaaatgttttaaaaaaaaaaaaaaagaataaaaagtacctgcccgggcggccgctctagaactagtggatcccccgggctgcaggaattcgatatcaagcttatcgataccgtcgacctcgagggggggcccggtacccagcttttgttccctttagtgagggttaattgcgcgcttggcgtaatcatggtcatagctgtttcctgtgtgaaattgttatccgctcacaattccacacaacatacgagccgggagcataaagtgtaaagcctggggtgcctaatgagtgaactaactcacattaa

SEQ ID NO: 38836 - DNA, 693 bp, Homo sapiens
  misc_feature 652: n = A,T,C or G
gcgtaatacgactcactatagggcgaataggagctccaccgcggtggcggccgaggtactgctgacttaaatagaggtttttttaaggtattgggtcagctaacagagactggagttgtcagccctgaacaatttatgaaatcttttgagcatatgaagaaatctggggattattatgttacagttgtagaagatgtgactctaggacagattgttgctacggcaactctgattatagaacataaattcatccattcctgtgctaagagaggaagagtagaagatgttgttgttagtgatgaatgcagaggaaagcagcttggcaaattgttattatcaacccttactttgctaagcaagaaactgaactgttacaagattacccttgaatgtctaccacaaaatgttggtttctataaaaagtttggatatactgtatctgaagaaaactacatgtgtcggaggtttctaaagtaaaaatcttgtaagaaaattgtcaaaggggctaatgctacaaggctacactcttcctagagttgaaatattttgttgctgcagccgagtgacctccataaatactggactgaaaaaacattgtaatactacaagtataatgacatttagaagattactttgggctggtgggacatgnctgtgaattagattacaaatgaatattataaggggatgatt

SEQ ID NO: 38837 - DNA, 305 bp, Homo sapiens
agggcgaattggagctccaccgcggtggcggccgaggtacagagacagaggaaggggggctccaaagccaagagagggaaccccacctgccacagataccagctaggtatatatacagaggctggaggaggcagtgtctgatttgcacaggctcaggggattggtttgacttgggcatgtcattcacgtagcccgcaggaaaagctggctctcccaccctagccttttaatatgcaaatgcagggcaccatgatcttctacacaggtggggatacttcggggtgttccatgtatccaggaaatgt

SEQ ID NO: 38838 - DNA, 584 bp, Homo sapiens
gcgtaatacgactcactatagggcgaattggagctccaccgcggtggcggccgaggtaccccagccacatggccttcatccttatgacctagcaggcagaacagggaccaagcagcttctattttgtcaaactcctttggacaaatattcaacattcaacaacaagctttgtaaacctaacgctaaacaagtcatggcaagcaaactggattttcttaagaaatgaggaaaagtgcaagtgatctcagtacctgcccgggcggccgctctagaactagtggatcccccgggctgcaggaattcgatatcaagcttatcgataccgtcgacctcgagggggggcccggtacccagcttttgttccctttagtgagggttaattgcgcgcttggcgtaatcatggtcatagctgtttcctgtgtgaaattgttatccgctcacaattccacacaacatacgagccgggagcataaagtgtaaagcctggggtgcctaatgagtgagctaactcacattaattgcgttgcgctcactgcccgctttccagtcgggaaacctgtcgtgccagctgcattaatgaatcg

SEQ ID NO: 38839 - DNA, 644 bp, Homo sapiens
  misc_feature 12, 583: n = A,T,C or G
cgactactatanggcgaattggagctccaccgcggtggcggccgaggtactatacatgaaatattcttgttgacctagtaatttatattattccatttaattcttaaacctatggcctttttattgagcacactcttaaatcattatttggcttgtaaacattcatctgaattgtggctacaatcctctttaaataatctaggaaaaaagaaagataaagcttacattttcacagttttggctcttaaacacattccacaaatgccattaagaatttattttgttttaggccagtcatggtggctcatgcctgtaatcccagcaatttgggaggctgaggcaagaactgcttgagcccaggagtttgagactagcctgggcaacatagcaagaccctgtctctaccaaaaaaaaaaaaaagtttattttgttttagagtcatttaatgtgtttttatgcacaataatagtgggaggttgttttgttgcatttgtttgtttgttttgttttgttttgttttgctttccatgtgggaaaagttaacattggaactgtttctagtaaaagatttttttcaggctgngcacggtggctcatgcctgtaatcccaacactttgggagaccgagggagctggatcacctg

SEQ ID NO: 38840 - DNA, 400 bp, Homo sapiens
cgactcactatagggcgaattggagctccaccgcggtggcggccgaggtaccccagttgttgttagtggggactatgatactgtaataatatttttaaaaatttacatcaagagaggcagtcattcacgatggttttgtgccagctctttttagggttttggatcacattagagatatttagaacatattaccctgtgacttacgtaggaaacctaatatgctgagtatctggcacttgaattcctgcttttattgctggaggtccacatctgtggttgacctctgttattgtttaaaaaaaataaataaaaattaaaaaaatctgtgcaataattttaaaatgtgctcccaggaatagacacaaatgttttgagtatcttttaagctgcattttccttt

SEQ ID NO: 38841 - DNA, 365 bp, Homo sapiens
gcgaattggagctttaccgcggtggcggccgaggtactcatgtatttttttttccagatctctttccccaagttgctattgtaagagtattctgctgcgtgtggatgcagttatacacattaaagcagatctggagtctgaagtagctttaaagcagctataaaacagaaatacatgcatacctgcagaaaccatgataggttagaggacttttttttggttttgttttgttcttgtatttgtcttgtattttggcttttacaagagaagaagaatttttattttcaaaagaaaaaaaaattcccagtgaatttgtgcaagaaaatgctggtttttttacacccatcccttaaagaaaaaacctt

SEQ ID NO: 38842 - DNA, 169 bp, Homo sapiens
tttttttttttttttttttttttttttttttatttttttttttttttttttttatttgttcttttggaatgcatgatactttatttaaacacacatatatacaatgatgacaaaggaaaacattgcagaattcagcacaggggctgcatgcattggtaggatgggtgga

SEQ ID NO: 38843 - DNA, 450 bp, Homo sapiens
tacgactcactatagggcgaattggagctccaccgcggtggcggccgtcgctcccctgctcctccttggtggctctctcagaggactccagagttgtatccccaggccgtcttccccgcgtacgcgggggcttggccaaatcgtcttcagagtcctccagtgaggaaagtagcagtgagagctcctctgaggaagaggaggaggaagatgaggaggacgaggaggaagaagagagtgaaagctcagactcagaggaagaaagggctcatcgcttagcagaactacaggaacagcttcgggcagtacctcggccgctctagaactagtggatcccccgggctgcaggaattcgatatcaagcttatcgataccgtcgacctcgagggggggcccggtacccagcttttgttccctttagtgagggttaattgcgcgcttggcgtaatcatg

SEQ ID NO: 38844 - DNA, 387 bp, Homo sapiens
actatagggcgaattggagctccaccgcggtggcggccgcccgggcaggtactgtggcctgttaggaacccggctacacagcaggaggtgaggagcaggcaaacattactgcctgagctccacctcctgtcagatcagcggtggcatcagattctcatcggaacttgaaccttattttgaactgcgcatgtgaggataggttgcatgctccctatgagaatctaactaatgcctgatgatttgaggtgaagaagtttcatcctgaaaccaccccccaacctgtctgtggaaaaatagtcttccatgaaaccggtccctggtgccaaaaaggttggggaccactggtctaagggacattaccctactaccaaaacattcctgatgcac

SEQ ID NO: 38845 - DNA, 427 bp, Homo sapiens
tacgactcactatagggcgaattggagctccaccgcggtggcggccgcccgggcaggtacgcggggcttccggtggcggagcggcggattagccttcgcggggcaaaatggagctcgaggccatgagcagatataccagcccagtgaacccagctgtcttcccccatctgaccgtggtgcttttggccattggcatgttcttcaccgcctggttcttcgtttacgaggtcacctctaccaagtacaagtcagacatcttttgaaacatcaaacagagaagcagcaaagagccagaacttgcctaaacctttaactgaatttccgtctcctgctgaacagcccacatgcaaggagattcctgatttacctgaagaaccttctcaaacagcagaagaagtagttactgttgctctccgatgtcccagtg

SEQ ID NO: 38846 - DNA, 615 bp, Homo sapiens
tacgactcactatagggcgaattgggccctctagatgcatgctcgagcggccgccagtgtgatggatatctgcagaattcgcccttagcgtggtcgcggccgaggtactatctggatactaaaatgttacggaagtagctctttgttctccctcactctgcccttagttaatagaaattcagactcgccaagtaaggcttcgtgcatagtgtcttcatgtcgcgtatagttgagcgcgttcttagcagttggcttcatggacaactcattagtgttttgacttttcttacccagcgttaattgaattcttgcttttagacaacttcctttttgtagtggtgaaccttgccctttagtacgcggggtctctgtcagtcgcgagcgaacgaccaagagggtgttcgactgctagagccgagcgaagcgatgcctaaatcaaaggaacttgtttcttcaagctcttctggcagtgattctgacagtgaggttgacaaaaagttaaagaggaaaaagcaagttgctccaaaaaaacctgtaaagaaacaaaagacaggtgagacttcgagagccctgtcatcttctaaacagagcagcagcagccgagatgataacatg

SEQ ID NO: 38847 - DNA, 426 bp, Homo sapiens
acactactatagggcgaattggagctccaccgcggtggcggccgaggtactctcagcttgttggtggaagcccctcatctgccttcattctgaaggcagggcccggcagaggaaggatcagagggtcgcggccggagggtcccggccgctctagaactagtggatcccccgggctgcaggaattctatatcaagcttatcgataccgtcgacctcgagggggggcccggtacccagcttttgttccctttaatgagggttaattgcgcgcttggcgtaatcatggtcatagctggttcctgtgtgaaattgttatccgctcacaattccacacaacatacgagccgggagcataaagtgtaaagcctggggtgcctaatgagtgagctaactcacattaattgccttgcgctcactgcccgctttc

SEQ ID NO: 38848 - DNA, 404 bp, Homo sapiens
tggctgccgaggtactgtaaaaaacattttgccccaaaataaacttatactaacttgttccataacatgtgtaaacaggatctagtttgagacagtaagaaggataagatattagtttgaaaggagcaccttatcagagcaacacaaattccgcagaattgaagcatgaacaaacatcaagtttataatgaaccttgggtgggagaatggtgaaatcattggtgctttacaaaaagttgatgggggcaatgcaccaaagaaatcagtagttttcaagtggacaattaattttaaggagggccaagatgatgacactctcagtggcagaccaaccacaccaatttgcaaggcaagacttcatctagttcatgccctaagtgaagaggactgacaattaacaacac

SEQ ID NO: 38849 - DNA, 529 bp, Homo sapiens
gactatagggcgaattggagctccaccgcggtggcggccgcccgggcaggtactttttttttttttttttttgcacaaatggcattttattaaagaaaatctaatttacaaagctttgtaaattttaagaaaaacattcatagatcataaacaaaaatttcaatatgcaatattcaaatttacaagaaaataagcacaaacttttagacagtgcagttattgctgcactcctttaattccttatccagagcccaaaaaatgtagacaaaccctaaaaatgtagcagaagcatttccgcacactggtgtccagaatctagtttgtgcagaaatgtttccactagatttatagagtacatttgaaaatgccctttggatacttggaactgctaaattattttattttttacataaggtcacttaaatgaaaagcgattaaaagacatctttcctgcattgccatctacataatatcagatattacggatgttagattgcatctcagtgttaaatctttactgatagatgta

SEQ ID NO: 38850 - DNA, 592 bp, Homo sapiens
tacgactcactatagggcgaattggagctccaccgcggtggcggccgcccgggcaggtactttatagtaataaatctgaccagcagagggagggatcaggcagcagtgtttagagcacaccacactggccactgtaaactgagaagctaagttaactggtattttatgattttgagtatagtctttttataagttgtatacactttacaatgtaaaagaaacaaactttgtataatagcaaatcgggaaggggactgcttaaaatgttaatgcagtgtttttctttttttctctgcataaatggcttgagcatactggcatttacacagaaatgatatatgctgcttttatcatataacaaatattttcccactattacagcctgagtaatacccgtattaaaagagcctcattttagaaagacatttaaaatttttggaacataccacatgtagaaaggttgaactggtttttcagctataatgcatatacaactatagtgtgtatctcggccgctctagaactagtggatcccccgggctgcaggaattcgatatcaagcttatcgataccgtcgacctcgagggggggc

SEQ ID NO: 38851 - DNA, 392 bp, Homo sapiens
gggcgaattggagctccaccgcggtggcggccgtcaggtccttgattggcaccgcctgatccccctcacctgggcctgtatggctaggcagactcctcatcttggagaacagagaaggacgacagcttctttgttgcgcaaactgactacagcctccaatggaggggtcattgaggagttatcttgtgttagatccaataactatgtgcaggaaccagagtgcaggaggaatcttgttcagtgcctccttgagaagcaggggactcctgtggtactcagaccgggtaagaaacatggcgagggtaggaggaggcagcggctacgcggggattctgaggaccaacacgactccaccggcacccaactcaccggcagccaactcacccacacgg

SEQ ID NO: 38852 - DNA, 382 bp, Homo sapiens
ttggagctccaccgcggtggcggccgaggtactgtttcactgaagagatggaatataagaagccaagtaatttatggaattctcttctttgtttttcttttttttttttggcagtggagtcttgctctttaaatagagcaaggctagtctggaactcctgggctcatgtggtcctcccgccttagctttcagtgtagctgggactacaggtgtgaacacagcttggaaatctcttaaccatgggagttaagtctcaaaattctggtgatacaagtggttgaaacttaaaactgtatttaaaaaataggattcgtgaatttgagatagttcataagtctgcaaaaggctgtataaatacatattttacatttactattattaa

SEQ ID NO: 38853 - DNA, 353 bp, Homo sapiens
gactactatagggcgaattggagctccaccgcggtggcggccgaggtacaatagagtaagaaattagacaaagttgtcatgtccagtaacagaataaaaggcctttcattaacctatctagaagtccccaatgcagtaggaaaacatgttcattcccctaacattgcagtatatactagcattagctttctttttaaaatatcttttctctataagcatttttaaaaggcatacccaaaagaggtgtttaatcaccatccccaccaaaatatagtttattatctctctccctcttttttaatgatagtgtaaactgaatccaattcctggccccgcgagcaaataatcttact

SEQ ID NO: 38854 - DNA, 433 bp, Homo sapiens
  misc_feature 373: n = A,T,C or G
ctactatagggcgaattggagctccaccgcggtggcggccgaggtacaggtgttttctgtggctcccagcttcattgcagcttgaagatagacggcagtgtctgtttgaactgagacacatgagacccgggacaggagtatgatagggagacgttcctgcctatccaggatgtgaagctggcgcaaccgcctaccacctctggagagacctcggcacatttcaccagttttccctgctaccctcatcagcactggtgctgctgcttgtcactggagtacctgccccgggcggccgctctagaactagtggatcccccgggctgcaggaattcgatatcaagcttatcgataccgtcgacctcgagggggggcnccggtacccagcttttgttccctttagtgagggttaattgcgcgcttggcgtaatcatgg

SEQ ID NO: 38855 - DNA, 431 bp, Homo sapiens
ctatacactactatagggcgaattggagctccaccgcggtggcggccgcccgggcaggtactgttaggagtatactgcttacaggtttagatatagtctgttagaattaaaaccaagtttagtgttcatatttacctcatgggctttatcaagcccatattacctcagcttatatatagttaccatttttgtgtttttaaatgttttgacgatttcaatacaagataaaaaggatagtgaatcattctttacatgcaaacattttccagttacttaactgatcagtttattattgatacatcactccattaatgtaaagtcataggtcattattgcatatcagtaatctcttggactttgttaaatattttactgtggtaatatagagaagaattaaagcaagaaaatctgaagtattgtcttgtttttaa

SEQ ID NO: 38856 - DNA, 233 bp, Homo sapiens
tacgactcactatagggcgaattggagctccaccgcggtggcggccgaggtacttctgttgctgtgttctgtcatgagttgcctcatgaattaggtgactttgctgttctactaaaggctggcatgaccgttaagcaggccgtcctttataatgcattgtcagccatgctggcgtatcttggaatggcaacaggaattttcattggttcattatgcctgaaaatgttttctat

SEQ ID NO: 38857 - DNA, 332 bp, Homo sapiens
  misc_feature 281: n = A,T,C or G
cgactcactatagggcgaattggagctccaccgcggtggcggccgaggtacctgtcagaatgagattaccctccaggttccaaatccctcagaattaagagccaagccaccttcttcttcctccacctgcaccgactcggccacccgggacatcagtgagggtggggagtcccccgtgttagtccgatgaggaggaagttcaggtggacactgcccttgccacatcacacactgacagagaggccactccggatggtggtgaggacagcgactcttagatngagacatgggcgttgtctggccacactggaatccagttttggctgtatgcg

SEQ ID NO: 38858 - DNA, 413 bp, Homo sapiens
cgggccccccctcgatagtacttctagaattaattaacgcgggtctatcaacaaagaacccttaacacaccatactatattgcaatccctatggtaccagactgtcgcaaagaacatcttttgggaatgaagtcagaagaacagtttgctgtgaccacctcagagtctcaaaacccttcctcctccagcaagacccaaccacaaaaactgtctaaaggcgccctgagtttgagaattttagtgtcctgctctgggtttttccaggctgccttttttttgataccaggcttgccctgcctgtaccattttttactgcataggcaggctgacagctcagactgactgatggcggagcctgcctcacaaatgtgcatgcgctagtctcacagcaccaggcctgactgtgacctttc

SEQ ID NO: 38859 - DNA, 442 bp, Homo sapiens
aaccctactaaagtaacaaaaactgcgtaccgggccccccctcgagtagtacttctagaattaattaacgcgggtctatcaacaaagaacccttaacacaccatactatattgcaatccctatggtaccagactgtcgcaaagaacatcttttgggaatgaagtcagaagaacagtttgctgtgaccacctcacagtctcaaaacccttcctcctccagcgagacccagccacaaaaactgtctaaaggcgccctgagtttgagaattttagtgtcctgctctgggtttttccaggctgcctttatcttgataccagacttgccctgcctgtaccattttttactgcataggcaggctgacagctcatactgactgatggcggagcctgcctcacaaatgtgcatgcgctagtctgacagtaccagacctgactgagacctt

SEQ ID NO: 38860 - DNA, 410 bp, Homo sapiens
accctactaagggaacaaaagctgggtaccgggccccccctcgagagtacttctagaattaattaacgcgggtctatcaacaaagaacccttaacacaccatactatattgcaatccctatggtaccagactgtcgcaaagaacatcttttgggaatgaagtcagaagaacagtttgctgtgaccacctcagagtctcaaaacccttcctcctccagcaagacccaaccacaaaaactgtctaaaggcgccctgagtttgagaattttagtgtcctgctctgggtttttccaggctgcctttttcttgataccaggcttgccctgcctgtaccattttttactgcataggcaggctgacagctcagactgactgatggcggagcctgcctcacaaatgtgcatgcgctag

SEQ ID NO: 38861 - DNA, 433 bp, Homo sapiens
cccagcgcgcataaccctactaaagggaacaaaagctgggtaccgggccccccctcgagagtacttctagaattaattaacgcgggtctatcaacaaagaacccttaacacaccatactatattgcaatccctatggtaccagactgtcgcaaagaacatcttttgggaatgaagtcagaagaacagtttgctgtgaccacctcagagtctcaaaacccttcctccttcagcaagacccaaccacaaaaactgtctaaaggcgccctgagtttgagaattttagtgtcctgctctgggtttttccaggctgcctttttcttgataccaggcttgccctgcctgtaccattttttactgcataggcaggctgacagctcagactgactgatggcggatcctgcctcacaaatgtgcatgcgctagtctaacagc

SEQ ID NO: 38862 - DNA, 658 bp, Homo sapiens
  misc_feature 186, 193, 220, 257, 270: n = A,T,C or G
cgcgcattaaccctcactaagggaacaaaagctgggtaccgggccccccctcgagagtacttctagaattaattaaggcgggagaccatggggatccccagcatgatcctcctggggcacagtttgggaggattcctggccacttcttactcaatcaagtaccctgatagagttaaacacctcatncctggtnggacccatggtggctttcccctccganccaactaaccccagtgaggatccgtgccacccccagncctgggtcaaagnccgtggcattctgtcctaggacgttccaatccattggctgttcttcgagtagctgggccctgggggcctggtctggtgcagcgattccggccggacttcaaacgcaagtttgcagacttctttgaagatgataccatatcagagtatatttaccactgcaacgcacagaatcccagtggtgagacagcattcaaagccatgatggagtcctttggctgggcccggcgccctatgctggagcgaattcacttgattcgaaaagatgtgcctatcactatgatctacgggtccgacacctggatagataccagtacgggaaaaaaggtgaagatgcagcggccggattcctatgtccgagacatgggtcctgctgaggaagaatgaagcg

SEQ ID NO: 38863 - DNA, 555 bp, Homo sapiens
taccgggccccccatcgagagtacttctagaattaattaacgcgggtctatcaacaaagaacccttaacacaccatactatattgcaatccctatggtaccagactgtcgcaaagaacatcttttgggaatgaagtcagaaaacagtttgctgtgaccacctcagagtctcaaaacccttcctcctccagcaagacccaaccacaaaaactgtctaaaggcgccctgagtttgagaattttagtgtcctgctctgggtttttccaggctgcctttttcttgataccaggcttgccctgcctgtaccattttttactgcataggcaggctgacagctcagactgactgatggcggagcctgcctcacaaatgtgcatgcgctagtctcacagcaccaggcctgactgtgacctttcagtagagtgacaattaatgtcattgttgcctaatgccaagtccctgtgaattggagaagaagggcacctctatacagttttgttgcccatggactcccacttgtcttctctgtaagacagacaggacagtcccatgatcc

SEQ ID NO: 38864 - DNA, 488 bp, Homo sapiens
gcgcgcaattaaccctactaaagggaacaaaagctgggtaccgggccccccctcgagagtacttctagaattaattaacgcgggtctatcaacaaagaacccttaacacaccatactatattgcaatccctatggtaccagactgtcgcaaagaacatcttttgggaatgaagtcagaagaacagtttgctgtgaccacctcagagtctcaaaaccctttcttcctccagcaagacccaaccacaaaaactgtctaaaggcgccctgagtttgagaattttagtgtcctgctctgggtttttccaggctgcctttttcttgataccaggcttgccctgcctgtaccattttttactgcataggcaggctgacagctcagactgactgatggcggagcctgcctcacaaatgtgcatgcgctagtctcacagcaccaggcctgactgtgacctttcagtagagtgacaattaatgtcattgttgcctaa

SEQ ID NO: 38865 - DNA, 391 bp, Homo sapiens
gcgcgcacattaactcctactaaagggaacaaaagctgggtaccgggccccccctcgagagtacttctagaattaattaacgcgggtctatcaacaaagaacccttaacacaccatactatattgcaatccctatggtaccagactgtcgcaaagaacatcttttgggaatgaagtcagaagaacagtttgctgtgaccacctcagagtctcaaaacccttcctcctccagcaagacccaaccacaaaaactgtctaaaggcgccctgagtttgagaattttagtgtcctgctctgggtttttccaggctgcctttttcttgataccaggcttgccctgcctgtaccattttttactgcataggcaggctgacagctcaaactgactgatg

SEQ ID NO: 38866 - DNA, 551 bp, Homo sapiens
atacgactactatagggcgaattggagctccaccgcggtggcggccgctttttttttttttttttttttttggggatgctcaacctataatacccaaaggctctatttcagtagaatttattggtttgctgattatagcagtgacatagttgcattctagagaccttagaaaatgcagaaaatttcaagaaaaacatttaaattgtgctcatagtgaaactgagaggtgaccactcttaatattttgtggcataagcattccagtcttttatctttctcaaagtttcacataaactttctcaaaggccattaaatacttttccatagcctgattttttgtgaccacatagtatcctattatattgataataccataatttacctaacccatttttatatatttggattttttccaattcatcattattatgaataatggtgtatctcagtggttattactttgcactgcatttcttatgaaagtattgagtaaaaggaagtaaagccctctcagagtgttttgtaggctgtcacatttcactccataatgt

SEQ ID NO: 38867 - DNA, 459 bp, Homo sapiens
cactactatagggcgaattggagctccaccgcggtggcggccgcttttttttttttttttttttttttttttggaccagagaggccccaaactagcagcctgtcctcctcagtagccccagcatcccttcatcattttgttgcccttctatgggcctagtttaggtctgagaggcatagttttaaaatttttattgttattaatttattctagagataaggtcttgctatgtttcccaggctggtcttgaactcctggcctcaagcaatcctcctgcagcagcctcccaaagtgctgggattacaggcatgagccaccacgtttggtcagacaggcatagttttacaaatatgtgggtggataaatgctgtccagtcttacttcatcacttttatcaattgaatgcttttggttggaaataacagaaaatccaactaaaagtgacttaaacaaaggaaa

SEQ ID NO: 38868 - DNA, 606 bp, Homo sapiens
ctcctatagggcgattggagctccaccgcggtggcggccgcttttttttttttttttttttttttttttggaagtagattgtttctgctaggcaatataatctgctaatgtgacagtttccctgtaacaatgtgtagcaaaactctgcaggattaatgagaagaatgtattgcctttgaagcagcaccacttgagtaaaaattcctcaaatgtgctctatgttatgctagtgtaagtatagcaccggaggatatttcttgggcctactttgcaagcctctgagaggtgctgtgcagctccgaccatgaactgctctcctaattgaagagggtcccaggaaggggaagggcactatggcctccattctacccagggagattgggtgaatatctggcatgtaattaagtgctagctcaggtcgggctgtttctggcatatagggtagccagcggtcaggggagcctggagtggggttgcagtggactggggaggcccccagtgtcacagatctcccagggactgcgtgctcctcgaggaaggggcctgctgcgatgggtgaggaccttaggagctgcccgggtgactcctggaaggagtgactgcatc

SEQ ID NO: 38869 - DNA, 619 bp, Homo sapiens
cgcgcgtctcctactcactatagggcgaattggagctccaccgcggtggcggccgcttttttttttttttttttttttttgaggtggagtcttgctctgtcaccaggctggagtgcagtggtgcaatcttggctcactgcaaccttcccctcctggctgagttaacttaggagagcttcctggagagggcacctttgaagataggaaggatttcatgaagtctttactaggccactagagtagaagcagtgggagacttcctggagaagagctcatggaaagaaaaacctaccgctggccctttgggaactgctttgggcctctttagtcctaggctcacacgccccttagaaacaaagtaagaataaagccagggataatacagtgagtggccaagaacacagactctggagccagactacctgggtttgaatcccagttaccagccatgtgactttgatcaagttgcttaacctttgtgtgcttcagtttcctcatctgtaaaataaggggatggtaattgtgacttcccagaactatggtggagagcaaatgggttaagagtgtgccgctgtaaactgtagagtgctgggctttcattgggaagtattacctttca

SEQ ID NO: 38870 - DNA, 636 bp, Homo sapiens
  misc_feature 345, 629: n = A,T,C or G
ctgggtaccgggcccccccttttagtacttctagaattaattttcgcgggcattgtttgcagaagacctggactggaatctaacactgtgagtactccccaggatccgtgttcctctctttagcccaggcatgcagttacattacattttccaaccttccttgcagttagctacgatcacgtgactgcattctggccagtggaatgtgtgtggaagtgatgtgggccaattccaggcctggcctataaaaatcccccactttttgttctctttctccatccaccatctgcatggagagctcccagcactagagggagaaaaagccaccagagggaaggagcctgngtccctgaatcactgtgtagactacctgccaaacatacaccctgaattgttatggcaataacaaataaactcctaatgtgttaagccatttaaattctggggttgttacagctgttagcccagtctgactaacatagcctcttaagaggctttggataagtttcctagcctccctgaacttcagtttcctcatctctaaaatgataattggaaaaacctttctgaaaatgactgagctaatatttgtaaaggctacatatgacttttgtaagccctaggcactntcgtttt

SEQ ID NO: 38871 - DNA, 507 bp, Homo sapiens
  misc_feature 17, 18, 19, 161, 177, 224: n = A,T,C or G
cgcggtggcggccgctnnnttttttttttttttttttttttttttgcagcacaaaaatctgggttttatttattcatttgtaaactcaagccagttctctattccactttttccaattatttgcttttgagagtctcaggattatccttccttcctctccnttccacattttctccncctgtgcccttctccgtggcccatgcttctctagtccacgacggtcnttgtttaagatcacacatgcggtttggtagattttccttcacctctctctttcagaaaaaaatgccaaaatggtgttttaagaagcttttattgagccaactgaacttcaacaaagcaaacgaaaacataaagtagggaaaggaaccctcttcaacaaatggtgttgggataattggcaagccacatgtaggagaattaaactggatcctcatctctcaccttatacacaaatcaactcaaaatgccccgcgttaattaattctagaagtactctcgaggggg

SEQ ID NO: 38872 - DNA, 507 bp, Homo sapiens; identical to SEQ ID NO: 38871
  misc_feature 17, 18, 19, 161, 177, 224: n = A,T,C or G

SEQ ID NO: 38873 - DNA, 592 bp, Homo sapiens
ctatagggcgaattggagctccaccgcggtggcggccgcttttttttttttttttttttttttttaacttttgacagagactagatcttgctatgttgctgaggttgctcttgaactcctgggctcaaagaatcctctcatttcagcctcttcaactgctggtattacaagcatgaccccatatgggctggaagctgatttttaaaatactgagaccatatagatgacagcacccagagaaacagaaatattaactgaagttgttgctggcagaccattctttctttccacctttctttcttcctccctccccctcctccatctttttacttttcgtcctcttcctttctcttctttctctccttcattatccctttcactgtttctctttctccctttcttttttcttttctttcccccgcgttaattaattctagaagtactctcgagggggggcccggtacccagcttttgttccctttagtgagggttaattgcgcgcttggcgtaatcatggtcatagctgtttcctgtgtgaaattgttatccgctcacaattccacacaacatacgagccggaagcataaagtgt

SEQ ID NO: 38874 - DNA, 492 bp, Homo sapiens
  misc_feature 293: n = A,T,C or G
ggtgccggccgctttttttttttttttttttattcctaattagatggggttgaaagtctttttagaggaacctctacgttttacagccttaatatcaggtgtagtgagtctcaccactttattcttctttgtcaaggttgattagctatctgagatctttgccttttcatatagattttagagtaagtttgtctatgtctacataaaagcttgctgggatttcgaggccgggtacggtggctcacgcctttaatcacaacactttgggaggctgacgcaggtggattacttanggtcaggagtttgagaccagcctggctaacagtggaaccctgtctctaccaaaaaaatacaaaactgggcgtggtggctcacgcctgtaatcccagtactttgggaggccgaggtgggtggatcacgaggtcaggagatcgagaccatcctggcaaaacatggtgaaaccccgtctccactaaaaaatacaaaaaaaat

SEQ ID NO: 38875 - DNA, 482 bp, Homo sapiens
gcgcaaccatcactaaagggaacaaaagctgagtaccgtgccgggccccccctcgagagtacttctagaattaattaacgcgggactgctaacaattagtccatcactatcccctcaagtcaaaataatgcccatcagacctcaggggcggggtgactacccaagatagccatctgaacgtgcacacggacccaattttcctgtaacctcaaggtggtgtaaaaggggcaaccatctggtcatttcttcgagttttttttatattttgtataactcctgtgcacataataaaatatgtaagcctatttttctgctaatgtgtgtactatcagtttgttttatggactcacccctaaggagaaaaatgtaaatttacctacatgtgaaatttagtttggagcttggctgccgtggacctagctaaaactgggtggcctgggctctcccttcccagataaaacttctttttttttttctttctg

SEQ ID NO: 38876 - DNA, 512 bp, Homo sapiens
  misc_feature 35: n = A,T,C or G
cgaattggagctctatccgcggtggcggccgcttnttttttttttttttttttttttaacttttaatttctgatcgagtcacagattgatttgttgagtagcttcagcacttcttcctttgtcatttttttctgtctgataagtcatgccatggacgttacccatttttatcccaaggcctcttacgttgacttgaaaagacggactatgtctttcagagatcttgtgggtatcacatcaatcttgacaaattttctaccctccaagtcatgatcctaagaacagcttgcctcccatttctccggtttgtgctattatgaaggccttattgtttcagccttcttcaatcttgagggttgttgtcactgtatgggtggttcagaaataagtaggtcctgttactatgaagggggtcacagcttttgttggcatatctaaactttgtggctcatggaacagtatgaatgcagaatgtagctttctccacttgtggactgctttgcatagctgcc

SEQ ID NO: 38877 - DNA, 381 bp, Homo sapiens
ccctactaaagggaacaaagctgggtaccgggccccccctcgagagtacttctagaattaattaacgcggggaatccggtgcggacgcacgcgaactctgcccgggagccgaggtgacgatctacccggtctcggtaataaatatttgcaaaacacatctgaccaaaatcctgttaacttcatgaaggctcactttatacgatgatttttgacgaaccatcttattaatgagattacaccaaaagcataaacaatttatacgtcaaactccgactgaaaaaaaaaaataaccgattaggatgttttttaaatgtactgtactctcaaataacatgacaaatttgacctgttcaattaatagaaatgaagtggctaaaaatg

SEQ ID NO: 38878 - DNA, 446 bp, Homo sapiens
atagggcgaattggagctccaccgcggtggcggccgctttttttttttttttttttttttttttttttactggaattgttgttatagtgcttccgttatttatttttattttttttattatactttaagttttagggtacatgtgcacaacgtgcaggtttgctacatatgtatacatgtgccatgttggtgtgctggactcattaactcgtcatttatattaggtatatatacgtgttcattgtacccttatcgactttgcagcatgcttatccatctaactattcatctttatttgccttcgttttttgagttcccttattcatcctaaaacaaaatataatgcctgactcatagtcagacttcacagtatttttaaatgaattacattgcattggggaaatataaatagtaatgtccttttatagaggaagtctaaaagaaat

SEQ ID NO: 38879 - DNA, 634 bp, Homo sapiens; identical to SEQ ID NO: 32242

SEQ ID NO: 38880 - DNA, 424 bp, Homo sapiens
cactatagggcgaattggagctccaccgcggtggcggccgcttttttttttttttttttttttttgggatgctcaacctataatacccaaaggctctatttcagtagaatttattggtttgctgattatagcagtgacatagttgcattctagagaccttagaaaatgcagaaaatttcaagaaaaacatttaaattgtgctcatagtgaaactgagaggtgaccactcttaatattttgtggcataagcattccagtcttttatctttctcaaagtttcacataaactttctcaaaggccattaaatacttttccatagcctgattttttgtgaccacatagtatcctattatattgataataccataatttacctaacccatttttatatatttgggattttttccaattcatcattattat

SEQ ID NO: 38881 - DNA, 533 bp, Homo sapiens
gtatacgactcactatagggcgaattggagctccaccgcggtggcggccgcttttttttttttttttttttttttttttttgaggaaggcacctacaaaacgaaagtgcctagggcttacaaaagtcatatgtagcctttacaaatattagctcagtcattttcagaaaggtttttccaattatcatttagagatgaggaaactgaagctcagggaggctaggaaacttatccaaagcctcttaagaggctatgttagtcagactgggctaacagctgtaacaaccccagaatttaaatggcttaacacattaggagtttatttgttattgccataacaattcagggtgtatgtttggcaggtagtctacacagtgattcagggacccaggctccttccctctggtggctttttctccctctagtgctgggagctctccatgcagatggtggatggagaaagagaacaaaaagtgggggatttttataggccaggcctggaattggcccacatcacttccacacacattccac

SEQ ID NO: 38882 - DNA, 641 bp, Homo sapiens; identical to SEQ ID NO: 32258

SEQ ID NO: 38883 - DNA, 606 bp, Homo sapiens; identical to SEQ ID NO: 38868

SEQ ID NO: 38884 - DNA, 483 bp, Homo sapiens; identical to SEQ ID NO: 32281

SEQ ID NO: 38885 - DNA, 441 bp, Homo sapiens
accctcactaaagggaacaaaagctgggtaccgggccccccctcgagagtacttctagaattaattaacgcgggactgctaacaattagtccatcactatcccctcaagtcaaaataatgcccatcagacctcaggggcggggtgactacccaagatagccatctgaacgtgacacacggacccaattttcctgtaacctcaaggtggtgtaaaaggggcaaccatctggtcatttcttcgagttttttttatattttgtataactcctgtgcacataataaaatatgtaagcctatttttctgctaatgtgtgtactatcagtttgttttatggactcacccctaaggagaaaaatgtaaatttacctacatgtgaaatttagtttggagcttggctgccgtggacctagctaaaactgggtggcctgggctctcccttc

SEQ ID NO: 38886 - DNA, 439 bp, Homo sapiens
gcgcgcaattaaccctcactaaagggaacaaaagctgggtaccgggccccccctcgagagtacttctagaattaattaacgcggggggacgaagcgcagcctgcactcccagatccgctcattttcgttctgccctccgttttacgattcgcctacactgaaaatgcgtgagtggagtggaaagccttcctactcctgcctcagcgaccccttctaaaatactgcctcgtttggcctgaaaatgtgatttgcaggcttcctgagcaaagtagatttcactccattaaagaaaaaaaaaagaaaaggcaccgaacggggctcggctgtcgggagttttgctttaaaaaaaaaaaaaaaaaaaaaaaaaaaaaagcggccgccaccgcggtggagctccaattcgccctatagtgagtcgtattacgcgcgctcactggcc

SEQ ID NO: 38887 - DNA, 667 bp, Homo sapiens; identical to SEQ ID NO: 32312

SEQ ID NO: 38888 - DNA, 433 bp, Homo sapiens
ccagcgcgcataaccctactaaagggaacaaaagctgggtaccgggccccccctcgagagtacttctagaattaattaacgcgggactgctaacaattagtccatcactatcccctcaagtcaaaataatgcccatcagacctcaggggcggggtgactacccaagatagccatctgaacgtgacacacggacccaattttcctgtaacctcaaggtggtgtaaaaggggcaaccatctggtcatttcttcgagttttttttatattttgtataactcctgtgcacataataaaatatgtaagcctatttttctgctaatgtgtgtactatcagtttgttttatggactcacccctaaggagaaaaatgtaaatttacctacatgtgaaatttagtttggagcttggctgccgtggacctagctaaaactggg

SEQ ID NO: 38889 - DNA, 424 bp, Homo sapiens; identical to SEQ ID NO: 38880

SEQ ID NO: 38890 - DNA, 412 bp, Homo sapiens
gcgcgcactaaccctcactaaagggaacaaaacgctgggtaccgggccccccctcgagagtacttctagaattaattaacgcgggactgctaacaattagtccatcactatcccctcaagtcaaaataatgcccatcagacctcaggggcggggtgactacccaagatagccatctgaacgtgacacacggacccaattttcctgtaacctcaaggtggtgtaaaaggggcaaccatctggtcatttcttcgagttttttttatattttgtataactcctgtgcacataataaaatatgttaagcctatttttctgctaatgtgtgtactatcagtttgttttatggactcacccctaaggagaaaaatgtaaatttacctacatgtgaaatttagtttggagcttggctgc

SEQ ID NO: 38891 - DNA, 403 bp, Homo sapiens
ccctactaaagggaatcaaaagctgggtaccgggccccccctcgagagtacttctagaattaattaaggcgggctatttgtaccactacactccagcctgggtgacagagtgagactctctcaaacaaagaagaaaagataaacaaacaaaaaaaagaaaattgacatgttaattctaaaattaatatgaaaatttaaaaatttaaaataccaaagtaattttgaaaaataacaaagctggaaactggtcttgcctgactttgagacttgtaaagctataaaaattaagacagtgtgataataatctcaaactatacaaatagttaaatatgacagaacaggtagacccacatatatatagatagctgattttcaagagacatgcaaagttaattcatgggca

SEQ ID NO: 38892 - DNA, 420 bp, Homo sapiens
gccagcgcgcaattaaccctactaaagggaacaaaagctgggtaccgggccccccctcgagagtacttctagaattaattaacgcgggactgctaacaattagtccatcactatcccctcaagtcaaaataatgcccatcagacctcaggggcggggtgactacccaagatagccatctgaacgtgacacacggacccaattttcctgtaacctcaaggtggtgtaaaaggggcaaccatctggtcatttcttcgagttttttttatattttgtataactcctgtgcacataataaaatatgtaagcctatttttctgctaatgtgtgtactatcagtttgttttatggactcacccctaaggagaaaaatgtaaatttacctacatgtgaaatttagtttggagcttggctgccgtgga

SEQ ID NO: 38893 - DNA, 396 bp, Homo sapiens
gcgaattggagctccaccgcggtggcggccgcttttttttttttttttttttttttttttggaccagagaggccccaaactagcagcctgtcctcctcagtagccccagcatcccttcatcattttgttgcccttctatgggcctagtttaggtctgagaggcatagttttaaaattttaatggctatttattaattctagagataaggtcttgctatgtttcccaggctggtcttgaactcctggcctcaagcaatcctcctgcagcagcctcccaaagtgctgggattacaggcatgagccaccacgtttggtcaaacaggcatagttttacaaatatgtgggtggataaatgctgtccagtcttacttcatcacttttatcaattgaatgctt

SEQ ID NO: 38894 - DNA, 581 bp, Homo sapiens
  misc_feature 82: n = A,T,C or G
gcgtaatacgactcactatagggcgaattggagctccaccgcggtggcggccgctttttttttttttttttttttttttttnggaccagagaggccccaaactagcagcctgtcctcctcagtagccccagcatcccttcatcattttgttgcccttctatgggcctagtttaggtctgagaggcatagtttaaaatttttattgttatttatttattctagagataaggtcttgctatgtttcccaggctggtcttgaactcctggcctcaagcaatcctcctgcagcagcctcccaaagtgctgggattacaggcatgagccaccacgtctggtcagacaggcatagttttacaaatatgtgggtggataaatgctgtccagtcttacttcatcacttctatcaattgaatgcttttggttggaaataacagaaaatccaactaaaagtgacttaaacaaaggaaatgttattatctcatgtaccaggaattctggaggtagactggttcaagggtggattaattaattctagaaatactctcgagggggggcccggtacccaacttttgttcccttta

SEQ ID NO: 38895 - DNA, 628 bp, Homo sapiens
gcgcaattaaccctcactaaagggaacaaaagctgggtaccgggccccccctcgagagtacttctagaattaattaacgcgggtccaggtctctgagtccattctttgggtttggacaggtaggtttgtttctcacaataccaggtataataccagtagaatgtttcatataatttaacaagtcattataaaatgtacttgaaattgcaaagagccacaaaaaaaacccagacaatattgatgaagaaaagacgaagtcagaggacctatactacaagatatcaatataaattataaaggtaccataattaaaactgtggaactggagtaaacatggacaagtagaccaatgtagttaaaaacaattctgaaaaagacccacgcatatatagatgcttgatttattaccatgttgctactataaacaagggaaaactgtttttttaaaataaattatgctgagtcaggccaggcacagtggctcgcgcctgcaatcccagcactttgggaagccaaggttggctgatcacttgaggccaggagttcaagaccagcctgacaaacatggcaaaacccctatctttactaaaattatgaacattagactggctcggtggcacacgcctgt

SEQ ID NO: 38896 - DNA, 511 bp, Homo sapiens
tagggcgaattggagctccaccgcggtggcggccgcttatttttttttttttttttttttttttgaagaatcaacacactctatatttgatcacaaagcaaaagtttaagtgtattacttaaaattttaagacaaaatctggaataattataactaacacaaattttgaggtagagaagagaattctagagataggtgagataaaattttcatctttgataatgagtaaacaaaaacactacctttaacaagtgaagaatttaaaaaatttagagaagaggaaatcataagtggtttttaaaatttattatacatatcggggtaaagataatccaacataaaatgagatttgaacagacacttcacaggagatagacaaatgtttcaacctcattagtcaccagacaaatgcaaattaaactcaaaatgcaatacctgtacacacctcacagaatggataaaacttgaaagactgacaaaccaaaccaacacaaagctggtctgaatgtgg

SEQ ID NO: 38897 - DNA, 561 bp, Homo sapiens
gactcactatagggcgaattggagctccaccgcggtggcggccgcttttttttttttttcttttttttttttttaaaagcaaaactcccgacagccgagccccgttcggtgccttttcttttttttttctttaatggagtgaaatctactttgctcaggaagcctgcaaatcacattttcaggccaaacgaggcagttttttagaaggggtcgctgaggcaggagtaggaaggctttccactccactcacgcattttcagtgtaggcgaatcgtaaaacggagggcagaacgaaaatgagcggatctgggagtgcaggctgcgcttcgtccccccgcgttaattaattctagaagtactctcgagggggggcccggtacccagcttttgttccctttagtgagggttaattgcgcgcttggcgtaatcatggtcatagctgtttcctgtgtgaaattgttatccgctcacaattccacacaacatacgagccggaagcataaagtgtaaagcctggggtgcctaatgagtgagctaactcacattaattgcgttgcgctca

SEQ ID NO: 38898 - DNA, 185 bp, Homo sapiens
acctggactggaatctaacactgtgagtactccccaggatccgtgttcctctctttagcccaggcatgcagttacattacattttccaaccttccttgcagttagctacgatcacgtgactgcattctggccagtggaatgtgtgtggaagtgatgtgggccaattccaggcctgggcctataaa

SEQ ID NO: 38899 - DNA, 403 bp, Homo sapiens
ccctcactaaagggaaaaaagctgggtaccgggccccccctcgagagtacttctagaattaattaacgcgggttcgtcctaaggaccactgtctgtgctgtgtctttcaaaggtcagaagagattgaacctttgtgtttttattttccctgtgtttgctttttctcatggggaacctgtgttgctgctttgaaggtatattcatactggcctttcaaatgccagctcttcaaattactagttaaggctttcaaaatatgttatttaaaaaattatcctctgtattttccatatgcagttataagtaggtttcatggttatgttttattcctcagtttatacatttgattattgtaccaagcagagtacctttgaaattttttttcatttaaaaaatatggatc

SEQ ID NO: 38900 - DNA, 641 bp, Homo sapiens
agctccaccgcggtggcggccgctttttgtttttttttttttttttttgctgagatcttcttattcaacccatatcaatttgactggacttgtagcattcaaatattaacacagatttcaaattttagaaagatatttgtactagaatacttgtcaggaactctgtggatttcattagtatggaaattgtttataaagacacactctgaatttttgtggtcaagtagggtttgtagaatctttgatagcccagcatgttaaaatgtaaatgttctagaaaaataatctttcactttccctgtgaaaagaccccgcaaaaagttttttgaggggtgtgttaaatatataaattttgaaagacgtaaacaaaatagttaactatctacttatgatatttaatagtttggccaggcatggcaactcatgcctgttgtaatcccagcgtattgggcggctgaggtaggaggattgtgtgagcccaggcgtttgagactgcagtgagctatggatcctgcctggatgacagggcaagaccccaagtcaaaaaaaaaaagtaatagtttaatgaacatttaaaaacacattgtttggaataatgtgtgttagaaaattgcttttttcttacttacattacataaaac

SEQ ID NO: 38901 - DNA, 647 bp, Homo sapiens
acgactactatagggcgaattggagctccaccgcggtggcggccgcttttttttttttttttttttttttgggatgctcaacctataatacccaaaggctctatttcagtagaatttattggtttgctgattatagcagtgacatagttgcattctagagaccttagaaaatgcagaaaatttcaagaaaaacattaaattggtgctcatagtgaaactgagaggtgaccactcttaatattttgtggcataagcattccagtcttttatctttctcaaagtttcacataaactttctcaaaggccattaaatacttttccatagcctgattttttgtgaccacatagtatcctattatattgataataccataatttacctaacccatttttatatatttggattttttccaattcatcattattatgaataatggtgtatctcagtggttattactttgcactgcatttcttatgaaagtattgagtaaaaggaagtaaagccctctcagagtgttttgtaggctgtcacatttcactccataatgtcctagtgtttgttgccaccagtgatatatgaaggtacccactgaaatgtcacacctttttggtttcctttttaaaataaaaaataaaaaagacattta

SEQ ID NO: 38902 - DNA, 448 bp, Homo sapiens
gcgcgcataaccctactaagggaacaaaagctgggtaccgggccccccctcgagagtacttctagaattaattaacgcgggactgctaacaattagtccatcactatcccctcaagtcaaaataatgcccatcagacctcaggggcggggtgactacccaagatagccatctgaacgtgacacacggacccaatttttcctgtaacctcaaggtggtgtaaaaggggcaaccatctggtcatttcttcgagttttttttatattttgtataactcctgtgcacataataaaatatgtaagcctatttttctgctaatgtgtgtactatcagtttgttttatggactcacccctaaggagaaaaatgtaaatttacctacatgtgaaatttagtttggagcttggctgccgtggacctagctaaaactgggtggcctgggctctccctt

SEQ ID NO: 38903 - DNA, 477 bp, Homo sapiens
ctaaagggaacaaaagctgggtaccgggccccccctcgagagtacttctagaattaattaaggcgggagaaggaaagagaaagtggaattaagggacaagaaagaggaagtggaattaagggacaaggggagaaaagcttaggcgaatcaacggattgcaatctatcatctgctaggaatgaacaagacaacatcaaatgaagagctgtcagctggaccatacaaaaagctaaatgtacacaaaaggttttttttttttccttttaaatctaccatactgcttcagttcatttccaatgcaacaatctactcaacaccaaaaatggtcatatctatcataaatacagaaagtcagtttttaaaacttattttttttaagctacaagtcctcaacactctttgtgtgtgtgggttattatttttttttttttgaaagtgggagtgcttaacttttccccttgaaattggcttcagcag

SEQ ID NO: 38904 - DNA, 478 bp, Homo sapiens
accctactaaagggaacaaaagctgggtaccgggccccccctcgagagtacttctagaattaattaacgcgggggaaaactgtcttacttaaacaaaatgtattttaggaaggtgcctgtttcaagggtttattactgttttataactaacagacttgggactttagtatacgaaaaggtgtcatttcaaatgggggaaaatgaattatttcaccaaatgatcttgggacaactggatagccattcagaaaaaaagtgaagctggaacactataacatgctttaccccacaataaatcacagttaaatgtaatatagaaaaaaataacacacgctcaatggagcggccgccaccgcggtggagctccaattcgccctatagtgagtcgtattacgcgcgctcactggccgtcgttttacaacgtcgtgactgggaaaaccctggcgttacccaacttaatcgccttgcagcacatacc

SEQ ID NO: 38905 - DNA, 480 bp, Homo sapiens; identical to SEQ ID NO: 32337

SEQ ID NO: 38906 - DNA, 395 bp, Homo sapiens
gactcactatagggcgaattggagctccaccgcggtggcggccgcttttttttttttttttttttttttttgaaatatgcccacccatttcaggttgagccacggataaggagggcttagctcatgtctcctgtgggaattgaggcatctcaggaaacagtatagagttggtacagttagaatgagaagaagcctggggaaagaaaccaagagtgagaaatgcgtggctattttgacttagctggagcaaccctctcataacaggctgggaagtggacccgcgttaattaacgcgggggaaattgatgaacaaacaaaggtcatagtaaaagacagacttttggggataaaaacagaaactccaagtactgtatcaacaaatgcaagtacaccac

SEQ ID NO: 38907 - DNA, 280 bp, Homo sapiens
gtatacgactcctatgggcgattggagctcaccgcggtggcggccgctttttttttttttttttttttttttttggggaggagtagagaaatgactaattttttcattggtgagtaatatgctacaaagactcgtagaatcatatacttttggacctggaaagtagcttaaggaccatctgattaaaattttaagttttattgatgaagaaattaagctcaagaaaggctggtacttgtccaagatcacagaagtattaactattgaagcttgagaaaac

SEQ ID NO: 38908 - DNA, 634 bp, Homo sapiens; identical to SEQ ID NO: 32242

SEQ ID NO: 38909 - DNA, 634 bp, Homo sapiens; identical to SEQ ID NO: 32242

SEQ ID NO: 38910 - DNA, 407 bp, Homo sapiens
atacgactcactatagggcgaattggagctccaccgcggtggcggccgcttttttttttttttttttttttttttgaaatatgcccacccatttcaggttgagccacggataaggagggcttagctcatgtctcctgtgggaattgaggcatctcaggaaacagtatagagttggtacagttagaatgagaagaagcctggggaaagaaaccaagagtgagaaatgcgtggctattttgacttagctggagcaaccctctcataacaggctgggaagtggacccgcgttaattaacgcgggggaaattgatgaacaaacaaaggtcatagtaaaagacagacttttggggataaaaacagaaactccaagtactgtatcaacaaatgcaagtacaccacaatcagtg

SEQ ID NO: 38911 - DNA, 593 bp, Homo sapiens; identical to SEQ ID NO: 32228

SEQ ID NO: 38912 - DNA, 408 bp, Homo sapiens
gcgcgtatacgactcactatagggcgaattggagctccaccgcggtggcggccgctttttttttttttttttttttttttttttgaagaatcaacagactctatatttgatcacaaagcaaaagtttaagtgtattacttaaaattttaagacaaaatctggaataattataactaacacaaattttgaggtagaggaagagaattctagagataggtgagataaaattttcatctttgataatgagtagacaaaaacactacctttaacaagtgaagaatttaaaaaatttagagaagaggaaatcataagtggtttttaaaatttattatgcatatacgaggtaaagataattccaacagaaaatgagatttgaacagtactcttaacaggatatagacaattgtt

SEQ ID NO: 38913 - DNA, 139 bp, Homo sapiens
ttttttttttttttttttttggaggtttctatttttattcaactacaagcaaacagcacaattaatgcaacattcagcaactcaagaccagcttttcttacccccatgaagaacgatcaatttaaaaaacacagatctc

SEQ ID NO: 38914 - DNA, 356 bp, Homo sapiens
tagggcgaattggagctccaccgcggtggcggccgcttttttttttttttttttttttttttgagagacaaacatgggccacatttttaagacaaacatggaccacaaccatgctgagagaacttagagtgaagtttacatggctatctttcttagtattagaaattttacctgataaacatcaaacatacgaccaacataggcatataaagcagctctacagatattttcctactgcccaaaatatcatataatgcacatgtaggtcacatgtgagtaggcaagagattctggaacacagaagcaagacaacaggatcacagcaattcagtatgctctgcttgttataggaaatc

SEQ ID NO: 38915 - DNA, 449 bp, Homo sapiens
  misc_feature 61: n = A,T,C or G
tatagggcgaattggagctccaccgcggtggcggccgcttttttttttttttttttttttnttttttttcacattaaactctgatttattggggggtaaagcatgttatagtgttccagcttcactttttttctgaatggctatccagttgtcccaagatcatttgttgaataattcattttcccccatttgaaatgacacccttttcgtatactaaagtcccaagtcttttagttataaaacagtaataaacccttgaaacaggcattttcctaaaatacattttgtttaagtaagacagttttcccccgcgttaattaattctagaagtactctcagggggggcccggtacccagcttttgttccctttagtgagggttaattgcgcgcttggcgtaatcatggtcatagctgtttcctgtgtgaaattgttatccgctcacaattc

SEQ ID NO: 38916 - DNA, 366 bp, Homo sapiens
gcgaattggagctccaccgcggtggcggccgctttttttttttttttttttttttttttgcaaataacgtgccttttattgggcactggctctttttgagcccggagtcccgcccccgccctctctcgaagaactggccagactttttgcaaacgccttgaagggtagaattagcagcgagctcttgaaactgcctctggagatggaactcagcggaattctcgaaaagaagagggacattaaaaagacgggtgcatgcactgatttccaagcgcagtttgtccatgttagtcttgtacatgcttgactccagtcagccaccgtaggccccgccttaattaattctagaagtactctcgagggggg

SEQ ID NO: 38917 - DNA, 628 bp, Homo sapiens
  misc_feature 564, 593: n = A,T,C or G
gactcactatagggcgaattggagctccccgcggtggcggccgctttttttttttttttttttttttttttttgaccagagaggccccaaactagcagcctgtcctcctcagtagccccagcatcccttcatcattttgttgcccttctatgggcctagtttaggtctgagaggcatagttttaaaatttttattgttatttatttattctagagataaggtcttgctatgtttcccaggctggtcttgaactcctggcctcaagcaatcctcctgcagcagcctcccaaagtgctgggattacaggcatgagccaccacgtctggtcagacaggcatagttttacaaatatgtgggtggataaatgctgtccagtcttacttcatcacttctatcaattgaatgcttttggttggaaataacagaaaatccaactaaaagtgacttaaacaaaggaaatgttattatctcatgtaccaggaattctggaggtagactggttcaagggtggattaattaattctagaagtactctcgagggggggcccggtacccagcttttgntccctttagtgagggttaattgcgcgctnggcgtaatcatggtcatagctgtttcctgtgtgaa

SEQ ID NO: 38918 - DNA, 354 bp, Homo sapiens
cgactactatagggcgaattggagctccaccgcggtggcggccgcttttttttttttttttttttttttttttttgaggagtttagaaattactaattttttcattggtgagtaatatgctacaaagactcgtagaatcatatacttttggacctggaaagtagcttaaggaccatctgattaaaattttaagttttattgatgaaaaaattaaatcttaaaaaaaggcttttttcttggccaaagatcacagaaagtattaatctattgaagcttgagaaaacagctcagttctctgcttcaaattatcagcctgaaactacatttgtataaataaaaataaactcaaccata

SEQ ID NO: 38919 - DNA, 424 bp, Homo sapiens; identical to SEQ ID NO: 38880

SEQ ID NO: 38920 - DNA, 634 bp, Homo sapiens; identical to SEQ ID NO: 32242

SEQ ID NO: 38921 - DNA, 489 bp, Homo sapiens
acgactactatagggcgaattggagctccaccgcggtggcggccgctttttttttttttttttttttttttttttgaccagagaggccccaaactagcagcctgtcctcctcagtagccccagcatcccttcatcattttgttgcccttctatgggcctagtttaggtctgagaggcatagttttaaaatttttattgttatttatttattctagagataaggtcttgctatgtttcccaggctggtcttgaactcctggcctcaagcaatcctcctgcagcagcctcccaaagtgctgggattacaggcatgagccaccacgtctggttagacaggcatagttttacaaatatgtgggtggataaatgctgtccagtcttacttcatcacttctatcaattgaatgcttttggttggaaataacagaaaatccaactaaaagtgacttaaacaaaggaaatgttattatcttatgtaccaggaatttt

SEQ ID NO: 38922 - DNA, 424 bp, Homo sapiens; identical to SEQ ID NO: 38880

SEQ ID NO: 38923 - DNA, 441 bp, Homo sapiens
gtaatacgactactatagggcgaattggagctccccgcggtggcggccgctttttttttttttttttttttttttttttggggattagtaaataaatctagaaatgagtactacgctacataaagagtaggtttagcaattttatttgtgttgccaaataatctccctttactttcacatatcctttcaaagtaaaataaaataatttatttataacaaaaaattattttttaatacaatagagaaaaaacttcaaatttccaacacgttttctaagggttcacaaacacttcaggcttgagtattcagatattaaaagagaaaatgccatcatcctttcttcgtattttctttatatgggccgcagatctgctttgccagaattgtcatactactgtccttacattcgtgtgtgaagccccttttcagataaataacagc

SEQ ID NO: 38924 - DNA, 652 bp, Homo sapiens
cgtatacgactcactatagggcgaattggagctccaccgcggtggcggccgcttttttttttttttttttttttttgggatgctcaacctataatacccaaaggctctatttcagtagaatttattggtttgctgattatagcagtgacatagttgcattctagagaccttagaaaatgcagaaaatttcaagaaaaacatttaaattgtgctcatagtgaaactgagaggtgaccactcttaatattttgtggcataagcattccagtcttttatctttctcaaagtttcacataaactttctcaaaggccattaaatacttttccatagcctgattttttgtgaccacatagtatcctattatattgataataccataatttacctaacccatttttatatatttggattttttccaattcatcattattatgaataatggtgtatctcagtggttattactttgcactgcatttcttatgaaagtattgagtaaaaggaagtaaagccctctcagagtgttttgtaggctgtcacatttcactccataatgtcctagtgtttgttgccaccagtgatatatgaaggtacccactgaaatgtcaccacctttttggttttcctttttaaaataaaaaataaaaaagacat

SEQ ID NO: 38925 - DNA, 423 bp, Homo sapiens
cttggagctccaccgcggtggcggccgcttttttttttttttttttttttttttggggaccagagaggccccttactagcagcctgtcctcctcaggagccccagcatcccttcatcatttggttgcccttctatgggcctagtttaggtctgagaggcatagttttaaaatttttattgggattcattgattctagagataaggtcttgctatgtttcccaggctggtcttgaactcctggcctcaagcaatcctcctgcagcagcctcccaaagtgctgggattacaggcatgagccaccacgtttggtcagacaggcttttttctacaaatatgtgggtggataaatgctgcccagccttacttcatcacttttatcaattgaatgcttttggttggaaataacaaaaaatccaactaaa

SEQ ID NO: 38926 - DNA, 467 bp, Homo sapiens
ccgcggtggcggccgctttttttttttttttttttttttttacttgaattgttgttatagtgcttccgttatttatttttattttttttattatactttaagttttagggtacatgtgcacaacgtgcaggtttgctacatatgtatacatgtgccatgttggtgtgctgcactcattaactcgtcatttatattaggtatatatacgtgttcattgtacccttatcgactttgcagcatgcttatccatctaactattcatctttatttgccttcgttttttgagttcccttattcatcctaaaacaaaatataatgcctgactcataatcagacttcacagtatttttaaatgaattacattgcattggggaaatataaatagtaatgtccttttatagaggaagtctaaaagaaattcttgggtgaaattgataatcaaacatttttaagaaggtatatttgct

SEQ ID NO: 38927 - DNA, 475 bp, Homo sapiens
atagggagtcaccgactactatagggcgaattggagctccaccgcggtggcggccgcttttttttttttttttttttttttgggatgctcaacctataatacccaaaggctctatttcagtagaatttattggtttgctgattatagcagtgacatagttgcattctagagaccttagaaaatgcagaaaatttcaagaaaaacatttaaattgtgctcatagtgaaactgagaggtgaccactcttaatattttgtggcataagcattccagtcttttatctttctcaaagtttcacataaactttctcaaaggccattaaatacttttccatagcctgattttttgtgaccacatagtatcctattatattgataataccataatttacctaacccatttttatatatttggattttttccaattcatcattattatgaataatggtgtatctcagtggttattactttgcac

SEQ ID NO: 38928 - DNA, 594 bp, Homo sapiens
ggcgaattggagctccaccgcggtggcggccgctttttttttttttttttttttttttttttgggggagtagagaaatgactaattttttcattggtgagtaatatgctacaaagactcgtagaatcatatacttttggacctggaaagtagcttaaggaccatctgattaaaattttaagttttattgatgaagaaattaagctcaagaaaggctgttacttgtccaagatcacagaagtattaactattgaagcttgagaaaacagccagttctctgctcaaatttcagctgaaactacattgtataataaaataactcaacataacattacaacagaatagtttaaactttttctagtcagtggcaacttagggtagggaagatccaaagggatttttaaacaagtttgttgaaattatgtaagaaaattaacttcatcagtgaattgagatttagtaagcgttcttgagcttctaaattaacacttcaatttttatatgctacagggctattaattatgtatctgatcttaattacttatggtcaaaatatttttaaagcaccaagttccccatgttttaagaatttggg

SEQ ID NO: 38929 - DNA, 493 bp, Homo sapiens
gactactatagggcgaattggagctccaccgcggtggcggccgctttttttttttttttttttttttggggatgctcaacctataatacccaaaggctctatttcagtagaatttattggtttgctgattatagcagtgacatagttgcattctagagaccttagaaaatgcagaaaatttcaagaaaaacatttaaattgtgctcatagtgaaactgagaggtgaccactcttaatattttgtggcataagcattccagtcttttatctttctcaaagtttcacataaactttctcaaaggccattaaatacttttccatagcctgattttttgtgaccacatagtatcctattatattgataataccataatttacctaacccatttttatatatttggattttttccaattcatcattattatgaataatggtgtatcttcagtggttattactttgcactgcatttcttatgaaagtattgagtaaaag

SEQ ID NO: 38930 - DNA, 633 bp, Homo sapiens
gactcactatagggcgaattggagctccaccgcggtggcggccgcttttttttttttttttttttttttgggatgctcaacctataatacccaaaggctctatttcaggagaatttattggtttgctgattatagcagtgacatagttgcattctagagaccttagaaaatgcaaaaaatttcaagaaaaacatttaaattgggctcatagtgaaactgagaggtgaccactcttaatattttgtggcataagcattccagtcttttatctttctcaaagtttcacataaactttctcaaaggccattaaatacttttccatagcctgattttttgtgaccacatagtatcctattatattgataataccataatttacctaacccatttttatatatttggattttttccaattcatcattattatgaataatggggtatctcagtggttattactttgcactgcatttcttatgaaagtattgagtaaaaggaagtaaagccctctcagagtgttttgtaggctgtcacatttcactccataatgtcctagtgtttgttgccaccagtgatatatgaaggtacccactgaaatgtcacacctttttgggtttcctttttaaaataaaaaat

SEQ ID NO: 38931 - DNA, 401 bp, Homo sapiens
gactactatagggcgaattggagctccaccgcggtggcggccgcttttttttttttttttttttttttgggatgctcaacctataatacccaaaggctctatttcagtagaatttattggtttgctgattatagcagggacatagttgcattctagagaccttagaaaatgcagaaaatttcaagaaaaacatttaaattgggctcatagtgaaactgagaggtgaccactcttaatattttgtggcataagcattccagtcttttatctttctcaaagtttcacataaactttctcaaaggccattaaatacttttccatagcctgattttttgtgaccacatagtatcctattatattgataataccataatttacctaacccatttttatatatttgg

SEQ ID NO: 38932 - DNA, 667 bp, Homo sapiens; identical to SEQ ID NO: 32312

SEQ ID NO: 38933 - DNA, 677 bp, Homo sapiens
gcgtatacgactcactatagggcgaattggagctccaccgcggtggcggccgcttttttttttttttttttttttttgggatgctcaacctataatacccaaaggctctatttcagtagaatttattggtttgctgattatagcagtgacatagttgcattctagagaccttagaaaatgcagaaaatttcaagaaaaacatttaaattgtgctcatagtgaaactgagaggtgaccactcttaatattttgtggcataagcattccagtcttttatctttctcaaagtttcacataaactttctcaaaggccattaaatacttttccatagcctgattttttgtgaccacatagtatcctattatattgataataccataatttacctaacccatttttatatatttggattttttccaattcatcattattatgaataatggtgtatctcagtggttattactttgcactgcatttcttatgaaagtattgagtaaaaggaagtaaagccctctcagagtgttttgtaggctgtcacatttcactccataatgtcctagtgtttgttgccaccagtgatatatgaaggtacccactgaaatgtcacacctttttggttttcctttttaaaataaaaaataaaaaagacatttaaccatataatattgttcttata

SEQ ID NO: 38934 - DNA, 196 bp, Homo sapiens
cgactcactatagggcgaattggagctccaccgcggtggcggccgcttttttttttttttttttttttttggtcttttctgtatttttttttttttaaatcaactaaaacaatttgatgcttaaaataaaagacaggaaatatttcctgatgagactttattcgagaatatagattttatttctgatcccgggggc

SEQ ID NO: 38935 - DNA, 433 bp, Homo sapiens
gtaatacgactactatagggcgaattggagctccaccgcggtggcggccgctttttttttttttttttttttttttttttggaggagtagagaaatgactaattttttcattggggagtaatatgctacaaagactcgtagaatcatatacttttggacctggaaagtagcttaaggaccatctgattaaaattttaagttttattgatgaagaaattaagctcaagaaaggctgttacttgtccaagatcacagaagtattaactattgaagcttgagaaaacagccagttctttgctcaaatttcagctgaaactacattgtataataaaataactcaacataacattacaacagaatagtttaaactctttttagtcagtggcaacttagggtagggaagatccaaagggatttttaaacaagtttgttg

SEQ ID NO: 38936 - DNA, 339 bp, Homo sapiens
tatagggcgaattggagctccaccgcggtggcggccgcttttttttttttttttttttttttttgaaatatgcccacccatttcaggttgagccacggataaggagggcttagctcatgtctcctgtgggaattgaggcatctcaggaaacagtatagagttggtacagttagaatgagaagaagcctggggaaagaaaccaagagtgagaaatgcgtggctattttgacttagctggagcaaccctctcataacaggctgggaagtggacccgcgttaattaacgcgggggaaattgatgaacaaacaaaggtcatagtaaaagacagacttttgggg

SEQ ID NO: 38937 - DNA, 379 bp, Homo sapiens
attggagctccaccgcggtggcggccgcttttttttttttttttttttttttgggatgctcaacctataatacccaaaggctctatttcagtagaatttattggtttgctgattatagcagtgacatagttgcattctagagaccttagaaaatgcagaaaatttcaagaaaaacatttaaattgtgctcatagtgaaactgagaggtgaccactcttaatattttggggcataagcattccagtcttttatctttctcaaaggttcacataaactttctcaaaggccattaaatacttttccatagcctgattttttgtgaccacatagtatcctattatattgataataccagtgatttacctaacccatttttata

SEQ ID NO: 38938 - DNA, 565 bp, Homo sapiens
ctatacggcgaattggagctccaccgcggtggcggccgcttttttttttttttttttttttttttttggaccagagaggccccaaactagcagcctgtcctcctcagtagccccagcatcccttcatcattttgttgcccttctatgggcctagtttaggtctgagaggcatagttttaaaatttttattgttatttatttattctagagataaggtcttgctatgtttcccaggctggtcttgaactcctggcctcaagcaatcctcctgcagcagcctcccaaagtgctgggattacaggcatgagccaccacgtctggtcagacaggcatagttttacaaatatgtgggtggataaatgctgtccagtcttacttcatcacttctatcaattgaatgcttttggttggaaataacagaaaatccaactaaaagtgacttaaacaaaggaaatgttattatctcatgtaccaggaattctggaggtagactggttcaagggtggattaattaattctagaagtactctcgagggggggcccggtacccagcttttgttccctt

SEQ ID NO: 38939 - DNA, 493 bp, Homo sapiens
cggtggcggccgctttttttttttttttttttttttggggagagacaaacatgggccacatttttaagacaaacatggaccacaaccatgctgagagaacttagagtgaagtttacatggctatctttcttagtattagaaattttacctgataaacatcaaacatacgaccaacatagcatataaagcagctctacagatattttcctactgcccaaaatatcatataatgcacatgtaggtcacatgtgagtaggcaagagattctggaacacagaagcaagacaacaggatcacagcaatttcagtatgctctgcttgttataggaaatccccagaacattctccaattactgaacaaaaaaagcaataaaactcagatttgtctgcctggggagaaataaacagaattagagagtgaatagcaaaacaaagctatctggtgaaaagacattcttacttggaaggagttaagattttgccccttccatgg

SEQ ID NO: 38940 - DNA, 527 bp, Homo sapiens
  misc_feature 71, 72, 73: n = A,T,C or G
acgactcactatagggcgaattggagctccaccgcggtggcggccgctttttttttttttttttttttttnnntttacatttaactctgatttattgtggggtaaagcatgttatagtgttccagcttcactttttttctgaatggctatccagttgtcccaagatcatttgttgaataattcattttcccccatttgaaatgacaccttttcgtatactaaagtcccaagtctcttagttataaaacagtaataaacccttgaaacaggcattttcctaaaatacattttgtttaagtaagacagttttcccccgcgttaattaattctagaagtactctcgagggggggcccggtacccagcttttgttccctttagtgagggttaattgcgcgcttggcgtaatcatggtcatagctgtttcctgtgtgaaattgttatccgctcacaattccacacaacatacgagccggaagcataaagtgtaaagcctggggtgcctaatgagtgagctaactcacattaa

SEQ ID NO: 38941 - DNA, 589 bp, Homo sapiens
  misc_feature 78: n = A,T,C or G
gcgtaatacgactcactatagggcgaattggagctccaccgcggtggcggccgctttttttttttttttttttttttnggggggaagatgaagaaatttcactcaagtattttgttactttaagattcaatgctggacactagaccagctataacattttcagatagagtgacttcatgcgtgaaatgatcacatacaatgaagaggttttaaaaaatacagatgacataacttgttcagttgaagaaaattaaaatactgatataaactaaatcattctcctcttcattttagggggatttttctctgcaattgtactgatttatgactagaaagctgaagactgatttgagcctctttagcaatactctatttcaccatttatcttccaaagaattatggctattttatttcttccaatgaagctggaaaattataatatgccagcagatcagtagaaatgtaaaaatattagtagttacccttttagatccaacttacctgtagtgaaatagcagcaatgcattctctatttgaggacaaaacataaaaaccctggctttataaacatagaagtttaaaaaatctc

SEQ ID NO: 38942 - DNA, 438 bp, Homo sapiens
tatagggcgaattggagctccaccgcggtggcggccgcttttttttttttttttttttttttttttttagagggagtcttactccgtcacccaggctggagtgggggggtgtgatctcagctcacagcaacctgacctcaggtgattcacccgcctctgtctcccaaagtgctgggattacaggcgtgagccactgcgcccggcgtctttgaattttttaaactgaagtttaattgcctttgagtttgatcattcactatttgccattggtatttcttttgttaattatctgctcatgctctaatttaataagggaaatttaatggattaacatatgacacccactatcacccgccttaattaattctagaagtactcttgagggggggcccgggccccaacttttgttccctttagggagggttaattgcgcgcttg

SEQ ID NO: 38943 - DNA, 443 bp, Homo sapiens
tatagggcgaattggagcttcaccgcggtggcggccgctttttttttttttttttttttttttttttgggggattccatttttatgaaatgtccagaacagggaaaacctattttagacaacagagacacaaagtcgatcagcagttgccaggggaggaggaagacgggaggggaaatgattgcttcacggggtgatgacagaatgttccagaacgtgacagaggtggtgcctacacaactttctggatgtactaaatgccgctgattgttcactttcaagtgattgatttttaggttatttgaatttcatctcaattaaaaaacccaaacacgcaaactgctcccgccagcttagccccgagcagacggcgcagcccgtggaggatgctgagccacccaggcttttccccgccttaattaattctagaagtactttcgaggg

SEQ ID NO: 38944 - DNA, 339 bp, Homo sapiens; identical to SEQ ID NO: 38936

SEQ ID NO: 38945 - DNA, 436 bp, Homo sapiens
atcgggcgaattgtagctccaccgcggtggcggccgcttttttttttttttttttttttttttttttttttttttttttttttttttttttttttttttttttttttttttttttttttttgggccaaaaaaaaaatttaaaaggaaaaaaccttaccaaaattcgggaggggaaaaaccaaacaagggggctccccaaaaaaaatcttatttgggggaggtaaaaaccccctttggggctccccgggattatcttcaggggcccctcttaattttattcagggccccccggaaaaattaagttcctacagccccgggttaaaaaattctaaaagcccccccgggggggggcccggaccccaacttttgtccccttaaggggggggaaaatgcccccttggggaaaaaaggggcaaagctgtttcccgggggaaaa

SEQ ID NO: 38946 - DNA, 410 bp, Homo sapiens
gcggccgctttttttttatgtttttttttgttatatcacaggggcataaagaacattattccttggaaggaaatatcattttatttaagcaacagtaacatttgaaatacccttttttccccatggagctacatctctgttccagattattaagtgtaaaaccagcaatccaatcattttttatcctggataacatagtcttatcaaatatttccctgggggatataattggaagggaagaatttcattaacatttaagctccccgcgttaattaattctagaagtactctcgagggggggcccggaacccagctttggttccctttagggagggttaatggcgcgcttggcgtaatcatgggcatagctgtttcctgggggaaatggttatccgctcacaattccacac

SEQ ID NO: 38947 - DNA, 446 bp, Homo sapiens
actactatagggctaattggagctccaccgcggtggcggccgctttttttttttttttttttttttttggagacggggttttgctgtgttggccgggctggtctccagctcctaaccgagagtgatccgccagcctcggccttccgaggtgccgggattgcataccgactctcgttcactcagtgctcaatggtgcccaggctggagtgcagtggcgtgatcttggctcgctacaaccttcaccttccatccgactgccttggccccccaaagtgccgagattgcagcctttgcccagccggcatccaatttgggaagggaggtatcatgtctgcctggccccccatcgactgggatctgacgagcctatttgtctaagtgctcattctggaaagcgaggaacctatctgtccggccctcatacgatgtaagaagcgaggagcgcc

SEQ ID NO: 38948 - DNA, 467 bp, Homo sapiens
cgccagcgcgcaattaaccctactaaagggaacaaaagctgggtaccgggccccccctcgagagtacttctagaattaattaacgcgggttgtcatacaagaagtactccaatttttctctccatctctccacctgctttttgaatattggcgcatcttacaataagctcttcccttcatggtccaagataaacgtaaacaatttccaaggttccatgcatcctcatcttcaccccacactttaaaactatcatttctagtccacccctgagatttgatctgattggactagcgttgatcaagtgtccaccccttgaacccatctctgtggccaggaaaaaggaacgataggctaagtcatatactccacccttggagcaggggcatgagtcagcttctccagaaccagatggagccccgctcagaaatcaggggctattgggtcaagggaagaaaaaaataaatgc

SEQ ID NO: 38949 - DNA, 460 bp, Homo sapiens
ctactatagggcgaattggagctccaccgcgggggcggccgcttttttttttttttttttttttttttttttgggggcccgggctggagtgcattggaatgaatttggctcactgcaacctggagctcccatgttcaagctgatatgatgcctcaccctcctgagtagctgggattacaagcacccgcgttaattaattctagaagtactctcgagggggggcccggtacccagcttttgttccctttagtgagggttaattgcgcgcttggcgtaatcatggtcatagctgtttcctgtgtgaaattgttatccgctcacaattccacacaacatacgagccggaagcataaagtgtaaagcctggggtgcctaatgagtgagctaactcacattaattgcgttgcgctcactgcccgctttccagtcgggaaacctgtcgtgccagctgcattaatga

SEQ ID NO: 38950 - DNA, 452 bp, Homo sapiens
ctatagggcgattcggacgctccaccgcggtggcggccgcttttttttttttttttttttttttttttttgaggaaggcacctacaaaacgaaagtgcctagggcttacaaaagtcatatgtagcctttacaaatattagctcagtcattttcagaaaggtttttccaattatcattttagagatgaggaaactgaagctcagggaggctaggaaacttatccaaagcctcttaagaggctatgttagtcagactgggctaacagctgtaacaaccccagaatttaaatggcttaacacattaggagtttatttgttattgccataacaattcagggtgtatgtttggcaggtagtctacacagtgattcagggacccaggctccttccctctggtggctttttctccctctagtgctgggagctctccatgcaaatggtggatggagaaag

SEQ ID NO: 38951 - DNA, 449 bp, Homo sapiens
actactatagggcgattggagctccccgcggtggcggccgctcgctttttttttttttttttttttttttgggattctgttccccttctgataatacagtataagaatataacaaatagatatttaattccccttaaatatgtgtggatattttctgaatggcctaagcatctcttactgtgagtcatttctgcaaatgaacaaactcattcattatgaagtaattcttactagtgtctctctgaaaatgacttttttttttttaactttaatctcttacctccaaattccaaaggtacatattacagctcttatgaatgtcctgaagcatgctaggggagttattttgctgccttagcccttgggattagaattttgtatagtagatatttaatgaatgtttatagggcttatgatcaaacttggtacataagctataaaaatgaaag

SEQ ID NO: 38952 - DNA, 445 bp, Homo sapiens
taaagggattaaagctgggtaccgggccccccctcgagagttcttctagaattaattaaggcgggggcacaggactgtacttttggtagcggtgcggggccgcccgcggactttagccctgcatagagatgggtagaccctaatttggaacagccattgactgggcacaggccagcactttgggaggccgagaggccgaggcaggaggatcgcttgaggccaggagtgccagactgcgagactagcctgggtaacatagtgagaccctctcttcaaaaaaaaaaaaaaaaaaaaaaaagcctgtcacggtggcctgcgcctgtaccccagctactcgagaggatcgcctgagcccagtgaagctgcagcgagctgtgaggatgccaccgcactccggcctgggctaaaaagctagatcgtgtctctgataaaagaataaaagctg

SEQ ID NO: 38953 - DNA, 424 bp, Homo sapiens; identical to SEQ ID NO: 38880

SEQ ID NO: 38954 - DNA, 430 bp, Homo sapiens
tatagggcgaattgtagctccaccgcggtggcggccgcttttttttttttttttttttttttttttgagatggagtttcactcttgttgcccaggctagagtgcaatggcaggatctcatctcactgcaacctctgcctcccgggttcaagtgactctcctgctttatcctcccgaggagctgggattacaggcgcccgccttaattaattctaaaagtactctccagggggggcccggtacccaacttttgttccctttagtgagggttaattgcgcgcttggcgtaatcatggtcatagctgattcctgtgtgaaattgttatccgatcacaattccacacaacatactagccggaagcataaagtgtaaagcctggggtgcctaatgagtgagctaactcacattaattgccttgcgctcactgccc

SEQ ID NO: 38955 - DNA, 346 bp, Homo sapiens
gtaacagtagctgggtaccgggcccgccctcgagagtacttctagaattaattaacgcggggcacttgatgaataagacgcggccatcccggcacaccccgtaggaccaatgctcaggccaaaggtgtccaaactatacagacccacagaatctaacaacagatgtctcaatattcctcgtcctagaactctcagaggatccagaactacagccggtcctcgctgggctgttcctgtccatgtgcctggtcatggtgctggggaacctgctcatcatcctggccgtcagccctgactcccaccttcacacccccatgtacttcttcctctccaacctgtccttgcc

SEQ ID NO: 38956 - DNA, 657 bp, Homo sapiens
gcgtaatacgactcactatagggcgaattggagctccaccgcggtggcggccgcttttttttttttttttttttttttttttttgaggaaggcacctacaaaacgaaagtgcctagggcttacaaaagtcatatgtagcctttacaaatattagctcagtcattttcagaaaggtttttccaattatcattttagagatgaggaaactgaagctcagggaggctaggaaacttatccaaagcctcttaagaggctatgttagtcagactgggctaacagctgtaacaaccccagaatttaaatggcttaacacattaggagtttatttgttattgccataacaattcagggtgtatgtttggcaggtagtctacacagtgattcagggacccaggctccttccctctggtggctttttctccctctagtgctgggagctctccatgcagatggtggatggagaaagagaacaaaaagtgggggatttttataggccaggcctggaattggcccacatcacttccacacacattccactggccagaatgcagtcacgtgatcgtagctaactgcaaggaaggttggaaaatgtaatgtaactgcatgcctgggctaaagagaggaacacggatcctggggagtactcacagtgttaga

SEQ ID NO: 38957 - DNA, 445 bp, Homo sapiens
cgcccgcgcgcacttaaccctactaaagggaacaaaagctgggtaccgggccccccctcgagagtacttctagaattaattaacgcgggcattgtgtgcagaagacctggactggaatctaacactgtgagtactccccaggatccgtgttcctctctttagcccaggcatgcagttacattacattttccaaccttccttgcagttagctacgatcacgtgactgcattctggccagtggaatgtgtgtggaagtgatgtgggccaattccaggcctggcctataaaaatcccccactttttgttctctttctccatccaccatctgcatggagagctcccagcactagagggagaaaaagccaccagagggaaggagcctgggtccctgaatcactgtgtagactacctgccaaacatacaccctgaattgttatggcaataa

SEQ ID NO: 38958 - DNA, 446 bp, Homo sapiens
acactactatagggcgaattggagctccaccgcggtggcggccgcttttttttttttttttttttttttttttttaccgggtgtgtggctgggggtgcaaagaggctgtgatgttgctgggcagtgtgggtctgggctaggggtctcttgccagctctgacacatccacccctaggcggaggcccacagccggaaccatggggtcaggctccaccggggaggctgatggatgccctggctcttcctgggcccaactcgaccctgctgctcccaaggggcttctcacctctgtgctagggtccacaacactggctttcctgctcccgatactgcctggctgcttggatggtgttttctggaggaagtcagagatcctctgcaccaaaaaatcacggtctttcaggttggcaaacaggaatgtcattttgcttttggtgctgatggac

SEQ ID NO: 38959 - DNA, 449 bp, Homo sapiens
ctatagggcgaattggagtcccaccgcggtggcggccgcttttttttttttttttttttttttttttttgagatggagtttcgctctgttgcccaggctggaatgcagtggagcgatctcggcttactgcaacctctgcctcccaggttcaagcaattctcctgcctcagcctcccaagtagctggggatacaggcgtgtaccaccacagctggttaattttttgtatttttagtagagactgggtttcaccatgttggccaggctggtctcgaactcctgacctcaagtgatttccccgccttggcctcccaaagtgctgggattacacgcatgagccaccacgccctgccagaggctctgagaattcttatagcaaagttaattttatgacataagcttataactaatgaggtcaaaactacaaaattaaaaatataaggtaatcct

SEQ ID NO: 38960 - DNA, 447 bp, Homo sapiens
cgactactatagggcgaattggagctccaccgcggtggcggccgctttttttttttttttgtgtttcaataaaactttatttacaaaaacaggtagtgggctggattggccaacttctgatgaatagcatttctttataaattctgaacatgagtactttaaaaaaatgtagcaaatatcttctactattatgtggttcatcttttccacctagtgtatcatatttttgatgaacagaatttcctgttttgatttttttaaaatagtaaacaagatttgctgatccttaatacctgcctgggtttatttcccatcttgtcttcagtatgatctaggccttctggaagttgaatgggggagcgtctaacaaatagctacctaatacctagacagatgacatcatctccgtgtgcaggtaggacattagatggtttctctagggaaaca

SEQ ID NO: 38961 - DNA, 432 bp, Homo sapiens
accctactaagggaacaaaagctgggtaccgggccccccctcgagagtacttctagaattaattaacgcgggtccaggtctctgagtccattctttgggtttggacaggtaggtttgtttctcacaataccaggtataataccagtagaatgtttcatataatttaacaagttcattataaaatgtacttgaaattgcaaagagccacaaaaaaaacccagacaatattgatgaagaaaagacgaagtcagaggacctatactacaagatatcaatataaattataaaggtaccataattaaaactgtggaactggagtaaacatggacaagtagaccaatgtagttaaaaacaattctgaaaaagacccacgcatatatagatgcttgatttattaccatgttgctactataaacaagggaaaactgtttt

SEQ ID NO: 38962 - DNA, 420 bp, Homo sapiens
cgcattaccctactaaagggaacaaaagctgggtaccgggccccccctcgagagtacttctagaattaattaaggcgggcgcctgtaatctcagctactttggaggccgaggcaggagaattgctagaacccaggaggcagaggttgcagtgagctgagatcgcgccactgcactccagcctgggagacagaatgagactccatctccaaaaaaaaaagaaagaaagaaagaaagaaagaaagaaggctctattttgatactgggagcctaaactgaatgattctggagaaattcacagatggggctgaggctcaccttcatgacagctgtatcaaaggcctaaatttctaaggctcagaaatcactacaataagcctatcaacagcatgtgatactctccaagcattttgcaaccttaa

SEQ ID NO: 38963 - DNA, 438 bp, Homo sapiens
tatagggcgaattggagctccaccgcggtggcggccgcttttttttttttttttttttttttttttgggctgaatcaggaaacatttattcttccccataaatttaaatggaggtgaaactgcgaatatgaagcaaagaacatttatctcacaaggtaactctgaatttttttaattctgaaacccaagacattgtcaacacttacagcattcacacaacactattttcaaaataggtttttgacccctaaaaatgaaaattcttagcgacaagctttatatatgaaacttaccccactgggtattcactttgtcacaaaaagcaactaccgacaaatagtttttccctctccccgacacaaaaactgaaattacagacttttaaagcagaaaaaattttctccaaaatgcaaatgattaaggtccaaggaacaaatg

SEQ ID NO: 38964 - DNA, 374 bp, Homo sapiens
tacactactatagggcgaattggagctccaccgcggtggcggccgcttttttttttttttttttttttttttttttttcctttttttacaaaagtttattcttaaaggtacaacagctccaagacaacacttaattccagctatacgtggcaaaagatgttatggcagggaatagagaggtttaaatccacaatgaaataaggggtcaccaatttttttaggcacaaggaacagtttactttttgccagatttttttaattccacctgtggccaagggccccttcccccgccttaataaattctagaagtacttttgagggggggcccggaacccaacttttgttccctttagggagggttaattgcgcccttg

SEQ ID NO: 38965 - DNA, 378 bp, Homo sapiens
acccagcgcgcataaccctactaaagggaacaaaagctgggtaccgggccccccctcgagagtacttctagaattaattaacgcgggggagggaggtcacggcgtaaaggtgcagctgccgccaccgccgcttctgcaaggtctcaaggacgggctgcagccatgtcctattgccggcaggaagggaaggatcgaatcatatttgtaaccaaagaagatcatgaaactccaagcagtgcagaattggtggctgatgaccccaacgatccatacgaggagcatggattgatactgccaaatggaaacattaactggaactgcccatgccttgggggaatggccagcggtccctggggagaacagtttaagtcagccttt

SEQ ID NO: 38966 - DNA, 431 bp, Homo sapiens
ctatagggcgaattggagctccaccgcggtggcggccgctttttttttttttttttttttttttttttttttttttttttttttttttgggttctcttttcccaaaaatacttccatttaatatagtcatatgaaagccaatcaccaagaagggagattgacagacatgcttaagaaaatagctacctacccttccccccacaccaaaggggtgattttaggttttggttattttattttaaacaaatggggaaaagacagacccccccggatgacttcccacagggaagggatttaagggctgcccccatgaatttttttaggccacgacagctacttcctccttttgtatctggatttaaatttaaagtttcctccccgtctttgggggggcaagcccaactgtttccttttttcaaaggaagggctaa

SEQ ID NO: 38967 - DNA, 181 bp, Homo sapiens
acgcctcgcgcaattaaccctcactaaagggaacaaaagctgggtaccgggccccccctcgagagtacttctagaattaattaacgcgggggtcaaaaggctgggcagccatggcgtcctatttcgatgaacacgactgcgagccgtcggaccctgagcaggagacgcgaaccaacatgct

SEQ ID NO: 38968 - DNA, 451 bp, Homo sapiens
tacactactatagggcgaattggagctccaccgcggtggcggccgctttttttttttttttttttttttttttttttaggattgcaataaacagcttttattcttttatcagagacacgatctagctttttagcccaggccggagtgcgggggcatcctcacagctcgctgcagcttcactgggctcaggcgaaccctttgagtagctggggtacaggcgcaggccaccgtgacaggctttattttttgtttttttccttttgaagagagggtctcactatgttacccaggctagtctcgcagtctggcactcctggccttaagcgatcctcctgcctcggcctcttggcctcccaaagtgctggcctgtgcccaaccaatggctgttccaaattagggtctacccatttttatgcagggctaaagtccgggggcggccccgcaccgttac

SEQ ID NO: 38969 - DNA, 533 bp, Homo sapiens; identical to SEQ ID NO: 38881

SEQ ID NO: 38970 - DNA, 652 bp, Homo sapiens; identical to SEQ ID NO: 38924

SEQ ID NO: 38971 - DNA, 451 bp, Homo sapiens
ctactatagggcgaattggagctccaccgcggtggcggccgctttttttttttttttttttttttttttttttaggattgcaataaacagcttttattcttttatcagagacacgatctagctttttagcccaggccggagtgcggtggcatcctcacagctcgctgcagcttcactgggctcaggcgatcctctcgagtagctggggtacaggcgcaggccaccgggacaggctttttttttttttttttttttttagaaaaaagggtctcactatgttacccaggctagtctcgcagtctggcactcctggcctaaagcgaacctcctgcctcggcctttcggcctcccaaagtgctggcctgtgcccagtcaatggctggtccaaattagggtttacccatctttatgcagggctaaagaccgggggcggcccctcaccgtttccaaa

SEQ ID NO: 38972 - DNA, 576 bp, Homo sapiens
cgcgcgtaatacgactcactatagggcgaattggagctccaccgcggtggcggccgcttttttttttttttttttttttttttgggaagatggaatctcactctgtcacccaggctggagtgcagtggcatgatctcagctcactggaagctctgcctcccaggttcacaccattctcctgcctcagcctctcaagcagctgggactacaggcgccagccgccatgcctggctaattttttttggtattttttagtacagatggggtttcaccgtgttagccaggatggtctcgatctcctgacctcgtgatctgcccacttcagcctcccaaagtgctgggattacaggcatgagccaccatgcccggccgatttcacctttcaatggcaattactataagacaggaaagttatttatttttatatatttacctaattttaagttaccttatacaaccctcattaatagtctgttagaactagaatttaaactctatgtgaatatggaccttatttaaacaatgtatccctagcacctagacaatgcctaacctgtcacattaacttaatatata

SEQ ID NO: 38973 - DNA, 621 bp, Homo sapiens; identical to SEQ ID NO: 32299

SEQ ID NO: 38974 - DNA, 437 bp, Homo sapiens
ccagcgcgcaattaaccctactaaagggaacaaaagctgggtaccgggccccccctcgagagtacttctagaattaattaacgcgggtgatcaagtacatcaaagacaaataccctaatctccaagtcattggaggcaatgtggtcactgctgcccaggccaagaacctcattgatgcaggtgtggatgccctgcgggtgggcatggaaaggggctccatctgcattacgcaggaagtgctggcctgtgggcggccccaagcaacagcagtgtacaaggtgtcagagtatgcacggcgctttggtgttccggtcattgctgatggaggaatccaaaatgtgggtcatattgcgaaagccttggcccttggggcctccacagtcatgatgggctctctcctggctgccaccactgaggcccctggtgaatacttcttt

SEQ ID NO: 38975 - DNA, 449 bp, Homo sapiens
tacgactactatagggcgaattggagctccaccgcggtggcggccgctttttttttttttttttgagacagagtctcactctgtcgcccaggctggagagcagtggcgtgatctcagctcactgcatgctccgcctcctgggttcacgccattctcccacttcagtctcctgagtagctgggattacaggcgttcaccgccacacctggctaattttgtttttgaatttttagtagagacagggtttcaccgtgttagccaggatggtctcgatctcctgacttcgtgatccgcctgcatcagcctcccaaagtgctgcgattacaggcatgagccaccgtgctcggccagctctctcttaaatgtagcagctggaaacattctttttgtttgattttttgctggtcccgcgttaattaattctagaagtactctcgagggggggcccg

SEQ ID NO: 38976 - DNA, 374 bp, Homo sapiens
agggacaaaagctgggtaccgggccccccctcgagagtacttctagaattaattaaggcgggttaactgcttgagtccaggaattcgagaccagtctagtctaggcaacacagcaaaaccccatctctataaaaataagccaggtatggtggcacgtgcctgtaattcccactacttgggaggctgagctgagagggtcgcctgagcctgggaggtcaagaatgcgtaagccgtgattgtaccactgcacgccagcctgggtgagaccctgtctcaaaaaaaaaaaaaaacaaaaaaaaaaaaaatgcggccgccaccgcggtggagctccaattcgccctatagtgagctcgtatttacgcgcgctcactggc

SEQ ID NO: 38977 - DNA, 404 bp, Homo sapiens
tacgactactatagggcgaattggagctccaccgcggtggcggccgctttttttttttttttttttttttttttttttttttttttttttttttttttttttttttttggaattacaaagctactttaaaaacttgggggggagccccacaggaaaaaaaaacactgggaaggggtaaccccccccccccccggggggggcccagggggagagaggctacctggggggaaggaaccccaaaagggacccgttgcaaactcagggcaaagggaatgccatcggggctgggacctgggacccctacaggaggaaaccccagcgtggggggactggctccaggcccacaggcaaagggcaagagggttggacccaaacccccaaagctactggggttcctccttttt

SEQ ID NO: 38978 - DNA, 371 bp, Homo sapiens
  misc_feature 58: n = A,T,C or G
cggccgctttttttttatatttttttttgtttataaacacaaatgtgttccacctttnaaagacaaacatggaccacaaccttgctgagagaacttacagtgaagtttacatggctatctttcttagtattagaaattttacctggaaaaccatcaaacatacgaccaacatagcatataaagcagctctacagatattttcctactgcccaaaatatcatataatgcacatgtgggtcacatgtgagtaggcaagagattctggaacacagaagcaagacaacaggatcacagcaatttcagtatgctctgcttgttataggaaatccccagaacattctccaattactgaacaaaaaaagcaataaaac

SEQ ID NO: 38979 - DNA, 295 bp, Homo sapiens
aaccctactaagggaaaaaagctgggtaccgggccccccctcgagagtacttctagaattaattaacgcgggggaacaaaaaacagacatgaatgcgccttccaggccatctgtttctctgctactaccctttatggaaagacacatctccttcccctccctgtcctacttgcttctacattcccgtatggctgagtacctctaatatagcgtgccctgcctccgggcctttgtagcagggccaggtctgactatccagattagcttgctctcctaagctgcatcattgcatgac

SEQ ID NO: 38980 - DNA, 409 bp, Homo sapiens
ctactatagggcgaattggagctccaccgcggtggcggccgctttttttttttttttttttttttttttgaaggagagagactttttccgctctctcgctccctgttaaagccgggtctagcacagctgcagacgccaccagcgagaaagagggagaggaagacagatagggggcggggggaagaaaaaaaagaaaggtaaaaagtcttctaggagaacctttcacatttgcaacaaaagacctaggggctggagagagattcctgggacgcagggctggagtgtctatttcgagctcagcggcagggctcgggcgcgagtcgagaccctgctcgctcctctcgcttctgaaaccgacgttcaggagcggctttttaaaaacgcaaggcacaaggacggtcacccgcgc

SEQ ID NO: 38981 - DNA, 629 bp, Homo sapiens
gcgtaatacgactactatagggcgaattggagctccccgcggtggcggccgcttttttttttttttttttttttttttttggaccaagaagtgttttatttttcttgcagtagctttgttaattgcacaaaatcatgttttgtttttgccatttaaacattatcacacaatcctattctgaaagacaaatgttcattaaaaacaaagcaaaaataaaaattcacaaccttaattacctagatttgtcatttaaaggtttaaagaaaaaagggaggggctttcttacaagctttttcacaagtgtcacattttctccttaaaagggaaggatttcaaaagaaaggtgaaatagcttaaacagaaatattcataaaaaggaactttacagaattgtcaacaatattaagacaaaattgactaaccggtttcattaccgcatcttcccccgccttaattaattctagaagtactctcgagggggggcccggtacccagcttttgttccctttagtgagggttaattgcgcgcttggcgtattcatggacataagctgttcctgtgtgaaattgttatccgctaacaattccacacaacatacgagccggaagcataaagggaaaagcctggg

SEQ ID NO: 38982 - DNA, 409 bp, Homo sapiens
actactatagggcgaattggagctccaccgcggtggcggccgctttttttttttttttttttttttttttttttttcgggcgacagagtttcgctcttgtcgccaggctggggtgcaatggcgccatctcggctcactgcaatctctgtctcccaggctcaagcaattctcctgccttaacctccttgagtggcggggactgcaggcgcccgccactacgcccgacccgggttaattaattctagaagtactctcgagggggggcccggtacccagcttttgttccctttagggagggttaattgcgccctgggcgtaatcatggtcatagctgtttcctgtgtgaaattgttatccgctcacaattccacacaacatacgagccggaagcataaagtgtaaagcctgg

SEQ ID NO: 38983 - DNA, 524 bp, Homo sapiens
ctatagggcgaattggagctccaccgcggtggcggccgcttttttttttttttttttttttttttttttgagatagggtttcactcctgtcacccaggctggagtgcagtggcacgatcttggctcactgcagcctccgtctcccacacttaagcgattctcctgtctcaacctctggtagctgggactacaggcacatgccactacatctggctaatttttttttttttttttttttttagtagagacagggttttggcatgtagcctaggctagtctcaaactcctgagctcaagtgatctgcccaccttagcctcccaaagggctgggattacaggtttgagacaccacacctggcctcaagtgctttttgacaggactgaacttcacatctactcatctaaatttcattcatcctcctacctagttattcatcctccttacctaggtactcattccatctgccatcataactttggttttagggaaaggggatttcacagttcttttgttcctcaacaaa

SEQ ID NO: 38984 - DNA, 559 bp, Homo sapiens
cggtggcggccgcttttttttttttttttttttttgtttaaagaaggaattttactctgtcgctcacgctgcagtgcagcagcatgatgtcggcttactgcaacctccacctctcgggttcaagtgattctcctgcctagcctcctgagactggtattataggcgtgcgccaccacaccctgctaatttttgtatttttagtaaagatggggtttcaccatgttggtcagtctggtctcgaactcccgaccttgtgatctacctgccccatcctcccaaagtgctgggattataggcctgagccaccgcaccggtctctccttctcttttaagctctggtcccaaactgctacccgcttccccagccaggcctccccctgagcagacacactgaccaagagaagcctccacctactgcctggacatgcaaaccctgccgcagcccaaggccttggagagctagagttatgcttccggccaacgctgaacccttcttagcttagaccggggtaacttggggatcttttgaaaggaaaggattcttagatgctcaagaaaa

SEQ ID NO: 38985 - DNA, 517 bp, Homo sapiens
ggcgaattggagctccaccgcggtggcggccgctttttcttttctttctttctttttttttttttagacggagtctccctctgtcacccagactggagtgcaatggtgtgatcttggctcactgcaacctccgcctcccgagttcaagtgattctcctgtctcacctctagtagctgggattacaggcgcctgccatcatgtgccggctaattttggtatttttagtagagatgtggtttcaccatatcggccaggttggtctcaaactcctgacctcaggtgatcagcccgcctctgcatcccaaactgctgggattacaggcgtgaggccaccacacccagcccggattacccttaagtaggaggtacattctcttccattgaaaaagagagagagcagagaatagatgcacaggcaagcagatctgtatccattttgttgtgggaagttgcttcctctctgatgttctctctctctctctctctctggctctctctctctctggttttctctct

SEQ ID NO: 38986 - DNA, 610 bp, Homo sapiens
  misc_feature 46: n = A,T,C or G
gactactatagggcgaattggagctccaccgcggtggcggccgctnttttttttttttttttttttttttttggagacagagttttgctcttgtcacccaggctggagtacaatggcacaatcgcggctcactgcaacctccacctcccgggttcaagtgattctcctgcctggcctctgagtagctgggattacaggcacctgccaccatgcctggctgtttttcatatttttagtagagacggggtttcaccatgttggccaggctggtcttgagctcgcgacctcaggtgattcgcccacctcagcctcccaaagtattgggattacagatgtgagccactgtgcccggcacttttctgcttttaaatacaatgattttagaaagtctgtatatgaactttgggcttgtacctagatatcccagtgtgtgtagggagccctgtatatctgcaaggggatccattagaccaaggatattagatccagcacttctcctttttaatgcatgtcataagcacatgattttatatcatgtcagaaaaaggctgttgatataaaggaagagaacaaagaatgagaagaactatatcccgcgttaattaattct

SEQ ID NO: 38987 - DNA, 92 bp, Homo sapiens
gcgcgcaattaaccctcactaaagggaacaaaagctgggtaccgggccccccctcgagagtacttctagaattaattaacgcgggatggcac

SEQ ID NO: 38988 - DNA, 546 bp, Homo sapiens
actatagggcgaattggagctccaccgcggtggcggccgcttttttttttttttttttttttttttgagacaagatcttgtcctgtcacccaggctggaatactgtggtgcaatcatagctcactgcagcctcaaacttctgggctcaagtgatcctcccacctcagcctcctgagtactgggaatgcaggcacataccaccatacctggctaattaaaaaaattttttttaatctcactgtattactgaagctggtctggaactcctggccttgaacgatcatctcagcctccccaaactctgggattacaggcatgaaccattacacctggcttgaagagaagaggttcttaatattgaagaagtccatttatctgtttttgttttttttcccctcatgtattgggtttttggtattgtatctaagagattgttgcttaactcaagaccacaaagatctttttctatttttttcttctaagttttttgtagttctaggttttacatttaagtctccaatacattttgagttaaattttgtgtat

SEQ ID NO: 38989 - DNA, 404 bp, Homo sapiens
ctcctcactaaagggaacaaaagctgggtaccgggccccccctcgagagtacttctagaattaattaaggcgggggataaagttaaggtgtagagtatttattaggttattaggcttgtttgtttgtttatgcaaatcatgttaggttgttatcagctcaaaataatgggttataagatagtatgttctggcctcatggtaacctcaaaccaaaatacatacaatggatacacgaaagataaaaagcacgaaactaaatcatgtcttcagagaaaatcatcttcactaaaaggaagacagaaaggaaagaaataaggaagagaagatcacaaaacaactggaaaagaaataacaaaacggcaggagtaaatccttatttatgaacaataatatggaatgtaaat

SEQ ID NO: 38990 - DNA, 553 bp, Homo sapiens
tactcactataaggcgaattggagctccaccgcggtggcggccgcttttttttttttttttttttttttttttggaccagagaggccccaaactagcagcctgtcctcctcagtagccccagcatcccttcatcattttgttgcccttctatgggcctagtttaggtctgagaggcatagtttaaaatttttattggtatttatttattctagagataaggtcttgctatgtttcccaggctggtcttgaactcctggcctcaagcaatcctcctgcagcagcctcccaaagtgctgggattacaggcatgagccaccacgtctggtcagacaggcatagttttacaaatatgtgggtggataaatgctgtccagtcttacttcatcacttctatcaattgaatgcttttggttggaaataacagaaaatccaactaaaagtgacttaaacaaaggaaatgttattatctcatgtaccaggaattctggaggtagactggttcaagggtggattaattaattctagaagtactctcgagggggggcccggtac

SEQ ID NO: 38991 - DNA, 371 bp, Homo sapiens
tgggtgccggcccccccctcgagagtacgtacagaattaattaatccacccttgtaccaggctacctccagaattcctggttcatgagataataacatttcctttgtttaagtcacttttagttggattttctgttatttccaaccaaaagcattcaatcgatagaagtgatgaagtaagactggacagcatttatccacccacatatttgtaaaactatgcctgtctgaccagacgtggtggctcatgcctgtaatcccagcactttgggaggctgctgcaggaggattgtttgaggccaggagttcaagaccagcctgggaaacatagcaagaccttatctctagaataaataaataacgataaaaatt

SEQ ID NO: 38992 - DNA, 488 bp, Homo sapiens
ccccccctcgagagtacttctttatttaattaacgcggggcaggtgatgtcacggtgtaataggtgcagctgccgccaccgccgcttctgcattgtctcagggacgggctgcagccatgtcctattgccggcaggaaggaaggatcgaatcatatttgtaaccaaagaagatcatgaaactccaagcagtgcagaattggtggctgatgaccccaacgatccatacgaggagcatggattgatactgccaaatggaaacattaactggaactgcccatgccttgggggaatggccagcggtccctgtggagaacagtttaagtcagccttttcctgcttccactatagcacggaggagatcaaggggtcagactgtgtagaccagttccgggccatgcaggaatgcatgcagaaatacccaaacctctatccccaagaggatgaggatgaggaagaggaaagagagaagaagccagcataacaagcag

SEQ ID NO: 38993 - DNA, 486 bp, Homo sapiens
  misc_feature 60, 203: n = A,T,C or G
gaacaaaagctgggtacccgggcccccctcgagagtacttctagaattaattaacgcggngagttattatagataatgcacaccttacaatattactactgggttattaatcctgctgacagttgtggcattacacctaatggatgaggtgcccattccgaggtccaatcggtgcagtctggggctgaggtgaggaaacctgngtcctcagcgaaggtgatcccagatacacgttcaccttccactacatacactgggggcgacaggcccctggaaaagggcttgagtggatggaacgtgttgatcctgaatatggcgacacactatatgcacagaattccagggcagagtcaccactacctgagacacgtctgcagacacagcctacatggagctgagcagcctgagatctgaggacacagacgtatattaatgtgcatgacacgcagtgtgaaaacccacattctgagagtgtcagaaaccttg

SEQ ID NO: 38994 - DNA, 532 bp, Homo sapiens
aacaaaagctgggtaccgggccccccctcgagagtacttctagaattaattaacgcggagtggggtggcatctgcgattcaagacagttttttacatctcttcagtgcctctttcagctatatgaattaaaaaccaggtactgtgggtgctcacctgaattctggttcttatgaaggtgcttttatggtgtaaatagtttttaaattggtgtccttgtagaggggacaatcggtagagccttctattctgccatcttgccccatctactcaccttgaaatttatattatatgttaactataaaagctttacttaaaaagaaaattctgaacatcggtcatacccatttatcaaaaatgactattattttttaaactggaagatcttactattgcaggtattttgataacaaaggttataatgggagtaccgttttattctaagtcataacatttatcattttaacagataggtaaaatatttaactctgcgtaattaccagtaagtcattttatatgctttctggactttta

SEQ ID NO: 38995 - DNA, 533 bp, Homo sapiens; identical to SEQ ID NO: 38881

SEQ ID NO: 38996 - DNA, 545 bp, Homo sapiens
  misc_feature 49, 50, 52: n = A,T,C or G
gagctccaccgcggtggcggccgcttttttttttttttttttttttttnntnaaaggccgttcttacgtatttttttttaaacttttatttcagtagtgtttggggaacaagtagtgtttggttgcatggaaaagttcttcagtggtgatttctgagattttggtgcacccatcacccaagggtagtcttttttatccatcaagtctgtacccaatgtgtagtctttgtttttttctttttttttttttttgagactgagtctcattctatcacccaggctggagtggagtggcatgatcttgactcactgcaacatctgcctcccgggttaattaattctagaagtactctcgagggggggcccggtacccagcttttgttccctttagtgagggttaattgcgcgcttggcgtaatcatggtcatagctgtttcctgtgtgaaattgttatccgctcacaattccacacaacatacgagccggaagcataaagtgtaaagcctggggtgcctaatgagtgagctaactcacattaattgcgtt

SEQ ID NO: 38997 - DNA, 542 bp, Homo sapiens
agctccaccgcggtggcggccgcttttttttttttttttttttttttttgctatggagtcttgccatattgcccaggctggtcttgaactcctgggctcaagcgatcctcctgcctcagtcccctaaagtgctgggattacaggcgtgagccaccacactcggcgaggttcatttttctcatgtgaaagacttgacattcatctctgcccacactttgatcatatcagaaaacaacctgtgcagccgctttctgattgctgaagccgcttcattcttcctcagcaggacccatgtctcggacataggaatccggccgctgcatcttcaccttttttcccgtactggtatctatccaggtgtcggacccgtagatcatagtgataggcacatcttttcgaatcaagtgaattcgctccagcatagggcgccgggcccagccaaaggactccatcatggctttgaatgctgtctcaccactgggattctgtgcgttgcagtggtaaatatactctgatatggtatcatcttcaaagaagtctgc

SEQ ID NO: 38998 - DNA, 493 bp, Homo sapiens
cgactcactatagggcgaattggagctccaccgcggtggcggccgcttttttttttttttttttttttttgggggagacggagatttactcgttgcccaggctggagtgcaatggcgcgatcttggctcaccgcatcctccgcctcccaggtccaagcgattctcctgcctcaggctcccgagtagctgggattacaggcatgtgtgaccacgcccggctaattttgtatttttagtagagacggggtttcaccgtgttgcccaggctgatctcgaactcctcacctcaggtaatccgcccgcctcggcctcccaaagttctgggattacaggcgtgagccactgcgccccccgcgttaattaattctagaagtactctcgagggggggcccggtacccagcttttgttccctttagtgagggttaattgcgcgcttggcgtaatcatggtcatagctgtttcctgtgtgaaattgttatccgctcacaattc

SEQ ID NO: 38999 - DNA, 621 bp, Homo sapiens; identical to SEQ ID NO: 32299

SEQ ID NO: 39000 - DNA, 490 bp, Homo sapiens
gcgaattggagctccaccgcggtggcggccgctttctttctttctttttctttcttaattgacgaacaacggagtcctgtggtggtgcccatgctggaatggagagacacaatcccggcttactgcagcctccacctgcctggtgcaagtgatcaagtgatctcctgcctcagctactgagtagctgggattacaggcacctgccatcatgcccagctaacttatatattttttgacttagcagagacagggttccaccatgttggccaggctggtcttgaactactgacctcaagtgaatcacctgccccgcctcaaccttccaaagtgcttggattacaggcgtgagccactgcacccagccattcttctttttatgaaaaagaaaatgttatctttgtggtaataaacagcaaacatttggggctaattaaaacttggcagcatttaggtatgtgtgtgcatgtgtgtgtgcgcacccgtgtgtttt

SEQ ID NO: 39001 - DNA, 606 bp, Homo sapiens
aagctgcgtaccgtggcccccctcgagagtacttctagaattaattaaagtcagcatgatgtattaaaacaaagcataataataataaaattttaaaaaatgtaaacttttacaatcattgaaaggcaaaaataaaataaaacaaaataaaatacagtgatccttaatatctgtggtacatttattccaggacgcccctcttcaccctccagataccaaagtctatagatgctcaagtcactaatataaaatggtgtagtatttgcatataacctatgcacatcctctcatagactttatttctaattaattttattatttttaatttttgtgggtacatagtatgtatttatatgtgtatatatatacatatatatggggtacattacatgttttgatatagtgatagcttaacaggatgactatagtcaataataacttgattgtacattttaaataagagtgcaattggattgtttgtaactcctgtatactttaaatcatctccagtttactaatacctaatacaatgtaaatgcaaggtaaataattgttatactgtattgtttaaaggataatgacaagaaattaagtttgtacatgttc

SEQ ID NO: 39002 - DNA, 486 bp, Homo sapiens
  misc_feature 51, 52: n = A,T,C or G
acgactcactatagggcgaattggagctccaccgcggtggcggccgctttnntttttttttttttttttttttttttgaggaaggcacctacaaaacgaaagtgcctagggcttacaaaagtcatatgtagcctttacaaatattagctcagtcattttcagaaaggtttttccaattatcattttagagatgagggaaactgaagctcagggaggctaggaaacttatccaaagcctcttaagaggctatgttagtcagactgggctaacagctgtaacaaccccagaatttaaatggcttaacacattaggagtttatttgttattgccataacaattcagggtgtatgtttggcaggtagtctacacagtgattcagggacccaggctccttccctctggtggctttttctccctctagtgctgggagctctccatgcaaatggtggatggagaaagagaacaaaaagtgggggatttttata

SEQ ID NO: 39003 - DNA, 486 bp, Homo sapiens
tacgactcactatagggcgaattggagctccaccgcggtggcggccgcttttttttttttttttttttttttgggttttgaggcagagttttgctctgtcgcccaggctggagtgcagcggtatgattatggctcactgcagcctcgacctcctggccccaggcgatcctcccacctcagtcccctaagtagctgggaccataggtatgtgccaccacacccggctaatttcattttttgtagagatgaggtcttactatgttgactaggctggtctcgaactcctgggctcaagcaggccttgtgcctcggcctccccaactgttgggattatgggcgtgagccactgtgcccggtctgctcgctgaatttctaatgagcttgaattacaggaagtaaaaataaattttccacttacagaccactaaccagtttagagcaaatctgtaaggagtgtatagattatgccacacgagcgcatgaagc

SEQ ID NO: 39004 - DNA, 610 bp, Homo sapiens
  misc_feature 47: n = A,T,C or G
gactactatagggcgaattggagctccaccgcggtggcggccgcttntttttttattttttttttttttttttaagaaggagtcttactccgtcacccaggctggagtgtggtggtgtgatctcagctcacagcaacctgacctcaggtgattcacccgcctctgtctcccaaagtgctgggatacaggcgtgagccactgcgcccggcgtctttgaattttttaaactgaagtttaattgcctttgagtttgatcattcactatttggcatttgtatttcttttgttaattatctgctcaagctctaatttcataatggaaatttaatggattaacatataacacccactatcacccgccttaattaattctagaagtactctcgagggggggcccggtacccagcttttgttccctttagtgagggttaattgcgcgcttggcgtaatcatggtcatagctgtttcctgtgtgaaagtgttatccgttcacaattccacacaacatacgagccggaagcataaagtgtaaagcctggggtgcctaatgagtgagctaactcacattaattgcgttgcgctcactgcccgctttccagtcgggaaacct

SEQ ID NO: 39005 - DNA, 504 bp, Homo sapiens
gactcactatagggcgaattggagctccaccgcggtggcggccgctttttttttttttttttttttttttttttgaccagagaggccccaaactagcagcctgtcctcctcagtagccccagcatcccttcatcattgtgttgcccttctatgggcctagtttaggtctgagaggcatagttttaaaattttaattgccatttatttattctagacataaggtcttgctatgtttcccaggctggacttgaactcctggcctaaagcaatcctactgcaggagcctcccaaagtgctgggattacaggcatgagccaccacgtgtggtcagacaggcatagttttacaaatatgtgggtggataaatgctgtccagtcttacttcatcacttctatcaattgaatgctttcggctggaaataacaaaaattccagctaaaagtgacttacacaaaggaaatgttattatctcatgtaccatgaattctggaggtatactggttc

SEQ ID NO: 39006 - DNA, 458 bp, Homo sapiens
gactcactatagggcgaattggagctccaccgcggtggcggccgctttttttttttttttttttttttttttggcgatgcaggctcttttttggttccatatgaactttaaagtagttttttccaattctgtgaagaaagtcattggtagcttgatggggatggcattgaatctataaataccttgggcaatatggccattttcacgatattgattcttcctacccatgagcattgaatgttattccatttgttcgtatcctcttttatttcattgagcagtagtttgtagttctccttgaagaggtccttcacgtcccttgtaagttggattcctaggtattttattctctttgaagcaattgtgaatgggagttcactcatgatttggctctctggttggctgttattggtgaataaaaatgcttgtgatttttgaacattgattttgtatcctga

SEQ ID NO: 39007 - DNA, 336 bp, Homo sapiens
  misc_feature 65: n = A,T,C or G
cctcgagagtacttctagaattaattaacgcgggggcagaaaaggtgtcttctgactcggcttgntgtgttgctgcctgattgccagagacggtcctgctgctgccgcagtcctgccagctgtccgacgatgtctcccacctaagtcaagccgccggccgcccctgcacaacaacaacaacaactgcgaggaaaatgaccagtctttgcccccgccggcccgccttaacagttcctgggtggagctacccatgaacagcagcaatggcaatgataatggcaatggaaaaaatggggggctggaacacgtaccatcctcatcctccatccacaatgg

SEQ ID NO: 39008 - DNA, 517 bp, Homo sapiens
cctcgagattatagtacttctagaattaatcaacgcggggggcttcgtgcgacctacctggagctggccagtgcggttatggaacaacattcgggcatcgagatcgagtcgcgcctcgggggcacaggtgaggtcgcataacacctgctgggtgcctttgagatagagataaatggacagctggtgttctccaagctggagaatgggggctttccctatgagaaagatctcattgaggccattcgaagagccagtaatggagaaaccctagaaaagatcaccaacagccgccctccctgcggtcatcctgtgactgcacaggactctgggttcctgctctgttctggggtccaaaccttggtctccctttggtcctgctgggagctccccctgcctctttcccctacttagcttcttagcaaagagaccctggcctccactttgccctttgggtacaaagaaagaatagaagattccgcggccttgggggcaggagagagacactctgcatgaacac

SEQ ID NO: 39009 - DNA, 523 bp, Homo sapiens
  misc_feature 228, 229, 248, 249, 282, 283: n = A,T,C or G
gcgcgcaattaaaccctcactaaagggaacaaaagctgggtaccgggccccccctcgagagtacttctagaattaattaaggcgggcagtgttcatgtttcaaaagctaacactggcatgactgactcaatgttggacccagacaaattaaaaaatggtagataaaaatacatataatacgccgggcgccggtggctcaagtctgtaatcccagcacttttgagagtnnccgaggcaggtggatcacnnaagctcaggagttcaaagaaccagcctagccannataatggtaaaaccccgtctctgctaaaaatacaaaaatcagctgggcatgttggtaggcacctgtactcccagctactcgggaggctgaggcaggagaattgcttaaagctgggaggtagaggttgcagtgagccaagattgagccactgccctccagcctgggctacagagcaagactccgtctcaaaacaacaacaacaaaaaacataaaataactcaaacaattaaatataaccct

SEQ ID NO: 39010 - DNA, 433 bp, Homo sapiens
accctactaaagggaacaaaagctgggtaccgggccccccctcgagagtacttctagaattaattaacggcgggggataaagttaaggtgtagagtatttattaggttatttggcttgtttgtttgtttatgcaaatcatgttaggttgttatcagcttaaaataatgggttataagatagtatgttctggcctcatggtaacctcaaaccaaaatacatacaatggatacacgaaagataaaaagcaagaaactaaatcatgtcttcagagaaaatcatcttcactaaaaggaagacagaaaggaaagaaataaggaagagaagatcacaaaacaactggaaaagaaataacaaaacggcaggagtaaatccttatttatgaacaataatatggaatgtaaatcaactaaatctccaatcaaaacacagact

SEQ ID NO: 39011 - DNA, 497 bp, Homo sapiens
acccagcgcgcaattaaccctactaaagggaacaaaagctgggtaccgggccccccctcgagagtacttctagaattaattaacgcgggtatcaaagtactcaaactatatatcatatactgtacataaaatatcaaagtacccaaactgtgtattattatatactgtatataaaatatcaaagtacctgaaatatatattgtatactgtacataaaatatcaaagtaccccaaaatatatactatatactgtacataaaatatgaaggtacatcaaatatatattatatcctgtacataaaatatcaaagtacacctaatatatattgtgtactgtacataatatattaaatcgcccaaatatatattgtatactgtatataaaatatgaaggtacttcaaatatatattatatgctgcacataaaatatcaaagtaccaaaaatatgtattatatactgtacataaaatatgaaagtacccaaccatttataata

SEQ ID NO: 39012 - DNA, 596 bp, Homo sapiens
tacgactcactatagggcgaattggagctccaccgcggtggcggccgcttttttttttttttttttttttttttgacagagtcttgctctgtcacccaggctgaggtgcagtggcacgatctcggctcactgcaagctccgtctcccgggttcacgccattcttctgcctcacctcccgagttgctgggactacaggtgcccgccaccacgcccgccttaattaattctagaagtactctcgagggggggcccggtacccagcttttgttccctttagtgagggttaattgcgcgcttggcgtaatcatggtcatagctgtttcctgtgtgaaattgttatccgctcacaattccacacaacatacgagccggaagcataaagtgtaaagcctggggtgcctaatgagtgagctaactcacattaattgcgttgcgctcactgcccgctttccagtcgggaaacctgtcgtgccagctgcattaatgaatcggccaacgcgcggggagaggcggtttgcgtattgggcgctcttccgcttcctcgctcactgactcgctgggctcggtcgttcggctgcggcgagcggtatcagct

SEQ ID NO: 39013 - DNA, 435 bp, Homo sapiens
gcgcgcaattaaccctcactaaagggaacaaaagctgggtaccgggccccccctcgagagtacttctagaattaattaaggcgggggttggaggtggggactctggaaaagcagcccccatttcctcgggtaccaataaataaaacatgcaggctgaaaaaaaaaaaaaaaaaaaaaacaaaaaaaaaaaaaaaaaaaaaaaaaaaaagggcggccgccaccgcgggggagctccaattcgccctatagggagtcgtattacgcgcgctcactggccgtcgttttacaacgtcgtgactgggaaaaccctggcgttacccaacttaatcgccttgcagcacatccccctttcgccagctggcgtaatagcgaaaaggcccgcaccgatcgcccttcccaacagttgcgcagcctgaatggcgaatggaaattgta

SEQ ID NO: 39014 - DNA, 453 bp, Homo sapiens
actactatagggcgaattggagctccaccgcggtggcggccgcttttttttttttttttttttttttttttttgaggaaggcacctacaaaacgaaagtgcctagggcttacaaaagtcatatgtagcctttacaaatattagctcagtcattttcagaaaggtttttccaattatcattttagagatgaggaaactgaagctcagggaggctaggaaacttatccaaagcctcttaagaggctatgttagtcagactgggctaacagctgtaacaaccccagaatttaaatggcttaacacattaggagtttatttgttattgccataacaattcagggtgtatgtttggcaggtagtctacacagtgattcagggacccaggctccttccctttggtggctttttctccctctagtgctgggagctctccatgcaaatgggggatggagaa

SEQ ID NO: 39015 - DNA, 527 bp, Homo sapiens; identical to SEQ ID NO: 38940
  misc_feature 71, 72, 73: n = A,T,C or G

SEQ ID NO: 39016 - DNA, 423 bp, Homo sapiens
accctactaaagggaacaaaagctgggtaccgggccccccctcgagagtacttctagaattaattaaggcgggtgatagtgggtgtgatatgttaatccattaaatttccattatgaaatgagagcttgagcagataatgaacagaagaaatacaaatgacaaatagtgaatgatcaaactcaaaggcaatcaaacttcagtttaaaaaatttaaaaaacccggggcgcaatggctcacgcctgtactcccagctctttgggagacagaggcgggtgaatcacctgaggtcaggttgctgagagctgagatcacaccaccacactccagcctgggtgacggagtaagactccatctacggaaggagtaaatccttatttatgaacagcggtcggcaccgcggaggagctacaattcgccctat

SEQ ID NO: 39017 - DNA, 443 bp, Homo sapiens
tacgactactatagggcgaattggagctccaccgcggtggcggccgcttttttttttttttttttttttttttttttgaggaaggcacctacaaaacgaaagtgcctagggcttacaaaagtcatatgtagcctttacaaatattagctcagtcattttcagaaaggtttttccaattatcattttaaagatgaggaaacctgaacctcagggaggctaggaaacttatccaaagcctcttaagaggctatgttagtcagactgggctaacagctgtaacaaccccagaatttaaatggcttaacacattaggagtttatttgttattgccataacaattcagggtgtatgtttggcaggtagtctacacagtgattcagggacccaggctccttccctctggtggctttttctccctctagtgctgggagctctccatgcag

SEQ ID NO: 39018 - DNA, 439 bp, Homo sapiens
tacgactcactatagggcgaattggagctccaccgcggtggcggccgcttttttttttttttttttttttttttttttattgggcatagtccttccttcatctcactccaactcttctgtcctggctccccgctcggctccaccgccgcgggcctcccttcacacatagcacaggtagaggtacgtcttctctatccttccaatcgggcgggaatctcctcgggcttgtggcccttcatgtgcttctgcatggaggaaaggctggggcaatactctgtgcaaatggtgcactggtagggcgaggcgccgttgtgcgttctcaggtgcttgatcatggccgagtagtcccgggagcgctggtggcagagcttacactcaaagggcttctcacctgtgtgcaccctatagtgcgtctccagctgatgcttgaggctgaact

SEQ ID NO: 39019 - DNA, 419 bp, Homo sapiens
ctactatagggcgaattggagctccaccgcggtggcggccgcttttttttttttttttttttttttttgctatggagtcttgccatattgcccaggctggtcttgaactcctgggctcaagcgatcctcctgcctcagtcccctaaagtgctgggattacaggcgtgagccaccacactcggccgaggttcattttttctcatgtgaaagacttgacattcatctctgcccacactttgatcatatcagaaaacaacctgtgcagccgctttctgattgctgaagccgcttcattcttcctcagcaggacccatgtctcggacataggaatccggccgctgcatcttcaccttttttcccgtactggtatctatccaggtgtcggacccgtaaatcatagtgataggcacattttttcg

SEQ ID NO: 39020 - DNA, 445 bp, Homo sapiens
cagcgcgcaattaaccctactaaagggaacaaaagctgggtaccgggccccccctcgagagtacttctagaattaattaaggcggggggatggtaaaatgtcacttgcgagtaacaggatccataggcagaacctgtggagcaagaaagtttgctaataaaattttgtttaccctaacataggttcttcatggagagcagtacttagagttatataaaccacttcccagagcaggaaaattaaaatgtgaagcagttgttgctgatgtcctagataaaggatccggtgtagtgattattatggatgtctattcttattctgagaaggaacttatatgccacaatcagttctctctctttcttgttggctctggaggctttggtggaaaacggacatcagacaaagtcaaggtaggctgtagccatacctaatagacctcctgatg

SEQ ID NO: 39021 - DNA, 386 bp, Homo sapiens
accctactaaagggaacaaaagctgggtaccgggccccccctcgagagtacttctagaattaattaaagagataaaaaccaacattaaccagagttgggaagacgttgattccaaccttcataggtgactctgaggggtgcaagacttcagaggaaacagtaactgtcgatgtgatggaaaaaagagaactagaattagaagcggagcctgaatatgtgacagaattgtgtcaatctcgtgaaaaaacttgaacagatgagaggctgctttgtctagataagccaagaacgtggtttcctgaaatgaaatctactcctgaagatgctgtgaacattggtgcaaagacaacagacttagaatattacatcaacttagttgatcaagc

SEQ ID NO: 39022 - DNA, 533 bp, Homo sapiens; identical to SEQ ID NO: 38881

SEQ ID NO: 39023 - DNA, 445 bp, Homo sapiens
gcgcgcaattaccctactaagggaaaaaagctgggtaccgggccccccctcgagagtacttctagaattaattaaggcgggcaggggcttgggaagccggtagtgctcattggtcaggttggagatggaatcacagggggcggaagtgagtttttcttgctgtctgctgttcccgagtgcgatggcagaacttgtttgggccagattaccggtttgggtggtgtcagctgatccaccaggtgcagggtctgcaacatatctcaagcactgatgttaggttttacaatagtgatgtgatcccaggagcaatttggggaggttcagacttggaaccagaggctgcatgacccctaaaccataatgtctaatcttacagctaatttgttagtcctgcaaagacagactggtccccaggcaagaaggggggtctttttgggaaagggcc

SEQ ID NO: 39024 - DNA, 669 bp, Homo sapiens; identical to SEQ ID NO: 32263

SEQ ID NO: 39025 - DNA, 352 bp, Homo sapiens
ccagcgcgcaataaccctactaaagggaacaaaagctgggtaccgggccccccctcgagagtacttctagaattaattaacgcgggacgcgggcaaagaaggtaggccgggctgtctggtggaagcggaggaagtcctgctgcttgaagtcattggaggagccagccttctgtccacctacctgcagagcatgcggggacctcctggaagatgaccgactggccctgggacttcttcatcaacctgagtgcggccgactaccccatcaggacaaatgaccagttggtggcgtttctttcccgataccgagatatgaatttcttggagttacacggccgggacaatgcaaggt

SEQ ID NO: 39026 - DNA, 340 bp, Homo sapiens
cgggccccccctctagagtacttctagaattaattaaggcgggggttctttctagggtgatggaaattcgaaaatggaatctgaggatagctgcctatatccgtaaatatgtgaatatgctgaaaaaccattgactcgtgcactttaaatgactggatttgtatggtacataaaactgtatctcgataacaccttctcaaaaagaataaatgcagtggctcacacctgtaatcccagcactttgggaagcaaaggagggccaatcacctgagatcaggagttcgagaccagcctgaccaacatggtgaaaccccatctcgactaaaaatacaaaagtagc

SEQ ID NO: 39027 - DNA, 435 bp, Homo sapiens
tagggcgaattggagctccaccgcggtggcggccgctttttttttttttttttttttttttttttttttaaaaatatggcttgtttattctttttctccccttttttctttatttcttaaatttttttctcattttcccttttaatttctttattgggggtttatttattttgaaacagagtcttactctgtttccccagcctggagtgcagtggcgtgatctcagctcattgcagccttgacctttccaggctcagttgatcctcccacccccgccttaattaattctagaagtactctcgagggggggcccggtacccagcttttgttccctttagtgggggttaattgcgcgcttggcgtaatcatggtcatagctgtttcctgtgggaaattgttatccgctcacaattccacacaacatacgagccggaa

SEQ ID NO: 39028 - DNA, 408 bp, Homo sapiens
actactatagggcgaattggagctccaccgcggtggcggccgctttttttttttttttttttttttttttccgggttcggacccgttccggatgctttaggctgccggatgtctgatctgcgaataactgaggcgtttctgtacatggattatctgtgttttaaagcactttgctgcaagggaccaccacctgcccgaacaaaaatatgccctggtttgcataggcctaacaggttctggcaaaaccagtctgttgtccaaactctgcagggaaagccccgataacgtcgtgtcgaccacaggttttagtattaaagcagtgccattccacaatgccctcttgaatgtaaaagaacttggaggggctgataacatccggaaatactggagccgctactaccaaggatc

SEQ ID NO: 39029 - DNA, 49 bp, Homo sapiens
tccaccgcggtgggccggccgcttttttttttttttttttttttttttt

SEQ ID NO: 39030 - DNA, 420 bp, Homo sapiens
cgccagcgcgcaattaaccctcactaaagggaacaaaagctgggtaccgggccccccctcgagagtacttctagaattaattaacgcgggacgcgggcaaagaaggtaggccgggctgtctgctggaagcggtggaagtcctgcggcttgaagtcattggaggagccagcctcctgtccacctacctgcagagcatgcgggacctcctggagatgaccgactggccctgggacttcttcatcaacctgagtgcggccgactaccccatcaggacaaatgaccagttggtggcgtttttctcccgataccgagatatgaatttcttgaagtcacacggtcgggacaatgcaaggttcattcggaagcagggcctggatcggctcttcctggagtgcgacgctcacatgtggcgcctgggag

SEQ ID NO: 39031 - DNA, 400 bp, Homo sapiens
accgcggtggcggccgcttgttttttttttttttttttttttttgaagatggaatctcactctgtcacccaggctggagtgcagtggcatgatctcagctcactggaagctctgcctcccaggttcacaccattctcctgcctcagcctctaagcagctgggactacggcccagccgccatgcctggctaattttttttggtattttttagtaaagatggggtttcaccgtgttagccaggatggtctcgatctcctgacctcgtgatctgcccacttcagcctcccaaagtgctgggattacaggcatgagccaccatgcccggccgatttcacctttcaatggcaattactataagacaggaaagttatttatttttatatatttacctaattttaag

SEQ ID NO: 39032 - DNA, 536 bp, Homo sapiens
  misc_feature 50, 51, 181: n = A,T,C or G
agctccaccgcggtggcggccgctgtttttgttttttttttttttttttnnaacatttaactctgatttattgtggggtaaagcatgttatagtgttccagcttcacttgttttctgaatggctatccagttgtcccaagatcatttgttgaataattcattttccccatttgaatgacanccttttcgtatactaaagtcccaagtctcttagttataaaacagtaataaacccttgaaacaggcattttcctaaaatacattttgtttaagtaagacagttttcccccgcgttaattaattctagaagtactctcgagggggggcccggtacccagcttttgttccctttagtgagggttaattgcgcgcttggcgtaatcatggtcatagctgtttcctgtgtgaaattgttatccgctcacaattccacacaacatacgagccggaagcataaagtgtaaagcctggggtgcctaatgagtgagctaactcacattaattgcgttgcgctcactgcccgctttccagtcggg

SEQ ID NO: 39033 - DNA, 606 bp, Homo sapiens
  misc_feature 17, 25: n = A,T,C or G
gtatacgactactatanggcgaatnggagctccaccgcggtggcggccgcttttttttttttttttttttttttttttttgaggaaggcacctacaaaacgaaagtgcctagggcttacaaaagtcatatgtagcctttacaaatattagctcagtcattttcagaaaggtttttccaattatcattttagagataggaaactgaagctcagggaggctaggaaacttatccaaagcctcttaagaggctatgttagtcagactgggctaacagctgtaacaaccccagaatttaaatggcttaacacattaggagtttatttgttattgccataacaattcagggtgtatgtttggcaggtagtctacacagtgattcagggacccaggctccttccctctggtggctttttctccctctagtgctgggagctctccatgcagatggtggatggagaaagagaacaaaaagtgggggatttttataggccaggcctggaattggcccacatcacttccacacacattccactggccagaatgcagtcacgtgatcgtagctaactgcaaggaaggttggaaaatgtaatgtaactgcatgcctgg

SEQ ID NO: 39034 - DNA, 402 bp, Homo sapiens
agctccaccgcggtggcggcccgcttttttttttttttttttttttttttttgaagaatcaacagactctatatttgatcacaaagcaaaagtttaagtgtattacttaaaattttaagacaaaatctggaataattataactaacacaaattttgaggtagaggaagagaatctaagataggtgagataaaattttcatctttgataatgagtagacaaaaacactacctttaacaagtgaagattttaaaaaatttagagaagaggaaatcataagtggtttttaaaatttattatacatatcgaggtaaagataatccaacagaaaatgagatttgaacagacacttcacaggagatagacaaatgtctcaacctcattagtcaccagacaaatgcaaa

SEQ ID NO: 39035 - DNA, 651 bp, Homo sapiens
atacgactcactatagggcgaattggagctccaccgcggtggcggccgcttttttttttttttttttttttttttttttgtagagggacatgatttaaactatggcaggtatcagcccacctcccaattcactgtggattcatgatccacagaaaaatagaaaacctggaccccgcagtccaagcaaagccacacagacagggcacataaaggtttggtgactcaaaaaaaagaagcaatgaagtgcattatccacagtcatttaagcagactccacttacaggcacacacacatacacacacacacaaaaccacacaatgtctcacacacacacacacagacatccaacatttacaacactcccacagaaacacacagcgtgggaactcctaaggctgcctggtactgcaggacatttgagtgtgggagagagcccctctccccgccccgccctggggaacacaggcgtgatgtacctataaatcacagtggggcaagtttcaaaatgactcacaactacaatgcctaggcaggcttgaagaatcctacagatttctttgcatcctttgggatttcagaatttatttctggaattgtgcttgatgtttctacagactctcacatctgccctctcttgggatcatgggact

SEQ ID NO: 39036 - DNA, 578 bp, Homo sapiens
gcgcgtatacgactcatatagggcgaattggagctccaccgcggtggcggccgcttttttttttttttttttgagatggagtcttggtctgtcgcccaggctggagtgcaatggtgcagtctcagctcactgaaacctctgcctcccgggttcaagtgattctcctgcctcagcctaccgagtagctgggattacaggggcctaccaccatgcctggctaatgtttgtatttttagtagagatggggcttcaccatgttggccatgctggtctcgaagtgctgacctcgtgatctgtccgcctcggcctcccaaagtgctgggattataggcgtgagccactgctcccggccacaatctacaactggatttgtgctttgcaatttacgctttcgaacatgcaggaatgtagtttgggcatttgtctggaacttcggattctcgggactccagggtggccaaggcgcggaggtgactcaatgacattgaccagcctggatgcacgtgggttgctgagccgatgctgggaaggtacggggtttgcccggtgcaggccgccggaactcacgcacgcccctg

SEQ ID NO: 39037 - DNA, 604 bp, Homo sapiens
gactcactatagggcgaattggagctccaccgcggtggcggccgcttttttttttttttttttttttttttttttggagtctcgctcttttgcccaggctggagagtgcaatggtgccatctcagctcactacatccctgattcaagtgattctcctgcctaagcctcctgagtagctgggattacaggcacttgccatcatgcctggctaatttttgtatttttgtagagacggggtttcaccatgttggccagtctggtcttgaactcttgacctcaggcgatccatccacctcggcttcccaaagtgctggaattataggcgtgagccaccgcacccagccttctgtgtgtattttcttatgatgtagaatgagtgataaagcaccataggagtcacctagtgttgccttttccatttttgagttgataaatggaggtctcagtctctgttaattagtggtacatctgggaaaagtcaaatgtgttgagctcgaaggtgttggtttgtttgtttttcccaccaggtctcttaactgtgcttgctgctggtgacctaccagttgttgtgtgacctaatttgcagcatgcccatggtacctta

SEQ ID NO: 39038 - DNA, 637 bp, Homo sapiens
gtaatacgactcactatagggcgaattggagctccaccgcggtggcggccgctttttcttttctttctttctttttttttttttagacggagtctccctctgtcacccagactggagtgcaatggtgtgatcttggctcactgcaacctccgcctcccgagttcaagtgattctcctgtctcagcctcctgagtagctgggattacaggcgcctgccatcatgtgccggctaattttggtatttttagtagagatgtggtttcaccatatcggccaggttggtctcaaactcctgacctcaggtgatcagcccgcctctgcatcccaaactgctgggattacaggcgtgaggccaccacacccagcccggattacccttaagtaggaggtacattctcttccattgaaaaagagagagagcagagaatagatgcacaggcaagcagatctgtatccattttgttgtgggaagttgcttcctctctgatgttctctctctctctctctctctggctctctctctctctggttttctctctcgtgcttcaagtagggaatgattagggagtgatactgtttgctaagtagtaagaaaataaagaaggggaacacagaaagagtggttcatagaaaaatg

SEQ ID NO: 39039 - DNA, 391 bp, Homo sapiens
ggcgattgggactccacgcggtggcggccgctttttttttttttttttttttttttacttgaattgttgttatagtgcttccgttatttatttttattttttttattatactttaagttttagggtacatgtgcacaacgtgcaggtttgctacatatgtatacatgtgccatgttggtgtgctgcactcattaactcgtcatttatattaggtatatatacgtgttcattgtacccttatcgactttgcagcatgcttatccatctaactattcatctttatttgccttcgttttttgagttcccttattcatcctaaaacaaaatataatgcctgactcatagtcagacttcacagtatttttaaatgaattacaatttgcatttgggg

SEQ ID NO: 39040 - DNA, 305 bp, Homo sapiens
cgactcactatagggcgaattggagctccaccgcggtggcggccgcttttttttttttttttttttttttgggaggctcaacctataatacccaaaggctctatttcagtagaatttattggtttgctgattatagcagtgacatagttgcattctagagaccttagaaaatgcagaaaatttcaagaaaaacatttaaattgggctcatagtgaaactgataggtgaccactcttaatattttgtggcataagcaatccagtcttatatctttctcaaagttacacataaactttctgaaaggc

SEQ ID NO: 39041 - DNA, 644 bp, Homo sapiens
  misc_feature 558, 563: n = A,T,C or G
gtaatacgactcactatagggtcgaattggagctccacgcggtggcggccgctttttttttttttttttttttttttacttgaattgttgttatagtgcttccgttatttatttttattttttttattatactttaagttttagggtacatgtgcacaacgtgcaggtttgctacatatgtatacatgtgccatgttggtgtgctgcactcattaactcgtcatttatattaggtatatatacgtgttcattgtacccttatcgactttgcagcatgcttatccatctaactattcatctttatttgccttcgttttttgagttcccttattcatcctaaaacaaaatataatgcctgactcatagtcagacttcacagtatttttaaatgaattacattgcattggggaaatataaatagtaatgtccttttatagaggaagtctaaaagaaattcttgggtgaattgataatcaaacatttttaagaaggtatatttgctagcaaagaaagaaaaaatatgacagcttatttatatagaaaacctatgtattctgngattnttctttgtttcaagtctgtatatgaatatcatgctatcccttcccccgccttaattaattctagaagtactctcgaggggg

SEQ ID NO: 39042 - DNA, 657 bp, Homo sapiens; identical to SEQ ID NO: 38956

SEQ ID NO: 39043 - DNA, 513 bp, Homo sapiens
  misc_feature 10: n = A,T,C or G
ggcgattggnagctcaccgcggtggcggccgctttttttttttttttttttttttttttttttaacatttaactctgatttattggggggtaaagcatgttatagtgttccagcttcactttttttctgaatggctatccagttgtcccaagatcatttgttgaataattcattttcccccatttgaaatgacaccttttcgtatactaaagtcccaagtctcttagttataaaacagtaataaacccttgaaacaggcattttcctaaaatacattttgtttaagtaagacagttttcccccgcgttaattaattctagaagtactctcgagggggggcccggtacccagcttttgttccctttagtgagggttaattgcgcgcttggcgtaatcatggtcatagctgtttcctgtgtgaaattgttatccgctcacaattccacacaacatacgagccggaagcataaagtgtaaagcctggggtgcctaatgagtgagctaactcacatt

SEQ ID NO: 39044 - DNA, 624 bp, Homo sapiens
gcgtaatacgactcactatagggcgaattggagctccaccgcggtggcggccgctttttttttttttttttttttttttttttgagacagggtctcactctgtcacccaggctggagtgcagtggcgcaatctcagctcactgcagcctctgcctcccaggttcaagcggttctcctgcctcagtctcccgagtagctgggattacaccaccacacctggctaatttttgtatttttggtatagacgggttttcgccatgttggccaggctggtgtcaactcctgatctcaagtgatctgccagcctcggcctcccaaagtgctattacaggcgtgagccaccacgcctggcttaggctgcttaaatattctttcttaggtatccttggttttggaaaaaaaaagaataacagaaaactaaaaattcccagtggcagtctctgtatcactggaatttaactttttgtttgtttgttttttgagatggagtctcgctctgttgcctaggatggcgtgcagtggcgtgatctcggatcactgcaagctccgcctcccgggttcacgccattcttctgcctcagcctcccgagtaactgggactacaggcgcccgccaccacgcccg

SEQ ID NO: 39045 - DNA, 652 bp, Homo sapiens; identical to SEQ ID NO: 38924

SEQ ID NO: 39046 - DNA, 77 bp, Homo sapiens
agcgcgcgtaatacgactactatagggcgaattggagctccaccgcggtggcggccgcttttttttttttttttttt

SEQ ID NO: 39047 - DNA, 430 bp, Homo sapiens
  misc_feature 311: n = A,T,C or G
gcgcgtaatacgactactatagggcgaattggagctccaccgcggtggcggccgctttttttttttttttgggtttcaataaaactttatttacaaaaacaaggtgtgggcctgattgggccaactttttgagaaataccatttttttataaattctgaacatgagtcctttaaaaaaatgtagcaaatatcttctactattatgtggtttcatccttttccacctagtgtatcatatttttgatgaacagaatttcctgttttgaatttttttaaaaatagttaaacaagattttgctgattccttaatnaacctgcctgggtttttattttcccattcttggtcttcagtatgaatctaggcccttctggaagttgaatggggtgagcgttctaacaaatagctacctaatacctagacagatgacat

SEQ ID NO: 39048 - DNA, 440 bp, Homo sapiens
  misc_feature 66, 68: n = A,T,C or G
agggcgaattggagctccaccgcggtggcggccgcttttttttttttttttttttttttttttttnantttttttttaaaaaaaacccccaacaggaccaacttttattttatttatccatttaagggccaatttttaaaaagtaaaggggaatgaacccttttgtatttaagatccttagacggaactttaatgtaaaaaaaaaaagaccttgctgggaaacagatgatgagaaacactgaaaaacttttcacagacccacaaaaggctcaaattgaaaacgggataaacctgttctggattaaccccgaaacataggggtttaattttgctaaccctgagatctcgctcaatttcaaactgcctgtgatccactcggtcgaggaaggctttccgttaaatgaccccctttttccctcaattatggagggccagttttt

SEQ ID NO: 39049 - DNA, 238 bp, Homo sapiens
  misc_feature 78: n = A,T,C or G
cgcgtaatacgactactatagggcgaattggagctccaccgcggtggcggccgcttttttttttttttttttttaaanagggggaagaagaagaaaatttcactcaaggattttggttaccttaagaattcaatggctggacacttagaccagcctattaacaatttttcagatagaagtgactttcatgccgtgaaaatgattcacatacaattgaagaagggtttttaaaaaaatt

SEQ ID NO: 39050 - DNA, 479 bp, Homo sapiens
cgctcctatagggcgattgagctccccgcggtggcggccgctttttttttttttttttttttttttttgatagagacagggtctcacccaggctggcgtgcagtggtacaatcacggcttacgcattcttgacctcccaggctcaggcgaccctcttagctcagcctcccaagttagtggggagattatcaaggccaccgttgcccaccattactcatgggctttatttttttataagaagaatgggggggttttgcctggtgtttttgccctaacaatttaggacctcagggccttggaaattacccctgagtacctttcgaacgctacgattaaagaactcctgctccagctctttaattttaatttctgagaaagtacttctcgagggggggcccggtacccagcttttgttccctttagtgagggttaattgcgcgcttggcgtaatcatggtcatagctgtttcctgtgtgaaa

SEQ ID NO: 39051 - DNA, 192 bp, Homo sapiens
tagggcaattggagctccccgcggtggcggccgcttttttttttttttttttttttttttttttttttttttttttgagacggagtctcgctctgtcgcccaggctggagtgcaatggcgggatctcggctcactgcaagctccgcctcccgggttcacgccattctcctgcctaagcctcccaagaagctg

SEQ ID NO: 39052 - DNA, 452 bp, Homo sapiens
  misc_feature 7: n = A,T,C or G
agggcgnattggagcttcaccgcggtggcggccgcttttttttttttttttttttttttttttgggaagggagtggtttagggaagactcgaaagtgacaatggagctatcaagttcaagaaggagttagtaggggaggaggctgcaagaagaagtgcacgcctggaggcaggaacagcatgtgttccggaagttcaaggtggcaggcccatgctggtgagaaagggcaatggaaaaggaatgaacaggtttcccctgcctacacttgcaagtgccttaaaccccgatacacagctccctcttttgaggttttcaagcgtacggggattaccggggtgagccaccgtgcccggcctgaactttttgtaaaggcaagtgaaacattgggagtggagaaggaacaatgacatccccgccttaattaattttagaagtactctcgagggggggcc

SEQ ID NO: 39053 - DNA, 399 bp, Homo sapiens
actcatatagggcgaattggagctccaccgcggtggcggccgctttttttttttttttttttttttttttccccaagagaagatgccattttcatcacaacatgtttacatactcaaggtaggaacttcaacactttgctccttctgaccatacccatttacataaacatatgcagggctcccctggcctgccggcagctatccacaccaaaaagaggaaaaggtagactggtaagactcaggctttcaagttatttcaaaaccaatagcaaagtaagacctgaggtacatatagtttgaatttagtcttttgaatgccttttaagaaagttttgaaatcaaattaatacaagcacgtgggcaaaacatgtatgtgtgctgtttttggccattgttgct

SEQ ID NO: 39054 - DNA, 381 bp, Homo sapiens
attggagctcaccgcggtggcggccgcttttttttttttttttttttttttgggatgctcaacctataatacccaaaggctctatttcagaagaatttattggtttgctgattatagcagtgacatagttgcattctagagaccttacaaaatgcagaaaattttaagaaaaacgtttaaattgtgctcatagtgaaactgataggtgaccactcttaatattttagcggcataagcattccagtcttttatctttctcaaagtttcacataaactttctcaaaggccattaaatacttttgcatagcctgattgtgtgagaccacataggatcctattatattgataatgccataatttacctaacccatttttatatat

SEQ ID NO: 39055 - DNA, 410 bp, Homo sapiens
ttttttttttttttttttttttttaaaagagaaaattttttggggcccaaccccggagggggagaaaaaattgtttttttttgggaaaacccccccccaccccaaaaaaaaaatttttttccccccccccccaaaaaggggaaaaaaaaaaggggcccccccccccccccccttttttttttttttttaaaaaaggaggggggattttttggggggggggggggaaaaaaaaaacctggaaaaaaaaaggggtggccccccaaaatttaaaagtttttgttttaaaggggggggccccggcccccaccctaaaaaaaaaaaaaaaaaaatttaaagggggggggccccaaaaaaaaattttttccttttaccgggggaaaaagccccctttaaaaaaaaaaaaaaaaaaa

SEQ ID NO: 39056 - DNA, 426 bp, Homo sapiens
  misc_feature 7: n = A,T,C or G
cggtggncggccgctttttttttttttttttttttttttttttttttttttttttttttttttttttttttttttttttttttttttttttttaaaaaaaaaaccccccttttgtttttgtgaaagtcaccccaaaacaaacaaaaaagaggaagggagggggcaagcacgaaaaaacaaaaatatacttttaattgtaacgcccccccccccccctccttgctttggaggaggggggcggataaccctaataaaaaacaaaggatgaacttgttttaaaaaaaaaaaaacccccccccccggggttttttccccccccccccccaaaaaaaaaaaaaaaaaaagggggggggggggccccccccccccttttttttttttttaaaaaaaaaaaaaccccccccccccaaaaaaaaaaaatttttt

SEQ ID NO: 39057 - DNA, 473 bp, Homo sapiens
gcggtggcggccgcttgatatgcctgactcatctgtctgaggagcggtcagtgaccttatggagcgggcaagggatcgcttacacctgagacgaactacagaacagcacgtaccagaggtggaagtccaagtcaaacgcagaaggactgcctcacttgagcaaccaagagtgtcagttgtacccgacgcgtttttcagcatgatcaagtacctggggtggattttctggctgaactgaggcaggcattcttagctgaaacaccaagaggtggttaaagccatattggagtagcgaggaatctgattccaagcaaaaaccaggctccatctactttttgaagcttctgcccagcttggcttgtttcttaggagaacccgcgttattttaatttagaagtactctcgagggggggccccgtacccagcttttgttgcctttaatgaagggttaattgcgcgcttggcgtaatcat

SEQ ID NO: 39058 - DNA, 461 bp, Homo sapiens
ttttttttttttttttttttttttttaggaaggcgggggataaagttaaggtgtagagtatttattaggttatttggcttgtttgtttgtttatgcaaatcatgttaggttgttatcagcttaaaataatgggttataagatagtatgttctggcctcatggtaacctcaaaccaaaatacatacaatggatacacgaaagataaaaagcaagaaactaaatcatgtcttcagagaaaatcatcttcactaaaaggaagacagaaaggaaagaaataaggaagagaagatcacaaaacaactggaaaagaaataacaaaacggcaggagtaaatccttatttatgaacaataatatggaatgtaaatcaactaaatctccaatcaaaacacagactggctgaatgaatttaaaaaaaaaaaacataatctgttgcctccaagaaacacacttaacctttaa

SEQ ID NO: 39059 - DNA, 410 bp, Homo sapiens
cgcggtggcggccgcttttttttttttttttttttttttttaggaaggcggggttttttttttttaaaattttttaaaaaatttttttttttaaaaaaaaaaagggcattttaaaaaagattatttttttaaaaaaaaaaggggggggggagggaaacacactttttaaaaacaaaaaaaaaagggggggaacacgccccaaaaaaaaaaaaaaaaaaaaagccgggacaaaaaaattgggagaaaaccccccaataggtttaaggcaaaccgggggttttttaaaaaaaaaagcaccttaaaaaatccccttttaaaaaaaaaaaaaatggagagggtaaaaaacttggaaaaattttgaaggcgttttttcaaagaatttaaaagggaaaatttgggaaaaaaaaagc

SEQ ID NO: 39060 - DNA, 483 bp, Homo sapiens; identical to SEQ ID NO: 32281

SEQ ID NO: 39061 - DNA, 440 bp, Homo sapiens
gcgtaatacgactcactatagggcgaattggagctccaccgcggtggcggccgctttttttttttttttttttttttttttgggaccagagaggcccaaaactagcatcctgtcctgcttagtagccccagcatcccttcatcattttgttgcccttctatgggcctagttaggtctgagaggcatagatttaaaatttttattgttatttatttattctagagataaggtcttgctatgtttcccaggctggtattgaacttctggcctgaagcaatcctcctgcagcagcctcccaaagtgctgggattacaggcatgagccaccacgtttggtcagacaggcatatttttacaaatatgtgggtggataaatgctgtccagtcttacttcatcacttttattaattgaatgcttttggttggaaataacagaaaatc

SEQ ID NO: 39062 - DNA, 495 bp, Homo sapiens
gtaatacgactcactatagggcgaattggagctccaccgcggtggcggccgcttttttttttttttttttttttttttttgggaattattatttaatgagaaaaaaatccacgtgtatacaacatttcaaaacagaagttaaatcattaaatagtactttttatttaaatgtttataaggcagatctatgagaatgatagaaaacatggtgtgtaatttgatagcaatattttggagattacagagttttagtaattaccaattacacagttaaaaagaagataatatattccaagcagatacaaaatatctaatgaaagatcaaggcaggaaaatgagtataactaattgacaatggaaaatcaattttaatgtgaattgcacattatcctttaaaagctttcaaaagaaagaattattgcagtctagttaattcagacagtgttaaatggtatcaggataaagaactgaagggcagaaagaattaattttcac

SEQ ID NO: 39063 - DNA, 372 bp, Homo sapiens
ctactatagggcgaattggagctccaccgcggtggcggccgctttttttttttttttttttttttttttttggaggaaggcacctacaaaacgaaagtgcctagggcttacaaaagtcatatgtagcctttacaaatattagctcagtcattttcagaaaggtttttccaattatcattttaaagatgaggaaactgaagctcagggagggctatgaaacttatccaaagcctcttaaaaggctatgttagtcagactgggctaacagctgtaacaaccccaaaatttaaatggcttaacacattaggagtttatttgttattgccataacaattcagggtgtatgtttggcaggttattctacacagtgat

SEQ ID NO: 39064 - DNA, 435 bp, Homo sapiens
actactatagggcgaattggagctccaccgcggtggcggccgcttttttttttttttttttttttttttgaggcacattaaactctgatttattgggggggaaagcatgttatagtgttccagcttcactttttttctgaatggctatccagctggcccaagatcatttgtagaataattcattttcccccatttgaaatggcaccttttcgtatactaaagtcccaagttttttagttataaaacagtattaaacccttgaaacaggccttttcctaaaatacattttgtttaagtaagacagttttcccccgggttaattaattctagaagtactctcgagggggggcccggtacccagcttttgttccctttagtgagggttaattgcgcgcttggcgtaatcatgggcatagctgttacctgggggaaatt

SEQ ID NO: 39065 - DNA, 436 bp, Homo sapiens
gtaatacgactactatagggcgaattggagctccaccgcggtggcggccgctttttttttttttttttttttttttttttttttttttttttttttttttttttttttttttttttggggggaatccatttatatgaaatgtccaaaacagggaaaacctttttttgacaacaaaaacccaaagtccttcaccatttgccaggggaggaggaaaacgggaggggaaaatattgctttacagggggatgacaaaattgttccggaacctgacaaagggggtgcctacacaactttctggatgtactaaatgcccctgattgttccctttcaagggattgaattttagggtttttgaatttcatctcaattaaaaaacccaaacacccaaactggtccccccttaattaaatctaaaagtactttttaagggggggcc

SEQ ID NO: 39066 - DNA, 407 bp, Homo sapiens
tatagggcgaattggagctccaccgcggtggcggccgcttttttttttttttttttttttttttttttaaagcaaaactccctacagccgagccccgttcggtgccttttcttttttttttctttaatggagtgaaatctactttgctcatgaagcctgcaaatcacattttcaggccaaacgaggcatttttttagaaggggtctcttaggcaggagttggaaggctttccactccactcacgcattttcagtgtaggcgaatcgtaaaacggggggcagaacgaaaatgaccggatctgggagtgcaggctgcgcttcttccccccgggttaattaattctagaagtactctcgagggggggcccggtacccagcttttgttccctttattgagggttaattgcg

SEQ ID NO: 39067 - DNA, 392 bp, Homo sapiens
atagggcgaattggagctccaccgcggtggcggccgcttttttttttttttttttttttttttttttttttttttttttttttttttttttttttttggaattacaaagctacttttaatacttgggggtgacccccacaggaataaaaaaccctgggaaggggtaaccccctcacccccgggagtggcccagggggaaagaggctacctggggggaaggaagcccaaaagggacccgttgcaaactcagggcaaagggaatgccatcggggctgggacctgggagccctacaggaggaaacccaaccgtggggggactggtttcaggcccacaggcaaagggcaagagggttggacccaaacccccaaagctccttgggttccctcctttt

SEQ ID NO: 39068 - DNA, 571 bp, Homo sapiens
actatagggcgaattggagctccaccgcggtggcggccgcttttttttttttttttttttttttgaggggaatgaatttaatataatctctataaaaaccctaatcacacagttttttacagaaatataggttattttttttttttattttttttagatggagtctcactctattgccaggctggagtgcagtggctgtagtggcctgatctcggctcactgcaacctctgcctcccggattcaagtgattctcctgcctcagcctcccgagcagctgggaatacaggcacccgccttaattaattctagaagtactctcgagggggggcccggtacccagcttttgttccctttagtgagggttaattgcgcgcttggcgtaatcatggtcatagctgtttcctgtgtgaaattgttatccgctcacaattccacacaacatacgagccggaagcataaagtgtaaagcctggggtgcctaatgagtgagctaactcacattaattgcgttgcgctcactgcccgctttccagtcgggaaacctgtcgtgccagctgcattaatgaatcg

SEQ ID NO: 39069 - DNA, 429 bp, Homo sapiens
gcgtaatacgactcactatagggcgaattggagctccaccgcggtggcggccgcttttttttttttttttttttttttgaggggaatgaatttaatataatctctataaaaaccctaatcagcacagttttttacagaaatatagtttattttttttttttattttttttagatggagtctcactctattgccaggctggagtgcagtggctgtagtggcctgatctcggctcactgcaacctctgcctcccggattcaagtgattctcctgcctcagcctcccgagcagctgggaatacaggcacccgccttaattaattctagaagtactctcgagggggggcccggtacccagcttttgttccctttagtgagggttaattgcgcgcttggcgtaatcatggtcatagctggttcctgtgtgaaat

SEQ ID NO: 39070 - DNA, 431 bp, Homo sapiens
gtaatcactactatagggcgaattggagctccaccgcggtggcggccgctttttttttttttttttttttttttttttttttttttttttttttttttttaatgggggcatcctattttaagggtgctttcattattttattttttatacagatacataccccttgctagaatcaaagcaaaaattttaatgggcgggtcctacaaaactaaagtgaaacaaaacaaaacaccgaacaactgaaaaacaatagctataaactttcaaggccaaaaaataaaatttaagggcaatcccttttgaaaaaggaaaaggagtttaaagttcctaaagagggttttataatgcaaatttaatgccagctttttagtaataaaaaagagaagggctttactatacactgactagcacataatacttaatttggaaaa

SEQ ID NO: 39071 - DNA, 172 bp, Homo sapiens
ctcactatagggcgaattggagctccaccgcggtggcggccgcttttttttttttttttttttttttgggatgctcaacctataatacccaaaggctctatttcagtagaatttattggtttgctgattatagcagggacatagcttgcattctagaagaccttagaaaatg

SEQ ID NO: 39072 - DNA, 445 bp, Homo sapiens
cgtaatacgactactatagggcgaattggagctccaccgcggtggcggccgcttttttttttttttttttttttttttttgggggagagaatcatttatgcaggctgcagagaaagcacttgctagagaaattttcataactataagggagcaaaaaactaatagccaagaccatgggataaagacctggaaagcatttatcctatttattcatttggtggctcatttattttttgttaattttattggaatataagctctataaaataaaatggacctgctgctcttgcgtatcactgtatgtcaagaagttatcatacagtatgaggcaaagtgggcactaaacaaatgtttattttgatgaggaaaagatggataaattgatgacaaaggtgtgacatatttcttgtcccaaaaaaaatgaacacctttggggcacttaaag

SEQ ID NO: 39073 - DNA, 410 bp, Homo sapiens
gtaatacgactactatagggcgaattggagctccaccgcggtggcggccgcttttttttttttttttttttttttgggatgcacaacctataatacccaaaggctctatttaaggagaacatatcggttagctggttataccagagacgtacttgcattctacagaccttacaaaatgcagaaaattttaagaaaaacatttaaattgtgctcataatgaaaactgaaaggtaaccactcttaatattatggggcataaccattccagtcttttatctttctcaaagtttcacataaactttctcaaaggccattaaatacttttccatagcctgattttttgtgaccacatagtactcctattttattgataataccataatttacctaacccatttttatatatttgg

SEQ ID NO: 39074 - DNA, 434 bp, Homo sapiens
tacgactcactatagggcgaattggagctccaccgcggtggcggccgcttttttttttttttttttttttttttttttttttttttttttttaattaccctctcacaggaccaacttttatttaattaattcatttagggacaaatttttaaaagtaaagggaatgaacccatttgtaattaaaatccatagacagaacttcaatgtaaaaaaaaaaaaaacttgttgggaaacagatgatgaaaaaccctgtaaaacttttcacaaacccccaaaaagctcacattgtaaacaggattaacctgcttttgattaaccccgtaacatcaaggtttaattttgctcaccctgaaatctcgctcaatttcaaacggcctgtgatccactcggccgaggaaggctttccgttcaatgaccccctttttccctcaatt

SEQ ID NO: 39075 - DNA, 471 bp, Homo sapiens
tatagggcgaattggagctccccgcggtggcggccgcttttttttttttttttttttttttttttttgaggaaggcacctacaaaacgaaagtgcctagggcttacaaaagtcatatgtagcctttacaaatattagctcagtcattttcagaaaggtttttccaattatcattttagagatgaggaaactgaagctcagggaggctaggaaacttatccaaagcctcttaagaggctatgttagtcagactgggctaacagctgtaacaaccccagaatttaaatggcttaacacattaggagtttatttgttattgccataacaattcagggtgtatgtttggcaggtagtctacacagtgattcagggacccaggctccttccctctggtggctttttctccctctagtgctgggagctctccatgcagatggtggatggagaaagagaacaaaatgtgggggatttt

SEQ ID NO: 39076 - DNA, 454 bp, Homo sapiens
tacgactactatagggcgaattggagctccaccgcggtggcggccgcttttttttttttttttttttttttttttttttaggacaaaaatctgggttttatttattcatttgtaaactcaagccaggtctctattccactttttccaattatttgcttttgagagtctcaggattatccttccttcctctccttccacattttctcccctggccctttttcctggccaggcttctttagtcccgacggtcttgtttaaatcacaatgcggtttggagattttccttcactctctctttcagaaaaaaatgccaaaatggggttttaagaagcttttattgagcccactgaacttcaacaaagcaaacgaaaacataaagttgggaaaggaacccttttcaacaaatggggttgggataattggcaagccacatgtaggagaatttaaactggat

SEQ ID NO: 39077 - DNA, 266 bp, Homo sapiens
tagggcaattgagctccccgcggtggcggccgcttttttttttttttttttttttttttttttatgtctgttcttacgtatttttttttaaacttttatttcagtagtgtttggggaacaagtagtgtttggttgcatggaaaagttcttcagtggtgatttctgagattttggtgcacccatcacccaagggtagtctttttttattccatcaagtctgtacccccatgtgtaggctttggtttctttcttttattttttttttg

SEQ ID NO: 39078 - DNA, 550 bp, Homo sapiens
gcgcgtaatacgactactatagggcgaattggagctccaccgcggtggcggccgctttttttttttttttttgcagacggagatgggctctgtcacccaggctggagtgcaatggcatgatcttggctcactgcaacctccacgtcccgggtacaagcgattctcctgcctcagcctcccaagtagctgggactacaggtgtgtgcaaccacatccaggcaattttggatttttagtagagatgggatttcaccatgttggccaggctggtcttgaactcctgaccttgtgatctgcctgccttggcctacaaagtgctgggattataggcatgagccaccgcgcccagctagaaaatacatttttgaagcaataataaagatgtgaaccaaatttagtgttctcaacatgtcaagccttaccgacaatgcaaagcaatagaaactcaaagcaatagaaactgctggtgagatataacctggttcaacccggtggaaatactttggcattaaacatgccaaactaaagttaaatacgcacataatctaca

SEQ ID NO: 39079 - DNA, 432 bp, Homo sapiens
gcgcgtaatacgactcactatagggcgaattggagctccaccgcggtggcggccgcttttttttttttttttttttttttttttggggtcacatgcgcatttattattgtctggaacatcaaggcctttcctcccctggcagtggcacaagggagggccaactctcaggaggcggccacgctgccaccagcagcaggcccatggggtggcagggtcatgggcggcagaaacagcgccttcagcttgcctgacaagctggcgatctcaggatcctgggcttcgtaagacttgaccaagcgagcaaacttaaggacaccttccccgtcgcagctgaagccataggctttgataacctcctgctggatctgcgtggccacgggcagcacgaattgcagcatcttacccatgtcgttgcaggcgttatcccgagcc

SEQ ID NO: 39080 - DNA, 308 bp, Homo sapiens
acgactcctatagggcgaattggagctccaccgcggtggcggccgcttttttttttttttttttttttttttttttgaggaagtcacctacataacgaaagtgcctagggcttacaaaagtcatatgtagcctttacaaatattagctcagtcattttcagaaaggtttttccaattatcattttagagatgaagaaactgaagctcagggaggctaggaaacttatccaaagcctcttaaaaagctatgttagtcagactgggctaacagctgtaacaaccccaaaatttaaatggcttaacacatt

SEQ ID NO: 39081 - DNA, 436 bp, Homo sapiens
tacgactactatagggcgaatgggagctccaccgcggtggcggccgctttttttttttttttttttttttttggggaaggagtttcactcctgttgccaaggctggagtgcaatggcgcaattaggctcactgcaacctcctcttcccgggctcaagtgattctcctgcctcagcctcccgagtagctgggattacaggtacccaccaccatgcccagctaattttttgtatttttaatagagatggggtttcaccatgttggccaggctggtcttgaactcctgacctcaggtgatccacctgcctcggcctcccaaagtgctgggattacaggtgtgagccatggtacccaacctttctcaacatttttgtctgtccccacacacaggctcaacagccagagaaagccaagggcctataggcagggcaacaaca

SEQ ID NO: 39082 - DNA, 561 bp, Homo sapiens
gactcactatagggcgaattggagctccaccgcggtggcggccgctttttttttttttttttttttttttttgagacggattttcactcttgttgcccaggctggagtgcaatggcgtggtcttggctcaccgcaacctctgcctccctggttcaagcaattcttctcctcaacctcccgagtagctgggattacaggcacctgccaccacgccctagctaatttttgtatttttagtagagacagggtctcactgacttcaggtgacgcccgcctcggcctcccaaagtgctgggattacaggcgtgagccatcacgcccagctggaaccattataacttgtaacaaaatatagaatataaattattggtttattggggagttcaaatatgaattttaataaaaccaaatcttttacaagttgaatataacatttcttactgtgcccatttagacaggggtccatccaaagggcattttatctgattttctgaaagatacattaagtatctaattttagataacccgcgttaattaattctagaagtactctcgaggggg

SEQ ID NO: 39083 - DNA, 419 bp, Homo sapiens
taatacgactactatagggcgaattggagctccaccgcggtggcggccgcttttttttttttttttttttttttttttttagatggagtcttactccgtcacccaggctggagtgtggtggtgtgatctcagctcacagcaacctgacctcatgtgattcacccgcctctgtctcccaaagtgctgggattacaggcgtgagccactgcgcccggcgtctttgaattttttaaactgaagtttaattgcctttgagtttgatcattcactatttggcatttggatttcttttgttaatcatctgctcaagctctaatttcataatggaaatttaatggattaacatattacacccactatcacccgcctttaattaattctagaagaactctcgagggggggcccggtacccagctttt

SEQ ID NO: 39084 - DNA, 433 bp, Homo sapiens
  misc_feature 12: n = A,T,C or G
cgactactatanggcgaattggagctccaccgcggtggcggccgctttttttttttttttttttttttgagacagactgactttgtcgccaggctggagtgtggagtgcagtgacacaatcttggctcactgcaacctctgcctcctgggttcaagcgattctcctgcttcagcgctcctaagtagctgggattacaggcacaccccaccacacccggctaatttttatattttcagtagaaatggggccccaccatgttggccaggctggtctagaactgctgacctggtgatccacctgcctcgggttcccaaagtgtgagtgactgcacccagccttgctgaattttcttaaaactctttttttctgacatcttgagttaaaagtcttttgttattctttgagacaggatctggctatctcacccaacct

SEQ ID NO: 39085 - DNA, 499 bp, Homo sapiens
  misc_feature 79: n = A,T,C or G
cgtaatacgactactatagggcgaattggagctccaccgcggtggcggccgcttttttttttttttttttttttttttntgggtctgtatttcttattaaaatgattggtctaagaccaaagatcttgtccctgtagctctctattgtattccttgttcctaaaaggttcctgggacatacagttcaaaaatatatatctgatgtacgaatgactgaataagtgaatgtgaccataacgcagaaattccctaagaaatgctttgtcctgataggtctccagtctctgcagaggacaaagagaaatattctaaggtcccaaaaagtctttcctggtgtgccacataagacctcctattcagttcagtgtaatatttcccacataccagacaatctttctttaggattccacagaaatttgagcaggcaactagtcctatcctccgcttttcccaccctcatcaccaaatttactactcccacaatcatagttaccattta

SEQ ID NO: 39086 - DNA, 166 bp, Homo sapiens
  misc_feature 82: n = A,T,C or G
cgcgtaatacgactactatagggcgaattggagctccaccgcggtggcggccgctttttttttttttttttttttttttttnggaggactatgataggtgaaatggtatgactataaaaaggatttgtttctttttgtctcctggaatgacatgatgcctttctag

SEQ ID NO: 39087 - DNA, 661 bp, Homo sapiens
gactactatagggcgaattggagctccaccgcggtggcggccgctttttttttttttttttttttttttgggggaagatgaagaaatttcactcaagtattttgttactttaagattcaatgctggacactagaccagctataacattttcagatagagtgacttcatgcgtgaaatgatcacatacaatgaagaggttttaaaaaatacagatgacataacttgttcagttgaagaaaattaaaatactgatataaactaaatcattctcctcttcattttagggggatttttctctgcaattgtactgatttatgactagaaagctgaagactgatttgagcctctttagcaatactctatttcaccatttatcttccaaagaattatggctattttatttcttccaatgaagctggaaaattataatatgccagcagatcagtagaaatgtaaaaatattagtagttacccttttagatccaacttacctgtagtgaaatagcagcaatgcattctctatttgaggacaaaacataaaaaccctggcttcataaacatagagtattaaaaaatctcagaagtttaatgtgtagacatttgctaatatttctgtatgtctcagcactcagtctgaattataaaacagaaaaaaatttag

SEQ ID NO: 39088 - DNA, 498 bp, Homo sapiens
gtaatacgactactatagggcgaattggagctccaccgcggtggcggccgcttttttttttttttttttttttttttttttaatgattgctttcttttaatcttaaagagataagtggactaacgtggataaagggctccatcttggacaacttgatcagtcttttcttctgtgctgaacagggcctgccaataacaagaaattcaacgccatttacaaagctttcttgtcttactctcagagaaagccattactgttcacatcattcaagaggctgtcaagctcacacctttcttaaataagtgttagctttttgggctgccttcccccagttgctctgtgctccaaacagatgcctgtgtttagtccccccccgttaattaattctagaagtactctttagggggggccccgtacccagcttttgttccctttaatgagggttaattgcgcgcttggcgtaatcatggtcatacctgtttcctgtgtgaaattgtt

SEQ ID NO: 39089 - DNA, 478 bp, Homo sapiens
gggcgaattggagctccaccgcggtggcggccgcttttttttttttttttttttttttacttgaattgttgttatagtgcttccgttatttatttttattttttttattatactttaagttttagggtacatgtgcacaacgtgcaggtttgctacatatgtatacatgtgccatgttggtgtgctgcactcattaactcgtcatttatattaggtatatatacgtgttcattgtacccttatcgactttgcagcatgcttatccatctaactattcatctttatttgccttcgttttttgagttcccttattcatcctaaaacaaaatataatgcctgactcatagtcagacttcacagtatttttaaatgaattacattgcattggggaaatataaatagtaatgtccttttatagaggaagtctaaaagaaattcttgggtgaattgataatcaaacatttttaagaaggtatat

SEQ ID NO: 39090 - DNA, 413 bp, Homo sapiens
tatagggcgaattggagctccaccgcggtggcggccgcttttttttttttttttttttttttttttggaccagagaggccccaaactatcagcctgtcctcctcagtagccccagcatcccttcatcattttgttgcccttctatgggcctagtttaggtctgagaggcatagttttaaaatttttattgttatttatttattctagagataaggtcttgctatgtttcccaggctggtcttgaactcctggccttaagcaatcctcctgcagaagcctcccaaagtgctgggattacaggcatgagccaccacgtttggttagacaggcttagttttacaaatatgcgggtggataaatgctgtccagtctttacttcatcaattctatcaattgaatgcttttggttggaa

SEQ ID NO: 39091 - DNA, 391 bp, Homo sapiens
taatacgactcctatagggcgaattggagctccaccgcggtggcggccgctttttttttttttttttttttttttttggagaaggagtctcgctctgtggtccaggctggagtgcagtggtgcaatctcagctcaatgcaagctccgcctcctgggttcacaccattctcttgtctcagcctcccgagtagctgagattacaggcacctgccaccacgcccggctaattttttgtatttttagtagagatggggtttcaccgtgttagtcaagatgatctcgatcttctgacctcgtgatccacccgccttagcctcccaaagtgctgggattacaggcgtgagccaccgcacccggcctttcctgtcatttttaatggatatatggggag

SEQ ID NO: 39092 - DNA, 487 bp, Homo sapiens
atagggcaattgagctccccgcggtggcggccgctttttttttttttttttttttttttttttttgagacggagtctcgctctgtcacccggggctggagtgcagtggcgtgatctcagctcactgccagctccgccttccgggttcatgccattctcttgcctcagcctcccgagtagctggggctacaggcgcctgccaccacgcccggctaattttttgtatttttagtagagacgagatttcaccgtgttagcaggatggtctcaatctcctgacctcgtgatccacccgcctcggcctcccaaagtgctgggattacaggcgtgagccaccgcgtccggcctggaccctcttagttaataattttaaagcaaaactgtgggcgattttgctgtgccttaagagaattgctataaagatgatatctgggaccttagctggaaaaactttgattgttaaggcccttggtgcttaaaaaaaatta

SEQ ID NO: 39093 - DNA, 576 bp, Homo sapiens; identical to SEQ ID NO: 38972

SEQ ID NO: 39094 - DNA, 639 bp, Homo sapiens
gtaatacgactcactatagggcgaattggagctccaccgcggtggcggccgctttttttttttttttttttttttttttttgagacagagttttgctcttgtcacccaggctggagtacaatggcacaatcgcggctcactgcaacctccacctcccgggttcaagtgattctcctgcctcggcctcctgagtagctgggattacaggcacctgccaccatgcctggctgtttttcatatttttagtagagacggggtttcaccatgttggccaggctggtcttgagctcgcgacctcaggtgattcgcccacctcagcctcccaaagtattgggattacagatgtgagccactgtgcccggcacttttctgcttttaaatacaatgattttagaaagtctgtatatgaactttgggcttgtacctagatatcccagtgtgtgtagggagccctgtatatctgcaaggggatccattagaccaaggatattagatccagcacttctcctttttaatgcatgtcataagcacatgattttatatcatgtcagaaaaaggctgttgatataaaggaagagaacaaagaatgagaagaactatatcccgcgttaattaattctagaagtactctcgaggggg

SEQ ID NO: 39095 - DNA, 661 bp, Homo sapiens
gactcactatagggcgaattggagctccaccgcggtggcggccgctttttttttttttttttttttttttttggacggagtcttgctctgttgcccagactagagcacagtggtgcgatcttggctcactgcaacctccgcctcccaggttcaagcgattctcctgcctcagcctcatgagtagctgggatgacaggcgcccaccaccacgccgtctaatttttgtatttttagtagagactgggtttcaccatcttggccaggctggtctcgaactcctgacctcaggtgatccgcctgcctcggcctctcaaagtgctgggattacaggcgtgagccactgtgcatggccagcttgacaaactttctaattgactggctcctgtgcattgctcatccttctctctcatttgttagtggctaggaaaaagaaagaagtttgttatctgagaaatgtgagtccttttaaagtctcaggataacagaggcatttaaaatgcaacagcagtctcttctcactcttcctggcactaaataatgacctcttgaagccacttgctatatgggctttacactgactgaagccaagtaaccataaaatgccatatgctggacaccataacccataccctatagttcagcaatctatagccaaacccta

SEQ ID NO: 39096 - DNA, 646 bp, Homo sapiens
gcgtaatacgactcactatagggcgaattggagctccaccgcggtggcggccgctttttttttttttttttttttttttacttgaattgttgttatagtgcttccgttatttatttttattttttttattatactttaagttttagggtacatgtgcacaacgtgcaggtttgctacatatgtatacatgtgccatgttggtgtgctgcactcattaactcgtcatttatattaggtatatatacgtgttcattgtacccttatcgactttgcagcatgcttatccatctaactattcatctttatttgccttcgttttttgagttcccttattcatcctaaaacaaaatataatgcctgactcatagtcagacttcacagtatttttaaatgaattacattgcattggggaaatataaatagtaatgtccttttatagaggaagtctaaaagaaattcttgggtgaattgataatcaaacatttttaagaaggtatatttgctagcaaagaaagaaaaaatatgacagcttatttatatagaaaacctatgtattctgggatttttctttgtttcaagtctgtatatgaatatcatgctatcccttcccccgccttaattaattctagaagtactctcgaggggg

SEQ ID NO: 39097 - DNA, 568 bp, Homo sapiens
gactcactatagggcgaattggagctccacgcggtggcggccgctttttttttttttttttttttttttacttgaattgttgttatagtgcttccgttatttatttttattttttttattatactttaagttttagggtacatgtgcacaacgtgcaggtttgctacatatgtatacatgtgccatgttggtgtgctgcactcattaactcgtcatttatattaggtatatatacgtgttcattgtacccttatcgactttgcagcatgcttatccatctaactattcatctttatttgccttcgttttttgagttcccttattcatcctaaaacaaaatataatgcctgactcatagtcagacttcacagtatttttaaatgaattacattgcattggggaaatataaatagtaatgtccttttatagaggaagtctaaaagaaattcttgggtgaattgataatcaaacatttttaagaaggtatatttgctagcaaagaaagaaaaaatatgacagcttatttatatagaaaacctatgtattctgggatttttctttgtttcaa

SEQ ID NO: 39098 - DNA, 486 bp, Homo sapiens
gactcactatagggcgaattggagctccaccgcggtggcggccgcttttttttttttttttttttttttttttttttttttttttttttttttttttttttaaaaaaagaacacagctttttttttttttttaaccatgggaggacaaaaaatttaattccttcactatcttttcgtgggaaaaactgaaaatttttgccattttatgggatgccctccctcagcaggaacccgggttaattaattttaaaagtcctctcgggggggggcccggcccccaacttttgttccctttagggagggttaattgcccccttggcgtaatcatgggcatagctgtttcctggggaaaattgttatccgctcacaattccacacaacatacgagccggaagcataaagggtaaagcctggggggcctaatgagtgagctaactcacattaattgcgttgcgctcactgcccgctttccaggcggaaaacctg

SEQ ID NO: 39099 - DNA, 571 bp, Homo sapiens
gcgtaatacgactactatagggcgaattggagctccaccgcggtggcggccgcttttttttttttttttttttttttttttttccacccaggctggagtgcaggggcacgatttcggctcactgcaacctttgcctcccaggttcaagcaattctctgcctcagctgcccgagtagctagatttacaggtgcctgccaccacacccagctaatttttgtatttttagtaaagacggggtttcaccatcttggccaggctggtcttgaactcctgaccttttcatccatccacctaaacctctaaaagtgctgggattacaggcgtgaaccaccgtgtgtggctggaactcttctttttaaaactatcagattttatgaggcttattcactatcacgagaacagcatgataaagaagtgcccccatgattcaattacctcccactgggtccctcctacaacatgtgggaattcaagatgagatttgggtggggacacagccaagccacatcattccacccccggcccctcccaaatctcatgtcctcacatttcaaaaccaatcatgccttg

SEQ ID NO: 39100 - DNA, 633 bp, Homo sapiens
gtaatacgactactatagggcgaattggagctccaccgcggtggcggccgcttttttttttttttttttttttttttttggagctgaatttattataatcctttttttttttttttttaaagatggaatctcactctattgcccaggttggagtacagtggcgcaatctcggctcaccgcaacctccgctttccacctcctgggttcaagtgattctcctgcctcagcctccctagtagctgggattacaggcacatgccaccatgcccagctaattttgtatttttactagagataaggtttcaccatgttggccaggctggtcttgaactcctgacctcaagtgatccacccacctcagcctcccaaagtgctgggattagaggcgtgagtcactgcacccagcataatcctctttcttaaacataattatttttattttatttggatttttctattttacttactttactctttatgatctttaatattggagttacattcaacatgactttatgcattaaaattatttttcattgtcaatcaaatattaaataaccatgtaagcagagtttcgtcttaggtttttgaccacttattatagtcttgaattttatgaggttcaactggctg

SEQ ID NO: 39101 - DNA, 634 bp, Homo sapiens; identical to SEQ ID NO: 32242

SEQ ID NO: 39102 - DNA, 604 bp, Homo sapiens
gactcactatagggcgaattggagctccaccgcggtggcggccgcttttttttttttttttttttttttttggctgagatcttcttattcaacccatatcaatttgactggacttgtagcattcaaatattaacacagatttcaaattttagaaagatatttgtactagaatacttgtcaggtaactctgtggtatttctattagtatggaaattgtttataaagacacactctgaatttttgtggtcaagtagggtttgtagaatctttgatagcccagcatgttaaaatgtaaatgttctagaaaaataatctttcactttccctgtgaaaagaccccgcaaaaagttttttgaggggtgtgttaaatatataaattttgaaagacgtagacaaaatagttaactatctacttatgatatttaatagtttggccaggcatggcaactcatgcctgttgtaatcccagcgtattgggcggctgaagtaggaggattgtgtgagcccaggcgtttgagactgcagtgagctatggatcctgcctggatgaccgggcaagaccccaagtcaaaaaaaaaaagtaatagtttaatgaacatttaaa

SEQ ID NO: 39103 - DNA, 99 bp, Homo sapiens
  misc_feature 64, 77: n = A,T,C or G
ctatagggcgaattggagctccaccgcggtggcggccgcttttttttttttttttttttttttngggggtttaattnaatttttttttttttttttttt

SEQ ID NO: 39104 - DNA, 395 bp, Homo sapiens
  misc_feature 76: n = A,T,C or G
tacgactcactatacggcgaattggagctccaccgcggtggcggccgctttttttttttttttttttttttttttngggaattattatttaatgagaaaaaaatccacgtgtatacaacatttcaaaacagaagttaaatcattaaatagtactttttatttaaatgtttataggcagatctatgagaatgatagaaaacatggtgtgtaatttgatagcaatattttggagattacaagagtttagtaattaccaattacacagtttaaaagaagataatatattccaagcagatacaaaatatctaatgaaagatcaaggcaggaaaatgagtataactaattgacaatggaaaatcaaatttaatgtgaattgcacattatcctttaaaagc

SEQ ID NO: 39105 - DNA, 551 bp, Homo sapiens; identical to SEQ ID NO: 38866

SEQ ID NO: 39106 - DNA, 56 bp, Homo sapiens
ctatagggcgaattggagctccaccgcggtggcggccgcttttttttttttttttt

SEQ ID NO: 39107 - DNA, 471 bp, Homo sapiens; identical to SEQ ID NO: 39075

SEQ ID NO: 39108 - DNA, 667 bp, Homo sapiens
gcgtaatacgactactatagggcgaattggagctccccgcggtggcggccgcttttttttttttttttttttttttttaacttttgacagagactagatcttgctatgttgctgaggttgctcttgaactcctgggctcaaagaatcctctcatttcagcctcttcaactgctggtattacaagcatgagccaccatatgggctggaagctgatttttaaaatactgagaccatatagatgacagcacccagagaaacagaaatattaactgaagttgttgctggcagaccattctttctttccacctttctttcttcctccctccccctcctccatctttttacttttcgtcctcttcctttctcttctttctctccttcattatccctttcactgtttctctttctccctttcttttttcttttctttcccccgcgttaattaattctagaagtactctcgagggggggcccggtacccagcttttgttccctttagtgagggttaattgcgcgcttggcgtaatcatggtcatagctgtttcctgtgtgaaattgttatccgctcacaattccacacaacatacgagccggaagcataaagtgtaaagcctggggtgcctaatgagtgagctaactcacattaattgcgttgcgctcactgccc

SEQ ID NO: 39109 - DNA, 401 bp, Homo sapiens
gcgtatacgactactatagggcgaattggagctccaccgcggtggcggccgctttttttttttttttttttttttttacttgaattgttgttatagtgcttccgttatttatttttattttttttattatactttaagttttagggtacatgtgcacaacgtgcaggtttgctacatatgtatacatgtgccatgttggtgtgctgcactcattaactcgtcatttatattaggtatatatacgtgttcattgtacccttatcgactttgcagcatgcttatccatctaactatttatctttatttgccttcgttttttgagttcccttattcatcctaaaacaaaatataatgcctgactcatagtcagaacttacagtatttttaaaatgaattacatt

SEQ ID NO: 39110 - DNA, 432 bp, Homo sapiens
gtatacgactactatagggcgaattggagctccaccgcggtggcggccgcttttttttttttttttttttttttttttttgagagggaaaattttgctgttttgcccaggctggagtgaagtggtattatcttggctcactgcaacctccgcccacccaggttcaagctattctcctgcctcaaccttctgagtagctgggattataggcacccactgccacacctggctaatttttgtatttttagtaaagacggggtttaaccacgttggccaggctggtctcgaacttctgacctcaggtgattcacccgccttaattaattctaaaagtactttcgagggggggcccggtccccatcttttgttccctttattgagggttaattgcgcgcttggcgtaatcatggtcatagctgtttcctgggtgaaa

SEQ ID NO: 39111 - DNA, 502 bp, Homo sapiens
atacgactactatagggcgaattggagctccaccgcggtggcggccgcttttttttttttttttttttttttttgaaaaagaatcacagccaaaataagacattaactgcaaaatccaaaatggctgcgcttaccctatgtataaaaatgcgtccagtccggtcggggcacggcctatgctttcccggggatcttggcccgcttgcgtgcaatagccttcctccacggccttcagctgtttcaacagctcctcccgccttaattaattctagaagtactctcgagggggggcccggtacccagcttttgttccctttagtgagggttaattgcgcgcttggcgtaatcatggtcatagctgtttcctgtgtgaaattgttatccgctcacaattccacacaacatacgagccggaagcataaagtgtaaagcctggggtgcctaatgagtgagctaactcacattaattgcgttgcgctcactgcccgctttccagacggga

SEQ ID NO: 39112 - DNA, 483 bp, Homo sapiens
cgactactatagggcgaattggagctccaccgcggtggcggccgctttttttttttttttttttttttttttttggaggaaggcacctacaaaacgaaagtgcctagggcttacaaaagtcatatgtagcctttacaaatattagctcagtcattttcagaaaggtttttccaattatcattttagagatgaggaaactgaagctcagggaggcttggaaacttatccaaagcctcttaagaggctatgttagtcagactgggctaacagctgtaacaaccccagaatttaaatggcttaacacattaggagtttatttgttattgccataacaattcagggtgtatgtttggcaggtagtctacacagtgattcagggacccaggctccttccctctggtggctttttctccctctagtgctgggagctctccatgcagatgggggatggagaaagagaacaaaaagtgggggatttttata

SEQ ID NO: 39113 - DNA, 504 bp, Homo sapiens
tacgactactatagggcgaattggagctccaccgcggtggcggccgcttttttttttttttttttttttttttttttaaagcaaaactcccgacagccgagccccgttcggggccttttcttttttttttctttaatggagtgaaatctactttgctcaggaagcctgcaaatcacattttcaggccaaacgaggcagtattttagaaggggtcgctgaggcaggagtaggaaggctttccactccactcacgcattttcagtgtaggcgaatcgtaaaacggagggcagaacgaaaatgagcggatctgggagtgcaggctgcgcttcgtccccccgcgttaattaattctagaagtactctcgagggggggcccggtacccagcttttgttccctttagtgagggttaattgcgcgcttggcgtaatcatggtcatagctgtttcctgtgtgaaattgttatccgctcacaattccacacaacatacgagccggaagcataa

SEQ ID NO: 39114 - DNA, 389 bp, Homo sapiens
actactatagggcgaattggagctccaccgcggtggcggccgcttttttttttttttttttttttttttttggagacagagttttgctcttgtcacccaggctggagtacaatggcacaatcgcggttcactgcaacctccacctcccgggttcaagtgattctcctgcctcggcctcctgagtagctgggattacaggcacctgccaccatgcctggctgtttttcatatttttagtaaagacggggtttcaccatgttggccaggctggtcttgagctcgcgacctcaggggattcgcccaccttagcctcccaaagtattgggattacagatgtgagccactgtgcccggcacttttctgcttttaaatacaatgattttagaaag

SEQ ID NO: 39115 - DNA, 296 bp, Homo sapiens
ctactatagggcgaattggagctccaccgcggtggcggccgcttttttttttttttttttttttttttttggagacagggttttgacatgttggtcaggctggtcatgaactcctggcctcaagtgatccacctacctcggcctcccaaagtgctgggattacaggtgtgagccaccgcgcccaaccctgtgtttattcttaggtctgtactacgctttatgcctcagtttccacagttaaaacacgttattttattcctcacgttataggagcaatttgtattcataaacttggc

SEQ ID NO: 39116 - DNA, 374 bp, Homo sapiens
acgactactatagggcgaattggagctccaccgcggtggcggccgctttttttttttttttttttttttttttttttttggattcatataaagacttttatctattgtgcaaagagagggtcatctggctccccagaaggttctcaaccccatcaagactgtccattttacatctttagctccagttcttcttaaagagtaaaagtgctccaaaggcctgtgatcatgggtactgattaagggctgcaaacttttcagatccagttaaatccctggtgtttgagctgtgtgggagctgtggttgcttgcttcctggctttgcctgaggtcctgccgcaaaccctgcagcagctggtttaggagtgtaagggggc

SEQ ID NO: 39117 - DNA, 380 bp, Homo sapiens
actatagggcgaattggagctccaccgcggtggcggccgcttttttttttttttttttttttttttttggggggaaggcacctacaaaacgaaagtgcctagggcttacaaaagtcatatgtagcctttacaaatattagctcagtcattttcagaaaggtttttccaattatcattttagagatgaggaaactgaagctcagggaggctaggaaacttatccaaagcctcttaagaggctatgttagtcagactgggctaacagctggaacaaccccagaatttaaatggcttaacacattaggagtttatttgttattgccataacaattcagggggtttgtttggccggttttctacacagtgatttagggacccag

SEQ ID NO: 39118 - DNA, 500 bp, Homo sapiens
tatagggcgaattggagctccaccgcggtggcggccgcttttttttttttttttttttttttttttggagacagggtctcactctgtcacccaggctggagtgcagtggcgcaatctcagctcactgcagcctctgcctcccaggttcaagcggttctcctgcctcagtctcccgagtagctgggattacaccaccacacctggctaatttttgtatttttggtatagacgggttttcgccatgttggccaggctggtgtcaactcctgatctcaagtgatctgccagcctcggcctcccaaagtgctattacaggcgtgagccaccacgcctggcttaggctgcttaaatattctttcttaggtatccttggttttggaaaaaaaaagaataaccgaaaactaaaaattcccagtggcagtctctgtttcactggaatttaactttttgtttgttggttttttgagatggagtctcgctctgttgcctaggatggcgtg

SEQ ID NO: 39119 - DNA, 499 bp, Homo sapiens
tacgactactatagggcgaattggagctccaccgcggtggcggccgctttttttttttttttttttttttggaggggaatgaatttaatataatctctataaaaaccctaatcacacagttttttacagaaatatagtttattttttttttttattttttttagatggagtctcactctattgccaggctggagtgcagtggctgtagtggcctgatctcggctcactgcaacctctgcctcccggattcaagtgattctcctgcctcagcctcccgagcagctgggaatacaggcacccgccttaattaattctagaagtactctcgagggggggcccggtacccagcttttgttccctttagtgagggttaattgcgcgcttggcgtaatcatggtcatagctgtttcctgtgtgaaattgttatccgctcacaattccacacaacatacgagccggaagcataaagtgtaaagcctggggtgcctaatgagtgagc

SEQ ID NO: 39120 - DNA, 438 bp, Homo sapiens
cactactatagggcgaattggagctccaccgcggtggcggccgctttttttttttttttttttttttttaagacggagtcttgcactgtcgcctaggctggagtgcaatagtgcgatcttggctcactgtaagctccacctccggcgttcacgccattctcctgtctcagcctcccgagtagctggaattacaggctcccgccaccacgcccggcctttttttgtatttttttagtagagacagggtttcactatgttggccagactggtcttgaacttctgacctcgtgatccgcctgcttcggcctcccaaagtgctgggattacaggtgtaagccacagtgccccgccttaattaattctagaagtactctcgagggggggcccggtacccaacttttgttccctttagttgagggttaattgcgcgcttggcgt

SEQ ID NO: 39121 - DNA, 462 bp, Homo sapiens
tacgactactatagggcgaattggagctccaccgcggtggcggccgctttttttttttttttttttttttttttgaagcacaaatgcttttatattcagcccctgtaaagccatcaaatgtttgaaagttgttaaacaccaaccaaagggtttaattttaagaacttagctaggaatgggtgaaatcctacccaattaataggagttctgcaaattattaacaaagtgtaaaatgaaaggaagggtcccttggagatgtgaaattcttttattgagagtcctgtcttctttattcaagaagtttgtagccatgtttagaactcactcaagaaccaacttcttaatttagatttcagccaacaagtcatggccaaaaattcccaaagagaaacaccaccccattgaaaaggattaaaagccagaggtccaaccagtaggagtgtttgggaagcccatttgccc

SEQ ID NO: 39122 - DNA, 481 bp, Homo sapiens
atacgactactatagggcgaattggagctccaccgcggtggcggccgcttttttttttttttttttttttttttttggaaggagattgtttctgctaggcaatataatctgctaatgggacagtttccctgtaacaatgtgtagcaaaactctgcacgattaatgagaagaatgtattgcctttgaagcagcaccacttgagtaaaaattcctcaaatgggctctatgttatgctagtggaagaatagcaccggaggatatttgttgggcctactttgcaagcctttgacaggtgctgtgcagctcccaccatgaactgatctgctaattgaagagggtcccaggaaggggaagggccctatggcctccattctacccagggagattgggtgaatatctggcatgtaattaagtgctagctcagggggggctgtttctggcatatagggtacccaacggacaggggatcctggactggggg

SEQ ID NO: 39123 - DNA, 503 bp, Homo sapiens
tatacgactactatagggcgaattggagctccccgcggtggcggccgcttttttttttttttttttttttttttttttgaggaaggcacctacaaaacgaaagtgcctagggcttacaaaagtcatatgtagcctttacaaatattagctcagtcattttcagaaaggtttttccaattatcattttagagatgaggaaactgaagctcagggaggctaggaaacttatccaaagcctcttaagaggctatgttagtcagactgggctaacagctgtaacaaccccagaatttaaatggcttaacacattaggagtttatttgttattgccataacaattcagggtgtatgtttggcaggtagtctacacagtgattcagggacccaggctccttccctctgggggctttttctccctctagggctgggagctctccatgcaaatggtggatggagaaagagaacaaaaagtgggggatttttataggccaggcctggaattg

SEQ ID NO: 39124 - DNA, 498 bp, Homo sapiens
actactatagggcgaattggagctccaccgcggtggcggccgctttttttttttttttttttttttttttctctctttagacagagtcttactctgtcacccaggctggagtgcagtagtgcaatcttggctcactgcaacctccacgtctcatgttcaagtgattctgctgcctcagcctcctgagtatctgggattataggcacacaccaccatgcccggctaatttttgtatttttagtagagactgggtttcaccatgttggccaggctggtctggaactcctgacctcatgatctgcccgccttaattaattctagaagtactctcgagggggggcccggtccccagcttttgttccctttagtgagggttaattgcgcgcttggcgtaatcatggtcatagctgtttcctgtgtgaaattgttatccgctcacaattccacacaacatacgagccggaagcataaagtgtaaagcctggggtgcctaatgag

SEQ ID NO: 39125 - DNA, 206 bp, Homo sapiens; identical to SEQ ID NO: 35966
  misc_feature 66, 96, 97, 100, 107: n = A,T,C or G

SEQ ID NO: 39126 - DNA, 636 bp, Homo sapiens
  misc_feature 581: n = A,T,C or G
tacgactcactatagggcgaattgggccctctagatgcatgctcgagcggccgccagtgtgatggatatctgcagaattcgccctttcgagcggccgcccgggcaggtaccttacaatgttagtaactgtcttttattaaggaagaaaaagttaaaatggcatgtaacttaagaaggtgggagaataataaaggaaaaaattaagaacaaaacgaaaagaatcatgaaatagtaaaacagtaaaattaagatataaatctcagagttggttatttgaaaagatcaatgaaacagagtaattctggaaaaaccaatgagaacaaaaagggaaagcacacgcaacatgggaatgaggaagcagaatactacaactccaggccaacaaatctgaaaatagaacagaatcactatttaggaaaattcacttaattaaaaaaaatttttttttgagaaagggtcttgctctgtgtcccaggcatgctcacggctcactgcagcttcggcccccagggctcaagtgatcctactgcttcagcctcctgagtagctgggactacaggcacacaccaccatgcctagcntaattggagtggcggctatgttgcccaggctgattgtgaactcctgggctcaagc

SEQ ID NO: 39127 - DNA, 637 bp, Homo sapiens; identical to SEQ ID NO: 36357
  misc_feature 25, 471: n = A,T,C or G

SEQ ID NO: 39128 - DNA, 437 bp, Homo sapiens
ctatatggcgaattgtgccctctagatgcatgctcgagcggccgccagtgtgatggatatctgcagaattcgccctttcgagcggccgcccgggcaggtaccctcaataaggtaagagtccagcttgggggttggaggaagctgtctgatccaactggaggtgtgtcctaagcctctgactctggctgggaaaggataataggccctggtcacagttagtgttcttctagatggcgagatgatctcatccaaaggacttctgactgggccaaaccatcaaatgtagtgacagcattggggtcctgccctctctgtcactgtcctcccaaaacaggttgccatgaagcatacgtcagctgtgacagcttgtaatctggatctggagaacctgggcacagattcaaaccgcagcattggcacgctggccatcaccaccc

SEQ ID NO: 39129 - DNA, 588 bp, Homo sapiens
gtccgaggcatcaaaggctgcataatgtctcctccacaggtattggtggttacttaggaccattgcctactagtgaaacaatcaacctcaacccagctttgcccttctgagcccctgaaagatcagctcgaatggggctgggaacatggaggggcgtgctgctgcacatggacctgtgaagtagtcagggcttctgtcccacgtggctgccccaaaacctttgtgaggtactgccctctgtacagtaagccatcatagtgtacatccgtttacttttatagtaagagacagaagaagagggcacagttttaaaacaatgatatgtaaaacagtgcgaaggtatgatttcctctctgaactaagtgtgaccgtgggtaactcttggtgtgttggacacccacttgaacagccactaccctggcccagatcagaatacggcaatggcatcccgaaccactgtatggcactcagcctgcggaaggggaaagtcacagagcaatccccaagagctttgagtctgaaaagtctgaggcaaacaaactcacacaggatcaatttaagtaacagagaacactgacaggggagctt

SEQ ID NO: 39130 - DNA, 512 bp, Homo sapiens
actactatagggcgaattgggccctctagatgcatgctcgagcggccgccagtgtgatggatatctgcagaattcgccctttcgagcggccgcccgggcaggacgcggggagttgtgagggggaaggtagactctttccagacctttgataaaggggctgctcaaaaagccacgaccctgggcctctgctaaaaccatggctttaagtaaggagggagcagatatataaaaaaccttatccccctttctaatctcttatgtcctgtgagtgtcacccattgagtaaacccaggtggaagtcagcaggaaagtagctgggatgatgcagtctttacaggttatatgctgaaatgattttggatgtacctcggccgcgaccacgctaagggcgaattccagcacactggcggccgttactagtggatccgagctcggtaccaagcttggcgtaatcatggtcatagctgtttcctgtgtgaaattgttatccgctcacaattccacacaacata

SEQ ID NO: 39131 - DNA, 492 bp, Homo sapiens
  misc_feature 187, 188: n = A,T,C or G
ctatagggcgaattgggccctctagatgcatgctcgagcggccgccagtgtgatggatatctgcagaattcgccctttcgagcggccgcccgggcaggtaccaagccaatgagttggagtttgccagggaggcttctaaatttattctgctgtgaattctaagtggggcatttggaaacttcatatnncctggacattttcttagcgtgacttagtaattaaatgtgcatccaaaaaaaaaaaaaaaaaacctgcagatttgcgctcaaccccaatttggttcatctgaacacaggagcacttgagaaatgcaaaattctttaatcactccaaattgcccaagcacaaaccaggccaagagcgtcaattgcttctaaaataagatgcaggtgttctgaaaaatctacaagcagtctgctcattttaaattactcttcactccatgtgcccatagggaagggaggattgaagaaggcgtttttttttcatcac

SEQ ID NO: 39132 - DNA, 589 bp, Homo sapiens
gactactatacggcgaattgggccctctagatgcatgctcgagcggccgccagtgtgatggatatctgcagaattcgccctttcgagcggccgcccgggcaggtaccattcttatctcagaatgctgtaaaccatcagtagaagcagtttagatttggactgcatggaaaatgaaaagtaataaccctccaaccacaacctagtcagggtattaataattatatgtagcaagaaaacaaagaagaaaataatattgaaaaaatggagattccccaaccagtttcatatttgaaggatctgagttgtatttttattaaggaaattttttttctgaatactgtcttccaaaatgttaacattaaaatctgaatcagaggactctgaatggaaaagaagtttgatcactgacacctagggctctgaagcgtgtgtggccacatggaaaagtcgaaggatgcgctgtcgaatctcctttgtcttcactccatagacaattgggttgagcacaggaggaaccagcagatagatattggccaaaatgacgggcagcggaaagtcacgccgcttgctaaagcgatgcaccatggac

SEQ ID NO: 39133 - DNA, 593 bp, Homo sapiens
ctatagggcgaattgtgccctctagatgcatgctcgagcggccgccagtgtgatggatatctgcagaattcgccctttcgagcggccgcccgggcaggtacatattatatgcaaggttacaaaaaaaaatcaatggttaatgattttttagctcaaccaagctaaaagatgtgaacaacgaaattgaactcaaaacaacttaagatacaaagctcttgttactgataatgtctaataatattcatcaatttaccatatcttgttcttatattaaaatgttctatcattttcctaattattttaaagtcgattacaaaaatatatatatattcttgtagtgccagaaaattgaatacattaataaatggggtagaatagatgaatctcccatgaagaagaattccaaataatttatgaactctgccctcaaggatatggagcacaactttctacttctctagtgtgagctgaatagtgacttccttccaaaaattacatatggaaagggggaaaataactttgtagtggagaaatctgataaacactatctcggctaggttatcaagattaacactaacattaataagtcacac

SEQ ID NO: 39134 - DNA, 391 bp, Homo sapiens
tatagggcgaattgggccctctagatgcatgctcgagcggccgccagtgtgatggatatctgcagaattcgccctttcgagcggccgcccgggcaggtacccgaaaagaaaggaagctttagtaatgaaaggattgctgccaaaatcctgtttcccccttgcagatcttacagaaaacagccacagaatcccaaggcatcagcaccaagagagcctgtagaaactatctggtctaagctcctgaagcccagagataagaatgacttaacccaagctgcacagcctcttaacagtccactgttaaccccagaaacagatgcatttgaatctgaaaggagacaggaatcctaatcctactgctcagggacttgctgatttactttgctgtcta

SEQ ID NO: 39135 - DNA, 392 bp, Homo sapiens
cactactatagggcgaattgggccctctagatgcatgctcgagcggccgccagtgtgatggatatctgcagaattcgccctttcgagcggccgcccgggcaggtccgggcaggtacaggtgttactatattacctgtaagaccacactcggtgtcatctcctgcaaactagtcctctcctgactcctctgtttctgtgagtgattctgcgatggcttgaggtcatccgtttgctttgaaagatcacacaccaggatacatacagagatgtgacccggatggatggacccttgcctcacaatcagggtagaagcctctggttttcttatttctttgtcctcctctgtggtgtgacacaggttcaggaggaggtacctcggccgcgaccacgct

SEQ ID NO: 39136 - DNA, 564 bp, Homo sapiens
ccctctagatgcatgctcgagcggccgccagtgtgatggatatctgcagaattcgcccttagcgtggtcgcggccgaggtactggaacatttgcagctgaaggaaaatctccaaaaaagatttcaaagagactaaagtaggaatgggtgctggaaatgagcaagaagggtgagagtcccacgggtgaagggagaaagcagcagagaatgaatataagcccggagaatgaacataaatgtgaggggaagaggccagaggccaacactggaaggacagtgagggccaagaaaggaactactaatgtttctgagacctgcagggaaccatggtattaagctctcattaccagcacctaattttttagaggctggttttccaacttaagtgaaagaaattcaccctgtttttagcaattatgacgcactatatttacttctgtcacattagctgattctgtggtggactgggtaatttgaaaagctcctttgaacatgaattgtttgtaaacttacagtctagcaataagcctaatttttaaaacagaatgcttaatttctccctgta

SEQ ID NO: 39137 - DNA, 262 bp, Homo sapiens
tagggcgaattgggccctgtagatgcatgctcgagcggccgccagtgtgatggatatctgcagaattcgccctttcgagcggccgcccgggcaggtacttttctttgtctttttttttgagacggagtctcgctctatcccccatgctggagtgcagtggcgcgatctcagctcactgcaagctccgcctaccatgttcacgccattgtcttgcctcagccttccgagtagctgggactacaggcacccgctaacatgccca

SEQ ID NO: 39138 - DNA, 497 bp, Homo sapiens
tggcgaatagggccctctagatgcatgctcgagcggccgccagtgtgatggatatctgcagaattcgcccttagcgtggtcgcggccgaggtaccattcttatctcagaatgctgtaaaccatcagtagaagcagtttagatttggactgcatggtaaaatgaaaagtaataaccctccaaccacaacctagtcagggtattaataattatatgtagcaagaaaacaaagaagaaaataatattgaaaaaatggagattccccaaccagtttcatatttgaaggatctgagttgtatttttattaaggaaattttttttctgaatactgtcttccaaaatgttaacattaaaatctgaatcagaggactctgaatggaaaagaagtttgatcactgacgcctagggctctgaagcgtgtgtggccacatggaaaagtcgaaggatgcgctgtcgaatctcctttgtcttcactccatagacaattgggttgagcaca

SEQ ID NO: 39139 - DNA, 466 bp, Homo sapiens
ccctctagatgcatgctcgagcggccgccagtgtgatggatatctgcagaattcgccctttcgagcggccgcccgggcaggtactattctcctcacctatagtattggactccttgaaaccaatgtgaatttacctggtattctgtgaggtgacctactgttgtttttctagaatagggagtagcaatagatgactgttcatggtgaactctaccttgtaaaacagaattatgtatttgcctgacttgcttgatcaaatggctactgtctgtcaccctgagaagaatattgaaacatagatgttcactgctacttcacttcactggctaagattcctgggtagacttcactgggctcctggtctctatttccattaagactcctttgctttgctatagcagcctgaaaaattccaagaattttaaaaagttatttttcatcttcagagaggacacattactcgatg

SEQ ID NO: 39140 - DNA, 607 bp, Homo sapiens
atacgactcactatagggcgaattgggccctctagatgcatgctcgagcggccgccagtgtgatggatatctgcagaattcgcccttagcgtggtcgcggccgaggtactactaaagaagagattactatttctggaagaaacaaggagagaggtgacagctgcttattacaggaaatgatttaccagagatcctatagcaagttaggagcggactcagggctagaaacagaatcaataaaataggtattaataataatggaagtctctgaattctcttcatttctttccttttctccttttttttctctcttcctttcttttttttttgagagggggacagggtcttgctctgtcacccaggctggagtggcacagtgtacctgcccgggcggccgctcgaaagggcgaattccagcacactggcggccgttactagtggatccgagctcggtaccaagcttggcgtaatcatggtcatagctgtttcctgtgtgaaattgttatccgctcacaattccacacaacatacgagccggaagcataaagtgtaaaacctggggtgcctaatgagtgagctaactcacattaattgcgtggcgctcact

SEQ ID NO: 39141 - DNA, 582 bp, Homo sapiens
ccctctagatgcatgctcgagcggccgccagtgtgatggatatctgcagaattcgcccttagcgtggtcgcggccgaggtacctggaggtgcaaggtgtgcgccgaggaaatagagttgaagaaagcaactggggactagttttatgaccagaaagtgaatcgctttgcttaccgcacaggtagtgagataatcaggatgtccctgcgccacaaacctgcagtgagtaaaagagagacagcgggacagtccctccttcatcagacacagatgggtgacatctggccaggaagaaagatcattcaggagcggcagaaggagcccagtgtgctatttgaagtgccaaagctgaaaagtggaaagagtgcattggaagctgagagtgagagtctggatagcttcacagctgactcggatagcacctccaggagagactctctggataaatctggcctctttccagaatggaagaagatgtctgctcccaaatctcaagtggaaaaggaaactcagcctggaggtcaaaatgtggtatttgtggatgagggtgagatgatatttaagaagaacaccagaaaaatcc

SEQ ID NO: 39142 - DNA, 519 bp, Homo sapiens
gatgcatgctcgagcggtcgccagtgtgatggatatctgcagaattcgcccttagcgtggtcgcggccgaggtacgcggggagggtagagcgagaagcaccagcaggcagtaacagccaacccttaccattgctagggcagagaactggtggagcctttctcttactcccaggacttcagcacctaagacagctccaaaacaaaccagaacagtcagctccgggggagcacgactgggcgagaggcacagaaatggacaccagaaataaggcccagctccttgtgctcctgactcttctcagtgtgctcttctcacagacttcggcatggcctctttacagggcaccttctgctctcaggttgggtgacagaataccctttgagggagcaaatgaacctgatcaagtttcattaaaagaagacattgacatgttgcaaaatgcattagctgaaaatgacacaccctattatgatgtatccagaaatgccaggcatgctgatggagttttcaccagtgac

SEQ ID NO: 39143 - DNA, 519 bp, Homo sapiens
ccctctagatgcatgctcgagcggccgccagtgtgatggatatctgcagaattcgcccttagcgtggtcgcggccgaggtaccattcttatctcagaatgctgtaaaccatcagtagaagcagtttatatttggactgcatggtaaaatgaaaagtaataaccctccaaccacaacctagtcagggtattaataattatatgtagcaagaaaacaaagaagaaaataatattgaaaaaatgggggttccccaaccagtttcatatttgaaggatctgagttgtatttttattaaggaaattttttttctgaatactgtcttccaaaatgttaacattaaaatctgaatcagaggactctgaatggaaaagaagtttgatcactgacacctagggctctgaagcgtgtgtggccacatggaaaagtcgaaggatgcgctgtcgaatctcctttgtcttcactccatagacaattgggttgagcacaggaggaaccaacagatagatattggccaagatga

SEQ ID NO: 39144 - DNA, 621 bp, Homo sapiens
ccacgcgtccgaggcatcaaaggctgcataatgtctcctccacaggtattggtggttacttaggaccattgcctactagtgaaacaatcaacctcaacccagctttgcccttctgagcccctgaaagatcagctcgaatggtgctgggaacatggagggcgtgctgcctgcacatggacctgtgaagtagtcagggcttctgtcccacgtggctgccccaaaacctttgtgaggtactgccctctgtacagtaagccatcatagtgtacatccgtttacttttatagtaagagacagaagaagagggcacagttttaaaacaatgatatgtaaaacagtgcgaaggtatgatttcctctctgaactaagtgtgaccgtgggtaactcttggtgtgttggacacccacttgaacagccactaccctggcccagatcagaatacggcaatggcatcccgaaccactgtatggcactcagcctgcggaaggggaaagtcacagagcaatccccaagagccttgagtctgagaagtctgaggcaaacaaactcacacaggatcaatttaagtaacagagaacactgacaggggagctgttcctagacagcagtggctaccggtgc

SEQ ID NO: 39145 - DNA, 369 bp, Homo sapiens
ccctctagatgcatgctcgagcggccgccagtgtgatggatatctgcagaattcgccctttcgagcggccgcccgggcaggtaccattcttatctcagaatgctgtaaaccatcagtagaagcagattagatttgtactgcatggtaaaatgaaaagtaataaccctccaaccacaactctagtcagggtattaataattatatgtagcaagaaaacaaataagaaaataatattgaaaaaatggagattccccaaccagtttcatatttgaaggatctgagttgtatttttattaaggaaatttttttttctgaatactgtctttcaaaatgttaacattaaaatctgaatcagaggactctgaatgg

SEQ ID NO: 39146 - DNA, 539 bp, Homo sapiens
ctatagggcgaattgcgccctctagatgcatgctcgagcggccgccagtgtgatggatatctgcagaattcgccctttcgagcggccgcccgggcaggtaccacttaatagtattgagttcatccgaactggtgaggtcgagacaggctgatctgttgtcctgttggttgatgtgatcaagagggtcatcggaatgacagctaccagtgaaatgatccacaccacagcacaggctacaactgcacatcgagttttgtgaatggaaaagcagctcattgggtgaatgatcacacagtagcggaagatgctgaaacaggtgaggaagaggatgctgctatacaggttgaaatggaagctgaagcggataaacttacacatgaaatctccaaagatccagttttcgccactggcatagtagtgaatcaagaaggggaggctggtcagatacagcaaatctgtgcaggccaggttcagcataatgatggtgctgctcttccaaggtctcattttgaaaatgtaagtggatatcactactgcat

SEQ ID NO: 39147 - DNA, 348 bp, Homo sapiens
tatacgactcactatagggcgaattgggccctctagatgcatgctcgagcggccgccagtgtgatggatatctgcagaattcgccctttcgagcggccgcccgggcagatacctcttattccagagaagtggggagcagagaggaagatggagtggaaaggggcgaggcaaggccctcctgaaatacctcaacccaaatcttcaagaaatccccaagtcctcacagtgctttttgtggatttttgtggaaaccggtaaaaagggctgatttgctgaccccagtgggtagaaaacagagactgtcaagagaacagaagagaaggcagaaaggggatggggaagtggggt

SEQ ID NO: 39148 - DNA, 605 bp, Homo sapiens
ccctctagatgcatgctcgagcggccgccagtgtgatggatatctgcagaattcgcccttagcgtggtcgcggccgaggtacctgaaggaacgaagaagagggatttctcaaggtgagaagcagttctccatggaccctgatgacagcacaggcaagtttcctatgactagggatcactgtccacacagagtctggcttcccaggtatccagcaggtagacaaaacagctaactccactgccactcctttctccacatccgttcctatttctcagccatctcagtgacatccgccatcttgagagtcaactactgactggactgagttgtgtggtatatgcttctgtttacttctcttctgtcttttttaagtggccaaatagcaaacgcttaaataggaaatctctgggagacttgaataaaagactttgcttggtagaaaatcatgtcacagaaaggctaatagacagcaaagtaaatcagcaagtccctgaacagtaggattaggattcctgtctcctttcagattcagatgcatctgtttctggggttaacagtggactgttaagaagctgtgcagcttgggttaagtcattcttatctct

SEQ ID NO: 39149 - DNA, 500 bp, Homo sapiens
agatgcatgctcgagcggccgccagtgtgatggatatctgcagaattcgcccttagcgtggtcgcttccgaggtacagtgaaaagagccaaggctgtgtgaccccctcatcacttagccaggcgtatggtcctggtttctgaggctgcagaaagcatcttagcaatttgtgtttggatggtccatgcctgactattctaggctggaggttcctaaagagtaacaagaggaagagaaacaagaatctctgacacttgttgagaatagagcacagtcccatttgtttgaaaagagacaccaggcagccatgtttatgtgccagaaatgcattccacctcaaggaggacttaatttatggacccgtgtgtgccaggctgagctgggcaagatctttctcaggacaaactctgccatgcagctaaaagcctggaaactaaaggatttcatgtagtaaactatcttccaacccctgtagacatcagaccgcaggatgaggtttca

SEQ ID NO: 39150 - DNA, 318 bp, Homo sapiens
atgcatgctccagcggccgacagggtgatggatatctgcagacttcgcccttagcgtggtcgcgggcgcggaacaagctcaggatgctccgaatgaagttaaggtcccttgcccatccggagaggcctcactggtcggatgatcttgtcctgatggaaaacgttgaaacagacttccaacctattctttgcccagagatgcagaaggaactgttgccaggacacatggccataaataatagaaagaaagctacaaccacaggctgcgtgaaagcttcacctcaccctttctggaaagcaaaaatagtatgaaaaaaac

SEQ ID NO: 39151 - DNA, 584 bp, Homo sapiens
tacgactcactatagggcgaattgggccctctagatgcatgctcgagcggccgccagtgtgatggatatctgcagaattcgcccttagcgtggtcgcggccgaggtacatcccagctgattcagtatttccttctctttgaaaactctcacagaaactgccctataacttctactgacatctcatctcaatggctagatcagtgctatataacaaaactttctgcagtgatagaaatgttctatatctgaactatccaagatgttagctactagccacttatgactgtttagcatttaaaatgtcacttgtggaactgacaaaatcaacttttaattttacttgattttaataaatttaaatttaaatagatacatgtgtctagtggctaccacaataaatagtgcagggctagaccttaatcacatcactaccccatctgcaagaaaagctggaaaatgaaggtttggagctaaacacgttgctaccctccacaaaattatgtttttcttagtaaggaaaaacaaacaaaaatgaatataggctgggcagataacagcctctgcaaccaagggatatttgctt

SEQ ID NO: 39152 - DNA, 364 bp, Homo sapiens
ctcactatagggcgaattgcgccctctagatgcatgctcgagcggccgccagtgtgatggatatctgcagaattcgcccttagcgtggtcgcggccgaggtactacagagatgccttgattccaagtatcccacttactttccacaaccaaaagttttgttccagttttcataaagctctaaatcttttggagaaacactatgtcgcacagttctaaaagcattttcaaaatcaatgtaagctatgggtcgaacttgatccggtgttatggtagcaatgtcagcagtttgtaagctgcgaataggaccaatagaagcctccctgcaaagctgtgtcatgtctgctcctgaaaacgcatcagact

SEQ ID NO: 39153 - DNA, 394 bp, Homo sapiens
tacgactcctatagggcgaattgggccctctagatgcatgctcgagcggccgccagtgtgatggatatctgcagaattcgcccttagcgtggtcgcggccgaggtacccgaaaagaaaggaagctttagtaatgaaaggattgctgccaaaatcctgtttcccccttgcagatcttacagaaaacagccacagaatcccaaggcatcagcaccaagagagcctgtagaaactatctggtctaagctcctgaagcccagagataagaatgacttaacccaagctgcacagcctcttaacagtccactgttaacccccagaaacagatgcttttgaatctgaaaggagacaggaatcctaatcctactgctcagggacttgctgatttactttgct

SEQ ID NO: 39154 - DNA, 527 bp, Homo sapiens
gactactatagggcgaattgggccctctagatgcatgctcgagcggccgccagtgtgatggatatctgcagaattcgccctttcgagcggccgcccgggcaggtaccattagctacagtgatcttagcttccttgcttacaattgttcagtgggtcatctaaattcttccatgtcctgagcatgatctacaaacattgtctagcttctgtctctccgtcttcccgccatcattgtgctgtagccatatggaactcctttcagttctctgaccatgccctttcctgcctcagatttcagcttaaattttgcctcctcagagagatgccttcccaaactccccatctgaagctggcctctgccttttactccctatcatgtcactctctgctcaccatccttatcacaatgtctatttgatttgtttgctagtttactgtcttcacaacataatgtccgtttgtgcaagggtcttatttttcttattcatgtctgtatctcaagggtctagcacaatgcttgatgcata

SEQ ID NO: 39155 - DNA, 540 bp, Homo sapiens
tacgactcactatagggcgaattgggccctctagatgcatgctcgagcggccgccagtgtgatggatatctgcagaattcgccctttcgagcggccgcccgggcaggtacccgaaaatagtgtttctgtcattcaggcaagattctagctttgccttttccctacttcccattttctacctcagaaacagaaattggaatatgagagggtggagaatcgctttagaggaactgaaacggagtttgtaagttgaatggtttctagcccatgtgtaaacctgggtgcggtgtgagaggagctctgcacgactccacggaagggaacccagtgagttgtagctatagtttcctaattgatttagaggtgacagcgtaaacaatggctctaaaaaaaggtgaaactccatttaccaaaaccaaatttgacactagctcccaaagctaacttgttaatacagatttatcttaggctagtgaagtggcactaaatttgaaactgagagtcttgggtgctgtcttttatctgtcttggggcttactg

SEQ ID NO: 39156 - DNA, 486 bp, Homo sapiens
ctactatagggcgaattgtgccctctagatgcatgctcgagcggccgccagtgtgatggatatctgcagaattcgccctttcgagcggccgcccgggcaggtacagtgaaaagagccaaggctgtgtgaccccctcatcacttagccaggcgtatggtcctggtttctgaggctgccagaaagcatcttagcaatttgtgtttggatggtccatgcctgactattctaggctggaggttcctaaagagtaacaagaggaagagaaacaagaatctctgacacttgttgagaatagagcacagtcccatttgtttgaaaagagacaccaggtagccatgtttatgtgccagaaatgcattccacctcaaggaggacttaatttatggacccgtgtgtgccaagctgagctgggcaagatctttctcaggacaaactctgccatgcagctaaaagcctggaaactaaaggatttcatgtagtaaacta

SEQ ID NO: 39157 - DNA, 417 bp, Homo sapiens
cgaggtacaattggttcattccacagtttaaactaactggagctcctaaaagcagcagacaggaactgaatgaaaacccctgcgctgactgacttgtataatctagtggcctagcctggaagcctcatttttgtcacctgtaaaaggagattgtaagaggatgggtataaggagcttcataaacctggatgagatatttgagggggagggaacaatacttaccctcaaagctattaagaggcaggagatgggaatattccacaaagccacttctacaaacacgggagcctgttgagtcccagaagggacagtggttggtggcttccagacatgctgtgtcctcaagaatccaacaagcatcttcttcatcctggtcctgcccccagctgagtccagcgttaaaatgtcttaaaggac

SEQ ID NO: 39158 - DNA, 471 bp, Homo sapiens
gcgtatacgactcactatagggcgaattggagctccaccgcggtggcggccgaggtactgcatacattattgcttgtgcattagcttatgtatttgaatcacagaaattgccatcactgaatattgctatagaacatttaaatgggccacttgcagtgtctcatgcctgaatacattggaggctgaggcacgaggacagtttgaggccacgaggttgagactagcctggacaacataaggagatgcctgtctctacaaaaacataaaaataaatcagctggtatcaagcacagttccatggacatattaaaatctttttaaaaagtaaaaataggctgggtgtgacggttcatgcctgaaatcctaacactgagggacgccaaggtaggcgcatcacctgcagtcaagtgatccagaccagccttcccaatatggtgaaaccccgtctctactaatgctacaaaaattacc

SEQ ID NO: 39159 - DNA, 537 bp, Homo sapiens
cgactactatagggcgaattggagctccaccgcggtggcggccgcctgggcaggtacgcgggggccgcgggacgccaggaggcggaggcggagtggagttagattaaatgccttaatggataaagaaaaattggatgttaagattgaatattgtaactatgcaatggattcctcagtggaaaacatgtatgtaaacaaagtgtgggttcaatgtgagaatgaaaattgtttgaaatggagattgttatcaagtgaggattcagccaaggttgatcatgatgaaccatggtacctcggccgctctagaactagtggatcccccgggctgcaggaattcgatatcaagcttatcgataccgtcgacctcgagggggggcccggtacccagcttttgttccctttagtgagggttaattgcgcgcttggcgtaatcatggtcatagctgtttcctgtgtgaaattgttatccgctcacaattccacacaacataccgagccgggagcataaagtgtaaagcctggggtgcctaatgagtg

SEQ ID NO: 39160 - DNA, 444 bp, Homo sapiens
tacgactcactatagggcgaattggagctccaccgcggtggcggccgggatcttcggcaagactcacgtctccaacaaccaagctccccaaagtcctgacctcaagcaatccgcctgcctaggcctcgcaaagtgctgggattacaggagtgagccaccgtgcccagccaaaaagattttggaagagtgaatgaatacaaggatttccactagactgagaattagtttgtcaacagcatttcagtgtcttgagaagtgtttacatttggcgtggacaaagctggcagatgacgtagaaagtaaaaagttgcctcttcaaagtttcccttcttgttaaagaataaatcataaatgttagaaacaatagtttcttttaaaggactacttacttcaagcctccttgctttgggctaataactctgttaagccctattgtatgtaact

SEQ ID NO: 39161 - DNA, 609 bp, Homo sapiens
tacgactcactatagggcgaattggagctccaccgcggtggcggccgcccgggcaggtacttttatttctaaaaacatctgccaaataaaaccaaccaaaactcattattttcaccattaccaagagctagctctattaaatttatatcaacaagttaatctgtctctatatagggaaggtttccgcaaactaaaatctaaacctaacttttgtagacagggattatggtaggaatttggtattacaactaaaccagccagctaaggagtgaacctaagaaaaaatatattgcatatccttattgacagaatcacagttagatgctgcactaaaaccctaaatggtatatctctcagcccacgtaaaatttcagctcaagaagttcacaaatagaaacagataataatgttcaaatattacttaagagtgattacacttaagtcaaacatgggaaagaatagcaaatacaaaccccaaggaaaaatgagattatggtgatttccaaatgcagtttctatagattaggcagaggtaatcattttaaagtgattcattcagctacccagactctggaaaacaagtcggggatgaagcaaagctcttaatct

SEQ ID NO: 39162 - DNA, 498 bp, Homo sapiens
atacgactcactatagggcgaattggagctccaccgcggtggcggccgaggtacatggttaacaggcagcttgtgcccaatcccaaagcgggaagaaaggcctggctttggctcactgatgataaagtctcctcccactgcctttcagcagctctgccgaagagctgatcaagatgctgcaaacccagcttccccagaccggccaagagggaagaatgatgagcgtgttttaaattacaaagagggagcagcgcaggcagtttctggtctgggtgataaattgaaatccataaatatagcagtgctaatttgaagttctgtaattgtttgtgccatgagaatgtgtacctgcccgggcggccgctctagaactagtggatcccccgggctgcaggaattcgatatcaagcttatcgataccgtccacctcgagggggggcccgcgacccagcttttggttcctttagtgagggttaattgcgcgcttggcgtaatcat

SEQ ID NO: 39163 - DNA, 659 bp, Homo sapiens
actatagggcgaattggagctccaccgcggtggcggccgaggtacttgacaggaaatctcacacttgtgaattcagagctcgtgagcataaaattgctcttctaatcacttgcttttatttgctgatctttattggtgcattttattggtcaggatgtgattgagattatgtaataaacccaactgactgcttcttttaacttctgctattgaagtaatccctcagattactgtcttgagagacggagagtgcacacagtccaacagtgtgcactcttcctctgtaaagacagtagaaaggtatccatcttgttttaaatagtagcagggaggtttatcaatggcttaacatggtaggctgggcctggagagctctcaatgtaacagagctcaaatgtggcatttacatgaattctaagttgattaagcgacacaatttgttcaactataaaacataatacattcttaatagattttacctattattgtatatgtaagttcctagtacctgcccgggcggccgctctagaactagtggatcccccgggctgcaggaattcgatatcaagcttatcgataccgtcgacctcgagggggggcccggtacccaacttttgttccctttaatgagggttaattgcgcgcttggcgtaatcatg

SEQ ID NO: 39164 - DNA, 522 bp, Homo sapiens
tacgactcactatagggcgaattggagctccaccgcggtggcggccgaggtacatttcctaagccggaacactcaagcttttttcagggtgtttggctcttgcagcaaaacaattgagatgctaacagggaggattacagtgtttacagaacaaccttcagcgccgacctggaatggtaactttttccctcctcagatgaccttacttccactgcctccacaaagaccttcttaccatgacctggctttccagtgtggttctgacagcactactgataaccaaactggagtcaggtattttgtacctgcccgggcggccgctctagaactagtggatcccccgggctgcaggaattcgatatcaagcttatcgataccgtcgacctcgagggggggcccggtacccagcttttgttccctttagtgagggttaattgcgcgcttggcgtaatcatggtcatagctgtttcctgtgtgaaattggtatccgctcacaattccacacaacatacgagccgggag

SEQ ID NO: 39165 - DNA, 416 bp, Homo sapiens
ctgaacactaatgcactaagagtaattgtgaaagcttcagattgcgctattttgaactatatatctggatgatatattcatatatgcttgaataacttataagcaattgaaactttcaattacagtatactattgaagcaaatcaactaatatatacacatatccattagcaatagtagataatttttgtaaatgtccagcacagttcttcatatgtagaggatgttcaaattggctaagttccttttctctcttaattattagtatttttcctactgctctttgtataattattccttcctctttagctccaatccttacaatctattcttaacatagcaactggaagaaagtttttaaacataaaccagatgatgtcactccaccccacaaaacttgcactattctctgtcaca

SEQ ID NO: 39166 - DNA, 506 bp, Homo sapiens
ctatagggcgaattggagctccaccgcggtggcggccgaggtacctagaagagctccctgcaagtgtaaatattaaggatgacctgtgcaaaattatacccacaccagcactagtggtaattattctaaattattgtcaaaaagttttttttaatctgtctttcaagtttaccagaaaagaaagcagtaaatgcattgatgtcattttattatgtacctgcccgggcggccgctctagaactagtggatcccccgggctgcaggaattcgatatcaagcttatcgataccgtcgacctcgagggggggcccggtacccagcttttgttccctttagtgagggttaattgcgcgcttggcgtaatcatggtcatagctgtttcctgtgtgaaattgttatccgctcacaattccacacaacatacgagccgggagcataaagtgtaaagcctggggtgcctaatgagtgagctaactcacattaattgcgttgcgctcactgcccgc

SEQ ID NO: 39167 - DNA, 617 bp, Homo sapiens
tacgactcactatagggcgaattggagctccaccgcggtggcggccgaggtacttgacaggaaatctcacacttgtgaattcagagctcgtgagcataaaattgctcttctaatcacttgcttttatttgctgatctttattggtgcattttattggtcaggatgtgattgagattatgtaataaacccaactgactgcttcttttaacttctgctattgaagtaatccctcagattactgtcttgagagacggagagtgcacacagtccaacagtgtgcactcttcctctttaaagacagtagaaaggtatccatcttgttttaaatagtagcagggaggtttatcaatggcttaacatggtaggctgggcctggagagctctcaatgtaacagagctcaaatgtggcatttacatgaattctaagttgattaagcgacacaatttgttcaactataaaacataatacattcttaatagattttacctattattgtatatgtaagttcctagtacctgcccgggcggccgctctagaactagtggatcccccgggctgcaggaattcgatatcaagcttatcgataccgtcgacctcgagggggggcccggtaccc

SEQ ID NO: 39168 - DNA, 512 bp, Homo sapiens
ggagctccaccgcggtggcggccgaggtactgatgggatttatgctcaatagaattaaccaggaagcaacccctggagatatagttgaaaaattgggagctgatgcaaaaattctttcaaatgttatctcaaaaagcacgagaccaaatactcttgatattgggaagccacctttaagatcaaaaagagacagtctagaaaaggaatctagtgatgatgatacaccttttgatggttctaactatttggcagataaagtggattctcctggtatttttgacttagaagacttagacagtgaaacagatgtatcaaaagcaggatgtgttgctacacaaaatcccaagaggattcaacgtatgaacagcagcttttcagtaaaaccttttgaaaaaactgatgtcgcaacaggaattgatcccctctctcttttgggtgctgagactgaacagcagcaaaaagaagaagaggaggaaggatgaagatgatagcaaaggcattttaacaccatc

SEQ ID NO: 39169 - DNA, 641 bp, Homo sapiens
  misc_feature 412: n = A,T,C or G
tatacgactactatagggcgaattgggccctctagatgcatgctcgagcggccgccagtgtgatggatatctgcagaattcgccctttcgagcggccgcccgggcaggtactcacaagatctggttgtgtggcacttcccttcccccctctctttgccctgcacctgccatgtgagatactattcctcttttgccttccaccatggttggaaacttcctgatgcctccctacaagctgatcagatgttagcaccatgcttcctgtacgcgggcctcccctcagaacttcaaaagggcaagatcttttttccttcacttattgctgaaaccaagagcacaattcccattgagagaaagatctctgtgctgtaaactaaaacaaattgtgcattccttccggggccatcgtctntgttttcttttttgtcttgaatgaattttaaaaggaaatatataataaaaatgttaaccagaaggtaaacttgagtgtaattgtcagacagacacacttttccaccagtgtatttgaattttagaccagtgaccctgttttgtggcattcatgcaaaacatgctgagggctgtgttcatctggtcatcgtgtcccaatttcagtcatgtttgtagcaagattttggaag

SEQ ID NO: 39170 - DNA, 570 bp, Homo sapiens
actatatggctatatggcgaattgtgccctctagatgcatgctcgagcggccgccagtgtgatggatatctgcagaattcgcccttagcgtggtcgcggccgaggtaccagccagttactgagcccctgtcacccttgaagtgagttccacctgaccagtcttgagcagccaacaggctcaattaagcccgcctggtttttccatatggctcatgatctaatttaaggaacaagtaactaaaaatgttaagccagtgcaaaataatctgcttacctactcacattggaaaagccctctgagctgaataattctggccattcctgctgtcaacaatactgctgcccaaatgtggcttaggaggctgcttctgccacaaaaccgtcatactcttgtgcgtgccttgttctttgttcattcatctagcaggtgttcccagacctcgtgtatgacaggtagctagggagctcttggagatgtagcagttgggattgtgggagattactgggcttcctcatcctttagaatggtaactctccttttgctttctgaacacctaggaatttcctgat

SEQ ID NO: 39171 - DNA, 423 bp, Homo sapiens
tgtatacgactcactatagggcgaattgggccctctagatgcatgctcgagcggccgccagtgtgatggatatctgcagaattcgcccttagcgtggtcgcggccgaggtactcctaggtagatcggatattgacttggagaggtcttggagaaaggctgatgaaggtgatcgacagcctaaatctctgaagccgtctcttgatgcaacctctgacccaacaatctctgggtcttgctgttatcagctccatcagttttactggatggaataaaaaggcctacctcattgggctcgtgtgggtgaggagaactgaagagtctgagagcgcggcacgagccagaggctacggaaaacactgccctcctacactccaccttggagagacccagaaaagaacaagcttcatttgtaaaaaaggaaa

SEQ ID NO: 39172 - DNA, 570 bp, Homo sapiens
  misc_feature 483: n = A,T,C or G
gactcactatagggcgaattgggccctctagatgcatgctcgagcggccgccagtgtgatggatatctgcagaattcgccctttcgagcggccgcccgggcaggtacacggggaaactcattggagcacgaaccctgttgtgaacggcctatccgaaggatctaggttgtgtgccttcgtatgagaatctaatgccagatgatctatcattgtctcactttgcccccagataagaccatctagttgcagaaaaataagctcagagcttccactgattctacattatggatatgtgccgccgaagcaagcacaaagccctacttttacacatgcctagtgatgcttcatggacaaggcttggctctgttgagtccaactaacctacctgagattctgagatttctcttcaatggcttcctgtgagctagagtttgaaaatatcttaaaatcttgagctagagatggaagtagcttgggcgattntcattatcatgtaaatcgggtcactcaaggggccaaccacagctggaagccactgctcaggggaaggttcatattggactttctact

SEQ ID NO: 39173 - DNA, 588 bp, Homo sapiens
ccctctagatgcatgctcgagcggccgccagtgtgatggatatctgcagaattcgcccttagcgttggtcgcggccgaggtacactattttaatatgtaacagtctttttaaaaaaggatgccacaggcagcaaacacacaaaaggcagtgtctgatcatttttgtttcaaaataaaaggaatatacttatttatatgctattaaaatatctgtcttattttttgaggttaaaatattcggaaactacttttatgcattgtagcagtaatcatttatggaatgcttttgacatgttttaacagggtaaccaaaacttttaggcctgttttttttggttgtccttgttgttatatttttaatggaaatctgttactcaggctggtagcattaaattagctttttaccctcaactcaagtagcaaatatcatggagaacttcagtgtttagcaggctgttaatttcccatctatgaatagcactttatgatgtaggctaaactaagcaaataatgcagcgttatgtggatcattatgcaataaagctgctaaagtcacatttgtggttgatactcaagccttgtacctgc

SEQ ID NO: 39174 - DNA, 506 bp, Homo sapiens
aattcgtcctttcgagcggccgcccgggcaggtacttgcccaatgtttacccttacgacaacgcaggcaaacagtagcaggagcatttggccgtgtttgttgagccgcttggccgcttttaagtttttaacagtgtagtttttttgggtatgaccaagttggccacaattatagcaggctccaagaaaagaatcagtcgagccagtttggttgccgtgcttcatggccggtgcccacagaatagctctgtgggtctccgatccaacgccttcacaagctttaatatatgcaggcaacacctcatgatcaggtaaattttgacgtaggatggaatgcacggccattttacactcatggttcgcattttgaaaagctaacatatgaagaagaataccttgagtgtgctcatcagagacagatttttcaacagcatcttgtaatttagctaaaaaatcaagatataattcattgtgaccctgtttaacaatagtaaaagaaacagaagc

SEQ ID NO: 39175 - DNA, 475 bp, Homo sapiens
gactactatagggcgaatgggccttctagatgcatgctcgagcggccgccagtgtgatggatatctgcagaattcgcccttagcgtggtcgcggccgaggtacgcggggagcaagtatttaattggttggacattgcataaaagaggtccatatccaggctaactctagaaattttattctcaaacttagttggcctctttttcttctgtcagaggaccattcttagtggcactggggaaatcttggcacccagaagaattcaactgcgctcactgcaaaaatacaatggcctacattggatttgtagaggagaaaggagccctgtattgggagctgtgctatgagaaattctttgcccctgaatgtggtcgatgccaaaggaagatccttggagaagtcattcaatgcgttgaaacaaacttggcatgtttcctggtttgggtgtgtagcctgtggaaaagcccattcggaata

SEQ ID NO: 39176 - DNA, 602 bp, Homo sapiens
acgactactatagggcgaattgggccctctagatgcatgctcgagcggccgccagtgtgatggatatctgcagaattcgccctttcgagcggccgcccgggcaggtacgcgggacatcaatgcagagtccctctgtgaatttacaacacccaacacccatgagttcagtccttaagaagaaaattgagcaagtatttaattggttggacattgcataaaagaggtccatatccaggctaactctagaaattttattctcaaacttagttggcctctttttcttctgtcagaggaccattcttagtggcactggggaaatcttggcacccagaagaattcaactgcgctcacagcaaaaatacaatggcctacattggatttgtagaggagaaaggagccctgtattgcgagctgtgctatgagaaattctttgcccctgaatgtggtcgatgccaaaggaagatccttggagaagtcatcaatgcgttgaaacaaacttggcatgtttcctgttttgtgtgtgtagcctgtggaaagcccattcggaacaatgtttttcacttggaggatggtgaaccctactgtgagactgattattatgc

SEQ ID NO: 39177 - DNA, 596 bp, Homo sapiens
  misc_feature 415, 509: n = A,T,C or G
gagtcgacccacgcgtccgtgctgattgctttgagcataacgaaggtgtattggatatggtcattatagctccatacatctgatagatgagagaaaacttgtatgctgtgctaataattgcaatagaaatatataccgttttggatttgtaaacatcttagaaaaaatacctagaaaaaaactcttaatgagcaaatggattaacatgtctgctttccatttttaagtatcaggtatccaaccatattattaaaataaaaaccaccagagtacagtctccatagttagatttgtataagcaaccgcaaaacgatatagtccagtatctagcacagcatagtcaaacacatagtattatgcatatggtaaatgttaataaatgtttgtggaataactgcctatgaaaacttctttntgaggcttgtattagtaatgtaatttaccatagataactttcctcatgtttcaaactgctggtcattaccaattaaggggttgagaaaacactntagatctcatacagcatggtaaaaaagtagaatagaatggaagctatgagagtgtatcacatgtagttagaagattgtttttatgac

SEQ ID NO: 39178 - DNA, 384 bp, Homo sapiens
gactactatagggcgaattgggccctctagatgcatgctcgagcggccgccagtgtgatggatatctgcagaattcgccctttcgagcggccgcccgggcaggtactgctgaggacccagtggcatgtgggcaccgcataccccttagtcgcacccaactttcctctgccacactgctgaggatcagcctctctggcactctccacgcttcaggcccatagaaagatcatcagcaagactgagaaagcacaaaaattctcagcgtgtttcattgtattctttttcagttgaggaagccggtaaaagtgacatatcagatcttcatttcccaggcttttcaacaagatcaattattacagttatcagtgacaaatgcaaacttct

SEQ ID NO: 39179 - DNA, 683 bp, Homo sapiens
ccctctagatgcatgctcgagcggccgccagtgtgatggatatctgcagaattcgcccttagcgtggtcgcggccgaggtactgacttaaatttggaatttactaattactggggatactttagtgagtctgcatatgtgtattattaatacatgttaaaccatactgcagataacaaaaaatatacttacatttctcttccagagagtaatgactgtattcaaagtctgagggaatgacaaaacgggatgcgcatctaacactgatacacggttcttcagaaaagactagtttcagctgtttccaggtttacataagatgatggaagcagtctctaatatgttaatcaagaaaatatatgcaattgccagctactacatatacagaaaataaagatggtgagtcaaacaaaacatacaaacttggtaacttctcaccctccagatattttgaacatatttaaaaaatttgaagataggatatcactgtgatcttaaaaagagaactttaaaaataacacattatggaatagtaaaactgagctgctaaaaccaaagtagtgaacagttttcctgatgtcctcacactcttaactaaaacccagattaaaactaccagctaaatttaatctaagtgttgactttttaaatgtcaatactttcaaacctgctttaataatattt

SEQ ID NO: 39180 - DNA, 616 bp, Homo sapiens
actatagggcgaattgggccctctagatgcatgctcgagcggccgccagtgtgatggatatctgcagaattcgcccttagcgtggtcgcggccgaggtacatctacctaaaggactattatgtggaataatacatactaatgaagtattacatgatttaaagactacaataaaccaaacatgcttataacattaagaaaatcaataaagatacatgattgaaaccaagttgaaaaatagcatatgccttggaggaaatgtgctcaaattactaatgatttagtgttgtccctactttctctctcttttttctttctttttttttattatggttagctgtctcaaaacataaaatggaataacatatcaaatgaaacagggaaaatgaagctgacaatttatggaagccagggcttgtcacagtctctactgttattatgcattacctgggaatttatataagcccttaataataatgccaatgaacatctcacgtgtgctcacaatgttctggcactattataagtgcttcacaagttttatgtgttcttcgtaactttatggagtaggtacatgcccgggcggccgctcgaaagggcgaattccagcacactggc

SEQ ID NO: 39181 - DNA, 536 bp, Homo sapiens
  misc_feature 408: n = A,T,C or G
tagggcgaattgggccctctagatgcatgctcgagcggccgccagtgtgatggatatctgcagaattcgccctttcgagcggccgcccgggcaggtactaaatctctttttccccttctatcttttctccatctctctcacatttactttatttttcctctttattttctgagtcattgactcctttatttagaagtaaaggatattatgtgccatatttcttctagaatcactggaagaatgaatgggcctctcttagtagttatattaagttatgctttctcagttataaggaaggacaaaatgttgaacaattgtcataatcataatctgaaagacttaatttaaatttcatatgctaaactttcaggcggtagctgaagtttgacttaataaatacttatatanttttattattttataacaggtatggtaacacaagaatataacttttgaaaatgtgtgtttgcatatccaaacgaatattgttcttcgaagcatcacttagtgaaaatacgccctcattccaaaatatg

SEQ ID NO: 39182 - DNA, 708 bp, Homo sapiens
acgactactatagggcgaattgggccctctagatgcatgctcgagcggccgccagtgtgatggatatctgcagaattcgccctttcgagcggccgcccgggcaggtacacaagaagtatctaaacctcttccttcagaagggagcctagctgaggctgatcacacagctcatgaagagatggaagctcatacgactgtgaaagaagctgaggatgacaacatctcggtcacaatccaggctgaagatgccatcactctggattttgatggtgatgacctcctagaaacaggtaaaaatgtgaaaattacagattctgaagcaagtaagccaaaagatgggcaggacgccattgcacagagcccggagaaggaaagcaaggattatgagatgaatgcgaaccataaagatggtaagaaggaagactgcgtgaagggtgaccctgtcgagaaagaagccagagaaagttctaagaaagcagaatctggagacaaagaaaaggatactttgaagaaagggccctcgtctactggggcctctggtcaagcaaagagctcttcaaaggaatctaaagacagcaagacatcatctaaagatgacaaaggaagtacctcggccgcgaccacgctaagggcgaattccagcacactggcgggccgtactagtggatccgagctcggtaccaagcttggcgtaatcatggtcatagc

SEQ ID NO: 39183 - DNA, 544 bp, Homo sapiens
gactcactatagggcgaatggggccctctagatgcatgctcgagcggccgccagtgtgatggatatctgcagaattcgccctttcgagcggccgcccgggcaggtacacatcagcatcacctggagggcctttttttaaaataagacacagattgctgggctcatggtcagagttcccagttaagtaaatcaggaaatttgtatttctagcaagtttataggtgaggccaatactgctgttttgggaactatgctttgagaaccactgccttgaaaaaatttccaacttctacctttaagatcagcctgacttatcaaacgctagagaaaaactgaatctacccttgggcagatgacttgggattggattctatacagcagtcttgcttcaatcttccagttttcagttttattataccaacaattggtttttacaagctagaagacaatgaatgtataagttctatggaacagtgagataaatttaagcttcttggctttgtatttagaaacattgattctatggatgatcatttgtatcatg

SEQ ID NO: 39184 - DNA, 543 bp, Homo sapiens
ccctctagatgcatgctcgagcggccgccagtgtgatggatatctgcagaattcgccctttcgagcggccgcccgggcaggtacatctacctaaaggactattatgtggaataatacatactaatgaagtattacatgatttaaagactacaataaaaccaaacatgcttataacattaagaaaaacaataaagatacatgattgaaaccaagttgaaaaatagcatatgccttggaggaaatgtgctcaaattactaatgatttagtgttgtccctactttctctctcttttttctttctttttttttattatggttagctgtctcaaagcataaaatggaataacatatcaaatgaaacagggaaaatgaagctgacaatttatggaagccagggcttgtcacagtctctactgttattatgcattacctgggaatttatataagcccttaataataatgccaatgaacatctcatgtgtgctcacaatgttctggcactattataagtgcttcacaggttttatgtgttcttcgtaactt

SEQ ID NO: 39185 - DNA, 516 bp, Homo sapiens
actatagggcgaattgggccctctagatgcatgctcgagcggccgccagtgtgatggatatctgcagaattcgccctttcgagcggccgcccgggcaggtaccctcaataaggtaagagtccagcttgggggttggaggaagctgtctgatccaactggaggtgtgtcctacctctgacctggctgggaaggataatagccctggtcacagttagtttcttctagatggtgagatgatctcatccaaaggacttctgactgggccaaaccatcaaatgtagtgacagcattgggttcctgccctctctgtcactgtcctcccaaaacaggttgccatgaagcatccgtcagctgtgacagcttgtaatctggatctggagaacctggtcacagattcaaaccgcagcattgccacgctggccatcaccaccctgcttaagacgggcagcgagagcagcatcgaccgcctcatgaagcagatctcctccttcatgtcagaaatctcggatgaattca

SEQ ID NO: 39186 - DNA, 564 bp, Homo sapiens
  misc_feature 175: n = A,T,C or G
gactactatagggcgaattgggccctctagatgcatgctcgagcggccgccagtgtgatggatatctgcagaattcgccctttcgagcggccgcccgggcaggtacaagtgtagagtttgtataaataatcaaagttaaattgtcagtagcttaaagtagccatttatatgatgnttttatatacagtttcaagggtaactacaagagcaaataacttacaattagataccaaaagagataaaaagaaaaagacccaaagcataccactacagaaaaccatcaaaccacaaaggaagaaagcaatataggaagaaaggaacaaagcatctacaaaacaataagaaagcaatgatcaagatggtggtggtaaattcctacctagtaaagttatgttgaatataaatggattaaattatccaatcaaaaggcatagagtgtctgaatggattttaaaaaacaaaaaaccaagacccaactatatgcagcctatgagagattcatatcaccttaaaggacattcatagatggaaagtgaagacatgggaaaaatattctatgcaaat

SEQ ID NO: 39187 - DNA, 608 bp, Homo sapiens
acgactactatagggcgaattgggccctctagatgcatgctcgagcggccgccagtgtgatggatatctgcagaattcgccctttcgagcggccgcccgggcaggtacctcctcctgctcctcaagagtgtggtctattttgccatcatcacctgctgtctgcttagaagaacggcttctgctgcaatggagagaaatcataacagacggtggcacaaggaggccatcttttcctcatcggttattgtccctagaagcgtcttctgaggatctagttgggctttctttctgggtttgggccatttcagttcttatgtgtgtacccgaaaagaaaggaagctttagtaatgaaaggattgctgccaaaatcctgtttcccccttgcagatcttacagaaaacagccacagaatcccaaggcatcagcaccaagagagcctgtagaaactatctggtctaagctcctgaagcccagagataagaatgacttaacccaagctgcacagcctcttaacagtccaccgttaaccccagaaacagatgcatttgaatctgaaaggagacaagaatcctaatcctactgctcaaggacttgctgatttactttgc

SEQ ID NO: 39188 - DNA, 559 bp, Homo sapiens
ccctctagatgcatgctcgagcggccgccagtgtgatggatatctgcagaattcgcccttagcgtggtcgcggccgaggtacaatcatttcttcgtattgtttttaaagtagagcaatgatatgactagtctgaagtgaacatagtctagaagtcacttgcttggtttggggattagaagtatttgcaaggtgaaccacccattctcttctgcttatttacactacactgcttttatccataacttggagccatcattaagatagactgttttttctatctctgtccttggaacctgttcaggtatttaaagctgtgttcctctgctaggctttgagtttcttaagggttggagccatatcattatgtcccttgcacctggttgtggtatacaatatcattctttcagcaaatacttttatttatttatttattggaggcagaatctcgctctgttgctcaagctggagtgcagtggcacgatctggctcactgcaacctctgcctcccaggtacctgcccgggcgggcgtcgaaagggcgaattccatcacactggcg

SEQ ID NO: 39189 - DNA, 549 bp, Homo sapiens
acgactactatagggcgaattgggccctctagatgcatgctcgagcggccgccagtgtgatggatatctgcagaattcgccctttcgagcggccgcccgggcaggtcgcgggggcccttgctcactagaaggagccccctgaccccttcttccaaaaatactttttgtctttgtcttctttctgcattcatcccccttcgttcactcccataacaaccaacagcgacaactggcacctaggacagggacgtgagtgaaggtctgctggagcagagaaactgacactgacaagaagaacgagaatgagaaaccctgcgacgagtctgctgacagctgatataagtctgcaaaatcagctgggccaccaaacggcaattgagagctgcacaacctgcaattacctttattcaattaatgcaaaaacaaaaatggggagatgttacaggccgaaagaatgaaggtcgtgaccaactcagtataccactgaaggctatatgagcaaacagaaaactgttctcatgaaagcaggatgttggaaaactaacaact

SEQ ID NO: 39190 - DNA, 587 bp, Homo sapiens; identical to SEQ ID NO: 32514
  misc_feature 209, 313: n = A,T,C or G

SEQ ID NO: 39191 - DNA, 517 bp, Homo sapiens
gactcactatagggcgaattgggccctctagatgcatgctcgagcggccgccagtgtgatggatatctgcagaattcgcccttagcgtggtcgcggccgaggtacgcgggggaaaaagggtggggagtgccctttcttgaaggaatcccttaagtgcacgtctcccgttttcttttcacatcaatgcagagtccctctgtgaatttacaacacccaacacccatgagttcagtccttaagaaggaaaattgagcaagtatttaattggttggacattgcataaaagaggtccatatccaggctaactctagaaattttattctcaaacttagttagcctccttttcttctgtcagaggaccattcttagtggcactggggaaatcttggcacccagaagaattcaactgcgctcactgcaaaaatacaatggcctacattggatttgtagaagagaaaggagccctgtattgtgagctgtgctatgagaaattctttgcccctgaatgtggtcgatg

SEQ ID NO: 39192 - DNA, 608 bp, Homo sapiens
  misc_feature 483: n = A,T,C or G
actcactatagggcgaattgtgccctctagatgcatgctcgagcggccgccagtgtgatggatatctgcagaattcgccctttcgagcggccgcccgggcaggtacctcgaaaataaccaagcagtcttttaaagaaatagaaaaagttgccttgccaactaatacgacctcatcgagacctcggactgagtgttgtagtgatgcaggtgactctcctttgaaacctgtcagctgtccaaaatctaaagcatcagacaagcggagtttacttccacatcagatcagtcagatatatgacgaattatttcagatacatctgaaattgcagtgtgaaactgcagcacaacagaaatttgctgaagaacttcaaaagcgagaacgttttttacttgaaagagaacaactgcttttcagacatgaaaatgccttgagtaaaattaaaggtgttgaagaagaggttcttacaagatttcaaattatanaagagcagcatgatgcagaagttgaacacttaaccgaagttcttaaggaaaagaataaagaaaccaagagactgaggtccttttttgatgcattgaaagaattgaatgataccttaaaaaaacag

SEQ ID NO: 39193 - DNA, 603 bp, Homo sapiens
tacgactcactatagggcgaattgggccctctagatgcatgctcgagcggccgccagtgtgatggatatctgcagaattcgccctttgagcggccgcccgggcaggtacatacatgtagaatgccattttctcatatttaagtgattttttcatgtgtagaagaatatccttaatactaactgtaaattccacaataataaaattggagttaagatttcaaatatcaggtcaggtagcaggtgtagaaagaatatgtccttattttagacgaaccaattcttactcttagaacagctaccacaaaaagatattaggtaataaagctcccaaggtatataaataaaaatgtctacattaaatttatgctaaatattcaacagagtaaatttataggcagaaataactaagtcttaaactagccccaatctgggaacttaaaaaaattaaaataaataaaatttcaattcattagttatgaattgcaactggaatttcaatcttatcatagctcacggaaaccatcttatcaatgtgctgcagatttaaaagcatttaaataatctttcacattggaaatattaaagggccaactgacatgatcg

SEQ ID NO: 39194 - DNA, 488 bp, Homo sapiens
atacgactcactatagggcgaattgggccctctagatgcatgctcgagcggccgccagtgtgatggatatctgcagaattcgcccttagcgtggtcgcggccgacgtactcttaaaaatctgttaagagagtggatctcattttaagggttcttaccacaataaaattaaatttttgaaataaatcagtcatatttgagtgaaatgaaacctttccgagtagtttcagacaattgataatacctagtttacagttcctgtagtcattttggagggtgaggacttgatgtgtttagtaaagttgagaaataaatacatgaaagaatgcgtggggaagagaaagtgtggggaagagaaattgtctcagaggaccattcttagtggcactggggaaatcttggcacccataagaattcaactgcgctcactgcaaaaatacaatggcctacattggatttgtagaggagaaaggagccctgtattggtgag

SEQ ID NO: 39195 - DNA, 410 bp, Homo sapiens
ctactatagggcgaattgggccctctagatgcatgctcgagcggccgccagtgtgatggatatctgcagaattcgccctttcgagcggccgcccgggcaggtacctgccaggaaaaatagcagcccagccaccaggtggcaacctgcactattgaccagacacttggccagtttgatgttgggcaccgaggacctgaaggcagtgttgcacattccaatcaggcagagcagcagggcacccatggcgatcagcatgctgaggggtagggcaaactggaggacacgcaggtccagctggtcaactgatgagtaccagttggagtaaccaaggttattttgtccacaaatattgctgaaacaagcattaccataaacgatgttgtttatgtcattgactcctgcaagcagaa

SEQ ID NO: 39196 - DNA, 611 bp, Homo sapiens; identical to SEQ ID NO: 36835

SEQ ID NO: 39197 - DNA, 534 bp, Homo sapiens
ccctctagatgcatgctcgagcggccgccagtgtgatggatatctgcagaattcgcccttagcgtggtcgcggccgaggtacatttttgttgtggattattttaaacataatgctatagtaatattttgaagatttgagctgttatttccatttgtttttacactgtgactaaatgattaggttttagttttagactctaaacggaacctgaattaataggaaataaacacggtgcaaatagcctcccctaaagtgatcccaattattacatagccatcttgctgtggctaatgtagaatgtttttgcagtatcacatgcacaaagggcatacccaaaaaacatttgagtgaagataatactagattctagaaagtatctagacacttaagagcaggtggtgatgatgttaattaataataacaatgttgaggggctggcttctgcccttccctaataagcataaagagcatttaaacttcacaaatttgctctcattttcttcatttattggtttttgaatcagtaaatgctt

SEQ ID NO: 39198 - DNA, 642 bp, Homo sapiens; identical to SEQ ID NO: 38156

SEQ ID NO: 39199 - DNA, 531 bp, Homo sapiens
tatagggcgaattgggccctctagatgcatgctcgagcggccgccagtgtgatggatatctgcagaattcgccctttcgagcggccgcccgggcaggtactggaggatctggggagagagcttgatgaacctggaaagcaggtcccaggcaattcagaaagacgggacatactcatggacaagttggcccccttgggaaggccatatgaatcactgactgtccagctccatcccaaaaagacccagctggagcaggaagcagggaaaccacaaaggaatggtgataaaactaggactaagaatgaagagttgttccagaaggaagatatgcccaaagacaaggaattccttggggagataaatgacagactgaacaaagatactcctcagcatcctaagtccaaagatattattgaaaatgagagcagatcagaatggcaacagagggaaagaagacgatataaatgtgatggatgtgggaaaagtttcagtcatagctcagaccttagtaaacacaggagaactcacacg

SEQ ID NO: 39200 - DNA, 573 bp, Homo sapiens
ctactatagggcgaattgggccctctagatgcatgctcgagcggccgccagtgtgatggatatctgcagaattcgcccttagcgtggtcgcggccgaggtactacatatgcagaatctgatacaatgttaatagactgattaaaatcttgttaacactgtaatgacggcaaccaactctgctctttgagtcaagtgatactgagttttgatgactcattcttttggcccggtgtaagccacttttccattgctggaaccatcagtaaacactgccagagcattttttaaaggcttatgtttggtaactttaggtaaaatccaagtagtcaattttaaaaactggaagatttttgttttggggtaacgattgccaataattcccacaaaatcggcaagaccaatctgccatgcaccagaattgataaaggcttgtctaacctgttgcttgttgaaaggaacagtgattttatctgggtcatttccacacaatgttattattcataatcttccctgaccaattaatgtagccatttgatccaagtacctgcccgggcggccgctcgaaagggcga

SEQ ID NO: 39201 - DNA, 513 bp, Homo sapiens
ccctctagatgcatgctcgagcggccgccagtgtgatggatatctgcagaattcgcccttagcgtggtcgcggccgaggtaccagttgtaaaattaccaggaaccgccatgcctcaagatcgccctgatttctgtcttcatcaatgactgcatcagtgcaccaccctgtccactacgtgatgctgtaggattaagtctcacagtgggcggctgaggatacagcgccgcgtcctgtgttgctggtgaattagacgccatcgctgtgggttgctggtatggtgccgtgctatttggcacaggacacaccgcttgaggtctgtattgaacctctgaaggaggccgatactgaagctcggttggcagccggtattgataaactaccagcggttgggtcttattttctaccggctgatattgtggatactgtatctgagttggcattgccgggatagaaactctgtccctttctacttgattttctcttggggtttgagcttggctaacctgcgtttg

SEQ ID NO: 39202 - DNA, 402 bp, Homo sapiens
gactcactatagggcgaattgggccctctagatgcatgctcgagcggccgccagtgtgatggatatctgcagaattcgcccttagcgtggtcgcggccgccggggcaggtaccagttgtaaaattaccaggaaccgccatgcctcaagatcgccctgttttctggcttcatcaatgactgcatgcagtgcaccaccctgtccactacgtgatgctgtaggattaagtctcacagtgggcggctgaggatacagcgccgcgtcctgtgttgctggtgaattagacgccatcgctgtgggttgctggtatggtgccgtgctatttggcacaggacacaccgcttgaggtctgtattgaacctctgaaggaggccgatactgaagctcggttggcagccggtatt

SEQ ID NO: 39203 - DNA, 452 bp, Homo sapiens
ccctctagatgcatgctcgagcggccgccagtgtgatggatatctgcagaattcgccctttcgagcggccgcccgggcaggtacctccagcaatgagaagcagagagggctaggttgacggtctcaaactggcaccggggagccccgtgactggttttaagggtgtgtgaatgaagattaaaatcttgtttgatattaacatgggttcagttttttttttttaatgtcactaagccatgctgtagagcccttctggaaggacttaggtgggacaaagagccagagtccacaacttctgtattgttcacagggccctagtgcatcctgggaagtttctctggcaccggaggtgagttttcctaagtagggaagtgaaggttgcaggaaagaagaaattataaggctatattataatgtgatgtggaagtagaaagctactttgctttgtaacc

SEQ ID NO: 39204 - DNA, 475 bp, Homo sapiens; identical to SEQ ID NO: 36920
  misc_feature 244, 321: n = A,T,C or G

SEQ ID NO: 39205 - DNA, 610 bp, Homo sapiens
cgactactatagggcgaattgggccctctagatgcatgctcgagcggccgccagtgtgatggatatctgcagaattcgcccttagcgtggtcgcggccgaggtactttttgtaagaaaatttttattgcagtgttcattctgattaagtgagaattattgtatttagttgccgctatacataatttttattaatattccttaagtgttgttttatcaggcgatttctctttgccagttgatacaatacaaatggaatataatgcatctaacatttcaaattcaagacatgattctgatcaaatcagtggtaaaatgaatacatatatgaattctacgacttctcctaagaaggatactggtgtgcaaacagatgacttaaatataggaatattcaccaatgcagaatcacattgtggatcattaatggagagggacatcacaaattgttcatctcctgagatttccgcagaacttattggacagtttagcaccaagaaaaacaagcaagacctaactcaggataaaggagccagcttagaaaaagaaaacaatcggtgtaatgaccagtgtaatcagttcacaaggaatgagaaacaaacaaaacacatg

SEQ ID NO: 39206 - DNA, 459 bp, Homo sapiens
ccctctagatgcatgctcgagcggccgccagtgtgatggatatctgcagaattcgcccttagcgtggtcgcggccgaggtacatctacctaaaggactattatgtggaataatacatactaatgaagtattacatgatttaaagactacaataaaaccaaacatgcttataacattaagaaaaacaataaagatacatgattgaaaccaagttgaaaaatagcatatgccttggaggaaatgtgctcaaattactaatgatttagtgttgtccctactttctctctcttttttctttcttttttttttattatggttagctgtcacatacaactttttttttttgagatggggtctcgctctgtcaccaagctggagtgcagtggcgcgatctcggctcactgcaacctccacattccatgttgaagtaattcttctgcctcagccttccgagtagctg

SEQ ID NO: 39207 - DNA, 611 bp, Homo sapiens
tacgactcactatagggcgaattgggccctctagatgcatgctcgagcggccgccagtgtgatggatatctgcagaattcgccctttcgagcggccgcccgggcaggacgcggggacatcaatgcagagtccctctgtgaatttacaacacccaacacccatgagttcagtccttaagaaggaaaattgagcaagtatttaattggttggacattgcataaaagaggtccatatccaggctaactctagaaattttattctcaaacttagttggcctctttttcttctgtcagaggaccattcttagtggcactggggaaatcttggcacccagaagaattcaactgcgctcactgcaaaaatacaatggcctacattggatttgtagaggagaaaggagccctgtattgtgagctgtgctatgagaaattctttgcccctgaatgtggtcgatgccaaaggaagatccttggagaagtcatcaatgcgttgaaacaaacttggcatgtttcctgttttgtgtgtgtagcctgtggaaagcccattcggaacaatgtttttcacttggaggatggtgaaccctactgtgagactgattattatgccctctt

SEQ ID NO: 39208 - DNA, 632 bp, Homo sapiens
cgcgcgtatacgactcactatagggcgaattggagctccaccgcggtggcggccgcccgggcaggtacaggacaattataaagaacttaaaaggagtctagaaaatccagcagaaaggaaaatggaaggtcagaattcccagagtcctcaatgtttcaaaacatgctcagagcaaaatggttatgttctcacattgtcaaatgcacaaccagttctgcaatatggtaatccttatgcatctcaggaaacaagaggttattacagtatttttggtttgggattagctgcatctggagatttttttatggtttatattttcatggattagcaaactgctggtataatcaaccctaatacaaacattattttatttgtataattagcagttttaatatttaacactgtaactggcttcatctagaagtgatgcaccatgagatgagtacctcggccgctctagaactagtggatcccccgggctgcaggaattcgatatcaagcttatcgataccgtcgacctcgagggggggcccggtacccagcttttgttccctttagtgagggttaattgcgcgcttggcgtaatcatggtcatagctgtttcctgtgtgaaaattgtatccgctcacaat

SEQ ID NO: 39209 - DNA, 598 bp, Homo sapiens
  misc_feature 532: n = A,T,C or G
tacgactcactatagggcgaattggagctccaccgcggtggcggccgaggtacgtgttaatagaggctagtttgggtcttgcagaaatgatttcatttgggatgctttggttgtcattggggggcttggttgttggagacgtgagtcttgccgaagatcccggccgctctagactagtggatcccccgggctgcaggaattcgatatcaagcttatcgataccgtcgacctcgagggggggcccggtacccagcttttgttccctttagtgagggttaattgcgcgcttggcgtaatcatggtcatagctgtttcctgtgtgaaattgttatccgctcacaattccacacaacatacgagccgggagcataaagtgtaaagcctggggtgcctaatgagtgagctaactcacattaattgcgttgcgctcactgcccgctttccagtcgggaaacctgtcgtgccagctgcattaatgaatcggccaacgcgcggggagaggcggtttgcgtattgggcgctcttccgcttnctcgctcactgactcgctgcgctcggtcgttcggctgcggcgagcggtatcagctcactcaaaggc

SEQ ID NO: 39210 - DNA, 598 bp, Homo sapiens; identical to SEQ ID NO: 39209
  misc_feature 532: n = A,T,C or G

SEQ ID NO: 39211 - DNA, 547 bp, Homo sapiens; identical to SEQ ID NO: 33508

SEQ ID NO: 39212 - DNA, 506 bp, Homo sapiens
  misc_feature 169, 199: n = A,T,C or G
gcgcgaatacgactcactatagggcgaattggagctccaccgcggtggcggccgcccgggcaggtactttgggactgcttgttaacttttgtggttgtctgaggccaatctaacgtgaccatttctgacacctcaacagagagaggaaagcaacttgagcaatgagagntaaataacttgggcctctcagaagatttgnaagatagaagaatctcattgtgagggggggactattttgcagggtcctcatttctccaagaaaagagatggtgttacagggaacccactgaaagccatatcccattaaatgaggaactaattttggctgggccttcttgtaatgtcctcgcaggtgtgttgtgaagattaatgcagggtagtatgtttgtagattgacacctagtctaaacttgaggtaattggtgctctgtgaatactcagtcgtgttcttttatagccttaatcatgatttgaactagtcccttgctttttaaatgactgaatga

SEQ ID NO: 39213 - DNA, 549 bp, Homo sapiens
  misc_feature 17: n = A,T,C or G
gtatacgactactatanggcgaattggagctccaccgcggtggcggccgaggtactacatatgcagaatctgatacaatgttaatagactgattaaaatcttgttaacactgtaatgacggcaaccaactctgctctttgagtcaagtgatactgagttttgatgactcattcttttggcccggtgtaagccacttttccattgctggaaccatcagtaaacactgccagagcattttttaaaggcttatgtttggtaactttaggtaaaatccaagtagtcaattttaaaaactggaagatttttgttttggggtaacgattgtcaataattcccacaaaatcggcaagaccaatctgccatgcaccagaattgataaaggcttgtctaacctgttgcttgttgaaaggaacagtgattttatctgggtcatttccacacaatgttattattcataatcttccctgaccaattaatgtagccatttgatccaagtacctgcccgggcggccgctcgacccggtacccagcttttgttccctttagtga

SEQ ID NO: 39214 - DNA, 493 bp, Homo sapiens
ggagctccaccgcggtggcggccggcgggaggctgacgagagccgggaggcgttagcgaaggaagagaaaaaccgaagacgaagccactacagcccccgcgtacagactttgaggtttcatcaatataaataaaagagcagaaaaatatgtcttgttttcatttgcttaccaaaaaaacaacaacaaaaaaagttgtcctttgagaacttcacctgctcctatgtgggtacctcggccgctctagaactagtggatcccccgggctgcaggaattcgatatcaagcttatcgataccgtcgacctcgagggggggcccggtacccagcttttgttccctttagtgagggttaattgcgcgcttggcgtaatcatggtcatagctgtttcctgtgtgaaattgttatccgctcacaattccacacaacatacgagccgggagcataaagtgtaaagcctggggtgcctaatgagtgagctaactcacattaatt

SEQ ID NO: 39215 - DNA, 564 bp, Homo sapiens
agctccaccgcggtggcggccgaggtactttggtttggagtatattattttatcctagaagatttggcttcactattaagacaacaattaggtctgcttttcttaggtatacacaaaaatagaaacagtccttatgatggattatttacagatatatagtattttggtgggtagaggcatggggaactatttagctcagctggcaaaaagtccaagcaaaacaatccaaatgcctagagtggtgacagttgtgcaatgggtactcaccaaaaagccaaatttcccctttggagttggtgacttagtgtagtctgtggctgacctagaaagacacagagttatcaagagtttcccttcctagaagatgaatgttaccttttgtgttaagaggtagagaaaataaaaatagcttttttttccctagaattgttaattactcttaacaacaaattaaattcaaagcctgtccttgagaactggaaatgtaaaatcatggttcaagttttataccttagtgattcctcaataggtgttactaggagttcactgaatgaacttaggagt

SEQ ID NO: 39216 - DNA, 475 bp, Homo sapiens
  misc_feature 223: n = A,T,C or G
gcgtatacgactcactataggcgtaatacgactactatacggcgaatcggagctccaccgcggtggcggccgaggtactcttttcaaggctttacttccaatcttccccttaagtgctagtgtccagaggaaaaattatttcttctctgtagaagtcattttgaagacagtatttttctgagatccaatgtggttgggagttctgaagaggaagttatagttntaagctagattatctcattttattatattctgtgtttattttcctttgccgtgcttaggcctttggcaaatgttctctagatgtacctgcccgggcggccgctcgatgctcttcttttcttcccaatgtatcttaataacatcagggaaaaatttctcaagaagacaaaagtatgttccagccttctggagctttgtttcagcaattggaaggaagaaaaatagtgggcttgggggaaacatctgcatcaag

SEQ ID NO: 39217 - DNA, 633 bp, Homo sapiens
tacgactcactatagggcgaattggagctccaccgcggtggcggccgaggtacccaagtttgtgatgtcaattgccaagactaaggaatgaaacatcttcatacgaggtcatcccggagccaactcattgcctgctttttttctgtgtatgttggtggtgtggcggggacaggattgataagcactgtcatcacagcaccctctttactcctccatctaccccaaaactatttccttcctcctaccactccagctggctgcagtctccgttgctgccaccaaccacagcgatgtaagccacagtggcacaggctgcagcatccagcgtgtagcaggtggcttctccctctggtcctctaagctgggaacagagcagctggtcaggaagacacagaagagccttccccgcgtacctgcccgggcggccgctctagaactagtggatcccccgggctgcaggaattcgatatcaagcttatcgataccgtcgacctcgagggggggcccggtacccagcttttgttccctttagtgagggttaattgcgcgcttggcgtaatcatggtcatagctgtttcctgtgtgaaattgttatccgctcacaattccacacaacatacgagccgggagcat

SEQ ID NO: 39218 - DNA, 505 bp, Homo sapiens; identical to SEQ ID NO: 33122
  misc_feature 474: n = A,T,C or G

SEQ ID NO: 39219 - DNA, 473 bp, Homo sapiens
cgcggtggcggccgtccgggcaggtacgcggggagattgcctcatttcagctcaataaaacatcaccaaattcccttaggcagaaaaagggtggggagtgccctttcttgaaggaatcccttaagtgcacgtctcccgtttctttcacatcaatgcagagtccctctgtgaatttacaacacccaacacccatgagttcagtccttaagaaggaaaattgagcaagtatttaattggttggacattgcataaaagaggtccatatccaggctaactctagaaattttattctcaaacttagttggcctctttttcttctgtcagaggaccattcttagtggcactggggaaatcttggcacccagaagaattcaactgcgctcactgcaaaaatacaatggcctacattggatttgtagaggagaaaggagccctgtattgtgagctgtgctatgagaaattctttgcccctg

SEQ ID NO: 39220 - DNA, 396 bp, Homo sapiens
gactcactatagggcgaattggagctccaccgcggtggcggccgatgtactttgggactgcttgttaacttttgtggttgtctgaggccaatctaacgtgaccatttctgacacctcaacagagagaggaaagcaacttgagcaatgagagtaaataacttgggctctcagagatttgaagatagagatctcattgtgagggggactattttgcaggtcctcatttctacaagaaagagatggtgttacaggaacccactgaaagccatatcccattaaatgaggaactaattttggctgggccttcttgtaatgtcctcgcaggtggggtagtgaaaaataaatgcaggggagtatgtttgtagattgacacctagtctaaacttggaggaattg

SEQ ID NO: 39221 - DNA, 208 bp, Homo sapiens
  misc_feature 67, 96, 97, 100, 139: n = A,T,C or G
ctcactatagggcgaattgggccctctagatgcatgctcgagcggccgccagtgtgatggatatctncagaatgccccgttccagcggcccccccnncangtacaccgccaccctctactgttggaggaagatcttcanagatgaggggggcaaggccttcttcaagggtgcgtggtccaacgtcctgcggggcatggggggcgcctt

SEQ ID NO: 39222 - DNA, 526 bp, Homo sapiens
tatacgactcactatagggcgaattgggccctctagatgcatgctcgagcggccgccagtgtgatggatatctgcagaattcgcccttagcgtggtcgcggccgaggtacaggtttttatgtgaacatacattttcattttctgggataaatgctcaaaagggcaactgttgggttgtatggtaaacacatatatttttgtaagaaactaccctactctttttccagagtggctctactttttacatacagccactcatacaattcagacagcaatgtatgattgatccagtttcttcacatcctcaccagcatttggtattactactattttttatcttaaccattcacatagatgtgtgtaatgataccacatgtggttttaatttgcatttccaatggctaatgatgttgagtatctttttgtgtgctaatttgccatctatgtatcctcttcggtgaaatgtcttcatgtcttttgtctattttctatttaagtcatttgttctttttactattgaagtttg

SEQ ID NO: 39223 - DNA, 340 bp, Homo sapiens
  misc_feature 111, 112, 113, 114, 115: n = A,T,C or G
acgactcactatagggcgaattgggccctctagatgcatgctcgagcggccgccagtgtgatggatatctgcagaattcgccctttcgagcggccgcccgggcaggtactnnnnnttttttttgttttttttgttaaggggaaaacaacaccttatttattcagggtgtaatactgtctacttcctttcagaagacttgaaaaagatcaaaataggataaatggacagttactactaaacgattcaaatacttgggcagtatctttcccttttaaccctttcacacgtttttaaagtgtcaaaattgatgaatggtataaattcaaaagggaaaattttt

SEQ ID NO: 39224 - DNA, 631 bp, Homo sapiens
ccctctagatgcatgctcgagcggccgccagtgtgatggatatctgcagaattcgccctttcgagcggccgcccgggcaggtacttggtattgtattttttataaataagatttttatgtaaagcttagaatttgatttacagggaccttgctgagtaaataccatctcaattttgtgccactggttcagctgttagcacagtaaaaaaatcatttgtatcaaaggggcaaatgctttattaaggtagtaaaagggaacattacttctgcttttaggaagttactgcaagcacaagcatttgtgcttttaagcaaattaaagtagtaaaagaaaaacttaagtgaaacctttgccatcttcatgttttataatataaagcttacccaacaccagttaagccatggttaacctaaatgcctcatgccccagttcagcaaaaggaggaaaatgtgcctgcctcacagtcatcagtctttttaaatcttttttgttgttgttcttaagggtttgaatttgtctgcattccttgtctttaggggaaattcccttttcatattgtgtgcttcccaaagctatagtcatagatttcttccaaaaactattggcataattgtcactggagtgcttaaa

SEQ ID NO: 39225 - DNA, 618 bp, Homo sapiens
  misc_feature 174: n = A,T,C or G
gactcactatagggcgaattgggccctctagatgcatgctcgagcggccgccagtgtgatggatatctgcagaattcgccctttcgagcggccgcccgggcaggtacttttttttttttttttttttttgagacagagtcttgctctgtcacccaggctggagtgcagtggccnacctcggctcactgcaagctccgcctcctgggttcacaccattctcctgcctcagcctcctgagtagctgggactacaggcacccgccaccgtgcccggctaattttttgtatttttagtagagacggggtttcaccatgttagccaggatggtctcgatctcctgacctcgtgatccgcccgcctcggcctcccaaagtgctgggattgcaggcgtgagccactgcgcccagcctaggtagatcatctttttagctcattttgttaatgatttcagactcagatggtgtaggtagaatcagactcacatcttccattaatgtaattatgaagatgtgtgcgcattgtgttactaataagttgctaaaactagtttcattttggagaaagcttttttaaatatcttctagtattgctttgaggatccagtttaagtagaacatg

SEQ ID NO: 39226 - DNA, 489 bp, Homo sapiens
tggcgaattgtgccctctagatgcatgctcgagcggccgccagtgtgatggatatctgcagaattcgccctttcgagcggccgcccgggcaggtacctaactatacactttgattcagcctgctaaatcaggggttcaatactagcttggacaaactttgagtaattaattgctaccagccttattggaaacaaattatcaaccagtttcccctgcacaaattttgaaattcactgcttcacttaatctatttatattactaataatggattaataaagatgaattaattatatattacttaactagtattaaatgaaaaacagggactgaaatagttctgtattccgtgtttgcaacagccagccaactaagcagaggataaaccgttagcaaatgaatgtaataattactcatttccaagatatctaagcacataagcaaatacaggaacagacttcattctttttcttaacaaaaaagcatcttca

SEQ ID NO: 39227 - DNA, 445 bp, Homo sapiens
ccctctagatgcatgctcgagcggccgccagtgtgatggatatctgcagaattcgcccttagcgtggtcgcggccgaggtacattagaaatggagagtttaatagctctttaactgctgtcctcattaggtaatgataaatatttcccttaaataattgactattttgctgtgttttaaaaatgattgaaatttatcttgccatatctcataatttcatgcacaagttgactgagctaatcttgagaatatattcgtaaaataggagcacatttagttgaggtatacaaggtaggactctagacaaaaccttctattttagctttagtgaatttcaaaagtaatgggtcttggagtatagatttttattagtagcttgaaagagcttaatcatatgcagtaagtatttttattaccaataaatttaaaattttttaagaaaaata

SEQ ID NO: 39228 - DNA, 621 bp, Homo sapiens
ctatagggcgaattgggccctctagatgcatgctcgagcggccgccagtgtgatggatatctgcagaattcgcccttagcgtggtcgcggccgaggtacggttattttacatcacctataccagaaggtcctgactgacagacagcgaaggctaccggtgtagaaaaatcttacttcagaagagcaatataatacagatttcacaggcactacattttaatatatcaggtattatgctggttttcttataattctttctgtcctaaagctggcattataacaatgaccaaaaaggcaaggattgaagtaaacggaaagtagataccaaagttgatatagtttttttcttcagatagattagtgcatagttctcatgcagataaacactgctatgcatttacactgttggaaagcagagtgaattgagcccaagttgtcacatttgtgtaaatcattttgtcagcctataatagcaccatgtaatggatttgcattaaacattaaattgatttcaaaattggtgacacagtattcactacagttaaatgctatggaatagcttcaatgttacctgctatatatcaaagcaattttcatcccactgctttttattggaaaaaa

SEQ ID NO: 39229 - DNA, 528 bp, Homo sapiens
ctactatagggcgaattgggccctctagatgcatgctcgagcggccgccagtgtgatggatatctgcagaattcgcccttagcgtggtcgcggccgacgtactactccttacaacaggggtgggtagaaggcttatgaaaattatactgcgggtctgatctaattactccatgttactcacattctttccaacctaaattttggccaagtcagttctctttggagggagccctgtattctgtaactgactgggtggtccagagttattttgatatactgcttttcagaatggaaatttataatactttaaaaatattttgtaataccacaaatactgttgggcacttgatatttattagtggagtatatggtccactggtttcaggccaaatctagaatttagtgatactggctcagaagaatctaagttctattcaaccttcctgggcatcagagcctagattcacaatgacttgtctttactacttttgttccacattccccctctgtacctttgccctaccttct

SEQ ID NO: 39230 - DNA, 522 bp, Homo sapiens
tacgactactatagggcgaattgggccctctagatgcatgctcgagcggccgccagtgtgatggatatctgcagaattcgccctttcgagcggccgcccgggcaggtactttttttttttttttttttttttttctttttttttttttttttttttttttttttttttttttttttttttttttttttttcccgaagaacctttttgaaaattttttattgccagaaggaaacccaaaaggggctaaaaaaagggccctatttttttaaattaactccagggacaaacccttttaaaagttaaaaaaagggaccagtttgatttgccaaaattttaaagccccctccccatggaagggataaaggttcccttgggggatttgccctgaataaattctgaaaaaagcttgtggaattttgggaaaaaaataaaaaaatgaatttttttttttaaaatcctttgggggtccctgcctttgtttaaaatcccaggttaaaaaacgggccccaaaaaaattccctt

SEQ ID NO: 39231 - DNA, 660 bp, Homo sapiens
tacgactcactatagggcgaattgggccctctagatgcatgctcgagcggccgccagtgtgatggatatctgcagaattcgcccttagcgtggtcgcggccgaggtacaccaaggtggtgcattaccggaagtggatcaaggacaccatcgtggccaacccctgagcacccctatcaactcctattgtagtaaacttggaaccttggaaatgaccaggccaagactcaagcctccccagttctactgacctttgtccttaggtgtgaggtccagggttgctaggaaaagaaatcagcagacacaggtgtagaccagagtgtttcttaaatggtgtaattttgtcctctctgtgtcctggggaatactggccatgcctggagacatatcactcaatttctctgaggacacagataggatggggtgtctgtgttatttgtggggtactactactccctaacccaaaccaggtgattctagtgaagactgtcaataaacggagcatgtgatcaagcaaggcccatcagaatccttccctaagatttttataaaaagctggacctattctttttccatttgagcggggaatatttgaagatatgaggtctaaagctgtgatggcttattctccatccctgtgtaaattctggtctatagtaagc

SEQ ID NO: 39232 - DNA, 299 bp, Homo sapiens
gactcactataggggcgaattgggccctctagatgcatgctcgagcggccgccagtgtgatggatatctgcagaattcgcccttagcgtggtcgcggccgaggtacacatatgaaagaggggtgggatccacacagagagagtggagagtgacatgttgctggacactgtccatgaagcactgatcagaagctggaggcacaacgcaccagacactcacagaaaggatggagctgaaaacataacccactctgtactgtaggcactgggaagcctacataatgctgtgagccggggaag

SEQ ID NO: 39233 - DNA, 323 bp, Homo sapiens
gtgatggatatatgcagaattcgcccttacgagcggccgcccgggcaggtactatcattttttttttatttttttttttttcttttttattttttttattattattttaatttttaatataaaaaatttaatttatatatttttatattaagggggaaaaaaaaattaaattttaaataaaaaaaaaggggaaaaaaaatttttaaaaaaaggacggggcttaaatttaaggaaaaaaaaaaattttcgggaaaaatgcaaaaagggttaaaaaatttttaaatgaaggggggaaaaaatgaaaaaatccaaaaaagcaaggg

SEQ ID NO: 39234 - DNA, 509 bp, Homo sapiens
agtcgacgcgtaagacgtgtggcgaattgagccctctagatgcatgctcgagcggccgccagtgtgatggatatctgcagaattcgcccttagcgtggtcgcggccgaggtacaaaaattagctgggcatagtggcacatgcctgtagtcccagctactcgggaggctgatgaacaagaatcacttgaacctgggaggaggaggttgcagtgagctgagatcgtgccactgcactccagcctgagcgacagagcaagactgtctcaaaaaaataaaaaagaaaaaaataataaaaaggaaaacaaagcctttagaaaaacaaagcctttgaaaaaggatgtaaaattgaatatatagatacaattatttttaaaaagttttatagaaaaatatcctggattgttgatgttgttttaatatattttaatcatttttgtataatgtcatgtataatatgttataatgaaagtaaaaaaaaaaaaaggtcttagcagagcaggcagaaaaat

SEQ ID NO: 39235 - DNA, 518 bp, Homo sapiens
attgggccctctagatgcatgctcgagcggccgccagtgtgatggatatctgcagaattcgccctttcgagcggccgcccgggcaggtacatctacctaaaggactattatgtggaataatacatactaatgaagtattacatgatttaaagactacaataaaaccaaacatgcttataacattaagaaaaacaataaagatacatgattgaaaccaagttgaaaaatagcatatgccttggaggaaatgtgctcaaattactaatgatttagtgttgtccctactttctctctcttttttctttcttttttttttattatggttagctgtcacatacaacttttttttttttttgagatggggtctcgctctgtcaccaggctggagtgcagtggcgcgatctcggctcactgcaacctccacatcccatgttgaaagaattcttctgcctcagcctcccgaatagctgggactaaaggaacgtgccaccatgactggctaattttctgtatttttt

SEQ ID NO: 39236 - DNA, 588 bp, Homo sapiens
ccctctagatgcatgctcgagcggccgccagtgtgatggatatctgcagaattcgccctttcgagcggccgcccgggcaggcacctatcagtatgctttaactgttgtcacctttctgccccacttttatctatctcgaacacccctttctgcacactctttaaaccactgtattaacaaacacattagactgcatcctgccagacctacccatacaggcatcaaagtaatgattattgcttattgcctgacctaggatgtgagctccatgagaacagagactgattacctctcgctcccctgcacctaaaacaatgcctgcttggtgtaaagtaagtgctcagtaattttttaatgtgtgaccaatgaaataacttcaagagcagagagctcttttagattagaggcacatactaagtgccagcatttaacagaggacagacggaaattagacagatgcaaatagatctcattttattaactgggtaatgcagctgccactgcaattaaaaaaaaaattttagtttcaaacctttcaaattcctcaaaaattaaagttatgactaactttaccagcaaaggaaaaat

SEQ ID NO: 39237 - DNA, 596 bp, Homo sapiens
ctatagggcgaattgggccctctagatgcatgctcgagcggccgccagtgtgatggatatctgcagaattcgccctttcgagcggccgcccgggcaggtacgcggggacatcaatgcagagtccctctgtgaatttacaacacccaacacccatgagttcagtccttaagaaggaaaattgagcaagtatttaattggttggacattgcataaaagaggtccatatccaggctaactctagaaattttattctcaaacttagttggcctctttttcttctgtcagaggaccattcttagtggcactggggaaatcttggtacctcggccgcgaccacgctaagggcgaattccagcacactggcggccgttactagtggatccgagctcggtaccaagcttggcgtaatcatggtcatagctgtttcctgtgtgaaattgttatccgctcacaattccacacaacatacgagccggaagcataaagtgtaaagcctggggtgcctaatgagtgagctaactcacattaattgcgttgcgctcactgcccgctttccagtcgggaaacctgtcgtgccagcttgcattaatgaatcg

SEQ ID NO: 39238 - DNA, 564 bp, Homo sapiens
acgactcactatagggcgaattgggccctctagatgcatgctcgagcggccgccagtgtgatggatatctgcagaattcgcccttagcgtggtcgcggccgaggtactacactgcagtatcagccacacattctccgcagactaagacttctgggctttttgattctttgggaatttccttggggcaagccttccccttaggcctacattgtaatgatctttgataagaagggtcctgtaaattatttatctgtgacattccacttaccatgtgataagtaaatctactggtagcactgactgtaggtacagccgttgtcaatggagagttcaaagacctaagccttgatgactttaaggggaaatatttggtgcttttcttctatcctttggatttcacctttgtgcgtcctacagaaattgttgcttttagtgacaaagctaacgaatttcacgatgtgaactgtgaagttgtcgcagtctcagtggattcccactttagccatcttgcctggataaatacaccaagaaagaatggtggtttgggccacatgaacatcgcac

SEQ ID NO: 39239 - DNA, 560 bp, Homo sapiens
gactcactataggtcgtatagggcgaattgggccctgtagatgcatgctcgagcggccgccagtgtgatggatatctgcagaattcgcccttagcgtggtcgcggccgaggtactttgaatatggagtagtttacagctattttttttcttactggtaatcttaactaatatgattcccttattagagagcctctcactcccccaccccgaaaaatgtctactattcatgacagtaaccaattattctggacaaattgcttctttttaatttgagctatctgccatggactttctaaaatggaaacacagcctgagtgtatcttaaggagagtttgattgaaaaaatccaaatcactgtccatatagatcctggatataaagagatacctgatttttattaaaaggatactttttcaaatttaagagttaatcttggaaatttggaacaagtaaaggggcaagtaaaccttttgatgaaatataaaaggaactcattgcatgaagttgactatcaaattctgtgatgtgtggctttttaaaaatattctcagtgtctttt

SEQ ID NO: 39240 - DNA, 323 bp, Homo sapiens
ccctctagatgcatgctcgagcggccgccagtgtgatggatatctgcagaattcgccctttcgagcggccgcccgggcaggtacgcgaattggagaaaaagttcagtgggaagcatgtcgtctgtatcgctcagaggagaattctgcctaagccaactcgaaaaagccgtacgcgggggagctgagccggtgggtgagcggcggccacggcatcctgtgctgtgggggctacgaggaaagatctaattatcatggacctgcgacagtttcttatgtgcctgtccctgtgcacagcctttgccttgagcaaacccacagaaaag

SEQ ID NO: 39241 - DNA, 535 bp, Homo sapiens
acgactactatagggcgaattgggccctctagatgcatgctcgagcggccgccagtgtgatggatatctgcagaattcgccctttcgagcggccgcccgggcaggtactgcctctaatttttctttgtcttcctctcactggcatttttttctctcccaggtttcttaagaataatgttttttaaaggaggctttttgcccatcaagaataaaaagaaataaaaccaaagggttaccagaaaaaaaaaaaaaaaaaaaaaaaaaaagtacccgccaacaagcgggaccgagcaggaatccgtatctgggaacagaatgaacggagaccagaattcagatgtttatgcccaagaaaagcaggatttcgttcagcacttctcccagatcgttagggtgctgactgaggatgagatggggcacccagagataggagatgctattgcccggctcaagggggtcctggagtacctcggccgcgaccacgctaagggcgaattccagcacactggcggccgttactagtggatccgagctc

SEQ ID NO: 39242 - DNA, 659 bp, Homo sapiens
ctcactatagggcgaattgggccctctagatgcatgctcgagcggccgccagtgtgatggatatctgcagaattcgcccttagcgtggtcgcggccgaggtactccagcctgggcaacagagcgagactctgtctcaaaaataaataaatagaataaaataaaataaaatgttaactaaaatcgatttctaatttgggaaacataataactaataccatttgattttaaaaagaattgtatcttaatcattaagctaaagacatagcaagaaaacaatgacatggtcacttgaagggtgtctcagccaacttttcatcatctaataagacacccttaaagtaattccagcagaaagtctcagaaattcattgatcaacctccaaagcacatcagggaaggtgctaatacagtggataacaagaacaataaacagcagaacatgttatttaaatttttgagataataaaacaatacagaagtaggaacccttgtgaaattatgttctggttttgggtaatgagatcattaatacgttataaacttcatacgtgtggcacactgtaaggattaaagaatggaataagcaagcgagctccctaaaacacctgatataagaaacaccatgctgggcacagtggctcacgcctgtaatcccaca

SEQ ID NO: 39243 - DNA, 703 bp, Homo sapiens
  misc_feature 355, 585: n = A,T,C or G
cgactcactatagggcgaattgggccctctagatgcatgctcgagcggccgccagtgtgatggatatctgcagaattcgcccttagcgtggtcgcggccgaggtaccattatgtgcccgaattccgaaaagtgtccatagcagctaccatcatctatgcctatgcctggctggttcctttgcactctggggtttcctcatgtggagaaacagcaaagttatgaacatcgtctcctattcatttctggagattgtgtgtgtctatggatattccctcttcatttatatccccaccgcaatactgtggattatcccccagaaagctgttcgttggattctagtcatgattgccctgngcatctcaggatctctcttggcaatgacattttggccagctgttcgtgaggataaccgacgcgttgcattggccacaattgtgacaattgtgttgctccatatgcggcttggtgtgggctgcttggcatacttttttgatgcaccagagatggaccatctcccaacaactacagctactccaaaccaaacagttgctgcagccaagtccagctaatgaggaaattctctnttgttttttggagcatggttctttgggaagtggcatccactgcaggaaagcagaatgagcagagccagcagaactgatggagtggcacaaattcccagtgtctggatggtgccacact

SEQ ID NO: 39244 - DNA, 640 bp, Homo sapiens
gactcactatagggcgaattgggccctctagatgcatgctcgagcggccgccagtgtgatggatatctgcagaattcgccctttcgagcggccgcccgggcaggtacggtggtgtttttcttaaaggatgaattatcaaatgcttgctccccatggaagcctcttaaggaaaagtaaaactttgaatatgtcttatgggaagagactgacgtagcacaaatcattaaaaaaccttcacctaattgtcttcctggtcattttcatatggaccaaatgttcactctagggcccaaaaaacatttgtttcctgcatgtattcaatcttctggaacttgatatttcccacgaggtttggtaacagtgtcccaaagtcaaggtgacaaaagaactttgcattaataaagacaatttcgagctgtagtcaaatttggagggaataaactaccccttttccttatactgaaagtcttttaatatgcctgtgccttagttgaataaaatctcctacgttggggggagaaaacaatgctctgcagtgtcatttgcatacaagactgccaaaatttttcagtcaaaatattcgtttaaaactttaaaaagaaatctattccatttccatcactttgggtttggactgggt

SEQ ID NO: 39245 - DNA, 416 bp, Homo sapiens
  misc_feature 253, 259: n = A,T,C or G
tgtatacgactcactatagggcgaattgggccctctagatgcatgctcgagcggccgccagtgtgatggatatctgcagaattcgccctttcgagcggccgcccgggcaggtacaatagagtaagaaattagacaaagttttcatgtccagtagcagaataaaaggcctttcattaatctatctagaagtccccaatgcagtaggaaaacatgttcattcccctaacattgcggtatatactagcattagctntctttntaaaattttttttctctataagcatttttaaaaggcatacccaaaagaggtgtttaatcaccatccccaccaaaatatagtttattatctctctccctctttttaatgatagtgtaaactgaatccaattcctggcccccagagcaagtaagctact

SEQ ID NO: 39246 - DNA, 447 bp, Homo sapiens
cctctagatgcactgctcgagcggccgccagtgtgatggatatctgcagaattcgccctttcgagcggccgcccgggcaggtacactgaatctcaaccaggcactgaggacctgcagccttctgattcgggagcaatggatgtatccacttgcaatgctggctgtgcccagctcagcaccaaacataaggaaaaagatgctctgtgtctcgatatgaagtcttctgcttctgtagatttgttcgtagactcgtcagactctcacagccctctacacttgacggaacagaccccgaagaagccttctcctgagataaaccctgtagatggaagagagaatgccttgactggtgtccagaaagattcctctgaacttccaaccactaaatcgaattctattaatagcagttcagtggattagttcactccgggatacctcactgcatct

SEQ ID NO: 39247 - DNA, 612 bp, Homo sapiens
gactactatagggcgaattgggccctctagatgcatgctcgagcggccgccagtgtgatggatatctgcagaattcgccctttcgagcggccgcccgggcaggtactggtggcaagtgagtgaagggtttcagcaagggggtccccaccttccaggcacagtgtaagtggaccccccaacttgggggctctcctgggttgcacagtgtcctctgaaaattcacatccacctggaacctgcaaatatgaccttatttggaaatggagtctttgcagatgttgtcaagataagatgaagtcatactgttttaggatgggccctctatatggcacgactggggttcttatacgaagagggaccctagcacacggatgcatacagggagagcgctgtgtgatgagaaaggcagagattgcagtgatgctgccaccaaccaaggagccaccatcaaccaggagacgggcatggatccgattctccctgcgaacctccagaaggagccaactctgccaacaccttggttttggacttttgttccccacaactgtgagacaatacattctgtgggtttaagctttatgataatttgttactgtagccctgggaaaggaa

SEQ ID NO: 39248 - DNA, 472 bp, Homo sapiens
  misc_feature 248: n = A,T,C or G
tacgactcactatagggcgaattgggccctctagatgcatgctcgagcggccgccagtgtgatggatatctgcagaattcgcccttagcgtggtcgcggccgaggtactttttgctttagcagatagatagggcatccaatacaactgaaacaacctgataacaaattaattttatttttcaataaaaaggaatgctctggttttttaactggctccttgaggaagccagaagatggcatctgctctntaaacaggcttctcttatctgatttgagacacaaatccaccaagattctttcttacagtggaagtaggcaccacccctcagatcacgaggcccctaggaagaagcctgtggaaatcagcctgtgatgtgtggtggtgggccagcacctagaagacacatggtggttgtgcacataaatcccttcagcggactcagtggaaggatgagaattctgtaagttcatg

SEQ ID NO: 39249 - DNA, 424 bp, Homo sapiens
ccctctagatgcatgctcgagcggccgccagtgtgatggatatctgcagaattcgcccttagcgtggtcgcggccgaggtacttaaaaatactgaattgacagctacattgaatacagggtttcccagggtagttcttattttgtcacttactccaattacattcaaggtcgttatgcctcatctttttcctgagcttgggcagctctaactggggcacccagagagatacataccaggtaatctccacttctacttttctggtgactgggccctgccagaatgattcccacaacttagaaagtaggatgctaaacaaagttgaatcaacatatctttttagaaaatatcatgttagagaatactcctgaggacctgtttctaaccagagttgacaaatgtgaaaaatgcatcaactaaacagc

SEQ ID NO: 39250 - DNA, 492 bp, Homo sapiens
ctatagggcgaattgtgccctctagatgcatgctcgagcggccgccagtgtgatggatatctgcagaattcgcccttagcgtggtcgcggccgaggtactgaaagtgaaaaaacagaatggttgtatgggtaaatgaagtatggtttctagtgaatgtgcatcatttctgcttcattgtaaaactgaaaaattgtaagtaaaaccattgttgcctgtacggcagctccatcctgtccatcctgctggaggaggtcagccctgagctggtgtgcagcatgctgcacctctgctctggcacgcggctgcctgcactgaccgttcacgtgactcagccaaaggacggtggcttctgcgaagtgtgcaagaagctggtgggttatttggatcgcaacctggagaaaaacagcaccaagcaggaaatcctggctgctcttgagaaaggctgcagcttcctgccagacccttaccagaagcagtgtgatcagtttgtg

SEQ ID NO: 39251 - DNA, 525 bp, Homo sapiens
gtaatacgactcactatagggcgaattgggccctctagatgcatgctcgagcggccgccagtgtgatggatatctgcagaattcgcccttagcgtggtcgcggccgaggtactttttttttcctttttttttttaagagtataaggtttacacaatcattctcataatgtgacgcaagccagcaaggccaaaaatgctagagaaaataacgggatctcttccttgtaaacttgtactcttaaaaatctgttaagagagtggatctcattttaagggttcttaccacaataaaattaaatttttgaaataaatcagtcatatttgagtgaaatgaaacctttccgagtagtttcagacaattgataatacctagtttacagttcctgtagtcattttggagggtgaggacttgatgtgtttagtaaagttgagaaataaatacatgaaagaatgtgtggggaagagaaattgtggggaagagaaattgtctcaaaggaccattcttagtggcactggggaaatctt

SEQ ID NO: 39252 - DNA, 443 bp, Homo sapiens
acgactactatagggcgaattgggccctctagatgcatgctcgagcggccgccagtgtgatggatatctgcagaattcgcccttagcgtggtcgcggccgacgtactctcttttttttttttttttttttgttagtagagatggggtttcactatgttggtcagggtggtctcgaactcctgattacaagtgattcacctgccttggcctcccgagccttagcccttttgattccctgacaccaaatgctacttctcttggatagctatactgtgagaagttggagacgggcaaaacgggagcccaggccagtgtcagaaactcacccagagtcacagggacaaagctgttgtgtgggttcttccctgtgagaatcttaaggatggaaatggtgagcacaaaccttggcatttaaggaccgacaattctgaaatgttgtggtg

SEQ ID NO: 39253 - DNA, 610 bp, Homo sapiens
atacgactcactatagggcgaattgcgccctctagatgcatgctcgagcggccgccagtgtgatggatatctgcagaattcgccctttcgagcggccgcccgggcaggtacttaagaaaaaagatttgattatcatcacagcagaaaaaagtcattgcatatctgatcaataacttcagattctaagagtggatttttttttttacatgggctcctattttttcccctactgtcttgcattataaattagaagtgtattttcagtggaagaaacatttttcaataaataaagtaaggcattgtcatcaatgaagtaattaaaactgggacctgatctatgatacgcttttttctttcattacaccctagctgaaggacatccagttccccagctgtagttatgtatctgccttcaagtctctgacaagtgtgctgtgttagtagagtttgatttgtatcatatgataatcttgcacttgactgagttgggaccaggcttcacataaaaaattatttcttcacttttaacacaagttagaaattatatcccatttagttaaatgcgtgatttatattcagaacaacctactatgtagcgtttattttactg

SEQ ID NO: 39254 - DNA, 594 bp, Homo sapiens
ctatagggcgaattgggccctctagatgcatgctcgagcggccgccagtgtgatggatatctgcagaattcgcccttagcgtggtcgcggccgaggtactgtggaaatacatatttctttccctgagtaggttctagctaggtatgagtgccctagtttgaacatgtttgtgtgtgcatacacccagttaatgcagtcgtattttgagaaaaagaaaaggcagaaagagtcccattcactccctcaagcccagctcactggcaggaaagctggacattgttgctttggagcattgattttcctgcttctacgccactacagaccagaagctgtagatgccactgcctgctgattcttagcttggggcccctgccatttaaaatataggcaaggtcagagtataggatagcttcccataccttcggttggtggatgttttaggataaagaaaagacttgtaaaaagtcatcttgagtagtcttttttttgggtgttctctcaatataggaaacaaatgagccacagggagagaaaacccattttcagctcaggccaaaattaggggtagatgtggatatggttcccttgggaaga

SEQ ID NO: 39255 - DNA, 568 bp, Homo sapiens
ctactatagggcgaattgcgccctctagatgcatgctcgagcggccgccagtgtgatggatatctgcagaattcgccctttcgagcggccgcccgggcaggtaccttcaggatctgaactgtcacatcttacccaaaggggaggaagggcagtaactggcagattaatcttcaaatgggtcatattaggattgtgagccatggtgtaaagcccaattaactgccttgccttcccaactggtaaagcaagtggtccaacattttcgccagtagagaaatcagatatggcagtttcttcagattgaagttcttcaatatgacttgtttcttccttttctagaggcactttttccactatgaatactatgtcattttcatttagaatatttttcaaagggtttggttggcctttgctgatcaactgcacttggacatcagcctcatagagaaatgggtctttacggattcctttcttttcttcattaaatttctgaaggagacgagaataaaagtcctctgctgcgcagttcagccgctcccacatcccgccccaatgtgagggcggtacc

SEQ ID NO: 39256 - DNA, 673 bp, Homo sapiens
ccctctagatgcatgctcgagcggccgccagtgtgatggatatctgcagaattcgcccttagcgtggtcgcggccgaggtacatgacgccgctttcatgatgttctggaacaaagaaaactaacctatagtgatagaattcctatcaatggctgccacaatcgggagtgaaaggaactgactgagcaggtatacaagagaaccttctggggtgatggaaatattctgaagcttgactggagtgttggttacatgggtatatcaatttatcaaaactcactgaattgtatatttaaagtaggaacattttattgtaaataaattacacctctataatgttcgttttaaaaaatattagatacatcagctggaaatcacttggttttaacaaaaaattttctctggaatcttatgtattctagcacttatcttcttgtcttcaaaagcaatgcaaaacttcactgtagctaagcctatgttagactcttacaaattcctaaatagtagaattaggtcaatgagtaagttctaataaaataattctagattaactctacctacatgaattactgatttgctacatagagccacattaatgccttatataaatcattcaacatgatgaacctgctcacgtatttttaaattttaacatgtttggactttaaaaagtt

SEQ ID NO: 39257 - DNA, 564 bp, Homo sapiens
  misc_feature 174, 212: n = A,T,C or G
atacgactcactatagggcgaattgggccctctagatgcatgctcgagcggccgccagtgtgatggatatctgcagaattcgccctttgagcggccgcccgggcaggtaccagttgggcagctctgggtggaattgctgcggttctatgctttagaatttaatttggctgattntagtgataagtattcgtggtcaaagaattggtatctcngggaattgaagggattggcccaaaaagccgcattgccattgaagaatccctactctgttaaaaagaaatgtggcaaggaaccctaaatagtcaacctgtgtttgaatatatacttcattgtttaaggacaacatacaagtattttgctcttccacacaaaattacaaaatccagccttctaaagcctctgaatgcaattacatgtatttcagaacattctaaagaagtaataaatcatcatccagatgcacctcggccgcgaccacgctaagggcgaattccagcacactggcggccgttactagtggatccgagctcggtaccaagcttggcgtaatcatggtcatagctg

SEQ ID NO: 39258 - DNA, 505 bp, Homo sapiens
  misc_feature 479: n = A,T,C or G
atgcatgctcgagcggtcgccagcgagatggatatctgcagaattcgcccttagcgtggtcgcggccgaggtacaggaagctaagagaaacttacaagttagccgggcgtggtggctcacgcctgtgatccagcactttgggaggccgaggcaggcagatcacctgaggtcaggagtttgagaccagcctgtgcaacatggtgaaaccccatctctactaaaaatacaaaaattagctgggtgtggtggcacgcgcctgtaatcccagctacttgggaggctgaggcaggagaatcgcttgaacccgggaggcagaggctgcagtgagctgagatagcaccactacattccagcctgggcaacagagtgagactctgtctcaaaaaaagaaaaaagaaaagaaacttggaagccatttcagaaagactccaggaaggccagcagccactcctgcacaaccagggggaagggctacattntactgcaagcagctgttttctctgat

SEQ ID NO: 39259 - DNA, 605 bp, Homo sapiens
  misc_feature 568: n = A,T,C or G
atagggcgaattgggccctctagatgcatgctcgagcggccgccagtgtgatggatatctgcagaattcgcccttagcgtggtcgcggccgaggtacctgcacgggctgaggaacctctggcaaatccttttccacataggagtggcttttctgccttcatatcagatactaacaaggcagcttcaggagaagcagtctgactgtggagtgtgaggatgacactgtgatgaatggattctttgattttcttttgaggatcaatctatgtttctctttctgcttctctactttacactccagtttccatccttttcagccaactggactgaaaaaccaggaattggggatgttaaacagttgcagtggaagtcatgaggttgcttgatacccagccttggttctgtgccaagcattactgcaggatctccagccagttcagcacgtttacctaggacagctggatctgggggctcatccagaaagagctttattggaagagagaaaggaaatattttggtcttttaagttgaatgatacagtaaaccacttgattcaataacactggtnttagtcattgagagttgtctccaggaaccactttaaa

SEQ ID NO: 39260 - DNA, 535 bp, Homo sapiens
ctatagggcgaattgggccctctagatgcatgctcgagcggccgccagtgtgatggatatctgcagaattcgccctttcgagcggccgcccgggcaggtaccaaatttgcatatttgaaattaacactttagcacttgctgaactcagccctcgttaactcccttaacaagttcaatctgaaatcgaatttgcattcaaacagtttaatgccaccaagtaggtctgaactaatgtataaactcagcgccgccgccgccacccctactttcagggcagctgctcggggaagccggttttttttttttggccattttgcaaacaaaaccaacccacacccgttatcgcagagcacccaaggcccatggcaacttggttccacaagggagagccttccaaggccatattgtcagtctaattaatatgagctttttttttttcagtgctgcctatgtttccttgtgctggtagaatgtggtggcatttattaatggttgctgcaaaaaaaaaaaattaaagaaaagaaaaaaagaaaat

SEQ ID NO: 39261 - DNA, 562 bp, Homo sapiens
gactcactatagggcgaattgggccctctagatgcatgctcgagcggccgccagtgtgatggatatctgcagaattcgcccttagcgtggtcccggccgaggtacccattaaacagtttcttcctatgccttcaccctgaagcccccggcagctataaatatacattttatttttattaggtttacctcttctggatatttcatataggtggaatcataaaatgtgtgaccttttatgtctgggttcttacactgagcataatgcttccagggttcattcacatgcagcatatgtgagtgctgtattccttttcatggctgagtagtagtccattgtatggatggactacaatttgttattggacatttgggttgtttctatggtgtttttttctccccccacccctccaaacagggtctttctgttgcgcaagctggagtaatagtggcatgatcatagctcacagcagtcttgtactttgttacctcaacttagggaactaatacaccatgaataattatttttctataggtagtaatcactttgatccgattttgaatg

SEQ ID NO: 39262 - DNA, 309 bp, Homo sapiens
agtgtgatggatatctgcagaattcgcccttagcgtggtcgcggccgaggtacctggaagagtttcctgatggcttttacaaagggaagttgttagtttttgatgaacgctatgctctgtcctacaacagtgatgtggtgtcagagtgttcatactgtggagcccgctgggaccagtataaactctgctctactccccagtgccgacagctcgttttgacctgccctgcctgacaaggacaaggattcacagcctgttgtgtcacaatgtcaagacaaggggagccggaaagtttcaagccctattgca

SEQ ID NO: 39263 - DNA, 392 bp, Homo sapiens
gactactatagggcgaattgggccctctagatgcatgctcgagcggccgccagtgtgatggatatctgcagaattcgccctttcgagcggccgcccgggcaggtacgcgggggaggcattgcagggtttcaatacacaggacatgttctagttacagaagccttgctctgctgtcaacaattgggaaatgctcattttttcatgttttgtgaatactctggtcttgctgtaagctaatgtcatggctgtgggatattagagaagtgggtttatgactctgaagaccagcagacaccagactttaaaagtgcttaaattggaatttggaaactacagtaaagaaaccttcagataccagttccatcctgaagccctctgttgaacaacagggc

SEQ ID NO: 39264 - DNA, 607 bp, Homo sapiens
gactactatagggcgaattgggccctctagatgcatgctcgagcggccgccagtgtgatggatatctgcagaattcgccctttcgagcggccgcccgggcaggtactagaacacacttaccaatatcatttaactgtttttaatattataaatgtgtcttcctgaatggaaaaaggcatacaggctaaaataaagactattgttgctttttacctgattttattccaaaataatttaatattgaaaagccctaaacttctttaccacaaacaattctcaatatgtcagtttgctacataagaaagaaaacatttcagtgatttcatagtcatgtacctcggccgcgaccacgctaagggcgaattccagcacactggcggccgttactagtggatccgagctcggtaccaagcttggcgtaatcatggtcatagctgtttcctgtgtgaaattgttatccgctcacaattccacacaacatacgagccggaagcataaagtgtaaagcctggggtgcctaatgagtgagctaactcacattaattgcgttgcgctcactgcccgctttccagtcgggaaacctgtcgtgccagctgcattaatgaat

SEQ ID NO: 39265 - DNA, 597 bp, Homo sapiens
acgactcactatagggcgaattgagccctctagatgcatgctcgagcggccgccagtgtgatggatatctgcagaattcgccctttcgagcggccgcccgggcaggtacttggctcctttgagctacccttattttaagaattataaataggtgtcaacccacacaaagaacagattgtggattaccgtagggaaaaaaatagcttacccaacttactaaaagtttcaacaccaaaaaagatttaacttggctgaaagttctgaaacagctgagacacagaaccaggaagctataatttataatgaaatgttgatacatacttaaaagctactgcagctgtagctatactaaaataagatttcttcagggtttacttaccctgaaatgcaagaatacaagcataacaataatattactgtttttatatgcaccaatacctctctttaatatataaagctctacaacaaatacctctaataattttacaattaaattaagtccatacttctatactactttggtctcaacatttttaaaacatcaattaattttgaaaatttacaatttaacaacatgatcctatcaataacaagcac

SEQ ID NO: 39266 - DNA, 536 bp, Homo sapiens
  misc_feature 19, 20: n = A,T,C or G
ctactatagggcgaatggnngccctctagatgcatgctcgagcggccgccagtgtgatggatatctgcagaattcgccctatcgagcggccgcccgggcaggtacaaaaaataaaataactgtatttatagtttatagattccccctctcccatttacaaaactattaagttacattacctttttttttaaaaacatgagagcaaattgtacctcggccgcgaccacgctaagggcgaattccagcacactggcggccgttactagtggatccgagctcggtaccaagcttggcgtaatcatggtcatagctgtttcctgtgtgaaattgttatccgctcacaattccacacaacatacgagccggaagcataaagtgtaaagcctggggtgcctaatgagtgagctaactcacattaattgcgttgcgctcactgcccgctttccagtcgggaaacctgtcgtgccagctgcattaatgaatcggccaacgcgcggggagaggcggtttgcgtattgggcgctcttccgctttct

SEQ ID NO: 39267 - DNA, 347 bp, Homo sapiens
ccctctagatgcatgctcgagcggccgccagtgtgatggatatctgcagaattcgccctttcgagcggccgcccgggcaggtacttttacaaatggagcccttgggaggtgggttaggtaaaagaagctttttacttaacgttgcttatttccagtctaattttacgctgtagcagaaccagatggctgagaaaattctggaactatggatcttgaccccaaggatatattattttattccaagaaagatcaggtaggcgaaaagatgacaggatacagagtcaatccataaactaaatatgtataactgttctgaattatacagagtctagaaatatgtgtcagct

SEQ ID NO: 39268 - DNA, 329 bp, Homo sapiens
tatagggcgaatcgagccctctagatgcatgctcgagcggccgccagtgtgatggatatctgcagaattcgccctttcgagcggccgcccgggcaggtactcaaagtataatttctactgaatgcatatcacttgtgcactgttgtaaagctgaaaaaccgttaagcctctacgatttttaagtaagttggggaccatcagtttaaaataaatgcaatactatttcatgataaacatggtcactgtaagttttactcttttgaatgagggtgcgacagaatgcagttagaatcagttcatatcaccattaaaatcatccattcagaaac

SEQ ID NO: 39269 - DNA, 628 bp, Homo sapiens
atacgactactatagggcgaattgggccctctagatgcatgctcgagcggccgccagtgtgatggatatctgcagaattcgccctttcgagcggccgcccgggcaggtacagccggtcacccatgggaaagatcttctggaagtccgtggtcaccatctgggcctggatcccgaagccctgtctgcagcgatggccacacagttcttccccttcatggccatgacggcccctccgttataggacataatagacatgattgcggtgtacagtagattttcatgatcattgcatatttcttgtcattgaaatgtatcttttatgtttttaaatgcattcattttacacttgtgagtttatcattgactttaagagatagaaatgaaaaatgaaaattaaagctaaagcctttttatctattaatgcagatatattagaataagaatattttgggtttgtgtttattttttaatgaatttatgtttacttgatatggaaaattacgctttataggtggaaaagtagcaaataaagattaagtaaaagttagtgaaaatgatggggaatatagtattggaattttatagctagttaaaacaataagtatcatctaatttgggtgtttatttt

SEQ ID NO: 39270 - DNA, 615 bp, Homo sapiens
atacgactactatagggcgaattgggccctctagatgcatgctcgagcggccgccagtgtgatggatatctgcagaattcgccctttcgagcggccgcccgggcaggtacttttttttttttttttttttttttggggtctgtaggtcagataatttaataaatatttcaaataaatatataataaaaactgaaataaaatgtcaagaatggggaactaatggtattaagttttatatagaagggcatgagggaagtgtattaaaatttgttcaaatttatgactgagagggctaagaaggtacctcggccgcgaccacgctaagggcgaattccagcacactggcggccgttactagtggatccgagctcggtaccaagcttggcgtaatcatggtcatagctgtttcctgtgtgaaattgttatccgctcacaattccacacaacatacgagccggaagcataaagtgtaaagcctggggtgcctaatgagtgagctaactcacattaattgcgttgcgctcactgcccgctttccagtcgggaaacctgtcgtgccagctgcattaatgaatcggccaacgcgcggggagaagcggtttgcgtattgggcgc

SEQ ID NO: 39271 - DNA, 400 bp, Homo sapiens
tgtatacgactcactatagggcgaattgggccctctagatgcatgctcgagcggccgccagtgtgatggatatctgcagaattcgcccttagcgtggtcgcggccgaggtacactttgccaggttttatccctttgttaaagcaaatagaacagagagggaatatagctgccagtaaaaatcatttcccccctcttaatctcccatccttcatctccatgaaaccgactattaagataacctttctctctctgtgcactagtggaaaaagcaaagttctatagaaactcacagttaagagggactctgaatacagcaagttaaggcttttagtgcaaatagaatgaattcccactaaggtcaaaaggtttcaattgggtacctgcccgggcggccgctcg

SEQ ID NO: 39272 - DNA, 610 bp, Homo sapiens
tatagggcgaattgggccctctagatgcatgctcgagcggccgccagtgtgatggatatctgcagaattcgcccttagcgtggtcgcggccgaggtacaagctcaggattctccgaatgaagttaaggtcccttgcccatccggagaggcctcagctgtgtcggtatgatcttgtcctgatggaaaacgttgaaacagtcttccaacctattctttgcccagagttgcagttgtaactgttgccaggacacatggccataaataatagaaagaaagctacaaccacaggctgtttgaaagcttcacctcacctttctgcaaagcagaaaaagtatgaaaaaaaccaaggcttttttcagtagcgtcctatggatgtcacattgtacctgcccgggcggccgctcgaaagggcgaattccagcacactggcggccgttactagtggatccgagctcggtaccaagcttggcgtaatcatggtcatagctgtttcctgtgtgaaattgttatccgctcacaattccacacaacatacgagccggaagcataaagtgtaaagcctggggtgcctaatgagtgagctaactcacattaattgcgttgcgctcac

SEQ ID NO: 39273 - DNA, 601 bp, Homo sapiens
actatagggcgaattgagccctctagatgcatgctcgagcggccgccagtgtgatggatatctgcagaattcgccctttcgagcggccgcccgggcaggtactaagagacagagattaaaatggcttccagaggaaagacagagacaagcaaattaaagcagaatttagaagaacagttggatagactcatgcaacaattacaagatctggaggaatgcagagaggaacttgatacagatgaatatgaagaaaccaaaaaggaaactctggagcaactaagtgaatttaatgattcactaaagaaaattatgtctggaaatatgactttggtagatgaactaagtggaatgcagctggctattcaggcagctatcagccaggcctttaaaaccccagaggtcatcagattgtttgcaaagaaacaaccaggtcagcttcggacaaggttagcagagatggatagagatctgatggtaggaaagctggaaagagacctgtacctcggccgcgaccacgctaagggcgaattccagcacactggcggccgttactagtggatccgagctcggtaccaagcttggcgtaatcatggtcatagct

SEQ ID NO: 39274 - DNA, 652 bp, Homo sapiens
gactcactatagggcgaattgggccctctagatgcatgctcgagcggccgccagtgtgatggatatctgcagaattcgcccttagcgtggtcgcggccgaggtacatttaagtctgtattataataagcaaaaagattgtgtgtatgtatgtttaatataacatgacaggcactaggacgtctgcctttttaaggcagttccgttaagggtttttgtttttaaacttttttttgccatccatcctgtgcaatatgccgtgtagaatatttgtcttaaaattcaaggccacaaaaacaatgtttgggggaaaaaaaagaaaaaaatcatgccagctaatcatgtcaagttcactgcctgtcagattgttgatatataccttctgtaaataactttttttgagaaggaaataaaatcagctggaactgaaccctaaatcttgacttttgtcgttattatgcccaatgcctaagattggaaaggccctacagtatctggacactacacaatctgccttagctttaaaaaaataagttctcagaggaagtctgtcaaatgctaccttatcgaggaacattaaatgtctcttggccagatttcctctgaccctgaaaatgatggcatcagctgaatatgtgtcaactcaacacatgc

SEQ ID NO: 39275 - DNA, 545 bp, Homo sapiens
ccctctagatgcatgctcgagcggccgccagtgtgatggatatctgcagaattcgccctttcgagcggccgcccgggcaggtacttctctaatgaggatggagtctagaggagacccaagagccacaactaatacccaggctcaaagattccattcacctaagaaaaatccagaagaccagaccatgccccaaaataggacaatatatgttaccttgaaggtaaaccacaggagaaaccaagatatgaaacttaagctcacacatagtgagaatagtagcttatatatggctctcaacactctccaggctgtcagaaaagagatagaaactcaccaaggccaagaaatgcttgtgcgtggcacagaaggaatcaaagagtacctcggccgcgaccacgctaagggcgaattccagcacactggcggccgttactagtggatccgagctcggtaccaagctgggcgtaatcatggtcatagctgtttcctgtgtgaaattgttatccgctcacaattccacacaacatacgagccggaagcataaa

SEQ ID NO: 39276 - DNA, 419 bp, Homo sapiens
actatagggcgaattgtgccctctagatgcatgctcgagcggccgccagtgtgatggatatctgcagaattcgccctttccagcggcccccccggcaggtactctttctgactacaacatccagaaggagtcgaccctgcacctggtcctgcgtctgagaggtggatgcagatcttcgtgaagaccctgaccggctagaccatcaccctggaagtggagcccagtgacaccatcgaaaatgtgaaggccaagatccaggataaagaaggcatccctcccgaccagcagaggctcatctttgcaggcaagcagctggaagatggccgcactctttctgactacaacatccagaaggagtcgaccctgcacctggtcctgcgtctgagaagtggtatgcaaatcttcgtgaagaccctgac

SEQ ID NO: 39277 - DNA, 466 bp, Homo sapiens; identical to SEQ ID NO: 38202

SEQ ID NO: 39278 - DNA, 478 bp, Homo sapiens
  misc_feature 185, 271, 298, 309: n = A,T,C or G
tgctcgagcggccgccagtgtgatggatatctgcagaattcgcccttagcgtggtcgcggccgaggtacagagacagaggaaggggggctccaaagccaagagagggaaccccacctgccacagataccagctaggtgtatatacagaggctggaggaggcagtgtctgatttgcacaggctcangggattggtttgactaggcatgtcattcacgtagcccgcaggaaaagctggctctcccaccctggccttttaatatgcaaatgcanggcaccatgatcttctacacaggtggngatacttcggngtgtccatgtatccaggaatgtggggaaagggcaagaagtccacaggaatcgccatgtttgggtggacccactttctaatggctggcatttggatatcgggtaactggcctggctttaagagctggaactttacaagaaacttttccagacgtgctttaaaaaacaaaa

SEQ ID NO: 39279 - DNA, 630 bp, Homo sapiens
  misc_feature 574: n = A,T,C or G
ctatagggcgaattgagccctctagatgcatgctcgagcggccgccagtgtgatggatatctgcagaattcgccctttcgagcggccgcccgggcaggtacatcagtatcaattgcaaagttctgttttcttctacttcaggaaacaacctcatttgatttgtggaccctatgaactgtccaaacacactgatgaatatcagcaacttctctcatttgaatttctcatgtccttaaagtaaatagaatttccagagacaactaaagagcaatgcaatatgaagaaaattaaaatttggctaagaaaaataagtaatcaactaaaaattgccataacactcagacttaaacagaaaataagtttgttgtcttttataagatgacaaaacttcaatctaacatcacaagttcttatactagatgaatttactagtatatgaatcaatatactagatttctttcttctaccccaactgcaaatatactaaacaattatttcttcaatagtttctttttcccctagtcgtggcatttaaaactgagtaacagtatttagcactaagtaaatttagaanatataaaaaggttttacgaaatagcaatagttgattcatttttcatataccatctg

SEQ ID NO: 39280 - DNA, 285 bp, Homo sapiens
  misc_feature 116: n = A,T,C or G
ggccctctagatgcatgctcgagcggccgccagtgtgatggatatctgcagaattcgcccttagcgtggtcgcggccgaggtacaatagtggtcctgaggtgacgtatatcctcancttacaaagataacagagattaatatattaaagtatgacaggtgtccgaaattataaaagtattaattttggaaactgataaatgtccaagaaatcttcacaatttatgtttcctgatgcagcaccagctggtccctccattcggggtccctgacttcccacaacagcc

SEQ ID NO: 39281 - DNA, 552 bp, Homo sapiens
gactactatagggcgaattgggccctctagatgcatgctcgagcggccgccagtgtgatggatatctgcagaattcgcccttagcgtggtcgcggccgaggtacgcggggtaaccacctgggaaaacttcacagaaaatgagagtttcagatactgagaatagaaccactaagaagcagaaaagagaagatattctcgtgggggagaacaacggctgggaggggaggaagcatggccaaggcaaagaggtgggcattaataaggaatacaacatgtttaagaccacagaacatctgcataggctgtaaatttcgttgaatgatggatgcaaagatggaagacagatggatagaggaaaagacagaatcagatactggatgagttagtacctgcccgggcggccgctcgaaagggcgaattccagcacactggcggccgttactagtggatccgagctcggtaccaagcttggcgtaatcatggtcatagctgtttcctgtgtgaaattgttatccggtcacaattccacacaacatacgagccggaagcata

SEQ ID NO: 39282 - DNA, 495 bp, Homo sapiens
  misc_feature 109: n = A,T,C or G
gactcactatagggcgaattgggccctctagatgcatgctcgagcggccgccagtgtgatggatatctgcagaattcgcccttagcgtggtcgcggccgaggtactttnttttttttttttttttttttttccccctcttcaaaacaaaaaatggatttatacggaaaaagggttaatttacttggggtttatcagcacaccatttttaatgtgctttgaaagaattaaaaaccatgaaactgtattcactgaataccggtccatagttatattttttcttttaacgtggcttaaatacatacatcatgactttctattaaaatccttaaatctatggggatgtgtggtagataagactatattaaaaatttttcctcattaacaatttcattaaattaaaaaaaaatctgacatttcccttaaatgttaagttgaagcctgatctacactgctgtgtcctgtgaaatgaacctaatttttccagtgaataggaa

SEQ ID NO: 39283 - DNA, 515 bp, Homo sapiens
acgactcactatagggcgaatagtgctctctagatgcatgctcgagcggcacgccagtgtgatggatatctgcagaattcgccctttcgagcggccgcccgggcaggtacaccaaaaagagaactttgtgatccgttggtaagatagtatccacaagtaagcacttgtgttcactgttttttgtccacactagaatacacccagttggataccagagttatttacagacatctgaggaagatcctagttttcaagtctgtcaggaaaatattccatattgttttaagccagatcatacccatggaaaaatagagaatggttttctttctttttctttctgaccaatacatgctcaagaaatcaaatatctgagatacacaaattgaacgcggtagggtgggggaggaagtagggagataaagcctatgctgctgattcctcaattataggagcagtctttaaaagccctcgtcaatctagtgatgtgtttctctctggaattgggggactgggtg

SEQ ID NO: 39284 - DNA, 309 bp, Homo sapiens
gccctctagatgcatgctcgagcggccgccagtgtgatggatatctgcagaattcgcccttagcgtggtcgcggccgaggtacccgataggtagttttctaacccagccccttccctccaccctctagagtccatagtgtctattgttccacatttatgtccatgtatggtcaatgcttagctcccagttatgagtgaaaacgtgatatttgattttctgttacagcattaatttgcttaggattattacactgtggaaagtagtctggaaatttcttagagaacttaaaacggagttgccattagacc

SEQ ID NO: 39285 - DNA, 358 bp, Homo sapiens
  misc_feature 8: n = A,T,C or G
ttgggccntctagatgcatgctcgagcggccgccagtgtgatggatatctgcagaattcgcccttagcgtggtcgcggccgaggtacacaactgaaattcaaatatcgaggatggcaagaaaagctggcaacttctatgtatctgcagaacccaaattggcgtttgtcatcaggattggaggttatcaattgggtgaacccaaaggtctgaaaggtgttgcaacttctttgccttcatcaaatctttaatagaaaactttgtgaagctcagcaggggcttaataatgtgctgaggtttgtagaaccatatattgcattgggcatacccaaaatctgaaggtcagaaaataaactaatc

SEQ ID NO: 39286 - DNA, 579 bp, Homo sapiens
ctatagggcgaattgggccctctagatgcatgctcgagcggccgccagtgtgatggatatctgcagaattcgcccttagcgtggtcgcggccgaggtacctcccagtccactcgagctgcttctatctttggaggggcaaagcctgttgacacagctgctagagaaagagaagtagaagaacggctacagaaggaacaagagaagttgcagcgtcagctggatgagccaaaactagaacgacggcctcgggagagacacccaagctggcgaagtgaagaaactcaggaacgggaacggtcgaggacaggaagtgagtcatcacaaactgggacctccaccacatctagcagaaatgcacgaaggagagagagtgagaagtctctagaaaatgaaacactcaataaggaggaagattgccactctccaacttctaaacctcccaaacctgatcagcccctaaaggtaatgccagcccctccaccaaaggagaatgcttgggtgaagcgaagttctaacccttctgctcgatctcagagctcagacacagagcagcagtcccctacaagtggtgggggaaa

SEQ ID NO: 39287 - DNA, 581 bp, Homo sapiens
ccctctagatgcatgctcgagccgccgccagtgtgatggatatctgcagaattcgcccttagcgtcgtcgcggccgaggtacactttattttacttaaatatttttttgggaatctcaaaaaattttttttttacattattaccttcttctttaccttttcattctttttcttttttgaaaaaacccaactcccaaaaaatttaatgcccccaaaacccccaatgacacgggggaaacaccccaccccccaagaacatttttttgaaaccaaaataaaaaaggcccccaacccaagggggtcacaccctcaaacccaacccttttgaaagcccacggggaaaaaacccctaaaccccaaaattccaaacccccccgggcaaaaaaaccaaaacccctccccacaaaaaatcaaaaaattccccccccctggggggccccactcgtaaccccccccacccaaaaagccaagggggaaaaaaaacttggccccccaaaatcaaagctaaaaaaaacccccaacaccaaagccccttaacccgggaaacaaaaaaaaaccccccctcaaaaaaaaaaaaaaaaa

SEQ ID NO: 39288 - DNA, 354 bp, Homo sapiens
gtatacgactcactatagggcgaattgagccctctagatgcatgctcgagcggccgccagtgtgatggatatctgcagaattcgcccttagcgtggtcgcggccgaggtacaaatatatataacttacatttgattgtaaggccaacgttcaaaagtaaaaatgagatgagctctcttattgttatccgaggtcaagaggctgcaactgtcaaggggatgttctcaccaaaagggggtttgggggaagaagacacacacaaagctaataaaaccagaatccccatccccacaaaactcatgggaacaaaatttaaaggataaaacaaaacccaccaagacccatattacaaacc

SEQ ID NO: 39289 - DNA, 590 bp, Homo sapiens
tatacgactcactatagggcgaattgggccctctagatgcatgctcgagcggccgccagtgtgatggatatctgcagaattcgcccttagcgtggtcgcggccgaggtacattggggcaatctcaaaagtagtaaaattttttttgtcttttggcttaaccctagagacacagtagaccagtttcagcttacatttaagatggcagaaggggagaacaaaaaatttgacaggaattaaagtgctaagaacatcaccttagaatcaattccaaggacttacatgaagagaaaaccatcctcccatatgaaaatatttgcagtaggagaacacagtgcaataggctccaaaaatggcttttaagacctttggtggggcagttactactgctttaaagccaggttaaagtatactctaagcaaagatgaccgtagagcagctagcttccttttttataatcacagggaaagctctctccattgtccatcaaatcagctctagaaggtttttcttttttttctacaagtgcacaaaggggaaacactgattttaagaacctccttttcccaaagttttggccacaatttccctt

SEQ ID NO: 39290 - DNA, 608 bp, Homo sapiens
tacgactactatagggcgaattgggccctctagatgcatgctcgagcggccgccagtgtgatggatatctgcagaattcgccctttcgagcggccgcccgggcaggtacttataccccccaaatatataaaacatttttaaaagaaaaaaaggaagaaactattcatacatgcaacaactggatggatttcaagggaattatgctgaatgaaaaaagatcagcctcgtaagattacattctgtatgattccattcatacaacattcttgaaatgacaaaattacagagatggaggacagaacagtggtagccacaggttggggtgagggtataagaaagggatgtggctgcggctgtaaaagggcagtgcaagggatccatgtgacagaactgttctgtctcttgtgatggtggtcacatgaatctacacatgtgataatattgcatagaattaaatacacatacacgaaaaaagttcaagcagttgagcacaaatattttaattgtctaaaatgacattttctttaagagttatctacagttcaaagctcacttttatgaggtgtcacatccatcaccattttaagagatataaaatcatgaaaaga

SEQ ID NO: 39291 - DNA, 526 bp, Homo sapiens
tatagggcgaattgggccctctagatgcatgctcgagcggccgccagtgtgatggatatctgcagaattcgcccttagcgtggtcgcggccgaggtacatcctgcacagccctagatcccttaaaccttacagcacatgtttccgtgagcacagggttggggctaaagttacagattaacagcatctcacggcaaagcaatttttcttagtacctgcccgggcggccgctcgaaagggcgaattccagcacactggcggccgttactagtggatccgagctcggtaccaagcttggcgtaatcatggtcatagctgtttcctgtgtgaaattgttatccgctcacaattccacacaacatacgagccggaagcataaagtgtaaagcctggggtgcctaatgagtgagctaactcacattaattgcgttgcgctcactgcccgctttccagtcgggaaacctgtcgtgccagctgcattaatgaatcggccaacgcgcggggaaaggcggtttgcgtattgggcgc

SEQ ID NO: 39292 - DNA, 722 bp, Homo sapiens
  misc_feature 634: n = A,T,C or G
acgactcactatagggcgaattgggccctctagatgcatgctcgagcggccgccagtgtgatggatatctgcagaattcgccctttcgagcggccgcccgggcaggtacaaatttgaagtatgtgagaaggatgattaatatgaaggtgttttctggtttaagttgttccccctccctctgagaaaagtatgcatttttacattagaaaagggacttttgttgacttcagatctatggataattatttctaagcaacgtgtttttattcctcactaatcttggctatatcagataccatttatgaaacattcttgctataactgtctctccaagaccccgactgagtccccagcacctgctacagtgagctgccattccacacccatcacatgtggcactcttgccactccttgacattgtcaggcttttctaatgttggtagtatttattaaagatgaagatgcacatacccttcagctgagcagtttcactagtaggaaataccaaaagcttcgtacctcggccgcgaccacgctaagggcgaattccagcacactggcggccgttactagtggatccgagctcggtaccaagcttggcgtaatcatggtcatagctgtttcctgtgtgaanatgtatccgctcacaattccacacaacatacgagccggaagcataaagtgtaaagcctggggtgcctaatgagtgagctaactcacat

SEQ ID NO: 39293 - DNA, 531 bp, Homo sapiens
  misc_feature 107, 108: n = A,T,C or G
gactactatagggcgaattgggccctctagatgcatgctcgagcggccgccagtgtgatggatatctgcagaattcgcccttagcgtggtcgcggccgaggtacttnnttttttttttttttttttttttgtagggaaaacatcttttttattattattatttttatttatttattagagacaggttcttgttctgttgcctgggctagagtgcagtggtgcaatcctaattcactgtggcctcaaattcctgggctcaagtgatcctcctgccccacccttgagtagataggactacaggcacacaccaccatacctggataatttttttatttttatttcgtagaaacggaggtccagccaagttccccaggctggtctcgaactcttggcctcaagtgatcctccatgcctgggctggaaaacataaccttatgggaaagttcctaaaaatggttgaagaacaagactgaaggctagaatatgaaagctcaaattctgattctgccccttcctagttgcatattcctg

SEQ ID NO: 39294 - DNA, 550 bp, Homo sapiens
tacgactactatagggcgaattgggccctctagatgcatgctcgagcggccgccagtgtgatggatatctgcagaattcgccctttcgagcggccgcccgggcaggtactttttttttttttttttatttatttttttactttttttttttttttttttatttttttttttttttttttttattttttttatttttttttattgatttattttttaaaatatgtttattgtatttgttttttttttattgcgaacaaaaggggggataaaaaaaggggggacttaaaaacctttgggggaaaaacaaaaaaatgggggggggggcaaaaaaaaaaaaaaattttttttttgttggccccccgttctttaaaaaaagaatgtattgagaaaaaaaaaattcttaattgtgtaatactaaagggggttggttttttttttgtaaaaaaaaccttgtgtagggggggggaaaaaaaaaaaaaatttctttaaaaaattttttaaaaaaaaaaaacactatagggggtaaaaaaaaattattttttttgaaaat

SEQ ID NO: 39295 - DNA, 537 bp, Homo sapiens
tcactatagggcgaattgggccctctagatgcatgctcgagcggccgccagtgtgatggatatctgcagaattcgcccttagcgtggtcgcggccgaggtactaataattttttgttttttttttttttttgtattcttagtagagacggggtttcatcatattggtcaggctggtctcgagacctcctgacctcagatgatctgcctgccttggtctcccaaagtgctgggattacaggcatgagcctgtaatctacagtttcttttttttcaacaatcatagattgcttttatttaatgacctggaatcgtgtgttaacacttatgaaaatcctgatccttcttgcttgataacccaaggatgatgatgatgatcatgatcatgatgatgctgattacagtttggtgcctaatatgattcactgaggtgactagatgggtggcactgtagataaacagtgagacatcaggctcacttgaatcttgacaggaagtcaggatgatcatctgtgttggatgaaccacgttcttattgc

SEQ ID NO: 39296 - DNA, 548 bp, Homo sapiens
  misc_feature 477: n = A,T,C or G
actatagggcgaatcgtgccctctagatgcatgctcgagcggccgccagtgtgatggatatctgcagaattcgccctttcgagcggccgcccgggcaggtacgtatttccaagtattaagaagccaagtgtttttttttttgacgtattattgacaaatgtattcagcgccatacacaagagaaatattattactccaaagaacgaaagttaacaaaactccaaagcaaaaacccttttaatggaggtgagaaataacattaatgtaacaacagctagattgtttttaggatttttcttttcttttgtggaaacttcttgacttgacttttcatctgaacagtttttcccctcaagattttaatcttatatgtcataacttaagtttaggaacagcttgaataattagcattctagataacacaagggccatgattcactaaaattccaagctactgtaattttatggcatttattngcaaatgttctatgtatctcattttatctggagcagtccccactagtctaacctaaccatcttatagctct

SEQ ID NO: 39297 - DNA, 456 bp, Homo sapiens
tatagggcgaattgggccctctagatgcatgctcgagcggccgccagtgtgatggatatctgcagaattcgcccttagcgtggtcgcggccgagccggtaacggagaaagtttacgccgacactggcctgtattagcgcgtatggcctcgggccctcgttccccaaggcggtcgcctccctgttctcagtcgcaggctgaagccttgtctgctctcctcctttttggtttggttttggaactgactccgagggttgggagagcgcgttggtggcgacggccgagccagatcactataaacaaaatttccacaagagaaaatgttgaaataggagttgcggatacattggatatactggatgaaatacaagcggttaatttttgtaacgtgagggaaaagcccacattgctggttacatgtgtaaatcactgcgttattgctttagtcattgtctct

SEQ ID NO: 39298 - DNA, 425 bp, Homo sapiens
actcactatagggcgaattgagccctctagatgcatgctcgagcggccgccagtgtgatggatatctgcagaattcgcccttagcgtggtcgcggccgaggtactaaatattcagatgagaagaacattgcataaagcatttaagggatcaatttttgttgtgtttgatagcattgaatctgctaagaaatttgtagagacccctggccagaagtacataatcgttttgtggagtcggcacagttcaggttatggaggcacgtaattcaccaaagtgtaaaaaaggcaaaggaaaacacgctgcattgtagaataaggcattcaaatgtgctgttaacgtttaaggcagctaatggccaaaacaggcaagtcaagaaaagtggtctggtttggaggtgattttgcatctagaaggcattctcttc

SEQ ID NO: 39299 - DNA, 396 bp, Homo sapiens
ccctctacatgcatgctcgagcggccgccagtgtgatggatatctgcacaattcgcccttaccgtgctcgcggccgaggtaccattaggaaatggcccgaggggtcagggtttccatctgagactctgagtctctgaacggatgcgtcgaggcggaaggcggcaccccctccttcctcagacagacccaggcgaactaacaaacaaggcaaaatggaggcagccagtcctcctccttcatcttgactaacccaatagcagtggcccagggctttggggaatttcgatgggataggaaccaaagctactgccagaagcctgtttagttaggatgtccactgccccaggcaggtggtccccaggaccaaggctacagtacgcggcgattcctgaagct

SEQ ID NO: 39300 - DNA, 508 bp, Homo sapiens
ctatacggcgaattggagctccaccgcggtggcggccgaggtacaaactaaggactatttattgataatgttttgctactcttgtcagacaatggctataaactgaattaggcagtcttaaaaaaaaaaaacagaaaaagaaaaaaaagaacgttgcaaatttgttaaaatgccaaaaaggacagtttaattttgtacctgcccgggcggccgctcgaagtggatcccccgggctgcaggaattcgatatcaagcttatcgataccgtcgacctcgagggggggcccggtacccagcttttgttccctttagtgagggttaattgcgcgcttggcgtaatcatggtcatagctgtttcctgtgtgaaattgttatccgctcacaattccacacaacatacgagccgggagcataaagtgtaaagcctggggtgcctaatgagtgagctaactcacattaattgcgttgcgctcactgcccgctttccagtcgggaaacctgtcgtgcc

SEQ ID NO: 39301 - DNA, 239 bp, Homo sapiens
gactcactatagggcgaattggagctccaccgcggtggcggccgaggtacttatatccttcctgtgtcgactggcaaaatgtgatgaagacatcctgagccaccttctagcgtgaaacctcaaccaaacaaaaagtaaagaacactcggtctggacgaccaccgccgactccgaagcaggaaccctcacaacccgagcctccacgaaattcaaacttgccgcccccgcgtacctgcccg

SEQ ID NO: 39302 - DNA, 626 bp, Homo sapiens
acgactcactatacgactcactatagggcgaattggagctccaccgcggtggcggccgaggtactcgtaatttaaaacacctttgaaatgtagttgtccaaatgtaatgctgctatgtatattatttgggttccagatttttccctttaaaattctcaaaacactcagtgtccttacaactgcagctaaaatggttaatcattctggcaagaaggtgacagtgtgtatattggaaaggcagacattcacatttgaaaatattttgcattattgttagctaaaatcaacctctccttgaatgtagatacaatatatggttttgcagtcaattctgaatggaaaaaaagaatcaagtctgaaatttatgtgacatgtggcttcagatcatttgaacgatatgtagaaatctagatgaacatatcattagaggtgaaagcaaaatttgaaagcctaatgagatgaagcaacattatctctctctaatctgccaacaatattccctagattgtgttgccactgtattgattctgagtaatttggcttgtttatgcgtgatttaaatgcatgtggctgaatgcaataatttttcaagttattgagtagtagagaattcaccactattcact

SEQ ID NO: 39303 - DNA, 599 bp, Homo sapiens
gactcactatagggcgaattggagctccaccgcggtggcggccgggcatttctcccagggatctctgtgcttccttttgtgcttcctgtgtgtgtggatatttaaaggggctggaaatgtgcaaaaacatgtcactacttagacattatattgtcatcttgctgtttctagtgatgtttcgagcggccgcccgggcaggtacgcgggggttctgcatatctgtgcctctgacgtttattggtgcatactttggttttaagaagaatgccattgaacacccagttcgaaccaatcagattccacgtcagattcctgaacagtcgttctacacgaagcccttgtctggtattatcatgggagggattttgccctttggctgcatctttatacaacttttcttcattctgaatagtatttggtcacaccagatgtattacatgtttggcttcctatttctggtgtttatcattttggttattacctgttctgaagcaactatacttctttgctatttccacctatgtgcagaggattatcaattggcaatggcgttcattccttacgagtggctttactgcagttatttttttaatctatgc

SEQ ID NO: 39304 - DNA, 550 bp, Homo sapiens
atcgactcactatagggcgaattggagctccaccgcggtggcggccgaggtacctctcagctctgaaccccagtgacttactcaggtcagtatctaatataagctcggagtttggacggagggtctggacctcagctccaccaccccagcgacctttccgtgtctgtgatcacaagcggaccatccggaaaggcctgacagctgccacccgccaggagctgctagccaaagcattggagaccctactgctgaatggagtgctaaccctggtgctagaggaggatggaactgcagtggacagtgaggacttcttccagctgctggaggatgacacgtgcctgatggtgttgcagtctggtcagagctggagccctacaaggagtggagtgctgtcatatggcctgtgacgggagaggcccaagcacagcaaggacatcgcccgattcacctttgacgtgtacctgcccgggcggccgctctagaactagtggatcccccgggctgcaggaattcgatatcaagcttatcgataccgtcgacctcgaggggg

SEQ ID NO: 39305 - DNA, 398 bp, Homo sapiens
atacgactactatagggcgaattggagctccaccgcggtggcggccgaggtacaggccggggaagagactcaagtaggagcgcctgcccgagctgagactagatgtgaacctttcaccatgaaaatgttaaaagatataaaggaaggagttaaacaatatggatccaactccccttatataagaacattattagattccattgctcatggaaatagacttactccttatgactgggaaattttggccaaatcttccctttcatcctctcagtatctacagtttaaaacctggtggattgatggagtacctgcccgggcggccgctctagaactagtggatcccccgggctgcaggaattcgatatcaagcttatcgataccgtcgacctcgagggggg

SEQ ID NO: 39306 - DNA, 522 bp, Homo sapiens
atacgactcactatacggcgaattggagctccaccgcggcggcggccgacgtacgcggggacataaaagaaaaaaatgagagcgagagtgctaggggctgacttgcattccccctgcacccccaattcatatgctgaagccctaacccccagtgcctcaaaatgggactgcatttgcagacagggacttgacagagatgattaagttaaaatgaggttatagggtggaccctaatccaatatgactagtgtcctgatacgaagaggggacagttacagagggaagaccacatgggcacacagggagaagacggccgctctagaactagtggatcccccgggctgcaggaattcgatatcaagcttatcgataccgtcgacctcgagggggggcccggtacccagcttttgttccctttagtgagggttaattgcgcgcttggcgtaatcatggtcatagctggttcctgtgggaaaatgttattcgctcacaaattcacacaacatacgaaccgggagcata

SEQ ID NO: 39307 - DNA, 572 bp, Homo sapiens
cgcgtaatacgactcactatagggcgaattggagctccaccgcggtggcggccgcccgggcaggtactccatgttggttggtagtattttaaatctgaagcattttcagagtctaaggcaattcagactgcacagctgtcaactcaggagtcccattaaactgactctaaaaattcctaaaagaaggcatgatttattataagcaaatggctaacctggcttttttggtaatagaattttaaatgaaaataaaattatacaagatacacattgtttggatttttaaaaactctattaaatgtttaagtggttgtgaatatgaggaataattaaatgttaaccccagctgattagtgaacatataagaaaatggggggaactgatcccaaaagatcttctcttctaaggagaacttcacttgaggggcaaacactagaagatacaattgttattgtaaaacaaacactaatgagagtccgtcaaataattttaaaagaaaatagaacgcatttgcaactttcaaatgcatttgatgcccaacaatttcatcacctaccctatgtttaaaactg

SEQ ID NO: 39308 - DNA, 541 bp, Homo sapiens
gtatacgactcactatagggcgaattggagctccaccgcggtggcggccgaggtactgtcaccagctggaggctctctgccacctccttgttaccctgttacctttaaaataaaggtgcccaagaaagagaggctcttggtcttgaacttggaatagctcatctccagtttgcctgtcttgatattgagtctgggtatgcggtggcgagggcaggggatgatatgcaggagctgaggcagtgagtagaggaagttgaacacctggggcatgaagaatagtagcatggtcttgctgaagtgtcccaagatgcccaccacggcaaaggtcatgccagcaaagtaacagaaggtatctcccacaaacacccgtgatgggtacctgcccgggcggccgctcgatcgaaagatcaactttgatgcgcttttaaaattttctcatataaccccgtcaacgcagcagcacctgaagaaggtctatgcaagttttgccctttgtatgtttgtggcggctgcaggggcctatgtccatatggtcactcat

SEQ ID NO: 39309 - DNA, 436 bp, Homo sapiens
tacgactcactatagggcgaattggagctccaccgcggtggcggccgaggtactttttttttttttttttttttttgggttttttttttttttttttttttttttttttttttttttttttttttttttttggggatctgctaccctttatttgagaaaatttacccaaaaatccccaatccaacatttacaagggaatctggataaatcccatatgcctttttcccaaacaaaccaaaaaatggctttatgacaggggtccatgacaatggtataacaagggttacttaaacggcatcattctcatttatattataccgaccattttggataatatgctcaaaaatgggggaaagcacataacacccgattttaaagccccgggtacctgcccgggcgggctttaaaactaggggatcccccgggctgcaggaat

SEQ ID NO: 39310 - DNA, 611 bp, Homo sapiens
  misc_feature 213, 214, 250, 266: n = A,T,C or G
ctatagggcgaattggagctccaccgcggtggcggccgcccgggcaggtacgctgaaagcaaattgctgttttcctggtggttctgcacgtttcctaacttttatcatagtttgattttcattatttaagaaaaaataaaaaatccaaagaccataagaatggcattagattttttaaccattaaattattaatggcctatttggtggctcanntaaagattaatcatgtcacgccatgtttccaatctnttcttttgcagtatanttattttctaaaaattgttacatgcaaatttaaaccaagatttatcagtaaaagaaaaaaatagaatccttaataatgtaaatgttgttatatatgctaccctggtgaaaatatttttataaatcatgttgtcatttatgctttatgtagcctatttttcaataaccttcgagcggccgcccgggcaggtacttaggaatttattcaagtttaactgtagctaccgttctttttggcatagcaagatctctattggtattctacgtccttgttaactcttcacaaactttgcacaacaaaatgtttgagtcaattctgaaagctccggtattattctttgataga

SEQ ID NO: 39311 - DNA, 543 bp, Homo sapiens
gcgcgtaatacgactcactatagggcgaattggagctccaccgcggtggcggccgcccgggcaggtactgcatgctgtttgtggcactttatcttcaagccaggatgaagggagactgggcaagactcttacgccccacactgcaatttggtcttgttgccgtatccatttatgtgggcccttctcgagtttctgattataaacaccactggagcgatgtgttgactggactcattcagggagctctggttgcaatattagttgctgtatatgtatcggatttcttcaaagaaagaacttcttttaaagaaagaaaagaggaggactctcatacaactctgcatgaaacaccaacaactgggaatcactatccgagcaatcaccagccttgaaaggcagcagggtgcccaggtgaagctggcctgttttctaaaggaaaatgattgccacaaggcaagaggatgcatctttcttcctggtgtacctgtagtgagaaactgatttatgatcacttggaagatttgtatagttttataaaaactc

SEQ ID NO: 39312 - DNA, 496 bp, Homo sapiens
gctccaccgcggtggcggccgaggtaccgtttttgttggtttttttctccctcaaagtgaaatgagagactattgtagggttttgagccaaggagtgatattatctgaattctgttttaaaaggttcattatggctcctgtgtggaggcagggtagctacttagaaaccaagccatctcagcctcccgatttgtagagatgtggtctcactatgttgcccagactggtcttgaactcctggcctcatgtgatcctcccaccttggcctcccaaaatactaaaatgatagatatgagccgccacacctggccataagcttcagccttgagcagatactttctaaacactgtatatagggaaaaaaaactaattcttgcgtagccaaggtgttcattttgccgagaataacgtagcatactgtttacaattacgtgggtgtaatttctagctttgtgatcctgagagactgccttatcctccatatgcctcaggctct

SEQ ID NO: 39313 - DNA, 555 bp, Homo sapiens
  misc_feature 444, 445: n = A,T,C or G
gcggccgaggtacaaggaaatatatggactttcaatattttgggaaagaatatgcaagcacaagttgtgaagacacttgatatatcaaatatgtgaaaacagccagtccattaataagacatgattaaataaacaatggtatattaatacactagaatattcaaagaagggtatcaacaagaatgatctatattcactgacaatgagctctccccatactattttaaaaagtatttctattattttaagcttattatcataaagaacactggttttcgttttttaaaataagcaggccttaaaattctggtcaatgataaaagctgtaaaagaatacatcaccatgagggcaaaaagacatccaccaatctcttacagcaacttcaatttttcagatttcaagccatgagattaaaatggaataaataaatagacagaggtagnnttttttttgttttttgatttttcagaaattttctttaccaaaaaaagggttagaaggttaaggaaatagaaaaaaacattagttttctgagattctcatactgaataaat

SEQ ID NO: 39314 - DNA, 439 bp, Homo sapiens
cgactcactatagggcgaattggagctccaccgcggtggcggccgaggtactactgtttatccacattcgccgtggactctgctggcagagagaatcctatgggaacatctgaacagacagctggataagccaggccaacctcctgtgacacagcatctctcagtggtgccgcatctaaaggacaggcttttgccatgtgggcattgccatcctcacaccctgccttttgaatctgcccagagcagggtctgaactcacagtgacccacaggctgctgctggatgaacactcaggctacctaggtcttctcataatggagtggtagtgcaggctgcttgttcagctagaaagaggctgttatgcataggatggttgtattctctgccacagttgtccggagagaaataagaagccaaactccaatcagccttttacctg

SEQ ID NO: 39315 - DNA, 551 bp, Homo sapiens
tatagggcgaattggagctccaccgcggtggcggccgaggtacttaatttccaaataaagacaatgagaaagttgtagttctacctatcatgatgccagtatcctctgattgtgatttttgggattttagacattatggattttagattaggcattttgatcttttgggatttcaccattcaggattaaggtgttcgagattgtgtcttacaggattataaaccaaacccctttttgggattgggtttgtttcgccccagtcagccttattcttcagagattcttccagtttgttgctgtatcaatagttcacttttattttattttgttttatttatttatttgggatggagtctcgttgcccaggctggagtgcagtggcgccatctcagctcactgcaacctctgcctcctgggttcaagcaattcttctgcctcggtctccctagtagctgggattacaggcgcgcaccactatgcctggctaatttttgtatttttagtagagacggagtgtcgccatgttggccaggctggtctcgaactcctga

SEQ ID NO: 39316 - DNA, 561 bp, Homo sapiens
acgactcactatagggcgaattggagctccaccgcggtggcggccgcccgggcaggtactacatgaaccatgtctgatggtagcttgttcccactgtcattttgttttctggttgaagattaatgagctcagccacacaaacaagagttcttcattgacctctacagtccctgcctgttggaaacatctatggttttgtataacccctgtcatttaactgacagtgttagaagatatccccctgatgtgttactgtaaccaagaaagcatgaacgttaccctttctggtgacagcctgccatgggctgctgtggctgatacttatagaattgttgctccaaaattttggctccacttgagctgtccagaagtgtacctcggccgctctagaactagtggatcccccgggctgcaagaattcgatatcaagcttatcgataccgtcgacctcgagggggggcccggtacccagcttttgttccctttagtgagggttaattgcgcgcttggcgtaatcatggtcatagctgtttcctgtgtgaaattgttatccgctcacaa

SEQ ID NO: 39317 - DNA, 469 bp, Homo sapiens
gactcactatagggcgaattggagctccaccgcggtggcggccgcccgggcaggtaccttcattagcagttcctgggccaaaggcgttggtgatgttgcggtttgtctccgctgctttataacccattttgaactcgaaaaagaaaattgctctaatctgctttttgtctgatattatttccacggtcttatgtatctgcgcaccctttgacccttggcattatcttgggaggttccaatagatttctcttctcacttctagtgattaaagtccagttaggttcctttgcgtcatctcctttctccctgtagcttggcctgtggggcctgcactggcacttagaggcacatgggaagaaagatgtgaatgttccttatccattggtgtttctacctcttctccactggtgttcatggccttattaagatgggatccagattctggttctctggggtgcctatgtcagct

SEQ ID NO: 39318 - DNA, 575 bp, Homo sapiens
tacgactcactatagggcgaattggagctccaccgcggtggcggccgcccgggcaggtacagatctttaatagaaaagtatatttctttacagtagaaaaatatctgaacagtcaacttttcttaagacaaaaattcaaatgtaacatactacctaaactataaatttagctaaaactgaatcgagctgtttataagaactgattccaaaaatacatatatgaatttacataaccgatatgtagaagctcttcaaaatcgactgtaaattgaaaagttaaaattggccttgcctctgcagtttggagctgcaatggttgccagtatcggctgttttcttggtgcctgagctgcagggtgggcctgtcgaggaggggctgctgtctgggtcgctttccctctggctgtctgcggtgtaggtacctcggccgctctagaactagtggatcccccgggctgcaggaattcgatatcaagcttatcgataccgtcgacctcgagggggggcccggtacccagcttttgttccctttagtgagggttaattgcgcgcctggcgtaatcatggtcatagct

SEQ ID NO: 39319 - DNA, 345 bp, Homo sapiens
tatagggcgaattggagctccaccgcggtggcggccgggatcttcggcaagactcacgtctccaacaaccaagctccccaagctgagccgggctggcggaagaggcacgtgcgctgctgaatggagctggtcgctggttgctacgagcaggtcctctttgggttcgctgtacctcggccgctctagaactagtggatcccccggggctgcagggatttcgatatcaagcttattcgataccgtcgacctcgagggggggcccggtacccagcttttgttccctttagtgagggttaattgcgcgcttggcgtaatcatggtcatagctgtttcctgtgtgaaatt

SEQ ID NO: 39320 - DNA, 546 bp, Homo sapiens
cgtatacgactcactatagggcgaattggagctccaccgcggtggcgttctttccttaactgctcttccttttctaccacatatgggacttggtcttcttttgtcgagcggccgcccgggcaggtacttgattttttatcagatggcctggaaaacccagtctcacaaaaatatgaaattatcagaaggattatagtgcaatcttatgttgaaagaatgaactacctcactagtagttcacgtgatgtctgacagatgttgagtttcattgtgtttgtgtgttcaaatttttaaatattctgagatactcttgtgaggtcactctaatgccctgggtgccttggcacagttttagaaataccagttgaaaatatttgctcaggaatatgcaactaggaaggggcagaatcagaatttaagctttcatattctagccttcagtcttgttcttcaaccatttttaggaactttcccataaggttatgttttccagcccaggcatggaggatcacttgagggcaagagttcgagaccagcctggggaac

SEQ ID NO: 39321 - DNA, 503 bp, Homo sapiens
tacgactcactatagggcgaattggagctccaccgcggtggcggccgcccgggcaggtacctactgtgtgctttctactatcagccatcaaaaagaatgataaaagtccacagcataggaatctgttcatctgagtgttctgccaaaaaatacagtaattacaagtagtgtcaccatcagtgacaagggcagggaagactatttttcctttttttcccaacttattcaaatacttaaacctcttctatttcgagttcaaatgaggtaaacatacaacctcaaaggtaaactttgagttatgaaataatgggattttatgaattactaaatgattgaaagataggatcttagcttctctttagtgtcttcagttagaagggagaacaggcgtcccctgttgaaaagtttattagctcattatatgatctcatagcctccccactttatcttgcttcttatttttcaggtacttcctaatatttacaactttcctttgaattttt

SEQ ID NO: 39322 - DNA, 437 bp, Homo sapiens
tacgactcactatagggcgaattggagctccaccgcggtggcggccgcccgggcaggtacagcagaactgcatgatcagctgtatggtagccttgaaaaccaacaggccacaatcacagtgaaaacctcaggttggcagccactggaggatacaaaatgagtttggatctccttcaatgccccattcccagagaactgtcattatttgacctgctggtagttccctaaaggacgtgcaaggatgtttttatttgactggacacttgaagcttgccctgtatgaacagcccccatcttcccatgcttgtcaaaaatcagaggcaactaacactgcggcttcctgagagtctcactctgtcacccaggctggagagcaattgcacaaacacttgactcactgcagcctcaacttcttgtcctcaagtgatcctcccacc

SEQ ID NO: 39323 - DNA, 355 bp, Homo sapiens
gcgaattggagctccaccgcggtggcggccgctgtacgcggagaaacaatacgtctgtgctcatggaggcaaggatggccaggccatgttatgggatctcaacgaaggcaaacacctttacacgctagatggtggggacatcatcaacgccctgtgcttcagccctaaccgatactggctgtgtgctgccacaggccccagcatcaagatctgggatttagagggaaagatcatagtatatgaactgaatcaagaagttatcagtacatcggccgctctagaactagtggatcccccgggctgcaggaattcgatatcaagcttatcgataccgtcgacctcgagggggggcccg

SEQ ID NO: 39324 - DNA, 536 bp, Homo sapiens
tacgactcactatagggcgaattggagctccaccgcggtggcggccgaggtacttttcaaaaagaaagacaatttattggaagaatttgtagctggaaacactgttcattaagaaaacattaagttaccctgagaaagactcttaatattaccagtgttttcagggccccctgaccaacgcatggaagagcaacttgtaggctctagccttttaacaatacctacataaagaatattttgatctaaaatgtaacttgggttctctgccacactggtaataagtcacaaccaagacatctgaatgtgatggagtataagcaaattttgcgtttattttaggctgccctctttcttttctaagagaaagagtttgcagttcttcaaatggtcttggatgaaacctactgtttggaaaaaagaatcttctgtaagtaaactggtagttttcttaaaacagtaaacaaatttatctggtctacattctctaaactattattatatgcctagaaaataaggcattagtaattcatcattga

SEQ ID NO: 39325 - DNA, 644 bp, Homo sapiens
  misc_feature 587: n = A,T,C or G
gagcgcgcgtaatacgactcactatagggcgaattggagctccaccgcggtggcggccgaggtacccaagtttgtgatgtcaattgccaagactaaggaatgaaacatcttcatacgaggtcatcccggagccaactcattgcctgctttttttctgtgtatgttggtggtgtggcggggacaggattgataagcactgtcatcacagcaccctctttactcctccatctaccccaaaactatttccttcctcctaccactccagctggctgcagtctccgttgctgccaccaaccacagcgatgtaagccacagtggcacaggctgcagcatccagcgtgtagcaggtggcttctccctctggtcctctaagctgggaacagagcagctggtcaggaagacacagaagagccttccccgcgtacctgcccgggcggccgctctagaactagtggatcccccgggctgcaggaattcgatatcaagcttatcgataccgtcgacctcgaggggggcccggtacccagcttttgttccctttagtgagggttaattgcgcgcttggcgtaatcatggtcatagctgtntcctgtgtagaaatgttatccgctcacaattccacacaacatacgagccgggagcat

SEQ ID NO: 39326 - DNA, 588 bp, Homo sapiens
acgactcactatagggcgaattggagctccaccgcggtggcggccgaggtacttgattggtcagaaattgactcccttgacatatttgctcatgacaagcttgctcacggcctttaaatagagagtaaaatggaatggctgaatagccctcaaaaccaacgtatgtctagggatcatctacctaaggtagattctacagctgggcactagtaatttcatagaaaaaaatattttttagaattcatagaaatctttttgattactgaaaactaaattgtaataatcaaattgtcatccccatgacttattaaaataattttacaataatatacaacaaagctaccatagaatttgtagtttacatatagaacacattggtcagcatgttcttgggtctaaatgaaatacaagaaaattaaaatattttatacgaatgatgttttaaatttattaacatggcgatatgcctttgttacacaaaacttgctagagcagagtattttatttttttcttgcacgttttaaatatagatggaccattgaaatcaatatcagcatttacatgacattaccatgcagaaacacttg

SEQ ID NO: 39327 - DNA, 620 bp, Homo sapiens
  misc_feature 58, 95, 96, 106, 108, 109, 134, 135, 136, 146, 147, 167,168, 204: n = A,T,C or G
ctactatagggcgaattggagctccaccgcggtggcggccgcccggcaggtacgcggngagggtagagtgagaagcaccagcagggcagtaacanngccaaccctntnnagccattggctaagggggcagagannnactggtgganngcctttctcttacttcccannggacttcagcacctaagacagctccaaaacaaaccnaacagtcagctccgggggagcacgactgggcgagaggcacagaaatggacaccagaaataaggcccagctccttgtgctcctgactcttctcagtgtgctcttctcacagacttcggcatggcctctttacagggcaccttctgctctcaggttgggtgacagaataccctttgagggagcaaatgaacctgatcaagtttcattaaaagaagacattgacatgttgcaaaatgcattagctgaaaatgacacaccctattatgatgtatccagaaatgccaggcatgctgatggagttttcaccagtgacttcagtaaactcttgggtcaactttctgccaaaaagtacctcggccgctctagaactagtggatcccccgggctgcaggaattcgatatcaagcttatcgatacc

SEQ ID NO: 39328 - DNA, 509 bp, Homo sapiens
actatacggcgaattggagctccaccgctgcggcggccgcccgggcaggtactttaggaggctgaggtaggtggatcacttgaggtcaggagttcaagaccagcctggccaacatggtgaaacctcatctctactaaaaatacaaaaattagcttggtgtggtggtgcattgcctgtagtcccagctacttgggaggctgaggcaggagaatcacttgaacccatgaagtggaggttgcagtgagctgaggtcgtgccactgcacttcagcctgggtgacagagtgagacagtctcaaaaaaaaaaaaaaaaaaaaaagtacatacttaatatatgtctaaaagcatcccactccaacagatgccctacacatagggattgcttctcataaatatttaaaattgtttagaaactgggaacagattgaaaaatgatttttgtcctcggccgctctagaactagtggatcccccgggctgcaggaattcgatatcaagcttatcgataccg

SEQ ID NO: 39329 - DNA, 563 bp, Homo sapiens
  misc_feature 62: n = A,T,C or G
gcgtatacgactcactatagggcgaattggagctccaccgcggtggcggccgaggtactttntttttttttttttttttttttttttactttgaaattactttaatttaggaatagaaaacatcttgaaaggaaaaaaaaaacccacaaaacatacaggcaaatttgtattctgtgagtttctcacaccctcacacttgttcaccaatctctaagatgtcgagcggccgcccgggcaggtacaaacttttttttgtcattaaacaatatagtataacaactatttacaaagcatttacattgtattagctattataggtaatctagagatgatttaaagtgtatggtaggatgtgcacaggttatatgcaaatactacaccattttctataagggacttgaacatcatggactttagtatcctagggggttcttggaacccatcacccataggggcaccataggacaactatagtacctcggccgctctagaactagtggatcccccgggctgcaggaattcgatatcaagcttatcgataccgtcgacctcgagggggggcc

SEQ ID NO: 39330 - DNA, 650 bp, Homo sapiens
  misc_feature 497, 637: n = A,T,C or G
ctatagggcgaattggagctccaccgcggtggcggccgaggtactcttcagaagaaagaggcgagggctcgtcatttggtcaccctttggacattttgcaactcttcaatgggtttccattgttggttgattgttataagcttttgaggtacctgcccggcggccgctctagaactagtggatcccccgggctgcaggaattcgatatcaagcttatcgataccgtcgacctcgagggggggcccggtacccagcttttgttccctttagtgagggttaattgcgcgcttggcgtaatcatggtcatagctgtttcctgtgtgaaattgttatccgctcacaattccacacaacatacgagccgggagcataaagtgtaaagcctgcggtgcctaatgagtgagctaactcacattaattgcgttgcgctcactgcccgctttccagtcgggaaacctgtcgtgccagctgcattaatgaatcggccaacgcgcggngagaggcggtttgcgtattgggcgctcttccgcttcctcgctcactgactcgctgcgctcggtcgttcggctgcggcgagcggtatcagctcactcaaaggcggtaatacggttatccacagaatcaggggataacgcangaaagaacatgtg

SEQ ID NO: 39331 - DNA, 384 bp, Homo sapiens
ctgcagcggccgcccggccaggtacaatagatgacttttacatcatgtatattagccttatgtgatataaaatgtattacttagaaaatatacttaaaagaattatttctattataaatggtattcatgattgactgcttaattaatgcacattacatttctcctaatataaaatgaaatgatgcagtttagttcatttcagtctagatgcccgtacctcggccgctctagaactagtggatcccccgggctgcaggaattcgatatcaagcttatcgataccgtcgacctcgagggggggcccggtacccagcttttgttccctttagtgagggttaattgcgcgcttggcgtaatcatggtcatagctgtttcctgtgtgaa

SEQ ID NO: 39332 - DNA, 550 bp, Homo sapiens
gactactatagggcgaattggagctccaccgcggtggcggccagcaaaaggccaggaaccgtaaaaaggccgcgttgctggcgtttttccataggctccgcccccctgacgagcatcacaaaaatcgacgctcaagtcagaggtggcgaaacccgacaggactataaagataccaggcgtttccccctggaagctccctcgtgcgctctcctgttccgaccctgccgcttaccggatacctgtccgcctttctcccttcgggaagcgtggcgctttctcatagctcacgctgtaggtatctcagttcggtgtaggtcgttcgctccaagctgggctgtgtgcacgaaccccccgttcagcccgaccgctgcgccttatccggtaactatcgtcttgagtccaacccggtaagacacgacttatcgccactggcagcagccactggttacaggattagcagaacgaggtatgtaggcggtgctacagagttcttgaagtggtggcctaactacggctacacttgaagaacagtatttgggatctgcgctct

SEQ ID NO: 39333 - DNA, 175 bp, Homo sapiens
gctccaccgcggcggcggccgaggtactttttttttttttttttggtgggggagttgaaacctaattttgtggcgtagcagctatgcagcttgaaatccaagtagcactaaattttattatttcgtatttgtacctgcccgggcggccgctcgaatattgaaaaaggaagactct

SEQ ID NO: 39334 - DNA, 403 bp, Homo sapiens
ctatacggcgaattggagctccaccgcggtggcggccgacgtacttgttattgatatttgcttatttcgccccacttttttttaaattttactttacgttctgggatacatgtgcagaatgtgtaggtttgttacacaggtatacgtgtgccatagtggttgctgcacctatcaacccatcatctaggttttaagtcccacatgcattaggtatttgtcctaatactctccctcccctgttctcccaccccccgaatcacttattttaaaagtcagcaataaaaataaattgaaactaaatcaaataaattgatactatagagaacaaatctagcggccgtccgggcaggtacagtgtggtgtattttttgtttttttctttttcacaacatctacaggacac

SEQ ID NO: 39335 - DNA, 566 bp, Homo sapiens
cggtggcggccgaggtactttttttttttttttttttttttgagacagaatttcgctcttgttgtccagaggctggagtgcaatgacgtgatcttggctcactgcaacctcccaggttcaagcgattcttctgcctcagcctctaagtagctgggattacaggcgcctcccaccatgcctagctaattttttgtatttttagtagagacagggtttcactatgttggactcgaactcctgacctgatgtgatccacctgccttggacttccaacgtgctgggattacaggcatgagccaccgctcctggcctaaaatttgccttttacaaaaactcaacaaaagatcatctcaactaaggcatactaaataatatttaagacacaaacttacaggctaaaaaaataaacctgccatagtaacaaacacacactcaggaattacctacacgataaacattttaaattgctaaaccaaatagaaggaaacacagataacattgtaaagtttgaaaggtacctgcccgggcggacgctctagaactagtggatcccccgggctgcagga

SEQ ID NO: 39336 - DNA, 594 bp, Homo sapiens
gactactatagggcgaattggagctccaccgcggtggcggccgcccgggcaggtacacattcctgagtatacaccattgtggtgatataatttattttggaattttctccattcagcttaaaaggtgtttcttcccaagaaactgaacttttctgtcaaatgcacttgatcgaataggagaattgggttcataaaatggattcattgaaaattttatatataaatcataaacatcagtaaagaagttctttattccatcttcttgtcttatgtcatgaagtcgagcggccgtccgggcaggtacgcggggactggggaaagggagggctcactgagaaccatcccggtaacccgatcaccgctggtcaccatgaaccacattgtgcaaaccttctctcctgtcaacagcggtcagcctcccaactacgagatgctcaaggaggagcaggaagtggctatgctgggggtgccccacaaccctgctcccccgatgtccaccgtgatccacatccgcagcgagaccttcgtgcctgaccatgtcgtctgggccctgttcaacaccctcttcatgaacacctgctgcctgggctttat

SEQ ID NO: 39337 - DNA, 595 bp, Homo sapiens
tacgactcactatgggcgaattggagctccaccgcggtggcggccgaggtactttttttttttttttttttttttgagacagaatttcgctcttgttgtccagaggctggagtgcaatgacgtgatcttggctcactgcaacctcccaggttcaagcgattcttctgcctcagcctcctaagtagctgggattacaggcgcctcccaccatgcctagctaattttttgtatttttagtagagacagggtttcactatgttggtctcgaactcctgacctcatgtgatccacctgccttggactcccaacgtgctgggattacaggcatgagccaccgctcctggcctaaaatttgccttttacaaaaactcaacaaaagatcatctcaactaaggcatactaaataatatttaagacacaaacttacaggctaaaaaaataaacctgccatagtaacaaacacacactcaggaattacctacacgataaacattttaaattgctaaaccaaatagaaggaaacacaaataacattgtaaagtttgataggtacctgcccgggcggccgctctaaaactagtggatcccccgggct

SEQ ID NO: 39338 - DNA, 557 bp, Homo sapiens
cgcgcgtaatacgactcactatagggcgaattggagctccaccgcggtggcggccgaggttcttaaaagagaatctgggagcgatcctgacctctttcactcacccagtgatgacatggacagtatcatcttgccaaagccagaggatgagcatacggcctgtgatatcaccggaccagtcatgcaccgatgacacggcttcactggaccgacattcttctcatggcagtgatgtgtctctctcccaaattttaaagccaaacatgtcaagagatcggcaaagccttgatggattctacagccatgggatgggagctgcgggtcgagacagtgagagtgagcctgctgacccaagcgacatggatgacgaggagatggacagtatcactgaagcgcctgcaaactgctctgtactaaggagctacatgcgctctgtttctcccttgcggaagcacagctggcggcctgggaaaaatgcagccagcgatgcacaaatgaaccaccggagtttcagtctagaaggctagacaggaggagctggtgtctgaaacaaacca

SEQ ID NO: 39339 - DNA, 527 bp, Homo sapiens
  misc_feature 452: n = A,T,C or G
gcgcgtatacgactcactatagggcgaattggagctccaccgcggtggcggccgaggtacactggaggctggagcctgcagacggcatggctctgcggctcaccttgctgcagttggtggtggtgacagagactgcagcttgactgtagtgaatttggaaattatctgtctggaagctctgagtttatcttgggacctcaagaggagaggatcacccaactcacagcaatcaaactccaaatggtgctataaactgaaccacacatggacacgtcagtcttccgaggacctttagatcaaccccaggaggagccctagctgctgttccccattcgacgcccctttccagcaggaagtagccagaagacatcgtcgcccaaacctctaacagcagttagtgcggcatctccacaggggggaatgttgtaggagttattgataaattattttangcagatagagaggaaaaggggtccttaggaagtttttgttttttaaagcacgtttggaaaagtttcttgtaaagc

SEQ ID NO: 39340 - DNA, 419 bp, Homo sapiens
ctcactatagggcgaattggagctccaccgcggtggcggccgaggtactgtggcatggcgcagtgggtgacagatggccacatagcggtcaaaagccatggccagcagcactgtggattccatgccagataaggagtggatggcaaacatctgtagcagacaagcatcaaactggatggtagtggaattgaaccagaagatggccagcattttgggcatggatgaggtggagatgaggatgttcgagcggccgcccgggcaggtacgcggggatagccggacggggatctgagctggcaggatgaatgtgggggtggcacacagcgaagtaaaccccaacacccgagtgatgaatagccgaggcatctggctggcctacatcatcttggtaggattgctgcatatggttctactcagca

SEQ ID NO: 39341 - DNA, 523 bp, Homo sapiens
atacggcgaattgcagctccaccgcggcggcggccgaggtacaaaagaatacaatatgatttgtcaaaaaacatataaaaagacagctgctcttcctcaaatacatgagctaatgataaaagactttttcatgttaatgtctccaagttcttctttttacataaaaaaagaacattatggtggcaaatgtgaattatccttttaatattgaacattatattcttttaaaatccatccagatcaaatgcaataattttctttttaactcaacaactgatgctaccaaacgtggactcaatatacttgttaaaacgtgtaaagcgtgtctctagtcttcaaagctttcaggtgaagagaggtgctttttcttgatgcaaatctcaaggcagagaaaatcattttaaagcttataaaaagtggacagagaaatattaaaaacttctctgaaatatacaaatatgtgtaattattaaaattgaagacagtaacatcagttgcaagtgcttggaaatctgtcctgacc

SEQ ID NO: 39342 - DNA, 615 bp, Homo sapiens
gtatacgactcactatagggcgaattggagctccaccgcggtggcggccgaggtacagatctatgagctagaagaacacaagatagaaacttggagagaggtgtatctccaggactcctttaaaccgcttgtctgcatttctcctaatgccagcttgtttgatgctgtctcttcattaattcggaacaagatccacaggctgccagttattgacccagaatcaggcaatactttgtacaactgaatatgtttctatgtaaaagccacaataaagttaaatgaaatactaaataagtcttacaaattggtctcttaggagttctcaaaagaattagtaactgagtaacgttagattctaagaaatgccctcttcttgatctatcatttctgttttaactgaaaacacatctgccaacatatgttttggaatttctgaccctctgactttcaaggcataacaagcattctccactttggccaaactttgtttcaaggtatacagcttcttagaaacctcgtaaggtccagtgttgccaatgaatgaaaacccatcataaacctgacgtaaaaactggctcactatcaagggggtatcaatgtccccattccccacac

SEQ ID NO: 39343 - DNA, 474 bp, Homo sapiens; identical to SEQ ID NO: 34097

SEQ ID NO: 39344 - DNA, 481 bp, Homo sapiens
tacactactatagggcgaattggagctccaccgcggtggcggccgaggtacgcgggggaaggaaaaagagcaacagatccagggagcattcacctgccctgtctccaaacagccttgtgcctcacctacccccaacctcccagagggagcagctatttaaggggagcaggagtgcagaacaaacaagacggcctggggatacaactctggagtcctctgagagagccaccaaggaggagcaggggagcgacggccgctctagaactagtggatcccccgggctgcaggaattcgatatcaagcttatcgataccgtcgacctcgagggggggcccggtacccagcttttgttccctttagtgagggttaattgcgcgcttggcgtaatcatggtcatagctgtttcctgtgtgaaattgttatccgctcacaattccacacaacatacgagccgggagcataaagtgtaaagcctggggtg

SEQ ID NO: 39345 - DNA, 601 bp, Homo sapiens
tacgactcactatagggcgaattggagctccaccgcggtggcggccgaggtacattctggctcggatacagaatcactgctgcagggctcactatttggagatgcatttctttgagaggtagtgtcaactgctataggtgttagctcaccctcaccgaatgcatcacttataaacatgccttcatggattaaataagccacctctgtgtccagtgaattatcttttgcagcattcttctgttgtgaaatctcttccaattctctagtcctttggtttttgtcaagaactgagagaacaacactgtgaatgatatttaatgttgccttcactctctgtaggaaaattgtaaacttagagaaaatatccttgagcagatcaaaccactggggaaaattcaacattctcatctgatctgcaagcttcacaacaacatctgtgtctatttcttctgtttgtgaaactttattaatcacacactgtttaatgatattctttgctgtaataaccattttttcaccatagatttctaaaaaattaagctttctttgttttaaaagtccaaatacaagagatattagtctttcctcttctaaaacttga

SEQ ID NO: 39346 - DNA, 550 bp, Homo sapiens
  misc_feature 529: n = A,T,C or G
acgactcactatagggcgaattggagctccaccgcggtggcggccgcccgggcaggtacgcgggacattgtctttctcaaagtaacggattcaggaggagtccttttctgagtagagtccacagaagaggtattctattgatgggcttaggtcacgagcaaggatttgagccccttgtttaaaatgcaaagaaaaatgtgaaggattcgaactgcacttctggagaaaaatatgtcgtaactgcaagtgtggccaagaagagcatgatgtcctcttgagcaatgaagaggatcgaaaagtgggaaaactttttgaagacaccaagtataccactctgattgcaaaactaaagtcagatggaattcccatgtataaacgcaatgttatgatattgacgaatccagttgctgccaagaagaatgtctccatcaatacagttacctatgagtgggctcctcctgtccagaatcaagcattggccaggcagtacctcggccgctctagaactagtggatcccccgggctgcangaattcgatatcaagcttatc

SEQ ID NO: 39347 - DNA, 617 bp, Homo sapiens
tacgactactatagggcgaattggagctccaccgcggtggccggccgcccgggcaggtacagagacagaggaaggggggctccaaagccaagagagggaaccccacctgccacagataccagctaggtatatatacagaggctggaggaggcagtgtctgatttgcacaggctcaggggattggtttgactaggcatgtcattcacgtagcccgcaggaaaagctggctctcccaccctagccttttaatatgcaaatgcagggcaccatgatcttctacacaggtggggatacttcggggtgtccatgtatccaggaatgtggggaaagggcaagaagtccacaggaatcgccatgtttgggtggacccactttctaatggctggcatttggatatcgggtaactggcctggctttaagagctggagctttacaagaaacttttccagacgtgctttaaaaaacaaaaacttcctaaggaccccttttcctctctatctgcctaaaataatttatcaataactcctacaacattcccccctgtggagatgccgcactaactgctgttagaggtttgggcgacaatgtcttctggctacttcctgctggaaaggggc

SEQ ID NO: 39348 - DNA, 627 bp, Homo sapiens
acgactcactatagggcgaattggagctccaccgcggtggccggccgcccgggcaggtacgacgggagaaaaatgcatgaatgtcatcagtgccaaaaagccttcaccacgagcgcgtccctcacacggcacaggagaatccacaccggggagaagccttacgagtgcagcgactgcgggaaagccttcaacgacccttcagcccttaggagccacgcaagaactcacctcaaagagaagccctttgactgcagtcagtgtggaaatgcattccggaccctctcggccctgaaaatccacatgcgagttcacactggcgagaggccttacaagtgtgatcagtgcgggaaggcttacggccgctctagaactagtggatcccccgggctgcaggaattcgatatcaagcttatcgataccgtcgacctcgagggggggcccggtacccagcttttgttccctttagtgagggttaattgcgcgcttggcgtaatcatggtcatagctgtttcctggtgtgaaatgttatccgctcacaattccacacaacatacgagccgggagcataaagtgtaaagcctggggtgcctaatgagtgagctaactcacattaattgcgttgcgctc

SEQ ID NO: 39349 - DNA, 447 bp, Homo sapiens
gcgaattggagctccaccgcggtggcggccgaggtacatgactgtgtgtgtatgtgtgtgtgtgtataattctttgttgttttggtaaaatcagaggagtgggttataagtgctaatttccttgggaaattaatgaactagggcaagtatagcatcccatgcataaaattagcacagggacatcagaattgtatgggtcttcttttttcttttattctttttttttgagatggagtctcgctctgttgccaggattgagtgcagtggcgcaatctcagctcagtgcaacctccgcctcccaggttcaaccgattcccctgccttagcctttcgagtagctgggactacaggtgcacgccaccactcccagctaattttttgtatttttattagagatggggtttcgcctgtatgggtctttttttgtgatggggatacacccccatt

SEQ ID NO: 39350 - DNA, 478 bp, Homo sapiens; identical to SEQ ID NO: 30826

SEQ ID NO: 39351 - DNA, 370 bp, Homo sapiens; identical to SEQ ID NO: 30376

SEQ ID NO: 39352 - DNA, 418 bp, Homo sapiens
actactatagggcgaattggagctccaccgcggtggcggccgcccgggcaggtaccatatagatcaaaagctttgtaaccacaggaaaaaataaactcttccatcccttaaagaatagaatagtttgtccctctcatgggaattgggctgtatgtatattgttcttcctccttagaatttagagatacaagagttctacttagaacttttcatggacacaatttccacaacctttcagatgctgatgtagagctattgggaaagaacttccaaactcaggaagtttgcagagagcagacagctagagataactcgggacccagagttggtcgacagatgttagatgtatcctagcttttagctataaaccactcaaagattcagcccccagatcccacagtcagaactgaatctgcgt

SEQ ID NO: 39353 - DNA, 486 bp, Homo sapiens; identical to SEQ ID NO: 30378

SEQ ID NO: 39354 - DNA, 394 bp, Homo sapiens; identical to SEQ ID NO: 30379

SEQ ID NO: 39355 - DNA, 386 bp, Homo sapiens; identical to SEQ ID NO: 30380

SEQ ID NO: 39356 - DNA, 443 bp, Homo sapiens; identical to SEQ ID NO: 30381

SEQ ID NO: 39357 - DNA, 521 bp, Homo sapiens; identical to SEQ ID NO: 30382

SEQ ID NO: 39358 - DNA, 469 bp, Homo sapiens
tccaccgcggtggcggccgaggtactagtcagtatgctgtagtattaatcagtaggtcaagttcattgaagtaaaggagaattgaattcttgaagttcacatttaggcaaaaatttggcgttttaggaggtgagtataagacatgatctttatagaaaacgctgatgataaaaacagtgctctatgttaagtgcttttatgcttgactccattgtcatcttttcttaagaaactaagctcaggactgggtgcaatggctcatgtctgtaatcccagacactttgggaggctgaggctataggatcagttgagctcaagagttcaagatcagcctgggcaacatagctagacctcgtctctactaaaaaacagacaaacgaaaaacaaaaaaaacccccaataaaaccaacaaaccatcttggcatggtggtgcgtgcctgtggtcccagctgctcaagagctgagcggg

SEQ ID NO: 39359 - DNA, 462 bp, Homo sapiens; identical to SEQ ID NO: 30384

SEQ ID NO: 39360 - DNA, 518 bp, Homo sapiens; identical to SEQ ID NO: 30385

SEQ ID NO: 39361 - DNA, 459 bp, Homo sapiens; identical to SEQ ID NO: 30386

SEQ ID NO: 39362 - DNA, 491 bp, Homo sapiens; identical to SEQ ID NO: 30387

SEQ ID NO: 39363 - DNA, 657 bp, Homo sapiens; identical to SEQ ID NO: 30388

SEQ ID NO: 39364 - DNA, 553 bp, Homo sapiens; identical to SEQ ID NO: 30394

SEQ ID NO: 39365 - DNA, 397 bp, Homo sapiens; identical to SEQ ID NO: 30390

SEQ ID NO: 39366 - DNA, 473 bp, Homo sapiens; identical to SEQ ID NO: 30391

SEQ ID NO: 39367 - DNA, 418 bp, Homo sapiens; identical to SEQ ID NO: 30392

SEQ ID NO: 39368 - DNA, 410 bp, Homo sapiens; identical to SEQ ID NO: 30393

SEQ ID NO: 39369 - DNA, 553 bp, Homo sapiens; identical to SEQ ID NO: 30394

SEQ ID NO: 39370 - DNA, 245 bp, Homo sapiens; identical to SEQ ID NO: 30395

SEQ ID NO: 39371 - DNA, 377 bp, Homo sapiens; identical to SEQ ID NO: 30396

SEQ ID NO: 39372 - DNA, 489 bp, Homo sapiens; identical to SEQ ID NO: 30397

SEQ ID NO: 39373 - DNA, 406 bp, Homo sapiens; identical to SEQ ID NO: 30398

SEQ ID NO: 39374 - DNA, 433 bp, Homo sapiens; identical to SEQ ID NO: 30399

SEQ ID NO: 39375 - DNA, 423 bp, Homo sapiens; identical to SEQ ID NO: 30400

SEQ ID NO: 39376 - DNA, 404 bp, Homo sapiens; identical to SEQ ID NO: 30401

SEQ ID NO: 39377 - DNA, 490 bp, Homo sapiens; identical to SEQ ID NO: 30402

SEQ ID NO: 39378 - DNA, 570 bp, Homo sapiens; identical to SEQ ID NO: 30403

SEQ ID NO: 39379 - DNA, 489 bp, Homo sapiens
  misc_feature 436: n = A,T,C or G
tccaccgcggtggcggccgcccgggcaggtactattaaatttaatgagaggtaacccatgcaccggcaggaagttcaaggggacagaaggggcttgctccactctggagccctatctcctctcacctccttccttctagtttgacatgcgatcttgtctctctcttttataaagtgcttccaggcccttttgattaggatgctgtcctaaatccttcctaaagagaggttttggagccaccaacactgcttcactgtggaataaactttccttattaagattcttcattcactcataatcatctcctttttcctcactgctcattcatttatggagatagcacccatatcatagctacttggtcaaatcatggtgatactccccacttaggagaggaagatgactaggttatagctcttgcctttaggaaattaanaaccctgtggtgtaatctacattacacagtgggaatatggggcatatatcatg

SEQ ID NO: 39380 - DNA, 427 bp, Homo sapiens; identical to SEQ ID NO: 30405

SEQ ID NO: 39381 - DNA, 244 bp, Homo sapiens; identical to SEQ ID NO: 30406

SEQ ID NO: 39382 - DNA, 386 bp, Homo sapiens; identical to SEQ ID NO: 32930

SEQ ID NO: 39383 - DNA, 383 bp, Homo sapiens; identical to SEQ ID NO: 30407

SEQ ID NO: 39384 - DNA, 285 bp, Homo sapiens; identical to SEQ ID NO: 30408

SEQ ID NO: 39385 - DNA, 438 bp, Homo sapiens; identical to SEQ ID NO: 30409
  misc_feature 180, 181, 205, 212, 213, 225, 226, 241, 242, 254, 255, 271,272, 313, 335, 336, 344, 345, 362, 363, 371, 372, 404, 405,427, 428, 429: n = A,T,C or G

SEQ ID NO: 39386 - DNA, 525 bp, Homo sapiens; identical to SEQ ID NO: 30410

SEQ ID NO: 39387 - DNA, 363 bp, Homo sapiens; identical to SEQ ID NO: 30411

SEQ ID NO: 39388 - DNA, 443 bp, Homo sapiens; identical to SEQ ID NO: 30412

SEQ ID NO: 39389 - DNA, 381 bp, Homo sapiens; identical to SEQ ID NO: 30413

SEQ ID NO: 39390 - DNA, 469 bp, Homo sapiens; identical to SEQ ID NO: 30507

SEQ ID NO: 39391 - DNA, 466 bp, Homo sapiens; identical to SEQ ID NO: 30415

SEQ ID NO: 39392 - DNA, 544 bp, Homo sapiens; identical to SEQ ID NO: 30416
  misc_feature 375: n = A,T,C or G

SEQ ID NO: 39393 - DNA, 464 bp, Homo sapiens; identical to SEQ ID NO: 30417

SEQ ID NO: 39394 - DNA, 484 bp, Homo sapiens; identical to SEQ ID NO: 30439

SEQ ID NO: 39395 - DNA, 450 bp, Homo sapiens; identical to SEQ ID NO: 30419
  misc_feature 308: n = A,T,C or G

SEQ ID NO: 39396 - DNA, 569 bp, Homo sapiens
ggccctctatagcatgctcgagcggccgccagtgtgatggatatctgcagaattcggcttagcgtggtcgcggccgaggtacttagggtaagcattaacaatattattcaaaatgttatatagagttcaactgtatacaatagagcatttattaaagtgtgtccaaagcgcttataaataaagcatcttcgaggcaggcggctcacttgaggttaggaggaaagcagactggccaacatggtgaaaccccgtctctactgaaaatacaaaaaaattagccaggcgtcatggcgcacctgtagtcccagctactggggaggctgagacacgagaatcgcttgaacctgggaggtggaggttgcagtgagccaagattgcaccactgcactccagcctgggtgacagagtgggactctgtctcaaaaaaagaaagaaagaaagagaaataaagcatcttatgtaggaagtatggagaaataaaaaatgaagcaatttggccaggcacggtggctcacacctgtaatcctagcacttctgggaggccaaggcgggtggatcacttgaggtca

SEQ ID NO: 39397 - DNA, 460 bp, Homo sapiens; identical to SEQ ID NO: 30421

SEQ ID NO: 39398 - DNA, 602 bp, Homo sapiens; identical to SEQ ID NO: 30422

SEQ ID NO: 39399 - DNA, 492 bp, Homo sapiens; identical to SEQ ID NO: 30423

SEQ ID NO: 39400 - DNA, 404 bp, Homo sapiens; identical to SEQ ID NO: 30424

SEQ ID NO: 39401 - DNA, 466 bp, Homo sapiens; identical to SEQ ID NO: 30425

SEQ ID NO: 39402 - DNA, 393 bp, Homo sapiens; identical to SEQ ID NO: 30426

SEQ ID NO: 39403 - DNA, 446 bp, Homo sapiens; identical to SEQ ID NO: 30427

SEQ ID NO: 39404 - DNA, 202 bp, Homo sapiens; identical to SEQ ID NO: 30428

SEQ ID NO: 39405 - DNA, 415 bp, Homo sapiens; identical to SEQ ID NO: 30429

SEQ ID NO: 39406 - DNA, 407 bp, Homo sapiens; identical to SEQ ID NO: 30430

SEQ ID NO: 39407 - DNA, 440 bp, Homo sapiens; identical to SEQ ID NO: 30431

SEQ ID NO: 39408 - DNA, 525 bp, Homo sapiens; identical to SEQ ID NO: 30432

SEQ ID NO: 39409 - DNA, 467 bp, Homo sapiens; identical to SEQ ID NO: 36867

SEQ ID NO: 39410 - DNA, 461 bp, Homo sapiens; identical to SEQ ID NO: 30434

SEQ ID NO: 39411 - DNA, 539 bp, Homo sapiens; identical to SEQ ID NO: 30435
  misc_feature 155, 200: n = A,T,C or G

SEQ ID NO: 39412 - DNA, 455 bp, Homo sapiens; identical to SEQ ID NO: 30436

SEQ ID NO: 39413 - DNA, 393 bp, Homo sapiens; identical to SEQ ID NO: 30437

SEQ ID NO: 39414 - DNA, 458 bp, Homo sapiens; identical to SEQ ID NO: 30438

SEQ ID NO: 39415 - DNA, 484 bp, Homo sapiens; identical to SEQ ID NO: 30439

SEQ ID NO: 39416 - DNA, 506 bp, Homo sapiens; identical to SEQ ID NO: 30440

SEQ ID NO: 39417 - DNA, 361 bp, Homo sapiens; identical to SEQ ID NO: 30441

SEQ ID NO: 39418 - DNA, 518 bp, Homo sapiens; identical to SEQ ID NO: 30385

SEQ ID NO: 39419 - DNA, 397 bp, Homo sapiens; identical to SEQ ID NO: 30443

SEQ ID NO: 39420 - DNA, 417 bp, Homo sapiens; identical to SEQ ID NO: 30444

SEQ ID NO: 39421 - DNA, 491 bp, Homo sapiens; identical to SEQ ID NO: 30445

SEQ ID NO: 39422 - DNA, 401 bp, Homo sapiens; identical to SEQ ID NO: 30446

SEQ ID NO: 39423 - DNA, 400 bp, Homo sapiens; identical to SEQ ID NO: 30447

SEQ ID NO: 39424 - DNA, 478 bp, Homo sapiens; identical to SEQ ID NO: 30448

SEQ ID NO: 39425 - DNA, 422 bp, Homo sapiens; identical to SEQ ID NO: 30449

SEQ ID NO: 39426 - DNA, 461 bp, Homo sapiens; identical to SEQ ID NO: 30451

SEQ ID NO: 39427 - DNA, 338 bp, Homo sapiens; identical to SEQ ID NO: 30452

SEQ ID NO: 39428 - DNA, 437 bp, Homo sapiens; identical to SEQ ID NO: 30453

SEQ ID NO: 39429 - DNA, 456 bp, Homo sapiens; identical to SEQ ID NO: 30454

SEQ ID NO: 39430 - DNA, 414 bp, Homo sapiens; identical to SEQ ID NO: 30455

SEQ ID NO: 39431 - DNA, 466 bp, Homo sapiens; identical to SEQ ID NO: 30456

SEQ ID NO: 39432 - DNA, 460 bp, Homo sapiens; identical to SEQ ID NO: 30457
  misc_feature 7: n = A,T,C or G

SEQ ID NO: 39433 - DNA, 490 bp, Homo sapiens; identical to SEQ ID NO: 30458

SEQ ID NO: 39434 - DNA, 410 bp, Homo sapiens; identical to SEQ ID NO: 30459

SEQ ID NO: 39435 - DNA, 363 bp, Homo sapiens; identical to SEQ ID NO: 30460
  misc_feature 11, 23, 66, 85: n = A,T,C or G

SEQ ID NO: 39436 - DNA, 416 bp, Homo sapiens; identical to SEQ ID NO: 30462
  misc_feature 382: n = A,T,C or G

SEQ ID NO: 39437 - DNA, 609 bp, Homo sapiens; identical to SEQ ID NO: 30463

SEQ ID NO: 39438 - DNA, 394 bp, Homo sapiens; identical to SEQ ID NO: 30464
  misc_feature 214: n = A,T,C or G

SEQ ID NO: 39439 - DNA, 356 bp, Homo sapiens; identical to SEQ ID NO: 30465

SEQ ID NO: 39440 - DNA, 401 bp, Homo sapiens; identical to SEQ ID NO: 30466

SEQ ID NO: 39441 - DNA, 669 bp, Homo sapiens; identical to SEQ ID NO: 30467

SEQ ID NO: 39442 - DNA, 449 bp, Homo sapiens
tatagggcgaattggagctccaccgcggtggcggccgcccgggcaggtacatcatgtagagaggcagactcgtcgccgacaaaagcgctgacccctggaaaaccagcacagagccagctcttctgtctgaatccactctatccaaaacataacataagtcatggaaagaaatgagtctcaagaaatgagactcttaccatgatgagagggggacattgaaaagctactttagtgattagggagagaagtccccttttgcatcccaaatcaagcagaggactggtagtccaaatataattttggaataacctgagtcacctgggccttgaggaatcctggcctcttagtccacatttgcagaaatatcaggaggtcaatcaggaagctgtttaggcatctcaacacaaggtcaaaaagctcctaggtacctcggccgctctagaactagt

SEQ ID NO: 39443 - DNA, 380 bp, Homo sapiens; identical to SEQ ID NO: 30469

SEQ ID NO: 39444 - DNA, 602 bp, Homo sapiens; identical to SEQ ID NO: 30470

SEQ ID NO: 39445 - DNA, 617 bp, Homo sapiens; identical to SEQ ID NO: 37208
  misc_feature 478, 553: n = A,T,C or G

SEQ ID NO: 39446 - DNA, 589 bp, Homo sapiens; identical to SEQ ID NO: 39132

SEQ ID NO: 39447 - DNA, 407 bp, Homo sapiens; identical to SEQ ID NO: 30473

SEQ ID NO: 39448 - DNA, 531 bp, Homo sapiens; identical to SEQ ID NO: 30497

SEQ ID NO: 39449 - DNA, 481 bp, Homo sapiens; identical to SEQ ID NO: 30475

SEQ ID NO: 39450 - DNA, 609 bp, Homo sapiens; identical to SEQ ID NO: 30476

SEQ ID NO: 39451 - DNA, 572 bp, Homo sapiens; identical to SEQ ID NO: 30945
  misc_feature 121: n = A,T,C or G

SEQ ID NO: 39452 - DNA, 478 bp, Homo sapiens; identical to SEQ ID NO: 30478
  misc_feature 289: n = A,T,C or G

SEQ ID NO: 39453 - DNA, 640 bp, Homo sapiens; identical to SEQ ID NO: 30510

SEQ ID NO: 39454 - DNA, 612 bp, Homo sapiens; identical to SEQ ID NO: 30480

SEQ ID NO: 39455 - DNA, 255 bp, Homo sapiens; identical to SEQ ID NO: 30481

SEQ ID NO: 39456 - DNA, 410 bp, Homo sapiens; identical to SEQ ID NO: 30482

SEQ ID NO: 39457 - DNA, 482 bp, Homo sapiens; identical to SEQ ID NO: 30483

SEQ ID NO: 39458 - DNA, 454 bp, Homo sapiens; identical to SEQ ID NO: 30484

SEQ ID NO: 39459 - DNA, 399 bp, Homo sapiens; identical to SEQ ID NO: 30485

SEQ ID NO: 39460 - DNA, 393 bp, Homo sapiens; identical to SEQ ID NO: 30486

SEQ ID NO: 39461 - DNA, 468 bp, Homo sapiens; identical to SEQ ID NO: 30487
  misc_feature 11, 13, 64, 65, 297: n = A,T,C or G

SEQ ID NO: 39462 - DNA, 464 bp, Homo sapiens; identical to SEQ ID NO: 30488
  misc_feature 45: n = A,T,C or G

SEQ ID NO: 39463 - DNA, 420 bp, Homo sapiens; identical to SEQ ID NO: 30489

SEQ ID NO: 39464 - DNA, 403 bp, Homo sapiens; identical to SEQ ID NO: 30490

SEQ ID NO: 39465 - DNA, 655 bp, Homo sapiens; identical to SEQ ID NO: 30491

SEQ ID NO: 39466 - DNA, 421 bp, Homo sapiens; identical to SEQ ID NO: 30492

SEQ ID NO: 39467 - DNA, 356 bp, Homo sapiens; identical to SEQ ID NO: 30493

SEQ ID NO: 39468 - DNA, 493 bp, Homo sapiens; identical to SEQ ID NO: 30494

SEQ ID NO: 39469 - DNA, 455 bp, Homo sapiens; identical to SEQ ID NO: 30495

SEQ ID NO: 39470 - DNA, 433 bp, Homo sapiens; identical to SEQ ID NO: 30496

SEQ ID NO: 39471 - DNA, 531 bp, Homo sapiens; identical to SEQ ID NO: 30497

SEQ ID NO: 39472 - DNA, 408 bp, Homo sapiens; identical to SEQ ID NO: 30498

SEQ ID NO: 39473 - DNA, 602 bp, Homo sapiens; identical to SEQ ID NO: 33064

SEQ ID NO: 39474 - DNA, 461 bp, Homo sapiens; identical to SEQ ID NO: 30500

SEQ ID NO: 39475 - DNA, 490 bp, Homo sapiens; identical to SEQ ID NO: 30501

SEQ ID NO: 39476 - DNA, 457 bp, Homo sapiens; identical to SEQ ID NO: 30502

SEQ ID NO: 39477 - DNA, 480 bp, Homo sapiens; identical to SEQ ID NO: 30503
  misc_feature 308: n = A,T,C or G

SEQ ID NO: 39478 - DNA, 548 bp, Homo sapiens; identical to SEQ ID NO: 30504

SEQ ID NO: 39479 - DNA, 422 bp, Homo sapiens; identical to SEQ ID NO: 30505

SEQ ID NO: 39480 - DNA, 269 bp, Homo sapiens; identical to SEQ ID NO: 30506

SEQ ID NO: 39481 - DNA, 536 bp, Homo sapiens; identical to SEQ ID NO: 30716
  misc_feature 49: n = A,T,C or G

SEQ ID NO: 39482 - DNA, 499 bp, Homo sapiens; identical to SEQ ID NO: 30508

SEQ ID NO: 39483 - DNA, 620 bp, Homo sapiens; identical to SEQ ID NO: 31606

SEQ ID NO: 39484 - DNA, 577 bp, Homo sapiens; identical to SEQ ID NO: 30479

SEQ ID NO: 39485 - DNA, 402 bp, Homo sapiens; identical to SEQ ID NO: 30511

SEQ ID NO: 39486 - DNA, 280 bp, Homo sapiens; identical to SEQ ID NO: 30512

SEQ ID NO: 39487 - DNA, 302 bp, Homo sapiens; identical to SEQ ID NO: 30513

SEQ ID NO: 39488 - DNA, 428 bp, Homo sapiens; identical to SEQ ID NO: 31125

SEQ ID NO: 39489 - DNA, 290 bp, Homo sapiens; identical to SEQ ID NO: 30515

SEQ ID NO: 39490 - DNA, 592 bp, Homo sapiens; identical to SEQ ID NO: 30516
  misc_feature 510: n = A,T,C or G

SEQ ID NO: 39491 - DNA, 420 bp, Homo sapiens; identical to SEQ ID NO: 30517

SEQ ID NO: 39492 - DNA, 416 bp, Homo sapiens; identical to SEQ ID NO: 30518

SEQ ID NO: 39493 - DNA, 503 bp, Homo sapiens; identical to SEQ ID NO: 30519

SEQ ID NO: 39494 - DNA, 433 bp, Homo sapiens; identical to SEQ ID NO: 31349

SEQ ID NO: 39495 - DNA, 447 bp, Homo sapiens; identical to SEQ ID NO: 30521

SEQ ID NO: 39496 - DNA, 662 bp, Homo sapiens; identical to SEQ ID NO: 30578

SEQ ID NO: 39497 - DNA, 493 bp, Homo sapiens; identical to SEQ ID NO: 30523

SEQ ID NO: 39498 - DNA, 388 bp, Homo sapiens; identical to SEQ ID NO: 30524

SEQ ID NO: 39499 - DNA, 617 bp, Homo sapiens; identical to SEQ ID NO: 30525

SEQ ID NO: 39500 - DNA, 515 bp, Homo sapiens; identical to SEQ ID NO: 30745

SEQ ID NO: 39501 - DNA, 478 bp, Homo sapiens; identical to SEQ ID NO: 30527

SEQ ID NO: 39502 - DNA, 391 bp, Homo sapiens; identical to SEQ ID NO: 30528

SEQ ID NO: 39503 - DNA, 574 bp, Homo sapiens; identical to SEQ ID NO: 30529
  misc_feature 7: n = A,T,C or G

SEQ ID NO: 39504 - DNA, 457 bp, Homo sapiens
tggagctccaccgcggtggcggccgcccgggcaggtacttgattgctctgaaattccttatgcatgattagagaaagagtaaatgacgtattttaggattgagtttaacaaaagtgagatgctaattcttgaaaattaggcctctctatggggactgcacgtatcacatcaccctagatcttgagttaacgagagaatattcactgtcaggtgattcactgaccttgcctatagacttgaaaccaatagcaaatccagatgtagtttcactggcctttgaagtccagggcaaaaagacaaagcgtgactccctgtctccacatatgatcctgattgtctccctgttcagggacagaataaatatcctcaagacattgactcttttcacagtgaataagctgaggttggagctttggcctcatctcctataggggcatgctgcatatctgatctctac

SEQ ID NO: 39505 - DNA, 453 bp, Homo sapiens; identical to SEQ ID NO: 30531

SEQ ID NO: 39506 - DNA, 437 bp, Homo sapiens; identical to SEQ ID NO: 30532
  misc_feature 368, 369, 370, 371, 372: n = A,T,C or G

SEQ ID NO: 39507 - DNA, 512 bp, Homo sapiens; identical to SEQ ID NO: 30533

SEQ ID NO: 39508 - DNA, 441 bp, Homo sapiens; identical to SEQ ID NO: 30534

SEQ ID NO: 39509 - DNA, 444 bp, Homo sapiens; identical to SEQ ID NO: 30535

SEQ ID NO: 39510 - DNA, 423 bp, Homo sapiens; identical to SEQ ID NO: 30536

SEQ ID NO: 39511 - DNA, 443 bp, Homo sapiens; identical to SEQ ID NO: 30537

SEQ ID NO: 39512 - DNA, 474 bp, Homo sapiens; identical to SEQ ID NO: 30538

SEQ ID NO: 39513 - DNA, 512 bp, Homo sapiens; identical to SEQ ID NO: 30539

SEQ ID NO: 39514 - DNA, 391 bp, Homo sapiens; identical to SEQ ID NO: 30540

SEQ ID NO: 39515 - DNA, 440 bp, Homo sapiens; identical to SEQ ID NO: 30541

SEQ ID NO: 39516 - DNA, 489 bp, Homo sapiens; identical to SEQ ID NO: 30542

SEQ ID NO: 39517 - DNA, 389 bp, Homo sapiens; identical to SEQ ID NO: 30543

SEQ ID NO: 39518 - DNA, 455 bp, Homo sapiens; identical to SEQ ID NO: 31616

SEQ ID NO: 39519 - DNA, 385 bp, Homo sapiens
gcgtatacgactactatagggcgaattggagctccaccgcggtggcggccgaggtacgcgggagacagaagaaatagcaagtgccgagaagctggcatcagaaaaacagaggggagatttgtgtggctgcagccgagggagaccaggaagatctgcatggtgggaaggacctgatgatacagaggtgagaaataagaaaggctgctgactttaccatctgaggccacacatctgctgaaatggagataattaacatcactagaaacagcaagatgacaatataatgtctaagtagtgacatgtttttgcacatttccagcccctttaaatatccacacacacaggaagcacaaaaggaagcacagagatccctgggagaaatgcc

SEQ ID NO: 39520 - DNA, 448 bp, Homo sapiens; identical to SEQ ID NO: 30547

SEQ ID NO: 39521 - DNA, 445 bp, Homo sapiens; identical to SEQ ID NO: 30548

SEQ ID NO: 39522 - DNA, 607 bp, Homo sapiens; identical to SEQ ID NO: 30549

SEQ ID NO: 39523 - DNA, 407 bp, Homo sapiens; identical to SEQ ID NO: 30550

SEQ ID NO: 39524 - DNA, 475 bp, Homo sapiens; identical to SEQ ID NO: 30551

SEQ ID NO: 39525 - DNA, 406 bp, Homo sapiens; identical to SEQ ID NO: 30552

SEQ ID NO: 39526 - DNA, 474 bp, Homo sapiens; identical to SEQ ID NO: 30553

SEQ ID NO: 39527 - DNA, 543 bp, Homo sapiens; identical to SEQ ID NO: 30554

SEQ ID NO: 39528 - DNA, 473 bp, Homo sapiens; identical to SEQ ID NO: 30557

SEQ ID NO: 39529 - DNA, 516 bp, Homo sapiens; identical to SEQ ID NO: 30558

SEQ ID NO: 39530 - DNA, 584 bp, Homo sapiens; identical to SEQ ID NO: 30559

SEQ ID NO: 39531 - DNA, 391 bp, Homo sapiens; identical to SEQ ID NO: 30560

SEQ ID NO: 39532 - DNA, 576 bp, Homo sapiens; identical to SEQ ID NO: 30561
  misc_feature 438, 508: n = A,T,C or G

SEQ ID NO: 39533 - DNA, 409 bp, Homo sapiens; identical to SEQ ID NO: 30562

SEQ ID NO: 39534 - DNA, 473 bp, Homo sapiens; identical to SEQ ID NO: 30563

SEQ ID NO: 39535 - DNA, 375 bp, Homo sapiens; identical to SEQ ID NO: 30564

SEQ ID NO: 39536 - DNA, 390 bp, Homo sapiens; identical to SEQ ID NO: 30565

SEQ ID NO: 39537 - DNA, 573 bp, Homo sapiens; identical to SEQ ID NO: 30566

SEQ ID NO: 39538 - DNA, 527 bp, Homo sapiens; identical to SEQ ID NO: 30567
  misc_feature 382: n = A,T,C or G

SEQ ID NO: 39539 - DNA, 395 bp, Homo sapiens; identical to SEQ ID NO: 30568

SEQ ID NO: 39540 - DNA, 404 bp, Homo sapiens; identical to SEQ ID NO: 30569

SEQ ID NO: 39541 - DNA, 468 bp, Homo sapiens; identical to SEQ ID NO: 30570
  misc_feature 195, 214, 252, 253, 289, 290, 307, 308, 331, 332, 400, 405,406, 452: n = A,T,C or G

SEQ ID NO: 39542 - DNA, 408 bp, Homo sapiens; identical to SEQ ID NO: 30571

SEQ ID NO: 39543 - DNA, 409 bp, Homo sapiens; identical to SEQ ID NO: 30573

SEQ ID NO: 39544 - DNA, 492 bp, Homo sapiens
  misc_feature 479: n = A,T,C or G
tccaccgcggtggcggccgcccgggcaggtactttaggctgagaaataaatagaagggtgagaaaaaagaacagtctttatagtcagtaagagtgaaaagagaaagatggtagttggggaaagacagatggggagaaaggttggctggttgttaataaaacagtagaggatgagcatgtattataaatgctggtgggaagaaaccttgtggcaaggagggtggtagtgttggagaagaaagagaggatatagtagaaagttaaagaggaactggaagcaggtgggatccaggacataggaaggggaagagccttgggcagaggtgagacatctgcaggagggaaggaactgagagaagggaaggtgtgcaaatgtggcaggaggagtttgagtaaagttccatctgatatcctctattttctctgtaaatcattctgaatgaagtatgagacaaagagatcaaaggctcgaaaaaaaanaaaaaaaaaaaaa

SEQ ID NO: 39545 - DNA, 378 bp, Homo sapiens; identical to SEQ ID NO: 30575

SEQ ID NO: 39546 - DNA, 342 bp, Homo sapiens; identical to SEQ ID NO: 30576

SEQ ID NO: 39547 - DNA, 556 bp, Homo sapiens; identical to SEQ ID NO: 30577

SEQ ID NO: 39548 - DNA, 662 bp, Homo sapiens; identical to SEQ ID NO: 30578

SEQ ID NO: 39549 - DNA, 554 bp, Homo sapiens; identical to SEQ ID NO: 30579

SEQ ID NO: 39550 - DNA, 427 bp, Homo sapiens; identical to SEQ ID NO: 30580

SEQ ID NO: 39551 - DNA, 427 bp, Homo sapiens; identical to SEQ ID NO: 30581

SEQ ID NO: 39552 - DNA, 379 bp, Homo sapiens; identical to SEQ ID NO: 30582

SEQ ID NO: 39553 - DNA, 344 bp, Homo sapiens; identical to SEQ ID NO: 30583
  misc_feature 273, 290: n = A,T,C or G

SEQ ID NO: 39554 - DNA, 409 bp, Homo sapiens; identical to SEQ ID NO: 30573

SEQ ID NO: 39555 - DNA, 453 bp, Homo sapiens; identical to SEQ ID NO: 30585

SEQ ID NO: 39556 - DNA, 624 bp, Homo sapiens; identical to SEQ ID NO: 30586
  misc_feature 410, 432: n = A,T,C or G

SEQ ID NO: 39557 - DNA, 349 bp, Homo sapiens; identical to SEQ ID NO: 30587

SEQ ID NO: 39558 - DNA, 400 bp, Homo sapiens; identical to SEQ ID NO: 30588

SEQ ID NO: 39559 - DNA, 561 bp, Homo sapiens; identical to SEQ ID NO: 31806

SEQ ID NO: 39560 - DNA, 420 bp, Homo sapiens; identical to SEQ ID NO: 30590

SEQ ID NO: 39561 - DNA, 582 bp, Homo sapiens
  misc_feature 524, 557: n = A,T,C or G
ctccccgcggtggcggccgaggtacctttctatgggatgctgattcaacacgtaagacctttgcattctattcctccagatctcttaccctttcttctctatttttcatctaggtctctttaggcatatctttcattttgtcatccctttcactgtatctaatctgcttaatcaatatgttacactgtaaattttaaattaccatatatgtatcatttacaaatccctttggttccaaacctacttggccaactttgattctcttcatcccacatcatattttctatctcctcttattttagtctacacctggtaattctaatatctgtaatctctttgagagtttaggtaatttgttgtatttgctgactgtctcagggtagcttgtttccacataggtccatttatattagaatgaagtcattaggactctatctgaggggaatctttgagccttggtttaaggagagttcctccagagaaggtatgtgttcacttatgctgggttcactaccaatacactntaaacttcaagccttttttccttttccttcctnaaccaaatagtatgaattcttgctc

SEQ ID NO: 39562 - DNA, 402 bp, Homo sapiens; identical to SEQ ID NO: 30815

SEQ ID NO: 39563 - DNA, 469 bp, Homo sapiens; identical to SEQ ID NO: 30593

SEQ ID NO: 39564 - DNA, 485 bp, Homo sapiens; identical to SEQ ID NO: 30594

SEQ ID NO: 39565 - DNA, 325 bp, Homo sapiens; identical to SEQ ID NO: 30595

SEQ ID NO: 39566 - DNA, 411 bp, Homo sapiens; identical to SEQ ID NO: 30596

SEQ ID NO: 39567 - DNA, 572 bp, Homo sapiens; identical to SEQ ID NO: 30597

SEQ ID NO: 39568 - DNA, 523 bp, Homo sapiens; identical to SEQ ID NO: 30598

SEQ ID NO: 39569 - DNA, 402 bp, Homo sapiens; identical to SEQ ID NO: 30599
  misc_feature 319: n = A,T,C or G

SEQ ID NO: 39570 - DNA, 220 bp, Homo sapiens; identical to SEQ ID NO: 30600

SEQ ID NO: 39571 - DNA, 576 bp, Homo sapiens; identical to SEQ ID NO: 30601
  misc_feature 535: n = A,T,C or G

SEQ ID NO: 39572 - DNA, 474 bp, Homo sapiens; identical to SEQ ID NO: 30602

SEQ ID NO: 39573 - DNA, 542 bp, Homo sapiens
  misc_feature 521, 524: n = A,T,C or G
tccaccgcggtggcggccgaggtacgggacttgtctccagagacatgtctgggaagaagagctagactggagaatcatgagcatgttcaggtgaaaacatgtgagtggataagagcaagagggtgagaacacagaccaaggggctaagggacagactgtgttcagtatttgggtatggaacttgtttttgctacttgctagttctaagaccaggctcagactctaacttctctgtaatgtgggaataatgacagcacttaccttataagattttacaaagattaaaatatcatatataacagcacttaacacaagtaagaattcagtaaatgttgactgttattactattgtctgggtcgttataagtttgaagacacaattgcataaactgtcatcattaaaaggaaaacagagaaaagtagttctggaaggagtctgagaggcattgccagaaggttagggggaaaatcaggataaagtaatgttccataggccaaatgtgggggcttgggggaggtgntangatttcaagaagacaaag

SEQ ID NO: 39574 - DNA, 396 bp, Homo sapiens; identical to SEQ ID NO: 30604

SEQ ID NO: 39575 - DNA, 461 bp, Homo sapiens; identical to SEQ ID NO: 30605

SEQ ID NO: 39576 - DNA, 437 bp, Homo sapiens; identical to SEQ ID NO: 30606

SEQ ID NO: 39577 - DNA, 293 bp, Homo sapiens; identical to SEQ ID NO: 30607

SEQ ID NO: 39578 - DNA, 404 bp, Homo sapiens; identical to SEQ ID NO: 30608
  misc_feature 259, 393: n = A,T,C or G

SEQ ID NO: 39579 - DNA, 406 bp, Homo sapiens; identical to SEQ ID NO: 30609

SEQ ID NO: 39580 - DNA, 429 bp, Homo sapiens; identical to SEQ ID NO: 30610

SEQ ID NO: 39581 - DNA, 344 bp, Homo sapiens
ggcgaattgtagctccaccgcggtggcggccgaggtacctgtatttgactgatgtggtccccatcattttctgatagagttctttttgctgggatcctggaagatgatcttggtttatacatgaagaatctggggtccagtgaaagtgacttggtaaaacccacagatctgtgccgaaagccttggtcagctgccccttggcctgatgctcttttctctgcatcagtgcattgcttcacctcttcttcaaggactctgattaactggaagtggacataaactggggttatttatgtgggatttggttttccttcctacatcttagattgggtcactgaatatac

SEQ ID NO: 39582 - DNA, 416 bp, Homo sapiens; identical to SEQ ID NO: 30612

SEQ ID NO: 39583 - DNA, 476 bp, Homo sapiens; identical to SEQ ID NO: 30613

SEQ ID NO: 39584 - DNA, 564 bp, Homo sapiens; identical to SEQ ID NO: 30614
  misc_feature 324: n = A,T,C or G

SEQ ID NO: 39585 - DNA, 503 bp, Homo sapiens; identical to SEQ ID NO: 30663
  misc_feature 359, 416: n = A,T,C or G

SEQ ID NO: 39586 - DNA, 546 bp, Homo sapiens; identical to SEQ ID NO: 30616

SEQ ID NO: 39587 - DNA, 463 bp, Homo sapiens; identical to SEQ ID NO: 30617

SEQ ID NO: 39588 - DNA, 484 bp, Homo sapiens; identical to SEQ ID NO: 32460

SEQ ID NO: 39589 - DNA, 233 bp, Homo sapiens; identical to SEQ ID NO: 30619

SEQ ID NO: 39590 - DNA, 366 bp, Homo sapiens; identical to SEQ ID NO: 30620

SEQ ID NO: 39591 - DNA, 487 bp, Homo sapiens; identical to SEQ ID NO: 30621

SEQ ID NO: 39592 - DNA, 380 bp, Homo sapiens; identical to SEQ ID NO: 30622

SEQ ID NO: 39593 - DNA, 499 bp, Homo sapiens; identical to SEQ ID NO: 30623

SEQ ID NO: 39594 - DNA, 464 bp, Homo sapiens; identical to SEQ ID NO: 30624

SEQ ID NO: 39595 - DNA, 402 bp, Homo sapiens; identical to SEQ ID NO: 30625

SEQ ID NO: 39596 - DNA, 478 bp, Homo sapiens; identical to SEQ ID NO: 30626

SEQ ID NO: 39597 - DNA, 498 bp, Homo sapiens; identical to SEQ ID NO: 30627

SEQ ID NO: 39598 - DNA, 404 bp, Homo sapiens; identical to SEQ ID NO: 30628

SEQ ID NO: 39599 - DNA, 621 bp, Homo sapiens; identical to SEQ ID NO: 30629
  misc_feature 470, 472, 475, 476, 481, 494, 496, 497, 498: n = A,T,C or G

SEQ ID NO: 39600 - DNA, 592 bp, Homo sapiens
ctccaccgcggtggcggccgcccgggcaggtacttcagatactcacacaaccatcgtgtttttcacttctggtgaataaagcagcccttatcgatacagtttctactgaatgtgtatcgtgttcacaccatcatcaagtcgaaaaatcatcaagttgaaccgttttaagcccgggaccatctgtgttcaactttctgatgactttcacaagctctgcattttatctcccagctctgttgtaaggtattgtcagtgccttgcagaaaagaatcaaattccttccaagtgacatagacagcaagttttggagagctaaggacaaacagggccgcagctcagctcagttggcttgcttctcccacaccagcattccctgcgcagcccaagttctcagatacttctgagatcttagtcaacaaagcaaaaaaaaaaaaaaaaaaaaaagcccccgggcccttttaaaactaggggaccccccgggccgggggaatttaatttaaacttttttaaacccccccccccggggggggggcccggccccccttttttttcccttttagggggggtaaattgccccctggggaaaaaaagg

SEQ ID NO: 39601 - DNA, 423 bp, Homo sapiens; identical to SEQ ID NO: 30631

SEQ ID NO: 39602 - DNA, 476 bp, Homo sapiens; identical to SEQ ID NO: 30766

SEQ ID NO: 39603 - DNA, 330 bp, Homo sapiens; identical to SEQ ID NO: 30633

SEQ ID NO: 39604 - DNA, 462 bp, Homo sapiens; identical to SEQ ID NO: 30634

SEQ ID NO: 39605 - DNA, 413 bp, Homo sapiens; identical to SEQ ID NO: 30635

SEQ ID NO: 39606 - DNA, 461 bp, Homo sapiens; identical to SEQ ID NO: 30636

SEQ ID NO: 39607 - DNA, 458 bp, Homo sapiens; identical to SEQ ID NO: 30637

SEQ ID NO: 39608 - DNA, 476 bp, Homo sapiens; identical to SEQ ID NO: 30638

SEQ ID NO: 39609 - DNA, 500 bp, Homo sapiens; identical to SEQ ID NO: 30639

SEQ ID NO: 39610 - DNA, 433 bp, Homo sapiens; identical to SEQ ID NO: 30640

SEQ ID NO: 39611 - DNA, 369 bp, Homo sapiens; identical to SEQ ID NO: 30641

SEQ ID NO: 39612 - DNA, 385 bp, Homo sapiens; identical to SEQ ID NO: 30642

SEQ ID NO: 39613 - DNA, 385 bp, Homo sapiens; identical to SEQ ID NO: 30643

SEQ ID NO: 39614 - DNA, 466 bp, Homo sapiens; identical to SEQ ID NO: 30644

SEQ ID NO: 39615 - DNA, 556 bp, Homo sapiens; identical to SEQ ID NO: 30645

SEQ ID NO: 39616 - DNA, 482 bp, Homo sapiens; identical to SEQ ID NO: 30646

SEQ ID NO: 39617 - DNA, 525 bp, Homo sapiens
tccaccgcggtggcggccgcccgggcaggtacaaggaagactggctgaagaagaagctgagaacaaagcaggtctacagaggaagaagcagtgactagcctggtccctgaacgggtgaaatgggaaagtagctctggctccccactgccaaaaggcctcagtgatcttgctgtttggggttattagagcaccttttacccttttcaacaaagcccaattttacttaatctagttagaatttctactccttgaaaccaagagagacaaagcaaaatcaactataatttaaccattcctcctactttgagagcatgtaggttatttttaattttttgattaccctatgtgatgctatagtgaacatttctgaatacaaattcttgtttgcatttctagttatttccttaagatatatatgtatgtggaattaaaagatacaaacattaaatccttgataaactattccaaaagggtagtgcacaccatcaacttacttcaccagacacagtgtacctcggccgctct

SEQ ID NO: 39618 - DNA, 406 bp, Homo sapiens; identical to SEQ ID NO: 30648

SEQ ID NO: 39619 - DNA, 351 bp, Homo sapiens; identical to SEQ ID NO: 30649

SEQ ID NO: 39620 - DNA, 473 bp, Homo sapiens; identical to SEQ ID NO: 30650

SEQ ID NO: 39621 - DNA, 511 bp, Homo sapiens; identical to SEQ ID NO: 30651

SEQ ID NO: 39622 - DNA, 531 bp, Homo sapiens; identical to SEQ ID NO: 30652

SEQ ID NO: 39623 - DNA, 427 bp, Homo sapiens; identical to SEQ ID NO: 30653

SEQ ID NO: 39624 - DNA, 437 bp, Homo sapiens; identical to SEQ ID NO: 30654

SEQ ID NO: 39625 - DNA, 448 bp, Homo sapiens; identical to SEQ ID NO: 30655

SEQ ID NO: 39626 - DNA, 412 bp, Homo sapiens; identical to SEQ ID NO: 30656

SEQ ID NO: 39627 - DNA, 318 bp, Homo sapiens; identical to SEQ ID NO: 30657

SEQ ID NO: 39628 - DNA, 451 bp, Homo sapiens; identical to SEQ ID NO: 30658

SEQ ID NO: 39629 - DNA, 511 bp, Homo sapiens; identical to SEQ ID NO: 30659

SEQ ID NO: 39630 - DNA, 450 bp, Homo sapiens; identical to SEQ ID NO: 30660

SEQ ID NO: 39631 - DNA, 605 bp, Homo sapiens; identical to SEQ ID NO: 30661

SEQ ID NO: 39632 - DNA, 411 bp, Homo sapiens; identical to SEQ ID NO: 30662

SEQ ID NO: 39633 - DNA, 503 bp, Homo sapiens; identical to SEQ ID NO: 30663
  misc_feature 359, 416: n = A,T,C or G

SEQ ID NO: 39634 - DNA, 162 bp, Homo sapiens; identical to SEQ ID NO: 30664

SEQ ID NO: 39635 - DNA, 394 bp, Homo sapiens; identical to SEQ ID NO: 30665

SEQ ID NO: 39636 - DNA, 514 bp, Homo sapiens; identical to SEQ ID NO: 30666

SEQ ID NO: 39637 - DNA, 649 bp, Homo sapiens; identical to SEQ ID NO: 30668

SEQ ID NO: 39638 - DNA, 399 bp, Homo sapiens; identical to SEQ ID NO: 30669

SEQ ID NO: 39639 - DNA, 334 bp, Homo sapiens; identical to SEQ ID NO: 30670

SEQ ID NO: 39640 - DNA, 377 bp, Homo sapiens; identical to SEQ ID NO: 30671
  misc_feature 313: n = A,T,C or G

SEQ ID NO: 39641 - DNA, 467 bp, Homo sapiens; identical to SEQ ID NO: 30672

SEQ ID NO: 39642 - DNA, 443 bp, Homo sapiens; identical to SEQ ID NO: 30673

SEQ ID NO: 39643 - DNA, 383 bp, Homo sapiens; identical to SEQ ID NO: 30407

SEQ ID NO: 39644 - DNA, 408 bp, Homo sapiens; identical to SEQ ID NO: 30675

SEQ ID NO: 39645 - DNA, 424 bp, Homo sapiens; identical to SEQ ID NO: 30676

SEQ ID NO: 39646 - DNA, 537 bp, Homo sapiens; identical to SEQ ID NO: 30677

SEQ ID NO: 39647 - DNA, 411 bp, Homo sapiens; identical to SEQ ID NO: 30678

SEQ ID NO: 39648 - DNA, 463 bp, Homo sapiens; identical to SEQ ID NO: 30679

SEQ ID NO: 39649 - DNA, 436 bp, Homo sapiens; identical to SEQ ID NO: 36333

SEQ ID NO: 39650 - DNA, 477 bp, Homo sapiens; identical to SEQ ID NO: 30681

SEQ ID NO: 39651 - DNA, 439 bp, Homo sapiens; identical to SEQ ID NO: 30682

SEQ ID NO: 39652 - DNA, 455 bp, Homo sapiens; identical to SEQ ID NO: 30683

SEQ ID NO: 39653 - DNA, 393 bp, Homo sapiens; identical to SEQ ID NO: 30684

SEQ ID NO: 39654 - DNA, 407 bp, Homo sapiens; identical to SEQ ID NO: 30685

SEQ ID NO: 39655 - DNA, 488 bp, Homo sapiens; identical to SEQ ID NO: 30686

SEQ ID NO: 39656 - DNA, 488 bp, Homo sapiens; identical to SEQ ID NO: 30687

SEQ ID NO: 39657 - DNA, 424 bp, Homo sapiens; identical to SEQ ID NO: 30688

SEQ ID NO: 39658 - DNA, 423 bp, Homo sapiens; identical to SEQ ID NO: 30689

SEQ ID NO: 39659 - DNA, 400 bp, Homo sapiens; identical to SEQ ID NO: 30690

SEQ ID NO: 39660 - DNA, 365 bp, Homo sapiens; identical to SEQ ID NO: 30691

SEQ ID NO: 39661 - DNA, 314 bp, Homo sapiens
  misc_feature 194, 195: n = A,T,C or G
tccaccgcggtggccggccgcccgggcaggtacgtaacaggacatcaataaatattagttgaatggaagattaaatcaacaaaatggtgagttcctgatgatcataggtatgtgccacctgggttctattccagtaaggaatgggagattggctgccggaggcaagaacgtgtttcatttacatttacgcattnntgaccctgaaaaatgtcaccagattttacaagttatttacaatggtgtcttggaatgactgcaggctcgtaaataaccaggaaagataaggctaaaaaaaaaaaaaaaaaaaaaagtcc

SEQ ID NO: 39662 - DNA, 224 bp, Homo sapiens; identical to SEQ ID NO: 30693

SEQ ID NO: 39663 - DNA, 431 bp, Homo sapiens; identical to SEQ ID NO: 31658

SEQ ID NO: 39664 - DNA, 412 bp, Homo sapiens; identical to SEQ ID NO: 30695

SEQ ID NO: 39665 - DNA, 435 bp, Homo sapiens; identical to SEQ ID NO: 30696

SEQ ID NO: 39666 - DNA, 521 bp, Homo sapiens; identical to SEQ ID NO: 30697

SEQ ID NO: 39667 - DNA, 523 bp, Homo sapiens
cgaattgcgccctctagatgcatgctcgagcggccgccagtgtgatggatatctgcagaattcggcttagcgtggtcgcggccgaggtacccacagcattggctgttcttcataggagactcagagaagacttcataggagactcattattgtttactggacatcaggtgctatattgtatagcattcacattccacaggtgaggaaacaggctcagaggaataagtggcatgccaagatcattgagtatatcagtagcagaattaggattcagactttgttaggcctaactccaaagccctggctttttttttttgagatggaatcttactctgtcaccgggctggagtgcagtggcatgatctcagctcactgcaatctctgcctcctgggttcaagtgattcccctgccttagcctcctgagtagctgggactacaggcatgcaccaccacgcccagctaatttttgtatttttagtagagaggaggtttcaccgtgttggccaggatggtctcaatctc

SEQ ID NO: 39668 - DNA, 372 bp, Homo sapiens; identical to SEQ ID NO: 30699

SEQ ID NO: 39669 - DNA, 509 bp, Homo sapiens; identical to SEQ ID NO: 30700

SEQ ID NO: 39670 - DNA, 353 bp, Homo sapiens; identical to SEQ ID NO: 30701

SEQ ID NO: 39671 - DNA, 312 bp, Homo sapiens; identical to SEQ ID NO: 30702

SEQ ID NO: 39672 - DNA, 414 bp, Homo sapiens; identical to SEQ ID NO: 30703

SEQ ID NO: 39673 - DNA, 524 bp, Homo sapiens; identical to SEQ ID NO: 30704

SEQ ID NO: 39674 - DNA, 377 bp, Homo sapiens; identical to SEQ ID NO: 30705

SEQ ID NO: 39675 - DNA, 478 bp, Homo sapiens; identical to SEQ ID NO: 30706

SEQ ID NO: 39676 - DNA, 576 bp, Homo sapiens; identical to SEQ ID NO: 30707

SEQ ID NO: 39677 - DNA, 614 bp, Homo sapiens
  misc_feature 16: n = A,T,C or G
ccgggccccccctcgngggtacttctagaattaattaacgcgggaggctcgtaaataaccaggaaagataaggctgaaaaaaaaaaaaaacagttgaagaatcagttgcttgttttaaaaactcatttcacaatgcgttattttcttaccaaagaggcaggaagctcaatgtctataaaactttaaagtaagcatttccctttaaaatgaagacacactcttaaacctctctgtgaaccaatctctccataaaaatttatgatgtatttgaattagagcatgctaatttaagtgtgatgcacaaagagcactgcaaaggaaaaaacaaaccttaattttatttaatctcaaataataactaataattgcacaagaaataatcaggatctttgaaaatataagcagtcatttacattgccattggtagcttaaatgtgtagcccagcaatcagaacaaggagtcaaagtttcttttcaaggatctgaaataaaaaggcaaatagcaaagcatgtgcccaaacagccggcttggagtaactccctgtcccaggatgctcaatgcctttgtaaaagaaatatcaatcgggaatgttcttctaacataaataagctag

SEQ ID NO: 39678 - DNA, 405 bp, Homo sapiens; identical to SEQ ID NO: 30709

SEQ ID NO: 39679 - DNA, 589 bp, Homo sapiens; identical to SEQ ID NO: 39132

SEQ ID NO: 39680 - DNA, 469 bp, Homo sapiens; identical to SEQ ID NO: 30711

SEQ ID NO: 39681 - DNA, 397 bp, Homo sapiens; identical to SEQ ID NO: 30712

SEQ ID NO: 39682 - DNA, 429 bp, Homo sapiens; identical to SEQ ID NO: 30713
  misc_feature 416: n = A,T,C or G

SEQ ID NO: 39683 - DNA, 440 bp, Homo sapiens; identical to SEQ ID NO: 30714

SEQ ID NO: 39684 - DNA, 444 bp, Homo sapiens; identical to SEQ ID NO: 30715

SEQ ID NO: 39685 - DNA, 536 bp, Homo sapiens; identical to SEQ ID NO: 30716
  misc_feature 49: n = A,T,C or G

SEQ ID NO: 39686 - DNA, 425 bp, Homo sapiens; identical to SEQ ID NO: 30717

SEQ ID NO: 39687 - DNA, 479 bp, Homo sapiens; identical to SEQ ID NO: 30718

SEQ ID NO: 39688 - DNA, 418 bp, Homo sapiens; identical to SEQ ID NO: 30719

SEQ ID NO: 39689 - DNA, 559 bp, Homo sapiens; identical to SEQ ID NO: 30720

SEQ ID NO: 39690 - DNA, 483 bp, Homo sapiens; identical to SEQ ID NO: 30721

SEQ ID NO: 39691 - DNA, 390 bp, Homo sapiens; identical to SEQ ID NO: 30722

SEQ ID NO: 39692 - DNA, 352 bp, Homo sapiens; identical to SEQ ID NO: 30723

SEQ ID NO: 39693 - DNA, 431 bp, Homo sapiens; identical to SEQ ID NO: 30724

SEQ ID NO: 39694 - DNA, 413 bp, Homo sapiens; identical to SEQ ID NO: 30725

SEQ ID NO: 39695 - DNA, 393 bp, Homo sapiens; identical to SEQ ID NO: 30726

SEQ ID NO: 39696 - DNA, 305 bp, Homo sapiens; identical to SEQ ID NO: 30727

SEQ ID NO: 39697 - DNA, 434 bp, Homo sapiens; identical to SEQ ID NO: 30728

SEQ ID NO: 39698 - DNA, 479 bp, Homo sapiens; identical to SEQ ID NO: 30729
  misc_feature 303, 357, 454: n = A,T,C or G

SEQ ID NO: 39699 - DNA, 649 bp, Homo sapiens; identical to SEQ ID NO: 30730

SEQ ID NO: 39700 - DNA, 378 bp, Homo sapiens; identical to SEQ ID NO: 30731

SEQ ID NO: 39701 - DNA, 670 bp, Homo sapiens; identical to SEQ ID NO: 30732

SEQ ID NO: 39702 - DNA, 378 bp, Homo sapiens; identical to SEQ ID NO: 30733

SEQ ID NO: 39703 - DNA, 466 bp, Homo sapiens; identical to SEQ ID NO: 30734

SEQ ID NO: 39704 - DNA, 610 bp, Homo sapiens; identical to SEQ ID NO: 30735

SEQ ID NO: 39705 - DNA, 408 bp, Homo sapiens; identical to SEQ ID NO: 30736

SEQ ID NO: 39706 - DNA, 453 bp, Homo sapiens; identical to SEQ ID NO: 30737

SEQ ID NO: 39707 - DNA, 431 bp, Homo sapiens; identical to SEQ ID NO: 31254

SEQ ID NO: 39708 - DNA, 457 bp, Homo sapiens; identical to SEQ ID NO: 30739

SEQ ID NO: 39709 - DNA, 484 bp, Homo sapiens; identical to SEQ ID NO: 30740
  misc_feature 376, 386, 439: n = A,T,C or G

SEQ ID NO: 39710 - DNA, 405 bp, Homo sapiens; identical to SEQ ID NO: 30741

SEQ ID NO: 39711 - DNA, 298 bp, Homo sapiens; identical to SEQ ID NO: 30742

SEQ ID NO: 39712 - DNA, 414 bp, Homo sapiens; identical to SEQ ID NO: 30743

SEQ ID NO: 39713 - DNA, 396 bp, Homo sapiens; identical to SEQ ID NO: 30744

SEQ ID NO: 39714 - DNA, 515 bp, Homo sapiens; identical to SEQ ID NO: 30745

SEQ ID NO: 39715 - DNA, 529 bp, Homo sapiens; identical to SEQ ID NO: 30746

SEQ ID NO: 39716 - DNA, 474 bp, Homo sapiens; identical to SEQ ID NO: 30747

SEQ ID NO: 39717 - DNA, 464 bp, Homo sapiens; identical to SEQ ID NO: 30488
  misc_feature 45: n = A,T,C or G

SEQ ID NO: 39718 - DNA, 462 bp, Homo sapiens; identical to SEQ ID NO: 30749
  misc_feature 58, 62: n = A,T,C or G

SEQ ID NO: 39719 - DNA, 404 bp, Homo sapiens; identical to SEQ ID NO: 30750

SEQ ID NO: 39720 - DNA, 626 bp, Homo sapiens; identical to SEQ ID NO: 30751

SEQ ID NO: 39721 - DNA, 434 bp, Homo sapiens; identical to SEQ ID NO: 36423

SEQ ID NO: 39722 - DNA, 479 bp, Homo sapiens; identical to SEQ ID NO: 30753

SEQ ID NO: 39723 - DNA, 578 bp, Homo sapiens; identical to SEQ ID NO: 30754
  misc_feature 172, 569: n = A,T,C or G

SEQ ID NO: 39724 - DNA, 606 bp, Homo sapiens; identical to SEQ ID NO: 33276
  misc_feature 597: n = A,T,C or G

SEQ ID NO: 39725 - DNA, 504 bp, Homo sapiens
ctactatagggcgaattggagctccaccgcggtggcggccgaggtacgcgggacaaaaaaggaatcctaatgctacagaactgccactcctaccacctcctccaagcctacccaccattggagcagagactagacgtagaaaagcacgacggaaagagctagagatggagcagcagaatgaggcttcaggggagaataatgaccagcaatcacaagaagttccagaaaaagtaactgtatccagtgatcatgaggaagtagacaatccagaagaaaaaccagaagaagagaaagaagaggttatagatgaccaggagaacctagctcatagcaggaggaccagggaagatagaaaggtagaagccatcatgcatgcttttgaaaacttagagaaaagaaagaagcggcgggatcagcccttggaacagagcaactctgatgtagagattactacaaccacctcagagactcctgttggtgaagagacaaaaactgaagcccctg

SEQ ID NO: 39726 - DNA, 443 bp, Homo sapiens; identical to SEQ ID NO: 30673

SEQ ID NO: 39727 - DNA, 232 bp, Homo sapiens; identical to SEQ ID NO: 30758

SEQ ID NO: 39728 - DNA, 507 bp, Homo sapiens; identical to SEQ ID NO: 30759

SEQ ID NO: 39729 - DNA, 469 bp, Homo sapiens
gcgaattggagctccaccgcggtggcggccgaggtacactaatctgtattctaagtgtgaagatttgctcttcatgatgatgttaatctgtgtttcctagtcttgagaaatggattttaagctgggttctagagagctggggtgatagtaggctgtgctggtggaagtgaagatgtagagtgttctagaggtgactaacattttaagcttaagattgttggcaaatagaagatgaaagaataggaaataattccaagatcttcaactcttctgcattacaatatgtaaccaaatgatcttaattgtctagtcaaccaaagtttacaaaaaataaattctgccataactgtgactcaaatatatgcgaatgcataaaatatgggtaagaaagtgaatttgaggcttgaacacaggtaattaagaggatcttataagaattgccaagacttgatggcttaggactcaggtt

SEQ ID NO: 39730 - DNA, 584 bp, Homo sapiens
  misc_feature 571: n = A,T,C or G
tccaccgcggtggcggccgaggtacctcaggccctgtggttccctctcttctggggaaaaagccaatttctgatgggccactaagctctggtctttttctgccagaatcccaggaccctctgctaatccggttcctattgcacagatgattgcataataccacaggaattcaaatggggaacatcaatatcataggagtgagcacttactgggaacttacaagatactcttatatactttatttgggtgactgtatgtgctgcttgcaataacccataaggtagatacaattattatctctgttttatagtaagaaaattaaagcttatgggggtatgtaatttgcccatcttcctacaattgaaagtgatagggacaggatattaccctaggagcctgacttcagagcctgtgaccctaatgaccaacatgcagggagagaagctgttgtttgagcacccactgtgtgccaggcactgggctgaacactgtgcatggattaacttagtgactcctgccaactagcctctgaagtatgtacctgcccgggcggccgctctagaactagtgnatcccccgggctg

SEQ ID NO: 39731 - DNA, 459 bp, Homo sapiens; identical to SEQ ID NO: 30762

SEQ ID NO: 39732 - DNA, 459 bp, Homo sapiens; identical to SEQ ID NO: 30763

SEQ ID NO: 39733 - DNA, 400 bp, Homo sapiens; identical to SEQ ID NO: 30764

SEQ ID NO: 39734 - DNA, 611 bp, Homo sapiens
cccccctcgagggtacttctagaattaattaacgcgggactagcaacagtagtaagcctcattactcagttgtgagggggaaggtagactctttccagacctttgataaaggggctgctcaaaaaaagccacgaccttgggcctctgctaaaaccatggctttaagtaaggagggagcagatatataaaaatccttatccctctttctaatctcttatgtcctgtgagtgtcacccattgagtaaacccaagtggaagtcagcaggaaagtagctgggatgatgcagtctttacagataccagtaaagatgtcatctggccaatttgtgtgaaaaaagagaataattctcatccaaaccgcctgtctctggaaataagaaaagctctgagggtctccaaagttaccagaggaaggctgaattttatggtgattgataatatttccaagcttatggagaaaaaaatatcattagtcttttccatggtagaaaagagtaaagcctgtaacaaaaaaagtgatacagtggatgggatgatgagacccttgaaataagcaaggatggaccagaaactggtaacactcacccatggaatttcattatgaagtcgtg

SEQ ID NO: 39735 - DNA, 476 bp, Homo sapiens; identical to SEQ ID NO: 30766

SEQ ID NO: 39736 - DNA, 496 bp, Homo sapiens; identical to SEQ ID NO: 30767

SEQ ID NO: 39737 - DNA, 476 bp, Homo sapiens; identical to SEQ ID NO: 30768

SEQ ID NO: 39738 - DNA, 370 bp, Homo sapiens; identical to SEQ ID NO: 30769

SEQ ID NO: 39739 - DNA, 328 bp, Homo sapiens; identical to SEQ ID NO: 30770

SEQ ID NO: 39740 - DNA, 394 bp, Homo sapiens; identical to SEQ ID NO: 30771

SEQ ID NO: 39741 - DNA, 397 bp, Homo sapiens; identical to SEQ ID NO: 30772

SEQ ID NO: 39742 - DNA, 419 bp, Homo sapiens; identical to SEQ ID NO: 30773

SEQ ID NO: 39743 - DNA, 410 bp, Homo sapiens; identical to SEQ ID NO: 30774

SEQ ID NO: 39744 - DNA, 470 bp, Homo sapiens; identical to SEQ ID NO: 30775

SEQ ID NO: 39745 - DNA, 460 bp, Homo sapiens; identical to SEQ ID NO: 30776

SEQ ID NO: 39746 - DNA, 401 bp, Homo sapiens; identical to SEQ ID NO: 30777

SEQ ID NO: 39747 - DNA, 579 bp, Homo sapiens; identical to SEQ ID NO: 30778

SEQ ID NO: 39748 - DNA, 517 bp, Homo sapiens; identical to SEQ ID NO: 30779

SEQ ID NO: 39749 - DNA, 652 bp, Homo sapiens
ggggccctctagatgcatgctcgagcggccgccagtgtgatggatatctgcagaattcggcttagcgtggtcgcggccgaggtaccatatcagtggagagctgcagcaaggtggcccctacggccacgcaccagcctgcacattacttctccatactgcagccctttatatggaaacttcctacatcactttgctgtgtgtgtttacacaggtggattttgctttacttgcactgacagcacacaggagtgcagcacacaccccaacccacatcaactgccattaaagaaaagaaatttcagcccataatttcatgtccagcaaaattaggcatcataagtgaaggagaaataagatccttttcagacaagcaaatgctgagggaattcaatatcaccagatctaccttacaagagctcctgaaggaagcactaaatatggaaagaaaaaaccatcaccagccactacaaaatgcagtgaagaacgcagtgaattacgcagtccagtgatgctaaaaaccaaccacatacgttaagtctgcaaaataaccagctgacagcatgacgacaggataaaatccacacataccattactaaccttaaatgaaaatgggctaaatgctcccattgaaagacacgggggcagctggat

SEQ ID NO: 39750 - DNA, 478 bp, Homo sapiens; identical to SEQ ID NO: 30781

SEQ ID NO: 39751 - DNA, 465 bp, Homo sapiens; identical to SEQ ID NO: 30782

SEQ ID NO: 39752 - DNA, 455 bp, Homo sapiens; identical to SEQ ID NO: 30783

SEQ ID NO: 39753 - DNA, 400 bp, Homo sapiens; identical to SEQ ID NO: 30784

SEQ ID NO: 39754 - DNA, 375 bp, Homo sapiens; identical to SEQ ID NO: 30785

SEQ ID NO: 39755 - DNA, 600 bp, Homo sapiens; identical to SEQ ID NO: 30786
  misc_feature 200: n = A,T,C or G

SEQ ID NO: 39756 - DNA, 401 bp, Homo sapiens; identical to SEQ ID NO: 30787

SEQ ID NO: 39757 - DNA, 408 bp, Homo sapiens; identical to SEQ ID NO: 30788

SEQ ID NO: 39758 - DNA, 441 bp, Homo sapiens; identical to SEQ ID NO: 30789
  misc_feature 363: n = A,T,C or G

SEQ ID NO: 39759 - DNA, 495 bp, Homo sapiens; identical to SEQ ID NO: 30790

SEQ ID NO: 39760 - DNA, 420 bp, Homo sapiens; identical to SEQ ID NO: 30791

SEQ ID NO: 39761 - DNA, 518 bp, Homo sapiens; identical to SEQ ID NO: 30792

SEQ ID NO: 39762 - DNA, 379 bp, Homo sapiens; identical to SEQ ID NO: 30793

SEQ ID NO: 39763 - DNA, 372 bp, Homo sapiens; identical to SEQ ID NO: 30794

SEQ ID NO: 39764 - DNA, 411 bp, Homo sapiens; identical to SEQ ID NO: 30795

SEQ ID NO: 39765 - DNA, 493 bp, Homo sapiens; identical to SEQ ID NO: 30796

SEQ ID NO: 39766 - DNA, 554 bp, Homo sapiens; identical to SEQ ID NO: 36397

SEQ ID NO: 39767 - DNA, 428 bp, Homo sapiens; identical to SEQ ID NO: 30798

SEQ ID NO: 39768 - DNA, 424 bp, Homo sapiens; identical to SEQ ID NO: 36341

SEQ ID NO: 39769 - DNA, 648 bp, Homo sapiens; identical to SEQ ID NO: 30800
  misc_feature 82, 641: n = A,T,C or G

SEQ ID NO: 39770 - DNA, 536 bp, Homo sapiens; identical to SEQ ID NO: 30801

SEQ ID NO: 39771 - DNA, 473 bp, Homo sapiens; identical to SEQ ID NO: 30802

SEQ ID NO: 39772 - DNA, 495 bp, Homo sapiens; identical to SEQ ID NO: 30803
  misc_feature 433, 462, 468: n = A,T,C or G

SEQ ID NO: 39773 - DNA, 431 bp, Homo sapiens; identical to SEQ ID NO: 30804

SEQ ID NO: 39774 - DNA, 284 bp, Homo sapiens; identical to SEQ ID NO: 30806

SEQ ID NO: 39775 - DNA, 501 bp, Homo sapiens
tatagggcgatattggagctccaccgcggtggcggccgaggtaccacttaacaagggttctcagctgtgtggtcactggaccactgggatatgctgagctattgcttaaacactgacttaaataaaacaaatattttaaataagagaatgctactgtaattagaaggcaatcatttcaaagtctagatggaggccaggggcggtggctcatgcctgtaatcccagcactttgggaggccgaggtgggtggatcacatgaggtcaggagtttgagaccagcctggccagtatggtgaaactccatctctactaaaaatacaaaaattagccaggcgtggtggtgtgcacctgtaatccactgaggcaggagaatcacttgaacccgggaagtggaggttacagtgagctgagatagcaccactgcatccagcatgggcaacagagcgagattctgtttcaaaacataaaaatttaaaacaaaaaaaagtctaggtggaaatg

SEQ ID NO: 39776 - DNA, 489 bp, Homo sapiens; identical to SEQ ID NO: 30808

SEQ ID NO: 39777 - DNA, 405 bp, Homo sapiens; identical to SEQ ID NO: 30809

SEQ ID NO: 39778 - DNA, 559 bp, Homo sapiens; identical to SEQ ID NO: 30810

SEQ ID NO: 39779 - DNA, 467 bp, Homo sapiens; identical to SEQ ID NO: 30811

SEQ ID NO: 39780 - DNA, 591 bp, Homo sapiens; identical to SEQ ID NO: 30812
  misc_feature 574: n = A,T,C or G

SEQ ID NO: 39781 - DNA, 565 bp, Homo sapiens; identical to SEQ ID NO: 30813

SEQ ID NO: 39782 - DNA, 555 bp, Homo sapiens; identical to SEQ ID NO: 31000

SEQ ID NO: 39783 - DNA, 402 bp, Homo sapiens; identical to SEQ ID NO: 30815

SEQ ID NO: 39784 - DNA, 505 bp, Homo sapiens; identical to SEQ ID NO: 30816

SEQ ID NO: 39785 - DNA, 326 bp, Homo sapiens; identical to SEQ ID NO: 30817

SEQ ID NO: 39786 - DNA, 622 bp, Homo sapiens; identical to SEQ ID NO: 31782

SEQ ID NO: 39787 - DNA, 415 bp, Homo sapiens; identical to SEQ ID NO: 30819

SEQ ID NO: 39788 - DNA, 393 bp, Homo sapiens; identical to SEQ ID NO: 30820

SEQ ID NO: 39789 - DNA, 521 bp, Homo sapiens
tccaccgcggtggcggccgaggtactttaggctgagaaataaatagaagggtgagaaaaaagaacagtctttatagtcagtaagagtgaaaagagaaagatggtagttggggaaagacagatggggagaaaggttggctggttgttaataaaacagtagaggatgagcatgtattataaatgctggtgggaagaaaccttgtggcaaggagggtggtagtgttggagaagaaagagaggatatagtagaaagttaaagaggaactggaagcaggtgggatccaggacataggaaggggaagagccttgggcagaggtgagacatctgcaggagggaaggaactgagagaagggaaggtgtgcaaatgtggtaggaggagtttgagtaaagttccatctgatatcctctattttctctgtaaatcattctgaatgaagtatgagacaaagagatcaaaggcttgagaaaaaagaaaatttgaaaaaaaaagtacctgcccgggcggccgaggtactgaggag

SEQ ID NO: 39790 - DNA, 246 bp, Homo sapiens; identical to SEQ ID NO: 30821

SEQ ID NO: 39791 - DNA, 602 bp, Homo sapiens; identical to SEQ ID NO: 30822

SEQ ID NO: 39792 - DNA, 507 bp, Homo sapiens; identical to SEQ ID NO: 30823

SEQ ID NO: 39793 - DNA, 400 bp, Homo sapiens; identical to SEQ ID NO: 30588

SEQ ID NO: 39794 - DNA, 481 bp, Homo sapiens; identical to SEQ ID NO: 30825

SEQ ID NO: 39795 - DNA, 478 bp, Homo sapiens; identical to SEQ ID NO: 30826

SEQ ID NO: 39796 - DNA, 408 bp, Homo sapiens
gactcactatagggcgaattggagctccaccgcggtggcggtggaaggatagcttgagcccaggaggcggaggatgcagcgagctgagattcgccactgcactccaacctgggcaacagagtaagattccatctcaaaaaaataaataaatcaaaataaaatttctccaagacagcaaaagctattttgctttatgggatatttccctctttccttccccatctcccccttaagggaatttggtttaaccagagagagtggcagcaggaatgaacaataaggaatatgaaatcaaagtaactgagaaccaaacaggggaaaaccaaaaaggtaatctgcccaactgagtaaagaaaagtgaggtgagagcacagccttaggatgtaaagtgacagaacacaatgaaaa

SEQ ID NO: 39797 - DNA, 481 bp, Homo sapiens; identical to SEQ ID NO: 30828

SEQ ID NO: 39798 - DNA, 532 bp, Homo sapiens
tccaccgcggtggcggccgaggtactgtcacccatggccctgataggaaacagatggcatattcaagctggataatttgaagaggattaaatgaaacaagtattcacaaataggtgggcagagtttagaaaatcaacaagagatattgtagtatcctgggctagcaacagagaggatgggaatattgccccatagacctgaagtgcaaagagaaggagtgctacctcaaaaagagagctttgtggagaaggctgcctgatagtagctgtagtcccaggtagagggtgagccaccacgcccggcggttattacatagttttaaaagtgactcctcttaaggaaattttaattaagagaaaaatatcctagaactatgattagggtcaaaacagtatctatgttctttaggtattaaggaaaaagtgtatctgtcctaagaaagtgtttataaggagaagagtcttcctagaacactaactttaacacagaactctcatcactactctaaaaaaaaaaaaaaaaaaaaaaaaaa

SEQ ID NO: 39799 - DNA, 461 bp, Homo sapiens; identical to SEQ ID NO: 30830

SEQ ID NO: 39800 - DNA, 427 bp, Homo sapiens
  misc_feature 402, 403: n = A,T,C or G
actactatagggcgaattggagctccaccgcggtggcggccgcccgggcaggtacgtccacggtcagccttgcggtaagcttgtgtgcttagaggaacccagggtaacgatggggcaaactgaaagtaaatatgcctcttatctcagctttattaaaattcttttaagaagagggggagttagagcttctacagaaaatctaattacgctatttcaaacaatagaacaattctgcccatggtttccagaacagggaactttagatctaaaagattgggaaaaaattggcaaagaattaaaacaagcaaatagggaaggtaaaatcatcccacttacagtatgaaatgattgggccattattaaagcaactttagaaccatttcaaacaggagaagatatggnnttcagttttctgatgcccctaaag

SEQ ID NO: 39801 - DNA, 309 bp, Homo sapiens; identical to SEQ ID NO: 30832
  misc_feature 278, 295: n = A,T,C or G

SEQ ID NO: 39802 - DNA, 513 bp, Homo sapiens; identical to SEQ ID NO: 30630

SEQ ID NO: 39803 - DNA, 523 bp, Homo sapiens; identical to SEQ ID NO: 30834

SEQ ID NO: 39804 - DNA, 509 bp, Homo sapiens; identical to SEQ ID NO: 30835

SEQ ID NO: 39805 - DNA, 344 bp, Homo sapiens; identical to SEQ ID NO: 39581

SEQ ID NO: 39806 - DNA, 609 bp, Homo sapiens; identical to SEQ ID NO: 30837

SEQ ID NO: 39807 - DNA, 396 bp, Homo sapiens; identical to SEQ ID NO: 30604

SEQ ID NO: 39808 - DNA, 400 bp, Homo sapiens; identical to SEQ ID NO: 30838

SEQ ID NO: 39809 - DNA, 613 bp, Homo sapiens; identical to SEQ ID NO: 30839
  misc_feature 279, 587, 605: n = A,T,C or G

SEQ ID NO: 39810 - DNA, 441 bp, Homo sapiens; identical to SEQ ID NO: 31396
  misc_feature 303, 314: n = A,T,C or G

SEQ ID NO: 39811 - DNA, 415 bp, Homo sapiens; identical to SEQ ID NO: 31682

SEQ ID NO: 39812 - DNA, 357 bp, Homo sapiens; identical to SEQ ID NO: 31545
  misc_feature 141, 172, 200, 201, 216, 217, 244, 245, 270, 271, 285, 300: n = A,T,C or G

SEQ ID NO: 39813 - DNA, 416 bp, Homo sapiens; identical to SEQ ID NO: 30843

SEQ ID NO: 39814 - DNA, 201 bp, Homo sapiens; identical to SEQ ID NO: 30844

SEQ ID NO: 39815 - DNA, 234 bp, Homo sapiens; identical to SEQ ID NO: 30845

SEQ ID NO: 39816 - DNA, 347 bp, Homo sapiens
tccaccgcggtggcggccgcccgggcaggtactttggcttttgtttctagaacaccaatgagtatatgctcattaagatagtttgatgcaataaatccttattttacttgcctctattactgcattgtaaactgttgtctactttgtcttcttgaaatcctacacctcccccagcccccacatttggcctatggaacattactttatcctgattttccccctaaccttctggcaatgcctctcagactccttccagaactacttttctctgttttccttttaatgatgacagtttgtgtaattgtgtcttcaaacttataacgacccagacaatagtaataacagtc

SEQ ID NO: 39817 - DNA, 443 bp, Homo sapiens; identical to SEQ ID NO: 30847

SEQ ID NO: 39818 - DNA, 529 bp, Homo sapiens; identical to SEQ ID NO: 30849

SEQ ID NO: 39819 - DNA, 428 bp, Homo sapiens
tacgactactatagggcgaattggagctccaccgcggtggcggccgaggtacgcggggtttttaaactgggaaatctgagaaatggtatggttgtatgtgggttggcattcttgcatgatgggagtggccacctgctttcatattctgaagtcagagtgttccagacagaagaaatagcaagtgccgagaagctggcatcagaaaaacagaggggagatttgtgtggctgcagccgagggagaccaggaagatctgcatggtgggaaggacctgatgatacagaggtgagaaataagaaaggctgctgactttaccatctgaggccacacatctgctgaaatggagataattaacatcactagaaacagcaagatgacaatataatgtctaagtagtgacatgtttttgcacatttccagccccttta

SEQ ID NO: 39820 - DNA, 489 bp, Homo sapiens; identical to SEQ ID NO: 30851

SEQ ID NO: 39821 - DNA, 391 bp, Homo sapiens; identical to SEQ ID NO: 30852

SEQ ID NO: 39822 - DNA, 416 bp, Homo sapiens; identical to SEQ ID NO: 30853

SEQ ID NO: 39823 - DNA, 303 bp, Homo sapiens; identical to SEQ ID NO: 30854

SEQ ID NO: 39824 - DNA, 467 bp, Homo sapiens; identical to SEQ ID NO: 30855

SEQ ID NO: 39825 - DNA, 440 bp, Homo sapiens; identical to SEQ ID NO: 30856

SEQ ID NO: 39826 - DNA, 221 bp, Homo sapiens; identical to SEQ ID NO: 34730

SEQ ID NO: 39827 - DNA, 207 bp, Homo sapiens; identical to SEQ ID NO: 30858

SEQ ID NO: 39828 - DNA, 451 bp, Homo sapiens; identical to SEQ ID NO: 30859

SEQ ID NO: 39829 - DNA, 404 bp, Homo sapiens; identical to SEQ ID NO: 30750

SEQ ID NO: 39830 - DNA, 473 bp, Homo sapiens; identical to SEQ ID NO: 30861

SEQ ID NO: 39831 - DNA, 512 bp, Homo sapiens; identical to SEQ ID NO: 31752

SEQ ID NO: 39832 - DNA, 444 bp, Homo sapiens; identical to SEQ ID NO: 30863

SEQ ID NO: 39833 - DNA, 430 bp, Homo sapiens; identical to SEQ ID NO: 30864

SEQ ID NO: 39834 - DNA, 456 bp, Homo sapiens; identical to SEQ ID NO: 30865

SEQ ID NO: 39835 - DNA, 436 bp, Homo sapiens; identical to SEQ ID NO: 30866

SEQ ID NO: 39836 - DNA, 416 bp, Homo sapiens; identical to SEQ ID NO: 30867
  misc_feature 322: n = A,T,C or G

SEQ ID NO: 39837 - DNA, 603 bp, Homo sapiens; identical to SEQ ID NO: 30868
  misc_feature 21: n = A,T,C or G

SEQ ID NO: 39838 - DNA, 413 bp, Homo sapiens; identical to SEQ ID NO: 30869

SEQ ID NO: 39839 - DNA, 648 bp, Homo sapiens; identical to SEQ ID NO: 30870

SEQ ID NO: 39840 - DNA, 400 bp, Homo sapiens; identical to SEQ ID NO: 30871

SEQ ID NO: 39841 - DNA, 464 bp, Homo sapiens; identical to SEQ ID NO: 30872

SEQ ID NO: 39842 - DNA, 473 bp, Homo sapiens; identical to SEQ ID NO: 30873

SEQ ID NO: 39843 - DNA, 405 bp, Homo sapiens; identical to SEQ ID NO: 30874

SEQ ID NO: 39844 - DNA, 434 bp, Homo sapiens; identical to SEQ ID NO: 30875

SEQ ID NO: 39845 - DNA, 436 bp, Homo sapiens; identical to SEQ ID NO: 30876

SEQ ID NO: 39846 - DNA, 422 bp, Homo sapiens; identical to SEQ ID NO: 30877

SEQ ID NO: 39847 - DNA, 424 bp, Homo sapiens; identical to SEQ ID NO: 30878

SEQ ID NO: 39848 - DNA, 592 bp, Homo sapiens; identical to SEQ ID NO: 39600

SEQ ID NO: 39849 - DNA, 324 bp, Homo sapiens; identical to SEQ ID NO: 30880

SEQ ID NO: 39850 - DNA, 370 bp, Homo sapiens; identical to SEQ ID NO: 31420

SEQ ID NO: 39851 - DNA, 443 bp, Homo sapiens; identical to SEQ ID NO: 30882

SEQ ID NO: 39852 - DNA, 412 bp, Homo sapiens; identical to SEQ ID NO: 30883

SEQ ID NO: 39853 - DNA, 430 bp, Homo sapiens; identical to SEQ ID NO: 30884

SEQ ID NO: 39854 - DNA, 434 bp, Homo sapiens; identical to SEQ ID NO: 30885

SEQ ID NO: 39855 - DNA, 471 bp, Homo sapiens; identical to SEQ ID NO: 30886

SEQ ID NO: 39856 - DNA, 455 bp, Homo sapiens; identical to SEQ ID NO: 30887

SEQ ID NO: 39857 - DNA, 453 bp, Homo sapiens; identical to SEQ ID NO: 30888

SEQ ID NO: 39858 - DNA, 483 bp, Homo sapiens; identical to SEQ ID NO: 31925

SEQ ID NO: 39859 - DNA, 460 bp, Homo sapiens; identical to SEQ ID NO: 30890

SEQ ID NO: 39860 - DNA, 467 bp, Homo sapiens; identical to SEQ ID NO: 32420
  misc_feature 367, 404: n = A,T,C or G

SEQ ID NO: 39861 - DNA, 370 bp, Homo sapiens; identical to SEQ ID NO: 31420

SEQ ID NO: 39862 - DNA, 410 bp, Homo sapiens; identical to SEQ ID NO: 30893

SEQ ID NO: 39863 - DNA, 453 bp, Homo sapiens; identical to SEQ ID NO: 30894

SEQ ID NO: 39864 - DNA, 432 bp, Homo sapiens; identical to SEQ ID NO: 30895

SEQ ID NO: 39865 - DNA, 590 bp, Homo sapiens; identical to SEQ ID NO: 30896
  misc_feature 443: n = A,T,C or G

SEQ ID NO: 39866 - DNA, 431 bp, Homo sapiens; identical to SEQ ID NO: 30897
  misc_feature 376, 390, 391, 402, 403, 404, 421, 422, 423: n = A,T,C or G

SEQ ID NO: 39867 - DNA, 363 bp, Homo sapiens; identical to SEQ ID NO: 30898

SEQ ID NO: 39868 - DNA, 451 bp, Homo sapiens; identical to SEQ ID NO: 30899

SEQ ID NO: 39869 - DNA, 604 bp, Homo sapiens
  misc_feature 9: n = A,T,C or G
acttctagnattaattaacgcgggctacaaaggctcattagaatgatgaaaattcatctggctaaagaagttgtttttcttttagttataggttattgaggaaagtctcacagacataattggatcgcttatcttattcagtattcctaactagtatttgcataacttgggtccctgcttttcttctgttcaaagccatgtcatccttttgttcattctagctacttcttacaaattttgattaaattactgagccaaacactgactgtttgaaagattgtttaatgatgatttttaaggaggcaacagcaaccatttcaaagcttctttatatctgggcacttcctctttatacatttttgtaagccttggctcatagaaatatatttaaaaacaactggctaaattctattaaaacactcaatggcaatttttaaaactgttgtgttgctcatggaacaaaatgtttggcatgccattaaaactgaagtgttcatgaaaactttcatagctcaaggagacggggaacctgaagaggttcttaaatggcaacttagtacccagatacactgtgtcacattcttctgggaaggacaggaatgtg

SEQ ID NO: 39870 - DNA, 589 bp, Homo sapiens
tccaccgcggtggcggccgcccgggcaggtacatgcatcaggcaatggtgaccaattgtctgtggagggtgaggcagaaggaattgttgaggatgactgaggtgtctgggtaacgctttcaactgaaactgggaaaggggatcaactgaaactgggaaagggtttggtgtggcaggtataagtaatgagttcaagttgtatattctgagatggaagtgtcatgaggacattcaggtggagaaatcctgtaggacactggaaacggatccagagttcacagaagacaggataaaggttagggctcattagcatctgggtgatgaacgaaggcttggagagaatggggtcccttatggggagtgtgttgaaggacaacaggccgaagatagaaacctgaagcaaggacagaactttctttcagagctggtagaagagaagtcccaaaagagagacaaaaactggttagggagatagaagaatcacagaggccaagagaagagagtgtttccgagagggtgccaggaagggacagctaagtctgctctggaggtcagggatgtgtacctcggccgctctagaactagtggat

SEQ ID NO: 39871 - DNA, 367 bp, Homo sapiens; identical to SEQ ID NO: 30902

SEQ ID NO: 39872 - DNA, 404 bp, Homo sapiens; identical to SEQ ID NO: 30903

SEQ ID NO: 39873 - DNA, 500 bp, Homo sapiens; identical to SEQ ID NO: 31269

SEQ ID NO: 39874 - DNA, 554 bp, Homo sapiens; identical to SEQ ID NO: 30579

SEQ ID NO: 39875 - DNA, 385 bp, Homo sapiens
ttgggccctctagatgcatgctcgagcggccgccagtgtgatggatatctgcagaattcggctttcgagcggccgcccgggcaggtacgggttaacatttaaagaatctacattatagataacattttattgcaagtaaatgtatttcaaaatttgttattggttttgtatgagattattctcagcctacttcattatcaagctatattattttattaatgtagttcgatgatcttacagcaaagctgaaagctgtatcttcaaaatatgtctatttgactaaaaagttattcaacaggagttattatctataaaaaaatacaacaggaatataaaaaacttgaggataaaaagatgttggaaaaagtaatattaaatcttaaaa

SEQ ID NO: 39876 - DNA, 655 bp, Homo sapiens
tacgactactatagggcgaattgggccctctagatgcatgctcgagcggccgccagtgtgatggatatctgcagaattcgccctttcgagcggccgcccgggcaggtacgatcttggctcactgcaacctctccctcccgggttcaagtgattctcgtgcctcagcctcttgagtagctgggattacaggcgcgtgccactgcgtccggctaatttttgtatttttagtagagatggggtttcaccatgttggccaggctgatctcaaactcctgacctcatgtggtccacccaccttggcctcccaaagtgctgggattacaggcgtgagccaccacgctcagcctacaagcaattttttaaaaactgacacctattactgataaaattctctgtttaaaatcctatttactattttaaagataagtattagttttttttaaatacaataattctgttattgataaaatttaaggcattttcattgccttttgcagatttactcataactacctaacaaggaaagaaggtataattatttcagattggattatttattctaaaattaaattcttcactaatttattctaaagatgaatttaatagtccatcaggaaattggtttttataaagcttattttatgggcataaaata

SEQ ID NO: 39877 - DNA, 444 bp, Homo sapiens; identical to SEQ ID NO: 30908

SEQ ID NO: 39878 - DNA, 323 bp, Homo sapiens; identical to SEQ ID NO: 30909

SEQ ID NO: 39879 - DNA, 483 bp, Homo sapiens; identical to SEQ ID NO: 31267
  misc_feature 183, 184, 198, 199, 224, 234, 274, 403: n = A,T,C or G

SEQ ID NO: 39880 - DNA, 455 bp, Homo sapiens; identical to SEQ ID NO: 30911

SEQ ID NO: 39881 - DNA, 458 bp, Homo sapiens; identical to SEQ ID NO: 31133

SEQ ID NO: 39882 - DNA, 422 bp, Homo sapiens; identical to SEQ ID NO: 30936

SEQ ID NO: 39883 - DNA, 450 bp, Homo sapiens; identical to SEQ ID NO: 30914

SEQ ID NO: 39884 - DNA, 349 bp, Homo sapiens; identical to SEQ ID NO: 30915
  misc_feature 329, 330: n = A,T,C or G

SEQ ID NO: 39885 - DNA, 458 bp, Homo sapiens; identical to SEQ ID NO: 31191

SEQ ID NO: 39886 - DNA, 410 bp, Homo sapiens; identical to SEQ ID NO: 30917

SEQ ID NO: 39887 - DNA, 448 bp, Homo sapiens; identical to SEQ ID NO: 30918

SEQ ID NO: 39888 - DNA, 460 bp, Homo sapiens; identical to SEQ ID NO: 31809

SEQ ID NO: 39889 - DNA, 191 bp, Homo sapiens; identical to SEQ ID NO: 30920

SEQ ID NO: 39890 - DNA, 425 bp, Homo sapiens; identical to SEQ ID NO: 30921

SEQ ID NO: 39891 - DNA, 422 bp, Homo sapiens; identical to SEQ ID NO: 30922

SEQ ID NO: 39892 - DNA, 457 bp, Homo sapiens
actactatagggcgaattggagctccaccgcggtggcggccgaggtacacttggaaaggattaaaaccttaaaattattcattagaaatggattaactacctgttacttaatataaaaaggatttacaatgttattcacaatgatatgcaatacttgaaaattgaaaataggcctggccgcctgtaatcccagcactttgggaggctgaggggagtgcatctcttgagctcagaagttaaaggccagcctaagaaatatggtgacgatccgtctctacaaaaaatacaagaagtagccgggcatggtggcgcacgcctgtagtcccagctacttggaggcggaagtgggctggtctcttgagcccaggaagcagaggttgcggtgagctgaaatcctgccactgacctttagtctgggtgactaagactctgtatcaaaaaaagaaaagaaaagaaa

SEQ ID NO: 39893 - DNA, 561 bp, Homo sapiens; identical to SEQ ID NO: 31806

SEQ ID NO: 39894 - DNA, 410 bp, Homo sapiens; identical to SEQ ID NO: 30893

SEQ ID NO: 39895 - DNA, 405 bp, Homo sapiens; identical to SEQ ID NO: 30926

SEQ ID NO: 39896 - DNA, 434 bp, Homo sapiens; identical to SEQ ID NO: 30927

SEQ ID NO: 39897 - DNA, 420 bp, Homo sapiens; identical to SEQ ID NO: 36437

SEQ ID NO: 39898 - DNA, 422 bp, Homo sapiens; identical to SEQ ID NO: 30929

SEQ ID NO: 39899 - DNA, 444 bp, Homo sapiens; identical to SEQ ID NO: 30930

SEQ ID NO: 39900 - DNA, 415 bp, Homo sapiens; identical to SEQ ID NO: 30931

SEQ ID NO: 39901 - DNA, 174 bp, Homo sapiens; identical to SEQ ID NO: 30932

SEQ ID NO: 39902 - DNA, 555 bp, Homo sapiens; identical to SEQ ID NO: 31000

SEQ ID NO: 39903 - DNA, 465 bp, Homo sapiens; identical to SEQ ID NO: 31128

SEQ ID NO: 39904 - DNA, 405 bp, Homo sapiens; identical to SEQ ID NO: 30935

SEQ ID NO: 39905 - DNA, 424 bp, Homo sapiens; identical to SEQ ID NO: 31315

SEQ ID NO: 39906 - DNA, 424 bp, Homo sapiens; identical to SEQ ID NO: 30688

SEQ ID NO: 39907 - DNA, 455 bp, Homo sapiens; identical to SEQ ID NO: 30998

SEQ ID NO: 39908 - DNA, 443 bp, Homo sapiens; identical to SEQ ID NO: 30939

SEQ ID NO: 39909 - DNA, 428 bp, Homo sapiens; identical to SEQ ID NO: 31324

SEQ ID NO: 39910 - DNA, 614 bp, Homo sapiens; identical to SEQ ID NO: 30941

SEQ ID NO: 39911 - DNA, 410 bp, Homo sapiens; identical to SEQ ID NO: 36185

SEQ ID NO: 39912 - DNA, 448 bp, Homo sapiens; identical to SEQ ID NO: 31201

SEQ ID NO: 39913 - DNA, 415 bp, Homo sapiens; identical to SEQ ID NO: 31061

SEQ ID NO: 39914 - DNA, 572 bp, Homo sapiens; identical to SEQ ID NO: 30945
  misc_feature 121: n = A,T,C or G

SEQ ID NO: 39915 - DNA, 446 bp, Homo sapiens; identical to SEQ ID NO: 31594

SEQ ID NO: 39916 - DNA, 435 bp, Homo sapiens; identical to SEQ ID NO: 36092

SEQ ID NO: 39917 - DNA, 265 bp, Homo sapiens; identical to SEQ ID NO: 30948

SEQ ID NO: 39918 - DNA, 434 bp, Homo sapiens; identical to SEQ ID NO: 31102

SEQ ID NO: 39919 - DNA, 447 bp, Homo sapiens; identical to SEQ ID NO: 30950

SEQ ID NO: 39920 - DNA, 450 bp, Homo sapiens; identical to SEQ ID NO: 31737

SEQ ID NO: 39921 - DNA, 472 bp, Homo sapiens; identical to SEQ ID NO: 30952

SEQ ID NO: 39922 - DNA, 396 bp, Homo sapiens; identical to SEQ ID NO: 30953

SEQ ID NO: 39923 - DNA, 446 bp, Homo sapiens; identical to SEQ ID NO: 30954

SEQ ID NO: 39924 - DNA, 370 bp, Homo sapiens; identical to SEQ ID NO: 31420

SEQ ID NO: 39925 - DNA, 450 bp, Homo sapiens; identical to SEQ ID NO: 31709

SEQ ID NO: 39926 - DNA, 397 bp, Homo sapiens; identical to SEQ ID NO: 30957

SEQ ID NO: 39927 - DNA, 432 bp, Homo sapiens; identical to SEQ ID NO: 32137

SEQ ID NO: 39928 - DNA, 439 bp, Homo sapiens; identical to SEQ ID NO: 30959

SEQ ID NO: 39929 - DNA, 614 bp, Homo sapiens
  misc_feature 16, 29: n = A,T,C or G
ccgggccccccctcgnaaatacttctagnattaattaacgcggggtggcatgttgagaggggaccaaggactgtgctgcagggcacgcaaacaaatcacttcagtgttcctagagagtaagacagtgggtgaaccacacatagtacaaggagggcatgtcaaattcacagtaaaggagtctaaagcgaggccattatatgcttctcttctacctatctcatatatgccatttatgagcccacttaatataggacctgccctcaccataacgctcaggcctataagaactctcatacctacaaagacttcctcacacctttgccttctgctctataactggccatgtctgtattctgttcagattagagagaggtccactgaagctttccccaaaagttaggagacaaaataacaatgcccctagtaagctgacaaagggaaacattgaaaacataaatgagggccaggtgcggtggctcacgcctgtaatcccagccctttgggaagccgaggctggcagatcacctgaggtcaggagttcaagaccagcctgaccaatgtggagaaacgccatctctactaaaaatacaaaattagtcaagcatggtagtgca

SEQ ID NO: 39930 - DNA, 392 bp, Homo sapiens; identical to SEQ ID NO: 30961

SEQ ID NO: 39931 - DNA, 420 bp, Homo sapiens; identical to SEQ ID NO: 30962

SEQ ID NO: 39932 - DNA, 192 bp, Homo sapiens; identical to SEQ ID NO: 30963

SEQ ID NO: 39933 - DNA, 406 bp, Homo sapiens; identical to SEQ ID NO: 30964

SEQ ID NO: 39934 - DNA, 566 bp, Homo sapiens; identical to SEQ ID NO: 30965

SEQ ID NO: 39935 - DNA, 400 bp, Homo sapiens; identical to SEQ ID NO: 31345

SEQ ID NO: 39936 - DNA, 372 bp, Homo sapiens; identical to SEQ ID NO: 31453

SEQ ID NO: 39937 - DNA, 445 bp, Homo sapiens
ctactatagggcgaattggagctccaccgcggtggcggccgaggtacaggcaacaaaagcaaaaatacacgaacgagatgccataaaactaagaagcttctctgcacagcaaaagaaacagtaatagattgaagagacaacccacaaatgggaagagaatgtttttaaaccatatctcaggtaaggggttcataccaataatatgtaaggaactcaacccagaaatgagaaaacaagcttactaaaaaataagtaaaggagttgaatagacattttctaaaaacagacatacaaaaggccagatttttatcaaaaatgttgataaaaaacatcaacattcctaattatcagagaaatagatgtcaaaaccatgaagatattatctcacagatgttactgaggttattataaaaaagatgtggcggggcacggtggctcgcgcctg

SEQ ID NO: 39938 - DNA, 625 bp, Homo sapiens
cccccctcgagagtcttctagaattaattaacgcgggcatcaagatcttgtcattccacatcgtggtttcctttgaggatgtggctgtacccctctcccaggaggagtgggactgtctgatccctgctcagaggggcctctacaaggatgtgatgatggggacctatgggaacctactctcattagtaggtgaatggttaagcaaactgtggtacatccataccatgggatacgactcaacaatcaaaaggaactgcccagacttcaccacgatgcaatatatgcatgtaagaaatctgcacttataccccctaaatatataaaacatttttaaaaaaaaaaaaaaaaagcggccgccaccgcggtggagctccaattcgccctatagtgagtcgtattacgcgcgctcactggccgtcgttttacaacgtcgtgactgggaaaaccctggcgttacccaacttaatcgccttgcagcacatccccctttcgccagctggcgtaatagcgaagaggcccgcaccgatcgcccttcccaacagttgcgcagcctgaatggcgaatggaaattgtaagcgttaatattttgttaaaattcgcgttaaatttttgttaaatcagctca

SEQ ID NO: 39939 - DNA, 458 bp, Homo sapiens; identical to SEQ ID NO: 31191

SEQ ID NO: 39940 - DNA, 459 bp, Homo sapiens; identical to SEQ ID NO: 30971

SEQ ID NO: 39941 - DNA, 578 bp, Homo sapiens; identical to SEQ ID NO: 30972
  misc_feature 523: n = A,T,C or G

SEQ ID NO: 39942 - DNA, 374 bp, Homo sapiens
tccaccgcggtggcggccgaggtacctaaggaggcaacatctaaactggccttgaggaacagccgaagatggcgaacgggacagttcctgaaaagggaatgtgagatttggcaatcaggatagctgtagcctttactacggaaaagtcagtggtggagacagcagacagattcagcgggctgaagagtaagcagaaggtgaggatgggtaggcaggagatagaaaccattattttttgaagtttgatactaaagagaaggaaaggctaatacttgaagggggaagttttctaaatgggtgggacttgagcatgtttactagcaaaaggagagggaggtgagaggccgaacgtaagagaggcagtagtgggtgaa

SEQ ID NO: 39943 - DNA, 468 bp, Homo sapiens; identical to SEQ ID NO: 30974

SEQ ID NO: 39944 - DNA, 439 bp, Homo sapiens; identical to SEQ ID NO: 30975

SEQ ID NO: 39945 - DNA, 450 bp, Homo sapiens; identical to SEQ ID NO: 30976

SEQ ID NO: 39946 - DNA, 582 bp, Homo sapiens
tccaccgcggtggcggccgaggtacgctccagcattacctctaagcaaaccttcaaaatggctactgtagaagcacttctctcagcagcacccctcactctttcctcaatgagaaaagaagttgaggccccaattgcatcctctttactgatccacccaaaacaaactccctgcaggaaagtagagggataagatttccaaaggagatgctgaagagtaaaaagcaatcacacttcaaaataggactttacaaataattaacaacagctccagatccatcctgttctcttctctagaaccactagaaactctcagatctgaaactgtatcatagattacacacctacatatcccactccatgatacacatgttgaacttcctatgtccatatccatcctccacatcctcagagttagcaaacgagttagacatctaagactttgttccaagattcccatgtaaaaagttttcacatactatacaagtttacagtatacaatatactatgcactctcagtaaaaaggacaaattataatgtggtctcttattcaccagtaaaaaaatatctgctcttactgga

SEQ ID NO: 39947 - DNA, 460 bp, Homo sapiens; identical to SEQ ID NO: 30978

SEQ ID NO: 39948 - DNA, 430 bp, Homo sapiens; identical to SEQ ID NO: 30979

SEQ ID NO: 39949 - DNA, 419 bp, Homo sapiens; identical to SEQ ID NO: 30980

SEQ ID NO: 39950 - DNA, 452 bp, Homo sapiens; identical to SEQ ID NO: 31736

SEQ ID NO: 39951 - DNA, 434 bp, Homo sapiens; identical to SEQ ID NO: 30982

SEQ ID NO: 39952 - DNA, 480 bp, Homo sapiens; identical to SEQ ID NO: 31117

SEQ ID NO: 39953 - DNA, 423 bp, Homo sapiens; identical to SEQ ID NO: 30984

SEQ ID NO: 39954 - DNA, 346 bp, Homo sapiens; identical to SEQ ID NO: 30985
  misc_feature 278, 338, 339: n = A,T,C or G

SEQ ID NO: 39955 - DNA, 459 bp, Homo sapiens; identical to SEQ ID NO: 30986

SEQ ID NO: 39956 - DNA, 422 bp, Homo sapiens; identical to SEQ ID NO: 30987

SEQ ID NO: 39957 - DNA, 411 bp, Homo sapiens; identical to SEQ ID NO: 30988

SEQ ID NO: 39958 - DNA, 380 bp, Homo sapiens; identical to SEQ ID NO: 30989

SEQ ID NO: 39959 - DNA, 163 bp, Homo sapiens
actcactatatggcgaattggagctccactcgcggtggcggccgaggtacttgagggcatcattaaaatcagccagtgttcagtgagagacttaatgatggatttaatagtattaaatgggcaaaaatgcccttggcctttacatgctcatttaaaaacatat

SEQ ID NO: 39960 - DNA, 206 bp, Homo sapiens; identical to SEQ ID NO: 30991

SEQ ID NO: 39961 - DNA, 457 bp, Homo sapiens; identical to SEQ ID NO: 30992

SEQ ID NO: 39962 - DNA, 465 bp, Homo sapiens; identical to SEQ ID NO: 33531

SEQ ID NO: 39963 - DNA, 448 bp, Homo sapiens; identical to SEQ ID NO: 30994

SEQ ID NO: 39964 - DNA, 423 bp, Homo sapiens; identical to SEQ ID NO: 30631

SEQ ID NO: 39965 - DNA, 453 bp, Homo sapiens; identical to SEQ ID NO: 31070

SEQ ID NO: 39966 - DNA, 558 bp, Homo sapiens; identical to SEQ ID NO: 30997

SEQ ID NO: 39967 - DNA, 432 bp, Homo sapiens; identical to SEQ ID NO: 30938

SEQ ID NO: 39968 - DNA, 434 bp, Homo sapiens; identical to SEQ ID NO: 30999

SEQ ID NO: 39969 - DNA, 555 bp, Homo sapiens; identical to SEQ ID NO: 31000

SEQ ID NO: 39970 - DNA, 611 bp, Homo sapiens
  misc_feature 494: n = A,T,C or G
tccaccgcggtggcggccgcccgggcaggtactttggcttttgtttctagaacaccaatgagtatatgctcattaagatagtttgatgcaataaatccttattttacttgcctctattactgcattgtaaactgttgtctactttgtcttcttgaaatcctacacctcccccagcccccacatttggcctatggaacattactttatcctgattttccccctaaccttctggcaatgcctctcagactccttccagaactacttttctctgttttccttttaatgatgacagtttatgcaattgtgtcttcaaacttataacgacccagacaatagtaataacagtcaacatttactgaattcttacttgtgttaagtgctgttatatatgatattttaatctttgtaaaatcttataaggtaagtgctgtcattattcccacattacagagaagttagagtctgagcctggtcttagaactagcaagtagcanaaacaagttccatacccaaatactgagcacagtctgtcccttagccccttggtctgtgttctcaccctcttgctcttatccactcacatgttttcacctgaacatgctcatgattct

SEQ ID NO: 39971 - DNA, 422 bp, Homo sapiens; identical to SEQ ID NO: 31494

SEQ ID NO: 39972 - DNA, 404 bp, Homo sapiens; identical to SEQ ID NO: 31003

SEQ ID NO: 39973 - DNA, 456 bp, Homo sapiens; identical to SEQ ID NO: 31004

SEQ ID NO: 39974 - DNA, 443 bp, Homo sapiens; identical to SEQ ID NO: 31005

SEQ ID NO: 39975 - DNA, 451 bp, Homo sapiens; identical to SEQ ID NO: 31072

SEQ ID NO: 39976 - DNA, 395 bp, Homo sapiens; identical to SEQ ID NO: 31403
  misc_feature 303, 313, 317, 318, 356: n = A,T,C or G

SEQ ID NO: 39977 - DNA, 401 bp, Homo sapiens; identical to SEQ ID NO: 30787

SEQ ID NO: 39978 - DNA, 428 bp, Homo sapiens; identical to SEQ ID NO: 31259

SEQ ID NO: 39979 - DNA, 414 bp, Homo sapiens; identical to SEQ ID NO: 31394

SEQ ID NO: 39980 - DNA, 448 bp, Homo sapiens; identical to SEQ ID NO: 31011

SEQ ID NO: 39981 - DNA, 451 bp, Homo sapiens; identical to SEQ ID NO: 31072

SEQ ID NO: 39982 - DNA, 450 bp, Homo sapiens; identical to SEQ ID NO: 31183

SEQ ID NO: 39983 - DNA, 477 bp, Homo sapiens; identical to SEQ ID NO: 31014

SEQ ID NO: 39984 - DNA, 281 bp, Homo sapiens; identical to SEQ ID NO: 31015

SEQ ID NO: 39985 - DNA, 585 bp, Homo sapiens; identical to SEQ ID NO: 31016
  misc_feature 55, 398, 570: n = A,T,C or G

SEQ ID NO: 39986 - DNA, 449 bp, Homo sapiens; identical to SEQ ID NO: 31017
  misc_feature 226, 278, 283, 284, 319, 324, 325, 363, 364, 394, 421: n = A,T,C or G

SEQ ID NO: 39987 - DNA, 440 bp, Homo sapiens; identical to SEQ ID NO: 31018

SEQ ID NO: 39988 - DNA, 450 bp, Homo sapiens; identical to SEQ ID NO: 31019

SEQ ID NO: 39989 - DNA, 423 bp, Homo sapiens; identical to SEQ ID NO: 31020

SEQ ID NO: 39990 - DNA, 428 bp, Homo sapiens; identical to SEQ ID NO: 31021

SEQ ID NO: 39991 - DNA, 347 bp, Homo sapiens; identical to SEQ ID NO: 31022

SEQ ID NO: 39992 - DNA, 503 bp, Homo sapiens; identical to SEQ ID NO: 31023

SEQ ID NO: 39993 - DNA, 436 bp, Homo sapiens; identical to SEQ ID NO: 31024

SEQ ID NO: 39994 - DNA, 411 bp, Homo sapiens
ctatagggcgaattggagctccaccgcggtggcggccgaggtacgatcttggctcactgcaacctctccctcccgggttcaagtgattctcgtgcctcagcctcttgagtagctgggattacaggcgcgtgccactgcgtccggctaatttttgtatttttagtagagatggggtttcaccatgttggccagctgatctcaaactcctgacctcatgtggtccacccaccttggcctcccaaagtgctgggattacaggcgtgagccaccgcgctcagcctacaagcaattttttaaaaactgacacctattactgataaaattctctgtttaaaatcctatttactattttaaagataagtattagtttttttttttaaatacaataatttccgttattgataaaattta

SEQ ID NO: 39995 - DNA, 548 bp, Homo sapiens
ccgggttcccccctcgatgtacttctagaattaattaacgcgggggttttgtaattatagaaacaacaggaaccaaaactcattaatgttgagctgcaaaccagagggaagcttctttctcaaaacagggctcaggcctagaaaaatctagttttctgaaatcgctagccagcaacagcactgagatggccatcccagaaacaaggccaacacagaagcacccataaaggctgctggaggttgggacaaagagatccttgctgtccttacagaccccctgacttccaaggagctcccctctcacccagcctggcctgccttctccacagggtagctgatcgtcagcatcatcttcaatggtgttgtcaagagcactcagtgctcctgccatccctgtccatctccacatgaaaggagaggttagcactccagcctgggcgactgagcaagactccatctcaaaaaaaaaaaaaaaaaaaccggccgccaccgcggtggagctccaattcgccctatagtgagtcgtattacgcgcgctcactggccgt

SEQ ID NO: 39996 - DNA, 429 bp, Homo sapiens; identical to SEQ ID NO: 31027

SEQ ID NO: 39997 - DNA, 474 bp, Homo sapiens; identical to SEQ ID NO: 31028

SEQ ID NO: 39998 - DNA, 433 bp, Homo sapiens; identical to SEQ ID NO: 31029

SEQ ID NO: 39999 - DNA, 289 bp, Homo sapiens; identical to SEQ ID NO: 31030

SEQ ID NO: 40000 - DNA, 462 bp, Homo sapiens; identical to SEQ ID NO: 31031

SEQ ID NO: 40001 - DNA, 407 bp, Homo sapiens; identical to SEQ ID NO: 31032

SEQ ID NO: 40002 - DNA, 406 bp, Homo sapiens; identical to SEQ ID NO: 31081

SEQ ID NO: 40003 - DNA, 424 bp, Homo sapiens; identical to SEQ ID NO: 31034

SEQ ID NO: 40004 - DNA, 440 bp, Homo sapiens; identical to SEQ ID NO: 31035
  misc_feature 303: n = A,T,C or G

SEQ ID NO: 40005 - DNA, 394 bp, Homo sapiens; identical to SEQ ID NO: 31036

SEQ ID NO: 40006 - DNA, 652 bp, Homo sapiens
  misc_feature 13, 472: n = A,T,C or G
cgactcactatanggcgaattggagctccaccgcggtggcggccgcccgggcaggtacagtagtgcactcttggctcactgtagcctcgacctccggggctcaagtgatcctcctgccttagccccacaagtagtgggactataggcacacagcaccatgcccatctaattttgtattttatgtagagacaaggtttcaccatgttgcccaggctgatcttgagctcctgagctcaagtgatctgcccaccttggactcccaaaatgctgggattataggcgtaaaccaccatgcctggccttaaatcaactttagagtcaacatctcttatcactggagcttctggagaaactccatcacgtggtgctctctttcctgatgtgttgtgcccaaatagcttgttctcatcagatgacttatttgctatgatatatatacttcaagagctgctatatgtattacatacatcanatctttctgtaaagtttgatttttgtttctttaaaaggaacataaatgttccaagaccaagggacacaaagaggttttaatttttagttctgtagcctcatatattttaacagaaatataaaaacagatagtagcagttttccagtggagaaaactttccagatgtctccactgtatctc

SEQ ID NO: 40007 - DNA, 336 bp, Homo sapiens; identical to SEQ ID NO: 31038

SEQ ID NO: 40008 - DNA, 425 bp, Homo sapiens; identical to SEQ ID NO: 32912

SEQ ID NO: 40009 - DNA, 501 bp, Homo sapiens
tccaccgcggtggcggccgaggtactactggcttcccagtggttgggttgagtataagcccccaaattgagtaaaagaagaaaaagttaattcaatcaccaagtcttgctcgcatattaaaaattggatagatgaatgttcaatcatatgttttggctttggccagccagacgaggtcaatttttagatttgaactgcttagaattcttcagacaagtcttgatggagcacttcttggacagttagaactttaccaggttcacaggagagctcagatgaagcgaacacctcatccacactggtttcctttggagacctttactgttgagaggtggttttcatagccgcaaaatgacaagtgcaagttgagtagatcagtgtttatcaaccaggtgccacattgtgccccaggagacatttgacaatgatggggtgttactggcatctagtagacagaggtcagggatgctgcttaacatcttacaatgcacaggacagttg

SEQ ID NO: 40010 - DNA, 464 bp, Homo sapiens; identical to SEQ ID NO: 31041

SEQ ID NO: 40011 - DNA, 419 bp, Homo sapiens; identical to SEQ ID NO: 31042

SEQ ID NO: 40012 - DNA, 404 bp, Homo sapiens; identical to SEQ ID NO: 31043

SEQ ID NO: 40013 - DNA, 431 bp, Homo sapiens; identical to SEQ ID NO: 31044

SEQ ID NO: 40014 - DNA, 483 bp, Homo sapiens; identical to SEQ ID NO: 31045

SEQ ID NO: 40015 - DNA, 167 bp, Homo sapiens; identical to SEQ ID NO: 31046

SEQ ID NO: 40016 - DNA, 397 bp, Homo sapiens
tccaccgcggtggcggccgcccgggcaggtacacaaaccataaggtcagtaaatatcacaaagagagtatgccagtgtaaccaccatgcaatctctgtttatcattgtaggtgatagccacctctgcccaagttggctaatacttgaaaaaaagtggcccagaactcacgtgctgcacattttctgaaattactcttgacttctgatttcatggcaactcttcttattttccagtgttgcttaaaattttgtcttatttttggtattcatttatttcagaggtctttaaggagacattaaaacaaacaaacaaacatgggctcattattaaacctggaatcaggttgtggatgaaactgcttaaggagattataaatgagtaagaaaaatgcagttt

SEQ ID NO: 40017 - DNA, 418 bp, Homo sapiens; identical to SEQ ID NO: 33329

SEQ ID NO: 40018 - DNA, 535 bp, Homo sapiens; identical to SEQ ID NO: 31049

SEQ ID NO: 40019 - DNA, 371 bp, Homo sapiens; identical to SEQ ID NO: 31050

SEQ ID NO: 40020 - DNA, 475 bp, Homo sapiens; identical to SEQ ID NO: 31187

SEQ ID NO: 40021 - DNA, 440 bp, Homo sapiens; identical to SEQ ID NO: 31416

SEQ ID NO: 40022 - DNA, 438 bp, Homo sapiens; identical to SEQ ID NO: 31053

SEQ ID NO: 40023 - DNA, 437 bp, Homo sapiens; identical to SEQ ID NO: 31054

SEQ ID NO: 40024 - DNA, 325 bp, Homo sapiens; identical to SEQ ID NO: 31055

SEQ ID NO: 40025 - DNA, 453 bp, Homo sapiens; identical to SEQ ID NO: 31056

SEQ ID NO: 40026 - DNA, 431 bp, Homo sapiens; identical to SEQ ID NO: 31057

SEQ ID NO: 40027 - DNA, 562 bp, Homo sapiens; identical to SEQ ID NO: 31058

SEQ ID NO: 40028 - DNA, 599 bp, Homo sapiens; identical to SEQ ID NO: 31219

SEQ ID NO: 40029 - DNA, 441 bp, Homo sapiens
atacactactatagggcgaatggaagctccaccgcggtggcggccgcccgggcaggtacaagaaaaaatcaaacaatcacatcaaaaagtgggcgaaggatatgaacagacacttatcaaaagaagacatttatgcagccaacagacacatgaaaaaatgctcatcatcactggtcatcagagaaatgcaaatcaaaaccacaatccgggaggtcttgccaaagaccacctgggctttccgggcaatgtgctagagcttctgggaagcagtcgtggccctttggagattccacggcttcggatccctactgcaggatgctccactgtgtctgctggcctctggcgttttgctgaggggtaacctcggaatggctagaaacaagaacactgagatggcccagtcgtgccccaggcattcccgcacacgtggcggcaaagaaa

SEQ ID NO: 40030 - DNA, 415 bp, Homo sapiens; identical to SEQ ID NO: 31061

SEQ ID NO: 40031 - DNA, 451 bp, Homo sapiens; identical to SEQ ID NO: 31072

SEQ ID NO: 40032 - DNA, 443 bp, Homo sapiens; identical to SEQ ID NO: 31063

SEQ ID NO: 40033 - DNA, 397 bp, Homo sapiens; identical to SEQ ID NO: 31116

SEQ ID NO: 40034 - DNA, 266 bp, Homo sapiens
tatacgactcctatagggcgaattggagctccaccgcggtggcggccgcccgggcaggtacttcttggagtgccattttccttgtaacccttagattaattcagattgactgagttctgtgtcagtggaaattgccagaattacatcattgtgctttgcatctagtttcacttttccaaaagcctacacagatttcataatgttaaaaaaatagcatcttgttttcctttctgggcaaatcttttttcatagtcaccaactcttgt

SEQ ID NO: 40035 - DNA, 516 bp, Homo sapiens
tccaccgcggtggcggccgcccgggcaggtacaagaaacagaaatcaatgaggcttacttaagcaggaaaggaatctattggaagaatgtccaacagaattgatggggagcccgcagacacaaaatctcatatacgataaaaacttgcagacagggctacttctatcatcaaatgtgttttctaactttataacacgtgtgaatagccaaccttaggccaagcctggagggtaggtatataaaaggagtaaaggtcctgacagtaggaaaatggattgaattaaaattaaagtccgggtgtggtggctcatgcctataatccctgcactgtggaaggccaaggtgggtggatcacctgaggtcaggagttcgagaccagcctggctgacatggtgaaaccctgtctctagcaaaaaaaaaaaaaaaaagtcccctggcccgtttaaaaattagggaacccccgggccggaagaattccaatttaacctttttgaatcccgccaccctagggggggg

SEQ ID NO: 40036 - DNA, 670 bp, Homo sapiens; identical to SEQ ID NO: 30471

SEQ ID NO: 40037 - DNA, 214 bp, Homo sapiens; identical to SEQ ID NO: 31068

SEQ ID NO: 40038 - DNA, 408 bp, Homo sapiens; identical to SEQ ID NO: 31069

SEQ ID NO: 40039 - DNA, 502 bp, Homo sapiens; identical to SEQ ID NO: 31155

SEQ ID NO: 40040 - DNA, 477 bp, Homo sapiens; identical to SEQ ID NO: 31071

SEQ ID NO: 40041 - DNA, 451 bp, Homo sapiens; identical to SEQ ID NO: 31072

SEQ ID NO: 40042 - DNA, 398 bp, Homo sapiens; identical to SEQ ID NO: 31073

SEQ ID NO: 40043 - DNA, 561 bp, Homo sapiens; identical to SEQ ID NO: 31806

SEQ ID NO: 40044 - DNA, 471 bp, Homo sapiens; identical to SEQ ID NO: 31369

SEQ ID NO: 40045 - DNA, 447 bp, Homo sapiens; identical to SEQ ID NO: 31076

SEQ ID NO: 40046 - DNA, 410 bp, Homo sapiens; identical to SEQ ID NO: 31077
  misc_feature 335: n = A,T,C or G

SEQ ID NO: 40047 - DNA, 426 bp, Homo sapiens; identical to SEQ ID NO: 31078

SEQ ID NO: 40048 - DNA, 423 bp, Homo sapiens; identical to SEQ ID NO: 31079

SEQ ID NO: 40049 - DNA, 422 bp, Homo sapiens; identical to SEQ ID NO: 31080

SEQ ID NO: 40050 - DNA, 491 bp, Homo sapiens; identical to SEQ ID NO: 30404

SEQ ID NO: 40051 - DNA, 472 bp, Homo sapiens; identical to SEQ ID NO: 31766

SEQ ID NO: 40052 - DNA, 312 bp, Homo sapiens; identical to SEQ ID NO: 31083

SEQ ID NO: 40053 - DNA, 561 bp, Homo sapiens; identical to SEQ ID NO: 31806

SEQ ID NO: 40054 - DNA, 466 bp, Homo sapiens; identical to SEQ ID NO: 31085

SEQ ID NO: 40055 - DNA, 444 bp, Homo sapiens; identical to SEQ ID NO: 31235

SEQ ID NO: 40056 - DNA, 566 bp, Homo sapiens; identical to SEQ ID NO: 31087
  misc_feature 311: n = A,T,C or G

SEQ ID NO: 40057 - DNA, 530 bp, Homo sapiens
gtaatacgactcactatagggcgaatgggagctccaccgcggtggcggccgcccgggcaggtaccctcattgtagccatgggaaaattgatgttcagtggggatcagtgaattaaatggggtcatacaagtataaaaattaaaaaaaaagacttcatgcccaatctcatatgatgtggaagaactgttagagagaccaacagggtagtgggttagagatttccagagtcttacattttctagaggaggtatttaatttcttctcactcatccagtgttgtatttaggaatttcctggcaacagaactcatggctttaatcccactagctattgcttattgtcctggtccaattgccaattacctgtgtcttggaagaagtgatttctaggttcaccattatggaagattcttattcagaaagtctgcatagggcttatagcaagttatttatttttaaaagttccataggtgattctgatcggcagtgaagttagggagccaccagttatgatgggaagtatggaatggc

SEQ ID NO: 40058 - DNA, 357 bp, Homo sapiens; identical to SEQ ID NO: 31089

SEQ ID NO: 40059 - DNA, 426 bp, Homo sapiens; identical to SEQ ID NO: 31090

SEQ ID NO: 40060 - DNA, 444 bp, Homo sapiens; identical to SEQ ID NO: 31091

SEQ ID NO: 40061 - DNA, 389 bp, Homo sapiens; identical to SEQ ID NO: 31175

SEQ ID NO: 40062 - DNA, 442 bp, Homo sapiens; identical to SEQ ID NO: 31093

SEQ ID NO: 40063 - DNA, 217 bp, Homo sapiens
actacgagggactagctgtgcaactctgggcatggtgcttaatctaggccttagttttcatatttgtaaaatgtggtcaattgataaagacctctctcatagagttgttacgaggattaagtaagataatacgtagaaagcatttagcacagtgtctaaaaatagtaagttcttaaaaactgcaacctgttattatcatccaacttacttgtgacta

SEQ ID NO: 40064 - DNA, 425 bp, Homo sapiens; identical to SEQ ID NO: 31095

SEQ ID NO: 40065 - DNA, 456 bp, Homo sapiens
tccaccgcggtggcggccgaggtacccttacaaagaagacaccataccttatgcgttattaggtggaataatcattccattcagtattatcgttgtaagttaaatccacttttccaagtttataacttttgggcacttggcttaattttctgttactcttttaatgcttaaatgtgtaatcctccaaaaacaatgtatgctttttaaacctttaattgatgctttatttgatcaagagaatctcagctattttaagtggagtcaaaaaataacaatgtgtaattgtaagagccaggcatggtgacatgcctgtagtcccagctactcgagaggctgaggctagaggattgcttgagtctcggagttggatactataatatgtgatgatcacatctgtgaatagccattatactccagcccagacaacactgcaacatcccatcttaaaaaaaaaaa

SEQ ID NO: 40066 - DNA, 540 bp, Homo sapiens; identical to SEQ ID NO: 31448

SEQ ID NO: 40067 - DNA, 415 bp, Homo sapiens; identical to SEQ ID NO: 31061

SEQ ID NO: 40068 - DNA, 437 bp, Homo sapiens; identical to SEQ ID NO: 31099

SEQ ID NO: 40069 - DNA, 426 bp, Homo sapiens; identical to SEQ ID NO: 31100

SEQ ID NO: 40070 - DNA, 375 bp, Homo sapiens; identical to SEQ ID NO: 31101

SEQ ID NO: 40071 - DNA, 577 bp, Homo sapiens; identical to SEQ ID NO: 33297

SEQ ID NO: 40072 - DNA, 399 bp, Homo sapiens
tccaccgcggtggcggccgcccgggcaggtacagcattattagctggggctttcactgaaaaccccaggtctctttctattgtccccatatggttggagtcacaagagtgggagagatggccaagctctctgcagaggatcctggcagcagcctgaaccctcttgctacttccatcaaaggaaaaaaaaatcaaatatttacccccacgagcttataatattacagagaactccaccatcctgccctgcaaaatatcctgggatttgactaatactagagctgcttttctagtccttgagtgactaggaaggaagaaccaaaagcttgactcccctgcagcagtgagtctctggctttggtttgcacaggaaaccatagggtcacgtaaaatacacata

SEQ ID NO: 40073 - DNA, 422 bp, Homo sapiens; identical to SEQ ID NO: 31104

SEQ ID NO: 40074 - DNA, 272 bp, Homo sapiens; identical to SEQ ID NO: 31105

SEQ ID NO: 40075 - DNA, 209 bp, Homo sapiens; identical to SEQ ID NO: 31106

SEQ ID NO: 40076 - DNA, 453 bp, Homo sapiens; identical to SEQ ID NO: 31107

SEQ ID NO: 40077 - DNA, 419 bp, Homo sapiens; identical to SEQ ID NO: 31108

SEQ ID NO: 40078 - DNA, 250 bp, Homo sapiens; identical to SEQ ID NO: 31109

SEQ ID NO: 40079 - DNA, 471 bp, Homo sapiens; identical to SEQ ID NO: 31110

SEQ ID NO: 40080 - DNA, 555 bp, Homo sapiens; identical to SEQ ID NO: 31000

SEQ ID NO: 40081 - DNA, 336 bp, Homo sapiens
tccaccgcggtggcggccgcccgggcaggtactttaggctgagaaataaatagaagggtgagaaaaaagaacagtctttatagtcagtaagagtgaaaagagaaagatggtagttggggaaagacagatggggagaaaggttggctggttgttaataaaacagtagaggatgagcatgtattataaatgctggtgggaagaaaccttgtggcaaggagggtggtagtgttggagaagaaagagaggatatagtagaaagttaaagaggaactggaagcaggtgggatccaggacataggaaggggaagagccttgggcagaggtgagacatctgcc

SEQ ID NO: 40082 - DNA, 556 bp, Homo sapiens
  misc_feature 390, 485: n = A,T,C or G
gctttttatttttttttttttttttttttttttttttttttttttttttttttttttttttttttttttttttttaaaatttttttttttttaattaaaaaaaaaaaaaaaaaaaaaaaaaaaaaaaaaaaaaaaaaaaaaaaaaaaaaaaaaaaaaaaaaaaaaaaaaaaaaaaaaaaaaaaaaaaaaaagggaaaaaaaaaaaaaaaaaaaaaaaaaaaaaaaaaaaaaaaaaaaaaaaaaaaaaaaaaaaaaaaaaaaaaaaaaaaaagggaaaaaaaaaaaaaaaaaaaaaaaaaaaaaaaaaaaaaaaaaaaaaaatataaaaaaaaaaaaaagaaaaaaaataaaaaaaaaaaaaaaaaaaaaaaaaaaaaaaaaaaggggggngttttatttttataaaaaaaaaaaaaaaaaaaaaaatatttatggggagggggggggagaaaaataaaaaaaataattaaaaagggggagagggngggaaagaaaaaaaaaaaaagagggaaaaaaaaaaaaaaaaagatgggtgttaaaaaaaaaaaaaaaaaaa

SEQ ID NO: 40083 - DNA, 418 bp, Homo sapiens; identical to SEQ ID NO: 31114

SEQ ID NO: 40084 - DNA, 432 bp, Homo sapiens; identical to SEQ ID NO: 31115

SEQ ID NO: 40085 - DNA, 397 bp, Homo sapiens; identical to SEQ ID NO: 31116

SEQ ID NO: 40086 - DNA, 480 bp, Homo sapiens; identical to SEQ ID NO: 31117

SEQ ID NO: 40087 - DNA, 212 bp, Homo sapiens; identical to SEQ ID NO: 31118

SEQ ID NO: 40088 - DNA, 448 bp, Homo sapiens; identical to SEQ ID NO: 33000

SEQ ID NO: 40089 - DNA, 392 bp, Homo sapiens; identical to SEQ ID NO: 31120

SEQ ID NO: 40090 - DNA, 614 bp, Homo sapiens; identical to SEQ ID NO: 30941

SEQ ID NO: 40091 - DNA, 691 bp, Homo sapiens; identical to SEQ ID NO: 31400

SEQ ID NO: 40092 - DNA, 454 bp, Homo sapiens
attgggccttctagatgcatgctcgagcggccgccagtgtgatggatatctgcagaattcgcccttagcgtggtcgcggccgaggtacacaggccgggcacagtggttcgcacctgtaatcccaacactttgggaggctgaggcgggtggatcacaaggtcaggagatcgagaccatcctggccaacatggtgaaactctgtctctactaaaaaatacagaaaattagccagtcatggtggcacgttcctctagtcccagctactcgggaggctgaggcagaagaattacttcaacatgggattggaggttgcagtgagccgagatcgcgccactgcactccagcctggtgacagagcgagaccccatctcaaaaaaaaaagttgtatgtgacagctaaccataataaaaaaaaagaaagaaaaaagagagagaaagtagggacaacactaaat

SEQ ID NO: 40093 - DNA, 415 bp, Homo sapiens; identical to SEQ ID NO: 31124
  misc_feature 323, 369: n = A,T,C or G

SEQ ID NO: 40094 - DNA, 428 bp, Homo sapiens; identical to SEQ ID NO: 31125

SEQ ID NO: 40095 - DNA, 404 bp, Homo sapiens; identical to SEQ ID NO: 30750

SEQ ID NO: 40096 - DNA, 380 bp, Homo sapiens; identical to SEQ ID NO: 31127

SEQ ID NO: 40097 - DNA, 465 bp, Homo sapiens; identical to SEQ ID NO: 31128

SEQ ID NO: 40098 - DNA, 417 bp, Homo sapiens; identical to SEQ ID NO: 31129

SEQ ID NO: 40099 - DNA, 448 bp, Homo sapiens; identical to SEQ ID NO: 31130

SEQ ID NO: 40100 - DNA, 400 bp, Homo sapiens; identical to SEQ ID NO: 31131

SEQ ID NO: 40101 - DNA, 306 bp, Homo sapiens
gagctccaccgcggtggcggccgaggtacatgccaccatgcctagctaagttttgtatttttggcagagacagggtttcaccatgttggccaggctggcctcgaactcctgaccttaggtgatccaccctcctaggtctctcaaagtgctggaattacggtgtgagccactgcgcccggcccttagtagcatcttttaatggaggtagagttgagatttcagtgactaacaactaaaggtattaaaggtaggggtttatatgatacatttgcattttagaaaactgatctaagcttcaatgtgaag

SEQ ID NO: 40102 - DNA, 458 bp, Homo sapiens; identical to SEQ ID NO: 31133

SEQ ID NO: 40103 - DNA, 450 bp, Homo sapiens; identical to SEQ ID NO: 31134

SEQ ID NO: 40104 - DNA, 384 bp, Homo sapiens; identical to SEQ ID NO: 31135

SEQ ID NO: 40105 - DNA, 445 bp, Homo sapiens; identical to SEQ ID NO: 39937

SEQ ID NO: 40106 - DNA, 363 bp, Homo sapiens; identical to SEQ ID NO: 31676

SEQ ID NO: 40107 - DNA, 335 bp, Homo sapiens; identical to SEQ ID NO: 31138

SEQ ID NO: 40108 - DNA, 431 bp, Homo sapiens; identical to SEQ ID NO: 31139

SEQ ID NO: 40109 - DNA, 436 bp, Homo sapiens; identical to SEQ ID NO: 31140

SEQ ID NO: 40110 - DNA, 452 bp, Homo sapiens; identical to SEQ ID NO: 31160

SEQ ID NO: 40111 - DNA, 443 bp, Homo sapiens; identical to SEQ ID NO: 31142

SEQ ID NO: 40112 - DNA, 498 bp, Homo sapiens; identical to SEQ ID NO: 31143

SEQ ID NO: 40113 - DNA, 468 bp, Homo sapiens; identical to SEQ ID NO: 31790

SEQ ID NO: 40114 - DNA, 478 bp, Homo sapiens; identical to SEQ ID NO: 30781

SEQ ID NO: 40115 - DNA, 450 bp, Homo sapiens; identical to SEQ ID NO: 31146

SEQ ID NO: 40116 - DNA, 597 bp, Homo sapiens; identical to SEQ ID NO: 31147

SEQ ID NO: 40117 - DNA, 421 bp, Homo sapiens; identical to SEQ ID NO: 31449

SEQ ID NO: 40118 - DNA, 455 bp, Homo sapiens; identical to SEQ ID NO: 30887

SEQ ID NO: 40119 - DNA, 405 bp, Homo sapiens; identical to SEQ ID NO: 31150

SEQ ID NO: 40120 - DNA, 448 bp, Homo sapiens
aatacgactactatagggcgaattggagctccaccgcggtggcggccgcccgggcaggtacctactaaacagcaaagaaaccatcctagaggaaacaaagagcctgactcagaagcgctcaacaagcagcaaattaagccagagcctaatttggtctgtggtctcttaactgtggagccaagaacaaggagaacaaagttgggggcagagagagacacaggacatgaggagcagaaatattgccatctccaagccaaagccacttaggtatggaataggcagcaattgtttgaagggttaatgcatccatcccagctcctacttaagacagtgagaattatgcgcaaagttgtattggatttgcttttgggaaatgtgctttctggccgaatcaagtaaacatggaacaaaggcacacgcttgtgtaataaccactcagccaacatat

SEQ ID NO: 40121 - DNA, 569 bp, Homo sapiens; identical to SEQ ID NO: 31152

SEQ ID NO: 40122 - DNA, 171 bp, Homo sapiens; identical to SEQ ID NO: 30990

SEQ ID NO: 40123 - DNA, 445 bp, Homo sapiens; identical to SEQ ID NO: 31154

SEQ ID NO: 40124 - DNA, 502 bp, Homo sapiens; identical to SEQ ID NO: 31155

SEQ ID NO: 40125 - DNA, 551 bp, Homo sapiens; identical to SEQ ID NO: 31156

SEQ ID NO: 40126 - DNA, 569 bp, Homo sapiens; identical to SEQ ID NO: 31157

SEQ ID NO: 40127 - DNA, 452 bp, Homo sapiens; identical to SEQ ID NO: 31158

SEQ ID NO: 40128 - DNA, 62 bp, Homo sapiens
actcactatagggcgaattggagctccaccgcggtggcggccgcccgggcaggtactttttt

SEQ ID NO: 40129 - DNA, 438 bp, Homo sapiens
actactatagggcgaattggagctccaccgcggtggcggccgcccgggcaggtacgcgggggggcatcacggacctaccaatatgtgatgtcacccctggtggcccagctgtgtcatggagaaactccagctgggcccagagattctgcagcgggaaaatccaaggcttatttatgccaggctgagtggatttggccagtcaggaagcttctgccggttagctggccacgatatcaactatttggctttgtcaggtggaaggaacagcatatttaagttcttttctgtggaaaactcagaaattgagtctgtgggaagcacctcgaggacagaacatgttggatggtggagcacctttctatacgacttacaggacagcagatggggaattcatggctgttggagcaatagaaccccagttctacgagctgctgatca

SEQ ID NO: 40130 - DNA, 452 bp, Homo sapiens; identical to SEQ ID NO: 31160

SEQ ID NO: 40131 - DNA, 214 bp, Homo sapiens; identical to SEQ ID NO: 31068

SEQ ID NO: 40132 - DNA, 166 bp, Homo sapiens; identical to SEQ ID NO: 31162
  misc_feature 139, 151, 152, 159, 160: n = A,T,C or G

SEQ ID NO: 40133 - DNA, 468 bp, Homo sapiens; identical to SEQ ID NO: 31163

SEQ ID NO: 40134 - DNA, 471 bp, Homo sapiens; identical to SEQ ID NO: 31164

SEQ ID NO: 40135 - DNA, 359 bp, Homo sapiens; identical to SEQ ID NO: 31165

SEQ ID NO: 40136 - DNA, 315 bp, Homo sapiens; identical to SEQ ID NO: 31166
  misc_feature 256, 257, 273, 274, 293, 294: n = A,T,C or G

SEQ ID NO: 40137 - DNA, 481 bp, Homo sapiens; identical to SEQ ID NO: 30825

SEQ ID NO: 40138 - DNA, 504 bp, Homo sapiens; identical to SEQ ID NO: 33996

SEQ ID NO: 40139 - DNA, 437 bp, Homo sapiens; identical to SEQ ID NO: 31169

SEQ ID NO: 40140 - DNA, 478 bp, Homo sapiens; identical to SEQ ID NO: 31170

SEQ ID NO: 40141 - DNA, 539 bp, Homo sapiens
tccaccgcggtggcggccgcccgggcaggtactgtgttgtaagagatgcaggttagcagaaaccctccacatgagatctgctttaagactgacccaagcctgaaacgctctctccctaagtgatccatgtccctgcagtaataccataaccactaagctaacacactcactgtaaaagtgttgcttctccatgaagcaccaagacttgatgaccatttgcagttctcattaactccactaagaccctaaaggctaaatgacaaccaagcctctgtcactctgcctgagtggatttaccacaaatatcaaatctgttcaatctattataagagctaaaaaggagaagcacatgaaatcacatttcattcttagctcttttatcttcccatttttcatttagacattgaatacatgaaccaaagtttagttctctgtattagtcaatttgccaatagctgtcaaccctttaaaagtctttaagatgctacaaggttcccaaagctatacttctagtaatgctacgccttaaaagaaaaaaa

SEQ ID NO: 40142 - DNA, 428 bp, Homo sapiens; identical to SEQ ID NO: 31172

SEQ ID NO: 40143 - DNA, 393 bp, Homo sapiens; identical to SEQ ID NO: 31173

SEQ ID NO: 40144 - DNA, 407 bp, Homo sapiens; identical to SEQ ID NO: 31174

SEQ ID NO: 40145 - DNA, 363 bp, Homo sapiens; identical to SEQ ID NO: 31676

SEQ ID NO: 40146 - DNA, 448 bp, Homo sapiens; identical to SEQ ID NO: 31176

SEQ ID NO: 40147 - DNA, 451 bp, Homo sapiens; identical to SEQ ID NO: 31177

SEQ ID NO: 40148 - DNA, 438 bp, Homo sapiens; identical to SEQ ID NO: 31178

SEQ ID NO: 40149 - DNA, 353 bp, Homo sapiens; identical to SEQ ID NO: 31179

SEQ ID NO: 40150 - DNA, 560 bp, Homo sapiens
tccaccgcggtggcggccgaggtacatggtgccatgggacagataagaagggagtacctggcttggacttgaaggagaaatgagagagcaactatccgcagtagaaggctgagcatttcaaatccctgtgaaacctagggttttgaaaacagtatgtttcggcaacagcaagtggttcagtgtgattggagccttaaggggacagtggaagatgaggctgagcatttagggaggtgccagattgccccaaaggcagtgttctcaatactaaactaatgttcttccaccataaatgagctccccctggcaacttctcatttctatcaatggaactttcgttcttcatatgtccaaaccctgaagtgccatcttcaggtctgcctcagcatttgtgatcagtgctcaagttttgtatcatttctatattcaaaacattcttctgtgcatcctattctgtttccactatctacacactacttatcacctaattagtagataatttcaaaactgtaaatatttgtgtttcttcttgctctctctctcccttttttttttccggg

SEQ ID NO: 40151 - DNA, 450 bp, Homo sapiens; identical to SEQ ID NO: 30829

SEQ ID NO: 40152 - DNA, 428 bp, Homo sapiens; identical to SEQ ID NO: 31182

SEQ ID NO: 40153 - DNA, 450 bp, Homo sapiens; identical to SEQ ID NO: 31183

SEQ ID NO: 40154 - DNA, 380 bp, Homo sapiens; identical to SEQ ID NO: 31127

SEQ ID NO: 40155 - DNA, 474 bp, Homo sapiens; identical to SEQ ID NO: 31185

SEQ ID NO: 40156 - DNA, 427 bp, Homo sapiens; identical to SEQ ID NO: 33102

SEQ ID NO: 40157 - DNA, 611 bp, Homo sapiens; identical to SEQ ID NO: 39970
  misc_feature 494: n = A,T,C or G

SEQ ID NO: 40158 - DNA, 250 bp, Homo sapiens; identical to SEQ ID NO: 31188

SEQ ID NO: 40159 - DNA, 451 bp, Homo sapiens; identical to SEQ ID NO: 31072

SEQ ID NO: 40160 - DNA, 445 bp, Homo sapiens; identical to SEQ ID NO: 31190

SEQ ID NO: 40161 - DNA, 458 bp, Homo sapiens; identical to SEQ ID NO: 31191

SEQ ID NO: 40162 - DNA, 369 bp, Homo sapiens; identical to SEQ ID NO: 31192

SEQ ID NO: 40163 - DNA, 637 bp, Homo sapiens; identical to SEQ ID NO: 36664

SEQ ID NO: 40164 - DNA, 183 bp, Homo sapiens; identical to SEQ ID NO: 31194

SEQ ID NO: 40165 - DNA, 462 bp, Homo sapiens; identical to SEQ ID NO: 31195

SEQ ID NO: 40166 - DNA, 199 bp, Homo sapiens; identical to SEQ ID NO: 31196

SEQ ID NO: 40167 - DNA, 412 bp, Homo sapiens; identical to SEQ ID NO: 31197

SEQ ID NO: 40168 - DNA, 430 bp, Homo sapiens; identical to SEQ ID NO: 30884

SEQ ID NO: 40169 - DNA, 458 bp, Homo sapiens; identical to SEQ ID NO: 36175

SEQ ID NO: 40170 - DNA, 463 bp, Homo sapiens
gcgaattgggccctgtagatgcatgctcgagcggccgccagtgtgatggatatctgcagaattcgccctttggccgcccgggcaggtaccattcttatctcagaatgctgtaaaccatcagtagaagcagtttagatttggactgcatggtaaaatgaaaagtaataaccctccaaccacaacctagtcagggtattaataattatatgtagcaagaaaacaaagaagaaaataatattgaaaaaatggagattccccaaccagtttcatatttgaaggatctgagttgtatttttattaaggaaattttttttctgaatactgtcttccaaaatgttaacattaaaatctgaatcagaggactctgaatggaaaagaagtttgatcactgacacctagggctctgaagcgtgtgtggccacatggaaaagtcgaaggatgcgctggcgaatctcctttgtct

SEQ ID NO: 40171 - DNA, 448 bp, Homo sapiens; identical to SEQ ID NO: 31201

SEQ ID NO: 40172 - DNA, 439 bp, Homo sapiens; identical to SEQ ID NO: 31202

SEQ ID NO: 40173 - DNA, 471 bp, Homo sapiens; identical to SEQ ID NO: 31203

SEQ ID NO: 40174 - DNA, 453 bp, Homo sapiens; identical to SEQ ID NO: 31204

SEQ ID NO: 40175 - DNA, 436 bp, Homo sapiens; identical to SEQ ID NO: 31205

SEQ ID NO: 40176 - DNA, 451 bp, Homo sapiens; identical to SEQ ID NO: 31072

SEQ ID NO: 40177 - DNA, 405 bp, Homo sapiens; identical to SEQ ID NO: 31207

SEQ ID NO: 40178 - DNA, 405 bp, Homo sapiens; identical to SEQ ID NO: 31208

SEQ ID NO: 40179 - DNA, 432 bp, Homo sapiens; identical to SEQ ID NO: 31209

SEQ ID NO: 40180 - DNA, 185 bp, Homo sapiens; identical to SEQ ID NO: 31210

SEQ ID NO: 40181 - DNA, 406 bp, Homo sapiens; identical to SEQ ID NO: 31211

SEQ ID NO: 40182 - DNA, 556 bp, Homo sapiens; identical to SEQ ID NO: 40082
  misc_feature 390, 485: n = A,T,C or G

SEQ ID NO: 40183 - DNA, 263 bp, Homo sapiens; identical to SEQ ID NO: 31212
  misc_feature 230: n = A,T,C or G

SEQ ID NO: 40184 - DNA, 579 bp, Homo sapiens
  misc_feature 16, 523: n = A,T,C or G
tccaccgcggtggcgngccgaggtacacagagacacgatccacagttgtgtaggaataacttcctaaacatctttaggatctacctctttttcctgttcccactgttatttctttgtttcaggcccttaacatctctaatatacactagtatttctgtcttcacactgttttttttctttacacagctcttttcatagcccctccattagcacacagattggaattgtgtctccttgttacccacagaataaaacccaatgttcttaatatgtagtcttaatatagactctataaatagcccctttgttaatctatcttgaattactcacttttaggtttcagctccctactgagaccccaactggctttaccttctgttccctcctggttctgcttatcttccattgcccctgtggacctgctttctgtcattgccttccctgccctcagtctcaggagcctgagactggcttctagatgggtttggacaatggatagcactggcaggaggagagtagagtngctgtgtttattttcctggtttcctcctgcaagatcatgtcatgttggctctccca

SEQ ID NO: 40185 - DNA, 340 bp, Homo sapiens; identical to SEQ ID NO: 31258

SEQ ID NO: 40186 - DNA, 192 bp, Homo sapiens; identical to SEQ ID NO: 31215

SEQ ID NO: 40187 - DNA, 645 bp, Homo sapiens; identical to SEQ ID NO: 31216

SEQ ID NO: 40188 - DNA, 499 bp, Homo sapiens; identical to SEQ ID NO: 31217

SEQ ID NO: 40189 - DNA, 480 bp, Homo sapiens
  misc_feature 227: n = A,T,C or G
atacgactcactatagggcgaattggagctccaccgcggtggcggccgaggtacaagaaaaaatcaaacaatcacatcaaaaagtgggcgaaggatatgaacagacacttatcaaaagaagacatttatgcagccaacagacacatgaaaaaatgttcatcatcactggtcatcagagaaatgccatcaaaaccacaatccgggaggtcttgccaaagaccacctgngctttccgggcaacgtgctagagcttctgggaagcagtcgtggccctttggagattccacggcttcggattcctactgcaggatgctccactgtgtctgccggcctctggcgttttgctgaggggtaacctcggaatggctagaaacaagaacactgagatagcccagtcgtgccccaggcattcccgcacacgtggtggcaaagaaaggcgcgcagacagggtgcccagtcagcttggtcagagttctttac

SEQ ID NO: 40190 - DNA, 599 bp, Homo sapiens; identical to SEQ ID NO: 31219

SEQ ID NO: 40191 - DNA, 440 bp, Homo sapiens; identical to SEQ ID NO: 31220

SEQ ID NO: 40192 - DNA, 414 bp, Homo sapiens; identical to SEQ ID NO: 31221

SEQ ID NO: 40193 - DNA, 445 bp, Homo sapiens; identical to SEQ ID NO: 31222

SEQ ID NO: 40194 - DNA, 471 bp, Homo sapiens; identical to SEQ ID NO: 31223

SEQ ID NO: 40195 - DNA, 379 bp, Homo sapiens; identical to SEQ ID NO: 31224

SEQ ID NO: 40196 - DNA, 406 bp, Homo sapiens; identical to SEQ ID NO: 31211

SEQ ID NO: 40197 - DNA, 478 bp, Homo sapiens; identical to SEQ ID NO: 30781

SEQ ID NO: 40198 - DNA, 466 bp, Homo sapiens; identical to SEQ ID NO: 31227

SEQ ID NO: 40199 - DNA, 465 bp, Homo sapiens; identical to SEQ ID NO: 31386

SEQ ID NO: 40200 - DNA, 431 bp, Homo sapiens; identical to SEQ ID NO: 31246

SEQ ID NO: 40201 - DNA, 431 bp, Homo sapiens; identical to SEQ ID NO: 31658

SEQ ID NO: 40202 - DNA, 451 bp, Homo sapiens; identical to SEQ ID NO: 31231

SEQ ID NO: 40203 - DNA, 427 bp, Homo sapiens; identical to SEQ ID NO: 31233

SEQ ID NO: 40204 - DNA, 427 bp, Homo sapiens; identical to SEQ ID NO: 31233

SEQ ID NO: 40205 - DNA, 438 bp, Homo sapiens; identical to SEQ ID NO: 31234

SEQ ID NO: 40206 - DNA, 441 bp, Homo sapiens; identical to SEQ ID NO: 31779

SEQ ID NO: 40207 - DNA, 471 bp, Homo sapiens
gactactatagggcgaattgggccctctagatgcatgctcgagcggccgccagtgtgatggatatctgcagaattcgccctttgagcgccgcccgggcaggtacgatcttggctcactgcaacctctccctcccgggttcaagtgattctcgtgcctcagcctcttgagtagctgggattacaggcgcgtgccactgcgtccggctaatttttgtatttttagtagagatggggtttcaccatgttggccaggctgatctcaaactcctgacctcatgtggtccacccaccttggcctcccaaagtgctgggattacaggcgtgagccaccgcgctcagcctacaagcaattttttaaaaactgacacctattactgataaaattctctgtttaaaatcctatttactattttaaagataagtattagttttttttttaaatacaataattctgttattgataaaatttaa

SEQ ID NO: 40208 - DNA, 412 bp, Homo sapiens; identical to SEQ ID NO: 31317

SEQ ID NO: 40209 - DNA, 461 bp, Homo sapiens; identical to SEQ ID NO: 31238

SEQ ID NO: 40210 - DNA, 355 bp, Homo sapiens; identical to SEQ ID NO: 31239

SEQ ID NO: 40211 - DNA, 403 bp, Homo sapiens; identical to SEQ ID NO: 31240

SEQ ID NO: 40212 - DNA, 598 bp, Homo sapiens; identical to SEQ ID NO: 31241
  misc_feature 472: n = A,T,C or G

SEQ ID NO: 40213 - DNA, 465 bp, Homo sapiens; identical to SEQ ID NO: 31386

SEQ ID NO: 40214 - DNA, 423 bp, Homo sapiens; identical to SEQ ID NO: 31243
  misc_feature 352, 384, 385: n = A,T,C or G

SEQ ID NO: 40215 - DNA, 437 bp, Homo sapiens; identical to SEQ ID NO: 31054

SEQ ID NO: 40216 - DNA, 446 bp, Homo sapiens; identical to SEQ ID NO: 31594

SEQ ID NO: 40217 - DNA, 431 bp, Homo sapiens; identical to SEQ ID NO: 31246

SEQ ID NO: 40218 - DNA, 413 bp, Homo sapiens; identical to SEQ ID NO: 31247

SEQ ID NO: 40219 - DNA, 413 bp, Homo sapiens
actactatagggcgaattggagctccaccgcggtggcggccgaggtacttttttttttttttttttttttggagccggagtcttgctctgtcaccaggctggagtgcagtggtgtgatctcagctcactgcaacttccgtctcctgggttcaagaattttcctgcctcagcctcccaagtacatgggactacaggcacgccccaccatgcccagctcatttttgtatttttagtaaagacagggtttcaccatgttggccaggatgatcttgatctcttgacctcatgatccgcccctcttggcctcccaaagtgctgggatcacaggcgtgagccaccacacctggccctctatttattctctttaaagagagagaaaactatgagaggccaaaattatttaattaaatctt

SEQ ID NO: 40220 - DNA, 443 bp, Homo sapiens; identical to SEQ ID NO: 32125

SEQ ID NO: 40221 - DNA, 527 bp, Homo sapiens; identical to SEQ ID NO: 31250
  misc_feature 23, 504: n = A,T,C or G

SEQ ID NO: 40222 - DNA, 451 bp, Homo sapiens; identical to SEQ ID NO: 31072

SEQ ID NO: 40223 - DNA, 457 bp, Homo sapiens; identical to SEQ ID NO: 31252

SEQ ID NO: 40224 - DNA, 448 bp, Homo sapiens; identical to SEQ ID NO: 31201

SEQ ID NO: 40225 - DNA, 431 bp, Homo sapiens; identical to SEQ ID NO: 31254

SEQ ID NO: 40226 - DNA, 400 bp, Homo sapiens; identical to SEQ ID NO: 31255

SEQ ID NO: 40227 - DNA, 483 bp, Homo sapiens; identical to SEQ ID NO: 31045

SEQ ID NO: 40228 - DNA, 551 bp, Homo sapiens; identical to SEQ ID NO: 31156

SEQ ID NO: 40229 - DNA, 340 bp, Homo sapiens; identical to SEQ ID NO: 31258

SEQ ID NO: 40230 - DNA, 428 bp, Homo sapiens; identical to SEQ ID NO: 31259

SEQ ID NO: 40231 - DNA, 635 bp, Homo sapiens; identical to SEQ ID NO: 31675

SEQ ID NO: 40232 - DNA, 531 bp, Homo sapiens; identical to SEQ ID NO: 31436

SEQ ID NO: 40233 - DNA, 447 bp, Homo sapiens; identical to SEQ ID NO: 31262

SEQ ID NO: 40234 - DNA, 433 bp, Homo sapiens; identical to SEQ ID NO: 31651

SEQ ID NO: 40235 - DNA, 445 bp, Homo sapiens; identical to SEQ ID NO: 31355

SEQ ID NO: 40236 - DNA, 535 bp, Homo sapiens; identical to SEQ ID NO: 31265
  misc_feature 189, 215, 426: n = A,T,C or G

SEQ ID NO: 40237 - DNA, 596 bp, Homo sapiens
tccaccgcggtggcggccgcccgggcaggtaccagcttttgcactttcctcactgtaaagatgttgtatgggttacttaaccagttggggtttaatttccttggctgtatagtggacttagtgtcacatgcctacctcacgatttctgtgacaattaaatatgatgttttaaggcttctaacttactggatctaaataaattattcctggaaaaaaaaagtttgctgtgtaataaagcacctaaacaggaatgaaaaagcaggtatagaacttcaggtgttttgtcaccctccctcccccagtggtgtgtgtaggaaaactttgcttctttctgtaaatctgatgtctaatctcttctgactttacgttcaatcagttgattattttcattcagcagatgtgatcggtttgcagggttctcagtcaagtaggatagagaaaacatgaagatacacaactaaataaaatgctatatataaaatgatgttttatgcaataattatagctatgctatgttaattcagcaattattgctgctttggggaaatgagaaggctttgaggaggaggtagtatttcaaaatgatgaggtttgaa

SEQ ID NO: 40238 - DNA, 462 bp, Homo sapiens; identical to SEQ ID NO: 30910

SEQ ID NO: 40239 - DNA, 446 bp, Homo sapiens; identical to SEQ ID NO: 30954

SEQ ID NO: 40240 - DNA, 500 bp, Homo sapiens; identical to SEQ ID NO: 31269

SEQ ID NO: 40241 - DNA, 486 bp, Homo sapiens; identical to SEQ ID NO: 36401

SEQ ID NO: 40242 - DNA, 177 bp, Homo sapiens; identical to SEQ ID NO: 31271

SEQ ID NO: 40243 - DNA, 414 bp, Homo sapiens; identical to SEQ ID NO: 31272

SEQ ID NO: 40244 - DNA, 445 bp, Homo sapiens; identical to SEQ ID NO: 31273

SEQ ID NO: 40245 - DNA, 409 bp, Homo sapiens; identical to SEQ ID NO: 31274

SEQ ID NO: 40246 - DNA, 617 bp, Homo sapiens; identical to SEQ ID NO: 37208
  misc_feature 478, 553: n = A,T,C or G

SEQ ID NO: 40247 - DNA, 453 bp, Homo sapiens; identical to SEQ ID NO: 31446

SEQ ID NO: 40248 - DNA, 558 bp, Homo sapiens; identical to SEQ ID NO: 30997

SEQ ID NO: 40249 - DNA, 443 bp, Homo sapiens; identical to SEQ ID NO: 31278

SEQ ID NO: 40250 - DNA, 468 bp, Homo sapiens; identical to SEQ ID NO: 31790

SEQ ID NO: 40251 - DNA, 477 bp, Homo sapiens; identical to SEQ ID NO: 31280

SEQ ID NO: 40252 - DNA, 461 bp, Homo sapiens; identical to SEQ ID NO: 31281

SEQ ID NO: 40253 - DNA, 452 bp, Homo sapiens; identical to SEQ ID NO: 31158

SEQ ID NO: 40254 - DNA, 474 bp, Homo sapiens; identical to SEQ ID NO: 31284

SEQ ID NO: 40255 - DNA, 486 bp, Homo sapiens; identical to SEQ ID NO: 36401

SEQ ID NO: 40256 - DNA, 406 bp, Homo sapiens; identical to SEQ ID NO: 31797

SEQ ID NO: 40257 - DNA, 447 bp, Homo sapiens; identical to SEQ ID NO: 31287

SEQ ID NO: 40258 - DNA, 345 bp, Homo sapiens; identical to SEQ ID NO: 31378
  misc_feature 180, 338: n = A,T,C or G

SEQ ID NO: 40259 - DNA, 460 bp, Homo sapiens; identical to SEQ ID NO: 30978

SEQ ID NO: 40260 - DNA, 444 bp, Homo sapiens; identical to SEQ ID NO: 31290

SEQ ID NO: 40261 - DNA, 431 bp, Homo sapiens; identical to SEQ ID NO: 31291

SEQ ID NO: 40262 - DNA, 440 bp, Homo sapiens; identical to SEQ ID NO: 31416

SEQ ID NO: 40263 - DNA, 611 bp, Homo sapiens; identical to SEQ ID NO: 39970
  misc_feature 494: n = A,T,C or G

SEQ ID NO: 40264 - DNA, 437 bp, Homo sapiens; identical to SEQ ID NO: 31627

SEQ ID NO: 40265 - DNA, 427 bp, Homo sapiens; identical to SEQ ID NO: 31295
  misc_feature 322: n = A,T,C or G

SEQ ID NO: 40266 - DNA, 410 bp, Homo sapiens; identical to SEQ ID NO: 31296

SEQ ID NO: 40267 - DNA, 168 bp, Homo sapiens; identical to SEQ ID NO: 31297

SEQ ID NO: 40268 - DNA, 402 bp, Homo sapiens; identical to SEQ ID NO: 30900

SEQ ID NO: 40269 - DNA, 434 bp, Homo sapiens; identical to SEQ ID NO: 31299

SEQ ID NO: 40270 - DNA, 395 bp, Homo sapiens; identical to SEQ ID NO: 31300

SEQ ID NO: 40271 - DNA, 486 bp, Homo sapiens; identical to SEQ ID NO: 31301

SEQ ID NO: 40272 - DNA, 429 bp, Homo sapiens; identical to SEQ ID NO: 31027

SEQ ID NO: 40273 - DNA, 471 bp, Homo sapiens; identical to SEQ ID NO: 40207

SEQ ID NO: 40274 - DNA, 436 bp, Homo sapiens; identical to SEQ ID NO: 31024

SEQ ID NO: 40275 - DNA, 543 bp, Homo sapiens; identical to SEQ ID NO: 31305
  misc_feature 381: n = A,T,C or G

SEQ ID NO: 40276 - DNA, 455 bp, Homo sapiens; identical to SEQ ID NO: 31306

SEQ ID NO: 40277 - DNA, 399 bp, Homo sapiens; identical to SEQ ID NO: 31307

SEQ ID NO: 40278 - DNA, 475 bp, Homo sapiens; identical to SEQ ID NO: 31187

SEQ ID NO: 40279 - DNA, 544 bp, Homo sapiens
gctcggatccactagtaacggccgccagtgtgctggaattcggcttagcgtggtcgcggccgaggtacctttgagaccagatgctgcttatccaacagcccttatctcctttcttgctagtagacatgactgaactttctagtctacacgactcaaaggataattcattaatctaagccactcctgatggatgatcttacttgctttgccaatgacaggagtgagatgacccatttctagcaaagccatgaggccgtatctgctggagcttccaggggaagacttccttgctttagaaggacacagaaaaatctgtctctcttttgccagacacggttctgtcagcatttccttcccagaattacagtagccatattgggaccatgaggcgaactggcgtgaggataaacatggaagatggcagagcaaaaaaatttcaagaaactgagtctttggtgttatcactgagccactgaattaaccaaccttggagtaacattaaaataggatttcttgtcatatgaaatgatagttttcttattta

SEQ ID NO: 40280 - DNA, 274 bp, Homo sapiens; identical to SEQ ID NO: 31310

SEQ ID NO: 40281 - DNA, 385 bp, Homo sapiens; identical to SEQ ID NO: 31311

SEQ ID NO: 40282 - DNA, 439 bp, Homo sapiens; identical to SEQ ID NO: 31312

SEQ ID NO: 40283 - DNA, 419 bp, Homo sapiens; identical to SEQ ID NO: 31807

SEQ ID NO: 40284 - DNA, 407 bp, Homo sapiens
gcggccgccatcttgggtcatcgatgagcctcgccctgtgcctggtcccgcttgtgagggaaggacattagaaaatgaattgatgtgttccttaaaggatgggcaggaaaacagatcctgttgtggatatttatttgaacgggattacagatttgaaatgaagtcacaaagtgagcattaccaatgagaggaaaacagacgagaagatcttgatggcttcacaagacatgcaacaaacaaaatggaatactgtgatgacatgaggcagccaagctggggaggagataaccacggggcagagggtcaggattctggccctgctgcctaaactgtgcgttcataaccaaatcattttatatttctaaccctcaaaacaaaactgttgtaatatctgatctctacggttc

SEQ ID NO: 40285 - DNA, 424 bp, Homo sapiens; identical to SEQ ID NO: 31315

SEQ ID NO: 40286 - DNA, 462 bp, Homo sapiens; identical to SEQ ID NO: 31316

SEQ ID NO: 40287 - DNA, 412 bp, Homo sapiens; identical to SEQ ID NO: 31317

SEQ ID NO: 40288 - DNA, 389 bp, Homo sapiens; identical to SEQ ID NO: 30574

SEQ ID NO: 40289 - DNA, 206 bp, Homo sapiens; identical to SEQ ID NO: 31319

SEQ ID NO: 40290 - DNA, 400 bp, Homo sapiens; identical to SEQ ID NO: 31320

SEQ ID NO: 40291 - DNA, 236 bp, Homo sapiens; identical to SEQ ID NO: 31321

SEQ ID NO: 40292 - DNA, 448 bp, Homo sapiens; identical to SEQ ID NO: 31322

SEQ ID NO: 40293 - DNA, 410 bp, Homo sapiens; identical to SEQ ID NO: 31323

SEQ ID NO: 40294 - DNA, 428 bp, Homo sapiens; identical to SEQ ID NO: 31324

SEQ ID NO: 40295 - DNA, 405 bp, Homo sapiens; identical to SEQ ID NO: 34462

SEQ ID NO: 40296 - DNA, 413 bp, Homo sapiens; identical to SEQ ID NO: 31326

SEQ ID NO: 40297 - DNA, 400 bp, Homo sapiens; identical to SEQ ID NO: 30871

SEQ ID NO: 40298 - DNA, 430 bp, Homo sapiens; identical to SEQ ID NO: 31817

SEQ ID NO: 40299 - DNA, 460 bp, Homo sapiens; identical to SEQ ID NO: 33178

SEQ ID NO: 40300 - DNA, 617 bp, Homo sapiens; identical to SEQ ID NO: 37208
  misc_feature 478, 553: n = A,T,C or G

SEQ ID NO: 40301 - DNA, 166 bp, Homo sapiens; identical to SEQ ID NO: 31331

SEQ ID NO: 40302 - DNA, 432 bp, Homo sapiens; identical to SEQ ID NO: 31332

SEQ ID NO: 40303 - DNA, 410 bp, Homo sapiens
cactactatagggcgaattggagctccaccgcggtggcggccgaagtacacacatgagaactgaaatggcccaaacccagaaagaaagcccaactagatcctcagaagacgcttctagggacaataaccgatgaggaaaagatggcctccttgtgccaccgtctgttatgatttctctccattgcagcagaaagccgttcttctaagcagacagcaggtgatgatggcaaaatagaccacactcatttgcatcttttgaacaattgtctttgggatccattgtgatgacatctgtctttattggaggaaagataatttcttgatcaactccgtttttattattctcatgtctgacgatacgtctgtgttctttgtccagtgacttttctggcaccgttaaccagctaaat

SEQ ID NO: 40304 - DNA, 448 bp, Homo sapiens; identical to SEQ ID NO: 31334

SEQ ID NO: 40305 - DNA, 627 bp, Homo sapiens
acgactactatagggcgaattgtgccctctagatgcatgctcgagcggccgccagtgtgatggatatctgcagaattcgccctttcgagcggccgcccgggcaggtacgatcttggctcactgcaacctctccctcccgggttcaagtgattctcgtgcctcagcctcttgagtagctgggattacaggcgcgtgccactgcgtccggctaatttttgtatttttagtagagatggggtttcaccatgttggccaggctgatctcaaactcctgacctcatgtggtccacccaccttggcctcccaaagtgctgggattacaggcgtgagccaccgcgctcagcctacaagcaattttttaaaaactgacacctattactgataaaattctctgtttaaaatcctatttactattttaaagataagtattagtttttttttaaatacaataattctgttattgataaaatttaaggcattttcattgccttttgcagatttactcataactacctaacaaggaaagaaggtataattatttcaaattggattatttattctaaaattaaattcttcactaatttattctaagatgaatttaatagtccatcaggaaattggttttta

SEQ ID NO: 40306 - DNA, 453 bp, Homo sapiens; identical to SEQ ID NO: 31336

SEQ ID NO: 40307 - DNA, 367 bp, Homo sapiens; identical to SEQ ID NO: 31337

SEQ ID NO: 40308 - DNA, 203 bp, Homo sapiens; identical to SEQ ID NO: 31338

SEQ ID NO: 40309 - DNA, 406 bp, Homo sapiens; identical to SEQ ID NO: 31339

SEQ ID NO: 40310 - DNA, 448 bp, Homo sapiens; identical to SEQ ID NO: 31340

SEQ ID NO: 40311 - DNA, 577 bp, Homo sapiens; identical to SEQ ID NO: 31341

SEQ ID NO: 40312 - DNA, 412 bp, Homo sapiens; identical to SEQ ID NO: 31805

SEQ ID NO: 40313 - DNA, 487 bp, Homo sapiens; identical to SEQ ID NO: 31343

SEQ ID NO: 40314 - DNA, 431 bp, Homo sapiens; identical to SEQ ID NO: 31344

SEQ ID NO: 40315 - DNA, 400 bp, Homo sapiens; identical to SEQ ID NO: 31345

SEQ ID NO: 40316 - DNA, 586 bp, Homo sapiens; identical to SEQ ID NO: 31346
  misc_feature 449: n = A,T,C or G

SEQ ID NO: 40317 - DNA, 475 bp, Homo sapiens; identical to SEQ ID NO: 31347

SEQ ID NO: 40318 - DNA, 445 bp, Homo sapiens; identical to SEQ ID NO: 31348

SEQ ID NO: 40319 - DNA, 433 bp, Homo sapiens; identical to SEQ ID NO: 31349

SEQ ID NO: 40320 - DNA, 429 bp, Homo sapiens; identical to SEQ ID NO: 31350

SEQ ID NO: 40321 - DNA, 471 bp, Homo sapiens
ctccaccgcggtggcggccgcccgggcaggtactttaggctgagaaataaatagaagggtgagaaaaaagaacagtctttatagtcagtaagagtgaaaagagaaagatggtagttggggaaagacagatggggagaaaggttggctggttgttaataaaacagtagaggatgagcatgtattataaatgctggtgggaagaaaccttgtggcaaggagggtggtagtgttggagaagaaagagaggatatagtagaaagttaaagaggaactggaagcaggtgggatccaggacataggaaggggaagagccttgggcagaggtgagacatctgcaggagggaaggaactgagagaagggaaggtgtgcaaatgtggcaggaggagtttgagtaaagttccatctgatatcctctattttctctgtaaatcattctgaatgaagtatgagacaaagagatcaaaggctca

SEQ ID NO: 40322 - DNA, 397 bp, Homo sapiens; identical to SEQ ID NO: 31352

SEQ ID NO: 40323 - DNA, 323 bp, Homo sapiens; identical to SEQ ID NO: 31353

SEQ ID NO: 40324 - DNA, 412 bp, Homo sapiens; identical to SEQ ID NO: 31354

SEQ ID NO: 40325 - DNA, 445 bp, Homo sapiens; identical to SEQ ID NO: 31355

SEQ ID NO: 40326 - DNA, 448 bp, Homo sapiens; identical to SEQ ID NO: 31176

SEQ ID NO: 40327 - DNA, 472 bp, Homo sapiens; identical to SEQ ID NO: 31357

SEQ ID NO: 40328 - DNA, 248 bp, Homo sapiens; identical to SEQ ID NO: 31358
  misc_feature 154: n = A,T,C or G

SEQ ID NO: 40329 - DNA, 410 bp, Homo sapiens; identical to SEQ ID NO: 31359
  misc_feature 351: n = A,T,C or G

SEQ ID NO: 40330 - DNA, 391 bp, Homo sapiens; identical to SEQ ID NO: 31360

SEQ ID NO: 40331 - DNA, 464 bp, Homo sapiens; identical to SEQ ID NO: 33306

SEQ ID NO: 40332 - DNA, 468 bp, Homo sapiens; identical to SEQ ID NO: 31790

SEQ ID NO: 40333 - DNA, 408 bp, Homo sapiens; identical to SEQ ID NO: 31363

SEQ ID NO: 40334 - DNA, 424 bp, Homo sapiens; identical to SEQ ID NO: 31364

SEQ ID NO: 40335 - DNA, 431 bp, Homo sapiens; identical to SEQ ID NO: 34471

SEQ ID NO: 40336 - DNA, 617 bp, Homo sapiens; identical to SEQ ID NO: 37208
  misc_feature 478, 553: n = A,T,C or G

SEQ ID NO: 40337 - DNA, 346 bp, Homo sapiens; identical to SEQ ID NO: 31367

SEQ ID NO: 40338 - DNA, 464 bp, Homo sapiens; identical to SEQ ID NO: 31368

SEQ ID NO: 40339 - DNA, 471 bp, Homo sapiens; identical to SEQ ID NO: 31369

SEQ ID NO: 40340 - DNA, 239 bp, Homo sapiens; identical to SEQ ID NO: 31370

SEQ ID NO: 40341 - DNA, 415 bp, Homo sapiens; identical to SEQ ID NO: 31371

SEQ ID NO: 40342 - DNA, 422 bp, Homo sapiens; identical to SEQ ID NO: 31372

SEQ ID NO: 40343 - DNA, 175 bp, Homo sapiens; identical to SEQ ID NO: 31373

SEQ ID NO: 40344 - DNA, 466 bp, Homo sapiens; identical to SEQ ID NO: 31374

SEQ ID NO: 40345 - DNA, 418 bp, Homo sapiens
tatagggcgaattggagctccaccgcggtggcggccgaggtacagttcagtagtgttaagtatattcatattgttgtccaacagatttctataactttttcatcacgcagcactgaatcgctatacccactaaacacaagttctccctcctacctcctctgggcccttgggaaccacctttctactttctatgattttgactactttagacacttcatatgagtggaatcatacagtatttgtccttttgtgacttttattgtatacttttatttcacttagcataatgtccttgaggtgcaaccacgttgtagtatgtgacaagttttccttctttattaaggctgtataatattccattgttaatttcattctttttaacggcaacatatttcattgtatgaaaggctagtaactt

SEQ ID NO: 40346 - DNA, 452 bp, Homo sapiens; identical to SEQ ID NO: 31376

SEQ ID NO: 40347 - DNA, 417 bp, Homo sapiens; identical to SEQ ID NO: 31377

SEQ ID NO: 40348 - DNA, 345 bp, Homo sapiens; identical to SEQ ID NO: 31378
  misc_feature 180, 338: n = A,T,C or G

SEQ ID NO: 40349 - DNA, 439 bp, Homo sapiens; identical to SEQ ID NO: 31379

SEQ ID NO: 40350 - DNA, 504 bp, Homo sapiens; identical to SEQ ID NO: 34221

SEQ ID NO: 40351 - DNA, 407 bp, Homo sapiens
agggcgaattggagctccaccgcggtggcggccgaggtaccagttaagatctagcttctcggttttatttcctcctccatttacagtgacatttagcatactttgtttgtttgcccagtatgaaagccaccaatcttgaagcacataggcaacctgagctgcagtgtttaggagaataaggaaaatgaagacaatccagtgagcaccagctctgaagtaattcttataggcctgaaaaccaacttttccttcagaacggttctcctctgatagtgtaactgggacattctctgtatcttggctctccagagcaccatctttcaaggagggtctagaagattgttgagaccaaaccgaagactctgagaaggtacctgcccgggcggccgctctaaaactaggggatc

SEQ ID NO: 40352 - DNA, 426 bp, Homo sapiens; identical to SEQ ID NO: 31382

SEQ ID NO: 40353 - DNA, 416 bp, Homo sapiens; identical to SEQ ID NO: 31383

SEQ ID NO: 40354 - DNA, 474 bp, Homo sapiens; identical to SEQ ID NO: 31663

SEQ ID NO: 40355 - DNA, 446 bp, Homo sapiens; identical to SEQ ID NO: 31385

SEQ ID NO: 40356 - DNA, 465 bp, Homo sapiens; identical to SEQ ID NO: 31386

SEQ ID NO: 40357 - DNA, 344 bp, Homo sapiens; identical to SEQ ID NO: 34638

SEQ ID NO: 40358 - DNA, 386 bp, Homo sapiens; identical to SEQ ID NO: 31388

SEQ ID NO: 40359 - DNA, 465 bp, Homo sapiens; identical to SEQ ID NO: 31389

SEQ ID NO: 40360 - DNA, 421 bp, Homo sapiens; identical to SEQ ID NO: 31390

SEQ ID NO: 40361 - DNA, 539 bp, Homo sapiens; identical to SEQ ID NO: 40141

SEQ ID NO: 40362 - DNA, 428 bp, Homo sapiens; identical to SEQ ID NO: 31433

SEQ ID NO: 40363 - DNA, 424 bp, Homo sapiens; identical to SEQ ID NO: 31393

SEQ ID NO: 40364 - DNA, 414 bp, Homo sapiens; identical to SEQ ID NO: 31394

SEQ ID NO: 40365 - DNA, 234 bp, Homo sapiens; identical to SEQ ID NO: 31395

SEQ ID NO: 40366 - DNA, 441 bp, Homo sapiens; identical to SEQ ID NO: 31396
  misc_feature 303, 314: n = A,T,C or G

SEQ ID NO: 40367 - DNA, 452 bp, Homo sapiens; identical to SEQ ID NO: 31397

SEQ ID NO: 40368 - DNA, 455 bp, Homo sapiens; identical to SEQ ID NO: 31398

SEQ ID NO: 40369 - DNA, 456 bp, Homo sapiens; identical to SEQ ID NO: 31399

SEQ ID NO: 40370 - DNA, 691 bp, Homo sapiens; identical to SEQ ID NO: 31400

SEQ ID NO: 40371 - DNA, 437 bp, Homo sapiens; identical to SEQ ID NO: 31401

SEQ ID NO: 40372 - DNA, 445 bp, Homo sapiens; identical to SEQ ID NO: 31402

SEQ ID NO: 40373 - DNA, 395 bp, Homo sapiens; identical to SEQ ID NO: 31403
  misc_feature 303, 313, 317, 318, 356: n = A,T,C or G

SEQ ID NO: 40374 - DNA, 298 bp, Homo sapiens; identical to SEQ ID NO: 31404

SEQ ID NO: 40375 - DNA, 181 bp, Homo sapiens; identical to SEQ ID NO: 31405

SEQ ID NO: 40376 - DNA, 408 bp, Homo sapiens; identical to SEQ ID NO: 31406

SEQ ID NO: 40377 - DNA, 448 bp, Homo sapiens; identical to SEQ ID NO: 31407

SEQ ID NO: 40378 - DNA, 564 bp, Homo sapiens; identical to SEQ ID NO: 31408

SEQ ID NO: 40379 - DNA, 321 bp, Homo sapiens; identical to SEQ ID NO: 31409

SEQ ID NO: 40380 - DNA, 389 bp, Homo sapiens; identical to SEQ ID NO: 31175

SEQ ID NO: 40381 - DNA, 416 bp, Homo sapiens; identical to SEQ ID NO: 31206

SEQ ID NO: 40382 - DNA, 418 bp, Homo sapiens; identical to SEQ ID NO: 31412

SEQ ID NO: 40383 - DNA, 532 bp, Homo sapiens
gcggtggcggccgcccgggcaggtacgcggggaggctcctggggtggagtccaaatcactcattgtttgtgaaagctgagctcacagcaaaacaagccaccatgaagctgtcggtgtgtctcctgctggtcacgctggccctctgctgctaccaggccaatgccgagttctgcccagctcttgtttctgagctgttagacttcttcttcattagtgaacctctgttcaagttaagtcttgccaaatttgatgcccctccggaagctgttgcagccaagttaggagtgaagagatgcacggatcagatgtcccttcagaaacgaagcctcattgcggaagtcctggtgaaaatattgaagaaatgtagtgtgtgacatgtaaaaactttcatcctggtttccactgtctttcaatgacaccctgatcttcactgcagaatgtaaaggtttcaacgtcttgctttaataaatcacttgctctccacgtcaaaaaaaaaaaaaaaaaaaaagtacctcggccgcccgggcaggta

SEQ ID NO: 40384 - DNA, 458 bp, Homo sapiens; identical to SEQ ID NO: 31414

SEQ ID NO: 40385 - DNA, 587 bp, Homo sapiens; identical to SEQ ID NO: 37513

SEQ ID NO: 40386 - DNA, 440 bp, Homo sapiens; identical to SEQ ID NO: 31416

SEQ ID NO: 40387 - DNA, 279 bp, Homo sapiens; identical to SEQ ID NO: 31417
  misc_feature 41, 52, 53, 71, 128, 133, 138, 139, 161, 165, 177, 198, 204,205, 206, 208, 217, 222, 240, 242, 245, 263: n = A,T,C or G

SEQ ID NO: 40388 - DNA, 307 bp, Homo sapiens
tccaccgcggtggcggccgcccgggcaggtacagctaaactccaccgcagagcaagcaaacccaatctggcacacagcttttgggggtttcctctcctactatggcccctagccctgtgcccaggacatagtgaagggtcagtaaatgtttggctacattgatctgcagaatcctcactaacacccctccagcacaagcacaggtctgttgaacaaacatccccatagaacccaacggatctgccctaaagcccaaagagccttggcccctcacctattgggaacatctttccaaaaataccaccac

SEQ ID NO: 40389 - DNA, 221 bp, Homo sapiens; identical to SEQ ID NO: 31419

SEQ ID NO: 40390 - DNA, 433 bp, Homo sapiens
ggagctccaccgcggtggcggccgaggtactgggattataggcgtgagccaccgcgtctggcctctaacgagatatttctaaagggtaggccttcagtcaagaattttaaagctggatcttagaggttatctaaactaacctctccatttcatagataaggaaagtgagtcccagaaaagcactggtttggacaagttcagaaagctaaacagtgactgtggatgtatgattctgtctcttaactcctaatccaaatgtcttctcactagataaggctgtgccttctacatttgaaggctcaaaccccatggatggatggagggaaggatgggtggagggatggatggatagatggatggattgatagattcctaatatcgttcagctttcgcaggagagatggagccacctacgcattttacaaagtgctaa

SEQ ID NO: 40391 - DNA, 468 bp, Homo sapiens; identical to SEQ ID NO: 31421

SEQ ID NO: 40392 - DNA, 392 bp, Homo sapiens; identical to SEQ ID NO: 31422
  misc_feature 256, 271, 279, 280, 309, 310, 327, 328, 337, 344, 345, 360,362, 363: n = A,T,C or G

SEQ ID NO: 40393 - DNA, 380 bp, Homo sapiens; identical to SEQ ID NO: 31127

SEQ ID NO: 40394 - DNA, 504 bp, Homo sapiens; identical to SEQ ID NO: 34221

SEQ ID NO: 40395 - DNA, 475 bp, Homo sapiens; identical to SEQ ID NO: 31187

SEQ ID NO: 40396 - DNA, 452 bp, Homo sapiens; identical to SEQ ID NO: 31426

SEQ ID NO: 40397 - DNA, 444 bp, Homo sapiens; identical to SEQ ID NO: 31427

SEQ ID NO: 40398 - DNA, 456 bp, Homo sapiens; identical to SEQ ID NO: 31428

SEQ ID NO: 40399 - DNA, 414 bp, Homo sapiens; identical to SEQ ID NO: 31429

SEQ ID NO: 40400 - DNA, 464 bp, Homo sapiens; identical to SEQ ID NO: 31430

SEQ ID NO: 40401 - DNA, 201 bp, Homo sapiens; identical to SEQ ID NO: 31431

SEQ ID NO: 40402 - DNA, 440 bp, Homo sapiens; identical to SEQ ID NO: 31432

SEQ ID NO: 40403 - DNA, 466 bp, Homo sapiens; identical to SEQ ID NO: 31505

SEQ ID NO: 40404 - DNA, 614 bp, Homo sapiens; identical to SEQ ID NO: 30941

SEQ ID NO: 40405 - DNA, 414 bp, Homo sapiens; identical to SEQ ID NO: 31435

SEQ ID NO: 40406 - DNA, 531 bp, Homo sapiens; identical to SEQ ID NO: 31436

SEQ ID NO: 40407 - DNA, 455 bp, Homo sapiens; identical to SEQ ID NO: 31437

SEQ ID NO: 40408 - DNA, 435 bp, Homo sapiens; identical to SEQ ID NO: 31438

SEQ ID NO: 40409 - DNA, 467 bp, Homo sapiens; identical to SEQ ID NO: 30855

SEQ ID NO: 40410 - DNA, 429 bp, Homo sapiens; identical to SEQ ID NO: 31440

SEQ ID NO: 40411 - DNA, 422 bp, Homo sapiens
tatagggcgaattgttagctccaccgcggtggcggccgaggtacatgggactacaggcacgccccaccatgcccagctcatttttgtatttttagtagagacagggtttcaccatgttggccaggatgatcttgatctcttgacctcatgatccgcccgtcttggcctcccaaagtgctgggatcacaggcgtgagccaccacacctggccctctatttattctctttaaagagagagaaaactatgagaggccaaaattatttaattaaatctttaccttagcacaagggaaaaaaatggaatttgcctaatataggtgatgaaacatacacaatgaatagaaacaatcacattttagtaaaaggcaaaaatttgagacttataagctatatggtagcttatttttgggtggggaagaaat

SEQ ID NO: 40412 - DNA, 676 bp, Homo sapiens; identical to SEQ ID NO: 31442

SEQ ID NO: 40413 - DNA, 238 bp, Homo sapiens; identical to SEQ ID NO: 31443
